United States Patent Application Publication US 2013/0267429 A1 - sequence listing, part 16

SEQ ID NO: 359033 - DNA, 52 bp, Artificial
  Synthetic oligonucleotide
ccccctcctacagtttactccgacagatcgttttcagttgacctaccggaaa

SEQ ID NO: 359034 - DNA, 50 bp, Artificial
  Synthetic oligonucleotide
ccccctcgacccacggcaaaaccgtgggccgagggggggtgcatttacat

SEQ ID NO: 359035 - DNA, 54 bp, Artificial
  Synthetic oligonucleotide
ccccctcgacccacggcaaagccgtgggtcgagggggttgcatttacatggcaa

SEQ ID NO: 359036 - DNA, 52 bp, Artificial
  Synthetic oligonucleotide
ccccctcgttaggaagatcatgtggccatgggagactctcacgagtgtggtg

SEQ ID NO: 359037 - DNA, 54 bp, Artificial
  Synthetic oligonucleotide
ccccctctaggtatgtctttggaggcatgctatgtgagaggttgtaatcctaac

SEQ ID NO: 359038 - DNA, 56 bp, Artificial
  Synthetic oligonucleotide
ccccctctcctggattgcacagcacgattgatgggataccccctttaatttgaacc

SEQ ID NO: 359039 - DNA, 59 bp, Artificial
  Synthetic oligonucleotide
ccccctcttgcagatcgtccgtcgatctgaaattctccccattcgattgtgtcaccgtc

SEQ ID NO: 359040 - DNA, 52 bp, Artificial
  Synthetic oligonucleotide
ccccctgaaggaagagctaggggaaataaaaaactgttctttcaagatgacc

SEQ ID NO: 359041 - DNA, 57 bp, Artificial
  Synthetic oligonucleotide
ccccctgagccctgggttaatcacttttgagaattggactaagaacaagctgtgtgc

SEQ ID NO: 359042 - DNA, 51 bp, Artificial
  Synthetic oligonucleotide
ccccctgatatagagttgaatccaatgaacccatcggtgggtcagtccaaa

SEQ ID NO: 359043 - DNA, 54 bp, Artificial
  Synthetic oligonucleotide
ccccctgcagtacaaagacctaaagattgacataaagactacaccccctcccga

SEQ ID NO: 359044 - DNA, 56 bp, Artificial
  Synthetic oligonucleotide
ccccctggaagaaggttgcccatatacgatcacgatatcaactaagctagaagggg

SEQ ID NO: 359045 - DNA, 55 bp, Artificial
  Synthetic oligonucleotide
ccccctggagttctctctctacgcgtctccgaacctttggacacctcccacggca

SEQ ID NO: 359046 - DNA, 49 bp, Artificial
  Synthetic oligonucleotide
ccccctgggacgtatgaaccagcttaccttgggggtaaggacccccgcg

SEQ ID NO: 359047 - DNA, 58 bp, Artificial
  Synthetic oligonucleotide
ccccctggggacagcattacagtcagcatcgttaaaggggacgtgttgcactcctgta

SEQ ID NO: 359048 - DNA, 57 bp, Artificial
  Synthetic oligonucleotide
ccccctggttggggtcttttcatgggtggctctggtgctactgctgacgacaaaaga

SEQ ID NO: 359049 - DNA, 58 bp, Artificial
  Synthetic oligonucleotide
ccccctgttggtgatccgagtaaattcacaactctcttcaacatggaagctaaggtga

SEQ ID NO: 359050 - DNA, 60 bp, Artificial
  Synthetic oligonucleotide
cccccttacaaagagcaagacaacagttttcatcattacgcagagcattatataatagaa

SEQ ID NO: 359051 - DNA, 51 bp, Artificial
  Synthetic oligonucleotide
cccccttactgttttaagaaggggggccagcaggtagaagtgaggtttgac

SEQ ID NO: 359052 - DNA, 59 bp, Artificial
  Synthetic oligonucleotide
cccccttccagctaacttgcaatccatttatgcgaataagtatttcaaattgagcagac

SEQ ID NO: 359053 - DNA, 56 bp, Artificial
  Synthetic oligonucleotide
cccccttcggggtgcagcaatggaggccctctgcgaacttagaggacgactgttgt

SEQ ID NO: 359054 - DNA, 59 bp, Artificial
  Synthetic oligonucleotide
cccccttgatttttcgacgccatccgagctaatgacacctctgagtgggcctgcactta

SEQ ID NO: 359055 - DNA, 57 bp, Artificial
  Synthetic oligonucleotide
cccccttgcaagcctttgctacgagacgaggtatcgttcagagtaggactacacgat

SEQ ID NO: 359056 - DNA, 60 bp, Artificial
  Synthetic oligonucleotide
cccccttgcacgggctgcgtgggagacagctagacacactccagtcaactcctggctagg

SEQ ID NO: 359057 - DNA, 50 bp, Artificial
  Synthetic oligonucleotide
cccccttttggagattcttacatcgtggtcggaagaggtgacaagcagat

SEQ ID NO: 359058 - DNA, 54 bp, Artificial
  Synthetic oligonucleotide
ccccgaaagatcatattgtgacacatccacagtatcatgcccaaacattcacgg

SEQ ID NO: 359059 - DNA, 55 bp, Artificial
  Synthetic oligonucleotide
ccccgaaagcatcctatactcatttgacttcagacatggagactacacaacaaaa

SEQ ID NO: 359060 - DNA, 55 bp, Artificial
  Synthetic oligonucleotide
ccccgaaattgttcctatgttgtccgagtgcatggtagacctccgcccttcggtg

SEQ ID NO: 359061 - DNA, 50 bp, Artificial
  Synthetic oligonucleotide
ccccgaaccctaaatgcctgggtgaaattagtggaggaaaagaagttcgg

SEQ ID NO: 359062 - DNA, 55 bp, Artificial
  Synthetic oligonucleotide
ccccgaacgcgcccggtggatggtgatgctaaagtaccagcttgacgtgtttcac

SEQ ID NO: 359063 - DNA, 54 bp, Artificial
  Synthetic oligonucleotide
ccccgaacggctaaagcaaaccctccagaacggcctgccggactttatcagtca

SEQ ID NO: 359064 - DNA, 55 bp, Artificial
  Synthetic oligonucleotide
ccccgaagaaactatggataataacgggtcacaggcaagcacgaccgaaatgtta

SEQ ID NO: 359065 - DNA, 55 bp, Artificial
  Synthetic oligonucleotide
ccccgaagaagagcaagaaatggatccagtagatcctaaactagagccctggaac

SEQ ID NO: 359066 - DNA, 58 bp, Artificial
  Synthetic oligonucleotide
ccccgaagcgaaagtaagaccagagaagttctctcgacgcaggactcggcttgctgaa

SEQ ID NO: 359067 - DNA, 55 bp, Artificial
  Synthetic oligonucleotide
ccccgaaggggccggcgacccataccagtcatcgaagtctgtgcgtgattcgttc

SEQ ID NO: 359068 - DNA, 54 bp, Artificial
  Synthetic oligonucleotide
ccccgaagggtacatgaacacctttgcgtccgttgcaactgaaacgcaacgtag

SEQ ID NO: 359069 - DNA, 60 bp, Artificial
  Synthetic oligonucleotide
ccccgaagtacgcatgcgtcaacgctatcctattggcaagaatgaactagagttccgcga

SEQ ID NO: 359070 - DNA, 51 bp, Artificial
  Synthetic oligonucleotide
ccccgaatctaacaaaataaacctgttagacgagtacgcggccctacaacc

SEQ ID NO: 359071 - DNA, 56 bp, Artificial
  Synthetic oligonucleotide
ccccgaatggcccgtcgtcagtgctaccgcgatagtagattcagatcatttgggag

SEQ ID NO: 359072 - DNA, 54 bp, Artificial
  Synthetic oligonucleotide
ccccgaattccgaagcgagggcccctctgggtaggcttgttcccatgtgggaca

SEQ ID NO: 359073 - DNA, 55 bp, Artificial
  Synthetic oligonucleotide
ccccgacaaaatcgggccttggagccctattgatataaatcatcttagctgtcca

SEQ ID NO: 359074 - DNA, 55 bp, Artificial
  Synthetic oligonucleotide
ccccgacaatagcagagcctaaggcccttgagcggaggttcgtctttgacttgga

SEQ ID NO: 359075 - DNA, 55 bp, Artificial
  Synthetic oligonucleotide
ccccgacaccactctgctacaaggtgaattgcttcagcactttcaagtaccattc

SEQ ID NO: 359076 - DNA, 54 bp, Artificial
  Synthetic oligonucleotide
ccccgacacgacgagaatggtagcgccgaaggcgccaataaacactcgaaaagg

SEQ ID NO: 359077 - DNA, 55 bp, Artificial
  Synthetic oligonucleotide
ccccgacactttgagtgctgagctaccaaggatactagttgatcataagcttgga

SEQ ID NO: 359078 - DNA, 54 bp, Artificial
  Synthetic oligonucleotide
ccccgacagacggagaagactaccgacaagaagaagacttcgctttacaggaaa

SEQ ID NO: 359079 - DNA, 53 bp, Artificial
  Synthetic oligonucleotide
ccccgaccattcactcacccacgaaaagtgtgttgtaaccataagatttaacc

SEQ ID NO: 359080 - DNA, 55 bp, Artificial
  Synthetic oligonucleotide
ccccgacctgctctttgtaagaaagtgcgaacttcagtcttccagagtcaggacc

SEQ ID NO: 359081 - DNA, 52 bp, Artificial
  Synthetic oligonucleotide
ccccgacgatagtgcccccctcactggtccccccggcactggtccctccctc

SEQ ID NO: 359082 - DNA, 51 bp, Artificial
  Synthetic oligonucleotide
ccccgacgcgtactacagcgagcgtgtgttcaagttcaagaacgctctgag

SEQ ID NO: 359083 - DNA, 54 bp, Artificial
  Synthetic oligonucleotide
ccccgactcccgagagaacagaccgacgcacgatagggtttccgtctcaacctc

SEQ ID NO: 359084 - DNA, 60 bp, Artificial
  Synthetic oligonucleotide
ccccgactggcttctgctatatatgcctgggtacttgggccttccatgaaatttgagtgc

SEQ ID NO: 359085 - DNA, 58 bp, Artificial
  Synthetic oligonucleotide
ccccgacttccaccaatagcctgcctgacacaaagccgagcggtccagcccactccaa

SEQ ID NO: 359086 - DNA, 55 bp, Artificial
  Synthetic oligonucleotide
ccccgacttgctgagcttctctaggagagcccttttcccagccagaggtggctgg

SEQ ID NO: 359087 - DNA, 55 bp, Artificial
  Synthetic oligonucleotide
ccccgactttggcagtgccgaacacttctacgcctatcaccgggttccgcaaaca

SEQ ID NO: 359088 - DNA, 55 bp, Artificial
  Synthetic oligonucleotide
ccccgagaactcattttccaggtctggcagaggtgttgggcatactggcgtgagg

SEQ ID NO: 359089 - DNA, 55 bp, Artificial
  Synthetic oligonucleotide
ccccgagagctggagtcttgatgctagagagtccaaatgccctagacatttcaag

SEQ ID NO: 359090 - DNA, 55 bp, Artificial
  Synthetic oligonucleotide
ccccgagagtgtgcgattcgcgattctctacacagaaccagtgacctggaccgag

SEQ ID NO: 359091 - DNA, 53 bp, Artificial
  Synthetic oligonucleotide
ccccgagcaaacacaggcccaacagttgccctattcacagaccccagattcag

SEQ ID NO: 359092 - DNA, 55 bp, Artificial
  Synthetic oligonucleotide
ccccgagcacactgagaacgtcggtgaggaattcgttgtgtcgactcgtgatgcc

SEQ ID NO: 359093 - DNA, 58 bp, Artificial
  Synthetic oligonucleotide
ccccgagcccaggggcacggagaatcgatttccactggctactccttgatcccaatga

SEQ ID NO: 359094 - DNA, 55 bp, Artificial
  Synthetic oligonucleotide
ccccgaggagaaccttagagagttcaaaatgaaagctgatgttggggatattctc

SEQ ID NO: 359095 - DNA, 55 bp, Artificial
  Synthetic oligonucleotide
ccccgaggaggtagaaagggccaatgaaggagagaacaactgcttgctacacccc

SEQ ID NO: 359096 - DNA, 55 bp, Artificial
  Synthetic oligonucleotide
ccccgaggagtcttaagggtgcaacaagacccctatctgcaaattaggaggcaga

SEQ ID NO: 359097 - DNA, 53 bp, Artificial
  Synthetic oligonucleotide
ccccgaggccacttataccaagtgtggctcggggccttggttgacgcctaggt

SEQ ID NO: 359098 - DNA, 53 bp, Artificial
  Synthetic oligonucleotide
ccccgaggcccacgtggcttttcgtacgtgggccgaggccgctagtgcgcggt

SEQ ID NO: 359099 - DNA, 56 bp, Artificial
  Synthetic oligonucleotide
ccccgaggctacttacacaaaatgtggctcggggccttggctgacacctaggtgct

SEQ ID NO: 359100 - DNA, 54 bp, Artificial
  Synthetic oligonucleotide
ccccgagggaaccccaaaggagcccatcttgcgctccctggcttactccaacgc

SEQ ID NO: 359101 - DNA, 52 bp, Artificial
  Synthetic oligonucleotide
ccccgagggacataccacaaagacctccacgaccacccaccccggaacttgc

SEQ ID NO: 359102 - DNA, 54 bp, Artificial
  Synthetic oligonucleotide
ccccgagggtcccgagtgaggcttatcccggggatcggcctctgttcctccatg

SEQ ID NO: 359103 - DNA, 55 bp, Artificial
  Synthetic oligonucleotide
ccccgaggtccgcagggaaacgcgcacagagaacccgggcgcctccggtgagcca

SEQ ID NO: 359104 - DNA, 57 bp, Artificial
  Synthetic oligonucleotide
ccccgagtcccctggcaacagggtgtgttcccttatggagcacgttcgagcagggca

SEQ ID NO: 359105 - DNA, 58 bp, Artificial
  Synthetic oligonucleotide
ccccgagtgtctgggttcgttgaattcgtcacgactgaactctatcgtgagattacca

SEQ ID NO: 359106 - DNA, 50 bp, Artificial
  Synthetic oligonucleotide
ccccgagtttatgctgccgtttaaaataaactactaaagtcctggttaag

SEQ ID NO: 359107 - DNA, 52 bp, Artificial
  Synthetic oligonucleotide
ccccgatacggttggctacgatttaatacgtgagttaatttctattttgcgt

SEQ ID NO: 359108 - DNA, 57 bp, Artificial
  Synthetic oligonucleotide
ccccgatagataaatggacaccgatataccagagtccccaattgagtccccaatata

SEQ ID NO: 359109 - DNA, 54 bp, Artificial
  Synthetic oligonucleotide
ccccgataggtaattttgtccccgatacatcggtgcctattggggacattggag

SEQ ID NO: 359110 - DNA, 52 bp, Artificial
  Synthetic oligonucleotide
ccccgatatatacattcctacacgacgcccgactcctatgggagtccactag

SEQ ID NO: 359111 - DNA, 55 bp, Artificial
  Synthetic oligonucleotide
ccccgatcccgtggtcgatacgtccgattctttgacaacaaggagttgtttgctg

SEQ ID NO: 359112 - DNA, 53 bp, Artificial
  Synthetic oligonucleotide
ccccgatccttctccccggtcagactccgttcctcacatcagtgtacatgcct

SEQ ID NO: 359113 - DNA, 53 bp, Artificial
  Synthetic oligonucleotide
ccccgatcctttacgtgagctacaacgtttaggaacgaagaagatccctgacg

SEQ ID NO: 359114 - DNA, 51 bp, Artificial
  Synthetic oligonucleotide
ccccgatcgagaaacgatggcgccatgagaggatcatcctagaccccgggc

SEQ ID NO: 359115 - DNA, 56 bp, Artificial
  Synthetic oligonucleotide
ccccgatcttagcgacgggtcctggtctaccgtgagcgaggaggctagtgaggacg

SEQ ID NO: 359116 - DNA, 56 bp, Artificial
  Synthetic oligonucleotide
ccccgatgaggcacccataggcctgaattgtgagcaaattaccacccaccccttcg

SEQ ID NO: 359117 - DNA, 50 bp, Artificial
  Synthetic oligonucleotide
ccccgatgcggcttatgggtggccccgtttcgaaacaaccaagggaggat

SEQ ID NO: 359118 - DNA, 55 bp, Artificial
  Synthetic oligonucleotide
ccccgatgcggtttacagggtgctgcatttgggtgggtttatccatatcttgctt

SEQ ID NO: 359119 - DNA, 55 bp, Artificial
  Synthetic oligonucleotide
ccccgatgctccgcgcggcgcaacattgcctcctcgttcagcctcaacacaaact

SEQ ID NO: 359120 - DNA, 51 bp, Artificial
  Synthetic oligonucleotide
ccccgattacaaaggcgtggcaaccctggacgtcaacccctaccaagggcg

SEQ ID NO: 359121 - DNA, 55 bp, Artificial
  Synthetic oligonucleotide
ccccgattcccacatgcgtagccgttctagctccgtcgctagcgatcttgggcta

SEQ ID NO: 359122 - DNA, 55 bp, Artificial
  Synthetic oligonucleotide
ccccgattcctcagcgaattgtttagctcctccttcttggggatcccagaatcaa

SEQ ID NO: 359123 - DNA, 50 bp, Artificial
  Synthetic oligonucleotide
ccccgattctttgggatacgatctaatacgtgatttaatttctgtcgtca

SEQ ID NO: 359124 - DNA, 60 bp, Artificial
  Synthetic oligonucleotide
ccccgattgatgatcaagtggtcacattgcataaccgagacctccctgctctaatatcat

SEQ ID NO: 359125 - DNA, 55 bp, Artificial
  Synthetic oligonucleotide
ccccgattggcctattagcacacctaacctcctgagtgtgagcgcggtatagaca

SEQ ID NO: 359126 - DNA, 55 bp, Artificial
  Synthetic oligonucleotide
ccccgcaactatgaaggaggccactggaagtaacagctttggtccgcttgggatc

SEQ ID NO: 359127 - DNA, 54 bp, Artificial
  Synthetic oligonucleotide
ccccgcaagactgctagccgagtagcgttgggtcgcgaaaggccttgtaacggg

SEQ ID NO: 359128 - DNA, 54 bp, Artificial
  Synthetic oligonucleotide
ccccgcaagctgggttaccgcactaactccctgccaagtgaaactcggggacga

SEQ ID NO: 359129 - DNA, 51 bp, Artificial
  Synthetic oligonucleotide
ccccgcaaggaccgtgacgggagtttttggtggttcgaatctggccgcggg

SEQ ID NO: 359130 - DNA, 56 bp, Artificial
  Synthetic oligonucleotide
ccccgcaatataggatccagcgccttgacttgtggactgatagtaaggaagactca

SEQ ID NO: 359131 - DNA, 53 bp, Artificial
  Synthetic oligonucleotide
ccccgcaatcatacatgtacgtaatagcagattggacccctagcggaagttac

SEQ ID NO: 359132 - DNA, 55 bp, Artificial
  Synthetic oligonucleotide
ccccgcacaattaattaaacttcatcaatataatgcggatcctctagaacttgct

SEQ ID NO: 359133 - DNA, 55 bp, Artificial
  Synthetic oligonucleotide
ccccgcacagacgttccactatgccggctcttgctataatcggtgactcactact

SEQ ID NO: 359134 - DNA, 55 bp, Artificial
  Synthetic oligonucleotide
ccccgcacatcttatgcagctagaaaccacactacgctgcgagatgaaatccagc

SEQ ID NO: 359135 - DNA, 53 bp, Artificial
  Synthetic oligonucleotide
ccccgcaccaaactcctagagcttgatgctcagattgatgtggctttctctcg

SEQ ID NO: 359136 - DNA, 58 bp, Artificial
  Synthetic oligonucleotide
ccccgcactataatcccatatggccagagtacgagcgtcgttggagaagatccgggac

SEQ ID NO: 359137 - DNA, 58 bp, Artificial
  Synthetic oligonucleotide
ccccgcactcaagttcccctgagtgcggggtggtcgtctctgctcgtctagcgagccc

SEQ ID NO: 359138 - DNA, 53 bp, Artificial
  Synthetic oligonucleotide
ccccgcagagatctggcaagacgtgcttaaggcgaattccgcgctgggcggga

SEQ ID NO: 359139 - DNA, 51 bp, Artificial
  Synthetic oligonucleotide
ccccgcagggaatggtccttttccgcgcttgttaacggtactgaggaggcg

SEQ ID NO: 359140 - DNA, 54 bp, Artificial
  Synthetic oligonucleotide
ccccgcagggtaaacgctggtgtttcacttcttttgactctgatcctccgtttc

SEQ ID NO: 359141 - DNA, 55 bp, Artificial
  Synthetic oligonucleotide
ccccgcagttactggattaaacaagcccaacaagccgtaaacgccttcatcagag

SEQ ID NO: 359142 - DNA, 55 bp, Artificial
  Synthetic oligonucleotide
ccccgcatcactgtccctcactctcaacaacaggtctggcaaatactccgtccgc

SEQ ID NO: 359143 - DNA, 50 bp, Artificial
  Synthetic oligonucleotide
ccccgcatgaaggatttgcgaacggtggtgtccgaagacttatctgctta

SEQ ID NO: 359144 - DNA, 54 bp, Artificial
  Synthetic oligonucleotide
ccccgcattacatttggtggaccctcagattcaactgacaataatcaggatgga

SEQ ID NO: 359145 - DNA, 55 bp, Artificial
  Synthetic oligonucleotide
ccccgccaacatgaaacagtgcaggactgcaattgttcaatctatcccggccacc

SEQ ID NO: 359146 - DNA, 55 bp, Artificial
  Synthetic oligonucleotide
ccccgccagcataactggacacccagggagctggtagagaagggtctttgtgacc

SEQ ID NO: 359147 - DNA, 55 bp, Artificial
  Synthetic oligonucleotide
ccccgccaggattgcttctgtgacaataacttcacgcattacaacgaacacagca

SEQ ID NO: 359148 - DNA, 55 bp, Artificial
  Synthetic oligonucleotide
ccccgccagtgtagaaaacaggacgatcctggttgctttatcacgcatcatgacg

SEQ ID NO: 359149 - DNA, 53 bp, Artificial
  Synthetic oligonucleotide
ccccgcccaactggcacctatgcaggcctccccatcgctgattacggcgatgc

SEQ ID NO: 359150 - DNA, 55 bp, Artificial
  Synthetic oligonucleotide
ccccgcccacatggacctatgggcacattgcgaagaggtgatgctcaacgacgac

SEQ ID NO: 359151 - DNA, 50 bp, Artificial
  Synthetic oligonucleotide
ccccgcccactctcatcacgcctaaagcgacgggctggtacagctcggag

SEQ ID NO: 359152 - DNA, 55 bp, Artificial
  Synthetic oligonucleotide
ccccgcccattctagcgtggttcccaccttaatagaatggtgcaacaaagactat

SEQ ID NO: 359153 - DNA, 53 bp, Artificial
  Synthetic oligonucleotide
ccccgccccaggttcagaggagtcatacggacgcaaggatagccattggattg

SEQ ID NO: 359154 - DNA, 50 bp, Artificial
  Synthetic oligonucleotide
ccccgccccagtcaatgctctttttgcctgcccagatcacctaggggcat

SEQ ID NO: 359155 - DNA, 51 bp, Artificial
  Synthetic oligonucleotide
ccccgcccgggacgggacatcacgtgcgcctatagtaatgcacgtgataat

SEQ ID NO: 359156 - DNA, 55 bp, Artificial
  Synthetic oligonucleotide
ccccgcccgtgtgaagtggtaccggctgagacagtgtgtggcccagtctattgct

SEQ ID NO: 359157 - DNA, 55 bp, Artificial
  Synthetic oligonucleotide
ccccgccgggcgaaaattgttactttgtagcacaggcaccatcctgcgtccggga

SEQ ID NO: 359158 - DNA, 59 bp, Artificial
  Synthetic oligonucleotide
ccccgccgtgggacgcttgatactaatgctgagtcaccgtgacctcaagatacttggta

SEQ ID NO: 359159 - DNA, 51 bp, Artificial
  Synthetic oligonucleotide
ccccgcctacacaccaactatcgcaaaccccgccccgtcacggtgacgtag

SEQ ID NO: 359160 - DNA, 56 bp, Artificial
  Synthetic oligonucleotide
ccccgcctccgtaatgaggggttgctctcttcattgagggctaaggtcgccactct

SEQ ID NO: 359161 - DNA, 55 bp, Artificial
  Synthetic oligonucleotide
ccccgcctctaccatatagagatcagctgtatactgctcccgtctctacggagtc

SEQ ID NO: 359162 - DNA, 55 bp, Artificial
  Synthetic oligonucleotide
ccccgcctggtttgaggctctcaagatggttctagagaaaattgggtttggtgac

SEQ ID NO: 359163 - DNA, 60 bp, Artificial
  Synthetic oligonucleotide
ccccgccttgactgcagagatatttaacgtctatagctttagagatcatacttggcatgg

SEQ ID NO: 359164 - DNA, 59 bp, Artificial
  Synthetic oligonucleotide
ccccgccttgactgctgaaatctttaacgtttatagcttcagagaccatacatggcacg

SEQ ID NO: 359165 - DNA, 54 bp, Artificial
  Synthetic oligonucleotide
ccccgcgaaatcttgccgccacgtaacaatttgaaagactggtgtttgtagtac

SEQ ID NO: 359166 - DNA, 55 bp, Artificial
  Synthetic oligonucleotide
ccccgcgacgcagcttcgacgtcacatcgatctgcttgttgggagcgctaccctt

SEQ ID NO: 359167 - DNA, 56 bp, Artificial
  Synthetic oligonucleotide
ccccgcgagcgcaacgaagcctaaataaatgtacagggtcgtgttgagaatcccaa

SEQ ID NO: 359168 - DNA, 56 bp, Artificial
  Synthetic oligonucleotide
ccccgcgatcggtgtatcggtttagagcacgtgggtggtcctctaatacgtgggca

SEQ ID NO: 359169 - DNA, 50 bp, Artificial
  Synthetic oligonucleotide
ccccgcgcagatggctctcctattcactcccgtgactcacgcggccccta

SEQ ID NO: 359170 - DNA, 54 bp, Artificial
  Synthetic oligonucleotide
ccccgcgcgaaacccgcactagcccactagatccccgcacccgttgctgcatag

SEQ ID NO: 359171 - DNA, 55 bp, Artificial
  Synthetic oligonucleotide
ccccgcgcgtattctggctgtttcctgctcctgacaaagagataagtattgatgc

SEQ ID NO: 359172 - DNA, 54 bp, Artificial
  Synthetic oligonucleotide
ccccgcgcgtcctaatcattcgcgcgggtttgtcctcggggagtccttcagaat

SEQ ID NO: 359173 - DNA, 50 bp, Artificial
  Synthetic oligonucleotide
ccccgcgctgactattaattcccgccacggtcttttccccgcgcactcgt

SEQ ID NO: 359174 - DNA, 52 bp, Artificial
  Synthetic oligonucleotide
ccccgcggctctcggcctaactggggccccacagacccccggcgtaggtcgc

SEQ ID NO: 359175 - DNA, 52 bp, Artificial
  Synthetic oligonucleotide
ccccgcgtagattgtttagtatatcaggtttaggtcccaccatagactgggg

SEQ ID NO: 359176 - DNA, 57 bp, Artificial
  Synthetic oligonucleotide
ccccgcgtcagcctaccaagtacgcaactcttcaggcctttaccatgtcaccaacga

SEQ ID NO: 359177 - DNA, 60 bp, Artificial
  Synthetic oligonucleotide
ccccgcgtcggtcgctacatccattccatccgccattcacaccacatttatggcaaccac

SEQ ID NO: 359178 - DNA, 55 bp, Artificial
  Synthetic oligonucleotide
ccccgcgtgcgggatctgatcaggagaccaattgaccgtgctttacaccgtcact

SEQ ID NO: 359179 - DNA, 55 bp, Artificial
  Synthetic oligonucleotide
ccccgcgtggttgccatgtacaaagatgtgtttggcatgtgggtcaaacccgaga

SEQ ID NO: 359180 - DNA, 54 bp, Artificial
  Synthetic oligonucleotide
ccccgcgtttacctttccacgtggcgtatgcagagtgggcggacggttgagtgg

SEQ ID NO: 359181 - DNA, 50 bp, Artificial
  Synthetic oligonucleotide
ccccgcgtttcttttgtgcgggtgaggccttacgtttggcttttggtttg

SEQ ID NO: 359182 - DNA, 55 bp, Artificial
  Synthetic oligonucleotide
ccccgctacagaacatgcacgacattgttctgtcggttgttggcaacagcgtgcc

SEQ ID NO: 359183 - DNA, 55 bp, Artificial
  Synthetic oligonucleotide
ccccgctaccccacggacaccgtcatcgaaaacatctcagagatcacaacacccc

SEQ ID NO: 359184 - DNA, 51 bp, Artificial
  Synthetic oligonucleotide
ccccgctacggcccataggcatcccacgtatccgttgggatccgttccatc

SEQ ID NO: 359185 - DNA, 54 bp, Artificial
  Synthetic oligonucleotide
ccccgctatacgacgcccaacgttcgtggctgaaagcccacgccccggccacca

SEQ ID NO: 359186 - DNA, 52 bp, Artificial
  Synthetic oligonucleotide
ccccgctcactccaggtaattcgcttaggaaacgaattcaattagccaatga

SEQ ID NO: 359187 - DNA, 55 bp, Artificial
  Synthetic oligonucleotide
ccccgctcataacggggtaagcgctggtttgagtccagcaagaaccataaaataa

SEQ ID NO: 359188 - DNA, 55 bp, Artificial
  Synthetic oligonucleotide
ccccgctcctccagatccaccaatctgggtcccagctggcgacgtacgtattgac

SEQ ID NO: 359189 - DNA, 55 bp, Artificial
  Synthetic oligonucleotide
ccccgctcgcgtattacggactgatcgattgcactatgatgtctcgcactcaacg

SEQ ID NO: 359190 - DNA, 50 bp, Artificial
  Synthetic oligonucleotide
ccccgctctgcagtgtgtgctgggtgttgtgatgccaggggtacacttga

SEQ ID NO: 359191 - DNA, 55 bp, Artificial
  Synthetic oligonucleotide
ccccgctgtgaacgagggtcggtcgacacatcgagatggataggagcccctcgaa

SEQ ID NO: 359192 - DNA, 53 bp, Artificial
  Synthetic oligonucleotide
ccccgctgttcgatttacaaacacaggcacagtactgacaaacccatacacct

SEQ ID NO: 359193 - DNA, 52 bp, Artificial
  Synthetic oligonucleotide
ccccgcttaatacgatcacgaacgtatggaacaaatacggtagactcatacg

SEQ ID NO: 359194 - DNA, 60 bp, Artificial
  Synthetic oligonucleotide
ccccgcttacatcatctgttgcctcgggcaccaatctggtcctctatgctgccccactga

SEQ ID NO: 359195 - DNA, 55 bp, Artificial
  Synthetic oligonucleotide
ccccgcttacgtcatctgtcgcttcgggtactaatttggttctctacgctgcccc

SEQ ID NO: 359196 - DNA, 57 bp, Artificial
  Synthetic oligonucleotide
ccccgctttgactgccgagatttttaacgtttatagcttcagggaccacacatggca

SEQ ID NO: 359197 - DNA, 54 bp, Artificial
  Synthetic oligonucleotide
ccccgcttttgccgtacgctatagccgttgcgattatgcaacgtggcggtatta

SEQ ID NO: 359198 - DNA, 57 bp, Artificial
  Synthetic oligonucleotide
ccccggaattggctaactccacatttgtcgtagatggacctgagacaaaggaatgcc

SEQ ID NO: 359199 - DNA, 55 bp, Artificial
  Synthetic oligonucleotide
ccccggacacatttactacccaaagttctgcacaagcccacgaagccggacgcaa

SEQ ID NO: 359200 - DNA, 54 bp, Artificial
  Synthetic oligonucleotide
ccccggacactttaactaccggaatcagaccgagaccaacagtgaccatggacc

SEQ ID NO: 359201 - DNA, 54 bp, Artificial
  Synthetic oligonucleotide
ccccggaccgagtatcaatagactgctagcgcggttgaaagagaaaacgttcgt

SEQ ID NO: 359202 - DNA, 55 bp, Artificial
  Synthetic oligonucleotide
ccccggaccgccagaccttaccgctatccctacacaccttccacatatcatttgc

SEQ ID NO: 359203 - DNA, 53 bp, Artificial
  Synthetic oligonucleotide
ccccggacctagtagtgataggctgtacccacggccgaagatgaacccgtccg

SEQ ID NO: 359204 - DNA, 51 bp, Artificial
  Synthetic oligonucleotide
ccccggacctccggttctccacactccttcccccctgcgggcttcccagta

SEQ ID NO: 359205 - DNA, 54 bp, Artificial
  Synthetic oligonucleotide
ccccggactgagtatcaatagactgcccacgcggttgaaggagaaaacgttcgt

SEQ ID NO: 359206 - DNA, 55 bp, Artificial
  Synthetic oligonucleotide
ccccggacttcgagtcgtcaggtacatatccacgtagtggttcaggtacaggtaa

SEQ ID NO: 359207 - DNA, 55 bp, Artificial
  Synthetic oligonucleotide
ccccggagcaaacggacttatctaacacacgttcaacacagaagcagtttaacac

SEQ ID NO: 359208 - DNA, 52 bp, Artificial
  Synthetic oligonucleotide
ccccggagcttgccaagggcattgcataagaggactcttggactttcggcaa

SEQ ID NO: 359209 - DNA, 54 bp, Artificial
  Synthetic oligonucleotide
ccccggaggcatggttgaattgttcacttatttgcttgagaaacctgagttgtt

SEQ ID NO: 359210 - DNA, 53 bp, Artificial
  Synthetic oligonucleotide
ccccggatgacgttttgcaaggtttaccctttagctatgatactaacgaaaga

SEQ ID NO: 359211 - DNA, 50 bp, Artificial
  Synthetic oligonucleotide
ccccggcacggtagggccaggtactcgaatttggtcaaccacggtggacc

SEQ ID NO: 359212 - DNA, 51 bp, Artificial
  Synthetic oligonucleotide
ccccggcagcttgtttttcggcccgaggttttatggaaccaccctatacaa

SEQ ID NO: 359213 - DNA, 55 bp, Artificial
  Synthetic oligonucleotide
ccccggcataagtcgcgcaacgtgggtaaggtcatcgataccctaacgtgcggct

SEQ ID NO: 359214 - DNA, 58 bp, Artificial
  Synthetic oligonucleotide
ccccggcccattattcatgctgttgctcctgactatcgggttgaacataaccctaaga

SEQ ID NO: 359215 - DNA, 56 bp, Artificial
  Synthetic oligonucleotide
ccccggccctactacccgcccgcacgcatctctcggccagttccggagattgcacc

SEQ ID NO: 359216 - DNA, 54 bp, Artificial
  Synthetic oligonucleotide
ccccggccgatacagcatggtcattttgggtaggtacgttacgtaagcagacct

SEQ ID NO: 359217 - DNA, 59 bp, Artificial
  Synthetic oligonucleotide
ccccggcctattattcatgcagtggctcctgattatagggttgagcataacccgaagag

SEQ ID NO: 359218 - DNA, 54 bp, Artificial
  Synthetic oligonucleotide
ccccggccttcttatgtactcgcatagcacttggtcgggctacaagacgacccc

SEQ ID NO: 359219 - DNA, 55 bp, Artificial
  Synthetic oligonucleotide
ccccggctctggtgctacgagcatatgtacaagaaaataacaatatcaagggagc

SEQ ID NO: 359220 - DNA, 59 bp, Artificial
  Synthetic oligonucleotide
ccccggctggaacacaggatcagctgttggagttaacccagatctggcttggactcaaa

SEQ ID NO: 359221 - DNA, 55 bp, Artificial
  Synthetic oligonucleotide
ccccggctggggaagccaagtaagaaatgttgaactgtgataagtctgtctagga

SEQ ID NO: 359222 - DNA, 59 bp, Artificial
  Synthetic oligonucleotide
ccccggcttagtacataacctgattggaatgctccagaccattgctgatggcaaggcac

SEQ ID NO: 359223 - DNA, 53 bp, Artificial
  Synthetic oligonucleotide
ccccggcttgaggaaggttacattcctagaaataagtttgtgtcgcgtatttc

SEQ ID NO: 359224 - DNA, 60 bp, Artificial
  Synthetic oligonucleotide
ccccggcttggtacataacctgataggaatgcttcaaactattgcggatggcaaagcaca

SEQ ID NO: 359225 - DNA, 55 bp, Artificial
  Synthetic oligonucleotide
ccccgggaacaccaaactgtagtgacactataattacatacaacaacactgtggt

SEQ ID NO: 359226 - DNA, 55 bp, Artificial
  Synthetic oligonucleotide
ccccgggaagtgcccaaagcaacaatagtaatagataccctctcggacagcacct

SEQ ID NO: 359227 - DNA, 51 bp, Artificial
  Synthetic oligonucleotide
ccccgggatccgacggaaaggtatattgagtctacaaccggttttgaactc

SEQ ID NO: 359228 - DNA, 52 bp, Artificial
  Synthetic oligonucleotide
ccccgggattcccttcgtgtcctgccaacgcgggtacaggggggtctggcga

SEQ ID NO: 359229 - DNA, 55 bp, Artificial
  Synthetic oligonucleotide
ccccgggcacaagactgacgatgaagtgaactctgagccagtcaaacccgtagag

SEQ ID NO: 359230 - DNA, 52 bp, Artificial
  Synthetic oligonucleotide
ccccgggcacccgttcgtctataagtgtgttttctagaaatttggtattctg

SEQ ID NO: 359231 - DNA, 51 bp, Artificial
  Synthetic oligonucleotide
ccccggggaaccttcttggtccgggagagcgagacgacaaaaggtgcctat

SEQ ID NO: 359232 - DNA, 55 bp, Artificial
  Synthetic oligonucleotide
ccccggggcaatcattcacaaagggcttattaaattacagccccatattgtccaa

SEQ ID NO: 359233 - DNA, 59 bp, Artificial
  Synthetic oligonucleotide
ccccggggggcccacgccagggatgagttcactcgatgtcctccacatgcacagggtca

SEQ ID NO: 359234 - DNA, 57 bp, Artificial
  Synthetic oligonucleotide
ccccgggtattgaagctgttaccacacgcgttgagaaaaatgttgaccagattgata

SEQ ID NO: 359235 - DNA, 50 bp, Artificial
  Synthetic oligonucleotide
ccccgggtcccaataggaccaaaccccgtcttgtcagaccaacgaccacc

SEQ ID NO: 359236 - DNA, 55 bp, Artificial
  Synthetic oligonucleotide
ccccgggtccgagcccaacttgagcttcacattgcctaccagcgcatagtgggtc

SEQ ID NO: 359237 - DNA, 54 bp, Artificial
  Synthetic oligonucleotide
ccccgggtgcgtaccctgcgttcaggagggcaactcctcccgttgctgggtagc

SEQ ID NO: 359238 - DNA, 56 bp, Artificial
  Synthetic oligonucleotide
ccccggtaaatttgacactaatgcggaagacggaaagattctccatgagatgaggg

SEQ ID NO: 359239 - DNA, 54 bp, Artificial
  Synthetic oligonucleotide
ccccggtagtaatccactattcgactgtgggttcaacgtataccaaatatggcc

SEQ ID NO: 359240 - DNA, 59 bp, Artificial
  Synthetic oligonucleotide
ccccggtatccagaaggaaagattgtacacattagcccattgtcaggaagtgctcagcc

SEQ ID NO: 359241 - DNA, 51 bp, Artificial
  Synthetic oligonucleotide
ccccggtatctttgcatcacccagatactatcttgaactacaagatggcgc

SEQ ID NO: 359242 - DNA, 51 bp, Artificial
  Synthetic oligonucleotide
ccccggtcacggcaaatctgtcgcggcccataagcttgctaagatgctgaa

SEQ ID NO: 359243 - DNA, 55 bp, Artificial
  Synthetic oligonucleotide
ccccggtcgcctagcaacgcaggatcgttggattacgcaatcttctcaagagaag

SEQ ID NO: 359244 - DNA, 54 bp, Artificial
  Synthetic oligonucleotide
ccccggtctcttgtcgtggtcggtgatttcgaaatagaggggatttgttatgtc

SEQ ID NO: 359245 - DNA, 52 bp, Artificial
  Synthetic oligonucleotide
ccccggtgggccttacaatttaaccgtcggcagttgggtaagagaccatgtc

SEQ ID NO: 359246 - DNA, 55 bp, Artificial
  Synthetic oligonucleotide
ccccggtggtaccaaactgcagtgacaccataattacatataacaacactgtggt

SEQ ID NO: 359247 - DNA, 53 bp, Artificial
  Synthetic oligonucleotide
ccccggtggtgtcgtctcttacgaggtccctcagggttacactatgcagtact

SEQ ID NO: 359248 - DNA, 50 bp, Artificial
  Synthetic oligonucleotide
ccccggttaggctttggtattacacttaatagggattttaatcggcagta

SEQ ID NO: 359249 - DNA, 59 bp, Artificial
  Synthetic oligonucleotide
ccccggttatagcatgcctacactgtacaaaatccagcgtatgtgtctcgaacggtgta

SEQ ID NO: 359250 - DNA, 55 bp, Artificial
  Synthetic oligonucleotide
ccccggttattgtcaacagacaccgctctatgtagagtgtggttcctggacacca

SEQ ID NO: 359251 - DNA, 55 bp, Artificial
  Synthetic oligonucleotide
ccccggttcaataaacgtggcgcacgctcacataatctcccggtgtggtgtccgt

SEQ ID NO: 359252 - DNA, 55 bp, Artificial
  Synthetic oligonucleotide
ccccggttctacgatactagccgcggaaggctgtgcgataggagccgagtacact

SEQ ID NO: 359253 - DNA, 55 bp, Artificial
  Synthetic oligonucleotide
ccccggttgtcatagactctatagggcctcgtgatatcacaccaattgacactgt

SEQ ID NO: 359254 - DNA, 51 bp, Artificial
  Synthetic oligonucleotide
ccccgtaacttagaagcctggacaaaccgaccaatagaggcgttgtagcca

SEQ ID NO: 359255 - DNA, 55 bp, Artificial
  Synthetic oligonucleotide
ccccgtacagaccagaagtgctagaggccctacaccgttttcagctacagtgggg

SEQ ID NO: 359256 - DNA, 55 bp, Artificial
  Synthetic oligonucleotide
ccccgtaccctcctacgccctcctatataaaagcctcctccgacatccagcaatc

SEQ ID NO: 359257 - DNA, 56 bp, Artificial
  Synthetic oligonucleotide
ccccgtacttttaaccgcagcatccccaccgcgcaaaggcatcccatcaaatacga

SEQ ID NO: 359258 - DNA, 53 bp, Artificial
  Synthetic oligonucleotide
ccccgtatccctcgcccccaacgaattctacagcctggaactctttcggtggc

SEQ ID NO: 359259 - DNA, 55 bp, Artificial
  Synthetic oligonucleotide
ccccgtattcgacgggacttcccgaggtgaagtttgcgcgcaagacactagtgcg

SEQ ID NO: 359260 - DNA, 55 bp, Artificial
  Synthetic oligonucleotide
ccccgtcaacagattccccgcccttttccatgtaagctttgacatcggaccatga

SEQ ID NO: 359261 - DNA, 55 bp, Artificial
  Synthetic oligonucleotide
ccccgtcaaccttccaacaaggaattggctgcaatcttcagatccaccggtcatg

SEQ ID NO: 359262 - DNA, 55 bp, Artificial
  Synthetic oligonucleotide
ccccgtcacacaaacagaaactagtcgctatcttgtcacaacatgcacaaaagtt

SEQ ID NO: 359263 - DNA, 52 bp, Artificial
  Synthetic oligonucleotide
ccccgtcacatctagttacatcatgcaaaggcgagctggctgtctccattga

SEQ ID NO: 359264 - DNA, 55 bp, Artificial
  Synthetic oligonucleotide
ccccgtcagtcgcagcacttttccctaacgcacagccatttggacatcatgctac

SEQ ID NO: 359265 - DNA, 55 bp, Artificial
  Synthetic oligonucleotide
ccccgtcatgcatgtaggaggcgtgaatgcgccccgatccgatgacgcgtagctt

SEQ ID NO: 359266 - DNA, 56 bp, Artificial
  Synthetic oligonucleotide
ccccgtccctatggttgaagctcccgatcctaagccaggatttgccgaggatcaga

SEQ ID NO: 359267 - DNA, 51 bp, Artificial
  Synthetic oligonucleotide
ccccgtccgatccggtacccgacgtcccaataccaaccaacaccactggaa

SEQ ID NO: 359268 - DNA, 54 bp, Artificial
  Synthetic oligonucleotide
ccccgtcgcgaacttgctcgcgtagggaccccaaatggccagtataaccatagg

SEQ ID NO: 359269 - DNA, 51 bp, Artificial
  Synthetic oligonucleotide
ccccgtctcagatgccactttaaagatagggaccccaaggtacgcagtatt

SEQ ID NO: 359270 - DNA, 60 bp, Artificial
  Synthetic oligonucleotide
ccccgtctctgtacgggttctcaccattccacggaggaatggacagaatcatgacaatca

SEQ ID NO: 359271 - DNA, 53 bp, Artificial
  Synthetic oligonucleotide
ccccgtctgccatgccacaatatgacgtcactccagagatgaagatacccggt

SEQ ID NO: 359272 - DNA, 55 bp, Artificial
  Synthetic oligonucleotide
ccccgtctttagcttcggatcaccgatcctgctagccgggttggtcaaagtcgcc

SEQ ID NO: 359273 - DNA, 55 bp, Artificial
  Synthetic oligonucleotide
ccccgtgagccagcatgggctagaggacggagaaagagaagtgctgatgtggaag

SEQ ID NO: 359274 - DNA, 56 bp, Artificial
  Synthetic oligonucleotide
ccccgtgaggggtgcagcaatggaggccctcttgggtttagaggacaactgtcgta

SEQ ID NO: 359275 - DNA, 55 bp, Artificial
  Synthetic oligonucleotide
ccccgtgaggttcagaatgacgatcttctcagagatagaggaattgtagtagacc

SEQ ID NO: 359276 - DNA, 50 bp, Artificial
  Synthetic oligonucleotide
ccccgtgagtgtctgacgtgaggaggttggcgagtagtcgcagcgaccgt

SEQ ID NO: 359277 - DNA, 58 bp, Artificial
  Synthetic oligonucleotide
ccccgtgatctcgtcgacacgtatcgctctgtactgcaggtcggacatgtatgcggcg

SEQ ID NO: 359278 - DNA, 55 bp, Artificial
  Synthetic oligonucleotide
ccccgtgatttctcaaacaacaagatgactagctacctattcgacacacctgtca

SEQ ID NO: 359279 - DNA, 55 bp, Artificial
  Synthetic oligonucleotide
ccccgtgatttctcaaacatcaaacatgactagctaccttttcgacacgcctgtt

SEQ ID NO: 359280 - DNA, 58 bp, Artificial
  Synthetic oligonucleotide
ccccgtgcaacaaataggcggcaactatgtccatctgccgctgagtccccgaacccta

SEQ ID NO: 359281 - DNA, 56 bp, Artificial
  Synthetic oligonucleotide
ccccgtgcaacatcgggggggtcggcaaccacactttgacctgccccacagactgc

SEQ ID NO: 359282 - DNA, 51 bp, Artificial
  Synthetic oligonucleotide
ccccgtgcaccctctagcagagcaggtgaaaataataacacataacgggag

SEQ ID NO: 359283 - DNA, 51 bp, Artificial
  Synthetic oligonucleotide
ccccgtgcactagtttatgttggccaatcatatcgcagcctgaaaggctag

SEQ ID NO: 359284 - DNA, 53 bp, Artificial
  Synthetic oligonucleotide
ccccgtgcagcttagtagaggttatgtaatggttaggcggccagacgtctgtt

SEQ ID NO: 359285 - DNA, 55 bp, Artificial
  Synthetic oligonucleotide
ccccgtggaaaatgaagcggcattctttgaccacatcactgacgccatgcccgag

SEQ ID NO: 359286 - DNA, 51 bp, Artificial
  Synthetic oligonucleotide
ccccgtggattacatctttgagaatccggtgcatgtattgtggcgccaagc

SEQ ID NO: 359287 - DNA, 52 bp, Artificial
  Synthetic oligonucleotide
ccccgtggcactagtgattggagcatgcccgaacccacaatgcgaacactgg

SEQ ID NO: 359288 - DNA, 53 bp, Artificial
  Synthetic oligonucleotide
ccccgtggtgcgtgcccgcgcgatagcctgagccggtgagttgtgactggcca

SEQ ID NO: 359289 - DNA, 55 bp, Artificial
  Synthetic oligonucleotide
ccccgtgtagccgcctactattgcaaccgccgaaaattcgtggactatgtcctgc

SEQ ID NO: 359290 - DNA, 59 bp, Artificial
  Synthetic oligonucleotide
ccccgtgtgaacgcacaatctaccgcacttccccaactacctcagatgatctcactcct

SEQ ID NO: 359291 - DNA, 55 bp, Artificial
  Synthetic oligonucleotide
ccccgttaagaaaagatctggcatgagtaaactagcactcgtgatacgagacaat

SEQ ID NO: 359292 - DNA, 53 bp, Artificial
  Synthetic oligonucleotide
ccccgttacacttgggtaaatgtaacattgctggatggcttttaggaaaccca

SEQ ID NO: 359293 - DNA, 55 bp, Artificial
  Synthetic oligonucleotide
ccccgttacccaccttgacacagagagctccagtagtagtccttgtctttgcaag

SEQ ID NO: 359294 - DNA, 58 bp, Artificial
  Synthetic oligonucleotide
ccccgttccgcaatcgccggcacgtgttgattaatgtcaagattgacaacgaaaggca

SEQ ID NO: 359295 - DNA, 55 bp, Artificial
  Synthetic oligonucleotide
ccccgttccggggaggtgaggcatgaagaggattgaaatccgcgagctgaagggg

SEQ ID NO: 359296 - DNA, 52 bp, Artificial
  Synthetic oligonucleotide
ccccgttctacgcgccattttcgggtgcccccagcgttgttcgcaaccttgg

SEQ ID NO: 359297 - DNA, 55 bp, Artificial
  Synthetic oligonucleotide
ccccgttgagagcttggagacatcgggcaagagcagtcagagctaggcttatcgc

SEQ ID NO: 359298 - DNA, 55 bp, Artificial
  Synthetic oligonucleotide
ccccgttgagtgtgatctgttgcttacggcaacggtactgcttataattccaacc

SEQ ID NO: 359299 - DNA, 60 bp, Artificial
  Synthetic oligonucleotide
ccccgttgatagcaatatgagccacaccatgaggataacagggtatcctgagtcaaaact

SEQ ID NO: 359300 - DNA, 55 bp, Artificial
  Synthetic oligonucleotide
ccccgttgcgctagttggagctcttccatttgttacagactcgtcagtcatttcg

SEQ ID NO: 359301 - DNA, 58 bp, Artificial
  Synthetic oligonucleotide
ccccgttggtggcgtgcggcatgtagaacgatatatcgttatcttgttcgccatccgg

SEQ ID NO: 359302 - DNA, 53 bp, Artificial
  Synthetic oligonucleotide
ccccgtttacaaggtcaaggaaaatcacaggttaacagaagagctaagagaac

SEQ ID NO: 359303 - DNA, 52 bp, Artificial
  Synthetic oligonucleotide
ccccgtttctccccgttccctgcggccgtaggccactttgtcacctgcgcct

SEQ ID NO: 359304 - DNA, 50 bp, Artificial
  Synthetic oligonucleotide
ccccgtttctgattacgaatatactggggcggatatctgctatatccctt

SEQ ID NO: 359305 - DNA, 55 bp, Artificial
  Synthetic oligonucleotide
ccccgtttggtttgcctgcctaaagctgttacttgagaaactcggatactcgcac

SEQ ID NO: 359306 - DNA, 55 bp, Artificial
  Synthetic oligonucleotide
ccccgttttctattttggggttaccagagatcgtggttcgcagtggagctgcacc

SEQ ID NO: 359307 - DNA, 59 bp, Artificial
  Synthetic oligonucleotide
ccccgttttgcttggtgatgtaccctagcactttggaagcatctcttgctggttggatg

SEQ ID NO: 359308 - DNA, 60 bp, Artificial
  Synthetic oligonucleotide
ccccgtttttcgcgctcgattgcagtgccagtacgagcaccatcactggtacaagcttac

SEQ ID NO: 359309 - DNA, 50 bp, Artificial
  Synthetic oligonucleotide
cccctaaaagacagagcatggctagaggtccaaggatattggaatctgac

SEQ ID NO: 359310 - DNA, 56 bp, Artificial
  Synthetic oligonucleotide
cccctaaaatggattctgaccgaattgtcttcaaagttcataatcagctggtttct

SEQ ID NO: 359311 - DNA, 52 bp, Artificial
  Synthetic oligonucleotide
cccctaaagtcgttctgtaaatgaacgcccccgtgacccaccgccattggcg

SEQ ID NO: 359312 - DNA, 50 bp, Artificial
  Synthetic oligonucleotide
cccctaaatgttaaaatcggccactaccctaacctacaaaggttcccaga

SEQ ID NO: 359313 - DNA, 55 bp, Artificial
  Synthetic oligonucleotide
cccctaagattgaaggcgtattttcgcttgttatagtgatcgaccggaaaccaca

SEQ ID NO: 359314 - DNA, 55 bp, Artificial
  Synthetic oligonucleotide
cccctaagccatggttgtactgtgctatcttctaagacgtcctccctctggacgc

SEQ ID NO: 359315 - DNA, 53 bp, Artificial
  Synthetic oligonucleotide
cccctaaggccgagggagtcttctccctggtcgttgttgtggatcggaaacca

SEQ ID NO: 359316 - DNA, 54 bp, Artificial
  Synthetic oligonucleotide
cccctaagttgtatcgtcatccgatgcgtgaatttcaagatcttaaccggttac

SEQ ID NO: 359317 - DNA, 49 bp, Artificial
  Synthetic oligonucleotide
cccctaagttttgccgtctgtcccgaccccttcaggtaccccgaggtaa

SEQ ID NO: 359318 - DNA, 54 bp, Artificial
  Synthetic oligonucleotide
cccctaatacctttggattaatattaggcagaagtagtacaactatgaaaggtc

SEQ ID NO: 359319 - DNA, 51 bp, Artificial
  Synthetic oligonucleotide
cccctaatcccaaacccttaaccccatggcagcttacttacccaccttggc

SEQ ID NO: 359320 - DNA, 54 bp, Artificial
  Synthetic oligonucleotide
cccctaatgacgaatgggttcctacctacttcgggcgagcaccccacctcaaga

SEQ ID NO: 359321 - DNA, 56 bp, Artificial
  Synthetic oligonucleotide
cccctacacactagtatcaacaaaagaatggagcaaacggtatgaactcgaaattg

SEQ ID NO: 359322 - DNA, 51 bp, Artificial
  Synthetic oligonucleotide
cccctacaccaaaagtacaatttaaccttaactacaaagactaggccaaca

SEQ ID NO: 359323 - DNA, 50 bp, Artificial
  Synthetic oligonucleotide
cccctacagagagtaacgctaggtcattctcgatgctactcaacacgggt

SEQ ID NO: 359324 - DNA, 51 bp, Artificial
  Synthetic oligonucleotide
cccctacaggcaacacacggcaagggtgcaagagcaccatctccggagaag

SEQ ID NO: 359325 - DNA, 60 bp, Artificial
  Synthetic oligonucleotide
cccctacatgcatttatgttgttgggatggctgaattgggtgcattcttttcgatcctac

SEQ ID NO: 359326 - DNA, 55 bp, Artificial
  Synthetic oligonucleotide
cccctaccaacgaatttgctttattcagagataatatatcgaccgagtgtcgggt

SEQ ID NO: 359327 - DNA, 55 bp, Artificial
  Synthetic oligonucleotide
cccctaccagtgatcttttacaagatcccgatatgaatgagttaggcttcggtct

SEQ ID NO: 359328 - DNA, 55 bp, Artificial
  Synthetic oligonucleotide
cccctacccgcttatctgaccaagagtctgtgtgcggacatctgagcacattgta

SEQ ID NO: 359329 - DNA, 55 bp, Artificial
  Synthetic oligonucleotide
cccctacgcctagtggctctatggtgtcctctgattcccaattatttaataagcc

SEQ ID NO: 359330 - DNA, 51 bp, Artificial
  Synthetic oligonucleotide
cccctacgctgtcacacagactgaagcgcttactttagagcgcattgggat

SEQ ID NO: 359331 - DNA, 55 bp, Artificial
  Synthetic oligonucleotide
cccctacggcgagtattcaacaacccattgagcggaaaagcatggcgtaactggg

SEQ ID NO: 359332 - DNA, 58 bp, Artificial
  Synthetic oligonucleotide
cccctacgtgatatcattgacttggtggggcaaaaacattttatgagtatgggtgata

SEQ ID NO: 359333 - DNA, 57 bp, Artificial
  Synthetic oligonucleotide
cccctactaatgtgaatactataaagtcgtcaagtaagacattaacgattgctgttc

SEQ ID NO: 359334 - DNA, 60 bp, Artificial
  Synthetic oligonucleotide
cccctactcattacaacagctacagcttgcagctttgatcattactacctaaatacatca

SEQ ID NO: 359335 - DNA, 54 bp, Artificial
  Synthetic oligonucleotide
cccctactgatcctccgttgtgtaaagtccctgacgggttggaagatgtcttct

SEQ ID NO: 359336 - DNA, 52 bp, Artificial
  Synthetic oligonucleotide
cccctactgcttggaaccccagttaggcgtgtagtgatcaagggatggtggc

SEQ ID NO: 359337 - DNA, 55 bp, Artificial
  Synthetic oligonucleotide
cccctacttctgaacagagtcagggtgaggatcgtgttccccgagccgggttggc

SEQ ID NO: 359338 - DNA, 50 bp, Artificial
  Synthetic oligonucleotide
cccctacttgggtaccggtcggttggggtggcaaacccaactatgcctta

SEQ ID NO: 359339 - DNA, 55 bp, Artificial
  Synthetic oligonucleotide
cccctagaagaagatgaacagatcataatcaccatcctgtggaacttaaccccag

SEQ ID NO: 359340 - DNA, 51 bp, Artificial
  Synthetic oligonucleotide
cccctagcggtcagtggtgacaaccttactgtgcagtctcaggcccctctc

SEQ ID NO: 359341 - DNA, 55 bp, Artificial
  Synthetic oligonucleotide
cccctagcttggccacaatccggacctctgttccgtgagtacggcttgaaagcgg

SEQ ID NO: 359342 - DNA, 55 bp, Artificial
  Synthetic oligonucleotide
cccctaggacaatgcatattattaggaacagtaacagactatacaccaggaaccc

SEQ ID NO: 359343 - DNA, 55 bp, Artificial
  Synthetic oligonucleotide
cccctaggtagataatctgaactccgggattcagggcagcatacaggttcatcca

SEQ ID NO: 359344 - DNA, 51 bp, Artificial
  Synthetic oligonucleotide
cccctagtcccctcagccaatatggccatgtacataccccgcacgcttccc

SEQ ID NO: 359345 - DNA, 54 bp, Artificial
  Synthetic oligonucleotide
cccctagtccccttaatccttttgattctcagaggagtcagtaccgcctcgtct

SEQ ID NO: 359346 - DNA, 54 bp, Artificial
  Synthetic oligonucleotide
cccctagtgtaaaatctccagttgtaacagttgcctcgtgttcgtactctttac

SEQ ID NO: 359347 - DNA, 55 bp, Artificial
  Synthetic oligonucleotide
cccctagttccctccttagagattgagtccagcggaagctggggatttctttgga

SEQ ID NO: 359348 - DNA, 51 bp, Artificial
  Synthetic oligonucleotide
cccctatacctactaaaagagtgatagaaactttacttaatacggacttac

SEQ ID NO: 359349 - DNA, 52 bp, Artificial
  Synthetic oligonucleotide
cccctatagtcagcaatagtgactttctttgtgtaggatggtccagtaccag

SEQ ID NO: 359350 - DNA, 55 bp, Artificial
  Synthetic oligonucleotide
cccctatagtggcaaaagaaatagttgcacagtgcccaaagtgtcaggtaaaagg

SEQ ID NO: 359351 - DNA, 54 bp, Artificial
  Synthetic oligonucleotide
cccctatatatacttggtccctaagtttcgtggaaattgaaaatgtgggatcca

SEQ ID NO: 359352 - DNA, 55 bp, Artificial
  Synthetic oligonucleotide
cccctatatcgcatattgttatagaatctaacgacctccccgtatcttatgaatt

SEQ ID NO: 359353 - DNA, 57 bp, Artificial
  Synthetic oligonucleotide
cccctatccatcagcagagggaagccgacagacccgaagaaatcgaagaaggaggtg

SEQ ID NO: 359354 - DNA, 57 bp, Artificial
  Synthetic oligonucleotide
cccctatccatcatcagagggaggaacccgacaggccagaaggaatcgaagaaggag

SEQ ID NO: 359355 - DNA, 52 bp, Artificial
  Synthetic oligonucleotide
cccctatccgtgaagcagattggttgggaggttactaacgggactatttgtg

SEQ ID NO: 359356 - DNA, 57 bp, Artificial
  Synthetic oligonucleotide
cccctatgcaaatgaagctaactcttctgggtgtattgtcactgttgaaactaaacc

SEQ ID NO: 359357 - DNA, 52 bp, Artificial
  Synthetic oligonucleotide
cccctatgcagtaacggatgcaccaccaaaggtaagagtaggagtagggagt

SEQ ID NO: 359358 - DNA, 52 bp, Artificial
  Synthetic oligonucleotide
cccctatgccattggctgatacatcacaaatggtgccagaaagttcctgcag

SEQ ID NO: 359359 - DNA, 53 bp, Artificial
  Synthetic oligonucleotide
cccctatggcctccttcagttcacccaaagagtcggccccttatggtaactta

SEQ ID NO: 359360 - DNA, 52 bp, Artificial
  Synthetic oligonucleotide
cccctatgggccactgacacattggtgacgtatatgaataaacttacacgac

SEQ ID NO: 359361 - DNA, 55 bp, Artificial
  Synthetic oligonucleotide
cccctatgtgattagacagggtgactcatggttaaagaaattcacggaggcatgc

SEQ ID NO: 359362 - DNA, 52 bp, Artificial
  Synthetic oligonucleotide
cccctattaggccctcaatggttagacaagtggctgaaagggaaggtacccg

SEQ ID NO: 359363 - DNA, 60 bp, Artificial
  Synthetic oligonucleotide
cccctattcacatgggcggcaggactaatagagatgcaaaaaccctttgatgcgaatgga

SEQ ID NO: 359364 - DNA, 60 bp, Artificial
  Synthetic oligonucleotide
cccctattcctcgtcatgctccaattccacgttatagcacatacctaatgctactattga

SEQ ID NO: 359365 - DNA, 51 bp, Artificial
  Synthetic oligonucleotide
cccctattcggcgacgctcaaagcgttaacatagacattcgaatgttgtcg

SEQ ID NO: 359366 - DNA, 56 bp, Artificial
  Synthetic oligonucleotide
cccctattggggaacactgggctaaaggcactgtttgcactggagtgtcctctaag

SEQ ID NO: 359367 - DNA, 55 bp, Artificial
  Synthetic oligonucleotide
cccctattggtgtctaatgtgcaatttccaaaaatacccttatccctgtgtctgt

SEQ ID NO: 359368 - DNA, 54 bp, Artificial
  Synthetic oligonucleotide
cccctatttgctacctttgctacgacctttgctttgcttgttactattaattac

SEQ ID NO: 359369 - DNA, 54 bp, Artificial
  Synthetic oligonucleotide
cccctcaaaacacaagaggaaacggagcaaacatcggaggaggaagaaatcgaa

SEQ ID NO: 359370 - DNA, 55 bp, Artificial
  Synthetic oligonucleotide
cccctcaaacatggaaaagcagtgcagaacagttggaggaatttccataggagtc

SEQ ID NO: 359371 - DNA, 60 bp, Artificial
  Synthetic oligonucleotide
cccctcaacttgacaagtcagcgcaagaatacaatggacatgtatagagtcgagttgagc

SEQ ID NO: 359372 - DNA, 55 bp, Artificial
  Synthetic oligonucleotide
cccctcaagagacaaattcggagggatctctaatgttaaggtgaaggttgacaaa

SEQ ID NO: 359373 - DNA, 55 bp, Artificial
  Synthetic oligonucleotide
cccctcaccctaaactgtgacaggattgagaacaaaggaaaggtctttgacagcg

SEQ ID NO: 359374 - DNA, 55 bp, Artificial
  Synthetic oligonucleotide
cccctcactacaacaagttatgagggaccagttgaaaccattcacggaaccaaga

SEQ ID NO: 359375 - DNA, 60 bp, Artificial
  Synthetic oligonucleotide
cccctcactgtttacccgacaggttaacggatcagtgctcagcagaatatgtcttactgc

SEQ ID NO: 359376 - DNA, 53 bp, Artificial
  Synthetic oligonucleotide
cccctcagaaatttatagaaactacgagtcttggcgctttctttaatccgtta

SEQ ID NO: 359377 - DNA, 55 bp, Artificial
  Synthetic oligonucleotide
cccctcagacaagaattgaggctacaagtatcaactgtctcgatgtcgctcctgc

SEQ ID NO: 359378 - DNA, 55 bp, Artificial
  Synthetic oligonucleotide
cccctcagcaacgcaacgtatatcatgtacgtgtaattgacgctcttgtcggtcc

SEQ ID NO: 359379 - DNA, 60 bp, Artificial
  Synthetic oligonucleotide
cccctcagctatcatagcaaattggatcgtgctgtcagctcacgagagcttcagccggtt

SEQ ID NO: 359380 - DNA, 51 bp, Artificial
  Synthetic oligonucleotide
cccctcaggattcaggccaagaggagatagattataagcaactgctagaag

SEQ ID NO: 359381 - DNA, 55 bp, Artificial
  Synthetic oligonucleotide
cccctcatatgtggaaaggctgttctctttagagataggaatacaggagagcatt

SEQ ID NO: 359382 - DNA, 55 bp, Artificial
  Synthetic oligonucleotide
cccctcatatgtgggaaagcagtggtctttagagatagaaatacaggggattacc

SEQ ID NO: 359383 - DNA, 51 bp, Artificial
  Synthetic oligonucleotide
cccctcatcctgaccgttgatgcgtaatcattgcacgcccttatctgcacg

SEQ ID NO: 359384 - DNA, 55 bp, Artificial
  Synthetic oligonucleotide
cccctcatgacctaagtatagcgtgacgtcacttccgtggctccaagtcgcggat

SEQ ID NO: 359385 - DNA, 54 bp, Artificial
  Synthetic oligonucleotide
cccctcatgcgagggaacaactgtttcataccagttagttttgaggttttgtcc

SEQ ID NO: 359386 - DNA, 52 bp, Artificial
  Synthetic oligonucleotide
cccctcatggaaacagcaccgtgccctaccaccattctcattatggcggaca

SEQ ID NO: 359387 - DNA, 55 bp, Artificial
  Synthetic oligonucleotide
cccctcatgggaagggtgttatgaagaccctcactgctagttctctcgttgcccg

SEQ ID NO: 359388 - DNA, 55 bp, Artificial
  Synthetic oligonucleotide
cccctcatggtgttttagtatttcatgatagacctgcagaaacggatgtggtccc

SEQ ID NO: 359389 - DNA, 51 bp, Artificial
  Synthetic oligonucleotide
cccctccaagacgttgcaggattattcctcgcacgacatgcttctagaagt

SEQ ID NO: 359390 - DNA, 55 bp, Artificial
  Synthetic oligonucleotide
cccctccacagaggacctggttaatttactgcccgccatcctttcacctggagcc

SEQ ID NO: 359391 - DNA, 56 bp, Artificial
  Synthetic oligonucleotide
cccctccacggaggacctagtcaacctattgcccgccatcctttcgcctggagctc

SEQ ID NO: 359392 - DNA, 55 bp, Artificial
  Synthetic oligonucleotide
cccctccagaacgtgtaccaacttgttcaggaggtgattgaacgggtcgagctcc

SEQ ID NO: 359393 - DNA, 51 bp, Artificial
  Synthetic oligonucleotide
cccctccagaatgtattgtagatttgttgaaatctgtagattgtgaagagg

SEQ ID NO: 359394 - DNA, 60 bp, Artificial
  Synthetic oligonucleotide
cccctccagagcagagtaggatgcagttttcttctctaactgtgaatgtgaggggttcag

SEQ ID NO: 359395 - DNA, 54 bp, Artificial
  Synthetic oligonucleotide
cccctccagcaaggctgttgactcaatttcacccgcaggcctcctcacgacccc

SEQ ID NO: 359396 - DNA, 60 bp, Artificial
  Synthetic oligonucleotide
cccctccatcagaggcaagctcatctgccagccaattgtcagctccgtcgttgaaggcca

SEQ ID NO: 359397 - DNA, 56 bp, Artificial
  Synthetic oligonucleotide
cccctcccaaaataatcatccgcccactcttgcatctcgtcgggaacgttagtgaa

SEQ ID NO: 359398 - DNA, 55 bp, Artificial
  Synthetic oligonucleotide
cccctcccacattctggacctcttcatgagttgcgaccagctgcaaaccctctac

SEQ ID NO: 359399 - DNA, 50 bp, Artificial
  Synthetic oligonucleotide
cccctcccatccgaggacaaataagatgttcatcaacaatcacactgcta

SEQ ID NO: 359400 - DNA, 59 bp, Artificial
  Synthetic oligonucleotide
cccctcccatcgcaggaaacattacatgtgtgtcaaacattacaggactaatcttaaca

SEQ ID NO: 359401 - DNA, 55 bp, Artificial
  Synthetic oligonucleotide
cccctccccgctcctggtgtccccctgtacgtggccactcgttactgtctcactc

SEQ ID NO: 359402 - DNA, 52 bp, Artificial
  Synthetic oligonucleotide
cccctcccctacgcgccctctcattggtgcggtgaacccgacgctcctcaac

SEQ ID NO: 359403 - DNA, 53 bp, Artificial
  Synthetic oligonucleotide
cccctcccctagtaaaactatggtaccagttagaaacagagcccatagtagga

SEQ ID NO: 359404 - DNA, 55 bp, Artificial
  Synthetic oligonucleotide
cccctcccctggtaaaactatggtaccagctggagaaagaacctatagcaggagc

SEQ ID NO: 359405 - DNA, 58 bp, Artificial
  Synthetic oligonucleotide
cccctcccgaacgtgcgcttgacgtgactggtctttcagtctagctttctgagaaata

SEQ ID NO: 359406 - DNA, 53 bp, Artificial
  Synthetic oligonucleotide
cccctcccggtagccgtaaaacggggacatgtacacaaagtcgccagtcgcca

SEQ ID NO: 359407 - DNA, 51 bp, Artificial
  Synthetic oligonucleotide
cccctcccggtcggactaactgcgtgacggtccagtttctgattacagatt

SEQ ID NO: 359408 - DNA, 52 bp, Artificial
  Synthetic oligonucleotide
cccctcccggtgaaaggagggggctcagcatcatgcgtagttgccgatgggt

SEQ ID NO: 359409 - DNA, 52 bp, Artificial
  Synthetic oligonucleotide
cccctccctaccctcaaccttcaaccagatgattttcgaatttaatggtgtg

SEQ ID NO: 359410 - DNA, 55 bp, Artificial
  Synthetic oligonucleotide
cccctccctcgttaagaaagccgcattcaccgacgctgggcacaaagtctccacc

SEQ ID NO: 359411 - DNA, 58 bp, Artificial
  Synthetic oligonucleotide
cccctccctgaaagccgtcatccaagatgaagcctacaggcacctaaaacgtgagcta

SEQ ID NO: 359412 - DNA, 53 bp, Artificial
  Synthetic oligonucleotide
cccctcccttagtaaaattatggtaccagctagaacaagaacccatagtcgga

SEQ ID NO: 359413 - DNA, 52 bp, Artificial
  Synthetic oligonucleotide
cccctccgcaccgacgatggaaacaccgtcccttggtttctcgtcctggtac

SEQ ID NO: 359414 - DNA, 59 bp, Artificial
  Synthetic oligonucleotide
cccctccggaggaatttgcgacctaatcagcacctatgcccgaggttcagatgagggca

SEQ ID NO: 359415 - DNA, 51 bp, Artificial
  Synthetic oligonucleotide
cccctccggatgaaaagtcggagggtcctacttctcatccgtacccctccg

SEQ ID NO: 359416 - DNA, 53 bp, Artificial
  Synthetic oligonucleotide
cccctccgggagcacaaccaccgaccagtcgcaaggaggcaatgctcggcacg

SEQ ID NO: 359417 - DNA, 54 bp, Artificial
  Synthetic oligonucleotide
cccctccgttaacattttacgagtactgtgcgaggtcggagctctggggaacca

SEQ ID NO: 359418 - DNA, 51 bp, Artificial
  Synthetic oligonucleotide
cccctcctaaaatgaccggaggtggagcttggagcgcgaggggacccagcg

SEQ ID NO: 359419 - DNA, 52 bp, Artificial
  Synthetic oligonucleotide
cccctcctatatcggctaggggcagtgcagaacgaggtcacacttacccacc

SEQ ID NO: 359420 - DNA, 57 bp, Artificial
  Synthetic oligonucleotide
cccctcctgaggctgccgccccagcaccggttgccgccccaggaccgcccagctcca

SEQ ID NO: 359421 - DNA, 60 bp, Artificial
  Synthetic oligonucleotide
cccctcctgggctgatgatgaccgtcaggtcgactatggtgaaaagatcaactttgaggc

SEQ ID NO: 359422 - DNA, 55 bp, Artificial
  Synthetic oligonucleotide
cccctcgaaaatcccaaccgctagtattcagatcagcggtcgcattcggctctcc

SEQ ID NO: 359423 - DNA, 59 bp, Artificial
  Synthetic oligonucleotide
cccctcgaataatcaagtagtgccatatgaaccaatcattactaccatagagaaggaaa

SEQ ID NO: 359424 - DNA, 59 bp, Artificial
  Synthetic oligonucleotide
cccctcgaattggataagcacatggagatgtggctccccatttcgggaagttccctgca

SEQ ID NO: 359425 - DNA, 60 bp, Artificial
  Synthetic oligonucleotide
cccctcgacattcgataagtcacagcagaggttgcatcacttgactcactatcacacccc

SEQ ID NO: 359426 - DNA, 55 bp, Artificial
  Synthetic oligonucleotide
cccctcgagacctctacgcgaagatgcgtcagctcctacctgacaaggaactggc

SEQ ID NO: 359427 - DNA, 53 bp, Artificial
  Synthetic oligonucleotide
cccctcgatagatacatcaccggacgtttggtgtgccggcatgattgcggggc

SEQ ID NO: 359428 - DNA, 58 bp, Artificial
  Synthetic oligonucleotide
cccctcgcaaaggatttgttagcgccaatggctagaaagttttatgataactccatga

SEQ ID NO: 359429 - DNA, 56 bp, Artificial
  Synthetic oligonucleotide
cccctcgcccagtaaccagctccagggacttcagatcgagagtccagggaaaccaa

SEQ ID NO: 359430 - DNA, 52 bp, Artificial
  Synthetic oligonucleotide
cccctcgcgcgaaagctatctacgtgcgcgcagctcattggtgccgtaccct

SEQ ID NO: 359431 - DNA, 55 bp, Artificial
  Synthetic oligonucleotide
cccctcgctcctcgccatgttaattattaagggtcggtacactggccgccaactg

SEQ ID NO: 359432 - DNA, 53 bp, Artificial
  Synthetic oligonucleotide
cccctcgctgtagggacaaaactttacatgacaggaaatcttaggtcgtggat

SEQ ID NO: 359433 - DNA, 52 bp, Artificial
  Synthetic oligonucleotide
cccctcggagatccggaaactaaaggacttaggctacattggggaagagccc

SEQ ID NO: 359434 - DNA, 57 bp, Artificial
  Synthetic oligonucleotide
cccctcggatgctgcgcagaccctgatggatgtcttcgagtatgttggctttacggc

SEQ ID NO: 359435 - DNA, 54 bp, Artificial
  Synthetic oligonucleotide
cccctcgggctcagaatctaatcagcagtcatggacaacaaactaagagctcag

SEQ ID NO: 359436 - DNA, 50 bp, Artificial
  Synthetic oligonucleotide
cccctcggttcctcttggcgtgaccagtcccagcgcccctccgctgcccc

SEQ ID NO: 359437 - DNA, 52 bp, Artificial
  Synthetic oligonucleotide
cccctcgtccacatccaggaaggtgattggcttgtaagtgtaggccacgtga

SEQ ID NO: 359438 - DNA, 56 bp, Artificial
  Synthetic oligonucleotide
cccctcgttccctttcccgtgagtgtgtggttggcgtctgttctgaaggctgtatc

SEQ ID NO: 359439 - DNA, 57 bp, Artificial
  Synthetic oligonucleotide
cccctctagaagctaatgtaacagacccagttcctataacgatctctataagtccaa

SEQ ID NO: 359440 - DNA, 51 bp, Artificial
  Synthetic oligonucleotide
cccctctagctgtctcctcgactccgacgctgagtcctattcttccatgcc

SEQ ID NO: 359441 - DNA, 55 bp, Artificial
  Synthetic oligonucleotide
cccctctaggcgcgtgcgatttgatacatcctcctaagtctcggtgtggaagaac

SEQ ID NO: 359442 - DNA, 55 bp, Artificial
  Synthetic oligonucleotide
cccctctcacagacgttgtcaccgcggcaggtactcgcacggtaccagatgtaga

SEQ ID NO: 359443 - DNA, 60 bp, Artificial
  Synthetic oligonucleotide
cccctctccaaggctgacccgagctgcgccatgcttggggtctatggaatagttgatggt

SEQ ID NO: 359444 - DNA, 50 bp, Artificial
  Synthetic oligonucleotide
cccctctccactataagatcatcatcgtcgacagaaatggcgcgatatgt

SEQ ID NO: 359445 - DNA, 52 bp, Artificial
  Synthetic oligonucleotide
cccctctccgaagcaggagcagaaagacgagggacagggactgtaccctccc

SEQ ID NO: 359446 - DNA, 50 bp, Artificial
  Synthetic oligonucleotide
cccctctccgggtataccccccaaacgataaagcggaaagctgttgtaag

SEQ ID NO: 359447 - DNA, 60 bp, Artificial
  Synthetic oligonucleotide
cccctctcgacccgggagctcagacacaggatcttccccactctgtatgccatcttccaa

SEQ ID NO: 359448 - DNA, 55 bp, Artificial
  Synthetic oligonucleotide
cccctctcgttgcagacccttatcccaacaaccaggggaccagacaggccagaag

SEQ ID NO: 359449 - DNA, 52 bp, Artificial
  Synthetic oligonucleotide
cccctctctcgaagcatatatatataccacataggctatgtggtctctaaga

SEQ ID NO: 359450 - DNA, 55 bp, Artificial
  Synthetic oligonucleotide
cccctctctgacttgtgttgagagaaccaaggatccaatctggcgataaatcgta

SEQ ID NO: 359451 - DNA, 53 bp, Artificial
  Synthetic oligonucleotide
cccctctgaccgttccccagactccgacgccgggtcttgttcttccatgcccc

SEQ ID NO: 359452 - DNA, 55 bp, Artificial
  Synthetic oligonucleotide
cccctctgataaacctccaacacatattgaatcttaccttgttgtccctgattct

SEQ ID NO: 359453 - DNA, 50 bp, Artificial
  Synthetic oligonucleotide
cccctctgcagacacgttcggaaaagttcggcctagcggctagctccgcc

SEQ ID NO: 359454 - DNA, 55 bp, Artificial
  Synthetic oligonucleotide
cccctctgccagcatggaatggaggacgaccaccatgaggtgttggtgtggagat

SEQ ID NO: 359455 - DNA, 55 bp, Artificial
  Synthetic oligonucleotide
cccctctgggcaagatgactgccaggtttggatctaccgtctctactcttgacgg

SEQ ID NO: 359456 - DNA, 55 bp, Artificial
  Synthetic oligonucleotide
cccctctggtagggaccttcacactgcgttcgtgagatcttctcacgcgagcgct

SEQ ID NO: 359457 - DNA, 51 bp, Artificial
  Synthetic oligonucleotide
cccctctgttttccttgagtggctcttggaagccttcaggcggtacacccc

SEQ ID NO: 359458 - DNA, 55 bp, Artificial
  Synthetic oligonucleotide
cccctcttcagatgggttgatgttaatactgtcaaactccaacttgggctccaaa

SEQ ID NO: 359459 - DNA, 54 bp, Artificial
  Synthetic oligonucleotide
cccctcttccaaaatgttaaagtcgaaaggtggtataatcccatcatggccgta

SEQ ID NO: 359460 - DNA, 52 bp, Artificial
  Synthetic oligonucleotide
cccctcttcgaggttatttggacagtcgagaaaaggcgttttattggactta

SEQ ID NO: 359461 - DNA, 56 bp, Artificial
  Synthetic oligonucleotide
cccctctttcgcgacttccgtgtctcctgccccaccacagacctccggtctgagtg

SEQ ID NO: 359462 - DNA, 55 bp, Artificial
  Synthetic oligonucleotide
cccctgaaatggcgagatgggctgatgtgaaatacggcaacaataaaggggccct

SEQ ID NO: 359463 - DNA, 55 bp, Artificial
  Synthetic oligonucleotide
cccctgaagggaaaggaacaggtttcttttctggcaacgacatagtaacagcagc

SEQ ID NO: 359464 - DNA, 60 bp, Artificial
  Synthetic oligonucleotide
cccctgaatgcggctaatcctaactgcggagcacacgctcacaagccagtgagtggtgtg

SEQ ID NO: 359465 - DNA, 55 bp, Artificial
  Synthetic oligonucleotide
cccctgaattaatcagacattgtatatggtttccgtccttgaaggattacgttgg

SEQ ID NO: 359466 - DNA, 55 bp, Artificial
  Synthetic oligonucleotide
cccctgacactgaacacatggacggatatcacggccagtttgcaatgatcatgga

SEQ ID NO: 359467 - DNA, 55 bp, Artificial
  Synthetic oligonucleotide
cccctgacagggggaaagaattcattcagcgattacatcagttgacacacttagg

SEQ ID NO: 359468 - DNA, 55 bp, Artificial
  Synthetic oligonucleotide
cccctgaccgctggctatccaatgctcgcatgacccactatcaggcaatgctcct

SEQ ID NO: 359469 - DNA, 55 bp, Artificial
  Synthetic oligonucleotide
cccctgacctaagtttacccatggcggcgctgtctctaagtacccatgagcgccc

SEQ ID NO: 359470 - DNA, 51 bp, Artificial
  Synthetic oligonucleotide
cccctgacgatgtttcgaacccctccggtaacgtgctgctctcctccgaat

SEQ ID NO: 359471 - DNA, 54 bp, Artificial
  Synthetic oligonucleotide
cccctgactagagaatatcttgagtcattagccatttcaacccatgcgtttgag

SEQ ID NO: 359472 - DNA, 51 bp, Artificial
  Synthetic oligonucleotide
cccctgactagttaaaacaacggtccaccaatccgctaaggtggaggtggt

SEQ ID NO: 359473 - DNA, 58 bp, Artificial
  Synthetic oligonucleotide
cccctgactcacaggggtatgcatccgttcgaaatgtaccatcggtgaatcctgttac

SEQ ID NO: 359474 - DNA, 55 bp, Artificial
  Synthetic oligonucleotide
cccctgactgccctggtgtagggactgggtgcactgcatgtggtctttatattga

SEQ ID NO: 359475 - DNA, 57 bp, Artificial
  Synthetic oligonucleotide
cccctgagaagtatttactcaagaaaggtcatcaaccgtctgagatcgtcaaccgta

SEQ ID NO: 359476 - DNA, 55 bp, Artificial
  Synthetic oligonucleotide
cccctgagagccccgtagacggacgaacggtgcggatcgatagatagcaccggag

SEQ ID NO: 359477 - DNA, 55 bp, Artificial
  Synthetic oligonucleotide
cccctgagatagctgaggtcatgaagctaataggtgtaaccggattcgcaaacta

SEQ ID NO: 359478 - DNA, 55 bp, Artificial
  Synthetic oligonucleotide
cccctgagcaccaagaccatgttctggcgcacttccccggagaagcttccccccg

SEQ ID NO: 359479 - DNA, 52 bp, Artificial
  Synthetic oligonucleotide
cccctgatataccaaatcaagttagtgagtgtgacatgaaagtatgggagct

SEQ ID NO: 359480 - DNA, 60 bp, Artificial
  Synthetic oligonucleotide
cccctgatgccgagctcatagaagccaacctcttatggaggcaggaaatgggcggtaaca

SEQ ID NO: 359481 - DNA, 60 bp, Artificial
  Synthetic oligonucleotide
cccctgatgccgagctcatagaggctaacctcctgtggagacaggcgatgggcggtaaca

SEQ ID NO: 359482 - DNA, 54 bp, Artificial
  Synthetic oligonucleotide
cccctgatggcgaccgtgggctgcgcctgttcgcgcgtatgggtcggctctgag

SEQ ID NO: 359483 - DNA, 60 bp, Artificial
  Synthetic oligonucleotide
cccctgatgtccagtccatccccgtgtctggtgaatggagactccggaacacctagcatc

SEQ ID NO: 359484 - DNA, 58 bp, Artificial
  Synthetic oligonucleotide
cccctgatgtgtctctctggtcatcgtaccgttaccaacccactaatgagcgccccac

SEQ ID NO: 359485 - DNA, 55 bp, Artificial
  Synthetic oligonucleotide
cccctgatgttattcaaagtttcctggcatatgtacctccatctcacgctataga

SEQ ID NO: 359486 - DNA, 55 bp, Artificial
  Synthetic oligonucleotide
cccctgattgtcctggtgtagggacaggctgcactgcttgcggtgtatatctgga

SEQ ID NO: 359487 - DNA, 55 bp, Artificial
  Synthetic oligonucleotide
cccctgcaacacccggactttgcagtggaacctcacttcatcaaagaaacttcac

SEQ ID NO: 359488 - DNA, 55 bp, Artificial
  Synthetic oligonucleotide
cccctgcaacctgaataaagcgcggttaacccttgatgaggaagagtacacactc

SEQ ID NO: 359489 - DNA, 55 bp, Artificial
  Synthetic oligonucleotide
cccctgcacgagaggacaaagtggtacgtgatgctcagataccagacggacgtct

SEQ ID NO: 359490 - DNA, 55 bp, Artificial
  Synthetic oligonucleotide
cccctgcacgcttggtgacatatgacaaccctgcctatgagggtgtgggtgatgc

SEQ ID NO: 359491 - DNA, 55 bp, Artificial
  Synthetic oligonucleotide
cccctgcatccgataggcccgaactatcacaaacggaaaagcgatagcccaaaac

SEQ ID NO: 359492 - DNA, 50 bp, Artificial
  Synthetic oligonucleotide
cccctgcattgttaaatgttacgcgcagagtgggcgaagcgcgcgggaac

SEQ ID NO: 359493 - DNA, 60 bp, Artificial
  Synthetic oligonucleotide
cccctgccagaaggtgctgttaacagaatagtgtgcatgaccaattgggcatcactcggt

SEQ ID NO: 359494 - DNA, 52 bp, Artificial
  Synthetic oligonucleotide
cccctgcccgggacgggacattctgtaatggattgggcttaatgatgccaaa

SEQ ID NO: 359495 - DNA, 52 bp, Artificial
  Synthetic oligonucleotide
cccctgcccgggacgggacatttgcatctataaatagaagcgccctcgctca

SEQ ID NO: 359496 - DNA, 50 bp, Artificial
  Synthetic oligonucleotide
cccctgccgacaagtcaccctgcttcaatgaagtcacatgggaaaatgcc

SEQ ID NO: 359497 - DNA, 55 bp, Artificial
  Synthetic oligonucleotide
cccctgccgccccgtatcagccagcctctgctcagtggtcggatctcctcaacta

SEQ ID NO: 359498 - DNA, 53 bp, Artificial
  Synthetic oligonucleotide
cccctgcctaacaaaactggctcgccagaggcgggggggcgtggtagacggta

SEQ ID NO: 359499 - DNA, 60 bp, Artificial
  Synthetic oligonucleotide
cccctgcctccgcggtgcattatgccaacaagtctgggatctatcatctcaccaatgact

SEQ ID NO: 359500 - DNA, 52 bp, Artificial
  Synthetic oligonucleotide
cccctgcctgactcgaccctcgaagtcgaataccaccttggtgtgccccacc

SEQ ID NO: 359501 - DNA, 54 bp, Artificial
  Synthetic oligonucleotide
cccctgcctgcttacccaagaacacaaaaattgtcggccctgggaaatttgaca

SEQ ID NO: 359502 - DNA, 52 bp, Artificial
  Synthetic oligonucleotide
cccctgcgaccctttaaatccagcctacgtgacctctgaaacccatgagcca

SEQ ID NO: 359503 - DNA, 60 bp, Artificial
  Synthetic oligonucleotide
cccctgcgattgcagcactccgtgagtctatacaacagacacttgtcgaatcctctcagt

SEQ ID NO: 359504 - DNA, 55 bp, Artificial
  Synthetic oligonucleotide
cccctgctacagccattgaggatcattacagatatattaattctatggccacacg

SEQ ID NO: 359505 - DNA, 59 bp, Artificial
  Synthetic oligonucleotide
cccctgctccacctgcggcactagttggtttcactggtaatctacttgcaccgtatcca

SEQ ID NO: 359506 - DNA, 51 bp, Artificial
  Synthetic oligonucleotide
cccctgctctaatcgcccctacatttatcacgattacgcagtttgtagggt

SEQ ID NO: 359507 - DNA, 52 bp, Artificial
  Synthetic oligonucleotide
cccctgctgctgtctacaacggagtggcagatactaccctgttccttcacca

SEQ ID NO: 359508 - DNA, 52 bp, Artificial
  Synthetic oligonucleotide
cccctgctgggacgggacatccgaatagtaatgggcttaatacataaatggg

SEQ ID NO: 359509 - DNA, 55 bp, Artificial
  Synthetic oligonucleotide
cccctgctggttttgcgatcatgaaatgtaatgataagacattcaatggaacagg

SEQ ID NO: 359510 - DNA, 55 bp, Artificial
  Synthetic oligonucleotide
cccctgctgtacagattgggcgctgttcagaacgaagttactctgacgcacccag

SEQ ID NO: 359511 - DNA, 51 bp, Artificial
  Synthetic oligonucleotide
cccctgcttggtgccggcatatataaggtgcctgtcgggctgagctttgat

SEQ ID NO: 359512 - DNA, 56 bp, Artificial
  Synthetic oligonucleotide
cccctggaaggcgtggttgcctcacctacgtgccctaggctttgaagcttccgaga

SEQ ID NO: 359513 - DNA, 55 bp, Artificial
  Synthetic oligonucleotide
cccctggaatcgggatatctggcaaaggaagtgtgagcaacacacagctcacaag

SEQ ID NO: 359514 - DNA, 53 bp, Artificial
  Synthetic oligonucleotide
cccctggacaatttactctatgtgggatatgcgccaggcgggaaagattatac

SEQ ID NO: 359515 - DNA, 58 bp, Artificial
  Synthetic oligonucleotide
cccctggatctagggaagcttcaggtagctggtgtagccctctaagtgggaattcagc

SEQ ID NO: 359516 - DNA, 55 bp, Artificial
  Synthetic oligonucleotide
cccctggcacctatcataccacttcgtacctcctcatccatgatggggaccgtgc

SEQ ID NO: 359517 - DNA, 56 bp, Artificial
  Synthetic oligonucleotide
cccctggcactagtagcatttaacccctggcactagtagcatttaacccctggcac

SEQ ID NO: 359518 - DNA, 60 bp, Artificial
  Synthetic oligonucleotide
cccctggcatcccatcacacggtgggtcatcatccctcacgtgctaacctgcgcgtttag

SEQ ID NO: 359519 - DNA, 53 bp, Artificial
  Synthetic oligonucleotide
cccctggcccggactaccgtattaagcctgaccccgacggcctccgcagagta

SEQ ID NO: 359520 - DNA, 54 bp, Artificial
  Synthetic oligonucleotide
cccctggccgagaatgtgaattctcaacgcagcaccctgttgacttgcgtattg

SEQ ID NO: 359521 - DNA, 55 bp, Artificial
  Synthetic oligonucleotide
cccctggcgccactagactttgccactgaatcttccactgagatacccattacac

SEQ ID NO: 359522 - DNA, 52 bp, Artificial
  Synthetic oligonucleotide
cccctggcgctacctgcttctgcgggaagtgctcctgccagcgtgagaagac

SEQ ID NO: 359523 - DNA, 55 bp, Artificial
  Synthetic oligonucleotide
cccctggctcgtagccaccaccaagagcatttaccgtagaccatccgtacataaa

SEQ ID NO: 359524 - DNA, 53 bp, Artificial
  Synthetic oligonucleotide
cccctgggaagagacccaaagtggccataagaaagacggggcagtcggcggga

SEQ ID NO: 359525 - DNA, 54 bp, Artificial
  Synthetic oligonucleotide
cccctgggactgaagttcaagacggtccgccccgtcgccttgccacgcgcgtta

SEQ ID NO: 359526 - DNA, 57 bp, Artificial
  Synthetic oligonucleotide
cccctggggcttgggagccagcttacctcggctctaaagatgagagggtggatggcc

SEQ ID NO: 359527 - DNA, 55 bp, Artificial
  Synthetic oligonucleotide
cccctggtagatgaccaaatccgggaataccggacagcggcccgtgccgcatatg

SEQ ID NO: 359528 - DNA, 60 bp, Artificial
  Synthetic oligonucleotide
cccctggtcccctgcgattcaaagcgatttatccaaagcactcagccgatgatgacatga

SEQ ID NO: 359529 - DNA, 55 bp, Artificial
  Synthetic oligonucleotide
cccctggtcctgtagcagtacaaaatatgtcgtatccctcctccacatcgtttgt

SEQ ID NO: 359530 - DNA, 51 bp, Artificial
  Synthetic oligonucleotide
cccctggtgccctctcacgcgccctcctctggtgctcgctttccacgcgct

SEQ ID NO: 359531 - DNA, 54 bp, Artificial
  Synthetic oligonucleotide
cccctggtggtcctatacctgaaagcgttaccagttacgcgtggcaaacctcca

SEQ ID NO: 359532 - DNA, 55 bp, Artificial
  Synthetic oligonucleotide
cccctggttctgggccaattttggttaacatcatgggatcatggataaaacccca

SEQ ID NO: 359533 - DNA, 52 bp, Artificial
  Synthetic oligonucleotide
cccctggttgatgatcagatccgggattaccggaatgctgcaagagccgcct

SEQ ID NO: 359534 - DNA, 54 bp, Artificial
  Synthetic oligonucleotide
cccctggttttataaccgttcagtgctacacgagcgacgatttgttgacaggcg

SEQ ID NO: 359535 - DNA, 53 bp, Artificial
  Synthetic oligonucleotide
cccctgtaaatattataggtagaaatgtacttaagaagttaggatgtacttta

SEQ ID NO: 359536 - DNA, 51 bp, Artificial
  Synthetic oligonucleotide
cccctgtaaccggttccctgcacggccgtcccgattaaccgattccccgca

SEQ ID NO: 359537 - DNA, 55 bp, Artificial
  Synthetic oligonucleotide
cccctgtatctgttgatactgtagggcccctagactcttctattgtgtctatgat

SEQ ID NO: 359538 - DNA, 56 bp, Artificial
  Synthetic oligonucleotide
cccctgtatgtctacggtgccgtttcagtgacctgcgtgtggggttccgtgtcttg

SEQ ID NO: 359539 - DNA, 55 bp, Artificial
  Synthetic oligonucleotide
cccctgtcaaggggttgacagcgcctaattttgtgtacgagtctccgtctctgca

SEQ ID NO: 359540 - DNA, 56 bp, Artificial
  Synthetic oligonucleotide
cccctgtccccgaccgctggcctaccgagcgctcacgccatacttggcgcttcccc

SEQ ID NO: 359541 - DNA, 55 bp, Artificial
  Synthetic oligonucleotide
cccctgtccccgcacttacattgaaaggttgagaatacccaactacacatccttc

SEQ ID NO: 359542 - DNA, 52 bp, Artificial
  Synthetic oligonucleotide
cccctgtctacacgaaagcaacccgctccaaccttctaatttcctctcgcat

SEQ ID NO: 359543 - DNA, 55 bp, Artificial
  Synthetic oligonucleotide
cccctgtctccagaactgctgacatttcagaaacaaacctagataatgcagccta

SEQ ID NO: 359544 - DNA, 55 bp, Artificial
  Synthetic oligonucleotide
cccctgtgagcagttggagcttgagaaatattacaaatcgttcaaactggacacg

SEQ ID NO: 359545 - DNA, 60 bp, Artificial
  Synthetic oligonucleotide
cccctgtgcgtgaatccatggcctgtgcagttgagatgctggtaaatggagcagccgcag

SEQ ID NO: 359546 - DNA, 59 bp, Artificial
  Synthetic oligonucleotide
cccctgtgcgtgaatccatggttagcacaacctagagcgacgtaaatagaacaaccgca

SEQ ID NO: 359547 - DNA, 60 bp, Artificial
  Synthetic oligonucleotide
cccctgtggacctggtggcctgacctcaccccagatttatgcatgttggcccaccatgga

SEQ ID NO: 359548 - DNA, 55 bp, Artificial
  Synthetic oligonucleotide
cccctgtggttattgaacctgtgggcgctacggatccatctattgttacccttgt

SEQ ID NO: 359549 - DNA, 55 bp, Artificial
  Synthetic oligonucleotide
cccctgtgttccttgatggaacaatgagcttgggtgctgagattttgcccgactc

SEQ ID NO: 359550 - DNA, 56 bp, Artificial
  Synthetic oligonucleotide
cccctgttaattggggttctatatatacttagcaccaaatggcataatggtaatac

SEQ ID NO: 359551 - DNA, 55 bp, Artificial
  Synthetic oligonucleotide
cccctgttcacggtattagagcgggggcgcgtattttgcgcacgtatgcggttaa

SEQ ID NO: 359552 - DNA, 55 bp, Artificial
  Synthetic oligonucleotide
cccctgttctttcgtgagaataaacgaggcctctctcgtcgtagaattctgccca

SEQ ID NO: 359553 - DNA, 57 bp, Artificial
  Synthetic oligonucleotide
cccctgttgacacaaccttccacggcctccgctatgtggccccccagcattggaaga

SEQ ID NO: 359554 - DNA, 52 bp, Artificial
  Synthetic oligonucleotide
cccctgttgatccacaggcggagggtggtatccatgtgaattcccctacttc

SEQ ID NO: 359555 - DNA, 53 bp, Artificial
  Synthetic oligonucleotide
cccctgttgtgcgaacccctgaccacgtgaagcacggtgttctcctggaaagc

SEQ ID NO: 359556 - DNA, 57 bp, Artificial
  Synthetic oligonucleotide
cccctgtttctttggacatattcgtgcacactccacccttcctggtgccctcgtaca

SEQ ID NO: 359557 - DNA, 59 bp, Artificial
  Synthetic oligonucleotide
cccctgtttggtcaggcatgctaaagttaggcttggcattgttccgaactgattgttga

SEQ ID NO: 359558 - DNA, 59 bp, Artificial
  Synthetic oligonucleotide
ccccttaagggtcactccattgagattggtctgatttgattgcatacgccaagacgaaa

SEQ ID NO: 359559 - DNA, 55 bp, Artificial
  Synthetic oligonucleotide
ccccttaatcatggttattacgattgtggggttgttcgatgttccttgagactgt

SEQ ID NO: 359560 - DNA, 53 bp, Artificial
  Synthetic oligonucleotide
ccccttaattcaacgtctagcccacgatacgggcaccctatccaatttgtgtc

SEQ ID NO: 359561 - DNA, 55 bp, Artificial
  Synthetic oligonucleotide
ccccttacaagtatttcagtgacagtacaaattgctttgcatagtgaaatgagtg

SEQ ID NO: 359562 - DNA, 55 bp, Artificial
  Synthetic oligonucleotide
ccccttacagatggacaataccttatttgctaccaccttattaggggagatcttg

SEQ ID NO: 359563 - DNA, 52 bp, Artificial
  Synthetic oligonucleotide
ccccttaccgattttgaccagggctggggccctatctctcacgccaacgtaa

SEQ ID NO: 359564 - DNA, 52 bp, Artificial
  Synthetic oligonucleotide
ccccttaccgattttgaccaggggtggggccctattagtcatgccaacggaa

SEQ ID NO: 359565 - DNA, 51 bp, Artificial
  Synthetic oligonucleotide
ccccttagcactagtggacatcttgatgttcaccacgtcagcctatctggt

SEQ ID NO: 359566 - DNA, 56 bp, Artificial
  Synthetic oligonucleotide
ccccttagcgttcgaggggggcgtgacgccatcattttactcgcgtgtgttatgca

SEQ ID NO: 359567 - DNA, 56 bp, Artificial
  Synthetic oligonucleotide
ccccttagctattttgaccagggctggggccctatcagtcacgctgacgagggaag

SEQ ID NO: 359568 - DNA, 58 bp, Artificial
  Synthetic oligonucleotide
ccccttagtcccatgatactgcagggctacacgctctccagtgttggtccgccgtgag

SEQ ID NO: 359569 - DNA, 51 bp, Artificial
  Synthetic oligonucleotide
ccccttagtgtgctttatattatagtttatgcgtagcagggagaaccatta

SEQ ID NO: 359570 - DNA, 56 bp, Artificial
  Synthetic oligonucleotide
ccccttataggagcggccgaccaattcattggggacctcaccaagaccaactcagc

SEQ ID NO: 359571 - DNA, 55 bp, Artificial
  Synthetic oligonucleotide
ccccttatctagtaaaattatggtatcagctagaaacagagcccataccaggagc

SEQ ID NO: 359572 - DNA, 55 bp, Artificial
  Synthetic oligonucleotide
ccccttatgggaaacttactacattcaatcattcagagggttctaccatgactgc

SEQ ID NO: 359573 - DNA, 55 bp, Artificial
  Synthetic oligonucleotide
ccccttatttcaacagttggaacctgcagctataggtgacacttcaacattcgag

SEQ ID NO: 359574 - DNA, 57 bp, Artificial
  Synthetic oligonucleotide
ccccttcaaaggatgtccgtgtttcttcgtggtggccatctactcagcggagtggag

SEQ ID NO: 359575 - DNA, 55 bp, Artificial
  Synthetic oligonucleotide
ccccttcaaccaatagtggaaaacgcaaagcccactttgcgccagattatggctc

SEQ ID NO: 359576 - DNA, 56 bp, Artificial
  Synthetic oligonucleotide
ccccttcaaggcgagtatcacagctcccatccggaatcccagaacaagcggctctc

SEQ ID NO: 359577 - DNA, 54 bp, Artificial
  Synthetic oligonucleotide
ccccttcaattataagattacacctgctaacaagactgttgaatttcccgaaat

SEQ ID NO: 359578 - DNA, 55 bp, Artificial
  Synthetic oligonucleotide
ccccttcactagagaacgtaaccaccgcagacgtaattaaacgttgcgccatgat

SEQ ID NO: 359579 - DNA, 55 bp, Artificial
  Synthetic oligonucleotide
ccccttcagcgaacagaagagtctatccccagatgagaggaccgtagccgagggg

SEQ ID NO: 359580 - DNA, 56 bp, Artificial
  Synthetic oligonucleotide
ccccttcagcgaacagaagagtctctccggggtaggagtaagaccatagcgatggg

SEQ ID NO: 359581 - DNA, 55 bp, Artificial
  Synthetic oligonucleotide
ccccttcatcaagacaccaggtctttcctccttaaggctagccccggcgtgtgaa

SEQ ID NO: 359582 - DNA, 57 bp, Artificial
  Synthetic oligonucleotide
ccccttcattgaaagagcggttctacataagacacgtgttcaaacgtgtattgtctg

SEQ ID NO: 359583 - DNA, 53 bp, Artificial
  Synthetic oligonucleotide
ccccttccaaaatgaccaagagagggtggcttggagcgcggaggaccgtgggg

SEQ ID NO: 359584 - DNA, 59 bp, Artificial
  Synthetic oligonucleotide
ccccttccaagacgcagagacggtgggctatatctgtgtaatatgcccctacaccgagc

SEQ ID NO: 359585 - DNA, 55 bp, Artificial
  Synthetic oligonucleotide
ccccttccactagtttagatgagacatatcactatttgcagtctcgggctattac

SEQ ID NO: 359586 - DNA, 55 bp, Artificial
  Synthetic oligonucleotide
ccccttccactcgaattaaacgacatccggcgtttgatgatcctccatacttggc

SEQ ID NO: 359587 - DNA, 59 bp, Artificial
  Synthetic oligonucleotide
ccccttccccgagtgccgctggctgggagacactgttgccgagtcagaggcggtcgaga

SEQ ID NO: 359588 - DNA, 54 bp, Artificial
  Synthetic oligonucleotide
ccccttcccgccatcagagggaactcgacagacccgaaagaatcgaagaaggag

SEQ ID NO: 359589 - DNA, 57 bp, Artificial
  Synthetic oligonucleotide
ccccttcccgcgccgaactacacgttcgcgctgtggagggtgtcagcagaggaatac

SEQ ID NO: 359590 - DNA, 55 bp, Artificial
  Synthetic oligonucleotide
ccccttcccgtgactctaaagcccttctaaagatgcgtgactacgggctggagga

SEQ ID NO: 359591 - DNA, 55 bp, Artificial
  Synthetic oligonucleotide
ccccttccttgacaaaatgatatcaactgttgcaaagagagtaggaagagacccc

SEQ ID NO: 359592 - DNA, 53 bp, Artificial
  Synthetic oligonucleotide
ccccttcggtattcttagaacgcctaatggaggcctatagaaggtacactccg

SEQ ID NO: 359593 - DNA, 55 bp, Artificial
  Synthetic oligonucleotide
ccccttctatttgaagctgcctaagcatgacccttgggcgtggcctaacttcgat

SEQ ID NO: 359594 - DNA, 55 bp, Artificial
  Synthetic oligonucleotide
ccccttctgaggccagctcctcagctagtcagctgtccgctccatctctcaaggc

SEQ ID NO: 359595 - DNA, 55 bp, Artificial
  Synthetic oligonucleotide
ccccttctgtcaaagaaggaggcagtacacgtgctcacccataagccgatactca

SEQ ID NO: 359596 - DNA, 60 bp, Artificial
  Synthetic oligonucleotide
ccccttcttcatcgcgtgagtgcgatcttcgtctcgctccacccacagagagtaatgctc

SEQ ID NO: 359597 - DNA, 55 bp, Artificial
  Synthetic oligonucleotide
ccccttcttcgacatctggaacgcggccaactggaaagcgaacttcgacaacgcg

SEQ ID NO: 359598 - DNA, 53 bp, Artificial
  Synthetic oligonucleotide
ccccttctttctgctgcttatttctcttttctgcgtttcgcgctccctgaaaa

SEQ ID NO: 359599 - DNA, 53 bp, Artificial
  Synthetic oligonucleotide
ccccttgaacatcattggaaccccaacctgtattcccaagctgtagactatgc

SEQ ID NO: 359600 - DNA, 52 bp, Artificial
  Synthetic oligonucleotide
ccccttgagggggaaccgggggaccccgatctcagcgatgggtcttggtcta

SEQ ID NO: 359601 - DNA, 52 bp, Artificial
  Synthetic oligonucleotide
ccccttgatcatgtagtaatcgtaagggtagtggtagaacggtgttgagccg

SEQ ID NO: 359602 - DNA, 55 bp, Artificial
  Synthetic oligonucleotide
ccccttgatggctaaaatatattcgtggtcatttcacgtcggattcaggaaacag

SEQ ID NO: 359603 - DNA, 55 bp, Artificial
  Synthetic oligonucleotide
ccccttgcaactgccataaatgggattcccgctggatgtgaagatgcggagcttg

SEQ ID NO: 359604 - DNA, 56 bp, Artificial
  Synthetic oligonucleotide
ccccttgcaagcccttgctacgggaggaggtatctttcagagtaggactccacgag

SEQ ID NO: 359605 - DNA, 56 bp, Artificial
  Synthetic oligonucleotide
ccccttgcaagcccttgttacgagacgaggtgtcgttcagagtaggactacacgat

SEQ ID NO: 359606 - DNA, 55 bp, Artificial
  Synthetic oligonucleotide
ccccttgcaagcctttgctgcgagaagaggtgtcattcagagtggggctccacga

SEQ ID NO: 359607 - DNA, 52 bp, Artificial
  Synthetic oligonucleotide
ccccttgcctgtcattaagcctagtgcctctattataccgtgttattgtgga

SEQ ID NO: 359608 - DNA, 55 bp, Artificial
  Synthetic oligonucleotide
ccccttgctcggcgctggtatatacaaggtccctgttgggttgagctttgatgct

SEQ ID NO: 359609 - DNA, 54 bp, Artificial
  Synthetic oligonucleotide
ccccttgctttctcatggatgcttctccgcgagattgcgttattgtctactgac

SEQ ID NO: 359610 - DNA, 55 bp, Artificial
  Synthetic oligonucleotide
ccccttggacaagtagtttctctcgttgacagtgccattaaatgtcacattcccg

SEQ ID NO: 359611 - DNA, 55 bp, Artificial
  Synthetic oligonucleotide
ccccttgggagtggagatccggggagcagatgcagctcacaggtgtatcaggttt

SEQ ID NO: 359612 - DNA, 50 bp, Artificial
  Synthetic oligonucleotide
ccccttggggttctcgtatgacactcgctgctttgactcaactgtcactg

SEQ ID NO: 359613 - DNA, 58 bp, Artificial
  Synthetic oligonucleotide
ccccttgggtagagaaggagtcagctttgtctattgactacaaaactgctcttggagc

SEQ ID NO: 359614 - DNA, 52 bp, Artificial
  Synthetic oligonucleotide
ccccttgggtttcctacctaagttaattgggttgatcaaacctctcaatctg

SEQ ID NO: 359615 - DNA, 51 bp, Artificial
  Synthetic oligonucleotide
ccccttggtatctacgcatccacctactccttgttcaggatgacaaggtgt

SEQ ID NO: 359616 - DNA, 55 bp, Artificial
  Synthetic oligonucleotide
ccccttggtccgagcttggctacagtttctgtagtcgctcccagggaagtctccg

SEQ ID NO: 359617 - DNA, 55 bp, Artificial
  Synthetic oligonucleotide
ccccttggtgaaagggatatagttaaagctaagctaccttcactcttccagcacc

SEQ ID NO: 359618 - DNA, 53 bp, Artificial
  Synthetic oligonucleotide
ccccttggttcactaccctactatcaaccatcgccgggcccctattactcctc

SEQ ID NO: 359619 - DNA, 55 bp, Artificial
  Synthetic oligonucleotide
ccccttgtcccgaaactccaatcatgagatgtactgggtgagtggggccgctggt

SEQ ID NO: 359620 - DNA, 53 bp, Artificial
  Synthetic oligonucleotide
ccccttgtcccgctctggacagataatgctcatggcgttgggagtgttcctat

SEQ ID NO: 359621 - DNA, 60 bp, Artificial
  Synthetic oligonucleotide
ccccttgtccctctctggacagataatacacacggcgtcgggagtgtacctatgcataca

SEQ ID NO: 359622 - DNA, 55 bp, Artificial
  Synthetic oligonucleotide
ccccttgtgtcatcggaggggcgggcaacaacactctgcactgtcccaccgattg

SEQ ID NO: 359623 - DNA, 53 bp, Artificial
  Synthetic oligonucleotide
ccccttgtgtgactcgacccacgaggggtaacaacaccctggtgtgccctacc

SEQ ID NO: 359624 - DNA, 55 bp, Artificial
  Synthetic oligonucleotide
ccccttgttcagtcatgcaggagattgtcacagctggcacagatccaaactggtt

SEQ ID NO: 359625 - DNA, 56 bp, Artificial
  Synthetic oligonucleotide
ccccttgttgagagcgggggcctctaacttcgactggcgttcaactaactgccgca

SEQ ID NO: 359626 - DNA, 56 bp, Artificial
  Synthetic oligonucleotide
cccctttaaacgtggtccccgcgcactacgtatgtcggccaatcatgctgtagcgt

SEQ ID NO: 359627 - DNA, 50 bp, Artificial
  Synthetic oligonucleotide
cccctttaatttgaacgggcttcccgtactgggggttggattgccagtcc

SEQ ID NO: 359628 - DNA, 53 bp, Artificial
  Synthetic oligonucleotide
cccctttagcgacatttaggtgggtagtgttttaaactctaagggatgagtga

SEQ ID NO: 359629 - DNA, 54 bp, Artificial
  Synthetic oligonucleotide
cccctttataggcatggagaccaggccacgccacaaccggtggtgcaggtcccc

SEQ ID NO: 359630 - DNA, 53 bp, Artificial
  Synthetic oligonucleotide
cccctttcatacgttagtaagttcgatgatacgggttccacaatggtcgttaa

SEQ ID NO: 359631 - DNA, 54 bp, Artificial
  Synthetic oligonucleotide
cccctttccacaggcgactgtcgtacgaatcgttttacgtaccaactgggctgc

SEQ ID NO: 359632 - DNA, 53 bp, Artificial
  Synthetic oligonucleotide
cccctttccgaggtggtggagaccgatttgggtgcaggggctggtggcctggg

SEQ ID NO: 359633 - DNA, 50 bp, Artificial
  Synthetic oligonucleotide
cccctttccttacccacaaactttcccgacggatccggcgacaccctgtc

SEQ ID NO: 359634 - DNA, 51 bp, Artificial
  Synthetic oligonucleotide
cccctttcgcctttgagatcacccacaccccacccgttcctcccgccaccg

SEQ ID NO: 359635 - DNA, 50 bp, Artificial
  Synthetic oligonucleotide
cccctttctcgtaactccaaccatgagatgtactgggtcagtggagcctc

SEQ ID NO: 359636 - DNA, 56 bp, Artificial
  Synthetic oligonucleotide
cccctttggttgtgaaggtccttgtaaagtccagtcgtatgagcagcgtgacgacg

SEQ ID NO: 359637 - DNA, 51 bp, Artificial
  Synthetic oligonucleotide
cccctttgtcaaggcgtcgagtctttctcccttaaggctagtcccatcagt

SEQ ID NO: 359638 - DNA, 60 bp, Artificial
  Synthetic oligonucleotide
cccctttgtcaggatgatacatcaaggccttccttctataggctgctttgattttctcat

SEQ ID NO: 359639 - DNA, 50 bp, Artificial
  Synthetic oligonucleotide
cccctttgttttagtatccccatcaaaattaaacgcgttagaatgcgatc

SEQ ID NO: 359640 - DNA, 52 bp, Artificial
  Synthetic oligonucleotide
ccccttttataatacgtggcttcccgtatttgaggtttgtctgccactcctt

SEQ ID NO: 359641 - DNA, 53 bp, Artificial
  Synthetic oligonucleotide
ccccttttctgagaatggcttttggagccgctttaagaaaggccacctccagg

SEQ ID NO: 359642 - DNA, 55 bp, Artificial
  Synthetic oligonucleotide
ccccttttggtctttctaagtgcccgctgcacctgtgccacttggttgaagtcaa

SEQ ID NO: 359643 - DNA, 53 bp, Artificial
  Synthetic oligonucleotide
ccccttttgttgctggaatcctaaagttctaagaatccctgctcttttctcta

SEQ ID NO: 359644 - DNA, 55 bp, Artificial
  Synthetic oligonucleotide
cccgaaaatactgacatgaaagccgcgaaagcatacgttgatatgcttcgtgact

SEQ ID NO: 359645 - DNA, 54 bp, Artificial
  Synthetic oligonucleotide
cccgaaaccgtacacggtcttaggtgtatgctagccgtaaaatattgtcagtta

SEQ ID NO: 359646 - DNA, 55 bp, Artificial
  Synthetic oligonucleotide
cccgaaaccgtctaacttatcatttgctagttgtaataagttttcgcatatggtc

SEQ ID NO: 359647 - DNA, 52 bp, Artificial
  Synthetic oligonucleotide
cccgaaaccgttcacggttttaggtgtatgctagcagttaaatacctgcggt

SEQ ID NO: 359648 - DNA, 55 bp, Artificial
  Synthetic oligonucleotide
cccgaaaccttatccatcctaaacactatggatcctgagatccttgaggagtggc

SEQ ID NO: 359649 - DNA, 55 bp, Artificial
  Synthetic oligonucleotide
cccgaaacgcgcgtggagttgctaacctcttcacaccgggcgccaagcaggacat

SEQ ID NO: 359650 - DNA, 50 bp, Artificial
  Synthetic oligonucleotide
cccgaaacggtgagccacgacgactccttcctccgccatggtggccacgc

SEQ ID NO: 359651 - DNA, 55 bp, Artificial
  Synthetic oligonucleotide
cccgaaactggattccaaattgatccccgcatcgtccgcatcctacgcaacaagt

SEQ ID NO: 359652 - DNA, 60 bp, Artificial
  Synthetic oligonucleotide
cccgaaagagcagcatacagcgcaagcattatcatctcaatatcagttcttcggaacaaa

SEQ ID NO: 359653 - DNA, 55 bp, Artificial
  Synthetic oligonucleotide
cccgaaagagtctgagtacccaaccttcgacctctagaggattcgaggattcgag

SEQ ID NO: 359654 - DNA, 59 bp, Artificial
  Synthetic oligonucleotide
cccgaaaggatcgccctctacaatcagattgccgtagactgcggagcccagttttcagc

SEQ ID NO: 359655 - DNA, 55 bp, Artificial
  Synthetic oligonucleotide
cccgaaagggcagagcaccagattatcctaccagagtcacatctatcctctccat

SEQ ID NO: 359656 - DNA, 60 bp, Artificial
  Synthetic oligonucleotide
cccgaaataatcattgacccagtcttgcatctcgacaggaacgttagtgaacgatgagag

SEQ ID NO: 359657 - DNA, 60 bp, Artificial
  Synthetic oligonucleotide
cccgaacacatttgctacccagtgttctgcataatcccacaaagccagatgcaatggaac

SEQ ID NO: 359658 - DNA, 60 bp, Artificial
  Synthetic oligonucleotide
cccgaacagggacctggaagagtgagagtcttcaggagcacagctgagtgaaggcagtaa

SEQ ID NO: 359659 - DNA, 58 bp, Artificial
  Synthetic oligonucleotide
cccgaacattgcacccccaaccatactgctctcaggcaagctattttgtgctggggtg

SEQ ID NO: 359660 - DNA, 52 bp, Artificial
  Synthetic oligonucleotide
cccgaaccagcacccaagagcgatccccgaagggcccccgaaccgcaaaaga

SEQ ID NO: 359661 - DNA, 55 bp, Artificial
  Synthetic oligonucleotide
cccgaacgcagcggtccttcacgtcttgttaatgcgttgatagatggaaagcttg

SEQ ID NO: 359662 - DNA, 55 bp, Artificial
  Synthetic oligonucleotide
cccgaacgcccatcggatgcgcaattttctcgcaaacgcaccacaggcaggcagc

SEQ ID NO: 359663 - DNA, 57 bp, Artificial
  Synthetic oligonucleotide
cccgaacggattgcggtacaacggtgaagtttttcactgtcatcttcaatcgcgcga

SEQ ID NO: 359664 - DNA, 55 bp, Artificial
  Synthetic oligonucleotide
cccgaactggaagcctagagacgcaccagcaatataccccattgtagcatactgg

SEQ ID NO: 359665 - DNA, 57 bp, Artificial
  Synthetic oligonucleotide
cccgaacttaattgtcagtggaggaagatccagagtgctttctccgaaactgaagac

SEQ ID NO: 359666 - DNA, 54 bp, Artificial
  Synthetic oligonucleotide
cccgaagaagatcagaaagcgcgcgaggccttccggcgatatcaggaagaaagg

SEQ ID NO: 359667 - DNA, 51 bp, Artificial
  Synthetic oligonucleotide
cccgaagacggcagaccccgtctacgggaaagtgttcaacccaccccgcaa

SEQ ID NO: 359668 - DNA, 55 bp, Artificial
  Synthetic oligonucleotide
cccgaagatacctagcatagctccaaaattggagtcatgtgaaggtggttgttcc

SEQ ID NO: 359669 - DNA, 59 bp, Artificial
  Synthetic oligonucleotide
cccgaagatcgtcactaaccacgtgactcccgcaggccaaccacagtgtacgtgattca

SEQ ID NO: 359670 - DNA, 56 bp, Artificial
  Synthetic oligonucleotide
cccgaagatttatatacatcaatgttaagactagctagaaatacaagttcagggtt

SEQ ID NO: 359671 - DNA, 54 bp, Artificial
  Synthetic oligonucleotide
cccgaaggagtctctgcgagggttttggaagaaacactccggtgagcccggcac

SEQ ID NO: 359672 - DNA, 55 bp, Artificial
  Synthetic oligonucleotide
cccgaagggctacttccagcactggcgtctcgcctgctgatgtgggatcaggagt

SEQ ID NO: 359673 - DNA, 55 bp, Artificial
  Synthetic oligonucleotide
cccgaaggttctgaaccgtggtcactagttacagcgctgtgcgtgctttcgaatg

SEQ ID NO: 359674 - DNA, 55 bp, Artificial
  Synthetic oligonucleotide
cccgaagtccgccactaaccacgtgactcccgcaggccaacccagtactatgtcg

SEQ ID NO: 359675 - DNA, 52 bp, Artificial
  Synthetic oligonucleotide
cccgaagtgggttagagttcggagcacaagggccgtcagggatgtaccccct

SEQ ID NO: 359676 - DNA, 54 bp, Artificial
  Synthetic oligonucleotide
cccgaagtgggtttgaaatcctattgatagaagacggttggaccaaaacaagca

SEQ ID NO: 359677 - DNA, 55 bp, Artificial
  Synthetic oligonucleotide
cccgaagttctgcagactcgtccttcaagaacacaccgaagtgatggagattcct

SEQ ID NO: 359678 - DNA, 51 bp, Artificial
  Synthetic oligonucleotide
cccgaatagtctcgataaaagacgaaactcagggtgaagtttacggtaagt

SEQ ID NO: 359679 - DNA, 55 bp, Artificial
  Synthetic oligonucleotide
cccgaatctaccaggtgttcacacatcaaggtaaacgcatgcggatcggacatct

SEQ ID NO: 359680 - DNA, 55 bp, Artificial
  Synthetic oligonucleotide
cccgaatgacattaagagcttcggacttaccgccgctgtcaagcgctttggcgta

SEQ ID NO: 359681 - DNA, 59 bp, Artificial
  Synthetic oligonucleotide
cccgaatgaggccatgaacgagggcatgtggcgcgtaatgactgaccagggaggggtgt

SEQ ID NO: 359682 - DNA, 51 bp, Artificial
  Synthetic oligonucleotide
cccgaatggggcgcccgaggcagcattggacaacaccaccaatccaacggc

SEQ ID NO: 359683 - DNA, 55 bp, Artificial
  Synthetic oligonucleotide
cccgaatgtgcgcactggtgtgaggaccatcactaccggcggggcaatcacctac

SEQ ID NO: 359684 - DNA, 55 bp, Artificial
  Synthetic oligonucleotide
cccgaattacaggcctcaacagttatgtcaacctgtactagaaaatctggtagat

SEQ ID NO: 359685 - DNA, 60 bp, Artificial
  Synthetic oligonucleotide
cccgaattctgtatacccttctatgattatgtcgtggctaatcatggaagtttcttgcaa

SEQ ID NO: 359686 - DNA, 55 bp, Artificial
  Synthetic oligonucleotide
cccgaattgtaagactagaaacgcggcggatgtggcattatcccgattacgtaaa

SEQ ID NO: 359687 - DNA, 54 bp, Artificial
  Synthetic oligonucleotide
cccgaattgtgaattttacggacaaaggacgactgaacagatagttacggccca

SEQ ID NO: 359688 - DNA, 55 bp, Artificial
  Synthetic oligonucleotide
cccgacaagggctgcgcaagaattgagagacgagactcctggcacgcactcgaca

SEQ ID NO: 359689 - DNA, 51 bp, Artificial
  Synthetic oligonucleotide
cccgacaccaaaggaaagcgcggagggaaagtggtggcgggatcacaatat

SEQ ID NO: 359690 - DNA, 55 bp, Artificial
  Synthetic oligonucleotide
cccgacacgaagaccccattgccgttcctcccgcagtataggcaagccaccgtga

SEQ ID NO: 359691 - DNA, 55 bp, Artificial
  Synthetic oligonucleotide
cccgacagggcctatgctccgtcatgttgagcactgtggcacggagtctggcgat

SEQ ID NO: 359692 - DNA, 55 bp, Artificial
  Synthetic oligonucleotide
cccgacaggttaacggatcagtgctcagcagaatatgtcttactgctcgccaacg

SEQ ID NO: 359693 - DNA, 52 bp, Artificial
  Synthetic oligonucleotide
cccgacagtttcccttgcgtaccccgttattcggacgacatatcccatttcc

SEQ ID NO: 359694 - DNA, 55 bp, Artificial
  Synthetic oligonucleotide
cccgacatatggaagcaactttctagatatagtagggtccaagatggactccact

SEQ ID NO: 359695 - DNA, 60 bp, Artificial
  Synthetic oligonucleotide
cccgacatcatcttgacgaggaagtgtcggaaccccatgctgaagcatgctcgggaactc

SEQ ID NO: 359696 - DNA, 55 bp, Artificial
  Synthetic oligonucleotide
cccgacatgggcgcctctactgtgtcctgggtcaccaaggtggaccctctgagat

SEQ ID NO: 359697 - DNA, 60 bp, Artificial
  Synthetic oligonucleotide
cccgacatgtcaatgccacaaaacctatgcctagatcaagggccatacagctgtacctat

SEQ ID NO: 359698 - DNA, 55 bp, Artificial
  Synthetic oligonucleotide
cccgaccaaaccagcgccaaccgttaccaattgctttagagccagtatgccacgt

SEQ ID NO: 359699 - DNA, 56 bp, Artificial
  Synthetic oligonucleotide
cccgaccagatacttcttctaatagattctacaccttagctagtaaggaatgggac

SEQ ID NO: 359700 - DNA, 55 bp, Artificial
  Synthetic oligonucleotide
cccgaccagttattctggttttgctgatctcactcgtgggacctggggtcgcctt

SEQ ID NO: 359701 - DNA, 60 bp, Artificial
  Synthetic oligonucleotide
cccgaccatattgccctaagcacgtgagtcttggcatcagacagggttgggcttttggca

SEQ ID NO: 359702 - DNA, 51 bp, Artificial
  Synthetic oligonucleotide
cccgacccagagaacgtacttgcgtacgtcccctacgaccaggaacccttg

SEQ ID NO: 359703 - DNA, 55 bp, Artificial
  Synthetic oligonucleotide
cccgaccctgaagtgcaaaccctgggtagctatgaatatgaacccgatgaacccg

SEQ ID NO: 359704 - DNA, 53 bp, Artificial
  Synthetic oligonucleotide
cccgaccctggactccgaccccaaaacatctacaccatgtggggaagctccgt

SEQ ID NO: 359705 - DNA, 51 bp, Artificial
  Synthetic oligonucleotide
cccgaccgaatgacccaactgtaggtaagtgtaacgacccttacccaggaa

SEQ ID NO: 359706 - DNA, 58 bp, Artificial
  Synthetic oligonucleotide
cccgaccgctggctttccaacgcccggatgactcactatcaggccttgcttttggaca

SEQ ID NO: 359707 - DNA, 54 bp, Artificial
  Synthetic oligonucleotide
cccgacctcgttccggtgtttgaaaacactcacgttagttacgcttgctggcag

SEQ ID NO: 359708 - DNA, 53 bp, Artificial
  Synthetic oligonucleotide
cccgacctttaaggacctcggaattccttgcaaatccgttgatccccatataa

SEQ ID NO: 359709 - DNA, 55 bp, Artificial
  Synthetic oligonucleotide
cccgacgaagagagttaatcaaggagccccgacgcgcaggactcaaggtaagcgg

SEQ ID NO: 359710 - DNA, 55 bp, Artificial
  Synthetic oligonucleotide
cccgacgcatgtggaccagtgagaaatttgtgagactaaccatccctcaaggccg

SEQ ID NO: 359711 - DNA, 55 bp, Artificial
  Synthetic oligonucleotide
cccgacgccgtttgggttttcgctacacattgaagtgcagcgtcgtcacggctcg

SEQ ID NO: 359712 - DNA, 53 bp, Artificial
  Synthetic oligonucleotide
cccgacggatgttccgctgtgggtggagtggggcggtactccaggtaaatggt

SEQ ID NO: 359713 - DNA, 55 bp, Artificial
  Synthetic oligonucleotide
cccgacgtaaaggagggaacaaccggcagcgactacacgactgcttgcacggact

SEQ ID NO: 359714 - DNA, 55 bp, Artificial
  Synthetic oligonucleotide
cccgactaagaggcacagtacttatatactccgaccttaaagcgccagtggtacc

SEQ ID NO: 359715 - DNA, 55 bp, Artificial
  Synthetic oligonucleotide
cccgactaaggcgggtaagtctataggctccgaccagtcacttttgcgtgacgat

SEQ ID NO: 359716 - DNA, 55 bp, Artificial
  Synthetic oligonucleotide
cccgactatgaactaacaaccaacgggatgagagatatagtgtttgcctttggag

SEQ ID NO: 359717 - DNA, 60 bp, Artificial
  Synthetic oligonucleotide
cccgactatgggagaagctcacaatgacaaacgtgctgacccagcttttgtgtgcaaaca

SEQ ID NO: 359718 - DNA, 55 bp, Artificial
  Synthetic oligonucleotide
cccgactggacgatcgagttcgagctggcgaagcccgacacgaaactgcaggatg

SEQ ID NO: 359719 - DNA, 58 bp, Artificial
  Synthetic oligonucleotide
cccgacttaccagaaagtcctgtcagactggtatcaccccaccacgcacagtgtgacc

SEQ ID NO: 359720 - DNA, 60 bp, Artificial
  Synthetic oligonucleotide
cccgacttccctcagctgaacagtgactgggttccctctgtcagatcatgggccctgctt

SEQ ID NO: 359721 - DNA, 55 bp, Artificial
  Synthetic oligonucleotide
cccgacttgaagactccgtgtccgttggagaggttgtgccctaaatccacaatgg

SEQ ID NO: 359722 - DNA, 55 bp, Artificial
  Synthetic oligonucleotide
cccgacttgtgatgctgaatcacctgggtctagcacgcttggtcccagacgattg

SEQ ID NO: 359723 - DNA, 53 bp, Artificial
  Synthetic oligonucleotide
cccgagaaccaaacccgggtagccttcttctacgacagagctgtcccaatagg

SEQ ID NO: 359724 - DNA, 55 bp, Artificial
  Synthetic oligonucleotide
cccgagaagatcgactcctggacgcctatagatatgatccatctgagttgtccaa

SEQ ID NO: 359725 - DNA, 55 bp, Artificial
  Synthetic oligonucleotide
cccgagaagggaggtcgtaagccagctcgtctcatcgtgtttcccgacctgggtg

SEQ ID NO: 359726 - DNA, 57 bp, Artificial
  Synthetic oligonucleotide
cccgagacactttgtgacgttttccgaattgctggaacataacaacatgaacgtcac

SEQ ID NO: 359727 - DNA, 55 bp, Artificial
  Synthetic oligonucleotide
cccgagacagacgatacgctgccaatacaccattgcctggacactttagattctc

SEQ ID NO: 359728 - DNA, 55 bp, Artificial
  Synthetic oligonucleotide
cccgagacatcgatcttggccgaaactgctcccgctccgccggcgaaagaccttt

SEQ ID NO: 359729 - DNA, 55 bp, Artificial
  Synthetic oligonucleotide
cccgagacccaagctttcccctctcagtaatgtggccactcctccggaacgatgc

SEQ ID NO: 359730 - DNA, 50 bp, Artificial
  Synthetic oligonucleotide
cccgagaccggacacacttttggaattccgactggacacaattggaaccc

SEQ ID NO: 359731 - DNA, 54 bp, Artificial
  Synthetic oligonucleotide
cccgagacttcgattcgaccaactccgatgaaacgttttgttcgcccgagacca

SEQ ID NO: 359732 - DNA, 55 bp, Artificial
  Synthetic oligonucleotide
cccgagacttgtgatatggataaattcatagctagggttcatcattcaactagga

SEQ ID NO: 359733 - DNA, 60 bp, Artificial
  Synthetic oligonucleotide
cccgagagcaacatcttggacatagatttacgtcctgcatcagcatggaccctgtatgca

SEQ ID NO: 359734 - DNA, 60 bp, Artificial
  Synthetic oligonucleotide
cccgagagtaatgatgaggtttaagatcccacgtacgcaacagcctcaaattcatatcta

SEQ ID NO: 359735 - DNA, 55 bp, Artificial
  Synthetic oligonucleotide
cccgagataaaacaatacgatgactctataatggatgtggaaatacccttcttcc

SEQ ID NO: 359736 - DNA, 55 bp, Artificial
  Synthetic oligonucleotide
cccgagatatagtaacttcatatcaactgaggcatacctagtcctgttaggactc

SEQ ID NO: 359737 - DNA, 60 bp, Artificial
  Synthetic oligonucleotide
cccgagatctacacttacaagatctcaggtcagactctccactacatcccggagaatcac

SEQ ID NO: 359738 - DNA, 52 bp, Artificial
  Synthetic oligonucleotide
cccgagcaacgaccctttatgatgaaaaggttttctgggtttcccagaaata

SEQ ID NO: 359739 - DNA, 55 bp, Artificial
  Synthetic oligonucleotide
cccgagcaagaaggttgggaacttttagaatggacagtaacacagccaccggcaa

SEQ ID NO: 359740 - DNA, 55 bp, Artificial
  Synthetic oligonucleotide
cccgagcatcgatcggccctaagacgcatccgtgttaaaatgcgtgcgcctcgcc

SEQ ID NO: 359741 - DNA, 51 bp, Artificial
  Synthetic oligonucleotide
cccgagcccgagtgacctggtacgtggtaccgggttgcggggtaatactaa

SEQ ID NO: 359742 - DNA, 51 bp, Artificial
  Synthetic oligonucleotide
cccgagcccgttaggtcgcccagctctgctaggcctccgccccccgtgcgt

SEQ ID NO: 359743 - DNA, 55 bp, Artificial
  Synthetic oligonucleotide
cccgagccgcccgctcacgtcgtccgcgcgtacaatcaacctgccgccgacgtca

SEQ ID NO: 359744 - DNA, 55 bp, Artificial
  Synthetic oligonucleotide
cccgagccgtccccaatgccttatgtcccgtaccctcgctcaacagaggtgtatg

SEQ ID NO: 359745 - DNA, 55 bp, Artificial
  Synthetic oligonucleotide
cccgagctagttcacctggcagtggctgagaggctcgtcgctttagcagcggttg

SEQ ID NO: 359746 - DNA, 55 bp, Artificial
  Synthetic oligonucleotide
cccgagctcaataaaagagcccacaacccctcactcggggcgccagtcctccgat

SEQ ID NO: 359747 - DNA, 59 bp, Artificial
  Synthetic oligonucleotide
cccgagctggttccaacaaagtggtggcacctcactcatagatgtcctgcggacgtctg

SEQ ID NO: 359748 - DNA, 55 bp, Artificial
  Synthetic oligonucleotide
cccgagcttgttccaacgaattggtggcacctcacgcacagatgcccggcggatg

SEQ ID NO: 359749 - DNA, 59 bp, Artificial
  Synthetic oligonucleotide
cccgagctttctaaagagattggcatcgcgcgcgctgcatatgtttctgggcgacccaa

SEQ ID NO: 359750 - DNA, 55 bp, Artificial
  Synthetic oligonucleotide
cccgaggaagaggagaccgctcgcaatctgattcatgatgcagataagtacgcgt

SEQ ID NO: 359751 - DNA, 53 bp, Artificial
  Synthetic oligonucleotide
cccgaggaaggcagggaagctcttcctggggaccactcctcctcgggctcccg

SEQ ID NO: 359752 - DNA, 55 bp, Artificial
  Synthetic oligonucleotide
cccgaggagccaacgagtgtgggaattactatagaaggggtcatgagtcaaaaga

SEQ ID NO: 359753 - DNA, 55 bp, Artificial
  Synthetic oligonucleotide
cccgaggagggaagcaacacaacactgcggtgtcctaccgactgcttccggaagc

SEQ ID NO: 359754 - DNA, 55 bp, Artificial
  Synthetic oligonucleotide
cccgaggataatgagccaagtggatatgcacaaacagactgtgttctggaggcca

SEQ ID NO: 359755 - DNA, 58 bp, Artificial
  Synthetic oligonucleotide
cccgaggatccgatgagggcaaccgccacaccaacgagactgtaacatacaaggtagc

SEQ ID NO: 359756 - DNA, 55 bp, Artificial
  Synthetic oligonucleotide
cccgaggccacgccgagttaggatcgagggtacaggtagtgagtaagttcagatg

SEQ ID NO: 359757 - DNA, 55 bp, Artificial
  Synthetic oligonucleotide
cccgagggaagtagaagaagccactgaaggagaagacaactgtttgctacaccct

SEQ ID NO: 359758 - DNA, 55 bp, Artificial
  Synthetic oligonucleotide
cccgagggacacaagaaaacaggacaggtaccctctttgcaatacttagctctcc

SEQ ID NO: 359759 - DNA, 51 bp, Artificial
  Synthetic oligonucleotide
cccgagggctgatcccaacttgacagccacccggctgtctaccccggaggg

SEQ ID NO: 359760 - DNA, 55 bp, Artificial
  Synthetic oligonucleotide
cccgaggggctcattattactcagggtactggaaccaaccaggaattctccatac

SEQ ID NO: 359761 - DNA, 60 bp, Artificial
  Synthetic oligonucleotide
cccgagggggattgcttgcatagtgcaggtatgttgagtcacactgtgaggtattggtgc

SEQ ID NO: 359762 - DNA, 60 bp, Artificial
  Synthetic oligonucleotide
cccgagggtaatgatgagattcaaggtgcctcgctcccagcagcctcagatacatatata

SEQ ID NO: 359763 - DNA, 55 bp, Artificial
  Synthetic oligonucleotide
cccgagggtgagctgcaaggcgatgaggtctatgacgacgagcgcgtcagtcgtt

SEQ ID NO: 359764 - DNA, 51 bp, Artificial
  Synthetic oligonucleotide
cccgagggtgtgaacatcgccccgactcttggcgtgaacttcgtgaagcca

SEQ ID NO: 359765 - DNA, 55 bp, Artificial
  Synthetic oligonucleotide
cccgaggtgcttctgcgctacaagcaagtgagaggtatcgcatgagcaagtacac

SEQ ID NO: 359766 - DNA, 54 bp, Artificial
  Synthetic oligonucleotide
cccgaggtggttgtggatggcgaaggtggggcaatagatttaggaccacccgaa

SEQ ID NO: 359767 - DNA, 57 bp, Artificial
  Synthetic oligonucleotide
cccgaggttttgctgccacctggcacttaccacaccacctcctaccttctgattcat

SEQ ID NO: 359768 - DNA, 55 bp, Artificial
  Synthetic oligonucleotide
cccgagtaacccggcactatttcccaccatagcatacgaagccgcaaattatgac

SEQ ID NO: 359769 - DNA, 55 bp, Artificial
  Synthetic oligonucleotide
cccgagtatgcggttcttgctggcacgtctagactcgagctctcggaagagactg

SEQ ID NO: 359770 - DNA, 54 bp, Artificial
  Synthetic oligonucleotide
cccgagtgttggtaatgttaggtatagtgatattaagtcaccgagggttagtgg

SEQ ID NO: 359771 - DNA, 55 bp, Artificial
  Synthetic oligonucleotide
cccgagttttattggacttgcttctaggattttcaattggatcgatactagcgtt

SEQ ID NO: 359772 - DNA, 55 bp, Artificial
  Synthetic oligonucleotide
cccgataaagtaccgggtgacatattgggactgcggaggttattcaacatggagg

SEQ ID NO: 359773 - DNA, 55 bp, Artificial
  Synthetic oligonucleotide
cccgataactcagttgctgttcgggttgtgtatatcaggatccgccactgaaaag

SEQ ID NO: 359774 - DNA, 55 bp, Artificial
  Synthetic oligonucleotide
cccgataaggttatgagcgacgattaaaataaactttcgttatctatcttgcacc

SEQ ID NO: 359775 - DNA, 55 bp, Artificial
  Synthetic oligonucleotide
cccgatacaacagaagagtcagcacaacaaatctgttgtacaagagactcctcag

SEQ ID NO: 359776 - DNA, 55 bp, Artificial
  Synthetic oligonucleotide
cccgatacgagtttgccaggacctatcaagtttggagtcatccggcccacagggg

SEQ ID NO: 359777 - DNA, 55 bp, Artificial
  Synthetic oligonucleotide
cccgatacgccaatacatctgctgaggtcacaggagggttcttcggatgcttgcc

SEQ ID NO: 359778 - DNA, 59 bp, Artificial
  Synthetic oligonucleotide
cccgatacggtattcagcgcaacttgagggattactcacttgcaaggtacgcattcgat

SEQ ID NO: 359779 - DNA, 60 bp, Artificial
  Synthetic oligonucleotide
cccgatacttctctgcgcttctcactactgctgatgccaagaccaggtcctcatcaataa

SEQ ID NO: 359780 - DNA, 54 bp, Artificial
  Synthetic oligonucleotide
cccgatagttgcttaaaaggacgcaaaggatttagcaccacgaaaggcaaactg

SEQ ID NO: 359781 - DNA, 60 bp, Artificial
  Synthetic oligonucleotide
cccgatatacctcccgaacaccatgaggaacccacctcatcctctggatccagtagcaga

SEQ ID NO: 359782 - DNA, 60 bp, Artificial
  Synthetic oligonucleotide
cccgatatagtcgatgtttacaaggctgagaattctctacgcacacaccagtcaaagcaa

SEQ ID NO: 359783 - DNA, 60 bp, Artificial
  Synthetic oligonucleotide
cccgatcactagattcagcagcgtttgactacggagtctgaatgtcattgagattagagt

SEQ ID NO: 359784 - DNA, 60 bp, Artificial
  Synthetic oligonucleotide
cccgatcatggggcaactgatctccttctttggagagattccaaccattctgcaagaggc

SEQ ID NO: 359785 - DNA, 57 bp, Artificial
  Synthetic oligonucleotide
cccgatcctgttgagaagaccctaatatcaactagaattgaggtgtcctccttcaaa

SEQ ID NO: 359786 - DNA, 51 bp, Artificial
  Synthetic oligonucleotide
cccgatctaaggagtacactgtatcacgttatgtctgacactgataccacg

SEQ ID NO: 359787 - DNA, 52 bp, Artificial
  Synthetic oligonucleotide
cccgatctccacactccttcccccctgcgggccccccaataagatggtaaga

SEQ ID NO: 359788 - DNA, 55 bp, Artificial
  Synthetic oligonucleotide
cccgatctttatgtttccctcactagggctaccaaaagtctgaccattctaagtc

SEQ ID NO: 359789 - DNA, 55 bp, Artificial
  Synthetic oligonucleotide
cccgatgaagtaagttcggctgatactacgttccgtagcccacaagacgtggtcc

SEQ ID NO: 359790 - DNA, 55 bp, Artificial
  Synthetic oligonucleotide
cccgatgatactatacgatgacacaattaaattgattcctgtggaggttggggca

SEQ ID NO: 359791 - DNA, 57 bp, Artificial
  Synthetic oligonucleotide
cccgatgcacgttgactcccgtggccgcatgtactattggggcacaccgaatcccca

SEQ ID NO: 359792 - DNA, 55 bp, Artificial
  Synthetic oligonucleotide
cccgatgccagggttggaagacccggcagaaaagatgctgttagactatatgaag

SEQ ID NO: 359793 - DNA, 60 bp, Artificial
  Synthetic oligonucleotide
cccgatgccgcttcagctgtgagcaaactcaggcaattagctagaggggatgaaaccact

SEQ ID NO: 359794 - DNA, 60 bp, Artificial
  Synthetic oligonucleotide
cccgatgcgactcctatccaaactccacctctccatagcaccaatgtacatcccggacgc

SEQ ID NO: 359795 - DNA, 60 bp, Artificial
  Synthetic oligonucleotide
cccgatgcggcggtgatgaaagttgtgtcccgtgatgtgcgtagagtggtcgagatgttt

SEQ ID NO: 359796 - DNA, 54 bp, Artificial
  Synthetic oligonucleotide
cccgatgctaggactacaacatacaatgcaggccgcttttccactcctcaaccc

SEQ ID NO: 359797 - DNA, 57 bp, Artificial
  Synthetic oligonucleotide
cccgatggaagcgtcgggggctgctaacaacagtgatatggaccagacgacgacgtt

SEQ ID NO: 359798 - DNA, 60 bp, Artificial
  Synthetic oligonucleotide
cccgatggatgggtgtattgtcatgcagatggctcacagtttgatagctccctgacgccc

SEQ ID NO: 359799 - DNA, 50 bp, Artificial
  Synthetic oligonucleotide
cccgatgggagctcttctaaaactctatgtcaatgggtgtataggtgtgt

SEQ ID NO: 359800 - DNA, 55 bp, Artificial
  Synthetic oligonucleotide
cccgatgtcgaaagagtggtcataccacgtaaacatcttgcggatcagtgccgag

SEQ ID NO: 359801 - DNA, 60 bp, Artificial
  Synthetic oligonucleotide
cccgatgtcgtactactgtcagcaagagtacgcgattgacgttgcggacgagtacagatt

SEQ ID NO: 359802 - DNA, 58 bp, Artificial
  Synthetic oligonucleotide
cccgatgtctctaagtctttgcccaacagaaccaagtcatatattaagctgaaacgac

SEQ ID NO: 359803 - DNA, 55 bp, Artificial
  Synthetic oligonucleotide
cccgatgtggtagttattgtcgactatggtactttgaagttcacgttgctgacgt

SEQ ID NO: 359804 - DNA, 54 bp, Artificial
  Synthetic oligonucleotide
cccgattacgagattcccctgaacttattggatctggagactccgaccttaagg

SEQ ID NO: 359805 - DNA, 59 bp, Artificial
  Synthetic oligonucleotide
cccgattatctaggatggaacctagacaagagctactggatcctgaacgcgtccgtgaa

SEQ ID NO: 359806 - DNA, 56 bp, Artificial
  Synthetic oligonucleotide
cccgattcggagagaaaccttctttgctgtgaatcggtgtaatggggtacaatata

SEQ ID NO: 359807 - DNA, 58 bp, Artificial
  Synthetic oligonucleotide
cccgattgatggaccactacccgaggacaatgaaccaagcgggtatgcacaaacagat

SEQ ID NO: 359808 - DNA, 53 bp, Artificial
  Synthetic oligonucleotide
cccgattttatgctgccgttcccaataaactactagagtcctggttaaggtta

SEQ ID NO: 359809 - DNA, 57 bp, Artificial
  Synthetic oligonucleotide
cccgcaaacaaccaagtaatgccgtgtgaaccaataattgtggagaagaacataaca

SEQ ID NO: 359810 - DNA, 54 bp, Artificial
  Synthetic oligonucleotide
cccgcaacctcattccactggggtgcagcggttggggagtgcccccccagtcgg

SEQ ID NO: 359811 - DNA, 60 bp, Artificial
  Synthetic oligonucleotide
cccgcaagcgacgtgccacccgagtccctagagactctgctacaaacctatatagacagc

SEQ ID NO: 359812 - DNA, 55 bp, Artificial
  Synthetic oligonucleotide
cccgcaatcttctcgcagacgactggccaatacaagagctgcgtgagtccgttcc

SEQ ID NO: 359813 - DNA, 56 bp, Artificial
  Synthetic oligonucleotide
cccgcacccaatcaattattaggcgcgagatgaaaacacccccctcgggatgacag

SEQ ID NO: 359814 - DNA, 55 bp, Artificial
  Synthetic oligonucleotide
cccgcaccgactgccatgcgtgaacctgggccatatctcgcaccaactattccgg

SEQ ID NO: 359815 - DNA, 57 bp, Artificial
  Synthetic oligonucleotide
cccgcaccgtgaaaggccaagcatggtgcatgaaagggaaggcccccggaagcttgc

SEQ ID NO: 359816 - DNA, 57 bp, Artificial
  Synthetic oligonucleotide
cccgcacgtcaacaagctaaacgcaatattaatcaaaggggccacagcgacagggga

SEQ ID NO: 359817 - DNA, 55 bp, Artificial
  Synthetic oligonucleotide
cccgcactgcagatcaacacgccgtctcctgattgccctcttcttgccttgcctg

SEQ ID NO: 359818 - DNA, 56 bp, Artificial
  Synthetic oligonucleotide
cccgcactggtgcaaacactcctgctctcctccgcatgggcccaaatctttgtggc

SEQ ID NO: 359819 - DNA, 56 bp, Artificial
  Synthetic oligonucleotide
cccgcagaacttgcggcgcatcttaaagaagcgaaggcaaacgaaactaaggacgc

SEQ ID NO: 359820 - DNA, 50 bp, Artificial
  Synthetic oligonucleotide
cccgcagactggaccaaaatgtctaagagactgcagagtttccatgttgg

SEQ ID NO: 359821 - DNA, 60 bp, Artificial
  Synthetic oligonucleotide
cccgcagatgtagatggacttatgcctccccggtgactcctggaataatcgtccatccac

SEQ ID NO: 359822 - DNA, 55 bp, Artificial
  Synthetic oligonucleotide
cccgcagcaggggaggttggtcacgggatgagcatcaagatctgcacctctgagt

SEQ ID NO: 359823 - DNA, 54 bp, Artificial
  Synthetic oligonucleotide
cccgcagctccgtcagtccccagtctgccgtggagtagcgtcggtgagatagct

SEQ ID NO: 359824 - DNA, 55 bp, Artificial
  Synthetic oligonucleotide
cccgcaggagacttcttccttgccatcactcgatacatatatcttgataacatag

SEQ ID NO: 359825 - DNA, 51 bp, Artificial
  Synthetic oligonucleotide
cccgcagtggcaagcaaataggggctcgggtgcatttttatcacgacttaa

SEQ ID NO: 359826 - DNA, 55 bp, Artificial
  Synthetic oligonucleotide
cccgcagttcaaatcaatgcgtcttctgcgtacagctctccttttagcagtcttg

SEQ ID NO: 359827 - DNA, 60 bp, Artificial
  Synthetic oligonucleotide
cccgcagttgtgtgctttcgctgactgggcaacttatcgcgaatttcggtatctagagga

SEQ ID NO: 359828 - DNA, 55 bp, Artificial
  Synthetic oligonucleotide
cccgcataagaattggactggaaataacgtgaatgggccgaatggatttgggctg

SEQ ID NO: 359829 - DNA, 58 bp, Artificial
  Synthetic oligonucleotide
cccgcatctgatgggcttcctttcccatcttccgtagtcgacgtgggagaagtccaca

SEQ ID NO: 359830 - DNA, 60 bp, Artificial
  Synthetic oligonucleotide
cccgcattcggggcagtctgcgcaagcggtgaacggttccactgcgatcactcttgcgat

SEQ ID NO: 359831 - DNA, 55 bp, Artificial
  Synthetic oligonucleotide
cccgcattggcaggatgcagggcagagtttagcagatagtttgttaaatggagtt

SEQ ID NO: 359832 - DNA, 55 bp, Artificial
  Synthetic oligonucleotide
cccgccaataatgctgattgtgcctggctggaaacacaagaggaggcagacgaag

SEQ ID NO: 359833 - DNA, 60 bp, Artificial
  Synthetic oligonucleotide
cccgccaattagcctcatacaccgatcgtcaccagcagcagactattaccgtcctccaag

SEQ ID NO: 359834 - DNA, 54 bp, Artificial
  Synthetic oligonucleotide
cccgccacagacttcgccacgtttagggtcgtagagacccaatccgtagggcta

SEQ ID NO: 359835 - DNA, 58 bp, Artificial
  Synthetic oligonucleotide
cccgccacagcaaaacactccacctcttcgacctcaatgccgggcctgacaccaccgc

SEQ ID NO: 359836 - DNA, 60 bp, Artificial
  Synthetic oligonucleotide
cccgccacccattccgaccatctgtagcaaaaccctcctctgttctagctgctgagctgt

SEQ ID NO: 359837 - DNA, 60 bp, Artificial
  Synthetic oligonucleotide
cccgccactgagtacagcagctttgttcagtgccacaggtacgactctgaggtaccaccg

SEQ ID NO: 359838 - DNA, 59 bp, Artificial
  Synthetic oligonucleotide
cccgccacttcactaagtaacgtgtatgcccaaacttggagcatagtgcgcaaacgcca

SEQ ID NO: 359839 - DNA, 53 bp, Artificial
  Synthetic oligonucleotide
cccgccagagctggacggggttccgtttagtttaaaagctagagttaggcaca

SEQ ID NO: 359840 - DNA, 60 bp, Artificial
  Synthetic oligonucleotide
cccgccagatagccagagatcagagctaatcctcgaggacccaaacagcaatgcgaggga

SEQ ID NO: 359841 - DNA, 55 bp, Artificial
  Synthetic oligonucleotide
cccgccagatgtagcgattgtatttgaacgacggtaatcatgatgagtcttcaga

SEQ ID NO: 359842 - DNA, 59 bp, Artificial
  Synthetic oligonucleotide
cccgccaggcgatgggggctgggccccatagtctaacatatgagctcacccctgctggt

SEQ ID NO: 359843 - DNA, 55 bp, Artificial
  Synthetic oligonucleotide
cccgccatataaggggcagtaccataaagcatcgtgttaggacggcatccaccac

SEQ ID NO: 359844 - DNA, 58 bp, Artificial
  Synthetic oligonucleotide
cccgccatcaggcctgacttagcccctacttcctggtggcatgttacccatcgctgcc

SEQ ID NO: 359845 - DNA, 60 bp, Artificial
  Synthetic oligonucleotide
cccgccatccgacccagcctggcctcgtgacgctgtcatgcaatacgactcaaactggag

SEQ ID NO: 359846 - DNA, 58 bp, Artificial
  Synthetic oligonucleotide
cccgccatctttgacagtacctacgaagctgcttgatacgtaacgaggaggcggagtg

SEQ ID NO: 359847 - DNA, 55 bp, Artificial
  Synthetic oligonucleotide
cccgccatgaatctagcgggtgatggtgactcaatccgacatctgacggtaccgt

SEQ ID NO: 359848 - DNA, 55 bp, Artificial
  Synthetic oligonucleotide
cccgcccaaattaagacggacaatggttcgtgtttcacatcccgctccactcagg

SEQ ID NO: 359849 - DNA, 55 bp, Artificial
  Synthetic oligonucleotide
cccgcccactagggttaaaggtgttcacactataaaagcatatacgatgtgatgg

SEQ ID NO: 359850 - DNA, 55 bp, Artificial
  Synthetic oligonucleotide
cccgcccagacacatcttccaataggttttatactttaaagagtgtgacttggtc

SEQ ID NO: 359851 - DNA, 55 bp, Artificial
  Synthetic oligonucleotide
cccgcccaggctcttttgtaacatatgacaatcctgtatttgaccccgaggaaac

SEQ ID NO: 359852 - DNA, 48 bp, Artificial
  Synthetic oligonucleotide
cccgccccctttaaagtggtccccgcgcactacgtatgtcggccaatc

SEQ ID NO: 359853 - DNA, 52 bp, Artificial
  Synthetic oligonucleotide
cccgccccttgtttaaaggggtccccccacgtgcttcgctttcctgcagata

SEQ ID NO: 359854 - DNA, 53 bp, Artificial
  Synthetic oligonucleotide
cccgcccgacactgcagggatcccggggctgaacagtggcaatgcaggatcca

SEQ ID NO: 359855 - DNA, 55 bp, Artificial
  Synthetic oligonucleotide
cccgccctcatagatgaggccaccctccccgcttggagtcaaggcgttgctaact

SEQ ID NO: 359856 - DNA, 55 bp, Artificial
  Synthetic oligonucleotide
cccgccctggtccctctcctaatctcatagctctcaacccctcttccacccaatc

SEQ ID NO: 359857 - DNA, 55 bp, Artificial
  Synthetic oligonucleotide
cccgcccttcacgtgagctgtcctggtgagtagacaacccacacctccgttcgac

SEQ ID NO: 359858 - DNA, 50 bp, Artificial
  Synthetic oligonucleotide
cccgccctttgcaacaggagagtcgtcgggtccgctcactggggggctga

SEQ ID NO: 359859 - DNA, 55 bp, Artificial
  Synthetic oligonucleotide
cccgccgaatagcctcaagagctatcctagctcaagctgtagacacccaacccga

SEQ ID NO: 359860 - DNA, 50 bp, Artificial
  Synthetic oligonucleotide
cccgccgacgttaccagatattgccccgagtcttcgattcgcacctcgcg

SEQ ID NO: 359861 - DNA, 54 bp, Artificial
  Synthetic oligonucleotide
cccgccgagtttgtcatgtcagatgggcttgcagcctatactctaactccccgg

SEQ ID NO: 359862 - DNA, 57 bp, Artificial
  Synthetic oligonucleotide
cccgccgccccagacgacgtctcaaaggaggatttctacctgctattatacctctca

SEQ ID NO: 359863 - DNA, 55 bp, Artificial
  Synthetic oligonucleotide
cccgccgctcttgaacccatcggcggactcactcgaaccccgacaccagacgagg

SEQ ID NO: 359864 - DNA, 55 bp, Artificial
  Synthetic oligonucleotide
cccgccggaatcatggtacaacgaggaaaaatgctacgttcaagccctgttccgc

SEQ ID NO: 359865 - DNA, 55 bp, Artificial
  Synthetic oligonucleotide
cccgccggatggcacgctcggatacttggctctgtattaaatcgactcctcagcc

SEQ ID NO: 359866 - DNA, 55 bp, Artificial
  Synthetic oligonucleotide
cccgccgtacacgaacgacattacgtcagagacgcggcgttgtctccactacgcg

SEQ ID NO: 359867 - DNA, 55 bp, Artificial
  Synthetic oligonucleotide
cccgccgttataaatacttcggctctaagtatccgcttgcaaaatgtgggatcca

SEQ ID NO: 359868 - DNA, 55 bp, Artificial
  Synthetic oligonucleotide
cccgcctaaactgatgtcccgcctaaactgactcacactcctgcagtgcagctaa

SEQ ID NO: 359869 - DNA, 55 bp, Artificial
  Synthetic oligonucleotide
cccgcctatcccggtagacagcgtcgcgacttacaaattgttgacccacactcca

SEQ ID NO: 359870 - DNA, 56 bp, Artificial
  Synthetic oligonucleotide
cccgcctattataagtacttcgttgctaagtatgcgtttgaaaaatgtgggatcca

SEQ ID NO: 359871 - DNA, 55 bp, Artificial
  Synthetic oligonucleotide
cccgcctccaaggttcgacggaggctgaacttcgacagcccgtatcagaaccgtg

SEQ ID NO: 359872 - DNA, 57 bp, Artificial
  Synthetic oligonucleotide
cccgcctccacgtctccccggcgcacactgacgactatgacgagtgttctcaccaac

SEQ ID NO: 359873 - DNA, 50 bp, Artificial
  Synthetic oligonucleotide
cccgcctccgggcagatagcaacctcgggaagccctcaggggctctccta

SEQ ID NO: 359874 - DNA, 50 bp, Artificial
  Synthetic oligonucleotide
cccgcctccttagttgaatttgaaaatcccgccttccaaccggacgaaac

SEQ ID NO: 359875 - DNA, 54 bp, Artificial
  Synthetic oligonucleotide
cccgcctggtacaactagaggacggggaggtccgatggaaatcacatacgacgg

SEQ ID NO: 359876 - DNA, 60 bp, Artificial
  Synthetic oligonucleotide
cccgccttacctttgttgaacaggccatgatgcatctaatccaagttagcaaggagagaa

SEQ ID NO: 359877 - DNA, 60 bp, Artificial
  Synthetic oligonucleotide
cccgccttcatgacttgctgtgcttctaccggggaagtgcaagaaatgacgagcatgctt

SEQ ID NO: 359878 - DNA, 53 bp, Artificial
  Synthetic oligonucleotide
cccgcctttgatcctgacgtcacaatagagtttgagcgggatttggcagaggt

SEQ ID NO: 359879 - DNA, 51 bp, Artificial
  Synthetic oligonucleotide
cccgcgaaacgaccaccctcgagcccgagtggacccgcaagtacgagtggt

SEQ ID NO: 359880 - DNA, 55 bp, Artificial
  Synthetic oligonucleotide
cccgcgaagttatctacaccgccctctcccgagccgttcactccattcacttcgt

SEQ ID NO: 359881 - DNA, 56 bp, Artificial
  Synthetic oligonucleotide
cccgcgaatctgtgaaggtgtccacggacggggaaagagagagcccagtgcaaacc

SEQ ID NO: 359882 - DNA, 53 bp, Artificial
  Synthetic oligonucleotide
cccgcgaccatgattgaccacgtattgacccagcttctgtaccgcgactagcg

SEQ ID NO: 359883 - DNA, 60 bp, Artificial
  Synthetic oligonucleotide
cccgcgactggctggaactatgaatgctgactatgacccattttcagtcggaatgacaaa

SEQ ID NO: 359884 - DNA, 55 bp, Artificial
  Synthetic oligonucleotide
cccgcgattctgcgactcatgcgtaccaagcgtatggggtgtactcgagctcacg

SEQ ID NO: 359885 - DNA, 55 bp, Artificial
  Synthetic oligonucleotide
cccgcgcaacacaaaccaagagggggtctatcggccagtagccgagaaccccgca

SEQ ID NO: 359886 - DNA, 60 bp, Artificial
  Synthetic oligonucleotide
cccgcgccccaatgatggaacaggcagttgtggtccagtgtcttctaatggggcatatgg

SEQ ID NO: 359887 - DNA, 55 bp, Artificial
  Synthetic oligonucleotide
cccgcgcggctaccttgacttgatcctcctttctgatccatcaattcagcttgtc

SEQ ID NO: 359888 - DNA, 60 bp, Artificial
  Synthetic oligonucleotide
cccgcgctataccatcccccaaaaccgaagagcacacaatggggagagcgcatcatctca

SEQ ID NO: 359889 - DNA, 55 bp, Artificial
  Synthetic oligonucleotide
cccgcgctgatggaagaactagaagttctcgagcgggaactccagaaggaggagg

SEQ ID NO: 359890 - DNA, 55 bp, Artificial
  Synthetic oligonucleotide
cccgcgctggcaaaagagtttgcgacgggcgtgctgacctgtgagtcagtccaca

SEQ ID NO: 359891 - DNA, 50 bp, Artificial
  Synthetic oligonucleotide
cccgcgcttttgttcgccgctgtgccttccacgtgcccctcctaacgtat

SEQ ID NO: 359892 - DNA, 55 bp, Artificial
  Synthetic oligonucleotide
cccgcggaacgcgcggtgggaagaagacgccagaggcttcgaagaatacttcgca

SEQ ID NO: 359893 - DNA, 54 bp, Artificial
  Synthetic oligonucleotide
cccgcggccgactcgcctacgtgaacgctagctcttcacccgaaggcctacctt

SEQ ID NO: 359894 - DNA, 55 bp, Artificial
  Synthetic oligonucleotide
cccgcggcgtcaccgatggctataccgacggcaaagtgagctgtgatgttgaagt

SEQ ID NO: 359895 - DNA, 58 bp, Artificial
  Synthetic oligonucleotide
cccgcggcttgttcagtaccatcgtaacgagcctcactggcagggacaccaatgaaaa

SEQ ID NO: 359896 - DNA, 55 bp, Artificial
  Synthetic oligonucleotide
cccgcgggccgtgtgaaagttaactgcatgtggcatttatgggacagtggccttg

SEQ ID NO: 359897 - DNA, 60 bp, Artificial
  Synthetic oligonucleotide
cccgcggggatcgatgtgagctcgatgacagagatagagtcgaaatgagccctctcctgc

SEQ ID NO: 359898 - DNA, 54 bp, Artificial
  Synthetic oligonucleotide
cccgcggggctctcggcgcgttttaatgacgtcacggacgccattttataatac

SEQ ID NO: 359899 - DNA, 54 bp, Artificial
  Synthetic oligonucleotide
cccgcggttagcggagtcactcagttttcagaacacggtcaaacgataggggaa

SEQ ID NO: 359900 - DNA, 47 bp, Artificial
  Synthetic oligonucleotide
cccgcgtagcgctctaaaccctttaccccctaaagggggtaaaagag

SEQ ID NO: 359901 - DNA, 53 bp, Artificial
  Synthetic oligonucleotide
cccgcgtatgtcttcacaatacttttgctagctgctactgggaaaataaatcg

SEQ ID NO: 359902 - DNA, 53 bp, Artificial
  Synthetic oligonucleotide
cccgcgtcaccgggaccgagaccggacgaccgctgtacgcggacatcaaccca

SEQ ID NO: 359903 - DNA, 60 bp, Artificial
  Synthetic oligonucleotide
cccgcgtcactaccatactcagcagcctcactgtgacccagctcctgagacgactgcacc

SEQ ID NO: 359904 - DNA, 55 bp, Artificial
  Synthetic oligonucleotide
cccgcgtcgaaggtgcgttgtcgtctgaacttcgacagcccttactcaacccgtg

SEQ ID NO: 359905 - DNA, 55 bp, Artificial
  Synthetic oligonucleotide
cccgcgtgataatcaatggtgttactgctaggtctgaatgggatgtagataaagc

SEQ ID NO: 359906 - DNA, 51 bp, Artificial
  Synthetic oligonucleotide
cccgcgtgtagaagcagctatgagcctgccgcagtctcctccgccttctta

SEQ ID NO: 359907 - DNA, 56 bp, Artificial
  Synthetic oligonucleotide
cccgcgttccattttgaaacaggcgacacccgtgttgagagaccctgacgtatgga

SEQ ID NO: 359908 - DNA, 60 bp, Artificial
  Synthetic oligonucleotide
cccgcgttccctctgatcgatatcaaggctcagatgctgttcgcaaataacatcaaggcc

SEQ ID NO: 359909 - DNA, 55 bp, Artificial
  Synthetic oligonucleotide
cccgcgttctacatctataatactgggcgtaacgcctattttaagtttcaagaga

SEQ ID NO: 359910 - DNA, 50 bp, Artificial
  Synthetic oligonucleotide
cccgcgtttacaaaacagttttaccgaagtttgtttcagacaaaatgaag

SEQ ID NO: 359911 - DNA, 57 bp, Artificial
  Synthetic oligonucleotide
cccgctaatgctgattgtgcctggctggaagcgcaagaggaggaaggagacgtaggc

SEQ ID NO: 359912 - DNA, 59 bp, Artificial
  Synthetic oligonucleotide
cccgctacctgacaacctgactgcgttctacaatctagaaggcaacacctccagcaacc

SEQ ID NO: 359913 - DNA, 60 bp, Artificial
  Synthetic oligonucleotide
cccgctagaagttgccgtcacacttaacagacggatgagcagtgctgccgtttcttatgc

SEQ ID NO: 359914 - DNA, 55 bp, Artificial
  Synthetic oligonucleotide
cccgctagacgctatcgactttgtagaaatgaatatccgaacttttgataaagag

SEQ ID NO: 359915 - DNA, 58 bp, Artificial
  Synthetic oligonucleotide
cccgctatacactagcgtattccgacgcagtgttacacgccgaacataaccaacattg

SEQ ID NO: 359916 - DNA, 55 bp, Artificial
  Synthetic oligonucleotide
cccgctataggacgaagtggtagccaccactgatcaaacggcaaacatgcttctg

SEQ ID NO: 359917 - DNA, 55 bp, Artificial
  Synthetic oligonucleotide
cccgctattggtcagaagctagttttcacgcaggcagctaaggccgctaaccctg

SEQ ID NO: 359918 - DNA, 54 bp, Artificial
  Synthetic oligonucleotide
cccgctcaaagacgtggacttatcaaaacttatggttattaaagaccattctta

SEQ ID NO: 359919 - DNA, 54 bp, Artificial
  Synthetic oligonucleotide
cccgctcaaaggcgggactgctggtttcggatgggggaccaaacctgtataata

SEQ ID NO: 359920 - DNA, 60 bp, Artificial
  Synthetic oligonucleotide
cccgctcaatgattgagtcccctgtgtctatacgagctaatgaagccggcatcgtaggac

SEQ ID NO: 359921 - DNA, 55 bp, Artificial
  Synthetic oligonucleotide
cccgctcaccaaatccctcctaaacctgctaaagagagagtttatgctaaagacc

SEQ ID NO: 359922 - DNA, 51 bp, Artificial
  Synthetic oligonucleotide
cccgctcacgttcccctgggcgggggttgatgcgtcttcggacctcactcg

SEQ ID NO: 359923 - DNA, 49 bp, Artificial
  Synthetic oligonucleotide
cccgctcccaccccccccgggcctacgggccccctagtcagctttacgc

SEQ ID NO: 359924 - DNA, 55 bp, Artificial
  Synthetic oligonucleotide
cccgctccccaactggcggacgtgggagtatgaggtgtcaccgtgttctggaatg

SEQ ID NO: 359925 - DNA, 55 bp, Artificial
  Synthetic oligonucleotide
cccgctcgggaagatcacttattggcttatctcaacgaacacgtgtgcgtgaacg

SEQ ID NO: 359926 - DNA, 59 bp, Artificial
  Synthetic oligonucleotide
cccgctcggttgtggggtgacattcattccatacacgaattggcggggagcgatctcca

SEQ ID NO: 359927 - DNA, 55 bp, Artificial
  Synthetic oligonucleotide
cccgctctacaagagggaagtatcacgttaaataagttgcagaaaatagtgggag

SEQ ID NO: 359928 - DNA, 56 bp, Artificial
  Synthetic oligonucleotide
cccgctctctcgactggtctaaggtcacccttgacgggcgcccacttactactatc

SEQ ID NO: 359929 - DNA, 55 bp, Artificial
  Synthetic oligonucleotide
cccgctctctgagcccctacaatcgaagcagactctcccggatctaacacgttgg

SEQ ID NO: 359930 - DNA, 55 bp, Artificial
  Synthetic oligonucleotide
cccgctctggtaacacgtttgcacgatggattagatacttatgagctttcatgtt

SEQ ID NO: 359931 - DNA, 57 bp, Artificial
  Synthetic oligonucleotide
cccgctctggtgccgctataggcgccagggtacacttttacacagaccttagcagca

SEQ ID NO: 359932 - DNA, 55 bp, Artificial
  Synthetic oligonucleotide
cccgctcttcgcagacagtaacgagttcggctcagctaggaatctagtgccacac

SEQ ID NO: 359933 - DNA, 58 bp, Artificial
  Synthetic oligonucleotide
cccgctgaaatcgtgggcgtatagataaggatatcaacgagcccccaataatacgata

SEQ ID NO: 359934 - DNA, 59 bp, Artificial
  Synthetic oligonucleotide
cccgctgagccctttgcttccgctccaagatggaactaacactcacattatggccactg

SEQ ID NO: 359935 - DNA, 60 bp, Artificial
  Synthetic oligonucleotide
cccgctgcacttccacagcctgatacaactgacgacgaaaatcccgtcgctaatcctggc

SEQ ID NO: 359936 - DNA, 55 bp, Artificial
  Synthetic oligonucleotide
cccgctgctattgtctacaacggagtggcaggtactgccctgttcctttaccacc

SEQ ID NO: 359937 - DNA, 58 bp, Artificial
  Synthetic oligonucleotide
cccgctggacccgcaatacgttctgtggctagtcctcggtctctcagtggattccgcg

SEQ ID NO: 359938 - DNA, 58 bp, Artificial
  Synthetic oligonucleotide
cccgctggtggcttcgaaaacatgtccatctacgatcacttcggaattccgacacaag

SEQ ID NO: 359939 - DNA, 55 bp, Artificial
  Synthetic oligonucleotide
cccgctgtcgatactgacgtgtttgcaatggtatgctgggataggaacggtggtg

SEQ ID NO: 359940 - DNA, 55 bp, Artificial
  Synthetic oligonucleotide
cccgctgtgaatcccagcactcccttccgatacgcaaactgactagcagttcctg

SEQ ID NO: 359941 - DNA, 51 bp, Artificial
  Synthetic oligonucleotide
cccgctgttgagttataccacaaaggttagaacggtgagtgtaaaggcgtt

SEQ ID NO: 359942 - DNA, 57 bp, Artificial
  Synthetic oligonucleotide
cccgcttaatcccctcgagtgtctcccgaacgtgtgcactaacgttagcaacgtgca

SEQ ID NO: 359943 - DNA, 55 bp, Artificial
  Synthetic oligonucleotide
cccgcttacacgtgcgattgctcgcgccgcttacgcatagtccactttgcacggg

SEQ ID NO: 359944 - DNA, 54 bp, Artificial
  Synthetic oligonucleotide
cccgcttaccgtggggcctagatacgccttccaccagtgggactggcgacgtgg

SEQ ID NO: 359945 - DNA, 55 bp, Artificial
  Synthetic oligonucleotide
cccgcttacctgagagatgacgaagcaactgcagaggatcaacctacacaaccgg

SEQ ID NO: 359946 - DNA, 57 bp, Artificial
  Synthetic oligonucleotide
cccgcttagtgcacttagatggatccggtatttacaccgccgcgtactatacgggca

SEQ ID NO: 359947 - DNA, 55 bp, Artificial
  Synthetic oligonucleotide
cccgcttattgtaacactgatttaggtgctccactggaactgcgagactgcaaga

SEQ ID NO: 359948 - DNA, 60 bp, Artificial
  Synthetic oligonucleotide
cccgcttccatatctgaaaatatggctgcgcagcagaagtgtttcgccaataagaggatg

SEQ ID NO: 359949 - DNA, 55 bp, Artificial
  Synthetic oligonucleotide
cccgcttgtatgatgactgaccatcaccttcagccaacgggtgataggcaagccg

SEQ ID NO: 359950 - DNA, 58 bp, Artificial
  Synthetic oligonucleotide
cccgcttgtgaagccgacggacctggatcgattgccgaatcgtccaatccgctcaggt

SEQ ID NO: 359951 - DNA, 56 bp, Artificial
  Synthetic oligonucleotide
cccgctttagtgtctttccaaccgacgtatgattgtcctatggagacagttgggaa

SEQ ID NO: 359952 - DNA, 59 bp, Artificial
  Synthetic oligonucleotide
cccgctttatgcatcaatgtcagagcacgtcaacgtactcctaacgcgtacggaaggta

SEQ ID NO: 359953 - DNA, 58 bp, Artificial
  Synthetic oligonucleotide
cccggaaaacagaattatttccgctgcgtttgaggcaggcaactcagtattagatggc

SEQ ID NO: 359954 - DNA, 55 bp, Artificial
  Synthetic oligonucleotide
cccggaaatacccgatgtcaagaactccagaccatcagcccaatcaattaaaaag

SEQ ID NO: 359955 - DNA, 52 bp, Artificial
  Synthetic oligonucleotide
cccggaacggaagaagtcctggagtttgtggtacaatggattcggtaccaag

SEQ ID NO: 359956 - DNA, 55 bp, Artificial
  Synthetic oligonucleotide
cccggaactatgtcctagccctctgagactagttgacggccagacctgtgatatc

SEQ ID NO: 359957 - DNA, 55 bp, Artificial
  Synthetic oligonucleotide
cccggaagaatacttcactgggctatgattaaaagttcttgggaaatcaaccagc

SEQ ID NO: 359958 - DNA, 52 bp, Artificial
  Synthetic oligonucleotide
cccggaaggggatatctaccgaatgtttagccgttgataatttcagttttcc

SEQ ID NO: 359959 - DNA, 56 bp, Artificial
  Synthetic oligonucleotide
cccggaagggggcatttagtgcaccgggctctgccagaaggaacactggaacaaca

SEQ ID NO: 359960 - DNA, 60 bp, Artificial
  Synthetic oligonucleotide
cccggaagtatacatcctttccatggctgctaggttgtgctgccaactggatccttcgcg

SEQ ID NO: 359961 - DNA, 54 bp, Artificial
  Synthetic oligonucleotide
cccggaagttcatgaaacatttgtgaatccccaactccttcctgaggttgtagt

SEQ ID NO: 359962 - DNA, 53 bp, Artificial
  Synthetic oligonucleotide
cccggaatacgtcccgctaaaagaattcgcaggtaagaagaacatgaggaact

SEQ ID NO: 359963 - DNA, 55 bp, Artificial
  Synthetic oligonucleotide
cccggaatggctggccagacaaactgtaattgaatatagcttagcagacagccag

SEQ ID NO: 359964 - DNA, 51 bp, Artificial
  Synthetic oligonucleotide
cccggaattgtgcattaccagtttaccgccggggttccgggctcaggtaag

SEQ ID NO: 359965 - DNA, 60 bp, Artificial
  Synthetic oligonucleotide
cccggacaatagcaattagctgctgctcgggtgacggcacacattcgagcggcgaagcgg

SEQ ID NO: 359966 - DNA, 56 bp, Artificial
  Synthetic oligonucleotide
cccggaccatttgttcctggttcgggataagcagtaagccatgtcgacgtccaaga

SEQ ID NO: 359967 - DNA, 59 bp, Artificial
  Synthetic oligonucleotide
cccggactcgaactcggatctgccattggaactgacccggatgtcgattggacacgcta

SEQ ID NO: 359968 - DNA, 55 bp, Artificial
  Synthetic oligonucleotide
cccggagaaatccgcatagctataacagctgtagtacatactctcactggcgttg

SEQ ID NO: 359969 - DNA, 54 bp, Artificial
  Synthetic oligonucleotide
cccggagacagcgtaaccaccgaatcaaaacacaaagaccttcaactccatggg

SEQ ID NO: 359970 - DNA, 54 bp, Artificial
  Synthetic oligonucleotide
cccggagagagaagtgttaaggtggaaatttgacagcagactagcatttgaaca

SEQ ID NO: 359971 - DNA, 52 bp, Artificial
  Synthetic oligonucleotide
cccggagatctagagcactgccgttaccctgttcatgacaccgcttacctgc

SEQ ID NO: 359972 - DNA, 54 bp, Artificial
  Synthetic oligonucleotide
cccggagccatcacctatgccttatgttccttacccccggtctaccgaggtcta

SEQ ID NO: 359973 - DNA, 52 bp, Artificial
  Synthetic oligonucleotide
cccggagccggtggactccctcgtccgatacaagtcgttgacccgaaatacg

SEQ ID NO: 359974 - DNA, 55 bp, Artificial
  Synthetic oligonucleotide
cccggagcggacttctaccaacaagtacaaagtctacctcagcgctacaagccag

SEQ ID NO: 359975 - DNA, 54 bp, Artificial
  Synthetic oligonucleotide
cccggagcggggtcgttccgtctaatcgatagggatcagtcgacgtttgtggtc

SEQ ID NO: 359976 - DNA, 58 bp, Artificial
  Synthetic oligonucleotide
cccggaggcctggttcttgctgcatacctaccggacgatggcagcagtgaggttacgt

SEQ ID NO: 359977 - DNA, 55 bp, Artificial
  Synthetic oligonucleotide
cccggaggtatcgagaacggaagcgctatcgcagtactcattccgtctcacgttc

SEQ ID NO: 359978 - DNA, 51 bp, Artificial
  Synthetic oligonucleotide
cccggagtagagtacgaggactacgtgcgaaaaccgataacccgaccaacc

SEQ ID NO: 359979 - DNA, 56 bp, Artificial
  Synthetic oligonucleotide
cccggagtattctggcgaaagatgctgcgaaaggacacgacttaaaattagtcgtc

SEQ ID NO: 359980 - DNA, 50 bp, Artificial
  Synthetic oligonucleotide
cccggagttctacaaggactgagaactgctgacacagagaatgctgacac

SEQ ID NO: 359981 - DNA, 55 bp, Artificial
  Synthetic oligonucleotide
cccggatatacctcacgcaattttcacgatttctgctcaaaactcaatattaaac

SEQ ID NO: 359982 - DNA, 58 bp, Artificial
  Synthetic oligonucleotide
cccggatatggttgggtattacaggatgattatttgttgaatgccgtaaagatgactg

SEQ ID NO: 359983 - DNA, 50 bp, Artificial
  Synthetic oligonucleotide
cccggatctcacaagactgtgacttttgtgccagaatctgacgacattca

SEQ ID NO: 359984 - DNA, 60 bp, Artificial
  Synthetic oligonucleotide
cccggatgaggttaacaagagcacactacaaagcagacgggcagctgtgtctacactgga

SEQ ID NO: 359985 - DNA, 51 bp, Artificial
  Synthetic oligonucleotide
cccggatgatgaatcgagctccgttcgcagcagtgattattctttctgggg

SEQ ID NO: 359986 - DNA, 60 bp, Artificial
  Synthetic oligonucleotide
cccggatgcgtcccatgtgagaatgacaacggcaccttgcgatgttggatacaagtaaca

SEQ ID NO: 359987 - DNA, 55 bp, Artificial
  Synthetic oligonucleotide
cccggatggcaaggcagatgggtcttacaagcagccggtcaacccatggctgctc

SEQ ID NO: 359988 - DNA, 59 bp, Artificial
  Synthetic oligonucleotide
cccggatgggccacctccgaggtgtagaagaccttgctggcttcactcgtagtgtgtca

SEQ ID NO: 359989 - DNA, 55 bp, Artificial
  Synthetic oligonucleotide
cccggatggggctaactcgttgacaccctgcacttgccaagccgagtcctgttgg

SEQ ID NO: 359990 - DNA, 55 bp, Artificial
  Synthetic oligonucleotide
cccggattaaccggcacagtcgttgaagaagattcatggctatacacaaaagatg

SEQ ID NO: 359991 - DNA, 55 bp, Artificial
  Synthetic oligonucleotide
cccggattcattactttgcgtactttgtgagcgtagaaaccaccacgcttgaccc

SEQ ID NO: 359992 - DNA, 55 bp, Artificial
  Synthetic oligonucleotide
cccggattcccaaaatgcccctaattatgtgtctgaaaggcgcgtggtagtgcgg

SEQ ID NO: 359993 - DNA, 53 bp, Artificial
  Synthetic oligonucleotide
cccggcaaccaccccaacggggcgcaccacagaatcggccgcgggcacaacgg

SEQ ID NO: 359994 - DNA, 59 bp, Artificial
  Synthetic oligonucleotide
cccggcaatcacgccggaggtgcctacttccacgagtactccactctgcagtggttgac

SEQ ID NO: 359995 - DNA, 58 bp, Artificial
  Synthetic oligonucleotide
cccggcaatgccagtggttcagagcgggccctcagaatagaggttaaaactagtgtga

SEQ ID NO: 359996 - DNA, 58 bp, Artificial
  Synthetic oligonucleotide
cccggcacatggacacacgaattgcgtccaaactgacgaccccaccacacagttattc

SEQ ID NO: 359997 - DNA, 55 bp, Artificial
  Synthetic oligonucleotide
cccggcacctatcataccacttcatatcttttaatccatgatggcgaccgtgctg

SEQ ID NO: 359998 - DNA, 56 bp, Artificial
  Synthetic oligonucleotide
cccggcactttgttgccgctcgatactgtaggtttagaatattctagtgttagctt

SEQ ID NO: 359999 - DNA, 60 bp, Artificial
  Synthetic oligonucleotide
cccggcagattataagtgcaaacaacgaatgttcatgaaatcagtttgtgattcgttgaa

SEQ ID NO: 360000 - DNA, 50 bp, Artificial
  Synthetic oligonucleotide
cccggcatacgtagaggggcgctctcaacaaggcggcgtatagtagggct

SEQ ID NO: 360001 - DNA, 55 bp, Artificial
  Synthetic oligonucleotide
cccggcatcaatttgcgacacgcgcggcggtgtgtacccctgggagggtagaaac

SEQ ID NO: 360002 - DNA, 57 bp, Artificial
  Synthetic oligonucleotide
cccggcattcctcttggggatccctcatatgcaacagcgtccttcggaacacggttg

SEQ ID NO: 360003 - DNA, 55 bp, Artificial
  Synthetic oligonucleotide
cccggccagaactaccgcgtcacgaatcgagtcatcacatcagccggtcgcactg

SEQ ID NO: 360004 - DNA, 54 bp, Artificial
  Synthetic oligonucleotide
cccggcccaataattaagagaacgtgttcaaattcgtggtatgaccgaaggtca

SEQ ID NO: 360005 - DNA, 55 bp, Artificial
  Synthetic oligonucleotide
cccggcccactgtctttaattcaaaatgcctaagcgggatgggtcgtggcgcacc

SEQ ID NO: 360006 - DNA, 55 bp, Artificial
  Synthetic oligonucleotide
cccggcccggtgattcaggactgcccctatttgacatgaagatgaatgtcgtcgc

SEQ ID NO: 360007 - DNA, 55 bp, Artificial
  Synthetic oligonucleotide
cccggccctgtctactatcaggactacacgggcccagtctatcacagagctcctt

SEQ ID NO: 360008 - DNA, 53 bp, Artificial
  Synthetic oligonucleotide
cccggccgaacagggcaatcctcgcacggaacttacattgtgcatggacaggg

SEQ ID NO: 360009 - DNA, 55 bp, Artificial
  Synthetic oligonucleotide
cccggccgatgtatgcgagctcattcgtggagcctaccctaaaatccagaccacg

SEQ ID NO: 360010 - DNA, 55 bp, Artificial
  Synthetic oligonucleotide
cccggcctagcctccgaactcgtcataccaagtgagcgtctccactatcgtaatc

SEQ ID NO: 360011 - DNA, 55 bp, Artificial
  Synthetic oligonucleotide
cccggcctattttcgtctcggacaggagatggtcagaagatctgcaggaaaggtc

SEQ ID NO: 360012 - DNA, 57 bp, Artificial
  Synthetic oligonucleotide
cccggcctccgataagagattacagtacaccatgctgggggagatccttaattacta

SEQ ID NO: 360013 - DNA, 57 bp, Artificial
  Synthetic oligonucleotide
cccggcgtcgccatggcaactcacaaggacgacgaggaccgctttttcccatccagc

SEQ ID NO: 360014 - DNA, 55 bp, Artificial
  Synthetic oligonucleotide
cccggcgtgtgtatattccacagaccgacagttggttaggaccacccaatgttcc

SEQ ID NO: 360015 - DNA, 57 bp, Artificial
  Synthetic oligonucleotide
cccggcgttgaaagaacggttctacatactgcatgtgttgaagcgagttatctccgt

SEQ ID NO: 360016 - DNA, 56 bp, Artificial
  Synthetic oligonucleotide
cccggctaacttgagagtagttacatcacagtcgccctatgtagtagtggcaacca

SEQ ID NO: 360017 - DNA, 55 bp, Artificial
  Synthetic oligonucleotide
cccggctacacggcaaacgagcgctacgcgctctcggcgtacctgacgctgtttg

SEQ ID NO: 360018 - DNA, 55 bp, Artificial
  Synthetic oligonucleotide
cccggctcaaattatgcacaggaatatcataagtccagtcatgggtgttattggg

SEQ ID NO: 360019 - DNA, 55 bp, Artificial
  Synthetic oligonucleotide
cccggctcactgacgaccagatcagtgagttactatcattcaatgggacccctcc

SEQ ID NO: 360020 - DNA, 55 bp, Artificial
  Synthetic oligonucleotide
cccggctccacgggtcatccagccgagggacccacgatataacattgaggttggg

SEQ ID NO: 360021 - DNA, 52 bp, Artificial
  Synthetic oligonucleotide
cccggctctggcgttcccggatgaaggggagaaccttccgttccaggaagtc

SEQ ID NO: 360022 - DNA, 54 bp, Artificial
  Synthetic oligonucleotide
cccggctgcccatgggcgggagcccgaggtgagtgaaaccaccgaggtctaggg

SEQ ID NO: 360023 - DNA, 50 bp, Artificial
  Synthetic oligonucleotide
cccggcttctctcggtgcagcacccgcgactcacaaccataccgtttcac

SEQ ID NO: 360024 - DNA, 59 bp, Artificial
  Synthetic oligonucleotide
cccgggaacacccataattggtttgatgaagactgaaggcagtagctacatgtggtctg

SEQ ID NO: 360025 - DNA, 55 bp, Artificial
  Synthetic oligonucleotide
cccgggaaggattcccctcctttagcttatacttgttgatgagagcctccacagt

SEQ ID NO: 360026 - DNA, 55 bp, Artificial
  Synthetic oligonucleotide
cccgggaattgaagtctaagtgtccactcaggtagttatgtgggcctaacgctcg

SEQ ID NO: 360027 - DNA, 52 bp, Artificial
  Synthetic oligonucleotide
cccgggaccaacttggtagtttgtaccgtttcactccccagtcatttatcca

SEQ ID NO: 360028 - DNA, 51 bp, Artificial
  Synthetic oligonucleotide
cccgggacccccctgccacgcctcccacgaacacgcccatggggggggctc

SEQ ID NO: 360029 - DNA, 52 bp, Artificial
  Synthetic oligonucleotide
cccgggacctatcagtgcatctcgggaccctgccatcacaccttccacctga

SEQ ID NO: 360030 - DNA, 53 bp, Artificial
  Synthetic oligonucleotide
cccgggacgtcgagctcgagattagcgccgctctcttgggcctcccttgcgcc

SEQ ID NO: 360031 - DNA, 53 bp, Artificial
  Synthetic oligonucleotide
cccgggagatgcgtttaagaagtctcggaacaaaccaacgttgactaggccaa

SEQ ID NO: 360032 - DNA, 53 bp, Artificial
  Synthetic oligonucleotide
cccgggagtttgcccccctgaaacaatcagacactgcgtgtggtttccgtcct

SEQ ID NO: 360033 - DNA, 55 bp, Artificial
  Synthetic oligonucleotide
cccgggattctatcaccgggtgcgttagtagtcggcgtcatctgcgcggccatct

SEQ ID NO: 360034 - DNA, 55 bp, Artificial
  Synthetic oligonucleotide
cccgggcaaccagacatgtggaaggagcactttaaagcagacttctctcatctca

SEQ ID NO: 360035 - DNA, 53 bp, Artificial
  Synthetic oligonucleotide
cccgggcagtttgtcacctttaccgccagaaaggacgactcggccgaacatgg

SEQ ID NO: 360036 - DNA, 55 bp, Artificial
  Synthetic oligonucleotide
cccgggcatagcgaagcgcaacgatgtaaatggagtatcgcgcggagttgagtat

SEQ ID NO: 360037 - DNA, 55 bp, Artificial
  Synthetic oligonucleotide
cccgggccccagaagtgagaccaactctgagtggaccgatatggtgaaagatccg

SEQ ID NO: 360038 - DNA, 51 bp, Artificial
  Synthetic oligonucleotide
cccgggccttggtaccctccccgatgtcgttaggtttgctgggcgactttc

SEQ ID NO: 360039 - DNA, 60 bp, Artificial
  Synthetic oligonucleotide
cccgggctccacttgtgttgtttctgcactagcagcccatactataatttctgcagtgag

SEQ ID NO: 360040 - DNA, 57 bp, Artificial
  Synthetic oligonucleotide
cccgggctttcggaggcctaatggatgaactcaaggctcactgtgtcacactccctg

SEQ ID NO: 360041 - DNA, 52 bp, Artificial
  Synthetic oligonucleotide
cccggggaaaataccaaattcttcgctccggagttccgcacctgctatacat

SEQ ID NO: 360042 - DNA, 50 bp, Artificial
  Synthetic oligonucleotide
cccggggaacccggcgaatcgtccccacatagcagttcctcggaccccct

SEQ ID NO: 360043 - DNA, 49 bp, Artificial
  Synthetic oligonucleotide
cccggggaacccggcgaatcgtccccacatagcgagttcccggaccccc

SEQ ID NO: 360044 - DNA, 51 bp, Artificial
  Synthetic oligonucleotide
cccggggaactcgacttatcgtccccacatagcagactcccggaccccctt

SEQ ID NO: 360045 - DNA, 50 bp, Artificial
  Synthetic oligonucleotide
cccggggaactcgacttatcgtccccacatagcagggaccccggaccccc

SEQ ID NO: 360046 - DNA, 54 bp, Artificial
  Synthetic oligonucleotide
cccggggaactcggcaaatcgtccccacatagcagctccgggagccccttcaaa

SEQ ID NO: 360047 - DNA, 54 bp, Artificial
  Synthetic oligonucleotide
cccggggaactcggctaagccccgaaatgtctagttccactgtctccacttcca

SEQ ID NO: 360048 - DNA, 57 bp, Artificial
  Synthetic oligonucleotide
cccggggaagtttgtgaatggagaggcattgcggcaaatcctcagaaaatcaggtgg

SEQ ID NO: 360049 - DNA, 52 bp, Artificial
  Synthetic oligonucleotide
cccggggaccgcttccacagcgggatacaagacccctccaaggtacaaaaca

SEQ ID NO: 360050 - DNA, 55 bp, Artificial
  Synthetic oligonucleotide
cccggggacgcttggccactctgtgaacacgtgagaccgccagtcggaaaacttc

SEQ ID NO: 360051 - DNA, 53 bp, Artificial
  Synthetic oligonucleotide
cccggggagattcggcctagtcccgaaatgtctggttccgtcggctccacttc

SEQ ID NO: 360052 - DNA, 55 bp, Artificial
  Synthetic oligonucleotide
cccggggagcacgtttgcagaccgtggacaaagacacttccgtatacacacaaac

SEQ ID NO: 360053 - DNA, 53 bp, Artificial
  Synthetic oligonucleotide
cccggggatgttatacgataatacgcatctgctaacacacaaccaaacgcagc

SEQ ID NO: 360054 - DNA, 49 bp, Artificial
  Synthetic oligonucleotide
cccggggcgggtagccaaggcggtgttggggggggcttacgccttccag

SEQ ID NO: 360055 - DNA, 54 bp, Artificial
  Synthetic oligonucleotide
cccgggggcctcggcatccaacgggtgtacgtcggagacactgccctggcaggg

SEQ ID NO: 360056 - DNA, 54 bp, Artificial
  Synthetic oligonucleotide
cccggggggagctccctatcgtccccacatagcagagcccgggagccccttcta

SEQ ID NO: 360057 - DNA, 53 bp, Artificial
  Synthetic oligonucleotide
cccgggggtgcttgaggaccccggacgacgtgtgcagtttgattttgataacc

SEQ ID NO: 360058 - DNA, 52 bp, Artificial
  Synthetic oligonucleotide
cccggggtgcggagaactggcccgccactgggaacccaactggtgggaacga

SEQ ID NO: 360059 - DNA, 55 bp, Artificial
  Synthetic oligonucleotide
cccgggtaaacataaccttagaacaactgaggactctgacaccaatgccaaccag

SEQ ID NO: 360060 - DNA, 52 bp, Artificial
  Synthetic oligonucleotide
cccgggtaccacacccaaacggcaggaccctggcacttaggaaaattggagc

SEQ ID NO: 360061 - DNA, 55 bp, Artificial
  Synthetic oligonucleotide
cccgggtctaaggaaccagcagtcttgcatccagcagacaagagattagaagtag

SEQ ID NO: 360062 - DNA, 56 bp, Artificial
  Synthetic oligonucleotide
cccgggtctcgggacactccctgatgttgttaggtttgccgggcggctctcagaga

SEQ ID NO: 360063 - DNA, 54 bp, Artificial
  Synthetic oligonucleotide
cccgggtctgggaatgtaggtcgtgtgtggtactatacgcgttcggggacatct

SEQ ID NO: 360064 - DNA, 54 bp, Artificial
  Synthetic oligonucleotide
cccgggtcttgtttcagaaccaaaacaagcgtgaaatcgccctgtggagggcag

SEQ ID NO: 360065 - DNA, 55 bp, Artificial
  Synthetic oligonucleotide
cccgggtctttagctgacctcacgttttcgcggtatggagcctctcccagcaaag

SEQ ID NO: 360066 - DNA, 55 bp, Artificial
  Synthetic oligonucleotide
cccgggtgcaacacttagttagatgaaggtgagcacgattatattggatatctgt

SEQ ID NO: 360067 - DNA, 51 bp, Artificial
  Synthetic oligonucleotide
cccgggtgcaaccactgggcacaggactccaacaacgccccagacatacgg

SEQ ID NO: 360068 - DNA, 55 bp, Artificial
  Synthetic oligonucleotide
cccgggttagtggactgctacattaaccttggagcacgctggtcccttgactata

SEQ ID NO: 360069 - DNA, 53 bp, Artificial
  Synthetic oligonucleotide
cccgggttggctgacaaggttaaggagtactgggaggttgtgccgacttctac

SEQ ID NO: 360070 - DNA, 54 bp, Artificial
  Synthetic oligonucleotide
cccgggttgtgtcccctgtgtgaagaccggcgaccaaactaagtgttggctgcc

SEQ ID NO: 360071 - DNA, 52 bp, Artificial
  Synthetic oligonucleotide
cccggtaacactcatggaaagagtaaaacacggcgaaatagcaccgtggaac

SEQ ID NO: 360072 - DNA, 54 bp, Artificial
  Synthetic oligonucleotide
cccggtaccggtgacatccctagaagaatacaagtcatcgacccgcgggtcctg

SEQ ID NO: 360073 - DNA, 55 bp, Artificial
  Synthetic oligonucleotide
cccggtacggaaaccaaatggcgcctggaggtttgtgcatgacctacgagctaca

SEQ ID NO: 360074 - DNA, 57 bp, Artificial
  Synthetic oligonucleotide
cccggtaggtctctttggtgtaggatagggcacgatcgatgtggggaggatgaccac

SEQ ID NO: 360075 - DNA, 54 bp, Artificial
  Synthetic oligonucleotide
cccggtagttttggaagtgagttgggcttcgatctggttcgcttttgtgaggcg

SEQ ID NO: 360076 - DNA, 57 bp, Artificial
  Synthetic oligonucleotide
cccggtcaagaatctattcgctcctaatacgctaaagtcggttgagatctccctagc

SEQ ID NO: 360077 - DNA, 55 bp, Artificial
  Synthetic oligonucleotide
cccggtcaatttcaagaggtgctgtcccctcgtgtgtggaaaggctatccagttc

SEQ ID NO: 360078 - DNA, 52 bp, Artificial
  Synthetic oligonucleotide
cccggtcatcttggtagccactataggtgggtcttaagggttggttaaggtc

SEQ ID NO: 360079 - DNA, 51 bp, Artificial
  Synthetic oligonucleotide
cccggtccctgatattgattctcgcggcgcaatattgcgtcgccagtataa

SEQ ID NO: 360080 - DNA, 55 bp, Artificial
  Synthetic oligonucleotide
cccggtctaagccgcttggaatatgacagggttattttcctcatcttatttctac

SEQ ID NO: 360081 - DNA, 54 bp, Artificial
  Synthetic oligonucleotide
cccggtctagagttcgggtacaagtccgaagacgataaactacactctctctct

SEQ ID NO: 360082 - DNA, 60 bp, Artificial
  Synthetic oligonucleotide
cccggtctatgttgggcttgatgcttcccgctttgaccagcactgtagtgctgatgcgtt

SEQ ID NO: 360083 - DNA, 60 bp, Artificial
  Synthetic oligonucleotide
cccggtctctacatcctgcccctctgcttccaaacagcttgctcctccgctcactgctga

SEQ ID NO: 360084 - DNA, 53 bp, Artificial
  Synthetic oligonucleotide
cccggtctgtctcttaactttgtagaatggctttctaccggagtttgggagcc

SEQ ID NO: 360085 - DNA, 60 bp, Artificial
  Synthetic oligonucleotide
cccggtgatagttgctctccttaagagagtgactatcagagctaaacctatttgcgagcg

SEQ ID NO: 360086 - DNA, 55 bp, Artificial
  Synthetic oligonucleotide
cccggtgattcaagagaagtccttgtcactagctgatggtgcacaagccgtgctc

SEQ ID NO: 360087 - DNA, 55 bp, Artificial
  Synthetic oligonucleotide
cccggtgccgctactgcctttgtgggcgctggtctagccggcgctgccatcggca

SEQ ID NO: 360088 - DNA, 53 bp, Artificial
  Synthetic oligonucleotide
cccggtgcgagcaccctagacttgtcggggtggttcgtagcgggtggacgcgg

SEQ ID NO: 360089 - DNA, 60 bp, Artificial
  Synthetic oligonucleotide
cccggtgcgtgaatccattatcgtgacagcctagagcgatgaagtatgaacagccacaag

SEQ ID NO: 360090 - DNA, 54 bp, Artificial
  Synthetic oligonucleotide
cccggtgggatcacaactaccttgcgagcctgaaccggacgtggccgtgttaac

SEQ ID NO: 360091 - DNA, 50 bp, Artificial
  Synthetic oligonucleotide
cccggtgtctgcgcaagcggggaagggtgaattgtgcgccgtgttggacg

SEQ ID NO: 360092 - DNA, 55 bp, Artificial
  Synthetic oligonucleotide
cccggtgttctcatgcaccatctcattggtaaggttgctgcaggttgggaccccg

SEQ ID NO: 360093 - DNA, 58 bp, Artificial
  Synthetic oligonucleotide
cccggttcaacgccttatggctttcaggaggcattcaatatgtttgagaatgaaccca

SEQ ID NO: 360094 - DNA, 57 bp, Artificial
  Synthetic oligonucleotide
cccggttcccgacgtggactctcgtggtgctatattgcgccgccagtacaatttgtc

SEQ ID NO: 360095 - DNA, 58 bp, Artificial
  Synthetic oligonucleotide
cccggttgatgtctcaatcaaagcgcgtgccggcgggtttattcctatgccgcacgac

SEQ ID NO: 360096 - DNA, 52 bp, Artificial
  Synthetic oligonucleotide
cccggttgcgtgttcggacggttatggaggactggtgacaacggacccgaaa

SEQ ID NO: 360097 - DNA, 55 bp, Artificial
  Synthetic oligonucleotide
cccggttggcgcctccaaggtgcaagatgggctccagatcttctaccaggatccc

SEQ ID NO: 360098 - DNA, 51 bp, Artificial
  Synthetic oligonucleotide
cccggtttccccaaaatacccctaattatgtgtctggaaggcgcgtggtaa

SEQ ID NO: 360099 - DNA, 52 bp, Artificial
  Synthetic oligonucleotide
cccggtttgacgacccctcggtacgtcttcgagacaactgcccctcagggtc

SEQ ID NO: 360100 - DNA, 55 bp, Artificial
  Synthetic oligonucleotide
cccggttttggtctgtctcgctctggacgtcttcttgtgtgtatgggcgaaaaac

SEQ ID NO: 360101 - DNA, 57 bp, Artificial
  Synthetic oligonucleotide
cccgtaaaagaagcctcatttgtgataactacattcaattcattattagataagggc

SEQ ID NO: 360102 - DNA, 55 bp, Artificial
  Synthetic oligonucleotide
cccgtaaacgtctatctattggccgccgtgtattccgacttcaacgacactatag

SEQ ID NO: 360103 - DNA, 57 bp, Artificial
  Synthetic oligonucleotide
cccgtaatccatattcggtcacgcggtgatataccaaaggcgtgtcaaaagagcctc

SEQ ID NO: 360104 - DNA, 59 bp, Artificial
  Synthetic oligonucleotide
cccgtaatgaggtacgccgtcgtgtactgtgttaatccatgcaccggatcgaatattca

SEQ ID NO: 360105 - DNA, 53 bp, Artificial
  Synthetic oligonucleotide
cccgtaattataaataccgccccctgcctgttctcagacggatccacctcccg

SEQ ID NO: 360106 - DNA, 54 bp, Artificial
  Synthetic oligonucleotide
cccgtacaaccaagtccacatttcgaaagcgagcgacccaaagattgacgggtg

SEQ ID NO: 360107 - DNA, 55 bp, Artificial
  Synthetic oligonucleotide
cccgtacatcaggaaacaactggcactcagtccgtgatataaaacctggatacag

SEQ ID NO: 360108 - DNA, 58 bp, Artificial
  Synthetic oligonucleotide
cccgtaccagagggacagccagtcaggcgcggggaactgcgtctgcgggcgtgattac

SEQ ID NO: 360109 - DNA, 59 bp, Artificial
  Synthetic oligonucleotide
cccgtacctttttgcattccgattcctcaagtgtatccatgcatcacagcccgccgtgt

SEQ ID NO: 360110 - DNA, 60 bp, Artificial
  Synthetic oligonucleotide
cccgtacgactgtctccctcaattactatactttgaggcctcagaggccgcgcagcggca

SEQ ID NO: 360111 - DNA, 52 bp, Artificial
  Synthetic oligonucleotide
cccgtacgataccggctcatcggttacccccctaacgtccagcctgtaggac

SEQ ID NO: 360112 - DNA, 55 bp, Artificial
  Synthetic oligonucleotide
cccgtacgataggagcagagagagcgacaaatacgtatatagccgagtgaatctg

SEQ ID NO: 360113 - DNA, 54 bp, Artificial
  Synthetic oligonucleotide
cccgtacggtggactccgtactattgaacggtgtcaaacatccggtggacacat

SEQ ID NO: 360114 - DNA, 55 bp, Artificial
  Synthetic oligonucleotide
cccgtacgtacagcatccatgggatgaccaatgcatgccagagctgccaaacagc

SEQ ID NO: 360115 - DNA, 53 bp, Artificial
  Synthetic oligonucleotide
cccgtacgtcctctccgaccgaccctgatcccaagggtcgcccccgcgctgtc

SEQ ID NO: 360116 - DNA, 59 bp, Artificial
  Synthetic oligonucleotide
cccgtactgagtgtgcgcgacggagccaggtacgaatcgtaccgcgatgagctacggaa

SEQ ID NO: 360117 - DNA, 55 bp, Artificial
  Synthetic oligonucleotide
cccgtactgctacgtgagacgacatacaagggcgaagtcgttgacgctatcgtac

SEQ ID NO: 360118 - DNA, 51 bp, Artificial
  Synthetic oligonucleotide
cccgtacttgggtattgctttggcagtccctttgggcccccataaattctt

SEQ ID NO: 360119 - DNA, 55 bp, Artificial
  Synthetic oligonucleotide
cccgtagaaggtgcgacgtggtgacactcgcacgcgtaactccggttctccggat

SEQ ID NO: 360120 - DNA, 54 bp, Artificial
  Synthetic oligonucleotide
cccgtagagaggacgggggccggctgacacaacaaattgggataggagcccttg

SEQ ID NO: 360121 - DNA, 57 bp, Artificial
  Synthetic oligonucleotide
cccgtagggactccgtgcaaggacctgatcgtctgaagatccacgggatctgaaaac

SEQ ID NO: 360122 - DNA, 57 bp, Artificial
  Synthetic oligonucleotide
cccgtagtagcaaaagaaatagtagcctgctgtgataaatgtcagcaaaaaggggaa

SEQ ID NO: 360123 - DNA, 60 bp, Artificial
  Synthetic oligonucleotide
cccgtagtcggccatgaagattcatacgaggtatcagaccaaggaagagtcagatccttg

SEQ ID NO: 360124 - DNA, 55 bp, Artificial
  Synthetic oligonucleotide
cccgtagtggaggaatcagaagagatcagtcttctgaatatagttcatgcgccag

SEQ ID NO: 360125 - DNA, 55 bp, Artificial
  Synthetic oligonucleotide
cccgtagtgtacatcccatttatcttgggtcgatgcattatgatatatcctacgc

SEQ ID NO: 360126 - DNA, 60 bp, Artificial
  Synthetic oligonucleotide
cccgtatatgatcctcgccgcaacaacttgctcttcgttccctccctcgctggacactca

SEQ ID NO: 360127 - DNA, 57 bp, Artificial
  Synthetic oligonucleotide
cccgtatcggttgtggcactacccctgcaccgtcaactacactatccacaaggtgcg

SEQ ID NO: 360128 - DNA, 52 bp, Artificial
  Synthetic oligonucleotide
cccgtatgagcaccacatggtcctgggtgggggcagacaacaatgataggat

SEQ ID NO: 360129 - DNA, 55 bp, Artificial
  Synthetic oligonucleotide
cccgtatgcgccccacaaggccgtgtcgccgacttgcgataagacgcaacttgca

SEQ ID NO: 360130 - DNA, 60 bp, Artificial
  Synthetic oligonucleotide
cccgtatgcgttcaacgtgattcgtggtgctgcatcacctaacactccgaacctgccagc

SEQ ID NO: 360131 - DNA, 55 bp, Artificial
  Synthetic oligonucleotide
cccgtatggcttctccatattgatcgacatacaacagaggttcggtatgcacacg

SEQ ID NO: 360132 - DNA, 55 bp, Artificial
  Synthetic oligonucleotide
cccgtattaaacgtagtgatactaagcaggcagttatgactgcgttctatggttc

SEQ ID NO: 360133 - DNA, 55 bp, Artificial
  Synthetic oligonucleotide
cccgtattacattaagagcctccgtcttacttgctgcgttaagagccttggcgta

SEQ ID NO: 360134 - DNA, 56 bp, Artificial
  Synthetic oligonucleotide
cccgtattgatcctgctaacgctaccaacaaccgccaatttgcgcatcccctccgc

SEQ ID NO: 360135 - DNA, 55 bp, Artificial
  Synthetic oligonucleotide
cccgtattgcgaaatatctactactcatcaaactagcaatgctttctagagtggt

SEQ ID NO: 360136 - DNA, 55 bp, Artificial
  Synthetic oligonucleotide
cccgtcaaaacttaggagctacccaaaacagcacgcttaccacgcgccctccatc

SEQ ID NO: 360137 - DNA, 55 bp, Artificial
  Synthetic oligonucleotide
cccgtcaaaagacagatgaagagtattgccatgatctcaaagagtttcttggaga

SEQ ID NO: 360138 - DNA, 54 bp, Artificial
  Synthetic oligonucleotide
cccgtcaaactcggcaggagtaaccgctttcctctcaggaccctccacgtccag

SEQ ID NO: 360139 - DNA, 55 bp, Artificial
  Synthetic oligonucleotide
cccgtcaagaggacgtttacgtcttaataagcctagtgcctcacgtaaattgtca

SEQ ID NO: 360140 - DNA, 54 bp, Artificial
  Synthetic oligonucleotide
cccgtcaagggcgtattgacggactacccgatcctgtacctagtcaaggaccgc

SEQ ID NO: 360141 - DNA, 55 bp, Artificial
  Synthetic oligonucleotide
cccgtcaccacgcagcttatggtaccggtgcacctcattagaacgcctgtgaccg

SEQ ID NO: 360142 - DNA, 60 bp, Artificial
  Synthetic oligonucleotide
cccgtcactaaccctggccctagcgcaccaccagtgagtaaaggtgctgatcagccagaa

SEQ ID NO: 360143 - DNA, 60 bp, Artificial
  Synthetic oligonucleotide
cccgtcagagacagcttttgcactcgactggtgtatagcatctttcgataacatgagaac

SEQ ID NO: 360144 - DNA, 55 bp, Artificial
  Synthetic oligonucleotide
cccgtcagagtaggtatgaatatgaatgaggatggtcctatcatctttgagagac

SEQ ID NO: 360145 - DNA, 55 bp, Artificial
  Synthetic oligonucleotide
cccgtcaggcgagtggccgtttagggtgaacccccaaggtgagcactgaaggatc

SEQ ID NO: 360146 - DNA, 57 bp, Artificial
  Synthetic oligonucleotide
cccgtcatgagactgacgttaaatctatctgttcttttcgagacattcccgtagaaa

SEQ ID NO: 360147 - DNA, 51 bp, Artificial
  Synthetic oligonucleotide
cccgtccaaaaacacaatatactactaccaaggggatcccatagctgcgta

SEQ ID NO: 360148 - DNA, 60 bp, Artificial
  Synthetic oligonucleotide
cccgtccacaacggggacatagtgtgcatggttgagcgtactttggctgagtcattcgaa

SEQ ID NO: 360149 - DNA, 55 bp, Artificial
  Synthetic oligonucleotide
cccgtccagagaaccgccaagtcagtaacgtgcatctactgtgccgaagagcggc

SEQ ID NO: 360150 - DNA, 55 bp, Artificial
  Synthetic oligonucleotide
cccgtccatgactaagattgcttccggtcaacagacgttatccaacacacctggg

SEQ ID NO: 360151 - DNA, 54 bp, Artificial
  Synthetic oligonucleotide
cccgtcccctatttccgaaggtgattttaagggatacgtctctgataattgcac

SEQ ID NO: 360152 - DNA, 54 bp, Artificial
  Synthetic oligonucleotide
cccgtccctactcccataggcttcgcgtaggctaaccctgttgaactgccgttc

SEQ ID NO: 360153 - DNA, 56 bp, Artificial
  Synthetic oligonucleotide
cccgtccgttaatgcaagatgtattctgtttacaggcgtgggtataagacgccgta

SEQ ID NO: 360154 - DNA, 55 bp, Artificial
  Synthetic oligonucleotide
cccgtcctagagaagggagattcgggaacgttcagcatttgagggacgaagccac

SEQ ID NO: 360155 - DNA, 58 bp, Artificial
  Synthetic oligonucleotide
cccgtccttatcgatataggacttgacgtcggagcttgatttagctccctgaacattc

SEQ ID NO: 360156 - DNA, 53 bp, Artificial
  Synthetic oligonucleotide
cccgtcctttgacgcgaaggcatggtgggagtccctgaagggttaacccacac

SEQ ID NO: 360157 - DNA, 55 bp, Artificial
  Synthetic oligonucleotide
cccgtcgaaaggtataacattctgaccaatcctgacgctccgcctacgcaaatac

SEQ ID NO: 360158 - DNA, 55 bp, Artificial
  Synthetic oligonucleotide
cccgtcgacgcaacaacaaccgtcggcgtggcatgagagcggatgcacctttagc

SEQ ID NO: 360159 - DNA, 55 bp, Artificial
  Synthetic oligonucleotide
cccgtcgagctacagagatatactttagccagatactatgatatccgtcctggac

SEQ ID NO: 360160 - DNA, 51 bp, Artificial
  Synthetic oligonucleotide
cccgtcgctctgattacaccgaggaacgcgcctacagggtcgcaacgtata

SEQ ID NO: 360161 - DNA, 55 bp, Artificial
  Synthetic oligonucleotide
cccgtcgctggcatcacataatcaagtctggattccaagactctactgacctgga

SEQ ID NO: 360162 - DNA, 58 bp, Artificial
  Synthetic oligonucleotide
cccgtcggaatgttcctctcgtgcgactctgatatacgtcggtttgacgattgaccag

SEQ ID NO: 360163 - DNA, 54 bp, Artificial
  Synthetic oligonucleotide
cccgtcggcgctgaatccagcggacgatccctctcggggtcgcttggggctgta

SEQ ID NO: 360164 - DNA, 54 bp, Artificial
  Synthetic oligonucleotide
cccgtcgtgtgtacgatgaggcggtacaaaccttaacagtgttggacaaaaggc

SEQ ID NO: 360165 - DNA, 56 bp, Artificial
  Synthetic oligonucleotide
cccgtctaggaataaacgtggatcttactttaatcaacgtcgacattattcacgca

SEQ ID NO: 360166 - DNA, 55 bp, Artificial
  Synthetic oligonucleotide
cccgtctataatatgaccccagccagccgttatgcccccgttcgatttgtgtcgg

SEQ ID NO: 360167 - DNA, 55 bp, Artificial
  Synthetic oligonucleotide
cccgtctatgcaccctcaactactgatttcagatcaacagaagcacttgctagcc

SEQ ID NO: 360168 - DNA, 55 bp, Artificial
  Synthetic oligonucleotide
cccgtctattcaatctagaggtctgtttgaagccattgctggctttattgagggg

SEQ ID NO: 360169 - DNA, 55 bp, Artificial
  Synthetic oligonucleotide
cccgtctcacggtcctagccaccgcaactccccctggctcagtaaccgtcccaca

SEQ ID NO: 360170 - DNA, 60 bp, Artificial
  Synthetic oligonucleotide
cccgtctcatacacaactgaacatgacaaggtcactcagctgttgatcgattcgaaagca

SEQ ID NO: 360171 - DNA, 54 bp, Artificial
  Synthetic oligonucleotide
cccgtctcgggacggcagcttaccccttacttggcgtcggtatatataaggtgc

SEQ ID NO: 360172 - DNA, 55 bp, Artificial
  Synthetic oligonucleotide
cccgtctgataccgtgcaaacacgccacgtcattcagcaacgcagcaggaccgag

SEQ ID NO: 360173 - DNA, 57 bp, Artificial
  Synthetic oligonucleotide
cccgtctgcacgtatgtgccagcgactctatgcgaccaaatgaccggcatattggct

SEQ ID NO: 360174 - DNA, 55 bp, Artificial
  Synthetic oligonucleotide
cccgtctgcgccgttgaccagtacatcaccgtcattccgtcacgtgactacgcgc

SEQ ID NO: 360175 - DNA, 60 bp, Artificial
  Synthetic oligonucleotide
cccgtctggcggatggctcatttgtattcgctgcggctcctacctatgatatagtgcttg

SEQ ID NO: 360176 - DNA, 52 bp, Artificial
  Synthetic oligonucleotide
cccgtcttttccgtacgtttatgcccgcgcatacccctcgccgtactcttcg

SEQ ID NO: 360177 - DNA, 57 bp, Artificial
  Synthetic oligonucleotide
cccgtgaaagaaagtggtccccgctcacttgtttctgtcagccagtcatatttacgc

SEQ ID NO: 360178 - DNA, 53 bp, Artificial
  Synthetic oligonucleotide
cccgtgaaagaaatggtccccgcgcactttttttgtcggccagttatattcac

SEQ ID NO: 360179 - DNA, 58 bp, Artificial
  Synthetic oligonucleotide
cccgtgaattgacacggaacagcttctcacgccgctgtataattaaggttcgtgagcc

SEQ ID NO: 360180 - DNA, 55 bp, Artificial
  Synthetic oligonucleotide
cccgtgaccacaagtttgaaattgcagcttccacatctggtaggaattattacca

SEQ ID NO: 360181 - DNA, 57 bp, Artificial
  Synthetic oligonucleotide
cccgtgaccctacagtccccctcgcgagagccgcgtgggaaacagcaagacacactc

SEQ ID NO: 360182 - DNA, 55 bp, Artificial
  Synthetic oligonucleotide
cccgtgacgtccgtacttgtccgccactacgtaccgctcagagtaaccgctagca

SEQ ID NO: 360183 - DNA, 56 bp, Artificial
  Synthetic oligonucleotide
cccgtgacttccgtgttgccgctttcaagggtgacgattctgtggtcctttgtagc

SEQ ID NO: 360184 - DNA, 54 bp, Artificial
  Synthetic oligonucleotide
cccgtgagaacccaacttgcaaccggtaaagcgtattgtctctcgtgtgacccg

SEQ ID NO: 360185 - DNA, 55 bp, Artificial
  Synthetic oligonucleotide
cccgtgagtgtgtggttggcgtctgttctgaaggctgtatcgcaccgccttaccc

SEQ ID NO: 360186 - DNA, 51 bp, Artificial
  Synthetic oligonucleotide
cccgtgagttcacggaggcggaagtgggggggctaaacctcaccgagtggg

SEQ ID NO: 360187 - DNA, 51 bp, Artificial
  Synthetic oligonucleotide
cccgtgataacacctactaggcagacgatgtatgtagactctatccaagcg

SEQ ID NO: 360188 - DNA, 55 bp, Artificial
  Synthetic oligonucleotide
cccgtgatgctgtacggcactatggcacgctacatgaggcgcatgcgggagatcc

SEQ ID NO: 360189 - DNA, 57 bp, Artificial
  Synthetic oligonucleotide
cccgtgattaagccggctcaaccttttaccccagctgtgcacgaaacgcaacgcata

SEQ ID NO: 360190 - DNA, 55 bp, Artificial
  Synthetic oligonucleotide
cccgtgcaatttatcttgtaaccctttgaatggatagtcatggtcggcaggtggt

SEQ ID NO: 360191 - DNA, 58 bp, Artificial
  Synthetic oligonucleotide
cccgtgccaattctatcctgctcacccccttaccttcctatgcacctgattcgacctc

SEQ ID NO: 360192 - DNA, 54 bp, Artificial
  Synthetic oligonucleotide
cccgtgccggtttaacaactccaaattatgtcttcgagactacggcaccacaag

SEQ ID NO: 360193 - DNA, 53 bp, Artificial
  Synthetic oligonucleotide
cccgtgccgtaagaacatttacttccacaagtttgtcaccggcttaggtgtta

SEQ ID NO: 360194 - DNA, 55 bp, Artificial
  Synthetic oligonucleotide
cccgtgcctggtgcacagatgcggtttgtagggaccggcttcggtaactacacct

SEQ ID NO: 360195 - DNA, 52 bp, Artificial
  Synthetic oligonucleotide
cccgtgcgccagttcccatttttgagctccgtagctcccggtccttgcccct

SEQ ID NO: 360196 - DNA, 55 bp, Artificial
  Synthetic oligonucleotide
cccgtgcggaagaatcacttgcaaagaatgtgtggaggattttcataatcagaac

SEQ ID NO: 360197 - DNA, 55 bp, Artificial
  Synthetic oligonucleotide
cccgtgctccaactgagataattcgtggtgtgactaaatatggtgatggttacag

SEQ ID NO: 360198 - DNA, 55 bp, Artificial
  Synthetic oligonucleotide
cccgtgcttcaggactcctccatgaaaggctggatgagtacgagttgcaaggccc

SEQ ID NO: 360199 - DNA, 51 bp, Artificial
  Synthetic oligonucleotide
cccgtggatactggctgggcccgagctaattgggttccagccattggtgct

SEQ ID NO: 360200 - DNA, 54 bp, Artificial
  Synthetic oligonucleotide
cccgtggcactacgcagacgtcggaggtctcgtttcagcgggggtagcctatat

SEQ ID NO: 360201 - DNA, 54 bp, Artificial
  Synthetic oligonucleotide
cccgtggcgttggaggggagggatgaggcgtttattttattagccgctcgggca

SEQ ID NO: 360202 - DNA, 57 bp, Artificial
  Synthetic oligonucleotide
cccgtgggcgagcggtgcctctggtgaacgccgtgggccctacctcaaacatgagat

SEQ ID NO: 360203 - DNA, 55 bp, Artificial
  Synthetic oligonucleotide
cccgtggggaaagggagcgcgacctctattcccctgagtctctgtacacatcccc

SEQ ID NO: 360204 - DNA, 60 bp, Artificial
  Synthetic oligonucleotide
cccgtggggaggatctagatatagatccataatgataagacatcagtcatttgctaacat

SEQ ID NO: 360205 - DNA, 55 bp, Artificial
  Synthetic oligonucleotide
cccgtggtagagaagaggactcgtcgttctcgtaagaatccacaagaagccaaac

SEQ ID NO: 360206 - DNA, 55 bp, Artificial
  Synthetic oligonucleotide
cccgtggttgaacattatgcgtagcttggtgacaatcattctggaccctgcttga

SEQ ID NO: 360207 - DNA, 55 bp, Artificial
  Synthetic oligonucleotide
cccgtggttgaacattatgcgtatttgggtcacatacatctgggaccctgcttga

SEQ ID NO: 360208 - DNA, 55 bp, Artificial
  Synthetic oligonucleotide
cccgtgtaaccttagaagcaaacaaattgtacaatagggtgcatcacaaccagtg

SEQ ID NO: 360209 - DNA, 54 bp, Artificial
  Synthetic oligonucleotide
cccgtgtaatgacggggttcagactcctagccataggtatatgggttccccctc

SEQ ID NO: 360210 - DNA, 55 bp, Artificial
  Synthetic oligonucleotide
cccgtgtaattgcttacgatcacgaacattacccaggtggttctgagagcagttc

SEQ ID NO: 360211 - DNA, 55 bp, Artificial
  Synthetic oligonucleotide
cccgtgtccgtacgagctaatgaagccggcatcgtaggacaatacctgaaagggc

SEQ ID NO: 360212 - DNA, 57 bp, Artificial
  Synthetic oligonucleotide
cccgtgtctgtcgtcagaaagcggacgtatcagaaactgtgtccgattcatcacatc

SEQ ID NO: 360213 - DNA, 55 bp, Artificial
  Synthetic oligonucleotide
cccgtgtgagaatagagctgtgggaagtagagtatccctatttgtgatctctgtg

SEQ ID NO: 360214 - DNA, 55 bp, Artificial
  Synthetic oligonucleotide
cccgtgtgaggaagggaaagtgtgctacctgaccatcaatcagtgtggtgacccc

SEQ ID NO: 360215 - DNA, 55 bp, Artificial
  Synthetic oligonucleotide
cccgtgtggagaggacgcagactactgttgctttgttggatttcccgggcttcca

SEQ ID NO: 360216 - DNA, 57 bp, Artificial
  Synthetic oligonucleotide
cccgtgtggagcccaaatcagtggacatgtcaaaaacgggtccatgaggatcgtcgg

SEQ ID NO: 360217 - DNA, 55 bp, Artificial
  Synthetic oligonucleotide
cccgtgtggctgatgggcttaatgagtacggagaagaaaagaaacgagtcgtagg

SEQ ID NO: 360218 - DNA, 55 bp, Artificial
  Synthetic oligonucleotide
cccgtgtggtcgttcatttacatgggccttcctccgatccttctccccggccaga

SEQ ID NO: 360219 - DNA, 55 bp, Artificial
  Synthetic oligonucleotide
cccgtgtgtacctcaccaccagtgtgacacacgagaaatcaattggaccctacac

SEQ ID NO: 360220 - DNA, 55 bp, Artificial
  Synthetic oligonucleotide
cccgtgttatcgattatttgtcacactgtttgagcatcgttgacatggtgtctct

SEQ ID NO: 360221 - DNA, 58 bp, Artificial
  Synthetic oligonucleotide
cccgtgttcacagccatcggagcggccggtaagtggctgtgggacaactccctcaagc

SEQ ID NO: 360222 - DNA, 55 bp, Artificial
  Synthetic oligonucleotide
cccgtgttgtggttcactatgacccaatcactcagtcagcgtcagcgaaacgagg

SEQ ID NO: 360223 - DNA, 55 bp, Artificial
  Synthetic oligonucleotide
cccgtgtttaaatcattcgtgcctcttacggaactccttaaatggagcctcgcag

SEQ ID NO: 360224 - DNA, 56 bp, Artificial
  Synthetic oligonucleotide
cccgtgtttcacgtgcaaccgacctagaccgacgctacaggtgcgtcctcagttta

SEQ ID NO: 360225 - DNA, 59 bp, Artificial
  Synthetic oligonucleotide
cccgttaagtgcttagtcgctttagaagtatctgatgcattagtcggagcggatgtacg

SEQ ID NO: 360226 - DNA, 55 bp, Artificial
  Synthetic oligonucleotide
cccgttacaaatatgcatcaattccattccctcaatgttgggggtcggggggaca

SEQ ID NO: 360227 - DNA, 55 bp, Artificial
  Synthetic oligonucleotide
cccgttacaagaggctggaccctccatggcgtttgtagacgccagcagcgttgcc

SEQ ID NO: 360228 - DNA, 54 bp, Artificial
  Synthetic oligonucleotide
cccgttacaatgaaggcagaagttcggcggcgatacgacctacctacaagactc

SEQ ID NO: 360229 - DNA, 54 bp, Artificial
  Synthetic oligonucleotide
cccgttaggctaaaaggggtgagcccgaggcttgttcgaatctcgccaactggc

SEQ ID NO: 360230 - DNA, 55 bp, Artificial
  Synthetic oligonucleotide
cccgttatggcacaattgcaagcaaccacatgggaacattatgttctaggatagt

SEQ ID NO: 360231 - DNA, 57 bp, Artificial
  Synthetic oligonucleotide
cccgttattacgaagttatgtttccttcgtgtgcatttcaatgccctcattgttcga

SEQ ID NO: 360232 - DNA, 54 bp, Artificial
  Synthetic oligonucleotide
cccgttcaaaaacaggactactggtttcagatggaggaccgaatttgtacaata

SEQ ID NO: 360233 - DNA, 53 bp, Artificial
  Synthetic oligonucleotide
cccgttcactttaatcgaacggtttgctcattggtttgcgaaaacctctcgcg

SEQ ID NO: 360234 - DNA, 60 bp, Artificial
  Synthetic oligonucleotide
cccgttcagagccctcataagctgggagatgggtcaagcacccagcccatataatactag

SEQ ID NO: 360235 - DNA, 55 bp, Artificial
  Synthetic oligonucleotide
cccgttccgggttccttgcttgagatggatgaaggtgacatgttccactacggtg

SEQ ID NO: 360236 - DNA, 52 bp, Artificial
  Synthetic oligonucleotide
cccgttcctgtatgatacagattgggttaggtttgatgaagcaccgctagct

SEQ ID NO: 360237 - DNA, 58 bp, Artificial
  Synthetic oligonucleotide
cccgttctactgttcccttctatgataatggatttggccttatggctgtcggcaacag

SEQ ID NO: 360238 - DNA, 57 bp, Artificial
  Synthetic oligonucleotide
cccgttctcagggaagcggaaacataacggaccatctgtgcacggttcagaggcgtc

SEQ ID NO: 360239 - DNA, 55 bp, Artificial
  Synthetic oligonucleotide
cccgttctcattcaacttaaggctactgccactccaatctccatccgacagtatc

SEQ ID NO: 360240 - DNA, 55 bp, Artificial
  Synthetic oligonucleotide
cccgttctccacttcggtaatttcagctttgacgattatataaaccttgattgga

SEQ ID NO: 360241 - DNA, 55 bp, Artificial
  Synthetic oligonucleotide
cccgttgaacgacccgtatccgccagagaagcagagcgaatacagctggcatgcc

SEQ ID NO: 360242 - DNA, 55 bp, Artificial
  Synthetic oligonucleotide
cccgttgacaggcacaacactagatgaacaaatttacgtggatgttaaattagtg

SEQ ID NO: 360243 - DNA, 55 bp, Artificial
  Synthetic oligonucleotide
cccgttgacccaagggaagtagaagaggccaataaaggagagaacaacagtctgc

SEQ ID NO: 360244 - DNA, 55 bp, Artificial
  Synthetic oligonucleotide
cccgttgacgtttgctatttattgtccaatttgaaggatgatactgggaatttgc

SEQ ID NO: 360245 - DNA, 55 bp, Artificial
  Synthetic oligonucleotide
cccgttgactgcagaactgaagtatagcaacgagtctgtcaagcggaagcccgcg

SEQ ID NO: 360246 - DNA, 56 bp, Artificial
  Synthetic oligonucleotide
cccgttgaggactagaatcaagtggttgttacgcaaggtgccgaaaacagacctga

SEQ ID NO: 360247 - DNA, 57 bp, Artificial
  Synthetic oligonucleotide
cccgttgatgggtccttgtcacagtttggtagctatgtctcgatttaagagacagtt

SEQ ID NO: 360248 - DNA, 55 bp, Artificial
  Synthetic oligonucleotide
cccgttgatttcaatctgtgcagatggcgtcgtgtcagagtagccgtttcgacgg

SEQ ID NO: 360249 - DNA, 55 bp, Artificial
  Synthetic oligonucleotide
cccgttgcacctaggcaaatgtaacattgccggatggcttttaggaaacccagaa

SEQ ID NO: 360250 - DNA, 55 bp, Artificial
  Synthetic oligonucleotide
cccgttgcccttcggggcatctaggtccattagaggaataaggtatgactacaac

SEQ ID NO: 360251 - DNA, 54 bp, Artificial
  Synthetic oligonucleotide
cccgttggctgggatacccgccaatgcgacggtccgggcctatcccgggtgcga

SEQ ID NO: 360252 - DNA, 55 bp, Artificial
  Synthetic oligonucleotide
cccgttggtcacccaggccgatcaacccagcgcagcgcgtcacccccgacgaccc

SEQ ID NO: 360253 - DNA, 60 bp, Artificial
  Synthetic oligonucleotide
cccgttgtccgtttcaactcgctcgctacggagtgacctccaagctatgtgtgccatgaa

SEQ ID NO: 360254 - DNA, 55 bp, Artificial
  Synthetic oligonucleotide
cccgttgtcggacaatccatgctaatgtaattgggcctctattccacgagctcaa

SEQ ID NO: 360255 - DNA, 55 bp, Artificial
  Synthetic oligonucleotide
cccgttgtgataatctcgtcactttgtttagtgcgacttagacacgaagtggccg

SEQ ID NO: 360256 - DNA, 54 bp, Artificial
  Synthetic oligonucleotide
cccgtttatggtatgaatggtaccttgttaggcaatttattgattttccctcac

SEQ ID NO: 360257 - DNA, 55 bp, Artificial
  Synthetic oligonucleotide
cccgtttcgatacacttcattataacggactggataaatatgtacgaggtcgcct

SEQ ID NO: 360258 - DNA, 53 bp, Artificial
  Synthetic oligonucleotide
cccgtttgagcttgggggaaaattaagatgtgctttggacaatggtaagaggg

SEQ ID NO: 360259 - DNA, 55 bp, Artificial
  Synthetic oligonucleotide
cccgttttaggaatttagacaagcatgatgcctactacgtagtcaagcgttgtac

SEQ ID NO: 360260 - DNA, 49 bp, Artificial
  Synthetic oligonucleotide
cccgttttaggttcctgcccttactagggtggtccggtccttaggtgga

SEQ ID NO: 360261 - DNA, 57 bp, Artificial
  Synthetic oligonucleotide
cccgttttgccgggaaactcaatttctagcgcgaaagcaggtgattcatccgagcac

SEQ ID NO: 360262 - DNA, 50 bp, Artificial
  Synthetic oligonucleotide
ccctaaaacagggtgattacccgaagggttctatgttaattcgtaggagg

SEQ ID NO: 360263 - DNA, 54 bp, Artificial
  Synthetic oligonucleotide
ccctaaaagtaggccctgacaagaccaacctccaacagtctgacaaaacgcacg

SEQ ID NO: 360264 - DNA, 57 bp, Artificial
  Synthetic oligonucleotide
ccctaaaatctgatgtcaggttacacaggaatgatgttgggcccttgtctttcaagg

SEQ ID NO: 360265 - DNA, 54 bp, Artificial
  Synthetic oligonucleotide
ccctaaacgcctcgctcaaaccttctggcttccaacacgtgtggacgaccaacg

SEQ ID NO: 360266 - DNA, 55 bp, Artificial
  Synthetic oligonucleotide
ccctaaagaaagctcatggcccaaacacagcgtaaacaaaggagtatctgcatca

SEQ ID NO: 360267 - DNA, 59 bp, Artificial
  Synthetic oligonucleotide
ccctaaattaggaaagtggcctacattaatggatgtcgccaccacttgtgctcaattga

SEQ ID NO: 360268 - DNA, 57 bp, Artificial
  Synthetic oligonucleotide
ccctaacactaccactgagggtcaagtgaaagacaggttaaatctcagagaaaatga

SEQ ID NO: 360269 - DNA, 55 bp, Artificial
  Synthetic oligonucleotide
ccctaacagattcagcatgggttctatccttgaagtagatatgtctaaaggtaaa

SEQ ID NO: 360270 - DNA, 56 bp, Artificial
  Synthetic oligonucleotide
ccctaacagcccgagtcagttgcttaaatggctaaacgaggaacaaggactcgaca

SEQ ID NO: 360271 - DNA, 55 bp, Artificial
  Synthetic oligonucleotide
ccctaacatcaggaccggggtgaggacaattaccactggcagccccattacgtac

SEQ ID NO: 360272 - DNA, 54 bp, Artificial
  Synthetic oligonucleotide
ccctaacatccgtactggggttaggactatcaccacgggcggtgcaattaccta

SEQ ID NO: 360273 - DNA, 57 bp, Artificial
  Synthetic oligonucleotide
ccctaaccatgcacatgtcagaagtacccgtaattagtgccgacggggaggtataca

SEQ ID NO: 360274 - DNA, 50 bp, Artificial
  Synthetic oligonucleotide
ccctaacgtccggcgtgggtacggctttacgtactggtagcttgggtaaa

SEQ ID NO: 360275 - DNA, 55 bp, Artificial
  Synthetic oligonucleotide
ccctaacgtgtatctgcatcgggaaaagactgaacaggatttctcaacttgggtt

SEQ ID NO: 360276 - DNA, 54 bp, Artificial
  Synthetic oligonucleotide
ccctaactcctctgactggtgggctaagcttgagtcgaccccctacctgaaggc

SEQ ID NO: 360277 - DNA, 60 bp, Artificial
  Synthetic oligonucleotide
ccctaactgacacaacaaatcagaaggctgagttagaagcaattcatctagctctgcagg

SEQ ID NO: 360278 - DNA, 59 bp, Artificial
  Synthetic oligonucleotide
ccctaagaagcaaagagcccgtgtgtacctcaccaccagtgtgacacacgagaaatcaa

SEQ ID NO: 360279 - DNA, 55 bp, Artificial
  Synthetic oligonucleotide
ccctaagatagagggagtcttcacgttggttgttgttgtggaccgtaagccgcat

SEQ ID NO: 360280 - DNA, 57 bp, Artificial
  Synthetic oligonucleotide
ccctaagatgattgcctacgctgctgcgtcccgaagttcacaccttgggtcgcctct

SEQ ID NO: 360281 - DNA, 55 bp, Artificial
  Synthetic oligonucleotide
ccctaagcacgttcaacacggcagtctgcccagaatttcgtacaacatgttcgtc

SEQ ID NO: 360282 - DNA, 60 bp, Artificial
  Synthetic oligonucleotide
ccctaagctctatgctattgtgggaggccgtggaagtcttggcttattgtcatgattcac

SEQ ID NO: 360283 - DNA, 54 bp, Artificial
  Synthetic oligonucleotide
ccctaagggtcttaaaactatggtcgtaacagctggtatagatcaagttaattg

SEQ ID NO: 360284 - DNA, 55 bp, Artificial
  Synthetic oligonucleotide
ccctaaggtatctggatatcagtatagggtgttccgtgtgcggcttccagacccc

SEQ ID NO: 360285 - DNA, 55 bp, Artificial
  Synthetic oligonucleotide
ccctaaggtgtctgcatttcaatatagggtgtttagggtacgcctcccagatcct

SEQ ID NO: 360286 - DNA, 53 bp, Artificial
  Synthetic oligonucleotide
ccctaagtcttttccgtatttaaatacgtatgccctagctttatacgtgtata

SEQ ID NO: 360287 - DNA, 55 bp, Artificial
  Synthetic oligonucleotide
ccctaagtgaagcaccagcgtactctacaaagatgcgcctaaggttagaaacctc

SEQ ID NO: 360288 - DNA, 54 bp, Artificial
  Synthetic oligonucleotide
ccctaagtgcgtattcaatagcgcgcatattaagcctgcttaattcggtagaca

SEQ ID NO: 360289 - DNA, 60 bp, Artificial
  Synthetic oligonucleotide
ccctaagtgctgcagtgcaagcgacaaagtcctgtactttgacacgaatcataacgactc

SEQ ID NO: 360290 - DNA, 55 bp, Artificial
  Synthetic oligonucleotide
ccctaagttgttgccttacatgcgattcgattatttcaaggcgttggatatcgaa

SEQ ID NO: 360291 - DNA, 57 bp, Artificial
  Synthetic oligonucleotide
ccctaagtttagaccgataaagattagtctggaggagaagcccgcacctgatgctat

SEQ ID NO: 360292 - DNA, 55 bp, Artificial
  Synthetic oligonucleotide
ccctaatacaccagtgtatgaagtgccttcagatcaatggattgcgcgcaattac

SEQ ID NO: 360293 - DNA, 54 bp, Artificial
  Synthetic oligonucleotide
ccctaatcaatgtaactaaactttatgagggagtttactatggtactaatgacg

SEQ ID NO: 360294 - DNA, 57 bp, Artificial
  Synthetic oligonucleotide
ccctaatcttaggattaatgttaaacaaatggactttgcttcatcaggaattatggc

SEQ ID NO: 360295 - DNA, 55 bp, Artificial
  Synthetic oligonucleotide
ccctaatgaagctgttttaagcttcgatgtcacttttctgaaacttgggaataac

SEQ ID NO: 360296 - DNA, 55 bp, Artificial
  Synthetic oligonucleotide
ccctaatgactctaagagcttccgacttacttcctgcgttaatagctgctgcgta

SEQ ID NO: 360297 - DNA, 55 bp, Artificial
  Synthetic oligonucleotide
ccctaatgctaaacaagggtcttcttactatggtcctgggccttgttatcagtgg

SEQ ID NO: 360298 - DNA, 55 bp, Artificial
  Synthetic oligonucleotide
ccctaatggaacaataagctttaaaccagcctcaggaggggacctagaagtcaca

SEQ ID NO: 360299 - DNA, 55 bp, Artificial
  Synthetic oligonucleotide
ccctaatgttttgcaccgttgttttctcaaaccagttggccgcgatgttcagcgg

SEQ ID NO: 360300 - DNA, 55 bp, Artificial
  Synthetic oligonucleotide
ccctaattacgttgagagcctctgtcttacttccgctgttaatcgccttggcgta

SEQ ID NO: 360301 - DNA, 59 bp, Artificial
  Synthetic oligonucleotide
ccctaattattgctaaagctgcttcggctgaacctgaatttaatgcctttgcggcagtg

SEQ ID NO: 360302 - DNA, 51 bp, Artificial
  Synthetic oligonucleotide
ccctaattctcgaattagggtttcctgttgttaatggttctaataaaagga

SEQ ID NO: 360303 - DNA, 58 bp, Artificial
  Synthetic oligonucleotide
ccctaattcttgggacagagtgtctattaggtgccctgataagttctcgtgttcctca

SEQ ID NO: 360304 - DNA, 56 bp, Artificial
  Synthetic oligonucleotide
ccctaattttgcttagtcttttgtgtcccattcgtaagcataagcgttcataaata

SEQ ID NO: 360305 - DNA, 57 bp, Artificial
  Synthetic oligonucleotide
ccctacaaactcagggagtctgaaatgttgttaaccaaattagcaataccatatcag

SEQ ID NO: 360306 - DNA, 56 bp, Artificial
  Synthetic oligonucleotide
ccctacaaagggccatggttgatttgacacgacgggacgtgcgtactgactggtac

SEQ ID NO: 360307 - DNA, 55 bp, Artificial
  Synthetic oligonucleotide
ccctacaacccctctcgcgcgagctgcgtgggagacagcaagacacactccaatc

SEQ ID NO: 360308 - DNA, 60 bp, Artificial
  Synthetic oligonucleotide
ccctacaagatctctgagaccgagacccccaacagctgtgggaccaggcaccacggtgca

SEQ ID NO: 360309 - DNA, 57 bp, Artificial
  Synthetic oligonucleotide
ccctacaatgctatacaataaaatggaattcgagccatttcagtctttggtccctaa

SEQ ID NO: 360310 - DNA, 55 bp, Artificial
  Synthetic oligonucleotide
ccctacacaggagggctccttcaccagatagccctcattggtgatcgcggctcct

SEQ ID NO: 360311 - DNA, 55 bp, Artificial
  Synthetic oligonucleotide
ccctacaccgggccactcgaacgtcagaaacccctgaaggtgagagccaagctcc

SEQ ID NO: 360312 - DNA, 55 bp, Artificial
  Synthetic oligonucleotide
ccctacacctaagaatccttggccccaactagggttccaacttgctgctgttcac

SEQ ID NO: 360313 - DNA, 59 bp, Artificial
  Synthetic oligonucleotide
ccctacacctgatcttccggtggtaataatccacacacatgataacagtggtgacttct

SEQ ID NO: 360314 - DNA, 53 bp, Artificial
  Synthetic oligonucleotide
ccctacagattgtaggaccggatggtgattattacctaccttatccggaccct

SEQ ID NO: 360315 - DNA, 60 bp, Artificial
  Synthetic oligonucleotide
ccctacagcatcctccgcagactataaatggcgtcaagacctagagtttctgggagcact

SEQ ID NO: 360316 - DNA, 58 bp, Artificial
  Synthetic oligonucleotide
ccctacaggtctgtatcattactacattgtgacattgagattcccccagggtccaatc

SEQ ID NO: 360317 - DNA, 55 bp, Artificial
  Synthetic oligonucleotide
ccctacaggtgacaggaccagtacttattgtaacagatagtgattatgtagcacg

SEQ ID NO: 360318 - DNA, 50 bp, Artificial
  Synthetic oligonucleotide
ccctacatatcagctgtggactttagattgtgtgctgcctctgctagctc

SEQ ID NO: 360319 - DNA, 54 bp, Artificial
  Synthetic oligonucleotide
ccctacattggtccaacaccgaactcttccacctgtgttcgggcaccttggacc

SEQ ID NO: 360320 - DNA, 50 bp, Artificial
  Synthetic oligonucleotide
ccctaccaatgacactaataactgtgccttggaggaagacaacagtacct

SEQ ID NO: 360321 - DNA, 51 bp, Artificial
  Synthetic oligonucleotide
ccctaccacacccaccgaactagataacggtgtggtaggggtaaattctcc

SEQ ID NO: 360322 - DNA, 50 bp, Artificial
  Synthetic oligonucleotide
ccctaccagatgactcgcccactggggcggttccagaaaacactccccta

SEQ ID NO: 360323 - DNA, 54 bp, Artificial
  Synthetic oligonucleotide
ccctacccaacaaccttagctacgccggagcttagctcgccaccgttctaatat

SEQ ID NO: 360324 - DNA, 54 bp, Artificial
  Synthetic oligonucleotide
ccctacccaacacacctactactatcaatggtgtcatccccagtaatggacgag

SEQ ID NO: 360325 - DNA, 60 bp, Artificial
  Synthetic oligonucleotide
ccctacccagtttcttctctgcttaatactctgttctcagacatgatgcctaaggtgcag

SEQ ID NO: 360326 - DNA, 57 bp, Artificial
  Synthetic oligonucleotide
ccctaccgaacatcctctgaaggtaatcggcagaagggagacaagaggcggacgcaa

SEQ ID NO: 360327 - DNA, 51 bp, Artificial
  Synthetic oligonucleotide
ccctaccgactgtttaatccaaaagtaatgcggagagtagtaattaggggg

SEQ ID NO: 360328 - DNA, 55 bp, Artificial
  Synthetic oligonucleotide
ccctaccgcatttcagcctttaatcccagggttatgagacgagtagtaattcagg

SEQ ID NO: 360329 - DNA, 52 bp, Artificial
  Synthetic oligonucleotide
ccctaccgtatttctgcctttaaccctaaaattatgagaaaggtggtgatta

SEQ ID NO: 360330 - DNA, 54 bp, Artificial
  Synthetic oligonucleotide
ccctacctattctaactcttggtgagttgtctaactcccgttttccggctgcta

SEQ ID NO: 360331 - DNA, 53 bp, Artificial
  Synthetic oligonucleotide
ccctacctcttaatgaatattttgcgcgggtaggcggaaatacgtcaccggag

SEQ ID NO: 360332 - DNA, 56 bp, Artificial
  Synthetic oligonucleotide
ccctaccttgcccacctctcagccatgtacaccggctgggttgggaacatggaggt

SEQ ID NO: 360333 - DNA, 55 bp, Artificial
  Synthetic oligonucleotide
ccctacctttagttcctggtggccatgattctttagttcaaaccgatgcaagcag

SEQ ID NO: 360334 - DNA, 55 bp, Artificial
  Synthetic oligonucleotide
ccctaccttttagatgatggtactagtttggcctgtgctcttgtataccctcacc

SEQ ID NO: 360335 - DNA, 55 bp, Artificial
  Synthetic oligonucleotide
ccctaccttttcaatggttagaagttgttgttgtgagaaggtgataccttgagca

SEQ ID NO: 360336 - DNA, 50 bp, Artificial
  Synthetic oligonucleotide
ccctacgaaaacaccgagcgggtgccctccatggacgtgtactgggctcg

SEQ ID NO: 360337 - DNA, 55 bp, Artificial
  Synthetic oligonucleotide
ccctacgatctcttacagaaagtcctgctactgtcgctatgggccatcttgagtt

SEQ ID NO: 360338 - DNA, 55 bp, Artificial
  Synthetic oligonucleotide
ccctacggcctcctttgatgtggatcgtagagtattgacccttccaatgtgggac

SEQ ID NO: 360339 - DNA, 57 bp, Artificial
  Synthetic oligonucleotide
ccctacgggccgctagggctcgcagagggcttctccggtagtctctattcagttgta

SEQ ID NO: 360340 - DNA, 55 bp, Artificial
  Synthetic oligonucleotide
ccctacgttatgtcaaaaatttgttgctacagcattagctcccgttcgtcaacgt

SEQ ID NO: 360341 - DNA, 52 bp, Artificial
  Synthetic oligonucleotide
ccctacgttcaggccacgtcttagtgctatcacagatgtcataccagtaaaa

SEQ ID NO: 360342 - DNA, 53 bp, Artificial
  Synthetic oligonucleotide
ccctactaaggggaaagtgcgacaacttgaaaatgttccagtcaaggtaccaa

SEQ ID NO: 360343 - DNA, 56 bp, Artificial
  Synthetic oligonucleotide
ccctactaatgtggccgttgaattatttgccaagcgcagtgttcgacaccacccag

SEQ ID NO: 360344 - DNA, 56 bp, Artificial
  Synthetic oligonucleotide
ccctactacaactcaaatgccctccactactaataactaccaatgtgaatccgttg

SEQ ID NO: 360345 - DNA, 58 bp, Artificial
  Synthetic oligonucleotide
ccctactagactacagttgcctgtgaaccggatactcctggaagcctgcccatgctaa

SEQ ID NO: 360346 - DNA, 60 bp, Artificial
  Synthetic oligonucleotide
ccctactcctgtctcgatcatctctggtgacagtcctcatgttttggttgctctttcgag

SEQ ID NO: 360347 - DNA, 60 bp, Artificial
  Synthetic oligonucleotide
ccctactgcagtacgtagatgatcttttaatcgcagccgcctcaaaagagctatgtcaac

SEQ ID NO: 360348 - DNA, 55 bp, Artificial
  Synthetic oligonucleotide
ccctactgggcaccgctgatgatggcctcccagtataaacataatggccgaaacc

SEQ ID NO: 360349 - DNA, 60 bp, Artificial
  Synthetic oligonucleotide
ccctactgtcctgcatcaccattccggtctctgctgtccaagtgaagaacaccagtaaca

SEQ ID NO: 360350 - DNA, 54 bp, Artificial
  Synthetic oligonucleotide
ccctactgttggcactacgcaccccgaccgtgtggtattgtacccgcgtcgaag

SEQ ID NO: 360351 - DNA, 60 bp, Artificial
  Synthetic oligonucleotide
ccctacttcgtgcgcgtccaaggtctccttcggatctgtgcgctagcgcgcaagatagcc

SEQ ID NO: 360352 - DNA, 52 bp, Artificial
  Synthetic oligonucleotide
ccctacttgaaaccctacacaaaaaatctcctacgctaaccgataactctac

SEQ ID NO: 360353 - DNA, 54 bp, Artificial
  Synthetic oligonucleotide
ccctacttttaagttatagcgcgattggtagtgcgcttaaaaagttatcgtctc

SEQ ID NO: 360354 - DNA, 55 bp, Artificial
  Synthetic oligonucleotide
ccctagaaaagccagacacaatgtgcagattctactgtatttgagagtcttagaa

SEQ ID NO: 360355 - DNA, 55 bp, Artificial
  Synthetic oligonucleotide
ccctagaagcacaaatagaacattggcggcttcttcgtaaagaagctgtgctgtt

SEQ ID NO: 360356 - DNA, 59 bp, Artificial
  Synthetic oligonucleotide
ccctagaatgtttttggccgtgatcacatatataaccagaaatcagcccgaatggttca

SEQ ID NO: 360357 - DNA, 55 bp, Artificial
  Synthetic oligonucleotide
ccctagaattgagatccaaatgcccgctcaaataattatgtgggcctagtgaacg

SEQ ID NO: 360358 - DNA, 54 bp, Artificial
  Synthetic oligonucleotide
ccctagacccctgagcactttaaagggctcgtcgggagggccgatcctgtgccc

SEQ ID NO: 360359 - DNA, 57 bp, Artificial
  Synthetic oligonucleotide
ccctagacgccctatcatcatccatacacaaggacgccgttttgaaccccgtcctca

SEQ ID NO: 360360 - DNA, 60 bp, Artificial
  Synthetic oligonucleotide
ccctagagatgctgcattggcaactaatagagcctattttataacacgtcaattacaggt

SEQ ID NO: 360361 - DNA, 55 bp, Artificial
  Synthetic oligonucleotide
ccctagaggaaatgatgacagcctgccaaggagtaggaggcccggcacataaggc

SEQ ID NO: 360362 - DNA, 57 bp, Artificial
  Synthetic oligonucleotide
ccctagaggaacgcatgtttatgttcagacttaatactaaactgccatcgacctttg

SEQ ID NO: 360363 - DNA, 55 bp, Artificial
  Synthetic oligonucleotide
ccctagaggaagtgatatagcagggacaactagtactctggcagaacaggtggca

SEQ ID NO: 360364 - DNA, 55 bp, Artificial
  Synthetic oligonucleotide
ccctagagttcatcacagaaggattcacatggacaggagtcactcagaatggagg

SEQ ID NO: 360365 - DNA, 59 bp, Artificial
  Synthetic oligonucleotide
ccctagatggccgacgcgagacccaggagcccctattactagggacgctctgccacagc

SEQ ID NO: 360366 - DNA, 55 bp, Artificial
  Synthetic oligonucleotide
ccctagatgggaatcctgtttcggtggactgtaaatataaggctcccatacagac

SEQ ID NO: 360367 - DNA, 60 bp, Artificial
  Synthetic oligonucleotide
ccctagattgcgagatctacggggcctgctactccatagaaccattggatctacctccaa

SEQ ID NO: 360368 - DNA, 55 bp, Artificial
  Synthetic oligonucleotide
ccctagcaacccaagactacttaggttcactgttgccaaaaggcagagcccagtg

SEQ ID NO: 360369 - DNA, 49 bp, Artificial
  Synthetic oligonucleotide
ccctagcaaggccaactatctttccgtttccaagtttttaacggggaaa

SEQ ID NO: 360370 - DNA, 57 bp, Artificial
  Synthetic oligonucleotide
ccctagcaccaatgagacaaactccacaaccacaataatcaattacaacacccaaaa

SEQ ID NO: 360371 - DNA, 55 bp, Artificial
  Synthetic oligonucleotide
ccctagcatggcagaccagctaattcatctgcactattttgattgttttgcagac

SEQ ID NO: 360372 - DNA, 55 bp, Artificial
  Synthetic oligonucleotide
ccctagcctagaagagatgatgagagcctgtcaaggagtaggaggaccagctcat

SEQ ID NO: 360373 - DNA, 55 bp, Artificial
  Synthetic oligonucleotide
ccctagcggcagtggtggtcaacccatccgtgaaaacagcccgtgaggccggaat

SEQ ID NO: 360374 - DNA, 56 bp, Artificial
  Synthetic oligonucleotide
ccctaggaggagccatcaaaacgcgcgttttgattcggagtctctctaaaaatatg

SEQ ID NO: 360375 - DNA, 55 bp, Artificial
  Synthetic oligonucleotide
ccctaggagtgagcctatggcttatatccgttctgaatacgagcgccaaactaag

SEQ ID NO: 360376 - DNA, 56 bp, Artificial
  Synthetic oligonucleotide
ccctaggatgttcctagcaatgataacatacataacaagaaaccaacccgaatggt

SEQ ID NO: 360377 - DNA, 55 bp, Artificial
  Synthetic oligonucleotide
ccctaggatgtttctggctatgataacatacataacaaaaggccaacctgaatgg

SEQ ID NO: 360378 - DNA, 58 bp, Artificial
  Synthetic oligonucleotide
ccctaggattgaaatcgaggtgaccactcaaataattatgggcccctaatgcacgtgc

SEQ ID NO: 360379 - DNA, 57 bp, Artificial
  Synthetic oligonucleotide
ccctaggattgaaatctaggtgtccactcaaatagttatgtgggcctaaggcacgag

SEQ ID NO: 360380 - DNA, 51 bp, Artificial
  Synthetic oligonucleotide
ccctaggcataagggaaatgattctgtcacattcttgatggcagtccgaaa

SEQ ID NO: 360381 - DNA, 55 bp, Artificial
  Synthetic oligonucleotide
ccctaggccatggctttatagcttagggcaatatatctatgaaacttatggggac

SEQ ID NO: 360382 - DNA, 55 bp, Artificial
  Synthetic oligonucleotide
ccctagggatactgacgaacccatactcagtatctctccacacccatgccgcctg

SEQ ID NO: 360383 - DNA, 55 bp, Artificial
  Synthetic oligonucleotide
ccctaggtactgacaccctgtcggtcacagtgcagcttgagactagacctggtcg

SEQ ID NO: 360384 - DNA, 60 bp, Artificial
  Synthetic oligonucleotide
ccctaggtgcgatctctgcatggatagccttgaaggagcgtcccctgctttgcccgcagt

SEQ ID NO: 360385 - DNA, 55 bp, Artificial
  Synthetic oligonucleotide
ccctaggttcaacatctccgactactttgagattgtgcgtcagcctggtgatggt

SEQ ID NO: 360386 - DNA, 56 bp, Artificial
  Synthetic oligonucleotide
ccctagtaaacccaggggactccatcattttcaacagtattgggaatttgattgca

SEQ ID NO: 360387 - DNA, 55 bp, Artificial
  Synthetic oligonucleotide
ccctagtactggcaatcatgatagctggtctatctttctggatgtgctccaatgg

SEQ ID NO: 360388 - DNA, 55 bp, Artificial
  Synthetic oligonucleotide
ccctagtcacggctagctgtgaaaggtccgtgagccacatgatctgcaaagagac

SEQ ID NO: 360389 - DNA, 55 bp, Artificial
  Synthetic oligonucleotide
ccctagtcctccaatacgaacccgtgtcacacgtacacaatatcacaatcctgcg

SEQ ID NO: 360390 - DNA, 55 bp, Artificial
  Synthetic oligonucleotide
ccctagtctcggaacccctagaaaatgcagtcacctattatgtagacggggcagc

SEQ ID NO: 360391 - DNA, 57 bp, Artificial
  Synthetic oligonucleotide
ccctagtgacaacttggtgtacctgcctcccactcccgtgtctaaagttctcagcac

SEQ ID NO: 360392 - DNA, 60 bp, Artificial
  Synthetic oligonucleotide
ccctagtgatcgtggtgagaaaccatgaagacctggtcacggtaactgctacactggctc

SEQ ID NO: 360393 - DNA, 55 bp, Artificial
  Synthetic oligonucleotide
ccctagtgcctctgaattgctctctctttcactaatcctaacatcatccatcaac

SEQ ID NO: 360394 - DNA, 55 bp, Artificial
  Synthetic oligonucleotide
ccctagtggaaaaacataagcggaactacggctatgtgtatcgctggggcgtgac

SEQ ID NO: 360395 - DNA, 60 bp, Artificial
  Synthetic oligonucleotide
ccctagtggaccagctagtcattcatgtgaagcgctggtacactagtctgtgcacaagtt

SEQ ID NO: 360396 - DNA, 53 bp, Artificial
  Synthetic oligonucleotide
ccctagttaacgtaagtacaggttgttctcctataggaactagagcgttggtc

SEQ ID NO: 360397 - DNA, 59 bp, Artificial
  Synthetic oligonucleotide
ccctagttggtgtggcggatgtgtacaagacttgtccctctccttatccttatgtgcag

SEQ ID NO: 360398 - DNA, 55 bp, Artificial
  Synthetic oligonucleotide
ccctagtttacgttgtcgtgttctggcgtcggctagggactgcataccgtagggc

SEQ ID NO: 360399 - DNA, 57 bp, Artificial
  Synthetic oligonucleotide
ccctataataggacagctgctacagcccccgctgtgatggcggtagtcaatcctaaa

SEQ ID NO: 360400 - DNA, 52 bp, Artificial
  Synthetic oligonucleotide
ccctataatgtataggacgttgtccatacaaacgacggtaaatctatcacct

SEQ ID NO: 360401 - DNA, 55 bp, Artificial
  Synthetic oligonucleotide
ccctatacactcacaacaactcaccagattgaaactgtgactatctgtggcaagc

SEQ ID NO: 360402 - DNA, 58 bp, Artificial
  Synthetic oligonucleotide
ccctatacccatgaacactttcactatacagtaactgatataaaagatctgaccaaac

SEQ ID NO: 360403 - DNA, 55 bp, Artificial
  Synthetic oligonucleotide
ccctatacggtgacaaaccgggcaatcacagaacttgtggaaccccgtgatacca

SEQ ID NO: 360404 - DNA, 60 bp, Artificial
  Synthetic oligonucleotide
ccctatagacccagtttcacaagcactgcattagacttatctagcaacaagagtgttgtt

SEQ ID NO: 360405 - DNA, 55 bp, Artificial
  Synthetic oligonucleotide
ccctatagactgtgaagtcgcagacgtgaatttactgggtaaggtagtagcgatt

SEQ ID NO: 360406 - DNA, 52 bp, Artificial
  Synthetic oligonucleotide
ccctataggggttgccccttcccctagtaacagtcgttttgagtctgtagct

SEQ ID NO: 360407 - DNA, 55 bp, Artificial
  Synthetic oligonucleotide
ccctatagggtgagaagcctacttattgacaaggtgcgaagagccgcgtgtgctc

SEQ ID NO: 360408 - DNA, 51 bp, Artificial
  Synthetic oligonucleotide
ccctataggtttactggaaacactcgcggagaggttaacgagtttgtgtga

SEQ ID NO: 360409 - DNA, 58 bp, Artificial
  Synthetic oligonucleotide
ccctatatacataccagctacccaggcacggtgggactccggctacccaggcatggtg

SEQ ID NO: 360410 - DNA, 56 bp, Artificial
  Synthetic oligonucleotide
ccctatatgaggaggtaggtcctggattgcagaggaagatagtgggaattccccct

SEQ ID NO: 360411 - DNA, 60 bp, Artificial
  Synthetic oligonucleotide
ccctatatggataatctgcaactgaaggcccgtcaattgagcttgcagaggcccatgttt

SEQ ID NO: 360412 - DNA, 60 bp, Artificial
  Synthetic oligonucleotide
ccctatatggattgagatcgttgctcttttcggagtccatacaagagttgctaataccaa

SEQ ID NO: 360413 - DNA, 55 bp, Artificial
  Synthetic oligonucleotide
ccctatatgtatcgattgtaaacatagagcaccaatacaaacaaagtgtccgccg

SEQ ID NO: 360414 - DNA, 55 bp, Artificial
  Synthetic oligonucleotide
ccctatcactgctactgataaggagaccaactctactccagcctatcctaagaac

SEQ ID NO: 360415 - DNA, 60 bp, Artificial
  Synthetic oligonucleotide
ccctatcaggtgcatcactgcagttaagaccagtacgtatcagtcaatatactggcgccc

SEQ ID NO: 360416 - DNA, 55 bp, Artificial
  Synthetic oligonucleotide
ccctatcagtcaaaactaccgtttcactaggaagcacacaattaacagatgtaag

SEQ ID NO: 360417 - DNA, 55 bp, Artificial
  Synthetic oligonucleotide
ccctatcatctctctagaaaagggaacgtattgctccttgagccgactcggccac

SEQ ID NO: 360418 - DNA, 58 bp, Artificial
  Synthetic oligonucleotide
ccctatccagatctttggacattcaatgtcgatttggtgaaaccagtcgccgttagtg

SEQ ID NO: 360419 - DNA, 57 bp, Artificial
  Synthetic oligonucleotide
ccctatccatgagtctgatgacaattccaccgctgatgacaagtgcttgcactgccc

SEQ ID NO: 360420 - DNA, 58 bp, Artificial
  Synthetic oligonucleotide
ccctatccgttatcaaaccccagctatcaaagcagaacacacaggacgcgaaatcgtg

SEQ ID NO: 360421 - DNA, 55 bp, Artificial
  Synthetic oligonucleotide
ccctatcctgattttgtggcaaggctccaagatgttgctcaaaagtcaattgccg

SEQ ID NO: 360422 - DNA, 58 bp, Artificial
  Synthetic oligonucleotide
ccctatctactacgtacacgatgggtgttttcactgaacctcttctggacaatgagct

SEQ ID NO: 360423 - DNA, 55 bp, Artificial
  Synthetic oligonucleotide
ccctatcttggggattgtatgtattatgatgcgcctggcatcaaccaagaggagc

SEQ ID NO: 360424 - DNA, 60 bp, Artificial
  Synthetic oligonucleotide
ccctatgaacctcctccaaaacgttttgcacttgccccaagtgtgcatgcagaagcagac

SEQ ID NO: 360425 - DNA, 58 bp, Artificial
  Synthetic oligonucleotide
ccctatgaagccactgcaacaaagccagcaaagcccaataggcaatcccttctaaaac

SEQ ID NO: 360426 - DNA, 60 bp, Artificial
  Synthetic oligonucleotide
ccctatgacattaatcaaatgcttaattgtgtgggcgaccatcaagcagctatgcaaata

SEQ ID NO: 360427 - DNA, 54 bp, Artificial
  Synthetic oligonucleotide
ccctatgactcttggtcccagtgcgagatctgccccggtcgctttgttggccaa

SEQ ID NO: 360428 - DNA, 55 bp, Artificial
  Synthetic oligonucleotide
ccctatgactgctgcttcaaacatgagacaatccagcaatgcacagtgtggtgtc

SEQ ID NO: 360429 - DNA, 55 bp, Artificial
  Synthetic oligonucleotide
ccctatgagccagcatggaatagaggacccggaggaagaagtgttactgtggaag

SEQ ID NO: 360430 - DNA, 55 bp, Artificial
  Synthetic oligonucleotide
ccctatgagccagcatggaatagaggacgaagacagagaagtattaaagtgggtg

SEQ ID NO: 360431 - DNA, 55 bp, Artificial
  Synthetic oligonucleotide
ccctatgagccagcatggaatagaggacgcagaaagagaagtgctaaagtggcag

SEQ ID NO: 360432 - DNA, 55 bp, Artificial
  Synthetic oligonucleotide
ccctatgagccagcatggaatggaggacccggagagagaagtattagaatggagg

SEQ ID NO: 360433 - DNA, 55 bp, Artificial
  Synthetic oligonucleotide
ccctatgagccagcatgggatggatgatccagagaaacaagtgttagtgtggaag

SEQ ID NO: 360434 - DNA, 57 bp, Artificial
  Synthetic oligonucleotide
ccctatgagcctgcatgggatggaggacccggagaaagaagtgttagtatggaagtt

SEQ ID NO: 360435 - DNA, 55 bp, Artificial
  Synthetic oligonucleotide
ccctatgagcctgcatgggatggatgacccggaaagagaagtgttagagtggagg

SEQ ID NO: 360436 - DNA, 55 bp, Artificial
  Synthetic oligonucleotide
ccctatgcaccataacccggtgattcatgcggggcagcgagtggagcgatttgta

SEQ ID NO: 360437 - DNA, 55 bp, Artificial
  Synthetic oligonucleotide
ccctatgcttcagccaaccgctttgaccctacaactggtgcagaatttgctgagg

SEQ ID NO: 360438 - DNA, 60 bp, Artificial
  Synthetic oligonucleotide
ccctatgcttgtaggcatagctgtccgcggcctagttcgtgctgacctaacagttgttag

SEQ ID NO: 360439 - DNA, 57 bp, Artificial
  Synthetic oligonucleotide
ccctatggacggaattcactgatcgtaatggcgaaaaaggaacaccgtataatatga

SEQ ID NO: 360440 - DNA, 55 bp, Artificial
  Synthetic oligonucleotide
ccctatggagtcgaagcgacaacggaaagatgggaggagtggaagtttgagggcg

SEQ ID NO: 360441 - DNA, 60 bp, Artificial
  Synthetic oligonucleotide
ccctatggcattgtgaaggatccgaacctactgctcgacaggtggaagatcgcggaaaga

SEQ ID NO: 360442 - DNA, 55 bp, Artificial
  Synthetic oligonucleotide
ccctatgggattctcttacgacaccagatgctttgactcaacagtcacagagaga

SEQ ID NO: 360443 - DNA, 52 bp, Artificial
  Synthetic oligonucleotide
ccctatgggttctcacccgtgagaaatgtgtcaggggtaccagtaacctgta

SEQ ID NO: 360444 - DNA, 53 bp, Artificial
  Synthetic oligonucleotide
ccctatggtatagtcaaggacccgaacctattgctggacaggtggaagatagc

SEQ ID NO: 360445 - DNA, 55 bp, Artificial
  Synthetic oligonucleotide
ccctatggtctttaaccaggagccagccttagaggccatcgttaactgtggcccc

SEQ ID NO: 360446 - DNA, 55 bp, Artificial
  Synthetic oligonucleotide
ccctatgtactggactgtggtgtccccattagccagttattggtctgcccgcacc

SEQ ID NO: 360447 - DNA, 55 bp, Artificial
  Synthetic oligonucleotide
ccctatgtatttctgtaccgcaataaagattccccgctagggcatgtgccgtagc

SEQ ID NO: 360448 - DNA, 55 bp, Artificial
  Synthetic oligonucleotide
ccctatgtcaacatatggatggaatctagtgcgtcttcaaagtggagttgatgtt

SEQ ID NO: 360449 - DNA, 55 bp, Artificial
  Synthetic oligonucleotide
ccctatgtctcctggcatttactcctgtctgagaggtaatacttcagcatgcacg

SEQ ID NO: 360450 - DNA, 55 bp, Artificial
  Synthetic oligonucleotide
ccctatgtgcctagacaaagtgaatcatggcttaagaagttcacagaggcgtgca

SEQ ID NO: 360451 - DNA, 55 bp, Artificial
  Synthetic oligonucleotide
ccctatgtggaatttgtctttaagcccttttcctgcgcagattggtggaacatgc

SEQ ID NO: 360452 - DNA, 56 bp, Artificial
  Synthetic oligonucleotide
ccctatgttagctaattcattacatatacgccatttaaggcgttccaaaataccag

SEQ ID NO: 360453 - DNA, 55 bp, Artificial
  Synthetic oligonucleotide
ccctatgttccatacccacgctcaaccgaggtctatgttcggtccattttcggcc

SEQ ID NO: 360454 - DNA, 60 bp, Artificial
  Synthetic oligonucleotide
ccctatgtttgaccctcctggcaaacatagtgatcatgatccgcgagactcgcaagagac

SEQ ID NO: 360455 - DNA, 55 bp, Artificial
  Synthetic oligonucleotide
ccctattaatgaacgagttgggtgttccatttcatttgggaaccaggcaagtgtg

SEQ ID NO: 360456 - DNA, 60 bp, Artificial
  Synthetic oligonucleotide
ccctattactcctccttctgttgctcattctcgggccctgcatcatcaataggttagtcc

SEQ ID NO: 360457 - DNA, 53 bp, Artificial
  Synthetic oligonucleotide
ccctattagcgaacattgacaccccgataatgttctcccccgataccgtaggg

SEQ ID NO: 360458 - DNA, 55 bp, Artificial
  Synthetic oligonucleotide
ccctattgatccagcagcaccctcaattgtgcctcttacagagtcaggacctgat

SEQ ID NO: 360459 - DNA, 51 bp, Artificial
  Synthetic oligonucleotide
ccctattgtttctgggggccccgacgcacccccccaacgggggctggcgca

SEQ ID NO: 360460 - DNA, 54 bp, Artificial
  Synthetic oligonucleotide
ccctatttcaggccaattggggcgtttgcaccaacccagtctggatttatccgg

SEQ ID NO: 360461 - DNA, 60 bp, Artificial
  Synthetic oligonucleotide
ccctatttctcacatcagggggagtgttattatcactatatgtgtcagccttactgtcat

SEQ ID NO: 360462 - DNA, 55 bp, Artificial
  Synthetic oligonucleotide
ccctatttgtacgtagaacaagagaagatagccctggtgcacaagagggaattag

SEQ ID NO: 360463 - DNA, 55 bp, Artificial
  Synthetic oligonucleotide
ccctcaaaacccggattcggattgtccacagacggacaagtcgtcgatttcatgc

SEQ ID NO: 360464 - DNA, 54 bp, Artificial
  Synthetic oligonucleotide
ccctcaaacttctggggaatctcacgaagtattggggtcaggagctaaaaaata

SEQ ID NO: 360465 - DNA, 55 bp, Artificial
  Synthetic oligonucleotide
ccctcaaacttggtgactacggagaagtcacactggactgtgagccaaggagtgg

SEQ ID NO: 360466 - DNA, 55 bp, Artificial
  Synthetic oligonucleotide
ccctcaaagctcaatggtggtgtttcacagtcttcttcctctcttcgaccgcccc

SEQ ID NO: 360467 - DNA, 53 bp, Artificial
  Synthetic oligonucleotide
ccctcaaagggtagaatttcattaaccttccgtctttctaggagtgcctccaa

SEQ ID NO: 360468 - DNA, 60 bp, Artificial
  Synthetic oligonucleotide
ccctcaaagggtcagccagacacatagaggaatgctcgtgctatgggcacgattcaaagg

SEQ ID NO: 360469 - DNA, 51 bp, Artificial
  Synthetic oligonucleotide
ccctcaaataaatgctctaacatgtgagatagcaaaccaaagactccgatt

SEQ ID NO: 360470 - DNA, 54 bp, Artificial
  Synthetic oligonucleotide
ccctcaaatgggcccctcaatgattatttgggcggccggttcgtttctgtcgac

SEQ ID NO: 360471 - DNA, 55 bp, Artificial
  Synthetic oligonucleotide
ccctcaaattaccacacaacagaggtatagccgaggtcaggacagtctcgaagga

SEQ ID NO: 360472 - DNA, 57 bp, Artificial
  Synthetic oligonucleotide
ccctcaaccagaatatgacttggagctcataacatcgtgctcctctaacgtgtcagt

SEQ ID NO: 360473 - DNA, 50 bp, Artificial
  Synthetic oligonucleotide
ccctcaactatatacggattcactcgatcaccggtcaacgtgtgcagtca

SEQ ID NO: 360474 - DNA, 59 bp, Artificial
  Synthetic oligonucleotide
ccctcaatcatgctccgtcaataacacccaccattactacaaaggaccagcaaacacaa

SEQ ID NO: 360475 - DNA, 60 bp, Artificial
  Synthetic oligonucleotide
ccctcaatcggtgtacactacgacgtacgataacagtgcccgacatggagtatgaggcga

SEQ ID NO: 360476 - DNA, 55 bp, Artificial
  Synthetic oligonucleotide
ccctcaatctccttcttggcgtgacgtgctccccatgcttaatctccgttttaag

SEQ ID NO: 360477 - DNA, 55 bp, Artificial
  Synthetic oligonucleotide
ccctcaatggaccgtattacaggtctggtactcactttctcaatcgacacgtagg

SEQ ID NO: 360478 - DNA, 59 bp, Artificial
  Synthetic oligonucleotide
ccctcaatggtatgtaaacacagactgggccagagctagacaagatacacaaggttacc

SEQ ID NO: 360479 - DNA, 55 bp, Artificial
  Synthetic oligonucleotide
ccctcaatgtgctattgttcaagcatcggagtctaaagttttgcttgagaggttt

SEQ ID NO: 360480 - DNA, 55 bp, Artificial
  Synthetic oligonucleotide
ccctcaattacaatactaatgggcctgataggccgcgcagcggcactgacaacgt

SEQ ID NO: 360481 - DNA, 55 bp, Artificial
  Synthetic oligonucleotide
ccctcaattttcgctggccttcttccctcgttaatttgatagcatggctgttggg

SEQ ID NO: 360482 - DNA, 60 bp, Artificial
  Synthetic oligonucleotide
ccctcacaactgaagaccacactctagaataccatggaggactatatagctcaatatggc

SEQ ID NO: 360483 - DNA, 60 bp, Artificial
  Synthetic oligonucleotide
ccctcacaccatcccgtgtctgtgcaactatgcaatgactgcagagcgagtttacagatt

SEQ ID NO: 360484 - DNA, 55 bp, Artificial
  Synthetic oligonucleotide
ccctcacatgacatgcactgacgagcccatggaccataagacgatactgagccta

SEQ ID NO: 360485 - DNA, 60 bp, Artificial
  Synthetic oligonucleotide
ccctcaccaggattgcatagcacgattgatgggatccctcctttaatttgaacaggcttg

SEQ ID NO: 360486 - DNA, 60 bp, Artificial
  Synthetic oligonucleotide
ccctcaccagtggatcaatctacgcaccaacaatagtgctacaattgtgatgccatacac

SEQ ID NO: 360487 - DNA, 55 bp, Artificial
  Synthetic oligonucleotide
ccctcaccattgcaacaatgtgcttcctcatgcagattgccatcctggtaactac

SEQ ID NO: 360488 - DNA, 51 bp, Artificial
  Synthetic oligonucleotide
ccctcacccaacgcggtgtgagcctctagggaggcctagtccgccgagagg

SEQ ID NO: 360489 - DNA, 55 bp, Artificial
  Synthetic oligonucleotide
ccctcacccagccacaagcctacgcccatggggacagctattggccaacgctatc

SEQ ID NO: 360490 - DNA, 55 bp, Artificial
  Synthetic oligonucleotide
ccctcacccccgtgttcgtttagtcagagacgagcattggccgccccaaccagac

SEQ ID NO: 360491 - DNA, 55 bp, Artificial
  Synthetic oligonucleotide
ccctcaccttagacacaaccttgaaggcctgtggcaacacaactacgacccagtg

SEQ ID NO: 360492 - DNA, 54 bp, Artificial
  Synthetic oligonucleotide
ccctcacggaggtaattatcaggacggtacaaagacgatcagcttttacggccc

SEQ ID NO: 360493 - DNA, 55 bp, Artificial
  Synthetic oligonucleotide
ccctcacgtattcggcaacgcatgttgatacagttccattatcctctatgtcggc

SEQ ID NO: 360494 - DNA, 55 bp, Artificial
  Synthetic oligonucleotide
ccctcacgtgttagggtgacccggacacaatatcataatccctcctttcaagtaa

SEQ ID NO: 360495 - DNA, 60 bp, Artificial
  Synthetic oligonucleotide
ccctcactgccgctgagtacgatcagaccacgtatgggtcgtccaccaatcctatgtatg

SEQ ID NO: 360496 - DNA, 55 bp, Artificial
  Synthetic oligonucleotide
ccctcactgtgacatcactcctcagacggctccacaagtggattaatgaggactg

SEQ ID NO: 360497 - DNA, 55 bp, Artificial
  Synthetic oligonucleotide
ccctcacttcaactgggttcaaactccaggtggaccaggaaacaacggagcactc

SEQ ID NO: 360498 - DNA, 55 bp, Artificial
  Synthetic oligonucleotide
ccctcagaaactacagagctacagacgagattacctcgagtaacctacgagtgga

SEQ ID NO: 360499 - DNA, 57 bp, Artificial
  Synthetic oligonucleotide
ccctcagaaggatatagcaagtatgtgattagaaagaacccaaacggacaaagagaa

SEQ ID NO: 360500 - DNA, 55 bp, Artificial
  Synthetic oligonucleotide
ccctcagacatgctgcggacaggaaataactttgagtttacttacaccttcgagg

SEQ ID NO: 360501 - DNA, 58 bp, Artificial
  Synthetic oligonucleotide
ccctcagaccacaaacacctataggaacacagatacggaagaacacctcataatatgg

SEQ ID NO: 360502 - DNA, 55 bp, Artificial
  Synthetic oligonucleotide
ccctcagatcttgctctgataatcccgacccaccaaacatacttcgatagccgta

SEQ ID NO: 360503 - DNA, 60 bp, Artificial
  Synthetic oligonucleotide
ccctcagatgctgcatataagcagctgcttttcgcctgtactgggtctctctgggttaga

SEQ ID NO: 360504 - DNA, 55 bp, Artificial
  Synthetic oligonucleotide
ccctcagattgaatcaaggggattgtttggggcaatagctggttttatagagggg

SEQ ID NO: 360505 - DNA, 58 bp, Artificial
  Synthetic oligonucleotide
ccctcagatttaaacaccatgttaaatacggtagggggacatcaagcagccatgcaaa

SEQ ID NO: 360506 - DNA, 57 bp, Artificial
  Synthetic oligonucleotide
ccctcagcacttagtctaccctgacggttctgaaatcaccacacggcgagggatcct

SEQ ID NO: 360507 - DNA, 55 bp, Artificial
  Synthetic oligonucleotide
ccctcagcccagtacactcaaccccaatcttccctcgagtggttgaagaccaccg

SEQ ID NO: 360508 - DNA, 55 bp, Artificial
  Synthetic oligonucleotide
ccctcagcttaaggtgctcattgtgtcagcctcaaaggaacgtgctgacgctaac

SEQ ID NO: 360509 - DNA, 55 bp, Artificial
  Synthetic oligonucleotide
ccctcaggaaccgatagaagtcataccgataggcatacagttgtgcgtgagagac

SEQ ID NO: 360510 - DNA, 55 bp, Artificial
  Synthetic oligonucleotide
ccctcaggacaattctgcttggaatatgatggcgtcttccctgttttgcccttag

SEQ ID NO: 360511 - DNA, 55 bp, Artificial
  Synthetic oligonucleotide
ccctcagggtccacgagactaagccaaacagtgaggttccgtattaagagtcaag

SEQ ID NO: 360512 - DNA, 58 bp, Artificial
  Synthetic oligonucleotide
ccctcaggttacaagaactcgctgacacctgccccctcactctaaactgtgacaggat

SEQ ID NO: 360513 - DNA, 51 bp, Artificial
  Synthetic oligonucleotide
ccctcagtaatctacaacttgcggcagccaggggaacccactgacggacgc

SEQ ID NO: 360514 - DNA, 55 bp, Artificial
  Synthetic oligonucleotide
ccctcagtattccaaaggaagatggacgactgcttcaaaggcacggaggccttca

SEQ ID NO: 360515 - DNA, 57 bp, Artificial
  Synthetic oligonucleotide
ccctcagtgtgatggcttccaaaataagaaatgggacctttttgttgaacgcagcaa

SEQ ID NO: 360516 - DNA, 55 bp, Artificial
  Synthetic oligonucleotide
ccctcagttggtgatatatgtgaggacgctagcctgttgggtttcctgaccgacc

SEQ ID NO: 360517 - DNA, 55 bp, Artificial
  Synthetic oligonucleotide
ccctcatacctctgtgttatttcttgccctttgataactttcctcactggcggtg

SEQ ID NO: 360518 - DNA, 60 bp, Artificial
  Synthetic oligonucleotide
ccctcatagtaaatgcaccaaatcatgagggaatacaagcaggagtggatagattctaca

SEQ ID NO: 360519 - DNA, 57 bp, Artificial
  Synthetic oligonucleotide
ccctcatatcaaatttacaggcgaagatactaaaatgcctatgatagacaagctaac

SEQ ID NO: 360520 - DNA, 58 bp, Artificial
  Synthetic oligonucleotide
ccctcatatctcgttaaaattggatgttcgtacgtgtgacttgcttgttctagtagct

SEQ ID NO: 360521 - DNA, 55 bp, Artificial
  Synthetic oligonucleotide
ccctcatcaggtattagattatgtggagtcaggagaatggttgaatgatcctgag

SEQ ID NO: 360522 - DNA, 55 bp, Artificial
  Synthetic oligonucleotide
ccctcatctcagaaacagaccagggaagggacacaactacattgacgggatgact

SEQ ID NO: 360523 - DNA, 60 bp, Artificial
  Synthetic oligonucleotide
ccctcatctgtgtggcattaattgccatattgaaaggtattgttaacatatggaaatcag

SEQ ID NO: 360524 - DNA, 55 bp, Artificial
  Synthetic oligonucleotide
ccctcatgacaattgatactggaacgatacttcaacaagtcgaactacccttgaa

SEQ ID NO: 360525 - DNA, 57 bp, Artificial
  Synthetic oligonucleotide
ccctcatgacagtacaggggacttttatttacatcccagtcttcacaggcgcaaacg

SEQ ID NO: 360526 - DNA, 60 bp, Artificial
  Synthetic oligonucleotide
ccctcatgcaatcgggaccacgagcaactgtgtgaagtggtcgagctattagaaggaatc

SEQ ID NO: 360527 - DNA, 55 bp, Artificial
  Synthetic oligonucleotide
ccctcatgctgtgtgagttcacctctcctaaatggtggccgctgatcattagggg

SEQ ID NO: 360528 - DNA, 55 bp, Artificial
  Synthetic oligonucleotide
ccctcatggagccttaaacagcagcctcccctttcagaacgtacatcctatcacc

SEQ ID NO: 360529 - DNA, 55 bp, Artificial
  Synthetic oligonucleotide
ccctcatggtacccgctcactgacaccctgcacttgcggctcctcggacctttac

SEQ ID NO: 360530 - DNA, 55 bp, Artificial
  Synthetic oligonucleotide
ccctcattagctggttcccactcaattacgatcactgtacgtcttactcgcatgg

SEQ ID NO: 360531 - DNA, 50 bp, Artificial
  Synthetic oligonucleotide
ccctcattatttcctagattttggctttaccatggtcgtgaaaagcctgt

SEQ ID NO: 360532 - DNA, 58 bp, Artificial
  Synthetic oligonucleotide
ccctcattcagcaagagttacccggattgatgaaatccggttcctattgcacctcctc

SEQ ID NO: 360533 - DNA, 58 bp, Artificial
  Synthetic oligonucleotide
ccctcattccgctggactcaatcccttagaaggggtctgtccaactggacccatgctg

SEQ ID NO: 360534 - DNA, 59 bp, Artificial
  Synthetic oligonucleotide
ccctcattgtactcctaatgattttgctcttcggaccctgcattcttaatcgattagtc

SEQ ID NO: 360535 - DNA, 50 bp, Artificial
  Synthetic oligonucleotide
ccctcatttgggcgcacattgcctgcccggcggcagtcttactcccttag

SEQ ID NO: 360536 - DNA, 59 bp, Artificial
  Synthetic oligonucleotide
ccctccaacggtcctaaaatagtgcctgtggacagcgtcgcctgcatgaacttagaagc

SEQ ID NO: 360537 - DNA, 56 bp, Artificial
  Synthetic oligonucleotide
ccctccacgcatgaccccttaacccaagcgatttacaagactcagttcgtgactcc

SEQ ID NO: 360538 - DNA, 54 bp, Artificial
  Synthetic oligonucleotide
ccctccacttaaatcgaagggttttgtgtcacacgcgtgtaaggagtggtcaac

SEQ ID NO: 360539 - DNA, 52 bp, Artificial
  Synthetic oligonucleotide
ccctccagtcccttatgcgccccaaatagctcagtttttgtatgcggtaata

SEQ ID NO: 360540 - DNA, 55 bp, Artificial
  Synthetic oligonucleotide
ccctccatcgcgacgtggttggagatctaagtcaaccgactccgacgaaactacc

SEQ ID NO: 360541 - DNA, 55 bp, Artificial
  Synthetic oligonucleotide
ccctccatggccgaatgcagggtgacagcctgccggcggatgcctgttgttagta

SEQ ID NO: 360542 - DNA, 58 bp, Artificial
  Synthetic oligonucleotide
ccctccattagtcttagagactgcgtcacggacaagaaagacagtcacttgttttgac

SEQ ID NO: 360543 - DNA, 54 bp, Artificial
  Synthetic oligonucleotide
ccctccattttcttccactaacagcgattgaaaggatctttaaatcctccccca

SEQ ID NO: 360544 - DNA, 55 bp, Artificial
  Synthetic oligonucleotide
ccctcccacacgttaaaacacccgtccacttcacgcggcttatctggcatgaacg

SEQ ID NO: 360545 - DNA, 54 bp, Artificial
  Synthetic oligonucleotide
ccctcccagaagacacatccctggacgtttcacaaatttcttggacgtggcaga

SEQ ID NO: 360546 - DNA, 55 bp, Artificial
  Synthetic oligonucleotide
ccctcccatataacagcagaggcagctgcgaggaggttagcaaggggatcgcccc

SEQ ID NO: 360547 - DNA, 54 bp, Artificial
  Synthetic oligonucleotide
ccctccccaaaagtaacttagaagctttgaaccaacgatcaacagtaggtgtga

SEQ ID NO: 360548 - DNA, 60 bp, Artificial
  Synthetic oligonucleotide
ccctccccgatggctctcaacaccgctcccaccgctgacgcactagccgcgatggccttc

SEQ ID NO: 360549 - DNA, 54 bp, Artificial
  Synthetic oligonucleotide
ccctcccctacactggcggtggagctcatttaacatccggtggcaaccccttta

SEQ ID NO: 360550 - DNA, 55 bp, Artificial
  Synthetic oligonucleotide
ccctcccctgttgataacgtccaactacaatataatggtagaggacagatacagg

SEQ ID NO: 360551 - DNA, 53 bp, Artificial
  Synthetic oligonucleotide
ccctccctgaagggactactggactaataataggtagaagttctaattataaa

SEQ ID NO: 360552 - DNA, 52 bp, Artificial
  Synthetic oligonucleotide
ccctcccttaaaccaactctccccaccttcgcaatcatagacaaattaaacg

SEQ ID NO: 360553 - DNA, 55 bp, Artificial
  Synthetic oligonucleotide
ccctccgacaaatgatctaaatactgtaggaggagtaaacaccttcgctctcgaa

SEQ ID NO: 360554 - DNA, 55 bp, Artificial
  Synthetic oligonucleotide
ccctccgacaacggcgacacgggatccgacgttgagtcgtattcctccatgcccc

SEQ ID NO: 360555 - DNA, 55 bp, Artificial
  Synthetic oligonucleotide
ccctccgaggagagtgtttaagaggttatttatcgacgaggggttaatgctgcac

SEQ ID NO: 360556 - DNA, 60 bp, Artificial
  Synthetic oligonucleotide
ccctccgatttctgtggcaggacgtgagttggcagtcttgctataaactgtctgtaagtc

SEQ ID NO: 360557 - DNA, 55 bp, Artificial
  Synthetic oligonucleotide
ccctccgcctagcgatgcagttcgtagagtccccgctatacgacgcccaacgttc

SEQ ID NO: 360558 - DNA, 57 bp, Artificial
  Synthetic oligonucleotide
ccctccggacgtgggtgaatacacatccatatcgaacttgagtaacttcgccagaac

SEQ ID NO: 360559 - DNA, 55 bp, Artificial
  Synthetic oligonucleotide
ccctccgtacacacctggtagcccacctccttctgtcctctgcaccttctttctc

SEQ ID NO: 360560 - DNA, 55 bp, Artificial
  Synthetic oligonucleotide
ccctccgtgagttcattgaaaagaattacaattgtgataatgtggcacaccagag

SEQ ID NO: 360561 - DNA, 51 bp, Artificial
  Synthetic oligonucleotide
ccctccgtgcatttcttgaggcgccccattcggtcagtggccgttgcaaaa

SEQ ID NO: 360562 - DNA, 55 bp, Artificial
  Synthetic oligonucleotide
ccctcctaaagcgattgtagaggatttaaacgctataccgagacaatttattgta

SEQ ID NO: 360563 - DNA, 56 bp, Artificial
  Synthetic oligonucleotide
ccctcctacggcggaatctccgccttcttatctgcggaagtgtgacgtcacttccg

SEQ ID NO: 360564 - DNA, 55 bp, Artificial
  Synthetic oligonucleotide
ccctcctagccggagaacatgcactataactgggttctggccgttgagctacgga

SEQ ID NO: 360565 - DNA, 55 bp, Artificial
  Synthetic oligonucleotide
ccctcctagccggagaacctgcctcatagagggattctggccgttgaactacgga

SEQ ID NO: 360566 - DNA, 52 bp, Artificial
  Synthetic oligonucleotide
ccctcctaggtggttacgagtcaagttaatttgcgtagaaaaacttggcgtc

SEQ ID NO: 360567 - DNA, 55 bp, Artificial
  Synthetic oligonucleotide
ccctcctcccgtttccgcctgttgaggcagtcacgtagctagtaccaggttgcaa

SEQ ID NO: 360568 - DNA, 57 bp, Artificial
  Synthetic oligonucleotide
ccctcctccggcggtataatctccgccttttcatctgtgtaagcgtgacgtcacttc

SEQ ID NO: 360569 - DNA, 57 bp, Artificial
  Synthetic oligonucleotide
ccctcctctaacgcaatcggactacatttttacccgatctgggaagctggcacactg

SEQ ID NO: 360570 - DNA, 55 bp, Artificial
  Synthetic oligonucleotide
ccctcctctgagcaagagtcgcgtgtagcgtctgacggggttttcgaaccaggtc

SEQ ID NO: 360571 - DNA, 58 bp, Artificial
  Synthetic oligonucleotide
ccctcctctttcggataggtgaggtccactatggccatctgagcgggtttgaaagcga

SEQ ID NO: 360572 - DNA, 55 bp, Artificial
  Synthetic oligonucleotide
ccctcctgagctcctagccggttcgaaaatatcattgaatccttggtgctacgag

SEQ ID NO: 360573 - DNA, 53 bp, Artificial
  Synthetic oligonucleotide
ccctcctgattacaggggagttgtatcaaaacaacgtgacccttgttccctcg

SEQ ID NO: 360574 - DNA, 56 bp, Artificial
  Synthetic oligonucleotide
ccctcctggagataaacctcgtcgatagagaaagggagattggctctcttacgttg

SEQ ID NO: 360575 - DNA, 60 bp, Artificial
  Synthetic oligonucleotide
ccctcctgtcaaggcatcagcttatgaaatgctgctggattgtacaagtgcaagtgaata

SEQ ID NO: 360576 - DNA, 60 bp, Artificial
  Synthetic oligonucleotide
ccctccttaaaacgctcttcagcactacagtctacagtatcacactgatgtgatcatcaa

SEQ ID NO: 360577 - DNA, 55 bp, Artificial
  Synthetic oligonucleotide
ccctccttacaaagtttgttgctgcggccttacacaatataaaggctaaagcacc

SEQ ID NO: 360578 - DNA, 53 bp, Artificial
  Synthetic oligonucleotide
ccctccttccacttcgcatcaagattcgactgaccccgcggaccccctgatgg

SEQ ID NO: 360579 - DNA, 56 bp, Artificial
  Synthetic oligonucleotide
ccctccttctactgggatcacggctacacctaccgtgatggcccgggcgcctttga

SEQ ID NO: 360580 - DNA, 52 bp, Artificial
  Synthetic oligonucleotide
ccctccttgaaagactacgtcggcttaaaaattcctgtgtccgccgacctag

SEQ ID NO: 360581 - DNA, 52 bp, Artificial
  Synthetic oligonucleotide
ccctccttggcaacaaggacccacggggccgaaagccacgtcctgaaggacc

SEQ ID NO: 360582 - DNA, 54 bp, Artificial
  Synthetic oligonucleotide
ccctccttgttagaccccacgcagaggggtggcctaatctggtccgtataaatc

SEQ ID NO: 360583 - DNA, 55 bp, Artificial
  Synthetic oligonucleotide
ccctcgaatagtttaatgtctgcaccagaatctctgcctaagtactgaatagcac

SEQ ID NO: 360584 - DNA, 55 bp, Artificial
  Synthetic oligonucleotide
ccctcgacacctccgtgagctccaggtttacgagcgcggctgcaactggtacccg

SEQ ID NO: 360585 - DNA, 58 bp, Artificial
  Synthetic oligonucleotide
ccctcgactaccacttcgtagccgacgcagcatcctgcaagtactccaacgttgggac

SEQ ID NO: 360586 - DNA, 54 bp, Artificial
  Synthetic oligonucleotide
ccctcgacttcaccatacccttcaactcccagacctactggaaaatcactaacc

SEQ ID NO: 360587 - DNA, 55 bp, Artificial
  Synthetic oligonucleotide
ccctcgagagggagtgtgccgactacggaggagcgtctcctaggagagtgtctcc

SEQ ID NO: 360588 - DNA, 58 bp, Artificial
  Synthetic oligonucleotide
ccctcgagccgcaacaaccctggacatataagaaggcctgtgagagtttggataagaa

SEQ ID NO: 360589 - DNA, 50 bp, Artificial
  Synthetic oligonucleotide
ccctcgagtttagtttttccatcatagcactatttactttccgccgccct

SEQ ID NO: 360590 - DNA, 60 bp, Artificial
  Synthetic oligonucleotide
ccctcgatggaaggaagatggctgacggtagcgtactgcgcgcacggattattctgcaac

SEQ ID NO: 360591 - DNA, 55 bp, Artificial
  Synthetic oligonucleotide
ccctcgcaaaggtccctacaatatcagggtatggaatatggccgcaggcgctggc

SEQ ID NO: 360592 - DNA, 58 bp, Artificial
  Synthetic oligonucleotide
ccctcgccagagtggttggtgtcccaaggttattgtgatccagtgagagtctttgtta

SEQ ID NO: 360593 - DNA, 55 bp, Artificial
  Synthetic oligonucleotide
ccctcgcccatggcttcatggcctaggacaatatatctatgaaacatatggggac

SEQ ID NO: 360594 - DNA, 55 bp, Artificial
  Synthetic oligonucleotide
ccctcgccgctctagaggacaccgttgattaccccgcccgcgctcacacttttga

SEQ ID NO: 360595 - DNA, 55 bp, Artificial
  Synthetic oligonucleotide
ccctcgccggtcccatgacttccgatccccactcaccggtgaaagttttcatggc

SEQ ID NO: 360596 - DNA, 60 bp, Artificial
  Synthetic oligonucleotide
ccctcgcctttcccttgttacttcacctgcagatactcgtcttaatcaatacacagcatg

SEQ ID NO: 360597 - DNA, 52 bp, Artificial
  Synthetic oligonucleotide
ccctcgcgaaaccccgtaaattgtaccgatttactgggatgggaacacatat

SEQ ID NO: 360598 - DNA, 58 bp, Artificial
  Synthetic oligonucleotide
ccctcgctagctacgtccagcaccctcacaagaccgtcagggtcaagttccacacgga

SEQ ID NO: 360599 - DNA, 55 bp, Artificial
  Synthetic oligonucleotide
ccctcgctataggatggtctccagaccccgccaacaatatttcaggcaatgacac

SEQ ID NO: 360600 - DNA, 50 bp, Artificial
  Synthetic oligonucleotide
ccctcgctcaaaacttaccacttgactcagcctcaccctacagatagggt

SEQ ID NO: 360601 - DNA, 57 bp, Artificial
  Synthetic oligonucleotide
ccctcgctgcgtgtttcccaccgagttgtatctttgtgggtggcattactaggcgtg

SEQ ID NO: 360602 - DNA, 60 bp, Artificial
  Synthetic oligonucleotide
ccctcgctggggaaggctctccccaatcgatccaggtcatatatcaagctaagacgactg

SEQ ID NO: 360603 - DNA, 50 bp, Artificial
  Synthetic oligonucleotide
ccctcggcaccctccaagggagaaccggtctgtgaccaacctgccaaaga

SEQ ID NO: 360604 - DNA, 55 bp, Artificial
  Synthetic oligonucleotide
ccctcggctccctgaacaagtactgcgcggttcagtcgaccttcgtcatagaacc

SEQ ID NO: 360605 - DNA, 60 bp, Artificial
  Synthetic oligonucleotide
ccctcggctttgacttgaagatagtgaatcgcgcgccacgtggctctccagtgacatttc

SEQ ID NO: 360606 - DNA, 55 bp, Artificial
  Synthetic oligonucleotide
ccctcgggaggacttggcaaccaaggctcacgccccactgaatcgagtaatcagg

SEQ ID NO: 360607 - DNA, 55 bp, Artificial
  Synthetic oligonucleotide
ccctcggggcgagcttattgatcctgagtacgattacactgagttgtcgacttcg

SEQ ID NO: 360608 - DNA, 54 bp, Artificial
  Synthetic oligonucleotide
ccctcggtactgatactggggtctgataaggccacctccaatagggtcaagacc

SEQ ID NO: 360609 - DNA, 60 bp, Artificial
  Synthetic oligonucleotide
ccctcggtgaactaacggcacagctgacaagcatgactctcaaactgacttcgattgatt

SEQ ID NO: 360610 - DNA, 50 bp, Artificial
  Synthetic oligonucleotide
ccctcggtttgatccctcccggggttacgtggtcgacgtttcatacaacg

SEQ ID NO: 360611 - DNA, 55 bp, Artificial
  Synthetic oligonucleotide
ccctcggtttttgcctatataagcctgtaagaactttagctcgaggtcgatcctc

SEQ ID NO: 360612 - DNA, 55 bp, Artificial
  Synthetic oligonucleotide
ccctcgtatatattctgccgctgagcctgtgatacctttcccacagttgtttggg

SEQ ID NO: 360613 - DNA, 60 bp, Artificial
  Synthetic oligonucleotide
ccctcgtcgcagctgtcattggatggatgctaggaagcaacacaatgcaacgcgtcgtgt

SEQ ID NO: 360614 - DNA, 56 bp, Artificial
  Synthetic oligonucleotide
ccctcgtcggtctggtttatcctatgcgcgacggttcaacggaagcagaaacgtca

SEQ ID NO: 360615 - DNA, 53 bp, Artificial
  Synthetic oligonucleotide
ccctcgtctccagatggcgttaagttctaaaatcttccaggggaatgggaacc

SEQ ID NO: 360616 - DNA, 55 bp, Artificial
  Synthetic oligonucleotide
ccctcgtgatggttgacaaacaaaatgttgttggctaatttcagttctactggac

SEQ ID NO: 360617 - DNA, 55 bp, Artificial
  Synthetic oligonucleotide
ccctcgtggctacctagatctctccatccttgctgatccaactctctccttggtc

SEQ ID NO: 360618 - DNA, 58 bp, Artificial
  Synthetic oligonucleotide
ccctcgttatcgagcgggttagggccattggctgccactttgttctcttgctcacggc

SEQ ID NO: 360619 - DNA, 53 bp, Artificial
  Synthetic oligonucleotide
ccctcgttggctccgagtgaggcttatcccggggaactcggccctcttcccca

SEQ ID NO: 360620 - DNA, 59 bp, Artificial
  Synthetic oligonucleotide
ccctcgttgggagggacagcccataaaaaggtgcgatgtggtgacactcgcacgcgtga

SEQ ID NO: 360621 - DNA, 60 bp, Artificial
  Synthetic oligonucleotide
ccctctaaattgcaaatcatgttggcagaaatttgatagcctagttagatgccatgatca

SEQ ID NO: 360622 - DNA, 55 bp, Artificial
  Synthetic oligonucleotide
ccctctaagaaccaacgagctgtcccttgcttacttcaaaatgagtctgggacag

SEQ ID NO: 360623 - DNA, 59 bp, Artificial
  Synthetic oligonucleotide
ccctctaatagaagatcctgccagactgatgttagaatggttaaagacagggaatagac

SEQ ID NO: 360624 - DNA, 55 bp, Artificial
  Synthetic oligonucleotide
ccctctaatcaagctatctcacaatttactgaacagccggaacccatccgggaac

SEQ ID NO: 360625 - DNA, 55 bp, Artificial
  Synthetic oligonucleotide
ccctctacctgagactcctctgagcgaagtgcactcaatagagcatatcatggaa

SEQ ID NO: 360626 - DNA, 55 bp, Artificial
  Synthetic oligonucleotide
ccctctagagtgcattctgaagaacttctctgactttaagaagagggcgggagac

SEQ ID NO: 360627 - DNA, 55 bp, Artificial
  Synthetic oligonucleotide
ccctctagcagatcttccatcgacctgaaactcaccccattcgacggtgtctccg

SEQ ID NO: 360628 - DNA, 55 bp, Artificial
  Synthetic oligonucleotide
ccctctaggactcaattatccaggagcccaggatttaacctccttcttgaggcgc

SEQ ID NO: 360629 - DNA, 59 bp, Artificial
  Synthetic oligonucleotide
ccctctatagtaagtcttgttgaagaatctggtattgtcgatgttggtgcccctgctcc

SEQ ID NO: 360630 - DNA, 55 bp, Artificial
  Synthetic oligonucleotide
ccctctattacagccctcactgagtctttgatgtcctcaagataggaagaggcag

SEQ ID NO: 360631 - DNA, 55 bp, Artificial
  Synthetic oligonucleotide
ccctctattcccgctcccggcaccaagcttcctcctgcaccgggtcagcaatcat

SEQ ID NO: 360632 - DNA, 55 bp, Artificial
  Synthetic oligonucleotide
ccctctattgttccgaaagtcgatcaaactagcccaataccattgggtagacgag

SEQ ID NO: 360633 - DNA, 60 bp, Artificial
  Synthetic oligonucleotide
ccctctcaacgtccgaggggggcgtgatgctgtcatcttactcatgtgtgttgtacaccc

SEQ ID NO: 360634 - DNA, 50 bp, Artificial
  Synthetic oligonucleotide
ccctctcataaggcgcccttggtgcgtcaataaatcagtggtcccattat

SEQ ID NO: 360635 - DNA, 60 bp, Artificial
  Synthetic oligonucleotide
ccctctcatctggcataccagtggtagagaccttctactcacgcttcaggacctatgatg

SEQ ID NO: 360636 - DNA, 60 bp, Artificial
  Synthetic oligonucleotide
ccctctcattggtacaactgtctctactgtcaacatccctcggaggacggtgacactctc

SEQ ID NO: 360637 - DNA, 57 bp, Artificial
  Synthetic oligonucleotide
ccctctccacgaacccccactctagatctagggttcatggagaaggtctctgagtta

SEQ ID NO: 360638 - DNA, 60 bp, Artificial
  Synthetic oligonucleotide
ccctctccatacaactcaagatttgagtcagtcgcttggtcagcaagtgcttgtcatgat

SEQ ID NO: 360639 - DNA, 60 bp, Artificial
  Synthetic oligonucleotide
ccctctccatacaattcaaggtttgagtctgttgcttggtcggcaagtgcttgccacgat

SEQ ID NO: 360640 - DNA, 55 bp, Artificial
  Synthetic oligonucleotide
ccctctccatccttatccttctttccgagaattcctttgatgttccccagccagg

SEQ ID NO: 360641 - DNA, 55 bp, Artificial
  Synthetic oligonucleotide
ccctctcctgatgtcccacgtggttgtgaaggaccattgtaaggtcaatccttcg

SEQ ID NO: 360642 - DNA, 56 bp, Artificial
  Synthetic oligonucleotide
ccctctccttatgaggtggaggcacagcacgccttaagtgtctgcgatccggtgtt

SEQ ID NO: 360643 - DNA, 52 bp, Artificial
  Synthetic oligonucleotide
ccctctcggaaatggccgtccggaaagaagacgctcgtctgaaaacctttgt

SEQ ID NO: 360644 - DNA, 57 bp, Artificial
  Synthetic oligonucleotide
ccctctcggtattgataccgaagcggctgcatgggaaaagttcctagcggccgagga

SEQ ID NO: 360645 - DNA, 55 bp, Artificial
  Synthetic oligonucleotide
ccctctcgtgtccgatggatgactctaactgactacatctcgggatgcggagtca

SEQ ID NO: 360646 - DNA, 56 bp, Artificial
  Synthetic oligonucleotide
ccctctctacaaaagaactgaccacctacgggcttggacaccagaataaagcagtg

SEQ ID NO: 360647 - DNA, 60 bp, Artificial
  Synthetic oligonucleotide
ccctctctattccctgctaatccctggacgtggactgtgtctagggctgcttgccatcga

SEQ ID NO: 360648 - DNA, 55 bp, Artificial
  Synthetic oligonucleotide
ccctctctgagggagtagacaacgcagcacctgagtcatactctaactcgatgtc

SEQ ID NO: 360649 - DNA, 60 bp, Artificial
  Synthetic oligonucleotide
ccctctctggcagtgacagcgacacccttactgtaactgcatcacccccgctaactactg

SEQ ID NO: 360650 - DNA, 55 bp, Artificial
  Synthetic oligonucleotide
ccctctctggtacactccttttgaactatgcaatcgaacctcccaccctcccgac

SEQ ID NO: 360651 - DNA, 55 bp, Artificial
  Synthetic oligonucleotide
ccctctcttagaacagctaaagtgcaagggccagggtttgattttgcacaagcca

SEQ ID NO: 360652 - DNA, 52 bp, Artificial
  Synthetic oligonucleotide
ccctctcttgttagaccccacgcagaggggtggtttagtttggaccgtagaa

SEQ ID NO: 360653 - DNA, 55 bp, Artificial
  Synthetic oligonucleotide
ccctctgacccaggttttatattaaatcgtgagatagaaaactgtctatcaggga

SEQ ID NO: 360654 - DNA, 54 bp, Artificial
  Synthetic oligonucleotide
ccctctgacgagaccgctacttcagaagcgggatcactgtcctccatgcctccc

SEQ ID NO: 360655 - DNA, 57 bp, Artificial
  Synthetic oligonucleotide
ccctctgaggtttcgtctgaggtcagtatcgagatcgggacggagtcggaagacacc

SEQ ID NO: 360656 - DNA, 55 bp, Artificial
  Synthetic oligonucleotide
ccctctgatactactctactaccaagtatcaatttgataacgtcaccgtctacgt

SEQ ID NO: 360657 - DNA, 56 bp, Artificial
  Synthetic oligonucleotide
ccctctgcacccggggaggtgtcagccttttgttctgctctgtataggtttaatcg

SEQ ID NO: 360658 - DNA, 57 bp, Artificial
  Synthetic oligonucleotide
ccctctgctgagggcttatagtggtgatattcctacccaggagttccctcccattac

SEQ ID NO: 360659 - DNA, 56 bp, Artificial
  Synthetic oligonucleotide
ccctctgggaatggtttgatatttccaaatggctcttctatgttaagatattttgc

SEQ ID NO: 360660 - DNA, 56 bp, Artificial
  Synthetic oligonucleotide
ccctctgggaccccatgaattccttaaagtgctttaggtagtgaggatcgacgtca

SEQ ID NO: 360661 - DNA, 55 bp, Artificial
  Synthetic oligonucleotide
ccctctgggagagcattcaagaattctcaatgatggggagaaaggactgtccagt

SEQ ID NO: 360662 - DNA, 55 bp, Artificial
  Synthetic oligonucleotide
ccctctgggccccgacaattgaagcggagtctcctgggtctaggatggtggtacc

SEQ ID NO: 360663 - DNA, 55 bp, Artificial
  Synthetic oligonucleotide
ccctctgttcatagaatgtcatgtgagctggtaggtcacaaactcagtctcaagc

SEQ ID NO: 360664 - DNA, 60 bp, Artificial
  Synthetic oligonucleotide
ccctcttatctcgggcttgagagttgtccagtgggcaactggcgcccattataagctcaa

SEQ ID NO: 360665 - DNA, 55 bp, Artificial
  Synthetic oligonucleotide
ccctcttcatgtggtgatgacccctcaattgcgacgcactgtattgagcgagggt

SEQ ID NO: 360666 - DNA, 58 bp, Artificial
  Synthetic oligonucleotide
ccctcttccaaattgttgaagtcgaacggaggtataatcccatcatgcttgtatggaa

SEQ ID NO: 360667 - DNA, 55 bp, Artificial
  Synthetic oligonucleotide
ccctcttcccacaccagtttattagccccagaacaaacatgactgcccacatcac

SEQ ID NO: 360668 - DNA, 55 bp, Artificial
  Synthetic oligonucleotide
ccctcttccttcacttggtgggcatacccacccataggcacatcagaggcgaggc

SEQ ID NO: 360669 - DNA, 56 bp, Artificial
  Synthetic oligonucleotide
ccctcttctcaccaggggcgtctcagaaaatccaactagtaaataccaacggcagc

SEQ ID NO: 360670 - DNA, 57 bp, Artificial
  Synthetic oligonucleotide
ccctcttcttaatcactccacagtatgaaattaacttggctgagataaggaaagcgg

SEQ ID NO: 360671 - DNA, 55 bp, Artificial
  Synthetic oligonucleotide
ccctcttgcattatagggaagcgtttcaaaatactaaccctggaagttctgcgct

SEQ ID NO: 360672 - DNA, 55 bp, Artificial
  Synthetic oligonucleotide
ccctcttgccgtagccatttacgtttatattaagcgtggttacgatgctataccc

SEQ ID NO: 360673 - DNA, 55 bp, Artificial
  Synthetic oligonucleotide
ccctctttgaaggatcgtttctacattcgtcatgtgtttaagcgcgttttgtccg

SEQ ID NO: 360674 - DNA, 52 bp, Artificial
  Synthetic oligonucleotide
ccctgaaaacgctatccttatgcggcctccccaaccgtttatggtccaagtg

SEQ ID NO: 360675 - DNA, 60 bp, Artificial
  Synthetic oligonucleotide
ccctgaaaacgttggcttcaatattgctagttggtctccacaatgtcattgccgtggaca

SEQ ID NO: 360676 - DNA, 54 bp, Artificial
  Synthetic oligonucleotide
ccctgaaaagggctttgcctacgatgctcataaaagaaaggaggcctactttaa

SEQ ID NO: 360677 - DNA, 55 bp, Artificial
  Synthetic oligonucleotide
ccctgaaagaaatgaacaaggacagaagctttggagtaagacaagtgatgctggg

SEQ ID NO: 360678 - DNA, 55 bp, Artificial
  Synthetic oligonucleotide
ccctgaaagaatgtctatatataagaatgccgcgcttatttggcaacatgcctac

SEQ ID NO: 360679 - DNA, 59 bp, Artificial
  Synthetic oligonucleotide
ccctgaaagtgtctcgcggccgacttctagggttattgcacattctgatcttcctgaac

SEQ ID NO: 360680 - DNA, 60 bp, Artificial
  Synthetic oligonucleotide
ccctgaaatcctaaagcgccacagcgaatcaaaggctgatcttgtgcagttgtagtccat

SEQ ID NO: 360681 - DNA, 57 bp, Artificial
  Synthetic oligonucleotide
ccctgaacaccgtgactaatcttaaggttcaactcatacgcatggcggaggcagagc

SEQ ID NO: 360682 - DNA, 50 bp, Artificial
  Synthetic oligonucleotide
ccctgaacgcccaattggaggcggatgtcaaatcggctcaatcatgtagt

SEQ ID NO: 360683 - DNA, 55 bp, Artificial
  Synthetic oligonucleotide
ccctgaagcaatctgatctgatcccaagggttgacggtggtaattatttgaagcc

SEQ ID NO: 360684 - DNA, 55 bp, Artificial
  Synthetic oligonucleotide
ccctgaagcttggggactacggagaagtcacaatggattgcgagcctcgtagtgg

SEQ ID NO: 360685 - DNA, 59 bp, Artificial
  Synthetic oligonucleotide
ccctgaagtctgcctgaagtgggaattaatggacgaggattatcaggggcgtttgtgca

SEQ ID NO: 360686 - DNA, 58 bp, Artificial
  Synthetic oligonucleotide
ccctgaagtgtactcccttggcgctcctgaatgtgatcgtcattttttattgtgtttc

SEQ ID NO: 360687 - DNA, 55 bp, Artificial
  Synthetic oligonucleotide
ccctgaagttggcaacaggaatgcggaatgtaccagagaaacaaactaggggcct

SEQ ID NO: 360688 - DNA, 60 bp, Artificial
  Synthetic oligonucleotide
ccctgaatggggctgtggtgatgaaggtggggactatagggacagagtcctgctttatga

SEQ ID NO: 360689 - DNA, 60 bp, Artificial
  Synthetic oligonucleotide
ccctgaatgtgaattactcttcacagtaagctcatggtcttacattgtggaaacatcgaa

SEQ ID NO: 360690 - DNA, 60 bp, Artificial
  Synthetic oligonucleotide
ccctgaattgattgcctcggcatatgcgtcgttggcagactgctgacctcctctagctga

SEQ ID NO: 360691 - DNA, 58 bp, Artificial
  Synthetic oligonucleotide
ccctgaattggaaatgaaggtaccaattgaagacatgtggactgattcaacaagggac

SEQ ID NO: 360692 - DNA, 55 bp, Artificial
  Synthetic oligonucleotide
ccctgacaattgcaaactcagtgcctcaaagtagtcctctatcagtctagtgaac

SEQ ID NO: 360693 - DNA, 60 bp, Artificial
  Synthetic oligonucleotide
ccctgacacagtcagcaaccccaggcctagtaacctctccagcacagacagtccacccac

SEQ ID NO: 360694 - DNA, 55 bp, Artificial
  Synthetic oligonucleotide
ccctgacactctcagaaagttgcatggggagacgttcccttatacagcctttgac

SEQ ID NO: 360695 - DNA, 55 bp, Artificial
  Synthetic oligonucleotide
ccctgacactgtactcacccacgtagtcatgtgcggtaacgagtacacggccagg

SEQ ID NO: 360696 - DNA, 55 bp, Artificial
  Synthetic oligonucleotide
ccctgacatcccacagtggtcgcgggacaacagtaacagtcacggtgcacctgtc

SEQ ID NO: 360697 - DNA, 60 bp, Artificial
  Synthetic oligonucleotide
ccctgacattaatgcatacttgcattcatcctaaccgttattaatggacacgcgtcagcc

SEQ ID NO: 360698 - DNA, 59 bp, Artificial
  Synthetic oligonucleotide
ccctgacccgccgagtcgcgtatctgccacgttcatgcagttctcgaaagttgctgccc

SEQ ID NO: 360699 - DNA, 55 bp, Artificial
  Synthetic oligonucleotide
ccctgaccctacaactgatgcgggtggtcttgttgttattaaaggtgacttacag

SEQ ID NO: 360700 - DNA, 55 bp, Artificial
  Synthetic oligonucleotide
ccctgaccctgtttgcgaatcccttgcttggtggaagttaatttatcataacact

SEQ ID NO: 360701 - DNA, 55 bp, Artificial
  Synthetic oligonucleotide
ccctgaccgggtgtgtaggataggaaaggtgcccactgtgggcgacaggttatgg

SEQ ID NO: 360702 - DNA, 52 bp, Artificial
  Synthetic oligonucleotide
ccctgacctctgggacacctggcaactacaacgcaagcacccagctgcctgc

SEQ ID NO: 360703 - DNA, 55 bp, Artificial
  Synthetic oligonucleotide
ccctgaccttaaccataaggattaggcaaggaggaatgtggcgcaatcggtagag

SEQ ID NO: 360704 - DNA, 55 bp, Artificial
  Synthetic oligonucleotide
ccctgacgagcatatcaccgtggtactgcccaccaatgagcttcgcctcgactgg

SEQ ID NO: 360705 - DNA, 54 bp, Artificial
  Synthetic oligonucleotide
ccctgacgctaggactacaacatacaatgcaggccgtttttccaccccccaacc

SEQ ID NO: 360706 - DNA, 55 bp, Artificial
  Synthetic oligonucleotide
ccctgacggcagctgagaccggacacacctcgcaggtgactcctagtgacaacat

SEQ ID NO: 360707 - DNA, 55 bp, Artificial
  Synthetic oligonucleotide
ccctgacgtattgactgaaaccggggtctttggtcaaaatgcacagttccattac

SEQ ID NO: 360708 - DNA, 53 bp, Artificial
  Synthetic oligonucleotide
ccctgactgatggatagggtgcccctaaagaccgtctgttgcaaccatgcgtc

SEQ ID NO: 360709 - DNA, 60 bp, Artificial
  Synthetic oligonucleotide
ccctgagaagatcaagatgaaagggattgttcaccaagaggatgctctgaagctttcaga

SEQ ID NO: 360710 - DNA, 60 bp, Artificial
  Synthetic oligonucleotide
ccctgagactaacaaagcttttcataccaaacatgaacttcttgtatgaccagcctgtca

SEQ ID NO: 360711 - DNA, 55 bp, Artificial
  Synthetic oligonucleotide
ccctgagagaaatgagcaaggtcagatcctttggagtaagacaaatgatgctggt

SEQ ID NO: 360712 - DNA, 55 bp, Artificial
  Synthetic oligonucleotide
ccctgagccaccaccatccaggcacagacagcctgacaaggagatggtgtgtgac

SEQ ID NO: 360713 - DNA, 60 bp, Artificial
  Synthetic oligonucleotide
ccctgagccaccatcacccagacacagatagtctgacaaggaggtgatgtgtgactcgga

SEQ ID NO: 360714 - DNA, 55 bp, Artificial
  Synthetic oligonucleotide
ccctgagcccaaattccatgacgatccccttgaaaacaagtctaacaaggagaaa

SEQ ID NO: 360715 - DNA, 55 bp, Artificial
  Synthetic oligonucleotide
ccctgagcgggtatctacgctaggagacatgattaggcacgttctcccataagcg

SEQ ID NO: 360716 - DNA, 56 bp, Artificial
  Synthetic oligonucleotide
ccctgagcgtacgaaccctcgagaattgatgaacaaggttcctcgcggcctcactt

SEQ ID NO: 360717 - DNA, 55 bp, Artificial
  Synthetic oligonucleotide
ccctgagcttgccaagaacctagtcacagaatacggccgctttgacccaggagcg

SEQ ID NO: 360718 - DNA, 55 bp, Artificial
  Synthetic oligonucleotide
ccctgaggaacggccatacaaattgccagacctgtgcaggacattggacaccaca

SEQ ID NO: 360719 - DNA, 55 bp, Artificial
  Synthetic oligonucleotide
ccctgaggacttggttaatgtggctgctcatatccgtaaggcgctatccactcag

SEQ ID NO: 360720 - DNA, 55 bp, Artificial
  Synthetic oligonucleotide
ccctgagtatggctctttggaagctgatcagacgtggctacggctccttggcaac

SEQ ID NO: 360721 - DNA, 60 bp, Artificial
  Synthetic oligonucleotide
ccctgagtcaatggacccatcagaaatactagatgacaagtcacactccttcaccagaac

SEQ ID NO: 360722 - DNA, 51 bp, Artificial
  Synthetic oligonucleotide
ccctgagtgggagtttgttaatacccctcctttagtaaaattatggtacca

SEQ ID NO: 360723 - DNA, 55 bp, Artificial
  Synthetic oligonucleotide
ccctgatacactcggatacgatctaatccgtgatctgatacttgttgtccgtgcc

SEQ ID NO: 360724 - DNA, 55 bp, Artificial
  Synthetic oligonucleotide
ccctgataccctaggatttgatctcattcgtgatcttaccggtgtaattcgtgcg

SEQ ID NO: 360725 - DNA, 59 bp, Artificial
  Synthetic oligonucleotide
ccctgatacgcagcgattggtatgggcctgtgttggtgttgaaataggtagggggcagc

SEQ ID NO: 360726 - DNA, 60 bp, Artificial
  Synthetic oligonucleotide
ccctgatacgctaggtgcctatccttcgctcagcatggtactaaacgtcatgctgcacgc

SEQ ID NO: 360727 - DNA, 55 bp, Artificial
  Synthetic oligonucleotide
ccctgatatgggtattcggtggagtcgttgtccgcgtctagtggtcgtggggtcg

SEQ ID NO: 360728 - DNA, 60 bp, Artificial
  Synthetic oligonucleotide
ccctgatatgtaattgtgtggacctaaagatctggcccacatagtcttaccagttcttga

SEQ ID NO: 360729 - DNA, 58 bp, Artificial
  Synthetic oligonucleotide
ccctgatcatccgagtggtaaaacactgcggtctttctttaagatgacacctgacaac

SEQ ID NO: 360730 - DNA, 55 bp, Artificial
  Synthetic oligonucleotide
ccctgatctcgcctgtcaactctggcccagtccaagccaatgcttcccacacgga

SEQ ID NO: 360731 - DNA, 58 bp, Artificial
  Synthetic oligonucleotide
ccctgatgaggattcccgggatgccgaaagacaggataaaaaccactcatgaagccca

SEQ ID NO: 360732 - DNA, 60 bp, Artificial
  Synthetic oligonucleotide
ccctgatgcatacaatccaaacatgctcaagaaaaggcagctgacagtgttggacctgca

SEQ ID NO: 360733 - DNA, 55 bp, Artificial
  Synthetic oligonucleotide
ccctgatggctccaaggtgtatgctggctcccttttcgagtctgagtgcacttgg

SEQ ID NO: 360734 - DNA, 54 bp, Artificial
  Synthetic oligonucleotide
ccctgatggtacaaaagaaccatatgtacaagacggtaaactcgaaaagattcg

SEQ ID NO: 360735 - DNA, 53 bp, Artificial
  Synthetic oligonucleotide
ccctgatgttcctagaggatgtgaaggcccatgtaaggtgcagtcttttgatg

SEQ ID NO: 360736 - DNA, 57 bp, Artificial
  Synthetic oligonucleotide
ccctgatgttcctcgtggatgtgaaggcccgtgtaaagtccagtcgtatgaagcccg

SEQ ID NO: 360737 - DNA, 59 bp, Artificial
  Synthetic oligonucleotide
ccctgatgttcctcgtggttgtgagggtccatgtaaggtccaatcttttgatgcgaaga

SEQ ID NO: 360738 - DNA, 56 bp, Artificial
  Synthetic oligonucleotide
ccctgattaaacataacacttgtgttgttaccacagacaatggaaaatttacaggc

SEQ ID NO: 360739 - DNA, 57 bp, Artificial
  Synthetic oligonucleotide
ccctgcaaatgcctttacacgtgtcgtagtatgactgactcttttaaaagcgtgctc

SEQ ID NO: 360740 - DNA, 55 bp, Artificial
  Synthetic oligonucleotide
ccctgcaacgaccccactcaactgttttattaatagtatgggattgcgaatgtgt

SEQ ID NO: 360741 - DNA, 51 bp, Artificial
  Synthetic oligonucleotide
ccctgcaatgtaatggaactgcactgtgaattaccctgcaatgtaatggac

SEQ ID NO: 360742 - DNA, 59 bp, Artificial
  Synthetic oligonucleotide
ccctgcaattgaattggtatccagtcatatacaggatggggacatgtgtgatattggct

SEQ ID NO: 360743 - DNA, 55 bp, Artificial
  Synthetic oligonucleotide
ccctgcacaaggtagcgaggttcatcaccgtgagaggttaaattccgtactctct

SEQ ID NO: 360744 - DNA, 55 bp, Artificial
  Synthetic oligonucleotide
ccctgcacaagtcaaggcaaggagcattatcagtcctgtcatgggagtcatcgga

SEQ ID NO: 360745 - DNA, 57 bp, Artificial
  Synthetic oligonucleotide
ccctgcacctcgaagcgaagcattcagcgcagttctggagcttgtaccgtcacagta

SEQ ID NO: 360746 - DNA, 55 bp, Artificial
  Synthetic oligonucleotide
ccctgcacttctaacccgacctatcctgtcagaatggtcggagcagttacacacc

SEQ ID NO: 360747 - DNA, 55 bp, Artificial
  Synthetic oligonucleotide
ccctgcagacttgataggaagctacactccggaatccctgaatgcctcccttccg

SEQ ID NO: 360748 - DNA, 60 bp, Artificial
  Synthetic oligonucleotide
ccctgcagaggttcctgttgatggagctgtggacgcttctgcaccatctgtcatcacccc

SEQ ID NO: 360749 - DNA, 55 bp, Artificial
  Synthetic oligonucleotide
ccctgcagccatcaccccaaaagaagggctcataaggcctccgtctgaggcagag

SEQ ID NO: 360750 - DNA, 60 bp, Artificial
  Synthetic oligonucleotide
ccctgcagctagtacatgcaatccagcatgcagctagtcgtaacgagcaattgcgggacg

SEQ ID NO: 360751 - DNA, 60 bp, Artificial
  Synthetic oligonucleotide
ccctgcagctagtgcacacaaaccagtgtgtagctagtcgtaatgagcaattgcgggacg

SEQ ID NO: 360752 - DNA, 60 bp, Artificial
  Synthetic oligonucleotide
ccctgcagctagtgcatgcaatccagcatgtctctagtcgtaatgagtaattgcgggatg

SEQ ID NO: 360753 - DNA, 60 bp, Artificial
  Synthetic oligonucleotide
ccctgcagctagtgcatgtaatccaacatatggctagtcgtaatgagcaattgcgggatg

SEQ ID NO: 360754 - DNA, 60 bp, Artificial
  Synthetic oligonucleotide
ccctgcagctagtgtgcacaatccagtgcatggctagtcgtaacgagcaattgcgggatg

SEQ ID NO: 360755 - DNA, 57 bp, Artificial
  Synthetic oligonucleotide
ccctgcagggtgtcagcttgacgaagtatctagagagacttcggctcttcgtgtacc

SEQ ID NO: 360756 - DNA, 56 bp, Artificial
  Synthetic oligonucleotide
ccctgcatgggccccgccctttgcaacaggagagtcgtcgggtccactcactgggg

SEQ ID NO: 360757 - DNA, 57 bp, Artificial
  Synthetic oligonucleotide
ccctgcatgtaacggggctggaatacgatggtacacaacagtccgccgtgcgtgcac

SEQ ID NO: 360758 - DNA, 55 bp, Artificial
  Synthetic oligonucleotide
ccctgcattcttaatcgattagtccaatttgttaaagacaggatatcagtggtcc

SEQ ID NO: 360759 - DNA, 55 bp, Artificial
  Synthetic oligonucleotide
ccctgccattccaaaacatcaaccctagaactgtggggaagtgccctcggtatgt

SEQ ID NO: 360760 - DNA, 58 bp, Artificial
  Synthetic oligonucleotide
ccctgccgcttggtagccgatggtatgcgtgaactgcctcactaactgcaatagggga

SEQ ID NO: 360761 - DNA, 55 bp, Artificial
  Synthetic oligonucleotide
ccctgcctcccttggcaatcccagtcgatgcaccctgttcataggggcctcttcc

SEQ ID NO: 360762 - DNA, 50 bp, Artificial
  Synthetic oligonucleotide
ccctgcctctccatatactccttctgtaacatctcagtgatcatattgtc

SEQ ID NO: 360763 - DNA, 55 bp, Artificial
  Synthetic oligonucleotide
ccctgcctctgtcatcacgatactgtgatgccatggtgtccgacttatgcccgag

SEQ ID NO: 360764 - DNA, 59 bp, Artificial
  Synthetic oligonucleotide
ccctgcctgtgaagccgatggacctgggtcgattgccgaatcgtccaatccgctcaggt

SEQ ID NO: 360765 - DNA, 55 bp, Artificial
  Synthetic oligonucleotide
ccctgcgaacctgcatggaatggaggacccggagggagaagtgttagtgtggaga

SEQ ID NO: 360766 - DNA, 58 bp, Artificial
  Synthetic oligonucleotide
ccctgcgagctaatcttaatggttgcacctttatcgctaacaattttgattgccgtta

SEQ ID NO: 360767 - DNA, 55 bp, Artificial
  Synthetic oligonucleotide
ccctgcgatgggaccgtcggcccaacttgcgctgtccctactagtcaacgacata

SEQ ID NO: 360768 - DNA, 54 bp, Artificial
  Synthetic oligonucleotide
ccctgcgcccgcggagttcattaatacgaactctaattacggcgctaaagttag

SEQ ID NO: 360769 - DNA, 54 bp, Artificial
  Synthetic oligonucleotide
ccctgcgcctaccaccgcgcaggaggttagtgccagacaactatccagttgtct

SEQ ID NO: 360770 - DNA, 60 bp, Artificial
  Synthetic oligonucleotide
ccctgcggagcaaacattactggccacgtcagaaatggtactatgaagatagctggaccc

SEQ ID NO: 360771 - DNA, 60 bp, Artificial
  Synthetic oligonucleotide
ccctgcggatatgcaggtagtcaccatgcgtattgcatatggacgtgataacactcttat

SEQ ID NO: 360772 - DNA, 60 bp, Artificial
  Synthetic oligonucleotide
ccctgcggatgtatgcgagttgatccgtggtgcataccccatgatccagaccactagccg

SEQ ID NO: 360773 - DNA, 59 bp, Artificial
  Synthetic oligonucleotide
ccctgcggatgttactgaccagctaataggttacacacccagccttggtgagacgcgta

SEQ ID NO: 360774 - DNA, 55 bp, Artificial
  Synthetic oligonucleotide
ccctgcgggcataacagaggcatttggagtccccatcaaacaagttcaagtccac

SEQ ID NO: 360775 - DNA, 55 bp, Artificial
  Synthetic oligonucleotide
ccctgcggttacatcggtcatcacctgataacgacatacacgcattttggcgttg

SEQ ID NO: 360776 - DNA, 59 bp, Artificial
  Synthetic oligonucleotide
ccctgcgtccattgctaaccttagtaatgacgaccctatagacgtagctgtgagtacca

SEQ ID NO: 360777 - DNA, 59 bp, Artificial
  Synthetic oligonucleotide
ccctgctaaagcagttcttactttaagtccgcggttgcaggcagttagcatatcaccgc

SEQ ID NO: 360778 - DNA, 58 bp, Artificial
  Synthetic oligonucleotide
ccctgctaacgcttgctgcatccaaattttagactgctcagcagcgagtgcctgggtc

SEQ ID NO: 360779 - DNA, 55 bp, Artificial
  Synthetic oligonucleotide
ccctgctagggaagcagctagccatggaagagaaatagccctcaggactaggccg

SEQ ID NO: 360780 - DNA, 55 bp, Artificial
  Synthetic oligonucleotide
ccctgctattgcatcgttgatggcttttacagccgccgtcactagcccactaacc

SEQ ID NO: 360781 - DNA, 55 bp, Artificial
  Synthetic oligonucleotide
ccctgctcaactaggtggcctaaacttttatgcattaactagactctttaaccga

SEQ ID NO: 360782 - DNA, 50 bp, Artificial
  Synthetic oligonucleotide
ccctgctcaagaaaaagctgtaagtaaacttgcatccaaagagatggaac

SEQ ID NO: 360783 - DNA, 60 bp, Artificial
  Synthetic oligonucleotide
ccctgctccacgcaggaaggtcagatccgattgcggcagcccggttttgatgggcgacaa

SEQ ID NO: 360784 - DNA, 55 bp, Artificial
  Synthetic oligonucleotide
ccctgctgcccgctcactgcgtgagcgcatggcagtccttgattcccagggtttt

SEQ ID NO: 360785 - DNA, 56 bp, Artificial
  Synthetic oligonucleotide
ccctgctgctaacagtgcagaccatagggtttactggatacgagaggggagggttt

SEQ ID NO: 360786 - DNA, 55 bp, Artificial
  Synthetic oligonucleotide
ccctgctggcaactatgcaatcgccaatgggactggaaatgacattactacagcc

SEQ ID NO: 360787 - DNA, 55 bp, Artificial
  Synthetic oligonucleotide
ccctgctgtggcctccctcatgtcattctccgccgctttaaccagcccactgtct

SEQ ID NO: 360788 - DNA, 55 bp, Artificial
  Synthetic oligonucleotide
ccctgctgttgtgattctgaacattcgcaacaacgatacaggtgaatacgtaccg

SEQ ID NO: 360789 - DNA, 60 bp, Artificial
  Synthetic oligonucleotide
ccctgcttatgtgggaggccgttagtgtaaaaacagaggtagttggcattagcagcatgc

SEQ ID NO: 360790 - DNA, 60 bp, Artificial
  Synthetic oligonucleotide
ccctgctttaatgcctttgtatgcatgtatacaagctaagcaggctttcattttctcgcc

SEQ ID NO: 360791 - DNA, 52 bp, Artificial
  Synthetic oligonucleotide
ccctggaaatttggatggaattggttggagctgttggggtgttgcaggtcga

SEQ ID NO: 360792 - DNA, 59 bp, Artificial
  Synthetic oligonucleotide
ccctggaactctagctggagtaatagatctctaggggacatttggggaaacatgacatg

SEQ ID NO: 360793 - DNA, 55 bp, Artificial
  Synthetic oligonucleotide
ccctggaactggataaggacgtggagatgaggctccccattttcatggagctctc

SEQ ID NO: 360794 - DNA, 54 bp, Artificial
  Synthetic oligonucleotide
ccctggaagaagactcccctaggaccactgcagtggatgaaagcaagtgctctt

SEQ ID NO: 360795 - DNA, 55 bp, Artificial
  Synthetic oligonucleotide
ccctggaagtaaagaaccagcagttctacatcctgcagatgaacgacttgaagtc

SEQ ID NO: 360796 - DNA, 55 bp, Artificial
  Synthetic oligonucleotide
ccctggaattgtgactggatctgctgtgggttgtgatccagagacattctggtca

SEQ ID NO: 360797 - DNA, 51 bp, Artificial
  Synthetic oligonucleotide
ccctggacacccactccaattgggcgccggcgcatgttactagtcttcgcc

SEQ ID NO: 360798 - DNA, 50 bp, Artificial
  Synthetic oligonucleotide
ccctggaggaggatgaatgcaacaggctgctaaactcttctcaaatggga

SEQ ID NO: 360799 - DNA, 52 bp, Artificial
  Synthetic oligonucleotide
ccctggaggtcctcccaagatccctatcaaccttaagttacttaaatagtgt

SEQ ID NO: 360800 - DNA, 55 bp, Artificial
  Synthetic oligonucleotide
ccctggatgcctaagcctaaacctgcatgccgtgtaacctttaagcttggctttc

SEQ ID NO: 360801 - DNA, 57 bp, Artificial
  Synthetic oligonucleotide
ccctggcaagctggagttgtaaaccccgacctcggaggtcagccatgtacgagccgc

SEQ ID NO: 360802 - DNA, 55 bp, Artificial
  Synthetic oligonucleotide
ccctggcaagtaaaacctggtctcagtcttctaaaggatggtgttggaaactgcc

SEQ ID NO: 360803 - DNA, 57 bp, Artificial
  Synthetic oligonucleotide
ccctggcaatggacttacatttactgcccatgggcagacccgtctgtactttaagag

SEQ ID NO: 360804 - DNA, 50 bp, Artificial
  Synthetic oligonucleotide
ccctggccacgtactcatatcttggcctatggtccttcagcatcttgatt

SEQ ID NO: 360805 - DNA, 54 bp, Artificial
  Synthetic oligonucleotide
ccctggccagtacgggtccgctgtcggttgtgaccccgactaccattggactcc

SEQ ID NO: 360806 - DNA, 60 bp, Artificial
  Synthetic oligonucleotide
ccctggccttttagaaacagcagaaggctgtcaacaaataatgagacagttacagtcagc

SEQ ID NO: 360807 - DNA, 60 bp, Artificial
  Synthetic oligonucleotide
ccctggccttttagaaacagcagaaggctgtctagatatactaggacagctacaaccagc

SEQ ID NO: 360808 - DNA, 55 bp, Artificial
  Synthetic oligonucleotide
ccctggccttttagaatcagcagaaggatgtcaacaattactagaacagttacag

SEQ ID NO: 360809 - DNA, 56 bp, Artificial
  Synthetic oligonucleotide
ccctggcgagccgattattgagctagtactcaacatgttgcaaggacatttcggaa

SEQ ID NO: 360810 - DNA, 55 bp, Artificial
  Synthetic oligonucleotide
ccctggcgccgccacaaaataaatacggaggggcatcccgagccaccacataggt

SEQ ID NO: 360811 - DNA, 53 bp, Artificial
  Synthetic oligonucleotide
ccctggcgctttcttaaggaaaagttttgtaaatggacacaattgaactatgt

SEQ ID NO: 360812 - DNA, 55 bp, Artificial
  Synthetic oligonucleotide
ccctggctattatagctgtcactggactcaactggaaaggagtcctcttattggt

SEQ ID NO: 360813 - DNA, 52 bp, Artificial
  Synthetic oligonucleotide
ccctggcttagatcttggttcggcaattggtactgaccccgacacagattgg

SEQ ID NO: 360814 - DNA, 57 bp, Artificial
  Synthetic oligonucleotide
ccctgggagggtagaaaccactacgctacgcagcagccttagctacgccggagctta

SEQ ID NO: 360815 - DNA, 51 bp, Artificial
  Synthetic oligonucleotide
ccctgggatgtctgtgcttggttgtccgaaatctacccaactcggattcag

SEQ ID NO: 360816 - DNA, 55 bp, Artificial
  Synthetic oligonucleotide
ccctgggatttggagcctacatgtccaaagcacatggcatagaccccaacgtccg

SEQ ID NO: 360817 - DNA, 55 bp, Artificial
  Synthetic oligonucleotide
ccctgggccaattgtcacataaagagtgtaatagatgattgggcaacagtaggca

SEQ ID NO: 360818 - DNA, 55 bp, Artificial
  Synthetic oligonucleotide
ccctgggcgaaatggaccgtggcagtctaccctgttgggtcagttgtgcgggtac

SEQ ID NO: 360819 - DNA, 55 bp, Artificial
  Synthetic oligonucleotide
ccctggggacggttcgcattttggagagttgacctttcagagcgcttttctcttg

SEQ ID NO: 360820 - DNA, 53 bp, Artificial
  Synthetic oligonucleotide
ccctggggcccacgtggcgctagtactctggtacgttagtacccttgtacgcc

SEQ ID NO: 360821 - DNA, 60 bp, Artificial
  Synthetic oligonucleotide
ccctgggggcaatcagcttctggatgtgctctaatgggtcattgcaatgcagaatatgca

SEQ ID NO: 360822 - DNA, 55 bp, Artificial
  Synthetic oligonucleotide
ccctggggtactctctttgcgcctatccgaacctctagttacctccaatggcatg

SEQ ID NO: 360823 - DNA, 52 bp, Artificial
  Synthetic oligonucleotide
ccctgggtacggggcgtgtaccagcattgcaagctgcagaaacgggagcaag

SEQ ID NO: 360824 - DNA, 53 bp, Artificial
  Synthetic oligonucleotide
ccctgggtatttggacctaatctgcctgatcgctggtccaactgcttcaattt

SEQ ID NO: 360825 - DNA, 59 bp, Artificial
  Synthetic oligonucleotide
ccctgggtggtctaagtcctgagtacaggacagtcgtcagtagttcgacgtgagcagaa

SEQ ID NO: 360826 - DNA, 52 bp, Artificial
  Synthetic oligonucleotide
ccctgggttagggccacactcaaaaacttttctcgtgaaacttacgagcaaa

SEQ ID NO: 360827 - DNA, 59 bp, Artificial
  Synthetic oligonucleotide
ccctggtactgtgactggctcagcagtgggttgcaacccagacgtgttttggagcaaac

SEQ ID NO: 360828 - DNA, 58 bp, Artificial
  Synthetic oligonucleotide
ccctggtcagacagacaaaccaacatagcagcgggaataactcaaaaatccgcacaaa

SEQ ID NO: 360829 - DNA, 55 bp, Artificial
  Synthetic oligonucleotide
ccctggtcaggtgaacaaatttgaccaagccttcaagaaagctgtgaaaacaagg

SEQ ID NO: 360830 - DNA, 54 bp, Artificial
  Synthetic oligonucleotide
ccctggtcctgaagggtaaaaagaagctttcccggcgtgtgagaccgagcagaa

SEQ ID NO: 360831 - DNA, 54 bp, Artificial
  Synthetic oligonucleotide
ccctggtctagaaactttgtacgttgaacgtgagaaatgggaattactcaatcg

SEQ ID NO: 360832 - DNA, 55 bp, Artificial
  Synthetic oligonucleotide
ccctggtctttccattcaagtgggtgatgcctccgcactcacagcccctgagact

SEQ ID NO: 360833 - DNA, 55 bp, Artificial
  Synthetic oligonucleotide
ccctggtgaggtaaagaacatcttggagatactgcagatcgagtctctagttgag

SEQ ID NO: 360834 - DNA, 55 bp, Artificial
  Synthetic oligonucleotide
ccctggtgaggttaggaacttaatggagctagctgaaattgataccatgatacca

SEQ ID NO: 360835 - DNA, 55 bp, Artificial
  Synthetic oligonucleotide
ccctggtgctgatcggaactataacctggcgttcggatttccaccccagtcgcgc

SEQ ID NO: 360836 - DNA, 60 bp, Artificial
  Synthetic oligonucleotide
ccctggtggttattgcctcacaagatggatgctgattgctgcagatctcaagtgctttga

SEQ ID NO: 360837 - DNA, 53 bp, Artificial
  Synthetic oligonucleotide
ccctggtgtcaacggggtcagccttatgcaccatagcggtcctaggaacatcg

SEQ ID NO: 360838 - DNA, 54 bp, Artificial
  Synthetic oligonucleotide
ccctggttacacgaatattgtattcctgggcgtatatactgttttcgaacccag

SEQ ID NO: 360839 - DNA, 56 bp, Artificial
  Synthetic oligonucleotide
ccctggttccgcgctattgagaaggctattctggccctactccctcagggtgtgtt

SEQ ID NO: 360840 - DNA, 52 bp, Artificial
  Synthetic oligonucleotide
ccctggtttcatcgcagggtatgttttacttggaaaggtttagggcctttca

SEQ ID NO: 360841 - DNA, 55 bp, Artificial
  Synthetic oligonucleotide
ccctggttttctggtatgtcaactgcggatatagagccaagagagctaactgtcg

SEQ ID NO: 360842 - DNA, 60 bp, Artificial
  Synthetic oligonucleotide
ccctgtaacacatacaaaagagctgcttcacacagagcacaatgggatgctgtgtgcaac

SEQ ID NO: 360843 - DNA, 55 bp, Artificial
  Synthetic oligonucleotide
ccctgtaacgaatggcgttttcatcagtactgtgcaaatcatgaaccttcagcgg

SEQ ID NO: 360844 - DNA, 60 bp, Artificial
  Synthetic oligonucleotide
ccctgtaaggctttgtagtctcggaagaagactgcagagagttgcttcacggatcatcaa

SEQ ID NO: 360845 - DNA, 59 bp, Artificial
  Synthetic oligonucleotide
ccctgtacaccttgtctacacataacggggtgtccttatgtgccctgctgatggacgaa

SEQ ID NO: 360846 - DNA, 56 bp, Artificial
  Synthetic oligonucleotide
ccctgtaccccccttcctgcgccgaactataagttcgcgctgtggagggtgtctgc

SEQ ID NO: 360847 - DNA, 52 bp, Artificial
  Synthetic oligonucleotide
ccctgtagaagacaataggtggccgtatttacatagtagactaaccgtgttt

SEQ ID NO: 360848 - DNA, 55 bp, Artificial
  Synthetic oligonucleotide
ccctgtagggtagctgtttatcagcgcaacttattccggtgcatccggtgggttg

SEQ ID NO: 360849 - DNA, 51 bp, Artificial
  Synthetic oligonucleotide
ccctgtaggttaggttaagggtggtgtttaggtggcgtccctattgcccta

SEQ ID NO: 360850 - DNA, 60 bp, Artificial
  Synthetic oligonucleotide
ccctgtagttgactctcagctggaatttgaggatggttctcccctgtgtgctctcgtgga

SEQ ID NO: 360851 - DNA, 58 bp, Artificial
  Synthetic oligonucleotide
ccctgtatgttcggatggaaatgtactgaactggttggggacaccagatcgaagaatc

SEQ ID NO: 360852 - DNA, 55 bp, Artificial
  Synthetic oligonucleotide
ccctgtattgcgataagacaaagtctaaacaaactgccttaacaatgcaatcatc

SEQ ID NO: 360853 - DNA, 56 bp, Artificial
  Synthetic oligonucleotide
ccctgtcaacaacgcccctatgattttccttcgtatagagtgtatgcttttctacc

SEQ ID NO: 360854 - DNA, 51 bp, Artificial
  Synthetic oligonucleotide
ccctgtcacgggtcccggtggggcgttgttgcgttacactgagcccatgtc

SEQ ID NO: 360855 - DNA, 50 bp, Artificial
  Synthetic oligonucleotide
ccctgtcagtaagacaattgagtcacatttaattaatgtcaagctaccaa

SEQ ID NO: 360856 - DNA, 57 bp, Artificial
  Synthetic oligonucleotide
ccctgtcataaagggggattacaataacacaacaggcagagatgttctagtactctg

SEQ ID NO: 360857 - DNA, 60 bp, Artificial
  Synthetic oligonucleotide
ccctgtccacgcataatggagtgtctttatgtgccttgctgatggatgagaaactttcag

SEQ ID NO: 360858 - DNA, 60 bp, Artificial
  Synthetic oligonucleotide
ccctgtccctaaccttgcactgacacaacctgggcacacatatgacacatttacattgcc

SEQ ID NO: 360859 - DNA, 55 bp, Artificial
  Synthetic oligonucleotide
ccctgtccgactgtcaccctcaatcactatacttatgggtcttaaaggccgcgca

SEQ ID NO: 360860 - DNA, 55 bp, Artificial
  Synthetic oligonucleotide
ccctgtctatagttcccgcgttgaaggatcgttactacataaggcatgtaactaa

SEQ ID NO: 360861 - DNA, 49 bp, Artificial
  Synthetic oligonucleotide
ccctgtctcccccagtcggtagaaccttcgggtctttacctctaggggt

SEQ ID NO: 360862 - DNA, 57 bp, Artificial
  Synthetic oligonucleotide
ccctgtctgctgatcctgaccatcctttgaagcctaattaaatacttgttccctaag

SEQ ID NO: 360863 - DNA, 58 bp, Artificial
  Synthetic oligonucleotide
ccctgtctggttcagagcattagaaatggtccttagggagatagggtatagtgaagag

SEQ ID NO: 360864 - DNA, 52 bp, Artificial
  Synthetic oligonucleotide
ccctgtcttgttcctgcttggccaatacattcttggctgccctgtccagaaa

SEQ ID NO: 360865 - DNA, 55 bp, Artificial
  Synthetic oligonucleotide
ccctgtgacccgtataatggcccaatctacagatgatgccatctccttgtacgac

SEQ ID NO: 360866 - DNA, 55 bp, Artificial
  Synthetic oligonucleotide
ccctgtgagttcacccctagtagtgtgacaggggaaaacgcggtacaaacagctg

SEQ ID NO: 360867 - DNA, 60 bp, Artificial
  Synthetic oligonucleotide
ccctgtgatgagatctatgaaaactgtgggaccgagagacgtcaaacctatgacgtcagt

SEQ ID NO: 360868 - DNA, 55 bp, Artificial
  Synthetic oligonucleotide
ccctgtgcaaattaaggcccctcctttgttagttacaagcaatgtagacgtgtcc

SEQ ID NO: 360869 - DNA, 60 bp, Artificial
  Synthetic oligonucleotide
ccctgtgcccgatacctccctatgtagattcatcggactgcgtgttgagtcatctgtgtt

SEQ ID NO: 360870 - DNA, 60 bp, Artificial
  Synthetic oligonucleotide
ccctgtgcgaaaatccatagttacggcagttgatatggatgtaatagctacacccacagg

SEQ ID NO: 360871 - DNA, 55 bp, Artificial
  Synthetic oligonucleotide
ccctgtgcgagaatccattgtctctgcacgtgaaggctacgtataccgtgcaacc

SEQ ID NO: 360872 - DNA, 55 bp, Artificial
  Synthetic oligonucleotide
ccctgtgcgcaaatccattcaatgcgcagtcgatgtgcaggtagaatgagcagcc

SEQ ID NO: 360873 - DNA, 59 bp, Artificial
  Synthetic oligonucleotide
ccctgtgcggcgtcgtaaacgggcttcggtcacagacctgtatcgcacatgtaaggcca

SEQ ID NO: 360874 - DNA, 55 bp, Artificial
  Synthetic oligonucleotide
ccctgtgcgtaaatccatacttatgacaattaatgcttacgtaatacgaacagcc

SEQ ID NO: 360875 - DNA, 60 bp, Artificial
  Synthetic oligonucleotide
ccctgtgcgtaaatccatggtcgatgcagttgatatcgagatagtatgtgcagccacagt

SEQ ID NO: 360876 - DNA, 60 bp, Artificial
  Synthetic oligonucleotide
ccctgtgcgtgaatccatagttgctgcagaggagatggacgtatatggtacacccgcagc

SEQ ID NO: 360877 - DNA, 60 bp, Artificial
  Synthetic oligonucleotide
ccctgtgcgtgaatccatgatttgcgcagtctatgccgaagtagtatgaacacccacatg

SEQ ID NO: 360878 - DNA, 60 bp, Artificial
  Synthetic oligonucleotide
ccctgtgcgtgaatccatggttgtgacagttgaggctgacgtaatacgagcagccgcagt

SEQ ID NO: 360879 - DNA, 55 bp, Artificial
  Synthetic oligonucleotide
ccctgtgctgaaatcctcttgggtaacaagtccttctgtaaccttgtagaggtag

SEQ ID NO: 360880 - DNA, 55 bp, Artificial
  Synthetic oligonucleotide
ccctgtgcttcatgaagatatgaccattgccagtatcggcaaagacggcaaaccg

SEQ ID NO: 360881 - DNA, 52 bp, Artificial
  Synthetic oligonucleotide
ccctgtggctgtgagcgaggggtctacccccacgacgatgggcatgtgattc

SEQ ID NO: 360882 - DNA, 55 bp, Artificial
  Synthetic oligonucleotide
ccctgtgggccatgacctttggatacagtgactacgtaagcacacaactaggccc

SEQ ID NO: 360883 - DNA, 53 bp, Artificial
  Synthetic oligonucleotide
ccctgtgggggacgtcgtgcagtacggattcttaaacctcagtggaaaaccaa

SEQ ID NO: 360884 - DNA, 59 bp, Artificial
  Synthetic oligonucleotide
ccctgtgtaaagaagacctaaagatgtcaaggcttgcaccacattgttcatagtctccc

SEQ ID NO: 360885 - DNA, 56 bp, Artificial
  Synthetic oligonucleotide
ccctgtgtcgtttgtgggacctaccttccaatacatggaggctaatgactactacc

SEQ ID NO: 360886 - DNA, 55 bp, Artificial
  Synthetic oligonucleotide
ccctgtgtgccagcatggaatggaagatgaccacagagaagtattaatgtggaag

SEQ ID NO: 360887 - DNA, 55 bp, Artificial
  Synthetic oligonucleotide
ccctgtgtggaagcccattctcagttgggtccggttccttccccgatggggcaca

SEQ ID NO: 360888 - DNA, 55 bp, Artificial
  Synthetic oligonucleotide
ccctgtgttaactcaatctggtatgctttccgccctaacgtctggcgtaggcacg

SEQ ID NO: 360889 - DNA, 59 bp, Artificial
  Synthetic oligonucleotide
ccctgtgttagcgaggcatccgtggtcagcagatcttaagcgaattactgtgggggggc

SEQ ID NO: 360890 - DNA, 60 bp, Artificial
  Synthetic oligonucleotide
ccctgttaccatgttcaccgtcgatcaattcaagatgggtgagcaccgtaacatcgtgtc

SEQ ID NO: 360891 - DNA, 60 bp, Artificial
  Synthetic oligonucleotide
ccctgttacgtggaggccatcaaaaggcacgcaagtaagttggagttgcagcatgctgaa

SEQ ID NO: 360892 - DNA, 55 bp, Artificial
  Synthetic oligonucleotide
ccctgttactagctcaacgccgccagttggagacgcctccaacaacaccgttccc

SEQ ID NO: 360893 - DNA, 55 bp, Artificial
  Synthetic oligonucleotide
ccctgttaggtgtgaacacaatgcagtaaagggtaggtcacctacctaggttatc

SEQ ID NO: 360894 - DNA, 53 bp, Artificial
  Synthetic oligonucleotide
ccctgttagtcccattaaaaccagagaatcaatcaacacctacgggttagggc

SEQ ID NO: 360895 - DNA, 51 bp, Artificial
  Synthetic oligonucleotide
ccctgttcacttcaggaaccaagttaaaataagacggagagttgacataaa

SEQ ID NO: 360896 - DNA, 58 bp, Artificial
  Synthetic oligonucleotide
ccctgttccaaccatagcattcgatgctgaatcgctgcaatttcatgtaactgataaa

SEQ ID NO: 360897 - DNA, 55 bp, Artificial
  Synthetic oligonucleotide
ccctgttccggctactgcctctcacatctcgtcaaccttctcgatgactggggac

SEQ ID NO: 360898 - DNA, 52 bp, Artificial
  Synthetic oligonucleotide
ccctgttgtggtagggactaccgatcgttccggcgcccccacgtataactgg

SEQ ID NO: 360899 - DNA, 53 bp, Artificial
  Synthetic oligonucleotide
ccctgttgtggtggggacgaccgatcgtctcggtgcccctacgtataactggg

SEQ ID NO: 360900 - DNA, 54 bp, Artificial
  Synthetic oligonucleotide
ccctgttgtgtgttgcagtaatctttgtccccaactaaagcgttgggaggtcct

SEQ ID NO: 360901 - DNA, 55 bp, Artificial
  Synthetic oligonucleotide
ccctgtttaagatgcttaagctgctaacagaaaatgtgccaaaacgacgcaacat

SEQ ID NO: 360902 - DNA, 55 bp, Artificial
  Synthetic oligonucleotide
ccctgtttacttggttaccaaccatagcatcaaatttcgactcatatagattcac

SEQ ID NO: 360903 - DNA, 57 bp, Artificial
  Synthetic oligonucleotide
ccctgtttcgtccgaagttaagactgagtgcccatcgaccatgaatccgtctaatcc

SEQ ID NO: 360904 - DNA, 55 bp, Artificial
  Synthetic oligonucleotide
ccctgtttggtgcattgttagccggatttggattgagcactaaaggattagaagg

SEQ ID NO: 360905 - DNA, 58 bp, Artificial
  Synthetic oligonucleotide
cccttaaaccctgtatggaatgacaacgcccatggagtaggttctgtaccgatgcaca

SEQ ID NO: 360906 - DNA, 55 bp, Artificial
  Synthetic oligonucleotide
cccttaaaggttggtccagacaacaccaatctccaacaatctgtcaagacacaag

SEQ ID NO: 360907 - DNA, 56 bp, Artificial
  Synthetic oligonucleotide
cccttaaatagggttcatatatctggattatggaccaagtcaattacgtggtctgg

SEQ ID NO: 360908 - DNA, 55 bp, Artificial
  Synthetic oligonucleotide
cccttaacaaccctacagacggcgagatcgaatacgtccgtactctcgggcctga

SEQ ID NO: 360909 - DNA, 60 bp, Artificial
  Synthetic oligonucleotide
cccttaacacagcttgtacaccctaaaccaagctcgatacaaccatactgcatctctaca

SEQ ID NO: 360910 - DNA, 54 bp, Artificial
  Synthetic oligonucleotide
cccttaacctgtcagctatctttaaactggttaagttgcctttgaaagactgtc

SEQ ID NO: 360911 - DNA, 52 bp, Artificial
  Synthetic oligonucleotide
cccttaacttcatggggtatacaattggaggttggggcaccttaccccagga

SEQ ID NO: 360912 - DNA, 55 bp, Artificial
  Synthetic oligonucleotide
cccttaagcgaacaaaggagtctcctacggaataggagtaagaccatagcgatag

SEQ ID NO: 360913 - DNA, 53 bp, Artificial
  Synthetic oligonucleotide
cccttaagggttacccgcaccgttggcggaacgcacaattacaaagtgcgcaa

SEQ ID NO: 360914 - DNA, 52 bp, Artificial
  Synthetic oligonucleotide
cccttaaggtgggccgggaaagtgtagaatgtcaaccgaggtggcctccaac

SEQ ID NO: 360915 - DNA, 55 bp, Artificial
  Synthetic oligonucleotide
cccttaatgagctcagaaatgcgggaacgacataaagttcagcgaacaaaccacc

SEQ ID NO: 360916 - DNA, 57 bp, Artificial
  Synthetic oligonucleotide
cccttaatggtagcatacatgctggaaagagagttagttcgcaagacgaggttcctc

SEQ ID NO: 360917 - DNA, 55 bp, Artificial
  Synthetic oligonucleotide
cccttaatggttgcatacatgttggaaagggtactgtccgcgataccagattccc

SEQ ID NO: 360918 - DNA, 52 bp, Artificial
  Synthetic oligonucleotide
cccttacaagcccactgtcaacttccacgaccctcctacttaacatcttggg

SEQ ID NO: 360919 - DNA, 55 bp, Artificial
  Synthetic oligonucleotide
cccttacatctctacaccatgccttcagagggacctcctcgtcttacatagcagg

SEQ ID NO: 360920 - DNA, 55 bp, Artificial
  Synthetic oligonucleotide
cccttacatggtatccccaggaatgcactggaatgagcagtaaataccctgcgcc

SEQ ID NO: 360921 - DNA, 56 bp, Artificial
  Synthetic oligonucleotide
cccttaccattggggagtgccccaagtatgtcaaatcggacaaactggtccttgca

SEQ ID NO: 360922 - DNA, 55 bp, Artificial
  Synthetic oligonucleotide
cccttaccatttctcaccccgaagtgtggagacgagtcacattagtcgggttcaa

SEQ ID NO: 360923 - DNA, 55 bp, Artificial
  Synthetic oligonucleotide
cccttaccgtgatatcatacttgggaccaggttccatcgcgaatcactcgccgcg

SEQ ID NO: 360924 - DNA, 53 bp, Artificial
  Synthetic oligonucleotide
cccttacgatcacttccaccattattgtccggagcatgttaatgcgtggttca

SEQ ID NO: 360925 - DNA, 55 bp, Artificial
  Synthetic oligonucleotide
cccttacggctacctcaaacatcctcggaaaacatgggctgcactgcacaaggcc

SEQ ID NO: 360926 - DNA, 58 bp, Artificial
  Synthetic oligonucleotide
cccttactaccaaatggtagctgctctaaaactcatatcaattggtagttatggtagc

SEQ ID NO: 360927 - DNA, 56 bp, Artificial
  Synthetic oligonucleotide
cccttacttcttcgattgaatggtatttaagatcaatggaattagaccctgaaata

SEQ ID NO: 360928 - DNA, 55 bp, Artificial
  Synthetic oligonucleotide
cccttacttggcgagtacgagttgcaagggccagaagacatcgccgttgagctcg

SEQ ID NO: 360929 - DNA, 54 bp, Artificial
  Synthetic oligonucleotide
cccttagaaacaccgccgaacgtatgaccggtaagcgccgctccctgcggcttg

SEQ ID NO: 360930 - DNA, 55 bp, Artificial
  Synthetic oligonucleotide
cccttagaacgttactcagtgttgacagatgaagattttccacctcgtgggagtc

SEQ ID NO: 360931 - DNA, 55 bp, Artificial
  Synthetic oligonucleotide
cccttagaagaccttagaaccaccagccgcaagattaatacccttgcacatcagc

SEQ ID NO: 360932 - DNA, 54 bp, Artificial
  Synthetic oligonucleotide
cccttagactcacaggggggctctgcaaccggcccctctactctaagttccgac

SEQ ID NO: 360933 - DNA, 56 bp, Artificial
  Synthetic oligonucleotide
cccttagaggagaagtcaaaattaaccgaacaagcaatggacctcgtgaccgcagc

SEQ ID NO: 360934 - DNA, 54 bp, Artificial
  Synthetic oligonucleotide
cccttagaggagggatatgtggttctggtaggagacgagaacctaaaacagttc

SEQ ID NO: 360935 - DNA, 51 bp, Artificial
  Synthetic oligonucleotide
cccttagcaatttgcaatcgtctctatctggtcgattggaactatcaattg

SEQ ID NO: 360936 - DNA, 57 bp, Artificial
  Synthetic oligonucleotide
cccttaggcaggttagtccctatgtgggataattgtgccactgctaaaatgcgttac

SEQ ID NO: 360937 - DNA, 56 bp, Artificial
  Synthetic oligonucleotide
cccttaggcatggaatcattagtgggagtcatggttgttcggtttcctctcaaaac

SEQ ID NO: 360938 - DNA, 50 bp, Artificial
  Synthetic oligonucleotide
cccttagtatcagccacacccaaaaagttgagatgggaggacctaagacc

SEQ ID NO: 360939 - DNA, 59 bp, Artificial
  Synthetic oligonucleotide
cccttagttttttggccataggaggactcatcttgatgatgacactcggtgtgggagcg

SEQ ID NO: 360940 - DNA, 56 bp, Artificial
  Synthetic oligonucleotide
cccttataatgagatgatcataacgttgatagacagtgaagtagaatcgttcttgg

SEQ ID NO: 360941 - DNA, 55 bp, Artificial
  Synthetic oligonucleotide
cccttatagcatcaagcccgaaattctgtcacatatcaatcacagtcaattaggc

SEQ ID NO: 360942 - DNA, 56 bp, Artificial
  Synthetic oligonucleotide
cccttatatacataaagcctcttggggactccaagggcaaaagcggccatcctata

SEQ ID NO: 360943 - DNA, 60 bp, Artificial
  Synthetic oligonucleotide
cccttatatctggctaagatgggagtgccgacaagttgtcgggagtgtcaagcacgacac

SEQ ID NO: 360944 - DNA, 56 bp, Artificial
  Synthetic oligonucleotide
cccttatatgctagttgtaggaaatatagttattaaaccagactcccagactataa

SEQ ID NO: 360945 - DNA, 55 bp, Artificial
  Synthetic oligonucleotide
cccttatattaccgcatccagtacctgaaatacaatttttgttagcctcgaccac

SEQ ID NO: 360946 - DNA, 55 bp, Artificial
  Synthetic oligonucleotide
cccttatccaattctccacaaggacggttccaattttcgagagattgggactgtg

SEQ ID NO: 360947 - DNA, 60 bp, Artificial
  Synthetic oligonucleotide
cccttatccagcaggaattgcccgggttgatgaaatccggctcttactgcacttcatcca

SEQ ID NO: 360948 - DNA, 53 bp, Artificial
  Synthetic oligonucleotide
cccttatccccaagttaacatggactttcttgaaggaataacgtgggatagtg

SEQ ID NO: 360949 - DNA, 55 bp, Artificial
  Synthetic oligonucleotide
cccttatcgcacgtggaactatcatggatcataccgtgtgagggatgtgggaaca

SEQ ID NO: 360950 - DNA, 56 bp, Artificial
  Synthetic oligonucleotide
cccttatcgcgttgacatcaccgcaccgattcgttggtcgccagagcgtcgtgtga

SEQ ID NO: 360951 - DNA, 56 bp, Artificial
  Synthetic oligonucleotide
cccttatcgggaagtgctcagcatgtggaggaatgttcctgttacccccgataccc

SEQ ID NO: 360952 - DNA, 60 bp, Artificial
  Synthetic oligonucleotide
cccttatctgttagggcatcccaatataatctgtggaagctatccagactccatgtcaga

SEQ ID NO: 360953 - DNA, 53 bp, Artificial
  Synthetic oligonucleotide
cccttatgcaaagctgacagcttgtatgtatctgctgcagacatttgtgggct

SEQ ID NO: 360954 - DNA, 55 bp, Artificial
  Synthetic oligonucleotide
cccttatgcgccattaggcgtggtgaagcaaactaaacccgcagcaggcggtcct

SEQ ID NO: 360955 - DNA, 60 bp, Artificial
  Synthetic oligonucleotide
cccttatgcgttggcgcccaatgcgactgtgcccactatcatagccttattctgctgcgt

SEQ ID NO: 360956 - DNA, 55 bp, Artificial
  Synthetic oligonucleotide
cccttattaaggctgtggatttggctatgggaactgaaattatggtttatagccc

SEQ ID NO: 360957 - DNA, 60 bp, Artificial
  Synthetic oligonucleotide
cccttattcagcatcattcacactgaatagatcgcaaccagctcatgataacttgatggg

SEQ ID NO: 360958 - DNA, 55 bp, Artificial
  Synthetic oligonucleotide
cccttattgttggcactaccccccaaaaccttgtggtatcgtgccagcaaagagc

SEQ ID NO: 360959 - DNA, 55 bp, Artificial
  Synthetic oligonucleotide
cccttcaacagacacagagcagaccaatctgtacaagaacaaccctggaagagtc

SEQ ID NO: 360960 - DNA, 56 bp, Artificial
  Synthetic oligonucleotide
cccttcaagaaatattgaaaagtatcgggggtagctccatgaccctcgaagacaca

SEQ ID NO: 360961 - DNA, 60 bp, Artificial
  Synthetic oligonucleotide
cccttcaatcgtcctgtcaacaataagtcgcagacttccttacatgccgcacgttgctcg

SEQ ID NO: 360962 - DNA, 59 bp, Artificial
  Synthetic oligonucleotide
cccttcacatcagctactcccgtaccacgatgtagataatccggcaactataacttggc

SEQ ID NO: 360963 - DNA, 55 bp, Artificial
  Synthetic oligonucleotide
cccttcagacaatgtggaaactagaacaacatatatgcactttaatggttctgag

SEQ ID NO: 360964 - DNA, 55 bp, Artificial
  Synthetic oligonucleotide
cccttcagaccagaagacacccgcatcctcataaacttggacactttgccgccag

SEQ ID NO: 360965 - DNA, 55 bp, Artificial
  Synthetic oligonucleotide
cccttcagagattctggatgacaagtcacactcattcactcgatctaagcttgct

SEQ ID NO: 360966 - DNA, 54 bp, Artificial
  Synthetic oligonucleotide
cccttcagcccccgcgaccccttctagagaactagcatggcctactggttcaga

SEQ ID NO: 360967 - DNA, 55 bp, Artificial
  Synthetic oligonucleotide
cccttcagcctcggcagctcaggtataccgatgcgtcgatgccgctggaaaggtc

SEQ ID NO: 360968 - DNA, 55 bp, Artificial
  Synthetic oligonucleotide
cccttcagcgaacaaaagagactttccggaataggagtaagaccatagcgatggg

SEQ ID NO: 360969 - DNA, 57 bp, Artificial
  Synthetic oligonucleotide
cccttcagcgaacagaagacctctcactcggtgggagtaagaccatagcgatggggg

SEQ ID NO: 360970 - DNA, 60 bp, Artificial
  Synthetic oligonucleotide
cccttcagcgaacagagagcgcttcgtgcggtaggagtaagaccatagcgatagaaagag

SEQ ID NO: 360971 - DNA, 55 bp, Artificial
  Synthetic oligonucleotide
cccttcatacgcatgccgctgagaagatgctggaaaatcgcaccctcaatgaagt

SEQ ID NO: 360972 - DNA, 55 bp, Artificial
  Synthetic oligonucleotide
cccttcatatccgagggtgtatgattattaccgagtaactcgtgttctgaatatg

SEQ ID NO: 360973 - DNA, 60 bp, Artificial
  Synthetic oligonucleotide
cccttcatggtgcctacttcaagtgaccatgacatttcctcggctccagctgttcaatat

SEQ ID NO: 360974 - DNA, 60 bp, Artificial
  Synthetic oligonucleotide
cccttccagagatgacttaactctttctagagtaacagctgcccttgcaggatatacctg

SEQ ID NO: 360975 - DNA, 53 bp, Artificial
  Synthetic oligonucleotide
cccttccagcattcctcggtcaaccgcacccggttgcgcccgggtgactaaaa

SEQ ID NO: 360976 - DNA, 59 bp, Artificial
  Synthetic oligonucleotide
cccttccatttctctcatcatcctccttggagaccctctccagggagagtatcattcca

SEQ ID NO: 360977 - DNA, 52 bp, Artificial
  Synthetic oligonucleotide
cccttccccgcgcctggtgagttcctgaacttgaccgggacgttgggactcc

SEQ ID NO: 360978 - DNA, 54 bp, Artificial
  Synthetic oligonucleotide
cccttccgcgaatcgtgcggtaagcactggttccaaggggtagatgtaacgccc

SEQ ID NO: 360979 - DNA, 59 bp, Artificial
  Synthetic oligonucleotide
cccttccggacctatcagtattactgacggcaccatcttcatgtgtaacaccattgacc

SEQ ID NO: 360980 - DNA, 52 bp, Artificial
  Synthetic oligonucleotide
cccttcctacaaccaatcccacggacctttctttggaactgtccgactggcc

SEQ ID NO: 360981 - DNA, 53 bp, Artificial
  Synthetic oligonucleotide
cccttcctattcaccgccgggttccttgaagacctgagccacgccctgtttcc

SEQ ID NO: 360982 - DNA, 57 bp, Artificial
  Synthetic oligonucleotide
cccttcctccaagttgttgaagtcgaaaggtggtatgatcccatcatggccgtatgg

SEQ ID NO: 360983 - DNA, 53 bp, Artificial
  Synthetic oligonucleotide
cccttcctgtgctaatacgcctccctttccggacgacgcctattgttttaaca

SEQ ID NO: 360984 - DNA, 55 bp, Artificial
  Synthetic oligonucleotide
cccttccttgcacgtgacccaagatttaagcatcgggtatatcagcaattgagcg

SEQ ID NO: 360985 - DNA, 55 bp, Artificial
  Synthetic oligonucleotide
cccttcgaattggatgaggatatgcaggtgaggagttccatcttcgtggagttcc

SEQ ID NO: 360986 - DNA, 60 bp, Artificial
  Synthetic oligonucleotide
cccttcgagagatgagtcttgtgttattcaattgcagcagccccaaaagtgagatgcaga

SEQ ID NO: 360987 - DNA, 55 bp, Artificial
  Synthetic oligonucleotide
cccttcgctgttgttcaggggatggatcgcgggagtgtacactgagagggagatg

SEQ ID NO: 360988 - DNA, 58 bp, Artificial
  Synthetic oligonucleotide
cccttcgggacaacgctaacgctagtgcctctactgccgtaacgcgactagatcaatc

SEQ ID NO: 360989 - DNA, 60 bp, Artificial
  Synthetic oligonucleotide
cccttcgtaatactccccgcttgcgatgctgatggacctggatcgattgccgaatcatcc

SEQ ID NO: 360990 - DNA, 55 bp, Artificial
  Synthetic oligonucleotide
cccttcgtctaacatgaacgccgaccgcaccttatccgacgagcagtacgattgg

SEQ ID NO: 360991 - DNA, 60 bp, Artificial
  Synthetic oligonucleotide
cccttctaaatatgatgattcacggtcctattttgtatgttgagacatggccgcgaatgt

SEQ ID NO: 360992 - DNA, 60 bp, Artificial
  Synthetic oligonucleotide
cccttctagtcgtgaccacatcactcgtgtgcttactaaagctggctgggtgcccgttga

SEQ ID NO: 360993 - DNA, 55 bp, Artificial
  Synthetic oligonucleotide
cccttctattgttacattggttgaagaatccagtgttattgagtctggagcttcg

SEQ ID NO: 360994 - DNA, 54 bp, Artificial
  Synthetic oligonucleotide
cccttctcaacaaattagaagggatgatcaaggaagacgaggaaacgtcggacc

SEQ ID NO: 360995 - DNA, 55 bp, Artificial
  Synthetic oligonucleotide
cccttctcctttgattgattccactcctagccatattgagatttaggctggagag

SEQ ID NO: 360996 - DNA, 57 bp, Artificial
  Synthetic oligonucleotide
cccttctcgttagtatacttgatcgtcatttgcatgtaattatgaacaacacatgag

SEQ ID NO: 360997 - DNA, 57 bp, Artificial
  Synthetic oligonucleotide
cccttctgattcagtactgcaatcactttagtcatttgcccgtttctcctcggtttg

SEQ ID NO: 360998 - DNA, 60 bp, Artificial
  Synthetic oligonucleotide
cccttctgcccctccaggatggcaccaatacccatatcatggcgactgaggcgtctaatt

SEQ ID NO: 360999 - DNA, 51 bp, Artificial
  Synthetic oligonucleotide
cccttctgtggtgagagtaccctttacacccgtacctggtcggtgtcgggg

SEQ ID NO: 361000 - DNA, 57 bp, Artificial
  Synthetic oligonucleotide
cccttcttagagagacatcctatattcataaccattgttatattaaacccaagtgga

SEQ ID NO: 361001 - DNA, 55 bp, Artificial
  Synthetic oligonucleotide
cccttcttagttaatgatgaagcaattaagtatcagtctgtaccgacaatgccaa

SEQ ID NO: 361002 - DNA, 55 bp, Artificial
  Synthetic oligonucleotide
cccttcttcacacataatttcgtggctcacgatggtacgatgcaccctgctattc

SEQ ID NO: 361003 - DNA, 58 bp, Artificial
  Synthetic oligonucleotide
cccttcttgtgacctattgctgggaggaagagaatggtcctacatcgtcgaaagacca

SEQ ID NO: 361004 - DNA, 58 bp, Artificial
  Synthetic oligonucleotide
cccttgaaactcttggggccttgcgtccaggggtgtatgaggacactgtgctaccaga

SEQ ID NO: 361005 - DNA, 55 bp, Artificial
  Synthetic oligonucleotide
cccttgaattttgcgaaatgtgtcctttgatgaacgtttgtgtctgaaactctat

SEQ ID NO: 361006 - DNA, 55 bp, Artificial
  Synthetic oligonucleotide
cccttgacgaattcgaaacgagatgttctccctcccttgccgcttgttcacaccc

SEQ ID NO: 361007 - DNA, 55 bp, Artificial
  Synthetic oligonucleotide
cccttgactcgacacgagtacacgtgctccaagcctccgtccacatagacgtcga

SEQ ID NO: 361008 - DNA, 55 bp, Artificial
  Synthetic oligonucleotide
cccttgactctgcaccagagccttttacatcctcaaatacaaccataaactgatc

SEQ ID NO: 361009 - DNA, 59 bp, Artificial
  Synthetic oligonucleotide
cccttgagaccttctgggcaaaacacatgtggaatttcatcagcgggatacaatactta

SEQ ID NO: 361010 - DNA, 55 bp, Artificial
  Synthetic oligonucleotide
cccttgaggacgcagcaaggttacgagcaacaccacgttcggctgaaggaaagtc

SEQ ID NO: 361011 - DNA, 59 bp, Artificial
  Synthetic oligonucleotide
cccttgaggccttttgggcgaagcacatgtggaacttcatcagcggaatacagtacctg

SEQ ID NO: 361012 - DNA, 50 bp, Artificial
  Synthetic oligonucleotide
cccttgaggtaccatcgcgcggcgactcctcggttgggaaagcggtgggg

SEQ ID NO: 361013 - DNA, 55 bp, Artificial
  Synthetic oligonucleotide
cccttgatatttgccagtctacgtgtaaatatcctgactacttaggcatggctgc

SEQ ID NO: 361014 - DNA, 55 bp, Artificial
  Synthetic oligonucleotide
cccttgatcccctattgacatcccacgataccctatgttaatcaaagactgtcta

SEQ ID NO: 361015 - DNA, 60 bp, Artificial
  Synthetic oligonucleotide
cccttgatcgtcggtgatcacgtacacagcttgccgtactggtctcggaagataacgctc

SEQ ID NO: 361016 - DNA, 60 bp, Artificial
  Synthetic oligonucleotide
cccttgatgaattcagagtgacgtacacatctgagaaaagggatcagttgttgatgcatg

SEQ ID NO: 361017 - DNA, 58 bp, Artificial
  Synthetic oligonucleotide
cccttgatgaggaaagccgaacaagaatcaaaacaagactattcaccataagacaaga

SEQ ID NO: 361018 - DNA, 55 bp, Artificial
  Synthetic oligonucleotide
cccttgatgcatggtcttatggttaaaggacgtattatgcttattccagcccaca

SEQ ID NO: 361019 - DNA, 58 bp, Artificial
  Synthetic oligonucleotide
cccttgatggtagcatacatgctagaaagagaattggtccgcaaaacaaggttcctcc

SEQ ID NO: 361020 - DNA, 55 bp, Artificial
  Synthetic oligonucleotide
cccttgatggtagcatacatgttggagagagaacttgttcggaagacgagattcc

SEQ ID NO: 361021 - DNA, 55 bp, Artificial
  Synthetic oligonucleotide
cccttgattccagcataggaccttgcacgatatctcgcaacatggaatcagcgct

SEQ ID NO: 361022 - DNA, 55 bp, Artificial
  Synthetic oligonucleotide
cccttgcaaacctctcattagggaggaaacttgcttctccgtgggcttacattcc

SEQ ID NO: 361023 - DNA, 55 bp, Artificial
  Synthetic oligonucleotide
cccttgcatggggagcggttcaacaattagggcatcgattgaacttggaagaaat

SEQ ID NO: 361024 - DNA, 55 bp, Artificial
  Synthetic oligonucleotide
cccttgcatgtagctgtttgtgtctccaaacattgcccatctcatgttcagtcca

SEQ ID NO: 361025 - DNA, 55 bp, Artificial
  Synthetic oligonucleotide
cccttgccagacatcaatttgactggacgtgaacgccctgtcgttccggcgtccg

SEQ ID NO: 361026 - DNA, 55 bp, Artificial
  Synthetic oligonucleotide
cccttgccgacgctcagatcgttcaactcgcccgcacggtcaatctagcagttcc

SEQ ID NO: 361027 - DNA, 55 bp, Artificial
  Synthetic oligonucleotide
cccttgcctacagctgggaatctccaacatagattggacgacggcataactcaga

SEQ ID NO: 361028 - DNA, 52 bp, Artificial
  Synthetic oligonucleotide
cccttgcgaacatacaaaaatcggtccgtgtgattaaagagcagcacagtaa

SEQ ID NO: 361029 - DNA, 55 bp, Artificial
  Synthetic oligonucleotide
cccttgctacgagatgaggtgtcgtttagtgtgggactacacagttacccggtgg

SEQ ID NO: 361030 - DNA, 57 bp, Artificial
  Synthetic oligonucleotide
cccttgcttcactcatttctgaggtggagccagtacgtattcctactaccaagattt

SEQ ID NO: 361031 - DNA, 54 bp, Artificial
  Synthetic oligonucleotide
cccttggagtatacgacaccgccatagtcctcccgcgtcacgctatgcctggga

SEQ ID NO: 361032 - DNA, 55 bp, Artificial
  Synthetic oligonucleotide
cccttggatagatataatgcttgatttatcgtatgctgttgatgggttaggtgat

SEQ ID NO: 361033 - DNA, 55 bp, Artificial
  Synthetic oligonucleotide
cccttggattacagggttgtgcttttcagtctactgtcgctgagcttcagcgcct

SEQ ID NO: 361034 - DNA, 54 bp, Artificial
  Synthetic oligonucleotide
cccttggccgtttagcgattaacgcgactggttctaccgcagtcgtaactcgcc

SEQ ID NO: 361035 - DNA, 55 bp, Artificial
  Synthetic oligonucleotide
cccttgggagcaataaatacaacattgccctttcacaatatccacccactgacca

SEQ ID NO: 361036 - DNA, 60 bp, Artificial
  Synthetic oligonucleotide
cccttgggtcgatcttccctttgagctctcttgtcagcccagttctctcatagccgccaa

SEQ ID NO: 361037 - DNA, 60 bp, Artificial
  Synthetic oligonucleotide
cccttggtattagtgctattaatgagttggaagtaaatcctgcattaactcgcactgaca

SEQ ID NO: 361038 - DNA, 55 bp, Artificial
  Synthetic oligonucleotide
cccttggtcacgacttaattagggatctcatctccgtcattcgtgctcgtgacta

SEQ ID NO: 361039 - DNA, 55 bp, Artificial
  Synthetic oligonucleotide
cccttggtgagccgtcacttccagctatacgtgtatacgatttcacctcttccat

SEQ ID NO: 361040 - DNA, 58 bp, Artificial
  Synthetic oligonucleotide
cccttggttcgtcgtttgtacaggcctgacgctctggactaaggcatggaggtgccat

SEQ ID NO: 361041 - DNA, 55 bp, Artificial
  Synthetic oligonucleotide
cccttggtttgtggtaaagctatcagtttagtagatagagccactaatgttagat

SEQ ID NO: 361042 - DNA, 56 bp, Artificial
  Synthetic oligonucleotide
cccttgtaaagttcaatcgtttgaatccaggcacgatgtctcccatattggtaagg

SEQ ID NO: 361043 - DNA, 55 bp, Artificial
  Synthetic oligonucleotide
cccttgtaacgcgatacacgttgcacgtccggactcacgctttccacgttgacgt

SEQ ID NO: 361044 - DNA, 55 bp, Artificial
  Synthetic oligonucleotide
cccttgtagaataagacaaatagtgaattcctggatgcgtgtagggaaaggaatt

SEQ ID NO: 361045 - DNA, 52 bp, Artificial
  Synthetic oligonucleotide
cccttgtatatgacaggggggtcagtcaggaccatagctactggcaattatc

SEQ ID NO: 361046 - DNA, 55 bp, Artificial
  Synthetic oligonucleotide
cccttgtcaagaagtatatgaaggttaacgctcaggtggtttataaccaccagga

SEQ ID NO: 361047 - DNA, 55 bp, Artificial
  Synthetic oligonucleotide
cccttgtctaggcgttcgtatagtgtgaatagaatcaatggcaaacgtggatcga

SEQ ID NO: 361048 - DNA, 60 bp, Artificial
  Synthetic oligonucleotide
cccttgtgaaccaggtgactgtggtggaaagttgctatgcaaacatggtgtcataggtat

SEQ ID NO: 361049 - DNA, 60 bp, Artificial
  Synthetic oligonucleotide
cccttgtgaactcaatggtacattctgatgataatcaaacatctatatgtatggtgcaga

SEQ ID NO: 361050 - DNA, 59 bp, Artificial
  Synthetic oligonucleotide
cccttgtgacaggtttgcccaatactgtctgggcaacgcgtgacacctcagaggtcgaa

SEQ ID NO: 361051 - DNA, 55 bp, Artificial
  Synthetic oligonucleotide
cccttgtggggattcttggtctgctgagatgataagtcgaagcagagttaggatg

SEQ ID NO: 361052 - DNA, 56 bp, Artificial
  Synthetic oligonucleotide
cccttgtgttgcagttgggccgtgtatctctaaccgctgaggcactagcacacctt

SEQ ID NO: 361053 - DNA, 55 bp, Artificial
  Synthetic oligonucleotide
cccttgtgtttccaagttctactgagaaatcatgagtaaatggacgttgacacac

SEQ ID NO: 361054 - DNA, 59 bp, Artificial
  Synthetic oligonucleotide
cccttgttatctcaggattactttcgatgctattattgagctttataacacctatagaa

SEQ ID NO: 361055 - DNA, 55 bp, Artificial
  Synthetic oligonucleotide
cccttgttcgtcgtttttttaggattaatagtcagattgtgtacaaccatcaaga

SEQ ID NO: 361056 - DNA, 58 bp, Artificial
  Synthetic oligonucleotide
ccctttaaatatgcctgccctcaaagctcaatggtggtgtttcacagtcttcttcctc

SEQ ID NO: 361057 - DNA, 55 bp, Artificial
  Synthetic oligonucleotide
ccctttaatgtggtccccgcgcacatacgtatgtcggccaatcatgtagtagcgt

SEQ ID NO: 361058 - DNA, 55 bp, Artificial
  Synthetic oligonucleotide
ccctttaatgtggtccccgcgcacatacgtatgtcggccaatcatgtggaagctg

SEQ ID NO: 361059 - DNA, 59 bp, Artificial
  Synthetic oligonucleotide
ccctttagagactatgtagatcggttctataaaactttaagagctgagcaagcctcaca

SEQ ID NO: 361060 - DNA, 53 bp, Artificial
  Synthetic oligonucleotide
ccctttagagattatgtagaccggttctttaaagttctaagagccgaacaagc

SEQ ID NO: 361061 - DNA, 59 bp, Artificial
  Synthetic oligonucleotide
ccctttagagattatgtagatcggttctataaaactctaagggccgagcaatgcacaca

SEQ ID NO: 361062 - DNA, 55 bp, Artificial
  Synthetic oligonucleotide
ccctttagcaaacctatgatgcttagcgtagtaatgaacccaaagactacgcatg

SEQ ID NO: 361063 - DNA, 53 bp, Artificial
  Synthetic oligonucleotide
ccctttaggcggttgaatggactagtattcccgggaggtggttgtgactggac

SEQ ID NO: 361064 - DNA, 49 bp, Artificial
  Synthetic oligonucleotide
ccctttaggggtggtagacccattcgggttgttactttcccaaacacca

SEQ ID NO: 361065 - DNA, 59 bp, Artificial
  Synthetic oligonucleotide
ccctttagttgcgattggactccaacagatgacaggataggacttccccatgacaatta

SEQ ID NO: 361066 - DNA, 59 bp, Artificial
  Synthetic oligonucleotide
ccctttatagatataacaggttcacccagcggcactcgcttactggtggattatggcta

SEQ ID NO: 361067 - DNA, 57 bp, Artificial
  Synthetic oligonucleotide
ccctttatcccaatccagaccatagcaaaagttgctactctgaaaaatggataatgg

SEQ ID NO: 361068 - DNA, 60 bp, Artificial
  Synthetic oligonucleotide
ccctttccagttggatgctgccgctttggctgaggccggcaaagtttatggattgcagat

SEQ ID NO: 361069 - DNA, 54 bp, Artificial
  Synthetic oligonucleotide
ccctttcccagccctgaggcggctggtcaataaaagcctcaaacgtaactaaca

SEQ ID NO: 361070 - DNA, 55 bp, Artificial
  Synthetic oligonucleotide
ccctttcctctcatgccagaggggttacaggggagagtggcgtggagatggcgtg

SEQ ID NO: 361071 - DNA, 55 bp, Artificial
  Synthetic oligonucleotide
ccctttcctgcgacgcctcgacattagcgggctaagctgacagcacgccgcacta

SEQ ID NO: 361072 - DNA, 55 bp, Artificial
  Synthetic oligonucleotide
ccctttcgaggacgttgagacacggagttatgagtttctggaagttgagatcgta

SEQ ID NO: 361073 - DNA, 56 bp, Artificial
  Synthetic oligonucleotide
ccctttcgggcaagttaggagagcgaaatgactcagcccgatgtttcgtggggcga

SEQ ID NO: 361074 - DNA, 54 bp, Artificial
  Synthetic oligonucleotide
ccctttctaaacttgcggttcagatgaacaatgcgcaagcagacgtaaataaga

SEQ ID NO: 361075 - DNA, 55 bp, Artificial
  Synthetic oligonucleotide
ccctttctataaacactgacaatggttctgccttcctatctcaagaattccaggc

SEQ ID NO: 361076 - DNA, 58 bp, Artificial
  Synthetic oligonucleotide
ccctttctcacagaaacttttcagcaccgaggataaacgagagattcgataatgtcaa

SEQ ID NO: 361077 - DNA, 55 bp, Artificial
  Synthetic oligonucleotide
ccctttctcgccttgaggcgggtgtttaccagctgacaggttcagcaggcctggc

SEQ ID NO: 361078 - DNA, 55 bp, Artificial
  Synthetic oligonucleotide
ccctttctgcctatataaggacttagtttagctcattgctaagcatcgaagcaga

SEQ ID NO: 361079 - DNA, 59 bp, Artificial
  Synthetic oligonucleotide
ccctttctgttcacatcatttccacgagttaaacatgaaggatggcagaaccatcgttg

SEQ ID NO: 361080 - DNA, 55 bp, Artificial
  Synthetic oligonucleotide
ccctttcttccacatcagtgagttgattcatacaaactttctacccacattcttc

SEQ ID NO: 361081 - DNA, 58 bp, Artificial
  Synthetic oligonucleotide
ccctttcttcttgctcttgatcacaatccctttgtgtttgtcacaaagatgttcaaac

SEQ ID NO: 361082 - DNA, 60 bp, Artificial
  Synthetic oligonucleotide
ccctttgaaagacctgctctggcgcgagctaaagcgcaattgtcaccgggtattgcacca

SEQ ID NO: 361083 - DNA, 55 bp, Artificial
  Synthetic oligonucleotide
ccctttgaacttggcgaaatgtgttcgttggtgtatgtttgaatcacagactctg

SEQ ID NO: 361084 - DNA, 55 bp, Artificial
  Synthetic oligonucleotide
ccctttgaatttcgcgaagtgggtcctctgatgaacattcgtatcgcagactctg

SEQ ID NO: 361085 - DNA, 54 bp, Artificial
  Synthetic oligonucleotide
ccctttgaatttggggaatacgttgccgctggtagtcataagagacgacaacgg

SEQ ID NO: 361086 - DNA, 58 bp, Artificial
  Synthetic oligonucleotide
ccctttgactcgaggtttgtattctgcagtacaaatcaaactctgttagcaccgccta

SEQ ID NO: 361087 - DNA, 60 bp, Artificial
  Synthetic oligonucleotide
ccctttgagccaaatggccttgacagagtctgtgagtccattgcggaaacgtggcacgat

SEQ ID NO: 361088 - DNA, 60 bp, Artificial
  Synthetic oligonucleotide
ccctttgatgtggatactgatctcagaatagcagcacagaaaatacatcaacctgaccta

SEQ ID NO: 361089 - DNA, 51 bp, Artificial
  Synthetic oligonucleotide
ccctttgctttccacgcgcgctccgcttttttcactcgcgctatcgtccaa

SEQ ID NO: 361090 - DNA, 58 bp, Artificial
  Synthetic oligonucleotide
ccctttggaaccgtcagacacagtgcaaacgagacatgtcattcaaaccaggtcgagg

SEQ ID NO: 361091 - DNA, 55 bp, Artificial
  Synthetic oligonucleotide
ccctttggaaggctggcattctatataagagagaaaccacacgtagtgcctcgtt

SEQ ID NO: 361092 - DNA, 55 bp, Artificial
  Synthetic oligonucleotide
ccctttggagtagcatgggaagacccgaacacactcatttcttattacgcgtcac

SEQ ID NO: 361093 - DNA, 52 bp, Artificial
  Synthetic oligonucleotide
ccctttggatattgtagaccaaatagtaaaataccctgattttcttaaaatg

SEQ ID NO: 361094 - DNA, 55 bp, Artificial
  Synthetic oligonucleotide
ccctttgtctccgtgtcaacggccaatgctaaagtcctgattgagttggaaccac

SEQ ID NO: 361095 - DNA, 54 bp, Artificial
  Synthetic oligonucleotide
ccctttgtgtttgtcgcaaaggtgttcaaacctcttccaaacaagatcttcaaa

SEQ ID NO: 361096 - DNA, 54 bp, Artificial
  Synthetic oligonucleotide
ccctttgtttggcctgctaggtaccctcgtgacctaagcaagtacgaaggcctc

SEQ ID NO: 361097 - DNA, 51 bp, Artificial
  Synthetic oligonucleotide
ccctttgttttgcactttcaaagttacaaccataaaacacgactttgtttg

SEQ ID NO: 361098 - DNA, 55 bp, Artificial
  Synthetic oligonucleotide
cccttttaaagctcaaccgcaatgagaagtttagggacatcagagggtttctggc

SEQ ID NO: 361099 - DNA, 54 bp, Artificial
  Synthetic oligonucleotide
cccttttacaacagataaggcaagttttattaatttacccaatcataatcgcca

SEQ ID NO: 361100 - DNA, 60 bp, Artificial
  Synthetic oligonucleotide
cccttttacacaatgtggatatcctgctttaatgcctctgtatgcgtgtattcaatctca

SEQ ID NO: 361101 - DNA, 55 bp, Artificial
  Synthetic oligonucleotide
cccttttatctaccttatgatgacctcgatgttgattacaccgccttgtgtcgtg

SEQ ID NO: 361102 - DNA, 54 bp, Artificial
  Synthetic oligonucleotide
cccttttcaaaatctttccccgagaactgtgggtcaatgccccaaatatgtgaa

SEQ ID NO: 361103 - DNA, 58 bp, Artificial
  Synthetic oligonucleotide
cccttttcacaaggacaatgcaatacgactgggtgagaacaaggacgttatagtcaca

SEQ ID NO: 361104 - DNA, 50 bp, Artificial
  Synthetic oligonucleotide
cccttttccaaagacaacggaataagaattgggtcgaggggtcatgtttt

SEQ ID NO: 361105 - DNA, 52 bp, Artificial
  Synthetic oligonucleotide
cccttttcccattcccctcgtcaaagaccaattctaccatcggtttatcgag

SEQ ID NO: 361106 - DNA, 55 bp, Artificial
  Synthetic oligonucleotide
cccttttctgatccatccctgctttccaatgaaggagatttacgagtccatccgt

SEQ ID NO: 361107 - DNA, 55 bp, Artificial
  Synthetic oligonucleotide
cccttttctgtcgggtacggagctaaagaatgatgatggtccattgctttccgtt

SEQ ID NO: 361108 - DNA, 60 bp, Artificial
  Synthetic oligonucleotide
cccttttctgtgcctccgatgctaagagttatagtacagaagctcataacatctgggcca

SEQ ID NO: 361109 - DNA, 55 bp, Artificial
  Synthetic oligonucleotide
cccttttgaatagactgaacatcaacccagtgaaactttcttcgggctataaaga

SEQ ID NO: 361110 - DNA, 55 bp, Artificial
  Synthetic oligonucleotide
cccttttgagcaaattttggggatgtttgtccgctccactgtttccgttgcattg

SEQ ID NO: 361111 - DNA, 58 bp, Artificial
  Synthetic oligonucleotide
cccttttgctcacctcctggctagtatttttcctcctggtcacaaagatcgcacacga

SEQ ID NO: 361112 - DNA, 55 bp, Artificial
  Synthetic oligonucleotide
cccttttgtgggtcccacgagtaatgatggcattgctttataaggaccaatcagg

SEQ ID NO: 361113 - DNA, 51 bp, Artificial
  Synthetic oligonucleotide
cccttttttgttcgccggaaattttcgcaatccggtcccttatccaaatga

SEQ ID NO: 361114 - DNA, 56 bp, Artificial
  Synthetic oligonucleotide
ccgaaaaacccatgcaagttactgcccactctatggagaggggtgattgaagggga

SEQ ID NO: 361115 - DNA, 59 bp, Artificial
  Synthetic oligonucleotide
ccgaaaaatgctggatgcgaaggaagagccgaaggacgagatggatttatctacacgat

SEQ ID NO: 361116 - DNA, 55 bp, Artificial
  Synthetic oligonucleotide
ccgaaaacacacccacaattgttaacaccaagaaacaaccacagccgaaccatgc

SEQ ID NO: 361117 - DNA, 55 bp, Artificial
  Synthetic oligonucleotide
ccgaaaacggtgcgaccgaaagggatacatatataagggcagctaagggcagtgg

SEQ ID NO: 361118 - DNA, 60 bp, Artificial
  Synthetic oligonucleotide
ccgaaaagtacgcctctcagccagaactatgcactaactccacttgcatcggatctcgag

SEQ ID NO: 361119 - DNA, 53 bp, Artificial
  Synthetic oligonucleotide
ccgaaaagtggtcttgctttggggttcgtcgttgcaattgttgcgtacctggt

SEQ ID NO: 361120 - DNA, 51 bp, Artificial
  Synthetic oligonucleotide
ccgaaaataggtttttaagcgtaatcttattgtcaatagatgtaaaaattt

SEQ ID NO: 361121 - DNA, 57 bp, Artificial
  Synthetic oligonucleotide
ccgaaaatcaacctcaagtcatcaagtggactaccatatgtaggccgcaccaagggg

SEQ ID NO: 361122 - DNA, 55 bp, Artificial
  Synthetic oligonucleotide
ccgaaaatgaataacactccagaaaactgctgtcagctgcatttgatgtgcagcc

SEQ ID NO: 361123 - DNA, 60 bp, Artificial
  Synthetic oligonucleotide
ccgaaaatgtcactctctgattattttagctcagttagttgctcttttgatggcgaaatg

SEQ ID NO: 361124 - DNA, 60 bp, Artificial
  Synthetic oligonucleotide
ccgaaaattgatgcatcggcgttcgaagtggatggtacactgtacgatatctcgcagact

SEQ ID NO: 361125 - DNA, 55 bp, Artificial
  Synthetic oligonucleotide
ccgaaacaaaccaaccagacactggaatcgctaatgctagagttgagcgatcagc

SEQ ID NO: 361126 - DNA, 56 bp, Artificial
  Synthetic oligonucleotide
ccgaaacaagatatttcggtattcttaaaacaacagcttctactaacgcatctcag

SEQ ID NO: 361127 - DNA, 55 bp, Artificial
  Synthetic oligonucleotide
ccgaaacaataacctttacgcaatcctcaggaggggacccagaaattgtaatgca

SEQ ID NO: 361128 - DNA, 53 bp, Artificial
  Synthetic oligonucleotide
ccgaaacacccttgttgaggtccgccatgaccccgagaacattgagctcggca

SEQ ID NO: 361129 - DNA, 57 bp, Artificial
  Synthetic oligonucleotide
ccgaaacagtggtatagctgctcgcggatctgttaaccctattttagcggctactac

SEQ ID NO: 361130 - DNA, 58 bp, Artificial
  Synthetic oligonucleotide
ccgaaacatatgaaatgatgaatagatgctactcatatatatcaccacaatggcatgc

SEQ ID NO: 361131 - DNA, 55 bp, Artificial
  Synthetic oligonucleotide
ccgaaacatcataatccaaactgttatttccatgaccactaggtacagcactgta

SEQ ID NO: 361132 - DNA, 57 bp, Artificial
  Synthetic oligonucleotide
ccgaaacatgtgcctatgtttaaggatattagcaagagtattgttacgcagggtgat

SEQ ID NO: 361133 - DNA, 60 bp, Artificial
  Synthetic oligonucleotide
ccgaaaccacaacgttcgacgtcgtgagtgactactagaaatcatcacagaagtcatgac

SEQ ID NO: 361134 - DNA, 60 bp, Artificial
  Synthetic oligonucleotide
ccgaaaccctgcacgggtttcgctgtatgcttgcagtcaaatatctacaagctctactct

SEQ ID NO: 361135 - DNA, 58 bp, Artificial
  Synthetic oligonucleotide
ccgaaaccgcctgacgctagatttgaacgaaaccacgcgccgattacgagcagcatgg

SEQ ID NO: 361136 - DNA, 60 bp, Artificial
  Synthetic oligonucleotide
ccgaaacctttgtcatatgtaatgtgtaatatgtgttactgtatgttgtgtgtctgtcac

SEQ ID NO: 361137 - DNA, 55 bp, Artificial
  Synthetic oligonucleotide
ccgaaacgagtcctacacatcctatacaacgaagtacattttggaagcactggat

SEQ ID NO: 361138 - DNA, 55 bp, Artificial
  Synthetic oligonucleotide
ccgaaactaaaaggattatcgtactaaacggcgccttgcaacagcgtcgactcga

SEQ ID NO: 361139 - DNA, 53 bp, Artificial
  Synthetic oligonucleotide
ccgaaactgaagacgtcacaccactggttggtaagttgaattccacagttttt

SEQ ID NO: 361140 - DNA, 57 bp, Artificial
  Synthetic oligonucleotide
ccgaaactgctcccgctcctctggtgaaagaccattcttaattcaagtcgttcctga

SEQ ID NO: 361141 - DNA, 55 bp, Artificial
  Synthetic oligonucleotide
ccgaaactggaggaccagccttgagcctgtctgtgattctcgcttcccaggctcg

SEQ ID NO: 361142 - DNA, 56 bp, Artificial
  Synthetic oligonucleotide
ccgaaagaaccaatattccaaaatttcgacatcagtctaaaagttcatactcacaa

SEQ ID NO: 361143 - DNA, 55 bp, Artificial
  Synthetic oligonucleotide
ccgaaagaagtcctgtccacgtcccatgtgactttgttgactgtctgggttacga

SEQ ID NO: 361144 - DNA, 60 bp, Artificial
  Synthetic oligonucleotide
ccgaaagagatgtcgaagcaattcacagactacaacacattcaaaaggtataccacaagc

SEQ ID NO: 361145 - DNA, 57 bp, Artificial
  Synthetic oligonucleotide
ccgaaagatacgcacaaagcgtatgtagaagaatttttcgaatggtataacacaata

SEQ ID NO: 361146 - DNA, 51 bp, Artificial
  Synthetic oligonucleotide
ccgaaagatcagtgaacggattcttgacacttatctgggtcgatctgagga

SEQ ID NO: 361147 - DNA, 60 bp, Artificial
  Synthetic oligonucleotide
ccgaaagatctctcgatagcgacttcgctcaccgcatcagagaaacgtaaagtgatcgat

SEQ ID NO: 361148 - DNA, 55 bp, Artificial
  Synthetic oligonucleotide
ccgaaagatgacattgactttggagattatgtactcattgagcaaaagcgatatg

SEQ ID NO: 361149 - DNA, 60 bp, Artificial
  Synthetic oligonucleotide
ccgaaagatttcctcgatatgtggtttgcatcacacgagatatcgcacatccgtgatgga

SEQ ID NO: 361150 - DNA, 51 bp, Artificial
  Synthetic oligonucleotide
ccgaaagccccgatcgtagaggaaattaaggacgatgttgaaccgttaggt

SEQ ID NO: 361151 - DNA, 53 bp, Artificial
  Synthetic oligonucleotide
ccgaaagcccctatcgtagaggaagttaaggacgaagatgaaccgacaggttc

SEQ ID NO: 361152 - DNA, 55 bp, Artificial
  Synthetic oligonucleotide
ccgaaagcctcaatgcacggtcacctgtagaggagaatgtgcgcatggttaaagg

SEQ ID NO: 361153 - DNA, 55 bp, Artificial
  Synthetic oligonucleotide
ccgaaagctcttctgagggagatggatcgtctgatgaccaagcagagagacgcgc

SEQ ID NO: 361154 - DNA, 58 bp, Artificial
  Synthetic oligonucleotide
ccgaaaggaggctagccatgcccttagtaggactagcataatgaggggggtagcaaca

SEQ ID NO: 361155 - DNA, 54 bp, Artificial
  Synthetic oligonucleotide
ccgaaaggggtcattttcgagggtcgtggttatatcgactttcagagtgatacg

SEQ ID NO: 361156 - DNA, 51 bp, Artificial
  Synthetic oligonucleotide
ccgaaaggggtgacatggctggctccttgccattggatagggttaaaatta

SEQ ID NO: 361157 - DNA, 60 bp, Artificial
  Synthetic oligonucleotide
ccgaaagtagttgctacagctccaacacgacaacaattatatgacgtactatgggctgaa

SEQ ID NO: 361158 - DNA, 59 bp, Artificial
  Synthetic oligonucleotide
ccgaaagtatcgaggtgtgccttccggatcctggtggacgcagataattgactcagttg

SEQ ID NO: 361159 - DNA, 59 bp, Artificial
  Synthetic oligonucleotide
ccgaaagtccatatttgcccttcgaggagatcgattacccatccaggctagatcaacag

SEQ ID NO: 361160 - DNA, 53 bp, Artificial
  Synthetic oligonucleotide
ccgaaagtctgggccgagataaatcccccggggttggcatccacacaagcccc

SEQ ID NO: 361161 - DNA, 55 bp, Artificial
  Synthetic oligonucleotide
ccgaaagtgttacatactggggcatatatagagtaggtacttgtgtatctacacc

SEQ ID NO: 361162 - DNA, 51 bp, Artificial
  Synthetic oligonucleotide
ccgaaagtttactgcgtacgaccgtgacctcagtcatgccgcctgtagaaa

SEQ ID NO: 361163 - DNA, 58 bp, Artificial
  Synthetic oligonucleotide
ccgaaataaccatcgacccacgcttgcatctcagccggaacgtgagtaaaggaggaga

SEQ ID NO: 361164 - DNA, 56 bp, Artificial
  Synthetic oligonucleotide
ccgaaataagtaggataacatcttcctcctctaactgattggcgtacgaagttgta

SEQ ID NO: 361165 - DNA, 55 bp, Artificial
  Synthetic oligonucleotide
ccgaaatacttagcacattgagccttacaactaaagtgtagttcttcttccgtca

SEQ ID NO: 361166 - DNA, 59 bp, Artificial
  Synthetic oligonucleotide
ccgaaatattcgtcagcccactcttgcatctcgtcaggaacattagtgaaggaggaaag

SEQ ID NO: 361167 - DNA, 55 bp, Artificial
  Synthetic oligonucleotide
ccgaaatcaatacaacgctcaagaaacggcactgagagatcaatgccattcgatc

SEQ ID NO: 361168 - DNA, 53 bp, Artificial
  Synthetic oligonucleotide
ccgaaatcggttgaaccggaaccggttagtataaaagcagacattttctgcac

SEQ ID NO: 361169 - DNA, 53 bp, Artificial
  Synthetic oligonucleotide
ccgaaatcgttgtcgtttgaaggtgattgggtggttttaccatttactgtgtg

SEQ ID NO: 361170 - DNA, 55 bp, Artificial
  Synthetic oligonucleotide
ccgaaatgtccgacaccggcacagttcgacagcagtgccaaggtcgcaacgaccg

SEQ ID NO: 361171 - DNA, 55 bp, Artificial
  Synthetic oligonucleotide
ccgaaatgtcggcgctaccattcagagcctacaacttaatctttaacgaatggtt

SEQ ID NO: 361172 - DNA, 53 bp, Artificial
  Synthetic oligonucleotide
ccgaaattactaagacgtatcttagtaagactgaggcgcttcttaagggagga

SEQ ID NO: 361173 - DNA, 55 bp, Artificial
  Synthetic oligonucleotide
ccgaaattccatactcattgttaagccactatccgttagctgttcgtacgaacgt

SEQ ID NO: 361174 - DNA, 55 bp, Artificial
  Synthetic oligonucleotide
ccgaaattgccaggacgaccgggtcctttcttggatcaacccgctcaatgcctgg

SEQ ID NO: 361175 - DNA, 55 bp, Artificial
  Synthetic oligonucleotide
ccgaacaaacacaataggtgatgactatattccaatgtgtgattgtacagatgcc

SEQ ID NO: 361176 - DNA, 55 bp, Artificial
  Synthetic oligonucleotide
ccgaacaaacactataggtgatgactatataccagcatgtgattgcacgcaagcc

SEQ ID NO: 361177 - DNA, 57 bp, Artificial
  Synthetic oligonucleotide
ccgaacaatggcatggacggtggtgaatagtatttgtaacactactggagtcgaaaa

SEQ ID NO: 361178 - DNA, 59 bp, Artificial
  Synthetic oligonucleotide
ccgaacaatggcctggacagtagtaaacagtatttgcaacactactggagctgagaaac

SEQ ID NO: 361179 - DNA, 55 bp, Artificial
  Synthetic oligonucleotide
ccgaacaatttgtcatcaggggcctcgaagactcggctgagatcactgtttgggg

SEQ ID NO: 361180 - DNA, 52 bp, Artificial
  Synthetic oligonucleotide
ccgaacactagcgtcgcccgcttttatacggtatcgttatcattcattctag

SEQ ID NO: 361181 - DNA, 60 bp, Artificial
  Synthetic oligonucleotide
ccgaacagaagataaattttatctgtcagcgggtagatcaggatgtcgtcgtatactgta

SEQ ID NO: 361182 - DNA, 55 bp, Artificial
  Synthetic oligonucleotide
ccgaacataaatcagtgcaccctttctgatgggattacagagacttgccggagtg

SEQ ID NO: 361183 - DNA, 60 bp, Artificial
  Synthetic oligonucleotide
ccgaacatcagattacctgggaccccatcgatggacgcgttgtcagctcagctctacaat

SEQ ID NO: 361184 - DNA, 55 bp, Artificial
  Synthetic oligonucleotide
ccgaacattacagtgacaaagggaggagacactatttacattgcgcagctacctc

SEQ ID NO: 361185 - DNA, 55 bp, Artificial
  Synthetic oligonucleotide
ccgaaccataaagtgttttgaagacctagtcgcggctatttacaccaaatctgat

SEQ ID NO: 361186 - DNA, 57 bp, Artificial
  Synthetic oligonucleotide
ccgaaccatcgccacacctgtgggagccctaaacccaaggtggtggtctgccagtga

SEQ ID NO: 361187 - DNA, 59 bp, Artificial
  Synthetic oligonucleotide
ccgaacccacaagacaccaagatcaaatcagttcggccgactcctactctagaattgca

SEQ ID NO: 361188 - DNA, 51 bp, Artificial
  Synthetic oligonucleotide
ccgaaccccgtcctggcagaccaactttcgttcccgctacctaatccccta

SEQ ID NO: 361189 - DNA, 59 bp, Artificial
  Synthetic oligonucleotide
ccgaacccctgagtacaggggagtcgtcaatggttcgacactccatcagctgaggagtc

SEQ ID NO: 361190 - DNA, 57 bp, Artificial
  Synthetic oligonucleotide
ccgaacccgagggaactcgacaggctcagaagaatcgaagaaggaggtggagagcaa

SEQ ID NO: 361191 - DNA, 55 bp, Artificial
  Synthetic oligonucleotide
ccgaaccgatacgtcacacactttaacgacaataccgaatccgttgtcactatgg

SEQ ID NO: 361192 - DNA, 53 bp, Artificial
  Synthetic oligonucleotide
ccgaaccgatccaggtcatatattaagttaagacgactgcgttttaagggtac

SEQ ID NO: 361193 - DNA, 57 bp, Artificial
  Synthetic oligonucleotide
ccgaaccggagtgatccgccccacggtattgacgttcgtgtcatgcagtcgcgtaag

SEQ ID NO: 361194 - DNA, 54 bp, Artificial
  Synthetic oligonucleotide
ccgaacctaaatacatcatggatgtcttgggacggctgtgatcttgattactac

SEQ ID NO: 361195 - DNA, 55 bp, Artificial
  Synthetic oligonucleotide
ccgaaccttacaagatcccagagtcaggggcctgtattttcctgctggtggctcc

SEQ ID NO: 361196 - DNA, 51 bp, Artificial
  Synthetic oligonucleotide
ccgaaccttagtttgcacgcacgaaccgttccggcacagaagtcttgcgat

SEQ ID NO: 361197 - DNA, 55 bp, Artificial
  Synthetic oligonucleotide
ccgaacgaaatggatgctggtatttactacgctccatatgtagctctgactccgc

SEQ ID NO: 361198 - DNA, 55 bp, Artificial
  Synthetic oligonucleotide
ccgaacgatacactaataacagtctcttgggcagagtattatcgatggcaaggcg

SEQ ID NO: 361199 - DNA, 55 bp, Artificial
  Synthetic oligonucleotide
ccgaacgatagtacagattttctagtaccacagatacaaagcgcaacagtagcgg

SEQ ID NO: 361200 - DNA, 55 bp, Artificial
  Synthetic oligonucleotide
ccgaacgattgaaggctactaaaatggcatacgatatgataacaccgcagtccct

SEQ ID NO: 361201 - DNA, 57 bp, Artificial
  Synthetic oligonucleotide
ccgaacgcaaacacagggtattattctacaacaaactatgactccgttaatatgaca

SEQ ID NO: 361202 - DNA, 56 bp, Artificial
  Synthetic oligonucleotide
ccgaacgggtcacgaaagctcgcaattggcaaactcatagtcccaacgaatttcga

SEQ ID NO: 361203 - DNA, 54 bp, Artificial
  Synthetic oligonucleotide
ccgaacgggtggaccattggacagtaacaggacccgggactgtgactctacaag

SEQ ID NO: 361204 - DNA, 53 bp, Artificial
  Synthetic oligonucleotide
ccgaacggttgtcattagatttagatcaatattctttgggacgtaaatttttg

SEQ ID NO: 361205 - DNA, 54 bp, Artificial
  Synthetic oligonucleotide
ccgaacgtacaaagcaattttgacgctcatgtgtcgatggttgtgtacggggat

SEQ ID NO: 361206 - DNA, 51 bp, Artificial
  Synthetic oligonucleotide
ccgaacgtccgaagtcggaaaccgcaaaaggcggcgtatcggacgaacaac

SEQ ID NO: 361207 - DNA, 53 bp, Artificial
  Synthetic oligonucleotide
ccgaacgtcctctcggctctttttcctcgcgtatcaccttggctcatcggatc

SEQ ID NO: 361208 - DNA, 55 bp, Artificial
  Synthetic oligonucleotide
ccgaacgtcgaccgggtcactcctctaacgctcgcctctcgcgtagccatggtct

SEQ ID NO: 361209 - DNA, 55 bp, Artificial
  Synthetic oligonucleotide
ccgaacgtgacgcatctgctgctaacttcgtcgataatgtgccattggcccagca

SEQ ID NO: 361210 - DNA, 57 bp, Artificial
  Synthetic oligonucleotide
ccgaacgtgcacactacctccagtgacgttccgtacggggacagactgttggtatgc

SEQ ID NO: 361211 - DNA, 56 bp, Artificial
  Synthetic oligonucleotide
ccgaactaagattttagctcagggggacaaccaagtgttgtgtcccacttatatgc

SEQ ID NO: 361212 - DNA, 58 bp, Artificial
  Synthetic oligonucleotide
ccgaactacgctgttcgacaaaacaaaccggtcattcagcatactgagctatggggaa

SEQ ID NO: 361213 - DNA, 55 bp, Artificial
  Synthetic oligonucleotide
ccgaactagacagcggtgtggcaggggtaaattctccgcattcggtgcgaagggg

SEQ ID NO: 361214 - DNA, 55 bp, Artificial
  Synthetic oligonucleotide
ccgaactagctgggctactctcgatgtcgtcagcttctaacggtgagtcaaggca

SEQ ID NO: 361215 - DNA, 59 bp, Artificial
  Synthetic oligonucleotide
ccgaactatggaccgttcacggaggttggccgcgcatgaggtacagcgagaatgtcggc

SEQ ID NO: 361216 - DNA, 55 bp, Artificial
  Synthetic oligonucleotide
ccgaactcaagaacgattggtctttcatttgggagttcgatgccgctcctgtagt

SEQ ID NO: 361217 - DNA, 60 bp, Artificial
  Synthetic oligonucleotide
ccgaactctactctctaccctgcgtgggagtgtgcagaattcacaccgatgggctcggtg

SEQ ID NO: 361218 - DNA, 55 bp, Artificial
  Synthetic oligonucleotide
ccgaactggaactgataacagggtccgttcatatatcaagctcacatgtcttacc

SEQ ID NO: 361219 - DNA, 60 bp, Artificial
  Synthetic oligonucleotide
ccgaactgtttggcgatccattctccagacaatatgcgcgtaagcaaatctgtgaaacac

SEQ ID NO: 361220 - DNA, 51 bp, Artificial
  Synthetic oligonucleotide
ccgaactttccaagttttaagtaaccaaaccaaccaacataacacaatcga

SEQ ID NO: 361221 - DNA, 52 bp, Artificial
  Synthetic oligonucleotide
ccgaagaaacatcaatgccccgttaaccgaaatttaataacgttatggactg

SEQ ID NO: 361222 - DNA, 55 bp, Artificial
  Synthetic oligonucleotide
ccgaagaaatttactgaccctgtcatggacgttatacatgagatggccccaccgc

SEQ ID NO: 361223 - DNA, 60 bp, Artificial
  Synthetic oligonucleotide
ccgaagaatctggtgatgactgcatatcaagaactcagctattgaggacagagactgcag

SEQ ID NO: 361224 - DNA, 51 bp, Artificial
  Synthetic oligonucleotide
ccgaagacagccttgaatcattacggacgacgaacaattacagtgtcgata

SEQ ID NO: 361225 - DNA, 55 bp, Artificial
  Synthetic oligonucleotide
ccgaagaccctgaacctgctatacttacagggtagttgagggacaccaatgcaca

SEQ ID NO: 361226 - DNA, 55 bp, Artificial
  Synthetic oligonucleotide
ccgaagagcgcaccactattaacaaagtccccactgaggaccattcggctctgaa

SEQ ID NO: 361227 - DNA, 58 bp, Artificial
  Synthetic oligonucleotide
ccgaagatgtaacaaacgtttcatgggtcgttgattcgcatgagataatcaaaataac

SEQ ID NO: 361228 - DNA, 58 bp, Artificial
  Synthetic oligonucleotide
ccgaagattgaaggagtgttctctcttgtaattgtggtggatcgtaaacctcatttga

SEQ ID NO: 361229 - DNA, 55 bp, Artificial
  Synthetic oligonucleotide
ccgaagcacgttaccccggaagtcacctggcactcgtgggacatcaaacgaggac

SEQ ID NO: 361230 - DNA, 54 bp, Artificial
  Synthetic oligonucleotide
ccgaagcctcgaggtggtcggtcagtaccagacgaccggacccggtagcttcac

SEQ ID NO: 361231 - DNA, 55 bp, Artificial
  Synthetic oligonucleotide
ccgaagcgactggcgagacagactttcccaccatgagagatatggcgtgaagtta

SEQ ID NO: 361232 - DNA, 55 bp, Artificial
  Synthetic oligonucleotide
ccgaagcgcaaattcaaaagatgtcacacgacttgcaactagaagcatttacaat

SEQ ID NO: 361233 - DNA, 50 bp, Artificial
  Synthetic oligonucleotide
ccgaagcggaggagtccccgaatcgcacgcacatctgagctaaccacagg

SEQ ID NO: 361234 - DNA, 55 bp, Artificial
  Synthetic oligonucleotide
ccgaagcgtatattgaaatgcgcaacaagagtgagccgtatatgccacgatacgg

SEQ ID NO: 361235 - DNA, 59 bp, Artificial
  Synthetic oligonucleotide
ccgaagctaagtgtacctagttcgtgagaatcacggcactttaatgccgtgagtgttca

SEQ ID NO: 361236 - DNA, 56 bp, Artificial
  Synthetic oligonucleotide
ccgaagctcgggcgttcatctgccgcccgtgctggtaaacctagtactagggctcg

SEQ ID NO: 361237 - DNA, 55 bp, Artificial
  Synthetic oligonucleotide
ccgaagcttgaagaggagcgaattgtatcaattctccaatgggaccgagcagagc

SEQ ID NO: 361238 - DNA, 55 bp, Artificial
  Synthetic oligonucleotide
ccgaaggaggttacatttgtgcattttatcaaacagcaatcatagtaccaccaag

SEQ ID NO: 361239 - DNA, 55 bp, Artificial
  Synthetic oligonucleotide
ccgaaggcaaccaaattgtgtatgtcctacctgacattatgatgacaattaagtc

SEQ ID NO: 361240 - DNA, 60 bp, Artificial
  Synthetic oligonucleotide
ccgaaggcaagctcatggccaaaccatgagacaactaaaggtgttacagctgcctgctct

SEQ ID NO: 361241 - DNA, 51 bp, Artificial
  Synthetic oligonucleotide
ccgaaggccgactggcagccctacacgggctgagaggactgggcggtcccc

SEQ ID NO: 361242 - DNA, 50 bp, Artificial
  Synthetic oligonucleotide
ccgaaggcgggtacccgaggtgagtttacacaccgaggttaagggccaat

SEQ ID NO: 361243 - DNA, 55 bp, Artificial
  Synthetic oligonucleotide
ccgaaggctcatctgttaaagcaggcttacgcagttcaaaacgcagctctcgccg

SEQ ID NO: 361244 - DNA, 55 bp, Artificial
  Synthetic oligonucleotide
ccgaagggaattttaacaatgaagacattgctatggctttcgtcttagggaccgc

SEQ ID NO: 361245 - DNA, 53 bp, Artificial
  Synthetic oligonucleotide
ccgaagggactcgaagctaaagagtggaaactcacgagaaggaggggttccca

SEQ ID NO: 361246 - DNA, 55 bp, Artificial
  Synthetic oligonucleotide
ccgaagggagttgaccggtcatttggatcatttgatagcctttaacctactaaca

SEQ ID NO: 361247 - DNA, 57 bp, Artificial
  Synthetic oligonucleotide
ccgaagggatccatatatggcgtaggaaccgaagggaataagctctctgcggagtat

SEQ ID NO: 361248 - DNA, 50 bp, Artificial
  Synthetic oligonucleotide
ccgaaggggacttggtagggtggcccagtcctcccgggaccaaatctttg

SEQ ID NO: 361249 - DNA, 54 bp, Artificial
  Synthetic oligonucleotide
ccgaaggggcgtattatccgcatcccttcgaattacgatccgatagcccgaacc

SEQ ID NO: 361250 - DNA, 55 bp, Artificial
  Synthetic oligonucleotide
ccgaagggtttaaaagatgctcgtaaaagcgtggatcttcggatgccaaggcgtc

SEQ ID NO: 361251 - DNA, 52 bp, Artificial
  Synthetic oligonucleotide
ccgaaggtaatcgaaatgaacttacgtcaggacaacgaaaggtcaacgtagg

SEQ ID NO: 361252 - DNA, 51 bp, Artificial
  Synthetic oligonucleotide
ccgaaggtagggaccccgttgaccttagagaaattagccttccttgcccta

SEQ ID NO: 361253 - DNA, 60 bp, Artificial
  Synthetic oligonucleotide
ccgaaggtcatgatgaagtttaagattccaagagctcaacagccgcagattcatgtatac

SEQ ID NO: 361254 - DNA, 57 bp, Artificial
  Synthetic oligonucleotide
ccgaaggtcctagtgttcctaataccactataaatggtatggcaccaacggtgcgca

SEQ ID NO: 361255 - DNA, 55 bp, Artificial
  Synthetic oligonucleotide
ccgaaggtggtgtctgcttacgtagacttttatacgaatttgcaggagttgctgt

SEQ ID NO: 361256 - DNA, 54 bp, Artificial
  Synthetic oligonucleotide
ccgaaggtgtcggtgttccaaaataggccggattatagacctatcgaatcaccc

SEQ ID NO: 361257 - DNA, 55 bp, Artificial
  Synthetic oligonucleotide
ccgaaggtgttttctcgctggtcatagtcgtcgaccgcaaacctcacatcggacc

SEQ ID NO: 361258 - DNA, 55 bp, Artificial
  Synthetic oligonucleotide
ccgaaggttcacaccagaaatagtagatagacctaaaatcagaggacaagcgggc

SEQ ID NO: 361259 - DNA, 49 bp, Artificial
  Synthetic oligonucleotide
ccgaagtaacgggggggggtcactaggaacacgggggaccagtggatcc

SEQ ID NO: 361260 - DNA, 50 bp, Artificial
  Synthetic oligonucleotide
ccgaagtaataagttgtttaacggggtccgacggtaggaatgtgggataa

SEQ ID NO: 361261 - DNA, 55 bp, Artificial
  Synthetic oligonucleotide
ccgaagtatgagtatatcctagataccatggcggacaattttcgtgaactgggct

SEQ ID NO: 361262 - DNA, 51 bp, Artificial
  Synthetic oligonucleotide
ccgaagtccaaacagacagttttggaattgtgcggaaaagagatgtcacgc

SEQ ID NO: 361263 - DNA, 55 bp, Artificial
  Synthetic oligonucleotide
ccgaagtcctgcgcttccgcagctatatcgactgttattgctggtggacctacag

SEQ ID NO: 361264 - DNA, 49 bp, Artificial
  Synthetic oligonucleotide
ccgaagtctccccaccacggacaatttaacggtgaccccgttccgttag

SEQ ID NO: 361265 - DNA, 55 bp, Artificial
  Synthetic oligonucleotide
ccgaagtgaaggccaattggaatatggtctgggacttcgataccgctcctgcgac

SEQ ID NO: 361266 - DNA, 50 bp, Artificial
  Synthetic oligonucleotide
ccgaagtgatgcgagaagcacctcccctggtcatgacaggacggggcatg

SEQ ID NO: 361267 - DNA, 55 bp, Artificial
  Synthetic oligonucleotide
ccgaagtggcatgacgttacgtatcaaacagtagacggtaactctcataaacgcc

SEQ ID NO: 361268 - DNA, 55 bp, Artificial
  Synthetic oligonucleotide
ccgaagtgggcgagtcggggccatggcccagagcggtgaaaacaaagcttttcaa

SEQ ID NO: 361269 - DNA, 54 bp, Artificial
  Synthetic oligonucleotide
ccgaagtggtagtaattacatttatataatgaggccgcagagactaaaccaggt

SEQ ID NO: 361270 - DNA, 60 bp, Artificial
  Synthetic oligonucleotide
ccgaagtggtcgtctacgggccggagcaccttgctgcgcacttcccactgaatcactaca

SEQ ID NO: 361271 - DNA, 60 bp, Artificial
  Synthetic oligonucleotide
ccgaagtgtaccacaagagtatctcacgcaggtgcacaagaacagtcacggcaatagttt

SEQ ID NO: 361272 - DNA, 54 bp, Artificial
  Synthetic oligonucleotide
ccgaagtgtggagacgagtcacattagtcgggttcaatcaagggtaccgtaccc

SEQ ID NO: 361273 - DNA, 55 bp, Artificial
  Synthetic oligonucleotide
ccgaagttacacctcacaaccaataagggtgtatctccggaacaagcagcggcta

SEQ ID NO: 361274 - DNA, 56 bp, Artificial
  Synthetic oligonucleotide
ccgaatacaacggtctgcgattggccatggcgcaagggttgccagtactatgtacc

SEQ ID NO: 361275 - DNA, 55 bp, Artificial
  Synthetic oligonucleotide
ccgaatacaatgcacgcgcccacttatatataacacgttgcgcgctaatgccaca

SEQ ID NO: 361276 - DNA, 54 bp, Artificial
  Synthetic oligonucleotide
ccgaatacgagttggccaggacccatcaagtttggagtcatccggcccgtaggg

SEQ ID NO: 361277 - DNA, 55 bp, Artificial
  Synthetic oligonucleotide
ccgaatactgactcgacgattgcactgatgatcatgcttctggagacatacgaag

SEQ ID NO: 361278 - DNA, 57 bp, Artificial
  Synthetic oligonucleotide
ccgaatagccaaattctgcgacccccttcaatacaactgtgagaccttgccagaacc

SEQ ID NO: 361279 - DNA, 52 bp, Artificial
  Synthetic oligonucleotide
ccgaatatatcggcatcatctacgagtagggatataaacaatcccgtaatcg

SEQ ID NO: 361280 - DNA, 58 bp, Artificial
  Synthetic oligonucleotide
ccgaatattcatttgcaccaggacattattaacaaatgtgaacaatttgtaggtcctc

SEQ ID NO: 361281 - DNA, 55 bp, Artificial
  Synthetic oligonucleotide
ccgaatattttcccttattcagcatcattcacactgaatagatcgcaaccagctc

SEQ ID NO: 361282 - DNA, 55 bp, Artificial
  Synthetic oligonucleotide
ccgaatcatcaatcatagtgcctgaaggggtcggatcattttggatccactggat

SEQ ID NO: 361283 - DNA, 57 bp, Artificial
  Synthetic oligonucleotide
ccgaatccaagttatttatgagaagacatactgtgttacaggtcaactagtggaagg

SEQ ID NO: 361284 - DNA, 55 bp, Artificial
  Synthetic oligonucleotide
ccgaatcccacaagccgtcttggacatgatcgctggtgcccactggggagtcctg

SEQ ID NO: 361285 - DNA, 50 bp, Artificial
  Synthetic oligonucleotide
ccgaatccggtcccccgtccgtgtgagggttggagtacgactctcggacc

SEQ ID NO: 361286 - DNA, 56 bp, Artificial
  Synthetic oligonucleotide
ccgaatcctcgagatgaacgggtacgatccgcagtacgcggcctccgtcttcctgg

SEQ ID NO: 361287 - DNA, 52 bp, Artificial
  Synthetic oligonucleotide
ccgaatcctgtcccgctactgctgaggtgggacaatgatttaccatcaaaag

SEQ ID NO: 361288 - DNA, 55 bp, Artificial
  Synthetic oligonucleotide
ccgaatcgactatatctgattgaacactcaatttcagcagtaacttccaacactc

SEQ ID NO: 361289 - DNA, 55 bp, Artificial
  Synthetic oligonucleotide
ccgaatcgcagcagatcatatattaaactgaaacgactgcgtttcaagggaactg

SEQ ID NO: 361290 - DNA, 58 bp, Artificial
  Synthetic oligonucleotide
ccgaatcggacgatttccaactttgaattcctcacaagttgagaccattggtcgatca

SEQ ID NO: 361291 - DNA, 60 bp, Artificial
  Synthetic oligonucleotide
ccgaatctgtatcccggcgcactcaggcctacccactatcggatctccaagccgcactac

SEQ ID NO: 361292 - DNA, 55 bp, Artificial
  Synthetic oligonucleotide
ccgaatgaagtgtttatggcaattaaacagtttaggtactcatgtttagctgagg

SEQ ID NO: 361293 - DNA, 58 bp, Artificial
  Synthetic oligonucleotide
ccgaatgattattggatactaattaactcgaattctaatggtgtagtgcttgagggta

SEQ ID NO: 361294 - DNA, 55 bp, Artificial
  Synthetic oligonucleotide
ccgaatgcaacaagagcttaacctgaacgaacttgaacactttatcgacaccgat

SEQ ID NO: 361295 - DNA, 55 bp, Artificial
  Synthetic oligonucleotide
ccgaatggaatatgggcctggactggggatgagtcggggaaagaaggactcaggc

SEQ ID NO: 361296 - DNA, 55 bp, Artificial
  Synthetic oligonucleotide
ccgaatggccgcgcaaattttttaggtgggccctcaaccaatgaaattcacgcta

SEQ ID NO: 361297 - DNA, 58 bp, Artificial
  Synthetic oligonucleotide
ccgaatgggacgatagttaagacaattacggatgaccaaattgaggtgaccaatgcca

SEQ ID NO: 361298 - DNA, 60 bp, Artificial
  Synthetic oligonucleotide
ccgaatgggatcagatgcacccccagataggtccattaccagcaggacagctgagggagc

SEQ ID NO: 361299 - DNA, 55 bp, Artificial
  Synthetic oligonucleotide
ccgaatggttactcgttcaggatcctgcgacacattctgagatcattcgacgaga

SEQ ID NO: 361300 - DNA, 55 bp, Artificial
  Synthetic oligonucleotide
ccgaatggttgcaatcatgcgtggattcaaagagtgcaccatttagtcaacatcg

SEQ ID NO: 361301 - DNA, 55 bp, Artificial
  Synthetic oligonucleotide
ccgaatgtattgtgtacgtgcgagttgtcgatgagtgatagatatgtggcgaccg

SEQ ID NO: 361302 - DNA, 55 bp, Artificial
  Synthetic oligonucleotide
ccgaatgtctctacaagtttattgagcacttgtacggttaagcaagcgcggacga

SEQ ID NO: 361303 - DNA, 55 bp, Artificial
  Synthetic oligonucleotide
ccgaatgttgcttgcgtgaatttatcacgatactgcacgttttggccacaccgtt

SEQ ID NO: 361304 - DNA, 55 bp, Artificial
  Synthetic oligonucleotide
ccgaattatgtgggcgacttgaatctagatgatcagtccaaagggaatgtttgtc

SEQ ID NO: 361305 - DNA, 60 bp, Artificial
  Synthetic oligonucleotide
ccgaattgacaacgagccatgcattgtccatggactgtcgcattaaatgtctgggttgta

SEQ ID NO: 361306 - DNA, 55 bp, Artificial
  Synthetic oligonucleotide
ccgaattgagttatacaaaattcgtgccggtcctttctcgaagtagtcttcattg

SEQ ID NO: 361307 - DNA, 55 bp, Artificial
  Synthetic oligonucleotide
ccgaattgccagacgttgtagactccctagtgacaaccgcattcatagcacagcg

SEQ ID NO: 361308 - DNA, 55 bp, Artificial
  Synthetic oligonucleotide
ccgaattggccaactccacgttcgtcgtggatggacccgagacaaaggaatgccc

SEQ ID NO: 361309 - DNA, 55 bp, Artificial
  Synthetic oligonucleotide
ccgaattgtattgtgtgagcctcgactttaataggtcaaaagtttgaactccacc

SEQ ID NO: 361310 - DNA, 51 bp, Artificial
  Synthetic oligonucleotide
ccgaatttcccagggagccgggtggtctttgaaggagacggcttgtttggg

SEQ ID NO: 361311 - DNA, 59 bp, Artificial
  Synthetic oligonucleotide
ccgacaaaaatgctggtgtcggaattcctgtctcatttcagcgtcgtactggtgacgct

SEQ ID NO: 361312 - DNA, 60 bp, Artificial
  Synthetic oligonucleotide
ccgacaaaatccctgcaatgttgaagcactggatggatgaaaaatccttctcggatgagc

SEQ ID NO: 361313 - DNA, 57 bp, Artificial
  Synthetic oligonucleotide
ccgacaaaggtggattaatacctttttgccaggatatcattgattcattagaccgac

SEQ ID NO: 361314 - DNA, 55 bp, Artificial
  Synthetic oligonucleotide
ccgacaacaaccttcgccacaaactcgtcgtattttcgagcattggcaatcgcga

SEQ ID NO: 361315 - DNA, 55 bp, Artificial
  Synthetic oligonucleotide
ccgacaaccggatcctggatctcgacttccccggagttgtcgtctgcaagcaggc

SEQ ID NO: 361316 - DNA, 55 bp, Artificial
  Synthetic oligonucleotide
ccgacaacctaccactaggcatgactttcaccgcaccaaataagcttaccttcgg

SEQ ID NO: 361317 - DNA, 58 bp, Artificial
  Synthetic oligonucleotide
ccgacaacctagtgatgatagctggctgaattttgatgggacgcttttaggaaattta

SEQ ID NO: 361318 - DNA, 54 bp, Artificial
  Synthetic oligonucleotide
ccgacaacgtgccaccaacatgacccctgaaaacatccggttccgccagggacc

SEQ ID NO: 361319 - DNA, 54 bp, Artificial
  Synthetic oligonucleotide
ccgacaagggtaacgtcgtgttcgcgactccggccctatatctgatacggtcgt

SEQ ID NO: 361320 - DNA, 54 bp, Artificial
  Synthetic oligonucleotide
ccgacacagacgtattgacgtccatgctaacagacccatcccatattacggcgg

SEQ ID NO: 361321 - DNA, 55 bp, Artificial
  Synthetic oligonucleotide
ccgacacagcagtactgaaatgtcagaaacgaagctacgtcactcagtcaacgcg

SEQ ID NO: 361322 - DNA, 55 bp, Artificial
  Synthetic oligonucleotide
ccgacacatcgtcctaacaaggttcatagcctcatatcgaaccacccgtacggga

SEQ ID NO: 361323 - DNA, 60 bp, Artificial
  Synthetic oligonucleotide
ccgacaccagatgcatgcagagcagcatataactggaagatggcaggtgaccccagatat

SEQ ID NO: 361324 - DNA, 59 bp, Artificial
  Synthetic oligonucleotide
ccgacaccattaaaagctggaggggtgacatactaagaacacaggagtctgaatgtgcc

SEQ ID NO: 361325 - DNA, 56 bp, Artificial
  Synthetic oligonucleotide
ccgacacccaatcggggccaatctcacaccaggtgattgtcaacaaccaaaattgg

SEQ ID NO: 361326 - DNA, 59 bp, Artificial
  Synthetic oligonucleotide
ccgacaccgcatccacgtacgtgccaattacagtgacggtggccccaatgtgtgcggag

SEQ ID NO: 361327 - DNA, 55 bp, Artificial
  Synthetic oligonucleotide
ccgacacgaccgattcaattaatctcttgtacgtgacaattgatgcgttcgacac

SEQ ID NO: 361328 - DNA, 53 bp, Artificial
  Synthetic oligonucleotide
ccgacacgagggtaccacttgtgtaatcgacaaccaccatcttaaaagtctag

SEQ ID NO: 361329 - DNA, 57 bp, Artificial
  Synthetic oligonucleotide
ccgacactgacaatcacttccatccgtccccgcttattgggcggtttggctgcaagc

SEQ ID NO: 361330 - DNA, 55 bp, Artificial
  Synthetic oligonucleotide
ccgacactgcaatcacccacagttgaggcttgtggatactcggatagaatcatac

SEQ ID NO: 361331 - DNA, 57 bp, Artificial
  Synthetic oligonucleotide
ccgacactgcgatcacctctgtaagaaggttagggcggagccaatacacggcctgtt

SEQ ID NO: 361332 - DNA, 55 bp, Artificial
  Synthetic oligonucleotide
ccgacactgttgacacagtactcgaaaagaatgtgacagtaacacactctgtaaa

SEQ ID NO: 361333 - DNA, 55 bp, Artificial
  Synthetic oligonucleotide
ccgacacttcgaggtcttggataatcggcgcttcccgagtcagatggggagtcgc

SEQ ID NO: 361334 - DNA, 60 bp, Artificial
  Synthetic oligonucleotide
ccgacagaagagagtgttgacgcaattaagactgcaaatgaaggacgatgtgaatttctc

SEQ ID NO: 361335 - DNA, 60 bp, Artificial
  Synthetic oligonucleotide
ccgacagaggagcaagccgtggatatatgcaaggcggcaatgggcttgaggattagctca

SEQ ID NO: 361336 - DNA, 55 bp, Artificial
  Synthetic oligonucleotide
ccgacaggaatttgggatcccctacaatcctcaaagtcaaggagtagtagaatct

SEQ ID NO: 361337 - DNA, 55 bp, Artificial
  Synthetic oligonucleotide
ccgacaggacgtcactcgcgctattgaaacgtatctcagattggctgaagcaact

SEQ ID NO: 361338 - DNA, 55 bp, Artificial
  Synthetic oligonucleotide
ccgacagggatggcgatcctggattacgtgaacatgcgtcaccaggaattggaag

SEQ ID NO: 361339 - DNA, 52 bp, Artificial
  Synthetic oligonucleotide
ccgacagggtaatagacccaaggcggtgcttgaaaccggtaatactaaaaga

SEQ ID NO: 361340 - DNA, 55 bp, Artificial
  Synthetic oligonucleotide
ccgacaggtgatgcctttcaaccttaggttacctaggttgtcactgacaaccaaa

SEQ ID NO: 361341 - DNA, 52 bp, Artificial
  Synthetic oligonucleotide
ccgacagtaccaccaggttttgaagacgttaacctgaggaaaggaaagacag

SEQ ID NO: 361342 - DNA, 55 bp, Artificial
  Synthetic oligonucleotide
ccgacatcgaccacttgacgctgaaacagtcggatttggtccccagggttgatgg

SEQ ID NO: 361343 - DNA, 53 bp, Artificial
  Synthetic oligonucleotide
ccgacatcggtggtagtctcgcggccgaacacccaagcctcgggagggccaat

SEQ ID NO: 361344 - DNA, 51 bp, Artificial
  Synthetic oligonucleotide
ccgacatctcatgtgcgtggttaactcgacttaggaagaaggttttcgtca

SEQ ID NO: 361345 - DNA, 53 bp, Artificial
  Synthetic oligonucleotide
ccgacatgactgcacttacgggaaccgtatgccgcgtgtctaagcactctcgt

SEQ ID NO: 361346 - DNA, 58 bp, Artificial
  Synthetic oligonucleotide
ccgacatgcaatcctgggtccccctatcaacggatgacccagtgatagacgggctcta

SEQ ID NO: 361347 - DNA, 55 bp, Artificial
  Synthetic oligonucleotide
ccgacattgcttttgcatgggaccaccaagagttagtgctcttcgactttccacg

SEQ ID NO: 361348 - DNA, 60 bp, Artificial
  Synthetic oligonucleotide
ccgacattgtgaactcaaccacagtgaccggcgacatcagcttcagactggaacaagacc

SEQ ID NO: 361349 - DNA, 56 bp, Artificial
  Synthetic oligonucleotide
ccgaccaaagtacaggtcaattccgcacgcctatcttaacaggctatggatttttg

SEQ ID NO: 361350 - DNA, 55 bp, Artificial
  Synthetic oligonucleotide
ccgaccaacggagatggcagtgaaccgtctgctcggcgagtgaagcgcgactcat

SEQ ID NO: 361351 - DNA, 55 bp, Artificial
  Synthetic oligonucleotide
ccgaccaactgcggtgcgaaatcgcactcgtatgtcacgttgtgaacagccgcgc

SEQ ID NO: 361352 - DNA, 55 bp, Artificial
  Synthetic oligonucleotide
ccgaccaagacaacagtttcaagtgatgaacatcgaacgtctaaactggatccgt

SEQ ID NO: 361353 - DNA, 54 bp, Artificial
  Synthetic oligonucleotide
ccgaccaatagaggcgttgtagccagcagcgcaacggtcaagcacttctgtttc

SEQ ID NO: 361354 - DNA, 57 bp, Artificial
  Synthetic oligonucleotide
ccgaccacaggaacatcaactgttgcttttacaggctatggaaactttggcttagag

SEQ ID NO: 361355 - DNA, 57 bp, Artificial
  Synthetic oligonucleotide
ccgaccaccccgtcaatgtcttaattggcgagcacctccgtggggaggtcaatgaca

SEQ ID NO: 361356 - DNA, 53 bp, Artificial
  Synthetic oligonucleotide
ccgaccactcattgtaatagtgaggtttgtcggaaaccagttattgtgcagcg

SEQ ID NO: 361357 - DNA, 55 bp, Artificial
  Synthetic oligonucleotide
ccgaccaggtcttttacaaatacggcaacgacgctcacaactgtacgctcgcaag

SEQ ID NO: 361358 - DNA, 55 bp, Artificial
  Synthetic oligonucleotide
ccgaccatacatccaaggcagatccagtgccgcgggtgatttctccccgtgatcc

SEQ ID NO: 361359 - DNA, 55 bp, Artificial
  Synthetic oligonucleotide
ccgaccatggaaactttacagagacccgacggtggattcacctcaagacatatcg

SEQ ID NO: 361360 - DNA, 50 bp, Artificial
  Synthetic oligonucleotide
ccgacccaaataagtttggtctcccagatgcacgcatctataatcctgac

SEQ ID NO: 361361 - DNA, 55 bp, Artificial
  Synthetic oligonucleotide
ccgacccaacaaaatgctatggtgcaaattcaggtggtattctacgtttccatgg

SEQ ID NO: 361362 - DNA, 58 bp, Artificial
  Synthetic oligonucleotide
ccgacccaagattggtcccgagacactccagaattccaacaagacagcaagttagaga

SEQ ID NO: 361363 - DNA, 55 bp, Artificial
  Synthetic oligonucleotide
ccgacccaccgaggatgggttgaggataagcaactcctaccgatattggctcgtc

SEQ ID NO: 361364 - DNA, 55 bp, Artificial
  Synthetic oligonucleotide
ccgacccagggcgacttgggctgagaacatctgggtggctgtccaccaagtcaga

SEQ ID NO: 361365 - DNA, 55 bp, Artificial
  Synthetic oligonucleotide
ccgacccagttttcaccaggattggggctatgtttgaacaggatcagaacaacag

SEQ ID NO: 361366 - DNA, 55 bp, Artificial
  Synthetic oligonucleotide
ccgacccatttgagtggctccaagataagattatgaattgcatttcgcttcgaag

SEQ ID NO: 361367 - DNA, 55 bp, Artificial
  Synthetic oligonucleotide
ccgaccccaagcgatgttatggacgctgctgttatggccttaaaagacgcaaccg

SEQ ID NO: 361368 - DNA, 55 bp, Artificial
  Synthetic oligonucleotide
ccgaccccatctccactctcaacgaatacacagactcgcttattattatagcccc

SEQ ID NO: 361369 - DNA, 53 bp, Artificial
  Synthetic oligonucleotide
ccgaccccttaccgactttgcccagggctggggccctattagccatgccaacg

SEQ ID NO: 361370 - DNA, 59 bp, Artificial
  Synthetic oligonucleotide
ccgacccgaataatcacgaggtatacataatagctacactagcagttgatcccaccaca

SEQ ID NO: 361371 - DNA, 55 bp, Artificial
  Synthetic oligonucleotide
ccgacccgctaaacgttaccgggaggcgcatacggtccgtcactgaactctcagc

SEQ ID NO: 361372 - DNA, 51 bp, Artificial
  Synthetic oligonucleotide
ccgacccgggaaggaggtaaggatctccgtaaagtgtgcccgacagagcac

SEQ ID NO: 361373 - DNA, 53 bp, Artificial
  Synthetic oligonucleotide
ccgacccgtctcggactctttggagcctctcctttgaccgagggatacgtggt

SEQ ID NO: 361374 - DNA, 55 bp, Artificial
  Synthetic oligonucleotide
ccgacccgtttcggactctttggagcttctccattgactgaaggatacgtggttc

SEQ ID NO: 361375 - DNA, 55 bp, Artificial
  Synthetic oligonucleotide
ccgaccctattcttggtgtaggaagatgaagttctactcaaatcaacgtcgaagt

SEQ ID NO: 361376 - DNA, 55 bp, Artificial
  Synthetic oligonucleotide
ccgacccttcctaccagggatctatcagtgcgtctcgggaccctgccatcacacc

SEQ ID NO: 361377 - DNA, 54 bp, Artificial
  Synthetic oligonucleotide
ccgaccgaacacagtgagtgaagcccctgggacacgcgcccgggggcttcgccc

SEQ ID NO: 361378 - DNA, 55 bp, Artificial
  Synthetic oligonucleotide
ccgaccgacagacacgaaaggatcagttcgcattctctacgtatcaacggcagcg

SEQ ID NO: 361379 - DNA, 55 bp, Artificial
  Synthetic oligonucleotide
ccgaccgagacgaaatgctacagtcgatacggctcgttgcacgcaaatctggcgt

SEQ ID NO: 361380 - DNA, 55 bp, Artificial
  Synthetic oligonucleotide
ccgaccgagcttcaccactacgagatcaggctcaagaccgtagaggggtgatccc

SEQ ID NO: 361381 - DNA, 56 bp, Artificial
  Synthetic oligonucleotide
ccgaccgagtcaagagccacacttttttcgagtctacgatgataagaaatggtttg

SEQ ID NO: 361382 - DNA, 55 bp, Artificial
  Synthetic oligonucleotide
ccgaccgtatatcacgaccgatctagtacgggataaatatatctttcgcaggggt

SEQ ID NO: 361383 - DNA, 55 bp, Artificial
  Synthetic oligonucleotide
ccgaccgtatggagaaaatttccgacaagaggtgatccactgagggtttgcggaa

SEQ ID NO: 361384 - DNA, 54 bp, Artificial
  Synthetic oligonucleotide
ccgaccgtccacggggcgcacctctctttacgcggactccccgtctgtgccttc

SEQ ID NO: 361385 - DNA, 55 bp, Artificial
  Synthetic oligonucleotide
ccgaccgtcgggatgcgtgtagataccgtcgcgacaagacactatggcctccgag

SEQ ID NO: 361386 - DNA, 59 bp, Artificial
  Synthetic oligonucleotide
ccgaccgtggcgaactaccagataaccgatgagtatgacgcttatctggacttggtcga

SEQ ID NO: 361387 - DNA, 51 bp, Artificial
  Synthetic oligonucleotide
ccgaccgttacccgttgcgggttgaatttaaaggcggtatgactcagtttg

SEQ ID NO: 361388 - DNA, 50 bp, Artificial
  Synthetic oligonucleotide
ccgacctaatctcattcaaaattcccgagtgcatcgagctgcctcaatcc

SEQ ID NO: 361389 - DNA, 55 bp, Artificial
  Synthetic oligonucleotide
ccgacctagtgcttcaacccggactaaacattgttcgcctacatattaaagtagc

SEQ ID NO: 361390 - DNA, 52 bp, Artificial
  Synthetic oligonucleotide
ccgacctgaagagcacacagaatgccattgacgagattactaacaaagtaaa

SEQ ID NO: 361391 - DNA, 55 bp, Artificial
  Synthetic oligonucleotide
ccgacctgatgtatggtatgacattcaaggccgtcgcttcgtgcgtggccgagac

SEQ ID NO: 361392 - DNA, 55 bp, Artificial
  Synthetic oligonucleotide
ccgacctgccaaccccttcatctgacttcatccccgaagtctccccaccacggac

SEQ ID NO: 361393 - DNA, 58 bp, Artificial
  Synthetic oligonucleotide
ccgacctggtgcccctctttgagaacacacacgttagttacgcctgctggcaagagga

SEQ ID NO: 361394 - DNA, 55 bp, Artificial
  Synthetic oligonucleotide
ccgaccttcaatctggaatggcaaagcaccgacagcttgttgataacccctcagg

SEQ ID NO: 361395 - DNA, 55 bp, Artificial
  Synthetic oligonucleotide
ccgacgaacagaatagagactactgttcgaaggaacgggtgcttctcgagcacgg

SEQ ID NO: 361396 - DNA, 60 bp, Artificial
  Synthetic oligonucleotide
ccgacgacgaagaatggacagaaaatatggccaaggacatactgcattcacgtcagggcg

SEQ ID NO: 361397 - DNA, 55 bp, Artificial
  Synthetic oligonucleotide
ccgacgaggaacgtgcgctgattcgcactgaattggcagctctactggcggatcc

SEQ ID NO: 361398 - DNA, 55 bp, Artificial
  Synthetic oligonucleotide
ccgacgagtggtggcacgaacccgaagaggtgaacgcgatgtacccgcatgagca

SEQ ID NO: 361399 - DNA, 55 bp, Artificial
  Synthetic oligonucleotide
ccgacgattggcggtggttctgatgcttcgattgtttcactaaatcttgtgagcc

SEQ ID NO: 361400 - DNA, 52 bp, Artificial
  Synthetic oligonucleotide
ccgacgcaatttatgattctttgaatttaaaagcggcagttggggccttgta

SEQ ID NO: 361401 - DNA, 50 bp, Artificial
  Synthetic oligonucleotide
ccgacgcacgcggaccagagcgctagatcccagggggcctacgaacctag

SEQ ID NO: 361402 - DNA, 55 bp, Artificial
  Synthetic oligonucleotide
ccgacgcagcctcttcaatatcaagaggagcatccattcgttcagtgggatcatc

SEQ ID NO: 361403 - DNA, 55 bp, Artificial
  Synthetic oligonucleotide
ccgacgccgctacttctaccgacccagacgttatagaagacgatggcttacaacc

SEQ ID NO: 361404 - DNA, 59 bp, Artificial
  Synthetic oligonucleotide
ccgacgcctctattcagttcgtgattctcctcggcgaccccatccaaggcgagtatcac

SEQ ID NO: 361405 - DNA, 55 bp, Artificial
  Synthetic oligonucleotide
ccgacgctcccagtttcttggtagcgttcaccacaacggcagcgtccgccgtgtt

SEQ ID NO: 361406 - DNA, 60 bp, Artificial
  Synthetic oligonucleotide
ccgacgctttggagccatgttgacttagtcaatcggtgtctgaccgctcttactatgtat

SEQ ID NO: 361407 - DNA, 57 bp, Artificial
  Synthetic oligonucleotide
ccgacgggataaaaacttgacgttgtctgagagataaattactgttagcgctcttga

SEQ ID NO: 361408 - DNA, 54 bp, Artificial
  Synthetic oligonucleotide
ccgacgggttgccgctgttaccactaataagcctgccgtccggtaggaagcgga

SEQ ID NO: 361409 - DNA, 55 bp, Artificial
  Synthetic oligonucleotide
ccgacggtcactttactggtagtacagattgggcacgtgtaggtggaacaggact

SEQ ID NO: 361410 - DNA, 55 bp, Artificial
  Synthetic oligonucleotide
ccgacggtcatgcgagattattttgagcatacattaaagacgttcgcacgcacac

SEQ ID NO: 361411 - DNA, 55 bp, Artificial
  Synthetic oligonucleotide
ccgacggtgggctagcatgcatgaggtccttaattgactcgcgggccctcatgga

SEQ ID NO: 361412 - DNA, 56 bp, Artificial
  Synthetic oligonucleotide
ccgacggtggttaacacttgtgcctaaaggagtcgagtggattactgacgacacca

SEQ ID NO: 361413 - DNA, 53 bp, Artificial
  Synthetic oligonucleotide
ccgacggttggacccacccaaagacgaaacccggttgtacacaggcaacatca

SEQ ID NO: 361414 - DNA, 55 bp, Artificial
  Synthetic oligonucleotide
ccgacgtaatatatcgtttcttcacgtccagcggtaacgtcaacgacaactgcgc

SEQ ID NO: 361415 - DNA, 55 bp, Artificial
  Synthetic oligonucleotide
ccgacgtatcagttaatagtgcattcggagagagcgtcgacttcagataacttcg

SEQ ID NO: 361416 - DNA, 58 bp, Artificial
  Synthetic oligonucleotide
ccgacgtcctgttgataagccacaagactttggagaggtgttcaatatgtttgacaac

SEQ ID NO: 361417 - DNA, 55 bp, Artificial
  Synthetic oligonucleotide
ccgacgtctcaccgattttgaccagggctggggccctatcagtcatgccagcgga

SEQ ID NO: 361418 - DNA, 60 bp, Artificial
  Synthetic oligonucleotide
ccgacgtgacgacagcactctctgtcccaggcgctgacgtggagcgctaccgtttgatcg

SEQ ID NO: 361419 - DNA, 55 bp, Artificial
  Synthetic oligonucleotide
ccgacgtgccaaggggttgtgaaggaccttgtaaggtgcaatcatttgaatccag

SEQ ID NO: 361420 - DNA, 55 bp, Artificial
  Synthetic oligonucleotide
ccgacgtggactcccgtggtgcaatactgcgccgccagtacaatttgtccacgtc

SEQ ID NO: 361421 - DNA, 53 bp, Artificial
  Synthetic oligonucleotide
ccgacgtggtaaactttgtaagtatggagttttccctcactgacccgagactg

SEQ ID NO: 361422 - DNA, 57 bp, Artificial
  Synthetic oligonucleotide
ccgacgtggtaaactttgtgagcatggaattttctcttactgacccgaggctggagc

SEQ ID NO: 361423 - DNA, 54 bp, Artificial
  Synthetic oligonucleotide
ccgacgtgtgggcgccgtctaacgtgcctaacttaaccgctccgagcgaattag

SEQ ID NO: 361424 - DNA, 60 bp, Artificial
  Synthetic oligonucleotide
ccgacgttcctcgagattccgtgccctctatggatgacttggtggatgacctgtgagctt

SEQ ID NO: 361425 - DNA, 60 bp, Artificial
  Synthetic oligonucleotide
ccgacgttgaccgactgttgtgatgtcgatgcattgtcgactgaagtagtcgataagttc

SEQ ID NO: 361426 - DNA, 57 bp, Artificial
  Synthetic oligonucleotide
ccgacgttggacagcgagctgtcccacatacccggctcgccgttgtggacggctccc

SEQ ID NO: 361427 - DNA, 55 bp, Artificial
  Synthetic oligonucleotide
ccgacgttgtggatggcgtcaatcacaagctggatgttacaacagcaacttgcac

SEQ ID NO: 361428 - DNA, 55 bp, Artificial
  Synthetic oligonucleotide
ccgacgtttcatcgtagtattcaccgaccacttccgaccagaagccatagttgtc

SEQ ID NO: 361429 - DNA, 51 bp, Artificial
  Synthetic oligonucleotide
ccgacgtttgctgtttccacgtgtatggtattaaaaaattgcggagtgtta

SEQ ID NO: 361430 - DNA, 53 bp, Artificial
  Synthetic oligonucleotide
ccgactaaaacaaaaagatggggttattccctacatttcatgggttatgtgat

SEQ ID NO: 361431 - DNA, 52 bp, Artificial
  Synthetic oligonucleotide
ccgactaatagagtccaatttttccgaagaacaggccgaggaattacaaaat

SEQ ID NO: 361432 - DNA, 55 bp, Artificial
  Synthetic oligonucleotide
ccgactaatccgaaagtgatatgggaagtgcctaggagctcgatatcaaacttag

SEQ ID NO: 361433 - DNA, 60 bp, Artificial
  Synthetic oligonucleotide
ccgactacatcattatagagacagatgcgtcagaagaaggctggggagcagtcttagtct

SEQ ID NO: 361434 - DNA, 51 bp, Artificial
  Synthetic oligonucleotide
ccgactacgagcaagatctccttaattgtatcgagaattgtgagatacttt

SEQ ID NO: 361435 - DNA, 55 bp, Artificial
  Synthetic oligonucleotide
ccgactacgatcacaggtggatgactcaccaggcaatgccgtgagagacgcctgt

SEQ ID NO: 361436 - DNA, 55 bp, Artificial
  Synthetic oligonucleotide
ccgactacttggtcagtcatggaattcaggccctgccaggacggcgatattctac

SEQ ID NO: 361437 - DNA, 57 bp, Artificial
  Synthetic oligonucleotide
ccgactagcgcccgtgcacgtagggcctttaatcttactactctaaccaggtcatca

SEQ ID NO: 361438 - DNA, 54 bp, Artificial
  Synthetic oligonucleotide
ccgactagtcttgaaccgtggaaagactctaaagagtccacgtatcgccaaact

SEQ ID NO: 361439 - DNA, 56 bp, Artificial
  Synthetic oligonucleotide
ccgactataccggaaagacagtgtggtttgttcctagcgtgaagatgggaaatgaa

SEQ ID NO: 361440 - DNA, 55 bp, Artificial
  Synthetic oligonucleotide
ccgactatgcattcagggatgtggtgcaccttgggcgtcccgtttatgagcgcgg

SEQ ID NO: 361441 - DNA, 57 bp, Artificial
  Synthetic oligonucleotide
ccgactcaactgttcgcagcctcgccgtccgacctcgtgaccgtgggcggcctgtgg

SEQ ID NO: 361442 - DNA, 60 bp, Artificial
  Synthetic oligonucleotide
ccgactcattgagaacagctttagtagcggctttcaatggaaaggtgtatgattgcctgc

SEQ ID NO: 361443 - DNA, 54 bp, Artificial
  Synthetic oligonucleotide
ccgactccaatgcgccacggccgtttttcattcaatgggagttttgtagaaacc

SEQ ID NO: 361444 - DNA, 57 bp, Artificial
  Synthetic oligonucleotide
ccgactccgcaccgatacgtcgcaccagtgaactggttcgcttagaacctttgcacg

SEQ ID NO: 361445 - DNA, 60 bp, Artificial
  Synthetic oligonucleotide
ccgactccgccctctgatgggagagcgaagaagaggtcagattgacgaggctctgaggtc

SEQ ID NO: 361446 - DNA, 55 bp, Artificial
  Synthetic oligonucleotide
ccgactccgttcttaggtgggccggacgaatgggattcagaagccgcaccgacga

SEQ ID NO: 361447 - DNA, 52 bp, Artificial
  Synthetic oligonucleotide
ccgactcgacgtataagttaaagtacgaatcgaacacgtacgatttagggac

SEQ ID NO: 361448 - DNA, 55 bp, Artificial
  Synthetic oligonucleotide
ccgactcgctatacatagcaggaggaaagcaattttggacaagagtgaaagcaca

SEQ ID NO: 361449 - DNA, 55 bp, Artificial
  Synthetic oligonucleotide
ccgactcggccacttgcagaaaacgtacataagcagttatcgcaggcaccgttcc

SEQ ID NO: 361450 - DNA, 55 bp, Artificial
  Synthetic oligonucleotide
ccgactctaattggaattgagtgtcctaaggatgagaagttaccacatcggaaga

SEQ ID NO: 361451 - DNA, 55 bp, Artificial
  Synthetic oligonucleotide
ccgactctggcaaagatgttttgtgtggaaaccacgtgaatgagcccaaggtcct

SEQ ID NO: 361452 - DNA, 54 bp, Artificial
  Synthetic oligonucleotide
ccgactcttgatggaccttatcaaccaacaacttttaaacctgacgttggctat

SEQ ID NO: 361453 - DNA, 55 bp, Artificial
  Synthetic oligonucleotide
ccgactgacgaggtttataatctcgtgtcgaatgccagttatattcccgagggtg

SEQ ID NO: 361454 - DNA, 51 bp, Artificial
  Synthetic oligonucleotide
ccgactgacgtcagatgacgtagacaggacttagaataattcggaccagcc

SEQ ID NO: 361455 - DNA, 60 bp, Artificial
  Synthetic oligonucleotide
ccgactgcccaatcgactatgaaggcagaggagttgacccctggtcgattccgcaccata

SEQ ID NO: 361456 - DNA, 59 bp, Artificial
  Synthetic oligonucleotide
ccgactgcgcagccaaatgccgttctgtagcactggactatttccgtttcaccggactg

SEQ ID NO: 361457 - DNA, 60 bp, Artificial
  Synthetic oligonucleotide
ccgactgctgttaataagactcatgacgacacaaagatgtcactacaacgtctacacgag

SEQ ID NO: 361458 - DNA, 55 bp, Artificial
  Synthetic oligonucleotide
ccgactggactaatttggcgactgcattaaccaacgggacattcagtgcgacgca

SEQ ID NO: 361459 - DNA, 55 bp, Artificial
  Synthetic oligonucleotide
ccgactggtagtactctgagacctcgtcttcgctcagaccctcttcgtcatcgct

SEQ ID NO: 361460 - DNA, 52 bp, Artificial
  Synthetic oligonucleotide
ccgactggtcttatgacgacattcccccacgacccaagcgggcccgggtaaa

SEQ ID NO: 361461 - DNA, 56 bp, Artificial
  Synthetic oligonucleotide
ccgactgtagtgtataactatttgagttccagagctccaaactttctaaggttgga

SEQ ID NO: 361462 - DNA, 55 bp, Artificial
  Synthetic oligonucleotide
ccgactgtcacagatacgttgcatgtggaacgagccgttccagcgacaataacgt

SEQ ID NO: 361463 - DNA, 50 bp, Artificial
  Synthetic oligonucleotide
ccgactgtgcatggggagcccgtacatctggacagcacccgagatcgata

SEQ ID NO: 361464 - DNA, 59 bp, Artificial
  Synthetic oligonucleotide
ccgactgttaagctgtatacatctgtggagaacgctcagcaggataagggtattgcaat

SEQ ID NO: 361465 - DNA, 55 bp, Artificial
  Synthetic oligonucleotide
ccgacttcttcctacacctagaagtacgactcccaccacaaggatgtaccgcaag

SEQ ID NO: 361466 - DNA, 55 bp, Artificial
  Synthetic oligonucleotide
ccgacttgaataaatccgcttcgcaggtccttagtttaaacgacatgactgttgt

SEQ ID NO: 361467 - DNA, 55 bp, Artificial
  Synthetic oligonucleotide
ccgactttagccttgcacgttatgcatttgatttctatgagatatcatctcgaac

SEQ ID NO: 361468 - DNA, 60 bp, Artificial
  Synthetic oligonucleotide
ccgagaaaaacacaatataatgacattatcactgcacaacgtttcatgtgtgttgccgca

SEQ ID NO: 361469 - DNA, 53 bp, Artificial
  Synthetic oligonucleotide
ccgagaactcaccgagttcatctacttcgaaatacccgaggagcaccctcaag

SEQ ID NO: 361470 - DNA, 55 bp, Artificial
  Synthetic oligonucleotide
ccgagaagacaagcctctagaggcaacagtagtgaaagatcaggacaatcaatgg

SEQ ID NO: 361471 - DNA, 55 bp, Artificial
  Synthetic oligonucleotide
ccgagaatgcattgatgttatacatggcgtgtacccacgcctctaatcctgtgta

SEQ ID NO: 361472 - DNA, 56 bp, Artificial
  Synthetic oligonucleotide
ccgagaatttgaggaaaaagtacgcgcgagataagatagtagctggaaataaatta

SEQ ID NO: 361473 - DNA, 55 bp, Artificial
  Synthetic oligonucleotide
ccgagaatttggccataccttcaacagctgatttctgcaaggaattagctcgata

SEQ ID NO: 361474 - DNA, 55 bp, Artificial
  Synthetic oligonucleotide
ccgagacaacgccggactgttctacggcatcaagtagtcgaaacccatcacaccg

SEQ ID NO: 361475 - DNA, 60 bp, Artificial
  Synthetic oligonucleotide
ccgagacaatacatcttgcaactgcagttcaaccggaaaggagagtcatcgatcgagaag

SEQ ID NO: 361476 - DNA, 55 bp, Artificial
  Synthetic oligonucleotide
ccgagacacatactagacattactttgagattaagtttggcaccaaagcgattca

SEQ ID NO: 361477 - DNA, 55 bp, Artificial
  Synthetic oligonucleotide
ccgagacagaatgcacatcttgttgcgtaataagcggatccagattccttcgctc

SEQ ID NO: 361478 - DNA, 51 bp, Artificial
  Synthetic oligonucleotide
ccgagacccccaacagctgtgggaccaggcaccacggtgcaccatgcagac

SEQ ID NO: 361479 - DNA, 54 bp, Artificial
  Synthetic oligonucleotide
ccgagacccccctggccttgtgtttgagggttccaccgctcaaattaagcacat

SEQ ID NO: 361480 - DNA, 54 bp, Artificial
  Synthetic oligonucleotide
ccgagaccctaaattctccgcctcggcacacaattttcgcgttaataacggcta

SEQ ID NO: 361481 - DNA, 55 bp, Artificial
  Synthetic oligonucleotide
ccgagaccttcccaggggtacacttctgtcccgagggataagccatccaactctg

SEQ ID NO: 361482 - DNA, 57 bp, Artificial
  Synthetic oligonucleotide
ccgagacgatgatggagcaatgcgtccagtacttatagtaccatttggaggatatgg

SEQ ID NO: 361483 - DNA, 54 bp, Artificial
  Synthetic oligonucleotide
ccgagacgcggtgaaaatggttttataatcgtagacgaacctgaagtactctac

SEQ ID NO: 361484 - DNA, 54 bp, Artificial
  Synthetic oligonucleotide
ccgagacgttaacacaaccggactttgttatcctctctccacctactgcgtctt

SEQ ID NO: 361485 - DNA, 57 bp, Artificial
  Synthetic oligonucleotide
ccgagactaccgtagccacagcggtaaagtctcaacctgacattaaagacctgtggc

SEQ ID NO: 361486 - DNA, 55 bp, Artificial
  Synthetic oligonucleotide
ccgagactacctgtcatgcatggacagacatgaagctccgtggatgacggacctg

SEQ ID NO: 361487 - DNA, 60 bp, Artificial
  Synthetic oligonucleotide
ccgagactgtgagcgataatattactctacctgatttgaaagatccagagagagtcacgg

SEQ ID NO: 361488 - DNA, 58 bp, Artificial
  Synthetic oligonucleotide
ccgagagaacacacattcacatcttttcatttactggggaagaaatggccaccaaggc

SEQ ID NO: 361489 - DNA, 60 bp, Artificial
  Synthetic oligonucleotide
ccgagagaagccctcagttgttgcaagtcctgcaaacccggctccaatgacggctagaca

SEQ ID NO: 361490 - DNA, 60 bp, Artificial
  Synthetic oligonucleotide
ccgagagaatcaacttcagaaagagtcgagagacgcgagactacgcgagatggctcacga

SEQ ID NO: 361491 - DNA, 55 bp, Artificial
  Synthetic oligonucleotide
ccgagagacgtagcaaggtaccccaaggagacaataattgacaaactcacagaga

SEQ ID NO: 361492 - DNA, 55 bp, Artificial
  Synthetic oligonucleotide
ccgagagagtggttgttagtattgatcgcttcttaagagttcgggatcagcgagg

SEQ ID NO: 361493 - DNA, 55 bp, Artificial
  Synthetic oligonucleotide
ccgagagatatgtcagctctattttctctatccaatgttgcttatgggctaagca

SEQ ID NO: 361494 - DNA, 58 bp, Artificial
  Synthetic oligonucleotide
ccgagagatctactcagaaagcaccggacactccaactgcatccaaaccgaaaacgag

SEQ ID NO: 361495 - DNA, 60 bp, Artificial
  Synthetic oligonucleotide
ccgagagatgcatccggagtaccacaaagactgctgacatcgagttttctacaagggact

SEQ ID NO: 361496 - DNA, 51 bp, Artificial
  Synthetic oligonucleotide
ccgagagccacttctgcacggttgcatctctcgcccttgaccagggcgggg

SEQ ID NO: 361497 - DNA, 59 bp, Artificial
  Synthetic oligonucleotide
ccgagagccggcctggaccctccagtggaggaggcggagtagctgacttgtcttctgaa

SEQ ID NO: 361498 - DNA, 53 bp, Artificial
  Synthetic oligonucleotide
ccgagagcgcagcagccgcatattcatatttatagcgcaccatgggattcaga

SEQ ID NO: 361499 - DNA, 55 bp, Artificial
  Synthetic oligonucleotide
ccgagagctcaacagccgcagattcatgtatacagtgctccatgggattctgatg

SEQ ID NO: 361500 - DNA, 60 bp, Artificial
  Synthetic oligonucleotide
ccgagagctgcatcctgagtactacaagaactgatgacatcgagcttcctactttgaact

SEQ ID NO: 361501 - DNA, 60 bp, Artificial
  Synthetic oligonucleotide
ccgagagggagagtccttctggactactctatatactcctgtctgtctaagctcgcgaag

SEQ ID NO: 361502 - DNA, 55 bp, Artificial
  Synthetic oligonucleotide
ccgagagggatagtcatttgactaccttcgtgaaagcagagaagatatcgacgtc

SEQ ID NO: 361503 - DNA, 55 bp, Artificial
  Synthetic oligonucleotide
ccgagagtgtgggattcaaacaatgagttctacatgttacctccagcacagagca

SEQ ID NO: 361504 - DNA, 59 bp, Artificial
  Synthetic oligonucleotide
ccgagagttccaccttcctcgtgagaactgtatcgacacccttgtgctgtcacgtttga

SEQ ID NO: 361505 - DNA, 54 bp, Artificial
  Synthetic oligonucleotide
ccgagagttcgtcagcagaccaaaaggagccccgatagattcgccaaccgtgga

SEQ ID NO: 361506 - DNA, 55 bp, Artificial
  Synthetic oligonucleotide
ccgagatagatgggtcggcagccgctctcagtggtaacttgcgggtctggatgcg

SEQ ID NO: 361507 - DNA, 60 bp, Artificial
  Synthetic oligonucleotide
ccgagatatgcagttagaacgagatgagatgtatggttacgtcaatattgccagaaactt

SEQ ID NO: 361508 - DNA, 57 bp, Artificial
  Synthetic oligonucleotide
ccgagatcacactcaagtatccagggatatcccagtcctctgggggggacatagggg

SEQ ID NO: 361509 - DNA, 55 bp, Artificial
  Synthetic oligonucleotide
ccgagatcagagggagtagcccctgctgttaatcccaatcttcaagtcattctga

SEQ ID NO: 361510 - DNA, 60 bp, Artificial
  Synthetic oligonucleotide
ccgagatcatgtcgaagtatgacgatttcagcctaggtattgataccgaagctgctgcat

SEQ ID NO: 361511 - DNA, 51 bp, Artificial
  Synthetic oligonucleotide
ccgagatctattaatgacaatcccaacgtcctgcaccggtgcttccttaga

SEQ ID NO: 361512 - DNA, 55 bp, Artificial
  Synthetic oligonucleotide
ccgagatgacagcacgatgggttacaggcatgactgggaggtgtactctaagtat

SEQ ID NO: 361513 - DNA, 60 bp, Artificial
  Synthetic oligonucleotide
ccgagatgacgaggcagagaaaaaggacgttgaggcacgcatgaattggagtgaggatat

SEQ ID NO: 361514 - DNA, 60 bp, Artificial
  Synthetic oligonucleotide
ccgagatgccattggacactgaggggacatacagcaacgaaagtgagtggggccagactt

SEQ ID NO: 361515 - DNA, 55 bp, Artificial
  Synthetic oligonucleotide
ccgagatggatgcagcccctctgcaagcggctatgcaccctcttaccagtcctgg

SEQ ID NO: 361516 - DNA, 55 bp, Artificial
  Synthetic oligonucleotide
ccgagatgggaacgccaaaggttacccagttcatcgcctcattgctaaagcgttc

SEQ ID NO: 361517 - DNA, 52 bp, Artificial
  Synthetic oligonucleotide
ccgagatgtatcatttcaagacttaagtgacaatccgtgcaaagtggacctt

SEQ ID NO: 361518 - DNA, 55 bp, Artificial
  Synthetic oligonucleotide
ccgagattaatgggagttcccaatttatgcagttaggcgaatggcaattatgggg

SEQ ID NO: 361519 - DNA, 55 bp, Artificial
  Synthetic oligonucleotide
ccgagattccacatgtagccgctgtgctgcgctctgccgatgaagggcgttggca

SEQ ID NO: 361520 - DNA, 55 bp, Artificial
  Synthetic oligonucleotide
ccgagattcccgagtttgtgagaaagtcgcttctttatgtgcttaccgtcagact

SEQ ID NO: 361521 - DNA, 55 bp, Artificial
  Synthetic oligonucleotide
ccgagattgtcctgaattctacttacggatcgctcaaaggtggaccacgccagag

SEQ ID NO: 361522 - DNA, 55 bp, Artificial
  Synthetic oligonucleotide
ccgagatttaggtggtacgagctgagagcagtcgaagttgtatgcatgttaacac

SEQ ID NO: 361523 - DNA, 52 bp, Artificial
  Synthetic oligonucleotide
ccgagcaaatacggcactagtgccttctccaatcggcccggttaatgatctg

SEQ ID NO: 361524 - DNA, 60 bp, Artificial
  Synthetic oligonucleotide
ccgagcaaattagttagattggagactcatgagtggacaccaacatgggctagaggacac

SEQ ID NO: 361525 - DNA, 55 bp, Artificial
  Synthetic oligonucleotide
ccgagcaagcaaaagtagacatcgcacaactgcgttcattgtctactctggtacg

SEQ ID NO: 361526 - DNA, 55 bp, Artificial
  Synthetic oligonucleotide
ccgagcaattatacgcgacagagttggcgttcgaaaacgaagctctgagacgagg

SEQ ID NO: 361527 - DNA, 55 bp, Artificial
  Synthetic oligonucleotide
ccgagcacatatggcgcaggagtcagagcagtgctcccgtgcgtttgcagtatgc

SEQ ID NO: 361528 - DNA, 55 bp, Artificial
  Synthetic oligonucleotide
ccgagcagaccaaactatatggaagtggaaataaactgataacagtcgaaagttc

SEQ ID NO: 361529 - DNA, 55 bp, Artificial
  Synthetic oligonucleotide
ccgagcagctgattaagtttgcaacccactcagtgtctctccgcggtgtacatcc

SEQ ID NO: 361530 - DNA, 55 bp, Artificial
  Synthetic oligonucleotide
ccgagcagtgatagaagaactcgtgctcgcgagagcggagctgagtgaggacacg

SEQ ID NO: 361531 - DNA, 59 bp, Artificial
  Synthetic oligonucleotide
ccgagcagtggttgacccgactggacctatcgtcatacagtacttctctgttaaggaga

SEQ ID NO: 361532 - DNA, 60 bp, Artificial
  Synthetic oligonucleotide
ccgagcatcagttggatcctctattcagagccaatacacacaatccagactgggacttca

SEQ ID NO: 361533 - DNA, 60 bp, Artificial
  Synthetic oligonucleotide
ccgagccaaatagcaagatcggatcagcccgacactaatccttccagctggcacgaaccc

SEQ ID NO: 361534 - DNA, 54 bp, Artificial
  Synthetic oligonucleotide
ccgagccccctagcgtcaccgaatgtgtaaaagcattggcgcgggaaaaacgct

SEQ ID NO: 361535 - DNA, 55 bp, Artificial
  Synthetic oligonucleotide
ccgagccgctatatctggagtacaaccaatcgtacatgtccgcatgccagtctgt

SEQ ID NO: 361536 - DNA, 58 bp, Artificial
  Synthetic oligonucleotide
ccgagccgggtgctatggatattctagtgaaatacgagttactcattagaagcgaatt

SEQ ID NO: 361537 - DNA, 55 bp, Artificial
  Synthetic oligonucleotide
ccgagcctattcctccaacacgggtcagagtttcacgcacacattatcacaatcc

SEQ ID NO: 361538 - DNA, 60 bp, Artificial
  Synthetic oligonucleotide
ccgagcctgtgcagctgcctgtatgggtgcgtcgcgttctctatttcggagtccgcgtct

SEQ ID NO: 361539 - DNA, 55 bp, Artificial
  Synthetic oligonucleotide
ccgagcgaaaggccaacgcagcgtgagtgaatcgaccagtggtgtgcagtgccac

SEQ ID NO: 361540 - DNA, 55 bp, Artificial
  Synthetic oligonucleotide
ccgagcgacattcaacccgtcaaaacttaggagctacccaaaacagcacgcttac

SEQ ID NO: 361541 - DNA, 54 bp, Artificial
  Synthetic oligonucleotide
ccgagcgcggtgttcgatccccacttttgggaaccgctttgttactatacattg

SEQ ID NO: 361542 - DNA, 55 bp, Artificial
  Synthetic oligonucleotide
ccgagcgctccaattgacaaatcctattttggagttgacgagatggacacctatg

SEQ ID NO: 361543 - DNA, 53 bp, Artificial
  Synthetic oligonucleotide
ccgagcgcttgtagccatcactcgagcgagacatgggttgttcatttacgacc

SEQ ID NO: 361544 - DNA, 55 bp, Artificial
  Synthetic oligonucleotide
ccgagcgtaacttctattacatggtgtcaactgggaagaatacaccacgaacact

SEQ ID NO: 361545 - DNA, 55 bp, Artificial
  Synthetic oligonucleotide
ccgagctaatcctgggatgtcaactatcttcccttggctgtctgcaactgccgtt

SEQ ID NO: 361546 - DNA, 56 bp, Artificial
  Synthetic oligonucleotide
ccgagctaattacttggtatccaactttgacaagtatgtagctacgttaagctgtt

SEQ ID NO: 361547 - DNA, 56 bp, Artificial
  Synthetic oligonucleotide
ccgagctacctgacaacacgaccgggcaaattacaccagctaagttgcgtggcgta

SEQ ID NO: 361548 - DNA, 60 bp, Artificial
  Synthetic oligonucleotide
ccgagctataggcttgaagaggatgatggatcaatcacagtgatagattataagaagatc

SEQ ID NO: 361549 - DNA, 60 bp, Artificial
  Synthetic oligonucleotide
ccgagctcgcgatggcttaggtcgttgcgcccacggctagccaactcttgtctcgcgcta

SEQ ID NO: 361550 - DNA, 55 bp, Artificial
  Synthetic oligonucleotide
ccgagctgaagcgcatagacatgaagataagctggagagcgactaagtcgtgtac

SEQ ID NO: 361551 - DNA, 54 bp, Artificial
  Synthetic oligonucleotide
ccgagctttcgcatcaatccgccggtggcctgtgggctggggctgaggacgtct

SEQ ID NO: 361552 - DNA, 55 bp, Artificial
  Synthetic oligonucleotide
ccgagctttctacaagggctgctgacattgagctatcatcaactttccgcagggg

SEQ ID NO: 361553 - DNA, 53 bp, Artificial
  Synthetic oligonucleotide
ccgaggaaattggttacgggaatacaccggccagaccaaatggtgaccaacaa

SEQ ID NO: 361554 - DNA, 57 bp, Artificial
  Synthetic oligonucleotide
ccgaggaagttagagaattaagaattaggcctgatcttagtgtcagaagatccaaat

SEQ ID NO: 361555 - DNA, 52 bp, Artificial
  Synthetic oligonucleotide
ccgaggaataaaaggggagtatttgtgcttgggttcttgggttttctcgcca

SEQ ID NO: 361556 - DNA, 55 bp, Artificial
  Synthetic oligonucleotide
ccgaggaattaaagaattacaacgagtggttcatccagtggcagaacgaatgttc

SEQ ID NO: 361557 - DNA, 56 bp, Artificial
  Synthetic oligonucleotide
ccgaggacagaccaatagcccgttaggggaaatgctcagggcctgccaaacctgga

SEQ ID NO: 361558 - DNA, 55 bp, Artificial
  Synthetic oligonucleotide
ccgaggacccaccagattatggagatcaaggtaatgtgcaacaggtgggatctgg

SEQ ID NO: 361559 - DNA, 55 bp, Artificial
  Synthetic oligonucleotide
ccgaggacgtgcaatattacctcggtgactattgtatgttgacggacgaggtttt

SEQ ID NO: 361560 - DNA, 52 bp, Artificial
  Synthetic oligonucleotide
ccgaggaggaaggagtcttggtgccagaaacttgcagtgttagtcctggcgg

SEQ ID NO: 361561 - DNA, 55 bp, Artificial
  Synthetic oligonucleotide
ccgaggaggacattacccaccgagtcttggcgctgaaagtcccgcacggctcccc

SEQ ID NO: 361562 - DNA, 55 bp, Artificial
  Synthetic oligonucleotide
ccgaggaggtctctcataacttcgctgacaagaaacaccttagcgcctgcggtta

SEQ ID NO: 361563 - DNA, 55 bp, Artificial
  Synthetic oligonucleotide
ccgaggaggtctggggccgctggagctgcagtgaaaggggttggaacaatggtga

SEQ ID NO: 361564 - DNA, 52 bp, Artificial
  Synthetic oligonucleotide
ccgaggaggttcttagcaaatcatgaaagcccgctttgagactcgtatatgg

SEQ ID NO: 361565 - DNA, 55 bp, Artificial
  Synthetic oligonucleotide
ccgaggagttaaaacagaggcagattcaaattaatttagtcgattggacagagag

SEQ ID NO: 361566 - DNA, 57 bp, Artificial
  Synthetic oligonucleotide
ccgaggatcccatccccttgaggtgaaggggacatctctggattcaatggtcctctt

SEQ ID NO: 361567 - DNA, 55 bp, Artificial
  Synthetic oligonucleotide
ccgaggatgctgagaagcacccgtggcaggtgttagtgaatatcaaaggagtggc

SEQ ID NO: 361568 - DNA, 53 bp, Artificial
  Synthetic oligonucleotide
ccgaggatgttccccagccagggattgtcatcctcgagtttcttgatggttct

SEQ ID NO: 361569 - DNA, 57 bp, Artificial
  Synthetic oligonucleotide
ccgaggattcttcccttttcacaaggacaatgcaatacgattgggtgagaacaagga

SEQ ID NO: 361570 - DNA, 53 bp, Artificial
  Synthetic oligonucleotide
ccgaggatttcttcaattacgctcactcaacgaattacgacgactgggccttt

SEQ ID NO: 361571 - DNA, 55 bp, Artificial
  Synthetic oligonucleotide
ccgaggcagagaacgaatactccaatgtcatggataaccgctatcggtcccaggg

SEQ ID NO: 361572 - DNA, 57 bp, Artificial
  Synthetic oligonucleotide
ccgaggcagcccacgtcctaactcgctgtgcccgtttcgggtgccgtatgaatccga

SEQ ID NO: 361573 - DNA, 55 bp, Artificial
  Synthetic oligonucleotide
ccgaggccccggttagtaagcctgctaactcacctattcttgctacacctagggc

SEQ ID NO: 361574 - DNA, 60 bp, Artificial
  Synthetic oligonucleotide
ccgaggccgatgatgttccatgaacaagtgtagttctggaaaaatcttagtcgccacata

SEQ ID NO: 361575 - DNA, 52 bp, Artificial
  Synthetic oligonucleotide
ccgaggcgatctaaactttgtcaatagggcaaatcagcgactgaatcctatg

SEQ ID NO: 361576 - DNA, 59 bp, Artificial
  Synthetic oligonucleotide
ccgaggcgtgggtataaatcagcgtataggcctcgtgccatacgtcgaaattatgcgaa

SEQ ID NO: 361577 - DNA, 60 bp, Artificial
  Synthetic oligonucleotide
ccgaggctactgcagtggacaagcctactagaccagatgtatcagtcaacaggttctaca

SEQ ID NO: 361578 - DNA, 59 bp, Artificial
  Synthetic oligonucleotide
ccgaggctagagccacacaaatgggagaagtattgtgttctcgaaataggggacatgct

SEQ ID NO: 361579 - DNA, 51 bp, Artificial
  Synthetic oligonucleotide
ccgaggctccgcattacacgggatttgcatcagggtcaacgcgcggtctgg

SEQ ID NO: 361580 - DNA, 55 bp, Artificial
  Synthetic oligonucleotide
ccgagggaagtggcagacttgctcagagccctgcggggtgatgagagagtcgttg

SEQ ID NO: 361581 - DNA, 55 bp, Artificial
  Synthetic oligonucleotide
ccgagggatgacctatggtattgagcggtgcgttatccacgctggtattatgacg

SEQ ID NO: 361582 - DNA, 55 bp, Artificial
  Synthetic oligonucleotide
ccgagggatgacttacggtatagaacgctgcgttattcacgctggtatcatgacg

SEQ ID NO: 361583 - DNA, 55 bp, Artificial
  Synthetic oligonucleotide
ccgagggcaacgagaaactgttacagcagttagagccagctctcaaaacagggtc

SEQ ID NO: 361584 - DNA, 52 bp, Artificial
  Synthetic oligonucleotide
ccgagggccccacaaaggcgggttttcatgcccctggacggctaaggggcac

SEQ ID NO: 361585 - DNA, 49 bp, Artificial
  Synthetic oligonucleotide
ccgaggggaacctataccctcccttaacctccctcaaatccctctttgg

SEQ ID NO: 361586 - DNA, 53 bp, Artificial
  Synthetic oligonucleotide
ccgaggggactttccagaagaggcgtaacctgggcgggactgggagtggctaa

SEQ ID NO: 361587 - DNA, 60 bp, Artificial
  Synthetic oligonucleotide
ccgaggggagcgctgtgacttggaggacagggatagatcggagctcagcccgctactgct

SEQ ID NO: 361588 - DNA, 55 bp, Artificial
  Synthetic oligonucleotide
ccgaggggatagtagagtgcacagctgctgtcctattttaggaccacgtgatgcg

SEQ ID NO: 361589 - DNA, 56 bp, Artificial
  Synthetic oligonucleotide
ccgaggggattcccaatgaggaacatctcccgacgtccagggaaattcaggactgc

SEQ ID NO: 361590 - DNA, 56 bp, Artificial
  Synthetic oligonucleotide
ccgaggggcatagtcatccttaggaaagcctgacctaaccggtcataggtgaatcc

SEQ ID NO: 361591 - DNA, 48 bp, Artificial
  Synthetic oligonucleotide
ccgagggggcccgaccaccaagtttggaggcaccccgggccgaagggt

SEQ ID NO: 361592 - DNA, 58 bp, Artificial
  Synthetic oligonucleotide
ccgaggggggtggcttagagcataggggaccagtggagccatgggatgctcctcccga

SEQ ID NO: 361593 - DNA, 55 bp, Artificial
  Synthetic oligonucleotide
ccgaggggtactgcaatgagctttgggtggcgaatcccaacattgtttgcaaacc

SEQ ID NO: 361594 - DNA, 55 bp, Artificial
  Synthetic oligonucleotide
ccgaggggtgtcttcaacagttcagacgctcaggcctttaacgctttcagccttc

SEQ ID NO: 361595 - DNA, 51 bp, Artificial
  Synthetic oligonucleotide
ccgagggttaaccccggcccttattacaaaattgccacgtacagcttacaa

SEQ ID NO: 361596 - DNA, 55 bp, Artificial
  Synthetic oligonucleotide
ccgaggtatggctttccaaggtaccagtaggactttaactcaacagtcctcagcg

SEQ ID NO: 361597 - DNA, 58 bp, Artificial
  Synthetic oligonucleotide
ccgaggtatttgacgggttctctatagagtcagactacactgctttcgattcgtccca

SEQ ID NO: 361598 - DNA, 55 bp, Artificial
  Synthetic oligonucleotide
ccgaggtccgcgtgagtactgagcagaggtatgtcgcaagtttggacgtgtccgc

SEQ ID NO: 361599 - DNA, 55 bp, Artificial
  Synthetic oligonucleotide
ccgaggtcgcgcgagacttcagtgagatatacgtcaagtatgggcgtggcttgcg

SEQ ID NO: 361600 - DNA, 55 bp, Artificial
  Synthetic oligonucleotide
ccgaggtcttatcattcaacatgaatatagtccctcctcctcctaaaagagattg

SEQ ID NO: 361601 - DNA, 53 bp, Artificial
  Synthetic oligonucleotide
ccgaggtgcccgcccctagggaggagtaaatggcggcgttatacgccgccgta

SEQ ID NO: 361602 - DNA, 58 bp, Artificial
  Synthetic oligonucleotide
ccgaggtgctgttgctcccaattcaaaatcgtccgattcggatcacgaatccaacctg

SEQ ID NO: 361603 - DNA, 55 bp, Artificial
  Synthetic oligonucleotide
ccgaggttgcgggaacaaccagcatcacgatgagccccaccgtaatacctgacag

SEQ ID NO: 361604 - DNA, 55 bp, Artificial
  Synthetic oligonucleotide
ccgaggtttctattagcacatgcttatcataatcttagagatgtgaggtatcaag

SEQ ID NO: 361605 - DNA, 55 bp, Artificial
  Synthetic oligonucleotide
ccgaggttttaacaattacaaggctgtgtcctgcgacttcaacaatggcatcacc

SEQ ID NO: 361606 - DNA, 55 bp, Artificial
  Synthetic oligonucleotide
ccgagtaagttcggtcaactcatttgtaatggattcgataaggtctaggttacca

SEQ ID NO: 361607 - DNA, 54 bp, Artificial
  Synthetic oligonucleotide
ccgagtacattaataacgggttacctccgattcagaatacacgaaacattgttc

SEQ ID NO: 361608 - DNA, 55 bp, Artificial
  Synthetic oligonucleotide
ccgagtacatttctgaggcaactgtggaggcaccactgacaccaataaaggatcg

SEQ ID NO: 361609 - DNA, 55 bp, Artificial
  Synthetic oligonucleotide
ccgagtacctcaagacgaagaaatgactgtcccaggctatgcacctgctgggagc

SEQ ID NO: 361610 - DNA, 57 bp, Artificial
  Synthetic oligonucleotide
ccgagtactgtacctcattagaggagccgggggcaacccttgccgtgcatcgacacg

SEQ ID NO: 361611 - DNA, 55 bp, Artificial
  Synthetic oligonucleotide
ccgagtatactcctataggcgataacaaggctttgatagctaaatatgcgggtat

SEQ ID NO: 361612 - DNA, 53 bp, Artificial
  Synthetic oligonucleotide
ccgagtatcattaaactcgggaactgggaagtcggtccagtgtaaataccgac

SEQ ID NO: 361613 - DNA, 57 bp, Artificial
  Synthetic oligonucleotide
ccgagtatgcccaaggataaagaggcgtgtgcaaaagctccattggaggcatataac

SEQ ID NO: 361614 - DNA, 53 bp, Artificial
  Synthetic oligonucleotide
ccgagtatgtactcggcactattgcaggagggaccgggaacgaaaattcccac

SEQ ID NO: 361615 - DNA, 59 bp, Artificial
  Synthetic oligonucleotide
ccgagtattccgttgaagagatttccaacgaagtcgctgaactcgattcagtggatcca

SEQ ID NO: 361616 - DNA, 52 bp, Artificial
  Synthetic oligonucleotide
ccgagtcccctacaacaaattaacataacatattgatttcttgccatagcac

SEQ ID NO: 361617 - DNA, 54 bp, Artificial
  Synthetic oligonucleotide
ccgagtccctatatacaaacagggaaacctgttccatagtgagtttactggtag

SEQ ID NO: 361618 - DNA, 53 bp, Artificial
  Synthetic oligonucleotide
ccgagtccctatgtgtataaattccaaaggttggatgttcataagggttaagg

SEQ ID NO: 361619 - DNA, 58 bp, Artificial
  Synthetic oligonucleotide
ccgagtccctgatggacgataatacggacaccatcatcaccggtaaggggaggtctgc

SEQ ID NO: 361620 - DNA, 58 bp, Artificial
  Synthetic oligonucleotide
ccgagtccgactttcggcccataccgccgctcacagaaacacatatgtctcctacgag

SEQ ID NO: 361621 - DNA, 53 bp, Artificial
  Synthetic oligonucleotide
ccgagtccgcgccacgtttagcgtcctcagagtgcaactctttggtagccctg

SEQ ID NO: 361622 - DNA, 60 bp, Artificial
  Synthetic oligonucleotide
ccgagtcctctgtcaaagagaaggacatgaccaaggaattctttgagaacaaatcagaga

SEQ ID NO: 361623 - DNA, 56 bp, Artificial
  Synthetic oligonucleotide
ccgagtcgaagcaggtcttatatcaagttgaaacgcttgcgtttcaagggtactgt

SEQ ID NO: 361624 - DNA, 58 bp, Artificial
  Synthetic oligonucleotide
ccgagtcgctcgagagcaacctggtccaatcataaacgtggtacatagtctcgttaac

SEQ ID NO: 361625 - DNA, 55 bp, Artificial
  Synthetic oligonucleotide
ccgagtcggttaaatcaggcattagaagtatgtgatattatgatggtggcatggg

SEQ ID NO: 361626 - DNA, 55 bp, Artificial
  Synthetic oligonucleotide
ccgagtctaaccaaagaattacagatggggtgtatagaatcaaggttagttcact

SEQ ID NO: 361627 - DNA, 57 bp, Artificial
  Synthetic oligonucleotide
ccgagtctatcgcgggccttcaatggatgtttactacgcttaccccgcttcaggcac

SEQ ID NO: 361628 - DNA, 60 bp, Artificial
  Synthetic oligonucleotide
ccgagtctgggatatgctttgtcgattggccagtcgaggctatcgtacatgctgcaggat

SEQ ID NO: 361629 - DNA, 54 bp, Artificial
  Synthetic oligonucleotide
ccgagtgacatagtcttggacgaaagagtccgaaggtgttaacctcttacgatt

SEQ ID NO: 361630 - DNA, 54 bp, Artificial
  Synthetic oligonucleotide
ccgagtgacttcagcgacatggaggagaccgaatgactctcgggacggggggag

SEQ ID NO: 361631 - DNA, 60 bp, Artificial
  Synthetic oligonucleotide
ccgagtgataaaacacaggatgatcaagaaagagcatcgagatgggatagtggacatact

SEQ ID NO: 361632 - DNA, 55 bp, Artificial
  Synthetic oligonucleotide
ccgagtgatgacgtgtaaagttcaatgaacatatacgggcgccatgacataggat

SEQ ID NO: 361633 - DNA, 55 bp, Artificial
  Synthetic oligonucleotide
ccgagtgcgtgtgacgggtctacctctctaaaagtcacaccgtggatactacgac

SEQ ID NO: 361634 - DNA, 55 bp, Artificial
  Synthetic oligonucleotide
ccgagtggacccagcgcgttcaattttaaacacctcacgagctggagttacggga

SEQ ID NO: 361635 - DNA, 54 bp, Artificial
  Synthetic oligonucleotide
ccgagtgggtggtggggacgtttggggtatcaccggacgtggtagatgtgggca

SEQ ID NO: 361636 - DNA, 55 bp, Artificial
  Synthetic oligonucleotide
ccgagtgggtttgcatctactcaccagacggggatggcgcaatcgtccaatcggt

SEQ ID NO: 361637 - DNA, 55 bp, Artificial
  Synthetic oligonucleotide
ccgagtgtagcttaggtcgatgagtctggacattcctcaccggtgacggtggtcc

SEQ ID NO: 361638 - DNA, 56 bp, Artificial
  Synthetic oligonucleotide
ccgagtgtcgggttagcagacggcgccatcgaacgtacttgtccccagacgctaac

SEQ ID NO: 361639 - DNA, 60 bp, Artificial
  Synthetic oligonucleotide
ccgagtgtgagccttgaggatttctggaaatggggtgatgcactggccatgggggcgctg

SEQ ID NO: 361640 - DNA, 54 bp, Artificial
  Synthetic oligonucleotide
ccgagtgtgtaacaacaaataaacgtccgtactttcccatgggtcgcagcccat

SEQ ID NO: 361641 - DNA, 53 bp, Artificial
  Synthetic oligonucleotide
ccgagtgttcctcgtttatgtaccgattattcaagcaacgacttcgggtttaa

SEQ ID NO: 361642 - DNA, 60 bp, Artificial
  Synthetic oligonucleotide
ccgagtgttgcacactcaattgctgtagagctttgtgttcctgggtttcatggttgggca

SEQ ID NO: 361643 - DNA, 53 bp, Artificial
  Synthetic oligonucleotide
ccgagttaagtatagggtcattccaacgtaggataggtacacaaaagacggtc

SEQ ID NO: 361644 - DNA, 55 bp, Artificial
  Synthetic oligonucleotide
ccgagttacaaatgcattgtctccgtgggcctctaaaatttcaacgccgcacgct

SEQ ID NO: 361645 - DNA, 55 bp, Artificial
  Synthetic oligonucleotide
ccgagttattagttggatctaaattcagcctcttcaaatggtgctatgagttcga

SEQ ID NO: 361646 - DNA, 55 bp, Artificial
  Synthetic oligonucleotide
ccgagttcacttttgtgttaactgagagatattacacccaaaattccggtcatgc

SEQ ID NO: 361647 - DNA, 54 bp, Artificial
  Synthetic oligonucleotide
ccgagttccatccggaacccgtcatacgcttcggatatgacccggttgtttctc

SEQ ID NO: 361648 - DNA, 56 bp, Artificial
  Synthetic oligonucleotide
ccgagttccgtttctgacgatgttttaaattccagcaatgttgctgagggtgtaac

SEQ ID NO: 361649 - DNA, 55 bp, Artificial
  Synthetic oligonucleotide
ccgagttcgcttgtcgcgaatttgaagataagttcacaggtgcaccgagagtgca

SEQ ID NO: 361650 - DNA, 57 bp, Artificial
  Synthetic oligonucleotide
ccgagttctgaccgcgagtaccgtatgtgagggtgagtggcgaacttttgtcctgga

SEQ ID NO: 361651 - DNA, 57 bp, Artificial
  Synthetic oligonucleotide
ccgagttctttacagaattggacggggtgcggttacacaggtacgctccagcgtgca

SEQ ID NO: 361652 - DNA, 54 bp, Artificial
  Synthetic oligonucleotide
ccgagttctttagctcgtgagatattgggcgtgtgtttcgggtttcgtctttcg

SEQ ID NO: 361653 - DNA, 56 bp, Artificial
  Synthetic oligonucleotide
ccgagttgatacaaagacactaaacatttcaaaagcatatatgtgggcaaaacgtg

SEQ ID NO: 361654 - DNA, 55 bp, Artificial
  Synthetic oligonucleotide
ccgagttgccattagacactgtagctgtaaatcagtaacgaaagtgagtggggcc

SEQ ID NO: 361655 - DNA, 55 bp, Artificial
  Synthetic oligonucleotide
ccgagttgccattggactcaggagctatgaatcagtaacgaaagtgagtggcgcc

SEQ ID NO: 361656 - DNA, 58 bp, Artificial
  Synthetic oligonucleotide
ccgagttggcagcaaggaagtattaccaagaggagccagaggctaagcttgttggcct

SEQ ID NO: 361657 - DNA, 59 bp, Artificial
  Synthetic oligonucleotide
ccgagtttggtaaggcacttagagcaactaatgatgctcaaccttacgaaggatacgca

SEQ ID NO: 361658 - DNA, 55 bp, Artificial
  Synthetic oligonucleotide
ccgagttttacctgtgacacagggttgagcctacttcatatcttgagcgaatgga

SEQ ID NO: 361659 - DNA, 55 bp, Artificial
  Synthetic oligonucleotide
ccgataaacgatccattaccacatacgcttcaggagcttggattcaaattgctaa

SEQ ID NO: 361660 - DNA, 55 bp, Artificial
  Synthetic oligonucleotide
ccgataaagttgtaatcgaggcgaggggcttgcttcggaggttcgcagacagtct

SEQ ID NO: 361661 - DNA, 55 bp, Artificial
  Synthetic oligonucleotide
ccgataaccagaccaaccgacatggacaaaatcagacgcctagccaacagtgtct

SEQ ID NO: 361662 - DNA, 55 bp, Artificial
  Synthetic oligonucleotide
ccgataacggcgaacatcacctcatggcaccgcaaggagcagtcttcccacgagc

SEQ ID NO: 361663 - DNA, 55 bp, Artificial
  Synthetic oligonucleotide
ccgataactggcaaaacttgcgataaagcggttcgagacttgctacgcatgcgcg

SEQ ID NO: 361664 - DNA, 54 bp, Artificial
  Synthetic oligonucleotide
ccgataatcttaaattgcgcaaatagtctttgacggtcacctattcccgacccg

SEQ ID NO: 361665 - DNA, 55 bp, Artificial
  Synthetic oligonucleotide
ccgataatggaaactcaaccgagcagatacttaagcgataagaaattgcttttaa

SEQ ID NO: 361666 - DNA, 60 bp, Artificial
  Synthetic oligonucleotide
ccgataatttattgcctaatggcatccgcttgctcggtatctattctttggatactgaag

SEQ ID NO: 361667 - DNA, 55 bp, Artificial
  Synthetic oligonucleotide
ccgatacaaacgcgagaaagacaactcgatcaaactccgtctgacgacgtatccg

SEQ ID NO: 361668 - DNA, 55 bp, Artificial
  Synthetic oligonucleotide
ccgatacaacatctcgcagcgggaagagcaacctccggttctctccttactcgac

SEQ ID NO: 361669 - DNA, 60 bp, Artificial
  Synthetic oligonucleotide
ccgatacaactatgacccctcaagagtggaagaagaacgtgtgctcttcgacatagattc

SEQ ID NO: 361670 - DNA, 58 bp, Artificial
  Synthetic oligonucleotide
ccgatacaccagtgatcatattggtgcctaatgttcaatttcccaaaatacccttatc

SEQ ID NO: 361671 - DNA, 60 bp, Artificial
  Synthetic oligonucleotide
ccgatacacttgagaagccttagcgtaagtgcactcaggcgtaaaaatcatcactggagc

SEQ ID NO: 361672 - DNA, 58 bp, Artificial
  Synthetic oligonucleotide
ccgatacagaatgtctattatgatttgtttaatgcggcaatgccggatccggtctata

SEQ ID NO: 361673 - DNA, 56 bp, Artificial
  Synthetic oligonucleotide
ccgatacatcaggtgccccctattagtgtctaatgtgcaatttccaaaaataccct

SEQ ID NO: 361674 - DNA, 51 bp, Artificial
  Synthetic oligonucleotide
ccgatacatccaagatgtcgctgtacaactatcccttattttaaacacgaa

SEQ ID NO: 361675 - DNA, 53 bp, Artificial
  Synthetic oligonucleotide
ccgataccaaaacctcgcaaaggcatggggacgaatctttctgttcccaaccc

SEQ ID NO: 361676 - DNA, 59 bp, Artificial
  Synthetic oligonucleotide
ccgataccaatcccacatgttaattggctatggttttgcatctccaggggactgtggtg

SEQ ID NO: 361677 - DNA, 59 bp, Artificial
  Synthetic oligonucleotide
ccgatacccaaacgtcagatgtgtttgcagagacaactggaaaggctcaaataggcctg

SEQ ID NO: 361678 - DNA, 58 bp, Artificial
  Synthetic oligonucleotide
ccgatacccaatcagggccaatctcacatcaggtaatcgtcaacaaccaaaactggtc

SEQ ID NO: 361679 - DNA, 58 bp, Artificial
  Synthetic oligonucleotide
ccgataccgtcgttgaactaccatccattccgccagaggactcgtcaattgaagtggc

SEQ ID NO: 361680 - DNA, 59 bp, Artificial
  Synthetic oligonucleotide
ccgatacctggaatctatggtatcactagcccaagttatgaatttgagtcctcggcacc

SEQ ID NO: 361681 - DNA, 55 bp, Artificial
  Synthetic oligonucleotide
ccgatacggaggtggagtggcgtgatgcgttggtggccaaaggctgtccacgtac

SEQ ID NO: 361682 - DNA, 59 bp, Artificial
  Synthetic oligonucleotide
ccgatacgtgttctctgttttcgtctctcatgtcgcgagtgggattcgagaccctacaa

SEQ ID NO: 361683 - DNA, 55 bp, Artificial
  Synthetic oligonucleotide
ccgatacgttgggatacgatctaatacgcgatctcatacttgttatacgggtgag

SEQ ID NO: 361684 - DNA, 55 bp, Artificial
  Synthetic oligonucleotide
ccgatactcgggatgttctaccacagggttggctagagcttcgtagcccttccag

SEQ ID NO: 361685 - DNA, 60 bp, Artificial
  Synthetic oligonucleotide
ccgatacttcggcagaagggttggtcagcgtgtttatggcatgccatactctggtggatc

SEQ ID NO: 361686 - DNA, 53 bp, Artificial
  Synthetic oligonucleotide
ccgatactttgccatttaagggaaagcgggccgaggacgggctatttatagta

SEQ ID NO: 361687 - DNA, 59 bp, Artificial
  Synthetic oligonucleotide
ccgatagaacttgagcatgatgacccaaccccactcacgtggtcctggaccgaactgac

SEQ ID NO: 361688 - DNA, 52 bp, Artificial
  Synthetic oligonucleotide
ccgatagaccggtttcctacctccgttcaaagggtaggtggtgggatctgga

SEQ ID NO: 361689 - DNA, 55 bp, Artificial
  Synthetic oligonucleotide
ccgatagagaatcaagagggaaaactggctctcccttagccatccgagtggacgt

SEQ ID NO: 361690 - DNA, 60 bp, Artificial
  Synthetic oligonucleotide
ccgatagcactgaaggaccgtcttttgtctcacagtagagggaaaggctggatcgagcac

SEQ ID NO: 361691 - DNA, 55 bp, Artificial
  Synthetic oligonucleotide
ccgatagggagaccccgaacgctctacgtaagtatgcttgcactttcgaggagtt

SEQ ID NO: 361692 - DNA, 54 bp, Artificial
  Synthetic oligonucleotide
ccgatataatattaccggatggccgcgcgatttttttaatccgtacagtccaac

SEQ ID NO: 361693 - DNA, 52 bp, Artificial
  Synthetic oligonucleotide
ccgatatatcggtacagaaatacatataccgatacctctataccgataacaa

SEQ ID NO: 361694 - DNA, 52 bp, Artificial
  Synthetic oligonucleotide
ccgatatatcggtaccccaattggtatcccttatttcactttcccaaaatac

SEQ ID NO: 361695 - DNA, 54 bp, Artificial
  Synthetic oligonucleotide
ccgatatatcggtactcaattagagtctcattttatacctttccgtaaataccc

SEQ ID NO: 361696 - DNA, 55 bp, Artificial
  Synthetic oligonucleotide
ccgatatatcggtgatcaattggggtctcataaattgcctttcctaaaatacccc

SEQ ID NO: 361697 - DNA, 54 bp, Artificial
  Synthetic oligonucleotide
ccgatatccgggagatggcatgtaaatatacgttttacgcaattaatcgccgtc

SEQ ID NO: 361698 - DNA, 60 bp, Artificial
  Synthetic oligonucleotide
ccgatatcgcttcattctcaattgatccgcaactttattgtgattataatggtgtactga

SEQ ID NO: 361699 - DNA, 50 bp, Artificial
  Synthetic oligonucleotide
ccgatatgggtcttctgcgttccggtaaacttccggggaaacgctttggg

SEQ ID NO: 361700 - DNA, 60 bp, Artificial
  Synthetic oligonucleotide
ccgatatgtcactccgggcgagagaccatctggcatgtttgacactgtagtgctctgtga

SEQ ID NO: 361701 - DNA, 55 bp, Artificial
  Synthetic oligonucleotide
ccgatatgttggtaactatagagcaaccttacagtctactagagagcaatttgag

SEQ ID NO: 361702 - DNA, 57 bp, Artificial
  Synthetic oligonucleotide
ccgatattaagcctcgtgccttcgctaaccaatacggggcttccgctatgggcatta

SEQ ID NO: 361703 - DNA, 52 bp, Artificial
  Synthetic oligonucleotide
ccgatattggatgtgagggacggggctcgtcacaccgataggtacatgtcct

SEQ ID NO: 361704 - DNA, 50 bp, Artificial
  Synthetic oligonucleotide
ccgatcactaccgccgttatgaccactcccggcagcggcatctagaccgc

SEQ ID NO: 361705 - DNA, 55 bp, Artificial
  Synthetic oligonucleotide
ccgatcagaagattatggttcggcacagggagttcgtgatggaggttcgttcagc

SEQ ID NO: 361706 - DNA, 60 bp, Artificial
  Synthetic oligonucleotide
ccgatcagactggagttgaccttggacgtcagatctgatctgacgattgagggagttgag

SEQ ID NO: 361707 - DNA, 60 bp, Artificial
  Synthetic oligonucleotide
ccgatcagcgattctctcgcgcccccgcacgcatccttcaaggtgccccaggcccgagtg

SEQ ID NO: 361708 - DNA, 60 bp, Artificial
  Synthetic oligonucleotide
ccgatcagctaaagaatttgctatattacaggatgacttaacggtattgagatacgctaa

SEQ ID NO: 361709 - DNA, 55 bp, Artificial
  Synthetic oligonucleotide
ccgatcaggaaagtgttacatgagcccaagagcagattgttcacagtgcttccaa

SEQ ID NO: 361710 - DNA, 55 bp, Artificial
  Synthetic oligonucleotide
ccgatcaggactactaaaatcgcaaccatgagcatgcgaatgataagtgctcgac

SEQ ID NO: 361711 - DNA, 55 bp, Artificial
  Synthetic oligonucleotide
ccgatcagtgatttaccggcgattgtttgtttttcaccgtcttacgattgcccaa

SEQ ID NO: 361712 - DNA, 60 bp, Artificial
  Synthetic oligonucleotide
ccgatcatggtgctccaggctggcctaactagagtgccgtacttcgtgcgcgctcaaggg

SEQ ID NO: 361713 - DNA, 58 bp, Artificial
  Synthetic oligonucleotide
ccgatcattatagaacatataatagaattggtcaaatatataaggggtcaaaattaca

SEQ ID NO: 361714 - DNA, 55 bp, Artificial
  Synthetic oligonucleotide
ccgatccaaatgcgtggtgattttcgcagtggaggccgtcttcttcgatctctac

SEQ ID NO: 361715 - DNA, 55 bp, Artificial
  Synthetic oligonucleotide
ccgatccaacggaaatcacccgttgggtggtgcgcggttcacgcatcgggaaatc

SEQ ID NO: 361716 - DNA, 55 bp, Artificial
  Synthetic oligonucleotide
ccgatccaacttgcgatactgattttcctgggtccaatgcgtctgggttgaggcg

SEQ ID NO: 361717 - DNA, 55 bp, Artificial
  Synthetic oligonucleotide
ccgatccaagactcgagccacacaaatgggagaagtactgtgttctagaaatcgg

SEQ ID NO: 361718 - DNA, 55 bp, Artificial
  Synthetic oligonucleotide
ccgatcccacttgttgtgggacattgtcctttaaggttcccaaagatgcgaagaa

SEQ ID NO: 361719 - DNA, 55 bp, Artificial
  Synthetic oligonucleotide
ccgatcccgatagacaccctcgcatgttacaagtctctgacccgacaaagctcgg

SEQ ID NO: 361720 - DNA, 60 bp, Artificial
  Synthetic oligonucleotide
ccgatccgacatgcagacacagaacagcagcattcatagtaagaaatcattctgaggaag

SEQ ID NO: 361721 - DNA, 53 bp, Artificial
  Synthetic oligonucleotide
ccgatccgaggggcccaaccaccaagtttggagagcactccggcccaaatggt

SEQ ID NO: 361722 - DNA, 55 bp, Artificial
  Synthetic oligonucleotide
ccgatccgagtggtccgtggcgtatcgagtttggagtcatccggacgaagggctg

SEQ ID NO: 361723 - DNA, 60 bp, Artificial
  Synthetic oligonucleotide
ccgatcctatgtggaactgaactaggatcaccactagtactagatgactgttcattagag

SEQ ID NO: 361724 - DNA, 60 bp, Artificial
  Synthetic oligonucleotide
ccgatcctgatgttgagtacagaaacgatggtctaatgtcttatgccacagacgtgtgta

SEQ ID NO: 361725 - DNA, 55 bp, Artificial
  Synthetic oligonucleotide
ccgatcctttcagacataaacgaaacagttaatgacgccgctgctacagtagctg

SEQ ID NO: 361726 - DNA, 58 bp, Artificial
  Synthetic oligonucleotide
ccgatcgaatggccgtaggcagaggaacctctggagtcctctagaccgcaaggaggaa

SEQ ID NO: 361727 - DNA, 54 bp, Artificial
  Synthetic oligonucleotide
ccgatcgaggtcctatattaagttgaaacgacttcgtttcaaagggactgtcaa

SEQ ID NO: 361728 - DNA, 50 bp, Artificial
  Synthetic oligonucleotide
ccgatcggagggagacacctatcatctagccactcggaggtccggtcgcc

SEQ ID NO: 361729 - DNA, 55 bp, Artificial
  Synthetic oligonucleotide
ccgatcggtgcgatggggtgatatccggcagtcggggaaccttctagtgctaagt

SEQ ID NO: 361730 - DNA, 55 bp, Artificial
  Synthetic oligonucleotide
ccgatcgtcataactttcgttaagcgtcggagacaatacgtttgccctactcgcg

SEQ ID NO: 361731 - DNA, 60 bp, Artificial
  Synthetic oligonucleotide
ccgatcgtgccttccttcgacatgaataatgaaggatcttatttcttcggagacaatgca

SEQ ID NO: 361732 - DNA, 50 bp, Artificial
  Synthetic oligonucleotide
ccgatcgtggacagatgagtgaagaggaatgggaacttacgaggtttgcg

SEQ ID NO: 361733 - DNA, 60 bp, Artificial
  Synthetic oligonucleotide
ccgatctaattgttgaacgacaggatgggaaagatgtgtgctaccctggcaaattctcga

SEQ ID NO: 361734 - DNA, 60 bp, Artificial
  Synthetic oligonucleotide
ccgatctacgatcaaggaaatctcttccacactgagaagtctgcaagactttcacacgtg

SEQ ID NO: 361735 - DNA, 60 bp, Artificial
  Synthetic oligonucleotide
ccgatctatgtcaaagtacctctcgtcacgagtagtgcaaggcttgatgcattgcaggag

SEQ ID NO: 361736 - DNA, 60 bp, Artificial
  Synthetic oligonucleotide
ccgatctcaacgtgtctgttccggctgattacaagtctgggcagagacttttcatgcagg

SEQ ID NO: 361737 - DNA, 59 bp, Artificial
  Synthetic oligonucleotide
ccgatctcagtgacgggtcttggtctactgtaagcgaggaggctagtgaggacgtcgtc

SEQ ID NO: 361738 - DNA, 55 bp, Artificial
  Synthetic oligonucleotide
ccgatctggataaatggtgtaagaatttcgtccggactctagatgggactgactc

SEQ ID NO: 361739 - DNA, 55 bp, Artificial
  Synthetic oligonucleotide
ccgatcttggctgtcatggccccagcattgccaatatcaccactaggagcatacc

SEQ ID NO: 361740 - DNA, 60 bp, Artificial
  Synthetic oligonucleotide
ccgatcttttgttctggggagatacatgtctcaaattaaagactcaattctgagagatgt

SEQ ID NO: 361741 - DNA, 60 bp, Artificial
  Synthetic oligonucleotide
ccgatgaaacggagcaccaaacctccggagatggactcgacgcttctgagcggacagatc

SEQ ID NO: 361742 - DNA, 55 bp, Artificial
  Synthetic oligonucleotide
ccgatgaaatctatgataatgtaaaccaaatagtgacggccatctcaagacatac

SEQ ID NO: 361743 - DNA, 55 bp, Artificial
  Synthetic oligonucleotide
ccgatgaagaagagaataggcttttgagggccgaaaggactccagccaagtgggg

SEQ ID NO: 361744 - DNA, 59 bp, Artificial
  Synthetic oligonucleotide
ccgatgaagagcacatccagaagccatttagtctacgtcgaagactaagtggagggaaa

SEQ ID NO: 361745 - DNA, 55 bp, Artificial
  Synthetic oligonucleotide
ccgatgaagctcgtgattactgtatgaaggaggaaactagggtttctggcccctt

SEQ ID NO: 361746 - DNA, 55 bp, Artificial
  Synthetic oligonucleotide
ccgatgaatatgatggccgtgccgtttcacggcaactctctttatgtagttaacc

SEQ ID NO: 361747 - DNA, 59 bp, Artificial
  Synthetic oligonucleotide
ccgatgacgtttgaagataaaacgacttgtcgcgacatgagagacggatttactatgcc

SEQ ID NO: 361748 - DNA, 60 bp, Artificial
  Synthetic oligonucleotide
ccgatgactttatacattggaattgcacagcttcgttctaatattgttgtatcaactaaa

SEQ ID NO: 361749 - DNA, 58 bp, Artificial
  Synthetic oligonucleotide
ccgatgagatacaagagattggatcaactaaatcacaaaatgtcacaattaatcctgg

SEQ ID NO: 361750 - DNA, 55 bp, Artificial
  Synthetic oligonucleotide
ccgatgagcaacgagttcgtccactccgacatccacggcctgtacctcgcgtgct

SEQ ID NO: 361751 - DNA, 55 bp, Artificial
  Synthetic oligonucleotide
ccgatgataatgtccccacacgtaggacattcttctgttgtgaagacttgagctc

SEQ ID NO: 361752 - DNA, 55 bp, Artificial
  Synthetic oligonucleotide
ccgatgatgtctcacctgaagtaacattatgtaaatctgctttaggaggaccatt

SEQ ID NO: 361753 - DNA, 55 bp, Artificial
  Synthetic oligonucleotide
ccgatgattgatattctctccttgctgatactcgatgtggcaatcccgcgcgctc

SEQ ID NO: 361754 - DNA, 55 bp, Artificial
  Synthetic oligonucleotide
ccgatgcaagtgaaactctattagcaaatgtaacatccgttaggcaagagtacgc

SEQ ID NO: 361755 - DNA, 60 bp, Artificial
  Synthetic oligonucleotide
ccgatgcactgggaattttcaaggcgctcatgatggtggctataacgtccataagcgcgt

SEQ ID NO: 361756 - DNA, 55 bp, Artificial
  Synthetic oligonucleotide
ccgatgcaggatcaagggtttgtatgatgccagattcagatattacaataacgtt

SEQ ID NO: 361757 - DNA, 60 bp, Artificial
  Synthetic oligonucleotide
ccgatgcatcagaagaaggttggggagcagtcttactctgcaaaccagataaatatgcta

SEQ ID NO: 361758 - DNA, 58 bp, Artificial
  Synthetic oligonucleotide
ccgatgccagggtcacaacatacaatgcaggccgcttttccacccctcagccttcggg

SEQ ID NO: 361759 - DNA, 55 bp, Artificial
  Synthetic oligonucleotide
ccgatgccctatgttccatacccacgttcaaccgaggtctatgttcggtccattt

SEQ ID NO: 361760 - DNA, 60 bp, Artificial
  Synthetic oligonucleotide
ccgatgccgatttagctccctgaatgttcggatggaaatgtgctgaccgacttggggaca

SEQ ID NO: 361761 - DNA, 55 bp, Artificial
  Synthetic oligonucleotide
ccgatgcctgattttacatcatttaggagccacgtaactaataccattcaggatc

SEQ ID NO: 361762 - DNA, 60 bp, Artificial
  Synthetic oligonucleotide
ccgatgcgatgctgctaatagatatggatctcccaccgttccgatctcccatccgccacc

SEQ ID NO: 361763 - DNA, 59 bp, Artificial
  Synthetic oligonucleotide
ccgatgcgatttagaggggttgcgcgcacaatggaatgataaaatcctgtccaaagaag

SEQ ID NO: 361764 - DNA, 60 bp, Artificial
  Synthetic oligonucleotide
ccgatgcgttaatcggaacctgttgccgatattctatgacgcagtggtcgattttcatac

SEQ ID NO: 361765 - DNA, 55 bp, Artificial
  Synthetic oligonucleotide
ccgatgctctcagaaaacttgctactggtttcgctggtgccggtgccacccctcg

SEQ ID NO: 361766 - DNA, 60 bp, Artificial
  Synthetic oligonucleotide
ccgatggaacaaactttgactggggaaccagagcactatgcatactaagacaaaacatga

SEQ ID NO: 361767 - DNA, 55 bp, Artificial
  Synthetic oligonucleotide
ccgatggaataggatcggtatcaccgacgagttagttaaggcggtcgaatcgcgc

SEQ ID NO: 361768 - DNA, 55 bp, Artificial
  Synthetic oligonucleotide
ccgatggacaaaagacgcacgcaacactcaagatcacgtgcgctccctgtgccta

SEQ ID NO: 361769 - DNA, 55 bp, Artificial
  Synthetic oligonucleotide
ccgatggacctgacaggacgtcaataagtacactgtatgatggaacgatcaaggc

SEQ ID NO: 361770 - DNA, 60 bp, Artificial
  Synthetic oligonucleotide
ccgatggacgtaacgctgtactattatcaacagacagacgaagccaataaatggatatca

SEQ ID NO: 361771 - DNA, 55 bp, Artificial
  Synthetic oligonucleotide
ccgatggactggcgtcactcaattacacgatggcctccgaccgcgttctccgtct

SEQ ID NO: 361772 - DNA, 60 bp, Artificial
  Synthetic oligonucleotide
ccgatggatatgcatatcgccgaacgcattgcggtgtaccttctggtttatataacactc

SEQ ID NO: 361773 - DNA, 55 bp, Artificial
  Synthetic oligonucleotide
ccgatggattgcttcttcggtccgtcggattttgttcacatcacattgattcctc

SEQ ID NO: 361774 - DNA, 51 bp, Artificial
  Synthetic oligonucleotide
ccgatggccaccgtacatacgcgagagagtgacatcaagtcttggacggag

SEQ ID NO: 361775 - DNA, 58 bp, Artificial
  Synthetic oligonucleotide
ccgatggcgtaatagttggcttttggcgcgatccatctagtggtggtgccataccgtt

SEQ ID NO: 361776 - DNA, 56 bp, Artificial
  Synthetic oligonucleotide
ccgatggctacatttatcataaatcggttttctgtaaacgtttctattgtgtaata

SEQ ID NO: 361777 - DNA, 60 bp, Artificial
  Synthetic oligonucleotide
ccgatggctgatcctcgtgagactatttacctacccactactgatagtgtggcttcgtat

SEQ ID NO: 361778 - DNA, 55 bp, Artificial
  Synthetic oligonucleotide
ccgatgggaatgcatatccactacaaaacttgacaaaggtcaacaacggggacta

SEQ ID NO: 361779 - DNA, 55 bp, Artificial
  Synthetic oligonucleotide
ccgatggggatgacgctggattttcagagcgccgcagatggtcagtcagaccctt

SEQ ID NO: 361780 - DNA, 60 bp, Artificial
  Synthetic oligonucleotide
ccgatggggggctgccatgttgactaagtcaatccggtgtgctctttaactctctgcatg

SEQ ID NO: 361781 - DNA, 52 bp, Artificial
  Synthetic oligonucleotide
ccgatggtaccaaacaacggtccatctatccgtcaccgagtcagacgattcc

SEQ ID NO: 361782 - DNA, 55 bp, Artificial
  Synthetic oligonucleotide
ccgatggtgagaattagcaaggtcagaaaataagacagtgtaatgttcgtccctc

SEQ ID NO: 361783 - DNA, 55 bp, Artificial
  Synthetic oligonucleotide
ccgatgtacgatccaaacgtggaggatcagaaccatctacgagtgatttgttaag

SEQ ID NO: 361784 - DNA, 55 bp, Artificial
  Synthetic oligonucleotide
ccgatgtagccactgttagtggcaagccccggccgatacctcggtgaggggtgaa

SEQ ID NO: 361785 - DNA, 55 bp, Artificial
  Synthetic oligonucleotide
ccgatgtatagccgcacgtgatagccgtttcgatagcccattcgagcgatgcacg

SEQ ID NO: 361786 - DNA, 55 bp, Artificial
  Synthetic oligonucleotide
ccgatgtcacagaggtgatacacaaattcaaacgaggagatcattcgagctgaag

SEQ ID NO: 361787 - DNA, 59 bp, Artificial
  Synthetic oligonucleotide
ccgatgtcactcgaggtaatgggctgacacatcgtgttggtaagaggttctgtattaag

SEQ ID NO: 361788 - DNA, 57 bp, Artificial
  Synthetic oligonucleotide
ccgatgtgactcctgcggtggtttgtctcaaaatggcgaaatttctgtcactaccgg

SEQ ID NO: 361789 - DNA, 55 bp, Artificial
  Synthetic oligonucleotide
ccgatgtgcgctgaatataatggactgcgtctagccggcaaacaagggctaccaa

SEQ ID NO: 361790 - DNA, 57 bp, Artificial
  Synthetic oligonucleotide
ccgatgtggtaaactttgtgagtatggaattttctctcactgacccgagacttgaac

SEQ ID NO: 361791 - DNA, 50 bp, Artificial
  Synthetic oligonucleotide
ccgatgttatgtcagcggtggccaagctaggacaaatagtgcctgagcca

SEQ ID NO: 361792 - DNA, 55 bp, Artificial
  Synthetic oligonucleotide
ccgatgttctcagaattctctggggcaagaaacaatatccctcaaggcttgccgg

SEQ ID NO: 361793 - DNA, 56 bp, Artificial
  Synthetic oligonucleotide
ccgatgttttcttaaaggactgtcttatgtcttatatagaattctgcaacacctcc

SEQ ID NO: 361794 - DNA, 55 bp, Artificial
  Synthetic oligonucleotide
ccgattaaacgtaaccaagatggcaattggttaggtgaccacctatctgacaagg

SEQ ID NO: 361795 - DNA, 55 bp, Artificial
  Synthetic oligonucleotide
ccgattaacagggctgttgcacaaaacgcctatgtgtgagggcagttatggcacg

SEQ ID NO: 361796 - DNA, 57 bp, Artificial
  Synthetic oligonucleotide
ccgattaactacagtgtattcaggatgaaccaatctcgaagctttgttacggggaga

SEQ ID NO: 361797 - DNA, 60 bp, Artificial
  Synthetic oligonucleotide
ccgattactggatcaatggacacactatatacgaactcaacacgagagggagtgttccta

SEQ ID NO: 361798 - DNA, 55 bp, Artificial
  Synthetic oligonucleotide
ccgattaggaacgggtattaatatcgctctgtcccgctggaactatcattcccac

SEQ ID NO: 361799 - DNA, 60 bp, Artificial
  Synthetic oligonucleotide
ccgattatacgcaacatatggctactataggtgtgctggcaacgcctgagataccgttca

SEQ ID NO: 361800 - DNA, 59 bp, Artificial
  Synthetic oligonucleotide
ccgattatccgttagctgaagatgaatctttcttcaaacaaggtcacaagtatgattac

SEQ ID NO: 361801 - DNA, 59 bp, Artificial
  Synthetic oligonucleotide
ccgattatcggtcggttgctttgcctcctaagctatgctggtatagtatactctctcgt

SEQ ID NO: 361802 - DNA, 53 bp, Artificial
  Synthetic oligonucleotide
ccgattcaacgaagtttgggtcgagagaaaggcgtttccgcgagcagggcccc

SEQ ID NO: 361803 - DNA, 52 bp, Artificial
  Synthetic oligonucleotide
ccgattcacgccctaagttttccatcccgttgttacaagggtttgtggacga

SEQ ID NO: 361804 - DNA, 59 bp, Artificial
  Synthetic oligonucleotide
ccgattcgaggctgacagcaccaactctacaaccagtgttgagaatttagtccgtataa

SEQ ID NO: 361805 - DNA, 51 bp, Artificial
  Synthetic oligonucleotide
ccgattcgctgtagtctggccgtcgattaaccccgacaccggaggaacgca

SEQ ID NO: 361806 - DNA, 55 bp, Artificial
  Synthetic oligonucleotide
ccgattcggaggctgactcacaggtagacagcgatgctgggcatgatctagagga

SEQ ID NO: 361807 - DNA, 60 bp, Artificial
  Synthetic oligonucleotide
ccgattcggggctgccatgttgacttagtcaatcggtactcagctctagtcttatgtcaa

SEQ ID NO: 361808 - DNA, 60 bp, Artificial
  Synthetic oligonucleotide
ccgattctatatgtcatagtcgacacgaagtaagacagcatcttgcagcaatcgcaaagg

SEQ ID NO: 361809 - DNA, 60 bp, Artificial
  Synthetic oligonucleotide
ccgattctatattctgttgatgattgcagcctccgatacttttaatacacgagtgtggtg

SEQ ID NO: 361810 - DNA, 60 bp, Artificial
  Synthetic oligonucleotide
ccgattctgactgggcaggctagacggaactggcagacggaattgaaccagatgcccgaa

SEQ ID NO: 361811 - DNA, 55 bp, Artificial
  Synthetic oligonucleotide
ccgattctggcacttccggtcatcaatttacgacacgcgcggcggtgtgtacccc

SEQ ID NO: 361812 - DNA, 51 bp, Artificial
  Synthetic oligonucleotide
ccgattgacaacttgcgtggtatcaatctatatcacacatgtagagaccga

SEQ ID NO: 361813 - DNA, 60 bp, Artificial
  Synthetic oligonucleotide
ccgattgacgccgaatgctcagttaccagtatgcttagcgttcttgtgttgcgcaaggac

SEQ ID NO: 361814 - DNA, 55 bp, Artificial
  Synthetic oligonucleotide
ccgattgacgtcatgttaggggtataaaacgactggctcgagccctcggattcac

SEQ ID NO: 361815 - DNA, 60 bp, Artificial
  Synthetic oligonucleotide
ccgattgagagacttcgccttgattgtagcgagagctgtggaacttctgggacgcagcag

SEQ ID NO: 361816 - DNA, 56 bp, Artificial
  Synthetic oligonucleotide
ccgattgatacggggggataattaatcccagcttacggtgtgtgccgacttgtatg

SEQ ID NO: 361817 - DNA, 58 bp, Artificial
  Synthetic oligonucleotide
ccgattgatttgcccccgcagcaagcggtataatatcatcctaggaactcgtttgaaa

SEQ ID NO: 361818 - DNA, 58 bp, Artificial
  Synthetic oligonucleotide
ccgattgatttgttctcaattatcggtaattcagtttattgtcgaagctatgtagcac

SEQ ID NO: 361819 - DNA, 55 bp, Artificial
  Synthetic oligonucleotide
ccgattggctccttgaggtgcttcgtgaagtgcctactccctcagagatcctcta

SEQ ID NO: 361820 - DNA, 59 bp, Artificial
  Synthetic oligonucleotide
ccgattgggggctgccatattgacttggtcaatcggtgtctcacaacctttactatgta

SEQ ID NO: 361821 - DNA, 60 bp, Artificial
  Synthetic oligonucleotide
ccgattgggtgctggcatattgacttggtcaatcggtgtctctcaacttataatatgtat

SEQ ID NO: 361822 - DNA, 60 bp, Artificial
  Synthetic oligonucleotide
ccgattgggtggcatgttgacttagcttgggtgtctctcaactctctctaatcctatgta

SEQ ID NO: 361823 - DNA, 60 bp, Artificial
  Synthetic oligonucleotide
ccgattgggtggtgccatgtcgacttagtcaatcggatgtctctcgactctctctatgta

SEQ ID NO: 361824 - DNA, 55 bp, Artificial
  Synthetic oligonucleotide
ccgattggtccaattcgtcaaagacaggatctcagtagttcaggctttagttctg

SEQ ID NO: 361825 - DNA, 59 bp, Artificial
  Synthetic oligonucleotide
ccgattggttgaaagccctatcgaaacgctgtggaaatcccaagctggcaagattcaga

SEQ ID NO: 361826 - DNA, 50 bp, Artificial
  Synthetic oligonucleotide
ccgattgtattaatgttcgttgttttagggattgaaactttgcgaaaatt

SEQ ID NO: 361827 - DNA, 53 bp, Artificial
  Synthetic oligonucleotide
ccgattgtcaaatcaaatctcaatactctgatgtcgttccaatcatcgcaaac

SEQ ID NO: 361828 - DNA, 52 bp, Artificial
  Synthetic oligonucleotide
ccgatttaccaggtttagtgtacgacgatttgagttttcacctttcgtctta

SEQ ID NO: 361829 - DNA, 55 bp, Artificial
  Synthetic oligonucleotide
ccgatttattccatcggcaaaacaatagactcagagatttatggtcctcgtgatc

SEQ ID NO: 361830 - DNA, 58 bp, Artificial
  Synthetic oligonucleotide
ccgatttcggtcgtgtttggcaacgtaggtattgtgtcagcataattgcaaggttaca

SEQ ID NO: 361831 - DNA, 52 bp, Artificial
  Synthetic oligonucleotide
ccgatttcgttaaagacacaccgtagacgggttacagcccgtgtacataaaa

SEQ ID NO: 361832 - DNA, 54 bp, Artificial
  Synthetic oligonucleotide
ccgatttcttcttttagtattaatgatggatccctccttccaccagtaaaggga

SEQ ID NO: 361833 - DNA, 56 bp, Artificial
  Synthetic oligonucleotide
ccgatttgagccgtacgtaggtctcagcggtcggtctgggagattgaaggtttcac

SEQ ID NO: 361834 - DNA, 60 bp, Artificial
  Synthetic oligonucleotide
ccgatttggggctgccatgttgacttagtcaatcggtgtctctcaatttgttctatgtat

SEQ ID NO: 361835 - DNA, 55 bp, Artificial
  Synthetic oligonucleotide
ccgatttgtcggtagttgtaccccttccctacgagatcctcaatcgtgctgaggg

SEQ ID NO: 361836 - DNA, 54 bp, Artificial
  Synthetic oligonucleotide
ccgattttcgcttactattcgactttacactaactgatctaacggataagtcgt

SEQ ID NO: 361837 - DNA, 54 bp, Artificial
  Synthetic oligonucleotide
ccgattttgaccagggctggggccctattagtcataccaatgggagcgggcctg

SEQ ID NO: 361838 - DNA, 55 bp, Artificial
  Synthetic oligonucleotide
ccgattttgatttcatattcctggtgccacccacagtcgagtcaagaactaagcc

SEQ ID NO: 361839 - DNA, 55 bp, Artificial
  Synthetic oligonucleotide
ccgattttgcccagggctggggccctatcgcttatgctaacggaagcggctccga

SEQ ID NO: 361840 - DNA, 55 bp, Artificial
  Synthetic oligonucleotide
ccgattttgtctgcattcgctcggactctatctcgtgtgtcaccactccgtatca

SEQ ID NO: 361841 - DNA, 57 bp, Artificial
  Synthetic oligonucleotide
ccgatttttctggacacatgactcatctgcgggcgtcctagtgcactatgataagcc

SEQ ID NO: 361842 - DNA, 55 bp, Artificial
  Synthetic oligonucleotide
ccgcaaaaccgaatcgcatcggctatatcagtacaatacttatctttccggaagg

SEQ ID NO: 361843 - DNA, 55 bp, Artificial
  Synthetic oligonucleotide
ccgcaaaactcgcaaactgggcagggtagcaaggaacagataaaagccggcacag

SEQ ID NO: 361844 - DNA, 55 bp, Artificial
  Synthetic oligonucleotide
ccgcaaaatagaggattggaatgatgctccagtccccaacgactacattcttctc

SEQ ID NO: 361845 - DNA, 55 bp, Artificial
  Synthetic oligonucleotide
ccgcaaaattatactgtgcctggtcagtgtattcgtagttataaccgcctggtgg

SEQ ID NO: 361846 - DNA, 58 bp, Artificial
  Synthetic oligonucleotide
ccgcaaacaaccaagtaacgccatgtgaaccaatagtaatagagaggaacataacaga

SEQ ID NO: 361847 - DNA, 55 bp, Artificial
  Synthetic oligonucleotide
ccgcaaaccgcactatactcccatatggccaaagttcgagcgtcgttagagagga

SEQ ID NO: 361848 - DNA, 57 bp, Artificial
  Synthetic oligonucleotide
ccgcaaacctcgtgccgtctgatgttgtcacgcctacttcgtacggttggccgccta

SEQ ID NO: 361849 - DNA, 50 bp, Artificial
  Synthetic oligonucleotide
ccgcaaaccttcccggctggacgcgcctgtactcgtcccacaaggaggtg

SEQ ID NO: 361850 - DNA, 55 bp, Artificial
  Synthetic oligonucleotide
ccgcaaaccttctttgtaacggcactcaagcaggtaaggtcgcttggggtgctaa

SEQ ID NO: 361851 - DNA, 52 bp, Artificial
  Synthetic oligonucleotide
ccgcaaagaggtttaccaagcgaaccacgcaaacgcgttgaggaagttaggt

SEQ ID NO: 361852 - DNA, 55 bp, Artificial
  Synthetic oligonucleotide
ccgcaaagatacgcacggaacgtgtagacttgaaatcacactccttcgcgtggcg

SEQ ID NO: 361853 - DNA, 55 bp, Artificial
  Synthetic oligonucleotide
ccgcaaagtataactatactatctcatacggtgactggacggaccgagatatgga

SEQ ID NO: 361854 - DNA, 55 bp, Artificial
  Synthetic oligonucleotide
ccgcaaagttaggctctttgacgaccacgaccaagcttgcactaagcacttcgcc

SEQ ID NO: 361855 - DNA, 60 bp, Artificial
  Synthetic oligonucleotide
ccgcaaagttcctgcctcatcggacttatccgttaccgccatctctgctatgttcgcgga

SEQ ID NO: 361856 - DNA, 60 bp, Artificial
  Synthetic oligonucleotide
ccgcaaatgggacgattgaaccagggtgattacgcttcgcaggagcagcacattcgtaga

SEQ ID NO: 361857 - DNA, 60 bp, Artificial
  Synthetic oligonucleotide
ccgcaaattggctcagcggttggttgtaaccctgatgttgattggcagaggtttggcaca

SEQ ID NO: 361858 - DNA, 54 bp, Artificial
  Synthetic oligonucleotide
ccgcaacaaccgtggtatgacaagagattaaaccttagactgggggtatggccg

SEQ ID NO: 361859 - DNA, 55 bp, Artificial
  Synthetic oligonucleotide
ccgcaacacaaactgaccatatctgaagtatcagggcaaggactgtgcataggga

SEQ ID NO: 361860 - DNA, 60 bp, Artificial
  Synthetic oligonucleotide
ccgcaacagacttggaaatggatgttactggcgcgagcaaatttgagtcgaagaaagaga

SEQ ID NO: 361861 - DNA, 55 bp, Artificial
  Synthetic oligonucleotide
ccgcaacagagctaaaattaaatacatgggactgtttaggtcatttagtactacc

SEQ ID NO: 361862 - DNA, 54 bp, Artificial
  Synthetic oligonucleotide
ccgcaaccaaaacggatttgacctccgttattcgatgtcgcgaaaggtggtggc

SEQ ID NO: 361863 - DNA, 56 bp, Artificial
  Synthetic oligonucleotide
ccgcaacccctcccggagcgacagatccctttccccagagcaacagcccaatagaa

SEQ ID NO: 361864 - DNA, 52 bp, Artificial
  Synthetic oligonucleotide
ccgcaacccttttgcggctcctagaagaccatggttcccaaggaccgacccc

SEQ ID NO: 361865 - DNA, 55 bp, Artificial
  Synthetic oligonucleotide
ccgcaacgatgcatcgcgagggattcttgtgttgcaaggtgacggacacactcaa

SEQ ID NO: 361866 - DNA, 55 bp, Artificial
  Synthetic oligonucleotide
ccgcaacgctaattattctcctcgtgcaggtagtgggccaagagttcacaaggcc

SEQ ID NO: 361867 - DNA, 55 bp, Artificial
  Synthetic oligonucleotide
ccgcaacgggcataccacctccacaacccaatcgagtgtaggagtcacctacggg

SEQ ID NO: 361868 - DNA, 60 bp, Artificial
  Synthetic oligonucleotide
ccgcaactgaagcagatatttaagcgggcgcattgggagaaggcacgcggcagtgatgag

SEQ ID NO: 361869 - DNA, 60 bp, Artificial
  Synthetic oligonucleotide
ccgcaacttacttgagatccattatgcttcccgagaatggaccagcaagcattccggacg

SEQ ID NO: 361870 - DNA, 56 bp, Artificial
  Synthetic oligonucleotide
ccgcaagacaaccagctggcatatgtggtgataggtttgttattcatgatacttac

SEQ ID NO: 361871 - DNA, 51 bp, Artificial
  Synthetic oligonucleotide
ccgcaagagaaaagcaccgaaaaggtctccaacccggtggtcgggtaccgc

SEQ ID NO: 361872 - DNA, 59 bp, Artificial
  Synthetic oligonucleotide
ccgcaagagacgcggtgtgccttctggctcttggtggacccaacttgttgacagcgtgg

SEQ ID NO: 361873 - DNA, 60 bp, Artificial
  Synthetic oligonucleotide
ccgcaagcctctatctaccgtccatttgtttttgcgcgatcggacggctgagttgatctg

SEQ ID NO: 361874 - DNA, 50 bp, Artificial
  Synthetic oligonucleotide
ccgcaagctaggtcaattctcttcctgcgaattggtctcttggcctgctt

SEQ ID NO: 361875 - DNA, 55 bp, Artificial
  Synthetic oligonucleotide
ccgcaagctgacatcacaccgatgcaaccaagatcggtagaaaccaggaacctgg

SEQ ID NO: 361876 - DNA, 55 bp, Artificial
  Synthetic oligonucleotide
ccgcaagcttacctgttattaaggccaattttagtagtctcggtgctaattggtc

SEQ ID NO: 361877 - DNA, 55 bp, Artificial
  Synthetic oligonucleotide
ccgcaaggaggctatgcttggggtacatgtcatatgggatctaggtctacaatcc

SEQ ID NO: 361878 - DNA, 55 bp, Artificial
  Synthetic oligonucleotide
ccgcaaggatggaagggctcaccagctatcttccaacatacaatgaggaaggtac

SEQ ID NO: 361879 - DNA, 47 bp, Artificial
  Synthetic oligonucleotide
ccgcaagggaggaggggttaggaaccgggtttgtggcggggacgggg

SEQ ID NO: 361880 - DNA, 55 bp, Artificial
  Synthetic oligonucleotide
ccgcaagtaacgttttcatattgctattgctagtcccaccgcccataacgtgtgc

SEQ ID NO: 361881 - DNA, 55 bp, Artificial
  Synthetic oligonucleotide
ccgcaagtatgcaggaagaggaggtctctcaggatctcgatgaatcacacgagcc

SEQ ID NO: 361882 - DNA, 55 bp, Artificial
  Synthetic oligonucleotide
ccgcaagtgcagagggctaccagcttgtgaatgttgagtgggccaacgcagtggc

SEQ ID NO: 361883 - DNA, 56 bp, Artificial
  Synthetic oligonucleotide
ccgcaagtttgttaagaggtggagtcctcttctattagtcttgcgagaaagacacg

SEQ ID NO: 361884 - DNA, 55 bp, Artificial
  Synthetic oligonucleotide
ccgcaataatattaccggatggccgcgatttttttggtgtcttgcgtgggaccac

SEQ ID NO: 361885 - DNA, 54 bp, Artificial
  Synthetic oligonucleotide
ccgcaataccccagtcactgatacgaatgaggttgttagttttccactcactgc

SEQ ID NO: 361886 - DNA, 59 bp, Artificial
  Synthetic oligonucleotide
ccgcaatcagcggaaatttgacgggttgagagctttgcaggctccagttccattacctg

SEQ ID NO: 361887 - DNA, 60 bp, Artificial
  Synthetic oligonucleotide
ccgcaatcttggtctgcagggctgtgctttccagtctactgttgctgagcttcagcgtct

SEQ ID NO: 361888 - DNA, 57 bp, Artificial
  Synthetic oligonucleotide
ccgcaatcttgtgggccgcatagggaaccttagcttgtaggttcattgcgacatggg

SEQ ID NO: 361889 - DNA, 58 bp, Artificial
  Synthetic oligonucleotide
ccgcaatgagtgctcgtttgccgactcaggtgagcgccccttctgaggtttacacccc

SEQ ID NO: 361890 - DNA, 55 bp, Artificial
  Synthetic oligonucleotide
ccgcaatgcaatacaagaataaatctgtgcgtatgacgaggcaccaagcattgcg

SEQ ID NO: 361891 - DNA, 55 bp, Artificial
  Synthetic oligonucleotide
ccgcaatgcatggcgacaccagttgtagaatgtaatgcaacaattaaggaggcga

SEQ ID NO: 361892 - DNA, 55 bp, Artificial
  Synthetic oligonucleotide
ccgcaatggtcgccaggcgtacctaaccgagattaagagtcgcgttaatcaggcg

SEQ ID NO: 361893 - DNA, 55 bp, Artificial
  Synthetic oligonucleotide
ccgcacaaacacaataggagatgactatatcccaacatgtgattgtacagaagct

SEQ ID NO: 361894 - DNA, 55 bp, Artificial
  Synthetic oligonucleotide
ccgcacaaacactataggtgatgactatataccaacttgtgattgtactgatgcc

SEQ ID NO: 361895 - DNA, 55 bp, Artificial
  Synthetic oligonucleotide
ccgcacaaagactcgtgaccgctcagttaatagctgattacgttggttcaacgag

SEQ ID NO: 361896 - DNA, 55 bp, Artificial
  Synthetic oligonucleotide
ccgcacaaataattgtgtgggcccaaagacctagcccacatggtctttccagttc

SEQ ID NO: 361897 - DNA, 55 bp, Artificial
  Synthetic oligonucleotide
ccgcacaacacgtctgcgtcgagagaaaggcattgcggcactgatgcgctcgacc

SEQ ID NO: 361898 - DNA, 60 bp, Artificial
  Synthetic oligonucleotide
ccgcacaacgtgctcggtcgagcctcatctctcaaaggggtcgctcactagtgtacgtcc

SEQ ID NO: 361899 - DNA, 55 bp, Artificial
  Synthetic oligonucleotide
ccgcacaagcgtataggtcaaggaactttctgattactgcacacagattgcaagc

SEQ ID NO: 361900 - DNA, 60 bp, Artificial
  Synthetic oligonucleotide
ccgcacaagtgtcagtaaacactttacccgatatagtgactgaggcatcagagaaattca

SEQ ID NO: 361901 - DNA, 55 bp, Artificial
  Synthetic oligonucleotide
ccgcacaatccactactagtttgcgcaaacagaccaacaattgcgggatttccgg

SEQ ID NO: 361902 - DNA, 60 bp, Artificial
  Synthetic oligonucleotide
ccgcacaatggcctggacagtggtgaacagcatctgcaataccacaggggttgagaagcc

SEQ ID NO: 361903 - DNA, 51 bp, Artificial
  Synthetic oligonucleotide
ccgcacacgtccttacgggtaactcggctagggtttccggggtcggcttca

SEQ ID NO: 361904 - DNA, 59 bp, Artificial
  Synthetic oligonucleotide
ccgcacacttatcaagactgtaccttacgaactcttcaagactaagcaatcattcggac

SEQ ID NO: 361905 - DNA, 60 bp, Artificial
  Synthetic oligonucleotide
ccgcacagaatgctgagtccctgtcatggcccctggtccttgggtgtgagcgtattgtta

SEQ ID NO: 361906 - DNA, 55 bp, Artificial
  Synthetic oligonucleotide
ccgcacagataattatgtagtcctaatgacctggcccacatagtcttccccgttc

SEQ ID NO: 361907 - DNA, 60 bp, Artificial
  Synthetic oligonucleotide
ccgcacagataattgtgaggtcctaatgatctggcccacattgttttgccggtacgacta

SEQ ID NO: 361908 - DNA, 56 bp, Artificial
  Synthetic oligonucleotide
ccgcacagggggtgcattctccggtgagagtccgtttggaagtcgagacccactcg

SEQ ID NO: 361909 - DNA, 55 bp, Artificial
  Synthetic oligonucleotide
ccgcacagtttaagtggaagtatatggagcacccgcactgcagatcaacacgccg

SEQ ID NO: 361910 - DNA, 55 bp, Artificial
  Synthetic oligonucleotide
ccgcacatagtctttggttgacacgaagccgtgactgtatcagtttgtccggtag

SEQ ID NO: 361911 - DNA, 54 bp, Artificial
  Synthetic oligonucleotide
ccgcacatgtggaaaagctcccacagcgccccctccactttcataagcaggcag

SEQ ID NO: 361912 - DNA, 59 bp, Artificial
  Synthetic oligonucleotide
ccgcaccaaagtgggtcgcatgagcggcgacataaacacaggccttgggaacaagattc

SEQ ID NO: 361913 - DNA, 55 bp, Artificial
  Synthetic oligonucleotide
ccgcaccaacccatcccaacgtggatggtacggtgtgggcttctcgactacgact

SEQ ID NO: 361914 - DNA, 55 bp, Artificial
  Synthetic oligonucleotide
ccgcaccacccttgaaatccccgtctgctgaagcatgtggttatagtgatagggt

SEQ ID NO: 361915 - DNA, 60 bp, Artificial
  Synthetic oligonucleotide
ccgcaccagaagcgtccatactataacttctacgaccttcatactgatagcaacattctc

SEQ ID NO: 361916 - DNA, 55 bp, Artificial
  Synthetic oligonucleotide
ccgcaccagagttaaacaaactccaagagggccaaagacgctagacgacggtggc

SEQ ID NO: 361917 - DNA, 55 bp, Artificial
  Synthetic oligonucleotide
ccgcacccatggatgatagtcgtcgtaatggtaatgtgggtttcgcaacggctgc

SEQ ID NO: 361918 - DNA, 55 bp, Artificial
  Synthetic oligonucleotide
ccgcacccggtacactcagtcaagttgttgccaatatagaatcagatcagtgcca

SEQ ID NO: 361919 - DNA, 55 bp, Artificial
  Synthetic oligonucleotide
ccgcaccgaatgcggctgatcgctcgaatgtaattatcggcgatgctcaaacgaa

SEQ ID NO: 361920 - DNA, 54 bp, Artificial
  Synthetic oligonucleotide
ccgcacctattgcttcgacgggttttctagctgtagcttccccgccgagacggg

SEQ ID NO: 361921 - DNA, 60 bp, Artificial
  Synthetic oligonucleotide
ccgcacctgtctagacgcctgactatgtttgacttacttgccacagcgggatgagctaaa

SEQ ID NO: 361922 - DNA, 60 bp, Artificial
  Synthetic oligonucleotide
ccgcaccttgggcgatggcgatacactctatttctgacatacctatcactaccgtagtga

SEQ ID NO: 361923 - DNA, 55 bp, Artificial
  Synthetic oligonucleotide
ccgcacgatcaacggtgttagctttgacggtacatccaatattactattgcggat

SEQ ID NO: 361924 - DNA, 57 bp, Artificial
  Synthetic oligonucleotide
ccgcacggactttggtttccacccaaacgctgagtggatcctgaagactctcgtgaa

SEQ ID NO: 361925 - DNA, 60 bp, Artificial
  Synthetic oligonucleotide
ccgcacggatgaggcgcttcctaattgcgatctccgtatgggtgctggactatgcgtaga

SEQ ID NO: 361926 - DNA, 51 bp, Artificial
  Synthetic oligonucleotide
ccgcacgttcgtcctgtggcggcgtatgaagctgtgggagatgcgctcgta

SEQ ID NO: 361927 - DNA, 57 bp, Artificial
  Synthetic oligonucleotide
ccgcactcaacgtcggggcaggactggcagagggaagccaggcgtctacaggttcgt

SEQ ID NO: 361928 - DNA, 50 bp, Artificial
  Synthetic oligonucleotide
ccgcactcgcgcgtccaacttgcacgctgcgcagtcgcccaacaaattga

SEQ ID NO: 361929 - DNA, 57 bp, Artificial
  Synthetic oligonucleotide
ccgcactgctacttactatttcgctgatctagaggtggcagtgaaacacgaggggga

SEQ ID NO: 361930 - DNA, 55 bp, Artificial
  Synthetic oligonucleotide
ccgcactgggactggatttcagcgcaacaatattcgggccgctccagtggttccg

SEQ ID NO: 361931 - DNA, 55 bp, Artificial
  Synthetic oligonucleotide
ccgcacttattagtgttaaggagagtagtttctcactgcctaaatggttggagag

SEQ ID NO: 361932 - DNA, 54 bp, Artificial
  Synthetic oligonucleotide
ccgcacttcgtgcgttgtgccgcggccttgggggggccacaacgctacccccga

SEQ ID NO: 361933 - DNA, 58 bp, Artificial
  Synthetic oligonucleotide
ccgcacttctgagatgagtgtggaaagctttttaggtcgctctagtttggttacacgc

SEQ ID NO: 361934 - DNA, 55 bp, Artificial
  Synthetic oligonucleotide
ccgcacttgaccgggacctgggacactctcattgagcgagagaatgccattgccc

SEQ ID NO: 361935 - DNA, 55 bp, Artificial
  Synthetic oligonucleotide
ccgcacttgagactggtatgccaatagagatgttagcaagttgtgtagcggcagg

SEQ ID NO: 361936 - DNA, 55 bp, Artificial
  Synthetic oligonucleotide
ccgcactttcaacctaaagttgcaccggcttatccagatttatctcttatacaaa

SEQ ID NO: 361937 - DNA, 60 bp, Artificial
  Synthetic oligonucleotide
ccgcactttgtttgactgtattagtaccacatggagttgggtagataatagcagcacatg

SEQ ID NO: 361938 - DNA, 55 bp, Artificial
  Synthetic oligonucleotide
ccgcagaacaaactaatagcaagatcatcaatacatatggtatgaatatcagccc

SEQ ID NO: 361939 - DNA, 55 bp, Artificial
  Synthetic oligonucleotide
ccgcagaaccaatgtgtgacaacgccccgttccacactgttaccgagtcctggtg

SEQ ID NO: 361940 - DNA, 52 bp, Artificial
  Synthetic oligonucleotide
ccgcagaagaaggcaaacactatatagaagacgcagacctacaagaactaat

SEQ ID NO: 361941 - DNA, 55 bp, Artificial
  Synthetic oligonucleotide
ccgcagaagataatgtgatgctcattacatgtaggtttgatccgctctcagcgtg

SEQ ID NO: 361942 - DNA, 60 bp, Artificial
  Synthetic oligonucleotide
ccgcagaatcaaaagatggtgaggggacgcaatcggagggcagccagaagaaagagagcg

SEQ ID NO: 361943 - DNA, 56 bp, Artificial
  Synthetic oligonucleotide
ccgcagacaacttgtgggttacagtttattatggggtacctgtatggaaagaagca

SEQ ID NO: 361944 - DNA, 55 bp, Artificial
  Synthetic oligonucleotide
ccgcagacacagtgttagccaaaagaaggttagaaatgctggaaatgactagatc

SEQ ID NO: 361945 - DNA, 60 bp, Artificial
  Synthetic oligonucleotide
ccgcagacacgggccatggtactgtggtactggaactgcagtacacaggcacggatggac

SEQ ID NO: 361946 - DNA, 55 bp, Artificial
  Synthetic oligonucleotide
ccgcagactgaactggctagtaaaatcagacggaaatgcatatccccttcaaaac

SEQ ID NO: 361947 - DNA, 55 bp, Artificial
  Synthetic oligonucleotide
ccgcagagtccaatgctgttccgatgaagcgcgtgttgatgtactatatacctga

SEQ ID NO: 361948 - DNA, 55 bp, Artificial
  Synthetic oligonucleotide
ccgcagagtctagacttgtggtggacttctctcaattttccagggggcccacccg

SEQ ID NO: 361949 - DNA, 55 bp, Artificial
  Synthetic oligonucleotide
ccgcagatcttaacacgacgttatagatacgatcaacgggccattcatatggcac

SEQ ID NO: 361950 - DNA, 60 bp, Artificial
  Synthetic oligonucleotide
ccgcagatgtattagaggcggcatcggaggaggttccgctgattggggcggggatggcta

SEQ ID NO: 361951 - DNA, 55 bp, Artificial
  Synthetic oligonucleotide
ccgcagatttggatcaatatcctctaggcagacgcttcttagcacaaaatggtat

SEQ ID NO: 361952 - DNA, 55 bp, Artificial
  Synthetic oligonucleotide
ccgcagcagactggctcgctacgcacagcacacacttcacagcagtatttgcgtg

SEQ ID NO: 361953 - DNA, 55 bp, Artificial
  Synthetic oligonucleotide
ccgcagcatccccaccgcgcaaaggcatcccatcaaatacgatgagtgtcgcgct

SEQ ID NO: 361954 - DNA, 55 bp, Artificial
  Synthetic oligonucleotide
ccgcagccaagatgaacttgtaggtagggccagagtatcgcaaggtgccggatgg

SEQ ID NO: 361955 - DNA, 55 bp, Artificial
  Synthetic oligonucleotide
ccgcagcgacagttttgagagagacaatctttcgcttgatcagccgtgaacgtgt

SEQ ID NO: 361956 - DNA, 55 bp, Artificial
  Synthetic oligonucleotide
ccgcagcgattggttcgattgatgtatgctattggagtagcgtgctgttgtcgat

SEQ ID NO: 361957 - DNA, 55 bp, Artificial
  Synthetic oligonucleotide
ccgcagctattgcacacaatccagtgtgttgatagtcgtaatgggcaactgtggg

SEQ ID NO: 361958 - DNA, 58 bp, Artificial
  Synthetic oligonucleotide
ccgcagctgctgagttctgcgtgattgagagggatgataggactgagacacccatttg

SEQ ID NO: 361959 - DNA, 51 bp, Artificial
  Synthetic oligonucleotide
ccgcagctggtttgaccgctatgggaatcgaggaaataccaattaaatgta

SEQ ID NO: 361960 - DNA, 55 bp, Artificial
  Synthetic oligonucleotide
ccgcagcttaatctggcgttccatgtattcattaagggtttcaaccatcgtgggg

SEQ ID NO: 361961 - DNA, 60 bp, Artificial
  Synthetic oligonucleotide
ccgcaggaagagtcaacctcagggatgttgatggtctgcattcatggtgcccccattaat

SEQ ID NO: 361962 - DNA, 50 bp, Artificial
  Synthetic oligonucleotide
ccgcaggacgcatccaaacttaatggtgattgcgtgggcggcacttataa

SEQ ID NO: 361963 - DNA, 55 bp, Artificial
  Synthetic oligonucleotide
ccgcaggactgtgggtcaccgtctctttctaaagggctctcaaaagacaaacagg

SEQ ID NO: 361964 - DNA, 55 bp, Artificial
  Synthetic oligonucleotide
ccgcaggaggtaggagagtggataacaggccactggacgttgagatcttcagggc

SEQ ID NO: 361965 - DNA, 58 bp, Artificial
  Synthetic oligonucleotide
ccgcaggatgtaaccaaacgcgcactaaagtacctcatagcttataagaaagcttgtg

SEQ ID NO: 361966 - DNA, 57 bp, Artificial
  Synthetic oligonucleotide
ccgcaggattagtttctggcacgtcgaatctaatgtcgcgatttttgttagtgttcc

SEQ ID NO: 361967 - DNA, 55 bp, Artificial
  Synthetic oligonucleotide
ccgcaggcaagagctgcaactacaaagacaagctttggagaatgggttggttttg

SEQ ID NO: 361968 - DNA, 55 bp, Artificial
  Synthetic oligonucleotide
ccgcaggcaatccaccgctactcatcattgagtgctttccggattcaatagaagt

SEQ ID NO: 361969 - DNA, 55 bp, Artificial
  Synthetic oligonucleotide
ccgcaggcactgctcaagtgtatgcgggtgatgactcggcgttagactgtgttcc

SEQ ID NO: 361970 - DNA, 52 bp, Artificial
  Synthetic oligonucleotide
ccgcagggcccactgggcgctagcacactggtatcacggtacctttgtgcgc

SEQ ID NO: 361971 - DNA, 55 bp, Artificial
  Synthetic oligonucleotide
ccgcagggggtgtctggattgtggtcgacgtacgttacgggcgcactacaagttc

SEQ ID NO: 361972 - DNA, 55 bp, Artificial
  Synthetic oligonucleotide
ccgcaggtcaaccacaaagacagcgatagaacgaacaataacgttagtaatcttg

SEQ ID NO: 361973 - DNA, 55 bp, Artificial
  Synthetic oligonucleotide
ccgcaggtcctatggaagaaggtactaccgcaggtgattcgaatgtttgtaaaag

SEQ ID NO: 361974 - DNA, 55 bp, Artificial
  Synthetic oligonucleotide
ccgcaggtcctggctcgatggccccgctcggttgtggggtgacattcattccata

SEQ ID NO: 361975 - DNA, 54 bp, Artificial
  Synthetic oligonucleotide
ccgcaggttggtgtttacccattaagtaggtatagagctttagttagtgattac

SEQ ID NO: 361976 - DNA, 59 bp, Artificial
  Synthetic oligonucleotide
ccgcagtccggcagacgactcgggtcctgactccactgtgattttgcccctccgagcca

SEQ ID NO: 361977 - DNA, 59 bp, Artificial
  Synthetic oligonucleotide
ccgcagtcctcaagatgttgtccctttagtcactcgtatggcaaccaaggctctaccca

SEQ ID NO: 361978 - DNA, 56 bp, Artificial
  Synthetic oligonucleotide
ccgcagtctgacaacaacaccgcaacaagtttcaggctcaccccagggctatggac

SEQ ID NO: 361979 - DNA, 55 bp, Artificial
  Synthetic oligonucleotide
ccgcagtgatggactcccctgtgcgtgaatccgtgatcatggcagtggatcgagc

SEQ ID NO: 361980 - DNA, 55 bp, Artificial
  Synthetic oligonucleotide
ccgcagtgcacgtgtggaaggtttaccagtgatgttaacaccaggatcaggacaa

SEQ ID NO: 361981 - DNA, 55 bp, Artificial
  Synthetic oligonucleotide
ccgcagtggcaaaattaaggcagctgactaacggggaggaaagcaccgccgaggc

SEQ ID NO: 361982 - DNA, 50 bp, Artificial
  Synthetic oligonucleotide
ccgcagtggcagtggagtacaaagtccgctcccggcaagtcacacaggtg

SEQ ID NO: 361983 - DNA, 51 bp, Artificial
  Synthetic oligonucleotide
ccgcagtgtacagccgacaactcgagatgttcgtccccgtccttgaaaacg

SEQ ID NO: 361984 - DNA, 56 bp, Artificial
  Synthetic oligonucleotide
ccgcagttaggttcgtagatccactcacaggagcgacactagacgataacccgttc

SEQ ID NO: 361985 - DNA, 59 bp, Artificial
  Synthetic oligonucleotide
ccgcagttcaagtctaagcgtcgtcgacgaatggccctacgtttggcaaggcgatgctg

SEQ ID NO: 361986 - DNA, 50 bp, Artificial
  Synthetic oligonucleotide
ccgcagttgtgcagttagtgagagagagtgctttactcaaagcttcagaa

SEQ ID NO: 361987 - DNA, 56 bp, Artificial
  Synthetic oligonucleotide
ccgcagtttgacgaagagtttgggcatgatttctccccagaacttgttgaacttgg

SEQ ID NO: 361988 - DNA, 55 bp, Artificial
  Synthetic oligonucleotide
ccgcagttttgtcgaacaactccctgacacgctaggtgcctatccttcactcagc

SEQ ID NO: 361989 - DNA, 55 bp, Artificial
  Synthetic oligonucleotide
ccgcataaacgtgacagctgctcaatgacaaaagggcgcaacttcccgagtcccg

SEQ ID NO: 361990 - DNA, 55 bp, Artificial
  Synthetic oligonucleotide
ccgcatacatgctaacagttttccaccctgaaaccaggaatgccgagctcccacg

SEQ ID NO: 361991 - DNA, 50 bp, Artificial
  Synthetic oligonucleotide
ccgcatacgacactattgctgacccggttgtgtacagcgaggcggctgct

SEQ ID NO: 361992 - DNA, 55 bp, Artificial
  Synthetic oligonucleotide
ccgcatacgcgtctattcacaagtaacggggtgtcagtaggaacgttaataagga

SEQ ID NO: 361993 - DNA, 55 bp, Artificial
  Synthetic oligonucleotide
ccgcatagacccacacttcactgccaaaacagcaatgctatagcgggttgtcctg

SEQ ID NO: 361994 - DNA, 59 bp, Artificial
  Synthetic oligonucleotide
ccgcatagcgctctctacgttcgcactgattctctacgcgaggacgctacaggctgaat

SEQ ID NO: 361995 - DNA, 54 bp, Artificial
  Synthetic oligonucleotide
ccgcataggtaaataatcgggacaccaaaggtaaatgggacaccgatacaattg

SEQ ID NO: 361996 - DNA, 57 bp, Artificial
  Synthetic oligonucleotide
ccgcatattcaaacatgatcaacgaattactaaatggggggtggaacacacgcgaat

SEQ ID NO: 361997 - DNA, 51 bp, Artificial
  Synthetic oligonucleotide
ccgcatcacttttatgatgcggcccattacattagtatccgttattctgac

SEQ ID NO: 361998 - DNA, 55 bp, Artificial
  Synthetic oligonucleotide
ccgcatcatcatcacagatgccaatacttggtgccccattcactgcagctgatgt

SEQ ID NO: 361999 - DNA, 60 bp, Artificial
  Synthetic oligonucleotide
ccgcatcatttggtttacatatgataatatactatgtttaccccatgcaccacgatgtga

SEQ ID NO: 362000 - DNA, 56 bp, Artificial
  Synthetic oligonucleotide
ccgcatccaggtgttggtgttaagagacgccttattggtttgggcctctcgacgga

SEQ ID NO: 362001 - DNA, 60 bp, Artificial
  Synthetic oligonucleotide
ccgcatcctcacgactcgtcacaatacgacgacgtcgacaacacagagttctgtcggagt

SEQ ID NO: 362002 - DNA, 50 bp, Artificial
  Synthetic oligonucleotide
ccgcatcctcgtgtaggagggcgtaggcatggttgggtaggagagggtta

SEQ ID NO: 362003 - DNA, 54 bp, Artificial
  Synthetic oligonucleotide
ccgcatcctcttgaaggactcgggactttccacgttgctaaggcaacgggggac

SEQ ID NO: 362004 - DNA, 50 bp, Artificial
  Synthetic oligonucleotide
ccgcatcgatcgtgcatatcggagtcccgacgacatgtcgcattcaaact

SEQ ID NO: 362005 - DNA, 55 bp, Artificial
  Synthetic oligonucleotide
ccgcatcggcccccggttgggggaacaagtaggtcgaaatgcagtgatactcgtc

SEQ ID NO: 362006 - DNA, 55 bp, Artificial
  Synthetic oligonucleotide
ccgcatcgggcaggaagcagtagacgaaatcgaatcgaaccataaccgccatcgc

SEQ ID NO: 362007 - DNA, 58 bp, Artificial
  Synthetic oligonucleotide
ccgcatctaatagatatgtttatcataaggagtttatggttactcgtgttaatacgtg

SEQ ID NO: 362008 - DNA, 60 bp, Artificial
  Synthetic oligonucleotide
ccgcatctactggtgcacagatcacccgtcatggttactcactcatgagccttccgaccg

SEQ ID NO: 362009 - DNA, 55 bp, Artificial
  Synthetic oligonucleotide
ccgcatctagatatcaagaaggacttagaagaagctgagcaaatgtacgacgcgt

SEQ ID NO: 362010 - DNA, 55 bp, Artificial
  Synthetic oligonucleotide
ccgcatcttgaatagatacaattccacaaaatggcacttctacaatttcagcagt

SEQ ID NO: 362011 - DNA, 59 bp, Artificial
  Synthetic oligonucleotide
ccgcatctttttggttagcgagctcaagagaggccgcaacacggcaggtggtacctcta

SEQ ID NO: 362012 - DNA, 60 bp, Artificial
  Synthetic oligonucleotide
ccgcatgacaggagcgacactttgtgttgtcacgggctaccgcctgctgacatccaagtg

SEQ ID NO: 362013 - DNA, 55 bp, Artificial
  Synthetic oligonucleotide
ccgcatgagggaggtaagacagtacatgaggaagtaaactgtgacaagtacaaag

SEQ ID NO: 362014 - DNA, 55 bp, Artificial
  Synthetic oligonucleotide
ccgcatgcaggcgcgacccacccaccgacacaccccggtggagcacgtgtgtatt

SEQ ID NO: 362015 - DNA, 55 bp, Artificial
  Synthetic oligonucleotide
ccgcatggttcgtcccctcgattgcaaaaggtggcatcatagcccgcactctgcg

SEQ ID NO: 362016 - DNA, 55 bp, Artificial
  Synthetic oligonucleotide
ccgcatggttttggggacatacgcacgtccgatattttgaaccacgaaaaggcac

SEQ ID NO: 362017 - DNA, 58 bp, Artificial
  Synthetic oligonucleotide
ccgcatgtggcaaagttgtagagcccctttaaaattgccaaaacggacaatgctatga

SEQ ID NO: 362018 - DNA, 57 bp, Artificial
  Synthetic oligonucleotide
ccgcatgttactcctgtgcctactcctactttctgtaggggtaggcatcttccttct

SEQ ID NO: 362019 - DNA, 55 bp, Artificial
  Synthetic oligonucleotide
ccgcattaccgtcttatggtaatgtgagggtccagaacctgaccctgtcttcttg

SEQ ID NO: 362020 - DNA, 55 bp, Artificial
  Synthetic oligonucleotide
ccgcattacttcgcgaatacggtgtggaaatagctcatacaggacaattcatatc

SEQ ID NO: 362021 - DNA, 55 bp, Artificial
  Synthetic oligonucleotide
ccgcattcagttctagctgtccttgaggatactattgattaccccgctcgtgctc

SEQ ID NO: 362022 - DNA, 55 bp, Artificial
  Synthetic oligonucleotide
ccgcattcatccacaaactctttggccaaccagaattcgcacaactacttgaagc

SEQ ID NO: 362023 - DNA, 55 bp, Artificial
  Synthetic oligonucleotide
ccgcattcgtttccaatggtcaggtggggtctattatggtcacttgctctgcgtg

SEQ ID NO: 362024 - DNA, 55 bp, Artificial
  Synthetic oligonucleotide
ccgcattgaacctgtatgtgcactgattcatggctcacctggtaccggtcagtcg

SEQ ID NO: 362025 - DNA, 55 bp, Artificial
  Synthetic oligonucleotide
ccgcattgacgacacaccacggcaatcagcgacctggagtctagatggcgctcac

SEQ ID NO: 362026 - DNA, 58 bp, Artificial
  Synthetic oligonucleotide
ccgcattgtgaagtaaaatgagaattcccattagatctcctggtgggtttaatgtaga

SEQ ID NO: 362027 - DNA, 55 bp, Artificial
  Synthetic oligonucleotide
ccgcatttgacgaagtattggttaaatatcgaattcccacgcagggagatcaccg

SEQ ID NO: 362028 - DNA, 55 bp, Artificial
  Synthetic oligonucleotide
ccgcatttgccgctcttttctttatgttctccctttgctcaactgcaaaagaggc

SEQ ID NO: 362029 - DNA, 59 bp, Artificial
  Synthetic oligonucleotide
ccgcattttcttagttagcgagcttaagagaggccgcaatacggcaggtgggagctcta

SEQ ID NO: 362030 - DNA, 60 bp, Artificial
  Synthetic oligonucleotide
ccgccaaagaatacgagaggatgggcgtgcacctacattgtgatgacaaggttcgaattc

SEQ ID NO: 362031 - DNA, 55 bp, Artificial
  Synthetic oligonucleotide
ccgccaacaacatatattaaaccatgatggtatatagcgcatccgccataatgag

SEQ ID NO: 362032 - DNA, 54 bp, Artificial
  Synthetic oligonucleotide
ccgccaacagacggatcttgtggttggcatgttctcgccgccataataaaccgg

SEQ ID NO: 362033 - DNA, 55 bp, Artificial
  Synthetic oligonucleotide
ccgccaacctacgagcttgcttcacggttgttgacctgtggaaaacgttccgtgc

SEQ ID NO: 362034 - DNA, 55 bp, Artificial
  Synthetic oligonucleotide
ccgccaagattagccgaactggcaataattcacgggctcttatcatgggcccgag

SEQ ID NO: 362035 - DNA, 50 bp, Artificial
  Synthetic oligonucleotide
ccgccaagccctaaaggaaaggggagaaagggtagccctcctctccctcg

SEQ ID NO: 362036 - DNA, 51 bp, Artificial
  Synthetic oligonucleotide
ccgccaagcgggttactgcgaacttaccaacattccacgcagccttcccta

SEQ ID NO: 362037 - DNA, 60 bp, Artificial
  Synthetic oligonucleotide
ccgccaataggcaggcacagtatagaatatacaaggcaaaccaaggcaggataattgggc

SEQ ID NO: 362038 - DNA, 55 bp, Artificial
  Synthetic oligonucleotide
ccgccaataggcggtgggtcacgggggccctgacaagggtctcatctcttccatt

SEQ ID NO: 362039 - DNA, 59 bp, Artificial
  Synthetic oligonucleotide
ccgccaatgcggatcgctgagatactggaggggtccaagcccttttttcgcaggctgta

SEQ ID NO: 362040 - DNA, 55 bp, Artificial
  Synthetic oligonucleotide
ccgccaatggtgcacgacctgtgaatacattggatagcgtgacttagcgagtacc

SEQ ID NO: 362041 - DNA, 55 bp, Artificial
  Synthetic oligonucleotide
ccgccaattcaatacatatactgcaaatctcaaaatgggaaacacatccatcaca

SEQ ID NO: 362042 - DNA, 53 bp, Artificial
  Synthetic oligonucleotide
ccgccaattggcggtgggtcacgggggcccctgtgggatttttatctcttcca

SEQ ID NO: 362043 - DNA, 55 bp, Artificial
  Synthetic oligonucleotide
ccgccacaattagtaaacgattaagattgaaagaaatagcgacacagactgatgg

SEQ ID NO: 362044 - DNA, 50 bp, Artificial
  Synthetic oligonucleotide
ccgccacaggaatccaagatgaatggctcacaggtgaaccacaattttcg

SEQ ID NO: 362045 - DNA, 50 bp, Artificial
  Synthetic oligonucleotide
ccgccacaggatgtcgccctatcgagcgtagacagcggcgaagtctttgg

SEQ ID NO: 362046 - DNA, 58 bp, Artificial
  Synthetic oligonucleotide
ccgccaccattggcggtaacgatgactcgcgcaccacctctatcttctacgaagtggg

SEQ ID NO: 362047 - DNA, 55 bp, Artificial
  Synthetic oligonucleotide
ccgccaccgaggaaattgaaatggaacctttacttgccccagcagatcctgacac

SEQ ID NO: 362048 - DNA, 58 bp, Artificial
  Synthetic oligonucleotide
ccgccaccgctcacaactccatgtccggagcccaccacctcacccctcccactgacta

SEQ ID NO: 362049 - DNA, 59 bp, Artificial
  Synthetic oligonucleotide
ccgccaccggctggttacgcaattgtgcggcgatatattgtcaagaggctcctcagctc

SEQ ID NO: 362050 - DNA, 50 bp, Artificial
  Synthetic oligonucleotide
ccgccactaccacaacactaggtggtgtgaaacgaataccagcatttgga

SEQ ID NO: 362051 - DNA, 55 bp, Artificial
  Synthetic oligonucleotide
ccgccactcccattgattcagttgatggcgctactgacctgatagacttctccgt

SEQ ID NO: 362052 - DNA, 55 bp, Artificial
  Synthetic oligonucleotide
ccgccactgaggctctaatcaaacatacatatgaagagcaaatcggtgaatcacc

SEQ ID NO: 362053 - DNA, 59 bp, Artificial
  Synthetic oligonucleotide
ccgccactgctcgagacgtggaaggctccagattatgaaccacctgtggtccatgggtg

SEQ ID NO: 362054 - DNA, 54 bp, Artificial
  Synthetic oligonucleotide
ccgccacttgaccagttatcaaatagggtgaagccgtcttttccgaattcggaa

SEQ ID NO: 362055 - DNA, 55 bp, Artificial
  Synthetic oligonucleotide
ccgccactttcccggtggtttccactgagccgttgcctattgccgccagaactat

SEQ ID NO: 362056 - DNA, 55 bp, Artificial
  Synthetic oligonucleotide
ccgccagctagggaacctcttgacttggctatacagcaactgcagagccttacta

SEQ ID NO: 362057 - DNA, 58 bp, Artificial
  Synthetic oligonucleotide
ccgccaggcatgaattggactgaattgattactaactattcaccatctagagaagaca

SEQ ID NO: 362058 - DNA, 60 bp, Artificial
  Synthetic oligonucleotide
ccgccagtaatggcgcgcgcacccgctgtgagcgccacccgtgctttgcaagagtggttg

SEQ ID NO: 362059 - DNA, 56 bp, Artificial
  Synthetic oligonucleotide
ccgccagtatcggtggtcccacactcctagaccgagaggtcaagctgcccccggaa

SEQ ID NO: 362060 - DNA, 55 bp, Artificial
  Synthetic oligonucleotide
ccgccagtgaccgcgcatgagccgcaggcacgacgtacggacgttatagtgcatt

SEQ ID NO: 362061 - DNA, 55 bp, Artificial
  Synthetic oligonucleotide
ccgccatagcattactagaaacagcacgacgagtacactaaactaatctgccttg

SEQ ID NO: 362062 - DNA, 59 bp, Artificial
  Synthetic oligonucleotide
ccgccatatttgatcacgtgactgcctacgtcacggccgccattttagtccacaaaatg

SEQ ID NO: 362063 - DNA, 55 bp, Artificial
  Synthetic oligonucleotide
ccgccatctgagtagtaacttcgcgcaacttttcgggtgtaattagcccggactg

SEQ ID NO: 362064 - DNA, 55 bp, Artificial
  Synthetic oligonucleotide
ccgccatgaacacctctcatcctctgccaaggcagttatataagaggactcttgg

SEQ ID NO: 362065 - DNA, 55 bp, Artificial
  Synthetic oligonucleotide
ccgccatgactcaatccgtgtcttacaatgcgtatgacacctctgatccgtccaa

SEQ ID NO: 362066 - DNA, 56 bp, Artificial
  Synthetic oligonucleotide
ccgccatgtaagcggaacgtggacttccacaagttcactagtgggttgggagtgag

SEQ ID NO: 362067 - DNA, 55 bp, Artificial
  Synthetic oligonucleotide
ccgccattgcttattaccacaaacattgacattagagagaacgacagatggcgct

SEQ ID NO: 362068 - DNA, 53 bp, Artificial
  Synthetic oligonucleotide
ccgccattttaggccctcgcgggcctccgtaggcgcgttttaatgacgtcacg

SEQ ID NO: 362069 - DNA, 56 bp, Artificial
  Synthetic oligonucleotide
ccgccatttttgcatccttcgtagaaggtgcgtccgccttcttctttctcggacgc

SEQ ID NO: 362070 - DNA, 55 bp, Artificial
  Synthetic oligonucleotide
ccgcccaaaataagcattgaacgttattacggtcgtcgcgtcgataacatacgag

SEQ ID NO: 362071 - DNA, 52 bp, Artificial
  Synthetic oligonucleotide
ccgcccaacggggaggacgaaccagtggtttcttacaacgccaagaatggcg

SEQ ID NO: 362072 - DNA, 52 bp, Artificial
  Synthetic oligonucleotide
ccgcccaactctgacacgaacggcgacgacaagctgacttcgttgcaccagt

SEQ ID NO: 362073 - DNA, 57 bp, Artificial
  Synthetic oligonucleotide
ccgcccaaggtcttacataagaggactcttggactcccagcaatgtcaacgaccgac

SEQ ID NO: 362074 - DNA, 53 bp, Artificial
  Synthetic oligonucleotide
ccgcccaatcttgacaaatctcttttcttcgacaataaggttacgccttccgg

SEQ ID NO: 362075 - DNA, 54 bp, Artificial
  Synthetic oligonucleotide
ccgcccacgcgccaaactctccgaccctcttccaccctcttgaccgctttctac

SEQ ID NO: 362076 - DNA, 54 bp, Artificial
  Synthetic oligonucleotide
ccgcccacgtgatttcaagacggaagttgacgtcatctacgggccaccggggtg

SEQ ID NO: 362077 - DNA, 55 bp, Artificial
  Synthetic oligonucleotide
ccgcccactcttgcatctcatcgggaacgttagtgaatgacgagagttgaaacgg

SEQ ID NO: 362078 - DNA, 56 bp, Artificial
  Synthetic oligonucleotide
ccgcccagactttcctagcaacctgtgtcaacggggtgttctggactgtctaccac

SEQ ID NO: 362079 - DNA, 55 bp, Artificial
  Synthetic oligonucleotide
ccgcccagattgcggagtcaatcgatggtaaactactaagtccaagaatgccttg

SEQ ID NO: 362080 - DNA, 51 bp, Artificial
  Synthetic oligonucleotide
ccgcccagggaccaccgacccaccgtcgggaggtaagccggccggcgatcg

SEQ ID NO: 362081 - DNA, 56 bp, Artificial
  Synthetic oligonucleotide
ccgcccagtgtatacaaggtcctccagtgttaaacgtcctgccctacagattagtg

SEQ ID NO: 362082 - DNA, 55 bp, Artificial
  Synthetic oligonucleotide
ccgccccatctacggcacgaatgttacgctctcccgatctaagaatccctctctt

SEQ ID NO: 362083 - DNA, 60 bp, Artificial
  Synthetic oligonucleotide
ccgcccccatgtacacactgctccgtcacaacacgaagcagcgattcagaaggactcgta

SEQ ID NO: 362084 - DNA, 55 bp, Artificial
  Synthetic oligonucleotide
ccgcccccccactctgttagaggacaagtggtacacccagcaagacctggcgccc

SEQ ID NO: 362085 - DNA, 57 bp, Artificial
  Synthetic oligonucleotide
ccgcccccctacaccttatgatccctacagcgcaggcattaggaaatttgataaaga

SEQ ID NO: 362086 - DNA, 58 bp, Artificial
  Synthetic oligonucleotide
ccgccccgtgatttcacgaaagtttacatcgctgcatccgtcggagctacactcgcgc

SEQ ID NO: 362087 - DNA, 56 bp, Artificial
  Synthetic oligonucleotide
ccgcccctcatgccctatgaaacattagggggccgacactagtgggcaagcccgat

SEQ ID NO: 362088 - DNA, 53 bp, Artificial
  Synthetic oligonucleotide
ccgcccctccggccggaatcctcgcacgggccggaccaagtggcatgtgcagt

SEQ ID NO: 362089 - DNA, 52 bp, Artificial
  Synthetic oligonucleotide
ccgcccgcgcccaaccaactgggcccacgcgtgtccacgaacccgccggagg

SEQ ID NO: 362090 - DNA, 53 bp, Artificial
  Synthetic oligonucleotide
ccgcccgctactccgtcgtaccgaaacagtactacaacccaggagttctacga

SEQ ID NO: 362091 - DNA, 55 bp, Artificial
  Synthetic oligonucleotide
ccgcccggagccgaatacatggcaagtgtattcttggcccataagtataccggag

SEQ ID NO: 362092 - DNA, 55 bp, Artificial
  Synthetic oligonucleotide
ccgcccggagtacaaccgtttatggacatgtattatgctaccattccccgcgctg

SEQ ID NO: 362093 - DNA, 60 bp, Artificial
  Synthetic oligonucleotide
ccgcccgtgaagtcaagcacaatccagcaccacgtgcagtagtcgccagtatccgcctca

SEQ ID NO: 362094 - DNA, 55 bp, Artificial
  Synthetic oligonucleotide
ccgcccgtgccagtccggcacctgttatgcccagtccggcatatgtaagactctc

SEQ ID NO: 362095 - DNA, 58 bp, Artificial
  Synthetic oligonucleotide
ccgccctagacttcttctacactctagcaaacgagggatactacgactgggcgcatgt

SEQ ID NO: 362096 - DNA, 55 bp, Artificial
  Synthetic oligonucleotide
ccgccctagatgtaccgaacaggaagctagacaacaacgcttgacaatgtgagga

SEQ ID NO: 362097 - DNA, 50 bp, Artificial
  Synthetic oligonucleotide
ccgccctatcaagacatccggcaccgactgtaatggggtggcccctgtga

SEQ ID NO: 362098 - DNA, 57 bp, Artificial
  Synthetic oligonucleotide
ccgccctcaattgcaatgacagcttgcagacgggtttcctcgcttccctgttttacg

SEQ ID NO: 362099 - DNA, 51 bp, Artificial
  Synthetic oligonucleotide
ccgccctccaagtgtgggtcccccccttacttgcacgcgggagtagggacg

SEQ ID NO: 362100 - DNA, 57 bp, Artificial
  Synthetic oligonucleotide
ccgccctccgtgttgatggccccgcaactcgttactttgccaacgactgccccatgc

SEQ ID NO: 362101 - DNA, 55 bp, Artificial
  Synthetic oligonucleotide
ccgccctggaacccaatggcatcgcgtacaagggtcacctcaagaaagtggccct

SEQ ID NO: 362102 - DNA, 55 bp, Artificial
  Synthetic oligonucleotide
ccgccctgggtcagcgagtccatgttacagaacaaggaattacgagattggatac

SEQ ID NO: 362103 - DNA, 60 bp, Artificial
  Synthetic oligonucleotide
ccgcccttccaaacgagctgatcctaacggcaggtgatgtcactgtagcgcgctttgacc

SEQ ID NO: 362104 - DNA, 52 bp, Artificial
  Synthetic oligonucleotide
ccgcccttctgtaataccccgcggcaaccctgatcagaacctcgggactcta

SEQ ID NO: 362105 - DNA, 53 bp, Artificial
  Synthetic oligonucleotide
ccgcccttgcgagcttggagacaccgggcccggtctgttcgcgctaagcttct

SEQ ID NO: 362106 - DNA, 54 bp, Artificial
  Synthetic oligonucleotide
ccgccctttgacgttgatgggttggttagccccactgatttagttaatcaggag

SEQ ID NO: 362107 - DNA, 55 bp, Artificial
  Synthetic oligonucleotide
ccgccgaaaattacgtcaatagcaggttcgtcctgacgtcatttgatgttctacc

SEQ ID NO: 362108 - DNA, 57 bp, Artificial
  Synthetic oligonucleotide
ccgccgagtttgtcatgtctgatgggtttgcggcctacaccttgacaccccggccca

SEQ ID NO: 362109 - DNA, 55 bp, Artificial
  Synthetic oligonucleotide
ccgccgcactgtcaaggacgactttactgaagggggttacatcagcatgttctac

SEQ ID NO: 362110 - DNA, 55 bp, Artificial
  Synthetic oligonucleotide
ccgccgcatttgaggatttgagagtgtcaagtttcatccggggaacaagggtgct

SEQ ID NO: 362111 - DNA, 56 bp, Artificial
  Synthetic oligonucleotide
ccgccgcgctattcgtgactgggaaacggacatctgcggcctagtggcggggtggt

SEQ ID NO: 362112 - DNA, 56 bp, Artificial
  Synthetic oligonucleotide
ccgccgcggatccgtaagttgaccaggcccattaaacgagacaatggcagacaccc

SEQ ID NO: 362113 - DNA, 55 bp, Artificial
  Synthetic oligonucleotide
ccgccgctacgagtttctgtcagcagacgaatcagagaacagttggacaaggctc

SEQ ID NO: 362114 - DNA, 57 bp, Artificial
  Synthetic oligonucleotide
ccgccgctgcactacttaataggttaagacctcagatgtccgatttttcagactttc

SEQ ID NO: 362115 - DNA, 51 bp, Artificial
  Synthetic oligonucleotide
ccgccggaagagaatgggaccggatagaaggtggaacgcacttgggcacac

SEQ ID NO: 362116 - DNA, 55 bp, Artificial
  Synthetic oligonucleotide
ccgccggactctataaaatcaccacaagccccgtgggtgtttgcctgtgcacctg

SEQ ID NO: 362117 - DNA, 60 bp, Artificial
  Synthetic oligonucleotide
ccgccggcatcccacctgttcctttttgcattccgatccctcaagtgtacccatgcatca

SEQ ID NO: 362118 - DNA, 55 bp, Artificial
  Synthetic oligonucleotide
ccgccggccctacctgcaggtttggcattcacttcaccatggttccgattttctg

SEQ ID NO: 362119 - DNA, 59 bp, Artificial
  Synthetic oligonucleotide
ccgccgggggtcattatgtccaaatggccttcgtgaagctggccgcactgacaggcacg

SEQ ID NO: 362120 - DNA, 60 bp, Artificial
  Synthetic oligonucleotide
ccgccgtaacctccaagctcaatgctctgattaacgcactcaaagcataaagagcatgct

SEQ ID NO: 362121 - DNA, 55 bp, Artificial
  Synthetic oligonucleotide
ccgccgtagtagatacgtttgacgagcgcacactgtctttgcagtatcgcgtcga

SEQ ID NO: 362122 - DNA, 58 bp, Artificial
  Synthetic oligonucleotide
ccgccgtccagaagaagatagtactaacatgtcgagtgaaggtagatatatgacatgg

SEQ ID NO: 362123 - DNA, 53 bp, Artificial
  Synthetic oligonucleotide
ccgccgtgaatttacccccaaaagttatgtccacagttatggacagtttacta

SEQ ID NO: 362124 - DNA, 60 bp, Artificial
  Synthetic oligonucleotide
ccgccgtgatatccttgcccaactcgttgtcgattcaagcattcagcgatccgaaaaata

SEQ ID NO: 362125 - DNA, 55 bp, Artificial
  Synthetic oligonucleotide
ccgccgtggcgactaggtacgaggtggataacatcgcacccgtattgttggcact

SEQ ID NO: 362126 - DNA, 55 bp, Artificial
  Synthetic oligonucleotide
ccgccgtgtgtgactcaatacttgtctatgtcgccagttacaacgaagtggactc

SEQ ID NO: 362127 - DNA, 50 bp, Artificial
  Synthetic oligonucleotide
ccgccgtgttcactacgcttttacctctgagaataacaacgactccctct

SEQ ID NO: 362128 - DNA, 53 bp, Artificial
  Synthetic oligonucleotide
ccgccgttcggcagacgtacgacgttcgagcactggacgggtgagtagtaggt

SEQ ID NO: 362129 - DNA, 55 bp, Artificial
  Synthetic oligonucleotide
ccgccgttgtccgaaatcattgcacgcttcgccagctctgcatgttctacgcccc

SEQ ID NO: 362130 - DNA, 60 bp, Artificial
  Synthetic oligonucleotide
ccgcctaagactgccgagtcttctgagcaacccgacctattctgttatgaggagccactc

SEQ ID NO: 362131 - DNA, 56 bp, Artificial
  Synthetic oligonucleotide
ccgcctacaaacctagaattatactcaggatacttaagtctgtacattagtagttc

SEQ ID NO: 362132 - DNA, 52 bp, Artificial
  Synthetic oligonucleotide
ccgcctacgttgcgacccccagggaccctccgtccgcgaccctccaaccgca

SEQ ID NO: 362133 - DNA, 55 bp, Artificial
  Synthetic oligonucleotide
ccgcctactataacatccttaccagctatgaataggcgtttcttcttagatctag

SEQ ID NO: 362134 - DNA, 57 bp, Artificial
  Synthetic oligonucleotide
ccgcctacttggtcgttagcgctgtcctgggcactcctgttgggggccgttcgatgc

SEQ ID NO: 362135 - DNA, 55 bp, Artificial
  Synthetic oligonucleotide
ccgcctacttggtcgttagcgctgttcttgggcactcctgttgggggctgttcga

SEQ ID NO: 362136 - DNA, 60 bp, Artificial
  Synthetic oligonucleotide
ccgcctagcatttcatcacatggcccgagagctgtatccagagtactacaagaactaaga

SEQ ID NO: 362137 - DNA, 60 bp, Artificial
  Synthetic oligonucleotide
ccgcctatcctgaccgttgcttcgtaatcattgcacgccattactcgtacgatttgcaac

SEQ ID NO: 362138 - DNA, 58 bp, Artificial
  Synthetic oligonucleotide
ccgcctatcttaccatttgccaccagcggtatctccgcacccaggctatatccaaggg

SEQ ID NO: 362139 - DNA, 55 bp, Artificial
  Synthetic oligonucleotide
ccgcctatgcggctttgccccggagtttcgccatgcaacaccttccagattccac

SEQ ID NO: 362140 - DNA, 60 bp, Artificial
  Synthetic oligonucleotide
ccgcctatgtgtcgccagatcaactatgaccagcgctttgcttggttcaccttgttgcga

SEQ ID NO: 362141 - DNA, 55 bp, Artificial
  Synthetic oligonucleotide
ccgcctattagcaagacccttaatgacaacaagcttcccatctactcggcctttg

SEQ ID NO: 362142 - DNA, 54 bp, Artificial
  Synthetic oligonucleotide
ccgcctcaaaactacagaatccccgaaaactaccaacatggccgccccgcgcca

SEQ ID NO: 362143 - DNA, 55 bp, Artificial
  Synthetic oligonucleotide
ccgcctcaaaactcggacagacccattgacaagatcgttttgttagcagtcggac

SEQ ID NO: 362144 - DNA, 53 bp, Artificial
  Synthetic oligonucleotide
ccgcctcaagcccactctgcacggacccaccccccttctgtatagactggggg

SEQ ID NO: 362145 - DNA, 60 bp, Artificial
  Synthetic oligonucleotide
ccgcctcagctctatttcgggatgccttagagtctcctgagcattgctcacctcaccata

SEQ ID NO: 362146 - DNA, 55 bp, Artificial
  Synthetic oligonucleotide
ccgcctcaggaatagaagaaaagcttgaactgaatttggatgaatgtgtgctggc

SEQ ID NO: 362147 - DNA, 55 bp, Artificial
  Synthetic oligonucleotide
ccgcctcagttgaccgaatggcgttgtatactccctgaccttctgtgtaccctag

SEQ ID NO: 362148 - DNA, 55 bp, Artificial
  Synthetic oligonucleotide
ccgcctccaaggtacgtcggaggttgaacttcgacagcccctatcgcagcagtgc

SEQ ID NO: 362149 - DNA, 55 bp, Artificial
  Synthetic oligonucleotide
ccgcctccaaggttcgtcgccgattgaacttcgacagcccatatgtcagccgtgc

SEQ ID NO: 362150 - DNA, 55 bp, Artificial
  Synthetic oligonucleotide
ccgcctcccttggagatgagacctcagtcggcatcataccacgtgccgacgtgga

SEQ ID NO: 362151 - DNA, 52 bp, Artificial
  Synthetic oligonucleotide
ccgcctcgccacggtcacaacgcgcggaatacaagtcaatgcggcccggata

SEQ ID NO: 362152 - DNA, 55 bp, Artificial
  Synthetic oligonucleotide
ccgcctcgttgatatacctagtattcgtgtacacgcaacgattagggagagaaag

SEQ ID NO: 362153 - DNA, 57 bp, Artificial
  Synthetic oligonucleotide
ccgcctctagcacttctcccgtcgatctggaatgtcccccattccagtgtatccccg

SEQ ID NO: 362154 - DNA, 53 bp, Artificial
  Synthetic oligonucleotide
ccgcctctagcgtcttgtgcatgtactcgacctgtctcagcagatctagtcgg

SEQ ID NO: 362155 - DNA, 55 bp, Artificial
  Synthetic oligonucleotide
ccgcctctcatccctcacctttcatcccggtcccaccatgccaactgtgcaatcc

SEQ ID NO: 362156 - DNA, 57 bp, Artificial
  Synthetic oligonucleotide
ccgcctctgcgaccgttatccacataaagtgccagtcaagggcgcttttgtggagtt

SEQ ID NO: 362157 - DNA, 55 bp, Artificial
  Synthetic oligonucleotide
ccgcctgaaatatggtgatttgcagtttgacagtcgcgatatagttactgagaca

SEQ ID NO: 362158 - DNA, 57 bp, Artificial
  Synthetic oligonucleotide
ccgcctgacatgaactaagttacccgcctaagtcggtgttgtcaagcccattgcgta

SEQ ID NO: 362159 - DNA, 55 bp, Artificial
  Synthetic oligonucleotide
ccgcctgcgaagcagttccgagtaaccggcaaactgttgtccgtctaatctcgat

SEQ ID NO: 362160 - DNA, 55 bp, Artificial
  Synthetic oligonucleotide
ccgcctgcgaattggtctcttcttcgctattttgtgttggaccttgattggcacg

SEQ ID NO: 362161 - DNA, 55 bp, Artificial
  Synthetic oligonucleotide
ccgcctgctgatgtgaacacagtaacccgactaaggcgggtaagtcaagcacttc

SEQ ID NO: 362162 - DNA, 55 bp, Artificial
  Synthetic oligonucleotide
ccgcctggggttgaacccgtggagtctccctccatgctacaatacccacacgtgc

SEQ ID NO: 362163 - DNA, 56 bp, Artificial
  Synthetic oligonucleotide
ccgcctggtagttcccgaagcaaatgtaggtgtaccttacagtttggaagatgcgc

SEQ ID NO: 362164 - DNA, 55 bp, Artificial
  Synthetic oligonucleotide
ccgcctggtgctactaacgcatacacagcgttctctgataccattcagttcactg

SEQ ID NO: 362165 - DNA, 56 bp, Artificial
  Synthetic oligonucleotide
ccgcctggtgtgaggcaccccggttcaataaacgtggcgcacgctcacataatctc

SEQ ID NO: 362166 - DNA, 55 bp, Artificial
  Synthetic oligonucleotide
ccgcctgttatgtggctgaaccccactgcactcatagtctatgaaatatggatct

SEQ ID NO: 362167 - DNA, 55 bp, Artificial
  Synthetic oligonucleotide
ccgcctgtttcgcagttctcaacgaattgcggtcagatcctcagcttgtctcgac

SEQ ID NO: 362168 - DNA, 55 bp, Artificial
  Synthetic oligonucleotide
ccgccttaaggactagcaagggttggcatcgcttagcgagatgtgaagaccggag

SEQ ID NO: 362169 - DNA, 56 bp, Artificial
  Synthetic oligonucleotide
ccgccttaccacgagctggcatacgaaggattacgtacacgacccgctgcccctta

SEQ ID NO: 362170 - DNA, 55 bp, Artificial
  Synthetic oligonucleotide
ccgccttatgtacctgccacaccagcagtccgttgttaagtgtcactacggcaaa

SEQ ID NO: 362171 - DNA, 60 bp, Artificial
  Synthetic oligonucleotide
ccgccttcatgcatgacgctctcatgtactacacccccgctcaaattgttgacctgttcc

SEQ ID NO: 362172 - DNA, 60 bp, Artificial
  Synthetic oligonucleotide
ccgccttcggtctataaattcacagagaatctagcaattcaaacactctgatggatcagc

SEQ ID NO: 362173 - DNA, 54 bp, Artificial
  Synthetic oligonucleotide
ccgccttctctaccccgggatccagtgttcgtcggagactgacttacgacaccc

SEQ ID NO: 362174 - DNA, 55 bp, Artificial
  Synthetic oligonucleotide
ccgccttcttttccggttctctaacgaacacgtgtcctaaagaggatgtcatcat

SEQ ID NO: 362175 - DNA, 55 bp, Artificial
  Synthetic oligonucleotide
ccgccttgaaccactgcaattttggcctattagttgtgcctattagcccactaga

SEQ ID NO: 362176 - DNA, 55 bp, Artificial
  Synthetic oligonucleotide
ccgccttggcgaatgctgtggtggttcggccgtttttgtctcgcgttcaaaccga

SEQ ID NO: 362177 - DNA, 56 bp, Artificial
  Synthetic oligonucleotide
ccgcctttaatttgaactggcttgccgtacttggtattgctttgccagtccctctg

SEQ ID NO: 362178 - DNA, 53 bp, Artificial
  Synthetic oligonucleotide
ccgcctttgaaagaaaggtttacacggactctgttgcgttacgcacgtaccta

SEQ ID NO: 362179 - DNA, 55 bp, Artificial
  Synthetic oligonucleotide
ccgccttttatgcctctatgtatcgtgagtcctttagtcactcaaagtacatggc

SEQ ID NO: 362180 - DNA, 55 bp, Artificial
  Synthetic oligonucleotide
ccgccttttgcggacgtgtcgctgaggaacgagatgtgttgacttccgttgatcc

SEQ ID NO: 362181 - DNA, 59 bp, Artificial
  Synthetic oligonucleotide
ccgcgaaagtctaagcaagattctgagtgtgctgagtgcccgttttataacttctgttg

SEQ ID NO: 362182 - DNA, 53 bp, Artificial
  Synthetic oligonucleotide
ccgcgaaccctgtgacctggtacactaaactcggcaacataactgaaaaaggg

SEQ ID NO: 362183 - DNA, 55 bp, Artificial
  Synthetic oligonucleotide
ccgcgaacgcgtcaggttgtcctaagaatgctaccatgtcaccatctttagctcc

SEQ ID NO: 362184 - DNA, 60 bp, Artificial
  Synthetic oligonucleotide
ccgcgaatgtgcactggtgttgagtcccaattcatgatgtcaatcttgggccatgacttt

SEQ ID NO: 362185 - DNA, 55 bp, Artificial
  Synthetic oligonucleotide
ccgcgaattcctatcaaagaatccagatctttccagacacaatctggaatgtgac

SEQ ID NO: 362186 - DNA, 51 bp, Artificial
  Synthetic oligonucleotide
ccgcgacaatacagttaacggcaatgtccatggttttagttgcccctaacg

SEQ ID NO: 362187 - DNA, 55 bp, Artificial
  Synthetic oligonucleotide
ccgcgacaatttaccgcatcaactgagcgaactattaatatgttacaagacttgg

SEQ ID NO: 362188 - DNA, 54 bp, Artificial
  Synthetic oligonucleotide
ccgcgacaggcacattatatagtttgagcggaagtataagttacacttctgccc

SEQ ID NO: 362189 - DNA, 55 bp, Artificial
  Synthetic oligonucleotide
ccgcgacatggtttatcgcgacttggaaggcttgaagcagaagctagggatccag

SEQ ID NO: 362190 - DNA, 55 bp, Artificial
  Synthetic oligonucleotide
ccgcgacatgttctaggcaagttctcaggtgaccaatggaatgatgtacttaacc

SEQ ID NO: 362191 - DNA, 52 bp, Artificial
  Synthetic oligonucleotide
ccgcgaccataaatccggtagtcaaggtatgacccgtgatcagcttcggagt

SEQ ID NO: 362192 - DNA, 55 bp, Artificial
  Synthetic oligonucleotide
ccgcgacggttcgccatccgtcaaccggttctcttcgggatcaagcctttcgtga

SEQ ID NO: 362193 - DNA, 56 bp, Artificial
  Synthetic oligonucleotide
ccgcgacgttgcttttaacaattataaattgttcgaacaacatcttgggagcattc

SEQ ID NO: 362194 - DNA, 58 bp, Artificial
  Synthetic oligonucleotide
ccgcgactatttccatgagaaactcactcgccttttatacgatcacaagattttccaa

SEQ ID NO: 362195 - DNA, 55 bp, Artificial
  Synthetic oligonucleotide
ccgcgactggcgtaaagacatgacagtcaatgacttcctcatgctacgggagcgc

SEQ ID NO: 362196 - DNA, 55 bp, Artificial
  Synthetic oligonucleotide
ccgcgacttgggaagtggccttcgatgatggatgtggcaacagctgcgtacattc

SEQ ID NO: 362197 - DNA, 58 bp, Artificial
  Synthetic oligonucleotide
ccgcgagagttagagatcgtagaatgtaccatcgggttctggggtagttgataccatc

SEQ ID NO: 362198 - DNA, 55 bp, Artificial
  Synthetic oligonucleotide
ccgcgagagtttccgacatcctgctttgctgtatttgtcaccaacactaatcagc

SEQ ID NO: 362199 - DNA, 56 bp, Artificial
  Synthetic oligonucleotide
ccgcgagattttttatactgggctttctactaaggcccaagtatgattggactcta

SEQ ID NO: 362200 - DNA, 55 bp, Artificial
  Synthetic oligonucleotide
ccgcgagcaaacgattcaatgctgtcaaggaacaagagagtgcttggtgaactac

SEQ ID NO: 362201 - DNA, 55 bp, Artificial
  Synthetic oligonucleotide
ccgcgagccattccgaccatggtcgaactagagacagatgccgctctgcctcgac

SEQ ID NO: 362202 - DNA, 60 bp, Artificial
  Synthetic oligonucleotide
ccgcgaggaaccaagtagtgctatgtgagccaactatagcagagaggcctaaagcagtaa

SEQ ID NO: 362203 - DNA, 55 bp, Artificial
  Synthetic oligonucleotide
ccgcgagggtttcttgtgttgcaaggtgacggacacgcttaacggtgagagggtc

SEQ ID NO: 362204 - DNA, 60 bp, Artificial
  Synthetic oligonucleotide
ccgcgaggtggacgttagtcgcattaaaggatgtgaagtcgttgaaatgaagcacataga

SEQ ID NO: 362205 - DNA, 52 bp, Artificial
  Synthetic oligonucleotide
ccgcgagtaacgacgtgtttacgagctaagtcgggaacctcgcccttccgga

SEQ ID NO: 362206 - DNA, 55 bp, Artificial
  Synthetic oligonucleotide
ccgcgagttacatccggagtattacaaagactgctgacacgggactttccgttgg

SEQ ID NO: 362207 - DNA, 54 bp, Artificial
  Synthetic oligonucleotide
ccgcgataagaaacccaggatgtgttcccgggaggaattcattggaaaagtcaa

SEQ ID NO: 362208 - DNA, 54 bp, Artificial
  Synthetic oligonucleotide
ccgcgatatttttcgataaatcgtgcgagttcgccgccaacttaaggttgttac

SEQ ID NO: 362209 - DNA, 51 bp, Artificial
  Synthetic oligonucleotide
ccgcgatcataggttgccgcaccttaaaaccggaaacaaaagcaatcgtta

SEQ ID NO: 362210 - DNA, 55 bp, Artificial
  Synthetic oligonucleotide
ccgcgatgagcgtcaaggtctgcacgttcgagtacatgctgtccaccgtcaacgg

SEQ ID NO: 362211 - DNA, 57 bp, Artificial
  Synthetic oligonucleotide
ccgcgatgcacttgttgagagggagcgtgaattccatatcgccacttccgcttcccc

SEQ ID NO: 362212 - DNA, 60 bp, Artificial
  Synthetic oligonucleotide
ccgcgattatgcgtgataatgagtcgtgtacgtgatgtgcataccaaacgccgtcaaata

SEQ ID NO: 362213 - DNA, 55 bp, Artificial
  Synthetic oligonucleotide
ccgcgcaagctctggccgttctagccacttttaccgcctaggcgtagggtcgtac

SEQ ID NO: 362214 - DNA, 60 bp, Artificial
  Synthetic oligonucleotide
ccgcgcaatcgttcaccggcgtggtgtatggcacacacaccaccgctgtgtcggagaccc

SEQ ID NO: 362215 - DNA, 60 bp, Artificial
  Synthetic oligonucleotide
ccgcgcacaagaacaccgtcgctcgcacctagcagggctagctcgagaattagcctagtt

SEQ ID NO: 362216 - DNA, 55 bp, Artificial
  Synthetic oligonucleotide
ccgcgcacctaattgcgacgccgttgatgggaattgtaggataatctcggttagg

SEQ ID NO: 362217 - DNA, 55 bp, Artificial
  Synthetic oligonucleotide
ccgcgcagaataaattttacctgccaccgcagccaagcacgcgtgttttgcacac

SEQ ID NO: 362218 - DNA, 60 bp, Artificial
  Synthetic oligonucleotide
ccgcgcagcggcacacacaacattgacactggcccaatcgacaagttctggaggaactct

SEQ ID NO: 362219 - DNA, 59 bp, Artificial
  Synthetic oligonucleotide
ccgcgcagcggggtcgctcctccacgacggatcaacaacgttattatctgcccagtctg

SEQ ID NO: 362220 - DNA, 60 bp, Artificial
  Synthetic oligonucleotide
ccgcgcagctgtagctgacttcagagatacatcacgagaagatccaaatttgatagactt

SEQ ID NO: 362221 - DNA, 59 bp, Artificial
  Synthetic oligonucleotide
ccgcgcagtgaccgacacaaatggacctatcgttatacagtacttctctgttaaggaga

SEQ ID NO: 362222 - DNA, 55 bp, Artificial
  Synthetic oligonucleotide
ccgcgcatctgtttcacttacccccaggctattccgttgctattattccccccga

SEQ ID NO: 362223 - DNA, 58 bp, Artificial
  Synthetic oligonucleotide
ccgcgcattacgtcaatggctttcacttacagaaaccccctcgaaattgctatcaaca

SEQ ID NO: 362224 - DNA, 55 bp, Artificial
  Synthetic oligonucleotide
ccgcgcattgagaagtcgtgcagtaaccatttaactagttctgggtcttccatag

SEQ ID NO: 362225 - DNA, 55 bp, Artificial
  Synthetic oligonucleotide
ccgcgccaacatggaccatagacattgagaagccattcggggccatcattgccta

SEQ ID NO: 362226 - DNA, 55 bp, Artificial
  Synthetic oligonucleotide
ccgcgccattccggcacaggatgaggtgaattttcgtcgtatcaagctgacctgg

SEQ ID NO: 362227 - DNA, 53 bp, Artificial
  Synthetic oligonucleotide
ccgcgcccgtgaaggaaagtggtccccgcgcacgtgtttgggtcggccaatta

SEQ ID NO: 362228 - DNA, 55 bp, Artificial
  Synthetic oligonucleotide
ccgcgccctaaggatggaacaggcagttgtagtccagtgtcttctaatggagcga

SEQ ID NO: 362229 - DNA, 58 bp, Artificial
  Synthetic oligonucleotide
ccgcgccgattacaactatgcaaaggctaagggtgttaaagatgagtgctcaaaaatc

SEQ ID NO: 362230 - DNA, 56 bp, Artificial
  Synthetic oligonucleotide
ccgcgccggaaacatcctttcgacacaactcggctcattggaatacctgcccacct

SEQ ID NO: 362231 - DNA, 53 bp, Artificial
  Synthetic oligonucleotide
ccgcgcctaccactaaaataaactggcttcgccgacgattacggctagaaccc

SEQ ID NO: 362232 - DNA, 55 bp, Artificial
  Synthetic oligonucleotide
ccgcgccttgtgacgcgggtttcaggggtagattgggggcgagggaatcgtgcga

SEQ ID NO: 362233 - DNA, 55 bp, Artificial
  Synthetic oligonucleotide
ccgcgcgaactgatacgctttggggcagttttaatatgtgttcctacacgagttc

SEQ ID NO: 362234 - DNA, 55 bp, Artificial
  Synthetic oligonucleotide
ccgcgcgagagcatatgcatcagacgtgaagaacgacaggactgggtcattcacc

SEQ ID NO: 362235 - DNA, 56 bp, Artificial
  Synthetic oligonucleotide
ccgcgcgaggcataaaattgcgtgtgatgcggaagggtcccggcacctcggaacgg

SEQ ID NO: 362236 - DNA, 60 bp, Artificial
  Synthetic oligonucleotide
ccgcgcgatttcgtgagcagagcggttgaatatgtcgacagagttaaggataatcagaat

SEQ ID NO: 362237 - DNA, 55 bp, Artificial
  Synthetic oligonucleotide
ccgcgcgccatagtaagttgttttgggcgcgtaacgcaacatgattaaaggtagc

SEQ ID NO: 362238 - DNA, 60 bp, Artificial
  Synthetic oligonucleotide
ccgcgcgctgggtacactcttcgggctgcatacttcgagtggtatcgcagagagtcacct

SEQ ID NO: 362239 - DNA, 51 bp, Artificial
  Synthetic oligonucleotide
ccgcgcggaaggatatagctgtgaggagcacgtccatggcaggctgggccg

SEQ ID NO: 362240 - DNA, 55 bp, Artificial
  Synthetic oligonucleotide
ccgcgcggaatgaggatattgatgcagagtttgagagtctaaatcgcataagtgg

SEQ ID NO: 362241 - DNA, 55 bp, Artificial
  Synthetic oligonucleotide
ccgcgcggcttgcgaataatactttggagagccttttgcctccagtgtcttccgt

SEQ ID NO: 362242 - DNA, 53 bp, Artificial
  Synthetic oligonucleotide
ccgcgcggttaaaaaatagttacattcatcgtataggtaaataattgggacac

SEQ ID NO: 362243 - DNA, 53 bp, Artificial
  Synthetic oligonucleotide
ccgcgctatggctacccgtctgaccaaaaaacagctggctcaggctatccaga

SEQ ID NO: 362244 - DNA, 54 bp, Artificial
  Synthetic oligonucleotide
ccgcgctcagttgtttcttcttgttctcgagggccttccttcttcggtggtccc

SEQ ID NO: 362245 - DNA, 55 bp, Artificial
  Synthetic oligonucleotide
ccgcgctcatcctgtcgatgttcatggtcacgttcctgaccgaggtggtggtcag

SEQ ID NO: 362246 - DNA, 60 bp, Artificial
  Synthetic oligonucleotide
ccgcgctctaaatataaattccgatggactggcgtcactcaattacacgatggcctccga

SEQ ID NO: 362247 - DNA, 58 bp, Artificial
  Synthetic oligonucleotide
ccgcgctggaagccccagcaatggtcgcaaacattccggtcgggtgttcgtgtggcta

SEQ ID NO: 362248 - DNA, 55 bp, Artificial
  Synthetic oligonucleotide
ccgcgctggaggcaataaaactaattagtctgtctcgatcatccgaacaagtgcc

SEQ ID NO: 362249 - DNA, 58 bp, Artificial
  Synthetic oligonucleotide
ccgcggacacaacgtacactgctgttccccttgcttgggtatccgcgataaaatgcgc

SEQ ID NO: 362250 - DNA, 60 bp, Artificial
  Synthetic oligonucleotide
ccgcggagagcgatgcgagctggatgacagagatagggtcgagatgagcccacttctgtt

SEQ ID NO: 362251 - DNA, 50 bp, Artificial
  Synthetic oligonucleotide
ccgcggataacggtactggtcagggaagcaacgcagcgcagacacgaccc

SEQ ID NO: 362252 - DNA, 55 bp, Artificial
  Synthetic oligonucleotide
ccgcggatggcagaatctctatgagaagctcaacaaacctgggtggacgcatggg

SEQ ID NO: 362253 - DNA, 55 bp, Artificial
  Synthetic oligonucleotide
ccgcggcaaaccaggtaggagtgggatccttcgggccagggttcactccaccaca

SEQ ID NO: 362254 - DNA, 57 bp, Artificial
  Synthetic oligonucleotide
ccgcggcccaagtcccgcaggggctaacaccaacagcacccccattggatccagcag

SEQ ID NO: 362255 - DNA, 53 bp, Artificial
  Synthetic oligonucleotide
ccgcggcccttctcccgttactttcttgtccgcagcccttgtccaacgtcagt

SEQ ID NO: 362256 - DNA, 55 bp, Artificial
  Synthetic oligonucleotide
ccgcggccgcttcgaaagtatgccgccgtctcaacttcgacagcccatatgtgag

SEQ ID NO: 362257 - DNA, 55 bp, Artificial
  Synthetic oligonucleotide
ccgcggcctccattggctgggacctttaacgacacagggttattcccagtcatgt

SEQ ID NO: 362258 - DNA, 55 bp, Artificial
  Synthetic oligonucleotide
ccgcggcgaagatcaaagcgtgggccgataacggcggtttggagaagatcgtcgc

SEQ ID NO: 362259 - DNA, 53 bp, Artificial
  Synthetic oligonucleotide
ccgcggcggttctgttcctcccacaggagtacggcaacaacccaccttgggaa

SEQ ID NO: 362260 - DNA, 52 bp, Artificial
  Synthetic oligonucleotide
ccgcgggagcgacccagcaaacgccggctgaggcacgaaaacctaggttgac

SEQ ID NO: 362261 - DNA, 55 bp, Artificial
  Synthetic oligonucleotide
ccgcgggcgttccttgtacggaacggcctgtattcaaagccacccctgccatatc

SEQ ID NO: 362262 - DNA, 56 bp, Artificial
  Synthetic oligonucleotide
ccgcggggaggtggagatgccatgccgacccgaagaggaaagaaggactcggacgc

SEQ ID NO: 362263 - DNA, 57 bp, Artificial
  Synthetic oligonucleotide
ccgcggggccgaaagccacgtccgaacggacccatcatgtgtgcaaccccagcacga

SEQ ID NO: 362264 - DNA, 55 bp, Artificial
  Synthetic oligonucleotide
ccgcgggggactacatccatctcccggaaagaatttcgtgagtaaggactatgcc

SEQ ID NO: 362265 - DNA, 53 bp, Artificial
  Synthetic oligonucleotide
ccgcggggggagggatcaactcccgagagggagtcactggcaagaaaggggga

SEQ ID NO: 362266 - DNA, 59 bp, Artificial
  Synthetic oligonucleotide
ccgcgggtaccctcagcagctccgacatccggaggagtgccgtggagtcacgtcggcga

SEQ ID NO: 362267 - DNA, 52 bp, Artificial
  Synthetic oligonucleotide
ccgcgggtcttattacggtaaaaggttgttattacctgattcagtcacggaa

SEQ ID NO: 362268 - DNA, 52 bp, Artificial
  Synthetic oligonucleotide
ccgcgggtgagtctgcagaccctgtgactgccaccgtcgagaactacggtgg

SEQ ID NO: 362269 - DNA, 55 bp, Artificial
  Synthetic oligonucleotide
ccgcggtcttgacgtgtctgtcatcccgaccagcggcgatgttgtcgttgtggca

SEQ ID NO: 362270 - DNA, 60 bp, Artificial
  Synthetic oligonucleotide
ccgcggtgctaacaacctggatgctggtatctactactgcccatacgttgcactgacccc

SEQ ID NO: 362271 - DNA, 51 bp, Artificial
  Synthetic oligonucleotide
ccgcggttccaggccgtcttggggccccaatgatccccggcgtaggtcccg

SEQ ID NO: 362272 - DNA, 53 bp, Artificial
  Synthetic oligonucleotide
ccgcggttctcgccctaattggggcccaaatgacccccggcgaaggtcgcgca

SEQ ID NO: 362273 - DNA, 55 bp, Artificial
  Synthetic oligonucleotide
ccgcgtaactgacaacaaggggaaaacgcatgatgtgctgaccggaagtgatgac

SEQ ID NO: 362274 - DNA, 55 bp, Artificial
  Synthetic oligonucleotide
ccgcgtacgcatacacaagcggccccaacgtgcccagactcggaaggatcgtgaa

SEQ ID NO: 362275 - DNA, 56 bp, Artificial
  Synthetic oligonucleotide
ccgcgtagacgacgagtctctcggaggcgggttgttgcaagaacgcagccaatggt

SEQ ID NO: 362276 - DNA, 58 bp, Artificial
  Synthetic oligonucleotide
ccgcgtatgagtttcaaaatggagggcataacaacgtggattggatcaaactgcggtg

SEQ ID NO: 362277 - DNA, 55 bp, Artificial
  Synthetic oligonucleotide
ccgcgtcaaggacaaccgcttcaaaagcgccctgtacctcgttgacttcgccaag

SEQ ID NO: 362278 - DNA, 59 bp, Artificial
  Synthetic oligonucleotide
ccgcgtcacaaaacaacaggcatggacaaacaggcctatgaacaggaaaccagaatgta

SEQ ID NO: 362279 - DNA, 51 bp, Artificial
  Synthetic oligonucleotide
ccgcgtcacaaaggcaagagcatgggccaacaggcccatgaatcggaagcc

SEQ ID NO: 362280 - DNA, 51 bp, Artificial
  Synthetic oligonucleotide
ccgcgtcaccaaagcaaaagcatgggcgaacagacccatggacagaaagcc

SEQ ID NO: 362281 - DNA, 60 bp, Artificial
  Synthetic oligonucleotide
ccgcgtcatctcgcaaacccaatacactattcagttgccgctgaatctagtggactaatc

SEQ ID NO: 362282 - DNA, 53 bp, Artificial
  Synthetic oligonucleotide
ccgcgtcccgttccgaagccttcagaccgcaggtggttaacggtctttagcac

SEQ ID NO: 362283 - DNA, 60 bp, Artificial
  Synthetic oligonucleotide
ccgcgtccgttgcaatggtctcggaagcgattcaagactctattggacatgcccgtataa

SEQ ID NO: 362284 - DNA, 55 bp, Artificial
  Synthetic oligonucleotide
ccgcgtctcggtcaatggccaagcttaatcgatgttgcaactgaatgttacttcc

SEQ ID NO: 362285 - DNA, 59 bp, Artificial
  Synthetic oligonucleotide
ccgcgtggagtaactgcaatggcggatgatacaggtacagaggaggggctagggtgttc

SEQ ID NO: 362286 - DNA, 55 bp, Artificial
  Synthetic oligonucleotide
ccgcgtggagtcagagaataaggtagtaattttggactctttcgacccgcttcga

SEQ ID NO: 362287 - DNA, 60 bp, Artificial
  Synthetic oligonucleotide
ccgcgtggcattcgatattcttcgccagaatattgagtgggaaacgtggcaaggagagaa

SEQ ID NO: 362288 - DNA, 56 bp, Artificial
  Synthetic oligonucleotide
ccgcgtggcgaaaattgttactttgtagcgcaggcaccatcctgcgcccgggaaaa

SEQ ID NO: 362289 - DNA, 55 bp, Artificial
  Synthetic oligonucleotide
ccgcgtggctcacgggacgctttgatcatccttacagtcctgtttcggccccacc

SEQ ID NO: 362290 - DNA, 60 bp, Artificial
  Synthetic oligonucleotide
ccgcgtgggagacagcaaggcacactccagttaattcctggctaggtaacataatcatgt

SEQ ID NO: 362291 - DNA, 56 bp, Artificial
  Synthetic oligonucleotide
ccgcgtgtgtgagacggattacatttatggacgtttccagacggaacgtaccacca

SEQ ID NO: 362292 - DNA, 55 bp, Artificial
  Synthetic oligonucleotide
ccgcgtgtttatctggagtatacattgttgagatgacgctcagtatgactgatgg

SEQ ID NO: 362293 - DNA, 55 bp, Artificial
  Synthetic oligonucleotide
ccgcgttaatgtttgctccatgatctattatcgcgtagatgaatcgcttctcggc

SEQ ID NO: 362294 - DNA, 55 bp, Artificial
  Synthetic oligonucleotide
ccgcgttacagccttcgcttaagttggcgttagaggaggaagcttgggcagcggc

SEQ ID NO: 362295 - DNA, 58 bp, Artificial
  Synthetic oligonucleotide
ccgcgttatcgcatacgaaccccgagccacgacccacagcgacatcaaacataaattc

SEQ ID NO: 362296 - DNA, 59 bp, Artificial
  Synthetic oligonucleotide
ccgcgttcaacatagctgaggacctagtggtaactgctaacaagaagtccgctgaagac

SEQ ID NO: 362297 - DNA, 60 bp, Artificial
  Synthetic oligonucleotide
ccgcgttccttgcaacttgcaatctgttaacgcaatgatcaaggactccaccatttacac

SEQ ID NO: 362298 - DNA, 55 bp, Artificial
  Synthetic oligonucleotide
ccgcgtttaatccgtcagactgtgggttaccgaatttggatagttgctctttgga

SEQ ID NO: 362299 - DNA, 57 bp, Artificial
  Synthetic oligonucleotide
ccgcgtttatcttcaaacgcaggaaatagttctcaaaactttgagtgaatcagagaa

SEQ ID NO: 362300 - DNA, 55 bp, Artificial
  Synthetic oligonucleotide
ccgcgtttgcaaaagattacaagaaagatgaatcttccaatggttgaaggaaaga

SEQ ID NO: 362301 - DNA, 54 bp, Artificial
  Synthetic oligonucleotide
ccgcgtttggaagggctttagacgtagtaaacagggcaacggacgtcgcgcata

SEQ ID NO: 362302 - DNA, 60 bp, Artificial
  Synthetic oligonucleotide
ccgctaaaaggatcagccaaacatattgaagaatgctcctgttacggacacaatcagagg

SEQ ID NO: 362303 - DNA, 57 bp, Artificial
  Synthetic oligonucleotide
ccgctaaaatgcggtataccgaagatgtgggttcctcacttaccaccgcagatgaaa

SEQ ID NO: 362304 - DNA, 52 bp, Artificial
  Synthetic oligonucleotide
ccgctaaagagcaagcagtctcgcgtcctggttacggcacgcgttctttggc

SEQ ID NO: 362305 - DNA, 60 bp, Artificial
  Synthetic oligonucleotide
ccgctaacaaccaagtaatcccatgtgaaccaatcataatagagaggaacatagactaca

SEQ ID NO: 362306 - DNA, 55 bp, Artificial
  Synthetic oligonucleotide
ccgctaacagccaagtattagaccttcagaagcgtcatgcatttgagcaggcatt

SEQ ID NO: 362307 - DNA, 56 bp, Artificial
  Synthetic oligonucleotide
ccgctaacctcgaccttcatgggagtgcagctagcgcgtgtcaagctagcgtctaa

SEQ ID NO: 362308 - DNA, 53 bp, Artificial
  Synthetic oligonucleotide
ccgctaagccaaatcaacgcgtctttcgggtatagctatacccgaaagacgcg

SEQ ID NO: 362309 - DNA, 60 bp, Artificial
  Synthetic oligonucleotide
ccgctaagtacgagaatcacacggagaatgcgttgttattgtatatggcatgtactcatg

SEQ ID NO: 362310 - DNA, 60 bp, Artificial
  Synthetic oligonucleotide
ccgctaatacttcagcgatcgcacatgtcacatcggcagtgtccgcgatgtcccctcgcc

SEQ ID NO: 362311 - DNA, 60 bp, Artificial
  Synthetic oligonucleotide
ccgctaatgataacacattgatgcatgaatttgtcgtgcgtacgttgcagaagatcggtc

SEQ ID NO: 362312 - DNA, 55 bp, Artificial
  Synthetic oligonucleotide
ccgctaatggatgcatatggcaaaagtttgttgaatcaggaagcatatgttaagg

SEQ ID NO: 362313 - DNA, 55 bp, Artificial
  Synthetic oligonucleotide
ccgctaatttacgcgaattgaaagttgttctacaagttgtctctaccgtccttga

SEQ ID NO: 362314 - DNA, 52 bp, Artificial
  Synthetic oligonucleotide
ccgctacacatgcaagagtttgcgacgaaatcgtgttatcgtcatgttctac

SEQ ID NO: 362315 - DNA, 55 bp, Artificial
  Synthetic oligonucleotide
ccgctaccaacccacaaatgagcgtcctacgcctcaaaatgtgtacatgtacgcg

SEQ ID NO: 362316 - DNA, 55 bp, Artificial
  Synthetic oligonucleotide
ccgctaccgttgttatatattatcgtcatctctccttgctggatctatgttcctc

SEQ ID NO: 362317 - DNA, 55 bp, Artificial
  Synthetic oligonucleotide
ccgctacctgcttcttttgtgcaggcgtatccagactgcccctggaccgccatgc

SEQ ID NO: 362318 - DNA, 52 bp, Artificial
  Synthetic oligonucleotide
ccgctacgcatgtagacagggtgcgccctctcgtatggagccgacggtatgg

SEQ ID NO: 362319 - DNA, 59 bp, Artificial
  Synthetic oligonucleotide
ccgctacggctcctgacctggtgcccctgtttgagaacactcacgttagctacgcttgc

SEQ ID NO: 362320 - DNA, 60 bp, Artificial
  Synthetic oligonucleotide
ccgctacgtgcagacaagtgtgccgtgggatcactcccgatatccgtggatataccggac

SEQ ID NO: 362321 - DNA, 51 bp, Artificial
  Synthetic oligonucleotide
ccgctacgtttgacggaatgaaccctaactctagtgataattcggttagtg

SEQ ID NO: 362322 - DNA, 60 bp, Artificial
  Synthetic oligonucleotide
ccgctactacgatatgtaagaatcggcagaacgactgagcatttgctggatcaatatgcc

SEQ ID NO: 362323 - DNA, 60 bp, Artificial
  Synthetic oligonucleotide
ccgctactgccactagagacaactgggctagcgacagactgccagctgcccaacaagact

SEQ ID NO: 362324 - DNA, 60 bp, Artificial
  Synthetic oligonucleotide
ccgctacttggtcagccttgggctatcgttgtgctgctagtactacttatctgggcgagt

SEQ ID NO: 362325 - DNA, 52 bp, Artificial
  Synthetic oligonucleotide
ccgctagactaaaagaaaagttccctataacggtagctatagagggagagtt

SEQ ID NO: 362326 - DNA, 55 bp, Artificial
  Synthetic oligonucleotide
ccgctagactatcaagaaccatcaccttataaagacacattagacgtagatggtc

SEQ ID NO: 362327 - DNA, 55 bp, Artificial
  Synthetic oligonucleotide
ccgctagactgggtctatatgggcgtgccttgcaacaagtaagagtggtagatcc

SEQ ID NO: 362328 - DNA, 55 bp, Artificial
  Synthetic oligonucleotide
ccgctagagccccggcatgcaggttacattgttggatgtggtggtcccaatctgc

SEQ ID NO: 362329 - DNA, 55 bp, Artificial
  Synthetic oligonucleotide
ccgctagaggtaatagtccctggtgaaggtaaccagggggtagcctctagctcca

SEQ ID NO: 362330 - DNA, 55 bp, Artificial
  Synthetic oligonucleotide
ccgctagcaacaagcaagaaagacccggagaagacacccttgctgccaacgagag

SEQ ID NO: 362331 - DNA, 51 bp, Artificial
  Synthetic oligonucleotide
ccgctagcatactttctcttaattctgaataaatcagcaccatctttagcc

SEQ ID NO: 362332 - DNA, 50 bp, Artificial
  Synthetic oligonucleotide
ccgctagcgacgaggctccgtgtgtcgccacgccgcttcccctccatgtg

SEQ ID NO: 362333 - DNA, 60 bp, Artificial
  Synthetic oligonucleotide
ccgctatagtgtaccagccattgctaaggagcaccttagcaaggctgggatctatctcag

SEQ ID NO: 362334 - DNA, 60 bp, Artificial
  Synthetic oligonucleotide
ccgctatagttcataagaagagtgatttggttgatgagtattgtctaagcccaaattgtg

SEQ ID NO: 362335 - DNA, 58 bp, Artificial
  Synthetic oligonucleotide
ccgctatatttaagcgtgtgtctaccagtaagcgagagttcgctggtagaccgagttc

SEQ ID NO: 362336 - DNA, 55 bp, Artificial
  Synthetic oligonucleotide
ccgctatctctggcacggattggacagaaggtaatgagtacgtatcactcccacc

SEQ ID NO: 362337 - DNA, 55 bp, Artificial
  Synthetic oligonucleotide
ccgctatgaccggatcaaggcactcaaggcggtggcatgagcatcaacgcatctg

SEQ ID NO: 362338 - DNA, 55 bp, Artificial
  Synthetic oligonucleotide
ccgctatgacggtactataccacctgctctattcagacacatcaaagagataagg

SEQ ID NO: 362339 - DNA, 55 bp, Artificial
  Synthetic oligonucleotide
ccgctatgccttctacgatgtttcctctgtaactcggtaaggcccgccacttgca

SEQ ID NO: 362340 - DNA, 51 bp, Artificial
  Synthetic oligonucleotide
ccgctcaaaagttttagctttgacttgacatatgacttcatcatcgcactt

SEQ ID NO: 362341 - DNA, 55 bp, Artificial
  Synthetic oligonucleotide
ccgctcaaataacagcagatgcccaacttgcattgatgagttggacgctatggcc

SEQ ID NO: 362342 - DNA, 60 bp, Artificial
  Synthetic oligonucleotide
ccgctcaactacttcatgctgatacccctcggctcgtcacttgggatgcaggcttatgta

SEQ ID NO: 362343 - DNA, 55 bp, Artificial
  Synthetic oligonucleotide
ccgctcaagatatctgctgggccaagatcgatgcttgaagcagtaatcggtatac

SEQ ID NO: 362344 - DNA, 60 bp, Artificial
  Synthetic oligonucleotide
ccgctcaagtctccaagcgctgaggcatgtggttatagtgatcgtgtggctcagcttacc

SEQ ID NO: 362345 - DNA, 54 bp, Artificial
  Synthetic oligonucleotide
ccgctcacccctgagttggaacgcttgggggagggcgtggtggatagccaacgg

SEQ ID NO: 362346 - DNA, 59 bp, Artificial
  Synthetic oligonucleotide
ccgctcacctctcggctatagtgatgtcgtgtcgacaatttcctttaatcgcgaaccag

SEQ ID NO: 362347 - DNA, 55 bp, Artificial
  Synthetic oligonucleotide
ccgctcacggcagcgggagagaagtcattgatgtcatgtgccatgccaccctaac

SEQ ID NO: 362348 - DNA, 59 bp, Artificial
  Synthetic oligonucleotide
ccgctcactcgtgcccacaactccagtgacgcctcgatacgaaagcatccgaaccaaaa

SEQ ID NO: 362349 - DNA, 55 bp, Artificial
  Synthetic oligonucleotide
ccgctcagcgacagaaagaaatgcggttgtgatgctgcttgatgccgtggataaa

SEQ ID NO: 362350 - DNA, 55 bp, Artificial
  Synthetic oligonucleotide
ccgctcagtaacaagactggagaatctgatgtggaaacaaataacaccagaactg

SEQ ID NO: 362351 - DNA, 58 bp, Artificial
  Synthetic oligonucleotide
ccgctcatcactggcttaacttcctccaggcggcatatcgcctagaacccggtccctc

SEQ ID NO: 362352 - DNA, 55 bp, Artificial
  Synthetic oligonucleotide
ccgctcattacaagtgatttcttcgttgtttgtatggtgagcattggatgtgtag

SEQ ID NO: 362353 - DNA, 60 bp, Artificial
  Synthetic oligonucleotide
ccgctccagcctatcctcatggcatgtcctgtatggacccactcaagtccccagtccacc

SEQ ID NO: 362354 - DNA, 55 bp, Artificial
  Synthetic oligonucleotide
ccgctccagtgtgttgctcgtgcaacatcccgacggctcccatgtaggttatgcc

SEQ ID NO: 362355 - DNA, 55 bp, Artificial
  Synthetic oligonucleotide
ccgctccccgtgagcgtatttactccatctctcgcccctcgttcttatcgacccg

SEQ ID NO: 362356 - DNA, 53 bp, Artificial
  Synthetic oligonucleotide
ccgctcccggtttttcgatctccccgagaattcatttggaactaatgcggatt

SEQ ID NO: 362357 - DNA, 55 bp, Artificial
  Synthetic oligonucleotide
ccgctcctaactttattaagggagtgattagttataaggaattcgcgtggcatta

SEQ ID NO: 362358 - DNA, 58 bp, Artificial
  Synthetic oligonucleotide
ccgctcctaccgtcgcacttacttatagggatcagcactgggataactcgccagggaa

SEQ ID NO: 362359 - DNA, 55 bp, Artificial
  Synthetic oligonucleotide
ccgctcctacgtgcattgttgcaatcccgtactgagtgtgcgcgacggagccagg

SEQ ID NO: 362360 - DNA, 60 bp, Artificial
  Synthetic oligonucleotide
ccgctcctctgatagttactagcggcgctcttagcgtacagtcacaagccccactgaccg

SEQ ID NO: 362361 - DNA, 55 bp, Artificial
  Synthetic oligonucleotide
ccgctccttggaacggaggtttcattttgtcttcagtcaaaatctcttccgcacc

SEQ ID NO: 362362 - DNA, 55 bp, Artificial
  Synthetic oligonucleotide
ccgctcgaaacgcccactgaagggcttgagcaacatgacagcaccactcatgagt

SEQ ID NO: 362363 - DNA, 55 bp, Artificial
  Synthetic oligonucleotide
ccgctcgattaggtgcagaacatacaaccttaccacggtactctgcggttgctag

SEQ ID NO: 362364 - DNA, 50 bp, Artificial
  Synthetic oligonucleotide
ccgctcgccagaaacgactgtggaccgtctagcaaccccagacgaaggca

SEQ ID NO: 362365 - DNA, 52 bp, Artificial
  Synthetic oligonucleotide
ccgctcgcctagcagctcgtattggctatatgcccggagcggactgttctcc

SEQ ID NO: 362366 - DNA, 55 bp, Artificial
  Synthetic oligonucleotide
ccgctcggtcggacgtacaccacgttaataaatagacctacaatggcaaatctac

SEQ ID NO: 362367 - DNA, 58 bp, Artificial
  Synthetic oligonucleotide
ccgctcggttgatgtgtcccgcatcttcaaggagccggaggttatcgcagcagaggct

SEQ ID NO: 362368 - DNA, 53 bp, Artificial
  Synthetic oligonucleotide
ccgctcgtgtgcggaaaagctattcagttgatggacaagtcatctagggttag

SEQ ID NO: 362369 - DNA, 58 bp, Artificial
  Synthetic oligonucleotide
ccgctctaaccgcgttcgcaacatagagtagggtcgaatgctgttgtgggtccagccc

SEQ ID NO: 362370 - DNA, 60 bp, Artificial
  Synthetic oligonucleotide
ccgctctcacacgcgctctctcattggtgctggtgcctctccattttttattgactgccc

SEQ ID NO: 362371 - DNA, 55 bp, Artificial
  Synthetic oligonucleotide
ccgctctcatgaccgtgttcgcggcaaagatcccgggattcacagcagaacccac

SEQ ID NO: 362372 - DNA, 60 bp, Artificial
  Synthetic oligonucleotide
ccgctctcatgttacgagagatgaagcaggggttgcactccgcagagccagggatctata

SEQ ID NO: 362373 - DNA, 59 bp, Artificial
  Synthetic oligonucleotide
ccgctctccactactgggctagagtaaagtggagagtgagcaattgacctaacctagta

SEQ ID NO: 362374 - DNA, 52 bp, Artificial
  Synthetic oligonucleotide
ccgctctctttccattcaaaaatcgcgcaataaatgacaggaaccaatcccg

SEQ ID NO: 362375 - DNA, 54 bp, Artificial
  Synthetic oligonucleotide
ccgctctgagggacagattacgaccagataataagttgggtcccgagaagtggg

SEQ ID NO: 362376 - DNA, 55 bp, Artificial
  Synthetic oligonucleotide
ccgctctgatcgcattagacgacatcagtctgttcggaaatttgtgtcacacgtt

SEQ ID NO: 362377 - DNA, 54 bp, Artificial
  Synthetic oligonucleotide
ccgctctgggatacgaatggggtgagttccttggaacttatcgaggggacggcg

SEQ ID NO: 362378 - DNA, 58 bp, Artificial
  Synthetic oligonucleotide
ccgctcttcacacccattaattcatttcggcctctgtgttgagccccttgttgaagtg

SEQ ID NO: 362379 - DNA, 51 bp, Artificial
  Synthetic oligonucleotide
ccgctcttcgcttgtactgggtctttttggttggaccaaatttgacccggg

SEQ ID NO: 362380 - DNA, 55 bp, Artificial
  Synthetic oligonucleotide
ccgctcttgactactcaacctttccctatgacagacgtacttctgactgcttacg

SEQ ID NO: 362381 - DNA, 58 bp, Artificial
  Synthetic oligonucleotide
ccgctcttgtgcaagataaaccggtgagaaggctaatctttgacgggccactattgca

SEQ ID NO: 362382 - DNA, 57 bp, Artificial
  Synthetic oligonucleotide
ccgctctttgcaaatgattaaacgccaagcagtgaaaagcgcggcaaaccaacgtaa

SEQ ID NO: 362383 - DNA, 56 bp, Artificial
  Synthetic oligonucleotide
ccgctgaaaatagtagtgtctatataaaatacggagtctactaaatctaggaaaga

SEQ ID NO: 362384 - DNA, 52 bp, Artificial
  Synthetic oligonucleotide
ccgctgacaacaaatactgcgacaagcaccaacgacattttgtaactattca

SEQ ID NO: 362385 - DNA, 60 bp, Artificial
  Synthetic oligonucleotide
ccgctgacaattggcatctacagagtcaagcatggaatgatggatccacagtacctaaaa

SEQ ID NO: 362386 - DNA, 55 bp, Artificial
  Synthetic oligonucleotide
ccgctgacgatggagttaagaacgtacataccatcgtgggtttagctgaaaggaa

SEQ ID NO: 362387 - DNA, 56 bp, Artificial
  Synthetic oligonucleotide
ccgctgacggcttcccattagaatccacaagcccaaaagccttcaagaattctctc

SEQ ID NO: 362388 - DNA, 58 bp, Artificial
  Synthetic oligonucleotide
ccgctgacgtcgtgtcgtctgccttctaccagcgcctttaccctggcgtcaccacaac

SEQ ID NO: 362389 - DNA, 60 bp, Artificial
  Synthetic oligonucleotide
ccgctgactggaaggctattggagcatacatactgggttttgcaattccgatcatcctaa

SEQ ID NO: 362390 - DNA, 55 bp, Artificial
  Synthetic oligonucleotide
ccgctgagagattcgagaccatataccccaggcatagggctagtgataccgtcac

SEQ ID NO: 362391 - DNA, 55 bp, Artificial
  Synthetic oligonucleotide
ccgctgataataaagtcatctgcaccgatgtctaaagaatactgcggttgtctat

SEQ ID NO: 362392 - DNA, 55 bp, Artificial
  Synthetic oligonucleotide
ccgctgatagggaacttgacgctgctagtcgagtgcttctagtcaatgcttgccg

SEQ ID NO: 362393 - DNA, 55 bp, Artificial
  Synthetic oligonucleotide
ccgctgatggatgtttggttggaatacatagtttggcgaataatgcacagtccac

SEQ ID NO: 362394 - DNA, 54 bp, Artificial
  Synthetic oligonucleotide
ccgctgatggccgtacagttcgccaacaatgcgacctcgacgctcgcagcatct

SEQ ID NO: 362395 - DNA, 60 bp, Artificial
  Synthetic oligonucleotide
ccgctgcaaatgatttcgaagatctgatgcttactgatcaagtttacatgcatcgagata

SEQ ID NO: 362396 - DNA, 56 bp, Artificial
  Synthetic oligonucleotide
ccgctgcaaccccaggagtcgttcgagacaacggcacaacactcaaccttgctggt

SEQ ID NO: 362397 - DNA, 60 bp, Artificial
  Synthetic oligonucleotide
ccgctgcataaaacaccctctatgaagcgtagggttagctatcgaaacccagtcatgaca

SEQ ID NO: 362398 - DNA, 55 bp, Artificial
  Synthetic oligonucleotide
ccgctgcatgttagcagtgaagtacttgcacttagtgctgccaacatatcccgag

SEQ ID NO: 362399 - DNA, 55 bp, Artificial
  Synthetic oligonucleotide
ccgctgcattttattgagacaccctattgaacatcttcacatgtgaaacctctgc

SEQ ID NO: 362400 - DNA, 58 bp, Artificial
  Synthetic oligonucleotide
ccgctgccaattcatgtggatatgattcgggattatatcggaaaacgaattaattatt

SEQ ID NO: 362401 - DNA, 60 bp, Artificial
  Synthetic oligonucleotide
ccgctgcccaaaagcgggccatcgtagctgtgatacccagacctgttttcacgcagatga

SEQ ID NO: 362402 - DNA, 55 bp, Artificial
  Synthetic oligonucleotide
ccgctgcccaggatcctgactgcttcagctctgctggagaggtcgggtaaccatg

SEQ ID NO: 362403 - DNA, 55 bp, Artificial
  Synthetic oligonucleotide
ccgctgccgtccgtagtggacctggattcgctggatgattacgagcgtcactggc

SEQ ID NO: 362404 - DNA, 57 bp, Artificial
  Synthetic oligonucleotide
ccgctgcgggattgggcccacgcgggcctacgagacctcgcggtggcagtagagccc

SEQ ID NO: 362405 - DNA, 55 bp, Artificial
  Synthetic oligonucleotide
ccgctgcgtatactgccactgcgtatgctgccgctgcgtatactaccgctgcgta

SEQ ID NO: 362406 - DNA, 60 bp, Artificial
  Synthetic oligonucleotide
ccgctgctccaccagagcagagtaggatgcaattctcctcgctgactgtgaatgtgagag

SEQ ID NO: 362407 - DNA, 53 bp, Artificial
  Synthetic oligonucleotide
ccgctgctcgcatccaaactgcttctcgcgtcgccccggctgaaatccgcact

SEQ ID NO: 362408 - DNA, 55 bp, Artificial
  Synthetic oligonucleotide
ccgctgctgccttcaccaactacctacagctgttaggtctccgttcccaaactgg

SEQ ID NO: 362409 - DNA, 57 bp, Artificial
  Synthetic oligonucleotide
ccgctggacaccccgcagaggttccgtgttgtttatatgagcatcacccgtctttcg

SEQ ID NO: 362410 - DNA, 55 bp, Artificial
  Synthetic oligonucleotide
ccgctggactaccgtccacccacctacggttggactcacgacaccgcgtggccat

SEQ ID NO: 362411 - DNA, 60 bp, Artificial
  Synthetic oligonucleotide
ccgctggcaccaagccggacctggcggcatgggttgcagctgtccaggcgatcaaagcgc

SEQ ID NO: 362412 - DNA, 60 bp, Artificial
  Synthetic oligonucleotide
ccgctggccagatcagtgtgcaacctacattctcagtgcaacggaatctcccttttgaaa

SEQ ID NO: 362413 - DNA, 58 bp, Artificial
  Synthetic oligonucleotide
ccgctggctctgcccgcaagaggcctagggcccctgctggacgttcaatggtttcggc

SEQ ID NO: 362414 - DNA, 50 bp, Artificial
  Synthetic oligonucleotide
ccgctggctgggagacactgttgccgagtcagaggcggtcgagataacca

SEQ ID NO: 362415 - DNA, 59 bp, Artificial
  Synthetic oligonucleotide
ccgctggcttatgccggagtgtaccacttctctccggcttgcattacgtagatttcgca

SEQ ID NO: 362416 - DNA, 57 bp, Artificial
  Synthetic oligonucleotide
ccgctgggcaattggttcggttgtacctggatgaactcaactggattcaccaaagtg

SEQ ID NO: 362417 - DNA, 55 bp, Artificial
  Synthetic oligonucleotide
ccgctgggcgcgtcggtattttggataccaaagggcgctatgaatcctccgcaac

SEQ ID NO: 362418 - DNA, 58 bp, Artificial
  Synthetic oligonucleotide
ccgctgggcgctacctgaacttcaagccctacttggcgagattcagtgggtctccaaa

SEQ ID NO: 362419 - DNA, 55 bp, Artificial
  Synthetic oligonucleotide
ccgctggggagtgcggcctgcgtagccccaggaggactgggttaacatagccgtt

SEQ ID NO: 362420 - DNA, 59 bp, Artificial
  Synthetic oligonucleotide
ccgctggtcccaatttagtttagcgctattttgaagtccgcgaaatgagctgagcgcat

SEQ ID NO: 362421 - DNA, 60 bp, Artificial
  Synthetic oligonucleotide
ccgctggtctcacccatttgatgatctggcattccaatttgaatgacgccacgtatcaga

SEQ ID NO: 362422 - DNA, 55 bp, Artificial
  Synthetic oligonucleotide
ccgctggtgcaagctactctgtgataagtagcaacttcaactctcctggtctaac

SEQ ID NO: 362423 - DNA, 55 bp, Artificial
  Synthetic oligonucleotide
ccgctggtgcttcacactagtaccagtggagccggaagagagaagagaccaatgg

SEQ ID NO: 362424 - DNA, 55 bp, Artificial
  Synthetic oligonucleotide
ccgctgtacaacaggatccaagaagtcaaccagaagtgtgcacgcttccgatacc

SEQ ID NO: 362425 - DNA, 60 bp, Artificial
  Synthetic oligonucleotide
ccgctgtcctgagaggattcctcattttgggcaaggaagacaagagatatggcccagcat

SEQ ID NO: 362426 - DNA, 60 bp, Artificial
  Synthetic oligonucleotide
ccgctgtctccacctttgagaaacactcatcctcaggccatgcagtggaattccacaacc

SEQ ID NO: 362427 - DNA, 54 bp, Artificial
  Synthetic oligonucleotide
ccgctgtcttggggtatggcgtctactcggttttgttgtcgttttggaatgtcc

SEQ ID NO: 362428 - DNA, 60 bp, Artificial
  Synthetic oligonucleotide
ccgctgtgaatggtcaaagaggcagaattgactattattggtctattttgaagccaggag

SEQ ID NO: 362429 - DNA, 55 bp, Artificial
  Synthetic oligonucleotide
ccgctgtgcaacattggaatacttcctcgtctagtacgggatagccctcattttc

SEQ ID NO: 362430 - DNA, 54 bp, Artificial
  Synthetic oligonucleotide
ccgctgtgctgtaagacccgtcggtaaatgaaaacgtaatagattcgcctttta

SEQ ID NO: 362431 - DNA, 55 bp, Artificial
  Synthetic oligonucleotide
ccgctgtggatgtcagcgagagtgtcacagaggatgcgcattccctccgaacccc

SEQ ID NO: 362432 - DNA, 60 bp, Artificial
  Synthetic oligonucleotide
ccgctgtgtatgttacgcatactcaagctgagaaggccagtttattggctactccgagtt

SEQ ID NO: 362433 - DNA, 51 bp, Artificial
  Synthetic oligonucleotide
ccgctgttccatttcgagcccccttttttcctaccggagtgaaggttgacc

SEQ ID NO: 362434 - DNA, 55 bp, Artificial
  Synthetic oligonucleotide
ccgctgttgtagtggagagagtggcaattccttgcataagcgagtatgcaacccc

SEQ ID NO: 362435 - DNA, 60 bp, Artificial
  Synthetic oligonucleotide
ccgctgtttcgactcaacagtcacagagagtgacatccgtgttgaggagtcaatctacca

SEQ ID NO: 362436 - DNA, 58 bp, Artificial
  Synthetic oligonucleotide
ccgcttaaagggtctagctgatgggatggtgggcaacccacagggtcaggccgcatta

SEQ ID NO: 362437 - DNA, 55 bp, Artificial
  Synthetic oligonucleotide
ccgcttaacagtttcgtgaacgcctcccagccctcagcaataaactgccaggctt

SEQ ID NO: 362438 - DNA, 55 bp, Artificial
  Synthetic oligonucleotide
ccgcttaatcccaatgcggggacttgtgtttgtcatttgccatacttcacaaaca

SEQ ID NO: 362439 - DNA, 59 bp, Artificial
  Synthetic oligonucleotide
ccgcttacgccgagaccaccatatcccacacttatgaattggagagcctaactggcgtg

SEQ ID NO: 362440 - DNA, 55 bp, Artificial
  Synthetic oligonucleotide
ccgcttaggtatttatatggtctgctagtcacggaagccagtccaatttccgatc

SEQ ID NO: 362441 - DNA, 60 bp, Artificial
  Synthetic oligonucleotide
ccgcttagtagcgtctgcgggtatgtttcaaggtacgatgaggttcatcttgcgatggac

SEQ ID NO: 362442 - DNA, 54 bp, Artificial
  Synthetic oligonucleotide
ccgcttagttgggccagaggcccaataccatgggccgcggggggtggggcgcac

SEQ ID NO: 362443 - DNA, 54 bp, Artificial
  Synthetic oligonucleotide
ccgcttatccgaaagaattcctccgctataacccacctaagagtactagttcac

SEQ ID NO: 362444 - DNA, 54 bp, Artificial
  Synthetic oligonucleotide
ccgcttcctatacgggactatcaataccagaccccttccaatcccggatcctcc

SEQ ID NO: 362445 - DNA, 55 bp, Artificial
  Synthetic oligonucleotide
ccgcttcgcaggtccttagtttaaacgacatgactgttgttctagagtccaagct

SEQ ID NO: 362446 - DNA, 55 bp, Artificial
  Synthetic oligonucleotide
ccgcttcggacttctaccgcaaaccaataatcgacgctatcaaacctcttgtcga

SEQ ID NO: 362447 - DNA, 55 bp, Artificial
  Synthetic oligonucleotide
ccgcttcgtcgcttgatccttcgtatgcgtcgctgtttgacagaccttcttcgct

SEQ ID NO: 362448 - DNA, 56 bp, Artificial
  Synthetic oligonucleotide
ccgcttcgtggtgaaacgccggtggtgtttcacaatggagaccaacgggcgcatcg

SEQ ID NO: 362449 - DNA, 55 bp, Artificial
  Synthetic oligonucleotide
ccgcttgagagacttaatattactgacagcgagaggggcggaacttctgggacgc

SEQ ID NO: 362450 - DNA, 56 bp, Artificial
  Synthetic oligonucleotide
ccgcttgagaggagaagcacggaaaacctttgtagacctaatgagaagaggagacc

SEQ ID NO: 362451 - DNA, 56 bp, Artificial
  Synthetic oligonucleotide
ccgcttgagaggagaagcgaggaaaacttttgtggacctaatgagaagaggagatt

SEQ ID NO: 362452 - DNA, 55 bp, Artificial
  Synthetic oligonucleotide
ccgcttgagatcgcgatcggttaccgcgaaccgaagaacccagcactgtccatcc

SEQ ID NO: 362453 - DNA, 55 bp, Artificial
  Synthetic oligonucleotide
ccgcttgagtccgagatgtcccatgtgaagaatccaagtagttgtctcgacacag

SEQ ID NO: 362454 - DNA, 56 bp, Artificial
  Synthetic oligonucleotide
ccgcttgattttcaacacgtttggacgtccgttttagacatccactatagtagata

SEQ ID NO: 362455 - DNA, 55 bp, Artificial
  Synthetic oligonucleotide
ccgcttggtggacttacaagctcaacaatgcccatggcactaccgatcttgtctg

SEQ ID NO: 362456 - DNA, 55 bp, Artificial
  Synthetic oligonucleotide
ccgcttgtggaagacccggaagtcccaaaactggaagcgctatcgcagtagtcat

SEQ ID NO: 362457 - DNA, 55 bp, Artificial
  Synthetic oligonucleotide
ccgcttgtgtgatggaatttatcattatgcctgcatttatagacctaaacgtgag

SEQ ID NO: 362458 - DNA, 60 bp, Artificial
  Synthetic oligonucleotide
ccgcttgtttcgtgtccccctctgtcaatctcatgtcgtgtatctctatcacgacatgac

SEQ ID NO: 362459 - DNA, 55 bp, Artificial
  Synthetic oligonucleotide
ccgctttaatagcggcacattcagtgaggttttacctccatatgtgctagtctgt

SEQ ID NO: 362460 - DNA, 57 bp, Artificial
  Synthetic oligonucleotide
ccgctttaccctcccttccgcagccagaagaactgaccatgatggaacgtttgagaa

SEQ ID NO: 362461 - DNA, 58 bp, Artificial
  Synthetic oligonucleotide
ccgctttagatagacgagatgacctgaatgaaaagattcgtaaggatctggcttcttt

SEQ ID NO: 362462 - DNA, 54 bp, Artificial
  Synthetic oligonucleotide
ccgctttattcactggggtcgacagctctggggggaaaagggaggatcggatgg

SEQ ID NO: 362463 - DNA, 58 bp, Artificial
  Synthetic oligonucleotide
ccgctttcaaccgaatcactcactggttcatcactccgaccaatttcgagtatattgg

SEQ ID NO: 362464 - DNA, 55 bp, Artificial
  Synthetic oligonucleotide
ccgctttccacacctttctggatgggagttagcgaaaacggtggtacaatccatc

SEQ ID NO: 362465 - DNA, 59 bp, Artificial
  Synthetic oligonucleotide
ccgctttgaccctacaactggtgcagaattttctgaagacacccctggaatgactgtca

SEQ ID NO: 362466 - DNA, 60 bp, Artificial
  Synthetic oligonucleotide
ccgctttggaggagccattgacttggtcaattggtaccaattgatctatctcatggtatc

SEQ ID NO: 362467 - DNA, 53 bp, Artificial
  Synthetic oligonucleotide
ccgctttgtgcctagcagggccttcgtcttttggcagcacggcagacagtaat

SEQ ID NO: 362468 - DNA, 55 bp, Artificial
  Synthetic oligonucleotide
ccgcttttatgcagttttagcacctaaagcacagctaggaggagcaagagatctg

SEQ ID NO: 362469 - DNA, 55 bp, Artificial
  Synthetic oligonucleotide
ccgcttttcgtcgttgatgcaccgtaccgcaattagtgcaaagagtgactaactc

SEQ ID NO: 362470 - DNA, 55 bp, Artificial
  Synthetic oligonucleotide
ccggaaaagaatattccctcaactgcagcaaacgctattaatcgttctccaaacg

SEQ ID NO: 362471 - DNA, 55 bp, Artificial
  Synthetic oligonucleotide
ccggaaaaggacccttacggatggtgttagcattcatcacgttcttgcgagtcct

SEQ ID NO: 362472 - DNA, 50 bp, Artificial
  Synthetic oligonucleotide
ccggaaaattgttgttggataccatttaatgaacaagcgaataatcgaaa

SEQ ID NO: 362473 - DNA, 58 bp, Artificial
  Synthetic oligonucleotide
ccggaaacagtactattcttaacgaattcgatgctgtgacgatgaacttgagggatat

SEQ ID NO: 362474 - DNA, 55 bp, Artificial
  Synthetic oligonucleotide
ccggaaacgaggatgtcagccctcctatcacttcaggggttcagaaactgtgtcg

SEQ ID NO: 362475 - DNA, 55 bp, Artificial
  Synthetic oligonucleotide
ccggaaacgtgaaccaggggtttcatctgcggaacatcaatcaacgccatcagtt

SEQ ID NO: 362476 - DNA, 55 bp, Artificial
  Synthetic oligonucleotide
ccggaaactcttcacggtttccgttgtatgctcgctatcaaatacctgcagactg

SEQ ID NO: 362477 - DNA, 52 bp, Artificial
  Synthetic oligonucleotide
ccggaaagacgaaaggaatggggacgaaaaatcgaagatttgttaacatgta

SEQ ID NO: 362478 - DNA, 56 bp, Artificial
  Synthetic oligonucleotide
ccggaaaggatgaaggtcctttagtttcacttgctaaacacaaagccatggatgca

SEQ ID NO: 362479 - DNA, 51 bp, Artificial
  Synthetic oligonucleotide
ccggaaagttggggaaaggatacggagattgagggaagaataccaacaaac

SEQ ID NO: 362480 - DNA, 54 bp, Artificial
  Synthetic oligonucleotide
ccggaaataccttttacaacggaagcggcgaatgaaatagctcgagtgactggg

SEQ ID NO: 362481 - DNA, 59 bp, Artificial
  Synthetic oligonucleotide
ccggaaatagcagcgagacccaaagtaagagatcaagctgggaggatgaactattactg

SEQ ID NO: 362482 - DNA, 55 bp, Artificial
  Synthetic oligonucleotide
ccggaaatccacttccaatcttatgtgaatgggttggttcgattgttatatcttt

SEQ ID NO: 362483 - DNA, 58 bp, Artificial
  Synthetic oligonucleotide
ccggaaatccttgatgagtactctgccaccctggatgaatgacctacggaaagcggtc

SEQ ID NO: 362484 - DNA, 55 bp, Artificial
  Synthetic oligonucleotide
ccggaaattgaagtagctctgcctactaccgatgctaaactaaactaccttgcgc

SEQ ID NO: 362485 - DNA, 50 bp, Artificial
  Synthetic oligonucleotide
ccggaaattgacttccttggagcaaccattggtaactccaaaatcaaatt

SEQ ID NO: 362486 - DNA, 55 bp, Artificial
  Synthetic oligonucleotide
ccggaacaaagacggtaccctagactgcgagacctatgaggctataaaacgacgc

SEQ ID NO: 362487 - DNA, 54 bp, Artificial
  Synthetic oligonucleotide
ccggaacaactgtagctacgggttccgttgttgttatccgcagccccaattgga

SEQ ID NO: 362488 - DNA, 56 bp, Artificial
  Synthetic oligonucleotide
ccggaacacgtccggatagaacagagagtccgcgaaattgtgcgttcggcgcgtcg

SEQ ID NO: 362489 - DNA, 56 bp, Artificial
  Synthetic oligonucleotide
ccggaacatcgtgttgtcctagggaaatagagacaagcattgttaatcccgctagg

SEQ ID NO: 362490 - DNA, 55 bp, Artificial
  Synthetic oligonucleotide
ccggaacatttcgaccgttccgcacaaccaaaatgtcaagctgtccagctacacc

SEQ ID NO: 362491 - DNA, 53 bp, Artificial
  Synthetic oligonucleotide
ccggaaccatcggcaagggcgcactgaccggacagacgccagctacccagacg

SEQ ID NO: 362492 - DNA, 55 bp, Artificial
  Synthetic oligonucleotide
ccggaaccgagatcgcttgcaagctggattcaaagtgagttcaataaggcatgtg

SEQ ID NO: 362493 - DNA, 54 bp, Artificial
  Synthetic oligonucleotide
ccggaacgtacggaacacagggatccatgggttgcctggggacttcttatcgaa

SEQ ID NO: 362494 - DNA, 55 bp, Artificial
  Synthetic oligonucleotide
ccggaactaagggataagtatcttccgagcgttctaagtaagccagcatttcgga

SEQ ID NO: 362495 - DNA, 60 bp, Artificial
  Synthetic oligonucleotide
ccggaactcaccagtcgcgcttttccgtgcaagatatagcatcggacacgagcctactga

SEQ ID NO: 362496 - DNA, 59 bp, Artificial
  Synthetic oligonucleotide
ccggaactccgattgagggccttccggtcatcaatttgcgacacgcgcggcagtgtgta

SEQ ID NO: 362497 - DNA, 55 bp, Artificial
  Synthetic oligonucleotide
ccggaagacccacgccggacagttcgtcgtctgggaccagttctacaagagcgag

SEQ ID NO: 362498 - DNA, 54 bp, Artificial
  Synthetic oligonucleotide
ccggaagacccctgtaagcaacccacccacgacctacccgagaccaatatgctc

SEQ ID NO: 362499 - DNA, 57 bp, Artificial
  Synthetic oligonucleotide
ccggaagagtgactgtctctactcaaaccagtcaaacaagtgtagtaccaaacattg

SEQ ID NO: 362500 - DNA, 50 bp, Artificial
  Synthetic oligonucleotide
ccggaagataacgttgtccacgtacgtgctaaagggggcgacttcaaatg

SEQ ID NO: 362501 - DNA, 57 bp, Artificial
  Synthetic oligonucleotide
ccggaagatttcaaagaattctcagtgaaagtttggaggactaattcaaatatgaca

SEQ ID NO: 362502 - DNA, 55 bp, Artificial
  Synthetic oligonucleotide
ccggaagcagtatcacgtcgtatagatttcgcttttaacgttcgtatagtacctg

SEQ ID NO: 362503 - DNA, 52 bp, Artificial
  Synthetic oligonucleotide
ccggaagcattgtaccagctcccggacaacccgattcccgtgttttcccacc

SEQ ID NO: 362504 - DNA, 57 bp, Artificial
  Synthetic oligonucleotide
ccggaagcgtacctgcctattgaagagcgcgaggaaattcacgcggcaacgtttcta

SEQ ID NO: 362505 - DNA, 54 bp, Artificial
  Synthetic oligonucleotide
ccggaagctatctctgcggctcttccaaatgacgcaggtcttatactcgccgat

SEQ ID NO: 362506 - DNA, 53 bp, Artificial
  Synthetic oligonucleotide
ccggaaggggttctggaggtactactggctatggacctattaatccggcaggg

SEQ ID NO: 362507 - DNA, 58 bp, Artificial
  Synthetic oligonucleotide
ccggaagggtgccagtggccacagtcagtgagtcccagggaatgacaatcaataaaag

SEQ ID NO: 362508 - DNA, 55 bp, Artificial
  Synthetic oligonucleotide
ccggaaggttctgccagagttgttacggaaatgccttgagcggcggctgcggacc

SEQ ID NO: 362509 - DNA, 53 bp, Artificial
  Synthetic oligonucleotide
ccggaagtactggaataatctcatcgaaattattcaatcaacgcccgaacttg

SEQ ID NO: 362510 - DNA, 55 bp, Artificial
  Synthetic oligonucleotide
ccggaagtgagacaatatgacgattctataatggatgtcgaaattcctttctttc

SEQ ID NO: 362511 - DNA, 54 bp, Artificial
  Synthetic oligonucleotide
ccggaagtgccaattttcgcgcgcttttcaccggatatcgtagtaattttgggc

SEQ ID NO: 362512 - DNA, 55 bp, Artificial
  Synthetic oligonucleotide
ccggaagttgtcggaaatccggcagcggagaatccaccggctccctgtgtgtcga

SEQ ID NO: 362513 - DNA, 52 bp, Artificial
  Synthetic oligonucleotide
ccggaagtttaccgtgttctttataataggccagagttaattcacggaccgc

SEQ ID NO: 362514 - DNA, 55 bp, Artificial
  Synthetic oligonucleotide
ccggaataacacaacatagtactgtacctgacatagtgctgggaccaacaagcga

SEQ ID NO: 362515 - DNA, 52 bp, Artificial
  Synthetic oligonucleotide
ccggaatacaatactggtgccctttgtaagtgttttacaggtaagtaaggcc

SEQ ID NO: 362516 - DNA, 55 bp, Artificial
  Synthetic oligonucleotide
ccggaatcaccgcgactgctaatataccttctatagtgactgcagacattcgagg

SEQ ID NO: 362517 - DNA, 55 bp, Artificial
  Synthetic oligonucleotide
ccggaatcaggaaaaccaattctcagtgtttcgtctgaggtgcctaaagactgtg

SEQ ID NO: 362518 - DNA, 60 bp, Artificial
  Synthetic oligonucleotide
ccggaatcccgggaatgctgaaattgaagatctcatatttctggcgcgatctgcactcat

SEQ ID NO: 362519 - DNA, 55 bp, Artificial
  Synthetic oligonucleotide
ccggaatctccacatcccggaggtctgcctgaaatgggagttaatggatgaagat

SEQ ID NO: 362520 - DNA, 54 bp, Artificial
  Synthetic oligonucleotide
ccggaatctgactccggggaacaccaatacacgtgtctcccggtataccagtac

SEQ ID NO: 362521 - DNA, 60 bp, Artificial
  Synthetic oligonucleotide
ccggaatctgccgaaactggctgattccgcgtcagcagccggcttgctcgcgcacgtgta

SEQ ID NO: 362522 - DNA, 55 bp, Artificial
  Synthetic oligonucleotide
ccggaatcttcacatccctgaagtctgcttaaagtgggagttaatggatgaggac

SEQ ID NO: 362523 - DNA, 55 bp, Artificial
  Synthetic oligonucleotide
ccggaatgaaaacacaagatattttggaacatacactggaggtcaacaaacccca

SEQ ID NO: 362524 - DNA, 55 bp, Artificial
  Synthetic oligonucleotide
ccggaatgatagatggatggtatggttatcatcatcagaatgagcagggatcggg

SEQ ID NO: 362525 - DNA, 55 bp, Artificial
  Synthetic oligonucleotide
ccggaatgatatattatattttaagtgactcagctgttaaccacgtttaaatcgt

SEQ ID NO: 362526 - DNA, 60 bp, Artificial
  Synthetic oligonucleotide
ccggaatgatgacgttaaacacaccctactcatttctagttgctgcatggccactcccta

SEQ ID NO: 362527 - DNA, 60 bp, Artificial
  Synthetic oligonucleotide
ccggaatggtcatacattgtggaaaaagacaagccagccaatggcctgtgctatccggga

SEQ ID NO: 362528 - DNA, 55 bp, Artificial
  Synthetic oligonucleotide
ccggaatggtcgggaaagctgtatctgccgtaaaacgtgtagcaagcagtatcaa

SEQ ID NO: 362529 - DNA, 57 bp, Artificial
  Synthetic oligonucleotide
ccggaatgtgatctgctcttaaaagtacctgaatggtcctatatagtggaaaaggaa

SEQ ID NO: 362530 - DNA, 55 bp, Artificial
  Synthetic oligonucleotide
ccggaattatgcccgagccctctaagattagtagatggtcaaacttgtgacattg

SEQ ID NO: 362531 - DNA, 56 bp, Artificial
  Synthetic oligonucleotide
ccggaattgttcagatgaattactcttctaatgtgtcgcaattatttccaaatacg

SEQ ID NO: 362532 - DNA, 55 bp, Artificial
  Synthetic oligonucleotide
ccggacaagattgtgtggggttcactgagactagagaatgaacaaccgagagagg

SEQ ID NO: 362533 - DNA, 60 bp, Artificial
  Synthetic oligonucleotide
ccggacaatggcatggacagtggtgaatagcgtctgcaacaccacaggggtcgagaagcc

SEQ ID NO: 362534 - DNA, 54 bp, Artificial
  Synthetic oligonucleotide
ccggacacatgagttatttactgttttaccggatggtaaaacagtaattgatat

SEQ ID NO: 362535 - DNA, 55 bp, Artificial
  Synthetic oligonucleotide
ccggacacccaaccaataagaccagacatagagctacaatcctcgcctatctggg

SEQ ID NO: 362536 - DNA, 55 bp, Artificial
  Synthetic oligonucleotide
ccggacaccgttcaagacgttcgagtcctcaaccctgtacacgatctcccaggga

SEQ ID NO: 362537 - DNA, 50 bp, Artificial
  Synthetic oligonucleotide
ccggacactgtatcacccacaaaatacgtattactgtcattcaagtagtc

SEQ ID NO: 362538 - DNA, 59 bp, Artificial
  Synthetic oligonucleotide
ccggacacttgaggatccagactacacttactccacctttcttaaagatgagctcagac

SEQ ID NO: 362539 - DNA, 55 bp, Artificial
  Synthetic oligonucleotide
ccggacagaaaggctgtacttttcgagctcaacgctccagtatcccttaagactc

SEQ ID NO: 362540 - DNA, 55 bp, Artificial
  Synthetic oligonucleotide
ccggacagacgtccgaagccaatgccagttcggcatttgaagtttccgctgaaga

SEQ ID NO: 362541 - DNA, 55 bp, Artificial
  Synthetic oligonucleotide
ccggacataattttgacaagtaaccgaagttcatccgatgagttgaagtccacga

SEQ ID NO: 362542 - DNA, 55 bp, Artificial
  Synthetic oligonucleotide
ccggacatcccaaagagcgtgcttgacaactgcgctgacatcagctgtgacgctt

SEQ ID NO: 362543 - DNA, 60 bp, Artificial
  Synthetic oligonucleotide
ccggacatgagggacaacggatcaattcggtagttaattcatctgagtcaccgatcagac

SEQ ID NO: 362544 - DNA, 50 bp, Artificial
  Synthetic oligonucleotide
ccggacatgtcaaaaacgggacgatgaggatcgttggtcctaagacctgc

SEQ ID NO: 362545 - DNA, 51 bp, Artificial
  Synthetic oligonucleotide
ccggaccaaaaagccaccacaacatgcgcccagggtacaagactcaaacca

SEQ ID NO: 362546 - DNA, 56 bp, Artificial
  Synthetic oligonucleotide
ccggaccaatgtgcctggtcggcgaattagtagacccgccattccacgaatttgcg

SEQ ID NO: 362547 - DNA, 52 bp, Artificial
  Synthetic oligonucleotide
ccggaccactagtccccttcttccaatccttggcctctaccaatggcccttt

SEQ ID NO: 362548 - DNA, 55 bp, Artificial
  Synthetic oligonucleotide
ccggaccatactctcgtgctcctcctgtcgctacatatctattgtctgtgattca

SEQ ID NO: 362549 - DNA, 59 bp, Artificial
  Synthetic oligonucleotide
ccggaccattcgtcgatttactatccatcacaaactacgaaggtgagctgtgtactcac

SEQ ID NO: 362550 - DNA, 55 bp, Artificial
  Synthetic oligonucleotide
ccggacccaaccactggtctcgcacgtactaattcccgttacttgcaaggctcag

SEQ ID NO: 362551 - DNA, 51 bp, Artificial
  Synthetic oligonucleotide
ccggaccccagctcagccgtggctaagttgcgtcaattgacaaacggggag

SEQ ID NO: 362552 - DNA, 55 bp, Artificial
  Synthetic oligonucleotide
ccggacccgtgttcaagtgcaggagttgtccgttagagtttacctcgagcgccga

SEQ ID NO: 362553 - DNA, 57 bp, Artificial
  Synthetic oligonucleotide
ccggacccttagtggatggcttcttagcaattatctgggtcgacctgcggagcctgt

SEQ ID NO: 362554 - DNA, 50 bp, Artificial
  Synthetic oligonucleotide
ccggacgagaaccaccaatagtaacttcaacaggaactgcacgaggctcg

SEQ ID NO: 362555 - DNA, 57 bp, Artificial
  Synthetic oligonucleotide
ccggacgagaatgacaaactgggattgtacctcgctcattcaaccacccgcatcccc

SEQ ID NO: 362556 - DNA, 59 bp, Artificial
  Synthetic oligonucleotide
ccggacgctagtagtgtgaaattgtcgtacaggaccatgttcccagttgattcgtgtgc

SEQ ID NO: 362557 - DNA, 58 bp, Artificial
  Synthetic oligonucleotide
ccggacggaacacttgaatggcgctcagctcgtacacgtttcaccgtatccagcacgt

SEQ ID NO: 362558 - DNA, 55 bp, Artificial
  Synthetic oligonucleotide
ccggacggacccgttaactatgacggtgccaatttcactcctccaacttcatggc

SEQ ID NO: 362559 - DNA, 53 bp, Artificial
  Synthetic oligonucleotide
ccggacggagaatacaagacgagcctggacgacgggaaaattcccgacggcgc

SEQ ID NO: 362560 - DNA, 57 bp, Artificial
  Synthetic oligonucleotide
ccggacgtagcaacttctaggttttacacgctggacacagtcatgtggggcaaagag

SEQ ID NO: 362561 - DNA, 59 bp, Artificial
  Synthetic oligonucleotide
ccggacgtattccgtcgatacaccatcaattccgaagattcggccgctatggtcataca

SEQ ID NO: 362562 - DNA, 55 bp, Artificial
  Synthetic oligonucleotide
ccggacgtatttcaaggaccatgatgcatagcgctctcctcaaggaatcaagcgc

SEQ ID NO: 362563 - DNA, 58 bp, Artificial
  Synthetic oligonucleotide
ccggacgtgcgacccatagttcaccaaacatggctcaggtcccggctaatggtgctcc

SEQ ID NO: 362564 - DNA, 55 bp, Artificial
  Synthetic oligonucleotide
ccggactacaaaaatggcgcattagtgacgtcacggccgccattttaagtaaggc

SEQ ID NO: 362565 - DNA, 52 bp, Artificial
  Synthetic oligonucleotide
ccggactacaaccccccgctactagagacgtggaaaaagcctgactacgaac

SEQ ID NO: 362566 - DNA, 55 bp, Artificial
  Synthetic oligonucleotide
ccggactacgtgcattcgtggttggaggactacgaggccgtttctcgcgacgctg

SEQ ID NO: 362567 - DNA, 55 bp, Artificial
  Synthetic oligonucleotide
ccggactagacaccgctcccatcgtattcggacagtcggttacagtaggtgcaga

SEQ ID NO: 362568 - DNA, 58 bp, Artificial
  Synthetic oligonucleotide
ccggactcaaactatgatggagctcagtgtcttattgaaggagaatttcccatttacc

SEQ ID NO: 362569 - DNA, 60 bp, Artificial
  Synthetic oligonucleotide
ccggactcatagctcacatcgtcacgcgcgtcacgggtggtctgtcctcacgcttcggca

SEQ ID NO: 362570 - DNA, 58 bp, Artificial
  Synthetic oligonucleotide
ccggactcatgttcgtggcatttgtcatttctggaaagtcgacagacatgtggattga

SEQ ID NO: 362571 - DNA, 55 bp, Artificial
  Synthetic oligonucleotide
ccggactcggacctgagggattcacaatcgctaacgacggaacaactgagacccg

SEQ ID NO: 362572 - DNA, 55 bp, Artificial
  Synthetic oligonucleotide
ccggactggcggacgtcagattcctacacccaaattatatgactttgaaatgggg

SEQ ID NO: 362573 - DNA, 55 bp, Artificial
  Synthetic oligonucleotide
ccggactgtctccagccgtggaaactttggagccaatgtggagggattcgaaccg

SEQ ID NO: 362574 - DNA, 55 bp, Artificial
  Synthetic oligonucleotide
ccggacttacttgtgagtgacccgaccgggacttctttgaatccaccgcagtcac

SEQ ID NO: 362575 - DNA, 60 bp, Artificial
  Synthetic oligonucleotide
ccggacttgccccttcgaatgacgccgcggattctgcagtcggtactagtactgatgcag

SEQ ID NO: 362576 - DNA, 58 bp, Artificial
  Synthetic oligonucleotide
ccggactttaacgtggggttatggcttctctctgcggcctgatgcagagttgtacatt

SEQ ID NO: 362577 - DNA, 57 bp, Artificial
  Synthetic oligonucleotide
ccggactttccaatgtcgcacacttctttcaatcggctaaaggcctcttggcctgta

SEQ ID NO: 362578 - DNA, 52 bp, Artificial
  Synthetic oligonucleotide
ccggacttttacaagaactgctgacaagggactttactaatggggactttcc

SEQ ID NO: 362579 - DNA, 54 bp, Artificial
  Synthetic oligonucleotide
ccggacttttctccgggaaaggacccttacggatggtgctagcattcatcacgt

SEQ ID NO: 362580 - DNA, 59 bp, Artificial
  Synthetic oligonucleotide
ccggagaaagaagtgctaatgtggaagtttgacagcaccctcgcatttcaccataaggc

SEQ ID NO: 362581 - DNA, 60 bp, Artificial
  Synthetic oligonucleotide
ccggagaaagaagtgctaatgtggaagtttgacagcatgctagcattcaagcacgtagcc

SEQ ID NO: 362582 - DNA, 55 bp, Artificial
  Synthetic oligonucleotide
ccggagaactagggtataagtcatcattagatgtgaaaggtatggactcatcgac

SEQ ID NO: 362583 - DNA, 57 bp, Artificial
  Synthetic oligonucleotide
ccggagaagcgaataagtggatctcaatgggatcgtcgtgtactattaaagtatgtc

SEQ ID NO: 362584 - DNA, 55 bp, Artificial
  Synthetic oligonucleotide
ccggagaccagttggaatctctagcatggtggaggccatggtgtctagggcccgg

SEQ ID NO: 362585 - DNA, 55 bp, Artificial
  Synthetic oligonucleotide
ccggagacggaaatgcaatcatgttgcccaatactctatcgccaaccaccccagc

SEQ ID NO: 362586 - DNA, 59 bp, Artificial
  Synthetic oligonucleotide
ccggagagacaagtgctaaagtggagatttaacagcaaactagcatttgaacacaaggc

SEQ ID NO: 362587 - DNA, 52 bp, Artificial
  Synthetic oligonucleotide
ccggagagacttcaacttggggaccagcgcgccagccctacggttttttcct

SEQ ID NO: 362588 - DNA, 58 bp, Artificial
  Synthetic oligonucleotide
ccggagagcagtggggagagcgatcaggagggggagctgtttatctagaagacccctc

SEQ ID NO: 362589 - DNA, 55 bp, Artificial
  Synthetic oligonucleotide
ccggagagggaagcgttcctgccggtggagggagtgataaacgtggaatattcac

SEQ ID NO: 362590 - DNA, 54 bp, Artificial
  Synthetic oligonucleotide
ccggagatagactcatcgtttccaactccaccgaccaacccatcggccttttcg

SEQ ID NO: 362591 - DNA, 55 bp, Artificial
  Synthetic oligonucleotide
ccggagattcacaccggaaatagcggctagacctaaggtaagagggcaagcaggt

SEQ ID NO: 362592 - DNA, 55 bp, Artificial
  Synthetic oligonucleotide
ccggagcaaactgtgacatgcttgatgtttgtgacaacatacttgtgtacgtagc

SEQ ID NO: 362593 - DNA, 55 bp, Artificial
  Synthetic oligonucleotide
ccggagcactcaaaagaaggtttccttacatcatgcatattagggctgccaaagc

SEQ ID NO: 362594 - DNA, 52 bp, Artificial
  Synthetic oligonucleotide
ccggagcattagtgaacggattcttgacacttatctgggacgatctgcggag

SEQ ID NO: 362595 - DNA, 55 bp, Artificial
  Synthetic oligonucleotide
ccggagccacatgcagtgatctatgttacggaggaattggtgcacctcatcaagg

SEQ ID NO: 362596 - DNA, 60 bp, Artificial
  Synthetic oligonucleotide
ccggagccactcctcagcatcccaccctattgcttccctgaacaattatgtagatcaact

SEQ ID NO: 362597 - DNA, 55 bp, Artificial
  Synthetic oligonucleotide
ccggagccactttagatgacgaagaccaaactaaagtagccaagtaccatgatag

SEQ ID NO: 362598 - DNA, 58 bp, Artificial
  Synthetic oligonucleotide
ccggagcccctatagaactctaatgagtgtagaaatagggcagtcacccaatgtgtac

SEQ ID NO: 362599 - DNA, 58 bp, Artificial
  Synthetic oligonucleotide
ccggagccgcaccaacatccgaggcagtcggcttgttcccttcatggtaaatcttgta

SEQ ID NO: 362600 - DNA, 55 bp, Artificial
  Synthetic oligonucleotide
ccggagccggagaaacaaagatcccaaacggacaatcagttggccgtgttcctga

SEQ ID NO: 362601 - DNA, 55 bp, Artificial
  Synthetic oligonucleotide
ccggagcgcacctgctttacgggacctccacttcttaaccatgtctgggacgttc

SEQ ID NO: 362602 - DNA, 51 bp, Artificial
  Synthetic oligonucleotide
ccggagcggactgttctccacaacggtcccagtcaggatgcgattgtgcga

SEQ ID NO: 362603 - DNA, 60 bp, Artificial
  Synthetic oligonucleotide
ccggagcggaggcattggtcacaaccgcgattcacattcatcgctggatcaggggatccg

SEQ ID NO: 362604 - DNA, 51 bp, Artificial
  Synthetic oligonucleotide
ccggagcggggtatagacggtacccactgtcaaaagcccttaaccgttatc

SEQ ID NO: 362605 - DNA, 55 bp, Artificial
  Synthetic oligonucleotide
ccggagctaaccgtctgcggttagtgcgagcgtagcgagtagagccgtttgtagg

SEQ ID NO: 362606 - DNA, 51 bp, Artificial
  Synthetic oligonucleotide
ccggagctccgtacttggcacaggctatcgcgtactgctctcccctcgtag

SEQ ID NO: 362607 - DNA, 55 bp, Artificial
  Synthetic oligonucleotide
ccggaggaattgactcagttgattgaggttaaggcggaagtggatgggaaagagg

SEQ ID NO: 362608 - DNA, 51 bp, Artificial
  Synthetic oligonucleotide
ccggaggaattggtaatctaccaatcagaaattggaattttgattttggac

SEQ ID NO: 362609 - DNA, 60 bp, Artificial
  Synthetic oligonucleotide
ccggaggactggctctcatccagtggatgcattaagtggattgtctgtcagggctgtctc

SEQ ID NO: 362610 - DNA, 57 bp, Artificial
  Synthetic oligonucleotide
ccggaggacttcaataaatttgtacttgaacactggtcacacaagcaagttgctcac

SEQ ID NO: 362611 - DNA, 59 bp, Artificial
  Synthetic oligonucleotide
ccggaggatcaggcaaggctcacacattcgtgttttcaaaggacggcatcaatggtagt

SEQ ID NO: 362612 - DNA, 54 bp, Artificial
  Synthetic oligonucleotide
ccggaggatctatgtttccgaagtcaaatatcgacagaaattacaaggttaaac

SEQ ID NO: 362613 - DNA, 58 bp, Artificial
  Synthetic oligonucleotide
ccggaggcaaatgccgtggatgaggccagtggtgacttggtcacctttaggagcccga

SEQ ID NO: 362614 - DNA, 55 bp, Artificial
  Synthetic oligonucleotide
ccggaggctccccagaccttatccatggtactgtcgttggtagtccgcagtcccc

SEQ ID NO: 362615 - DNA, 52 bp, Artificial
  Synthetic oligonucleotide
ccggagggaggtttttggtggtgacatttgttataaaatagcggaatggtta

SEQ ID NO: 362616 - DNA, 53 bp, Artificial
  Synthetic oligonucleotide
ccggaggggttgttcaggtaaattcaaccactccaaatgactacttgcccctc

SEQ ID NO: 362617 - DNA, 55 bp, Artificial
  Synthetic oligonucleotide
ccggaggtcatccctctattctcagcattgacagaaggagcaatcagtcatgatt

SEQ ID NO: 362618 - DNA, 54 bp, Artificial
  Synthetic oligonucleotide
ccggaggtccttttcgagttcctcagctttctttcttccgttcacccactgctc

SEQ ID NO: 362619 - DNA, 58 bp, Artificial
  Synthetic oligonucleotide
ccggaggtctctctcgagttcctctaacttctttcttccgctcacccactgctcgaga

SEQ ID NO: 362620 - DNA, 55 bp, Artificial
  Synthetic oligonucleotide
ccggaggttcactccagaactagcagccagacctaaagtaagaggacaggcaggc

SEQ ID NO: 362621 - DNA, 54 bp, Artificial
  Synthetic oligonucleotide
ccggagtacaaccgtttatggacatgtactacgccactgtcccccgtgctgatt

SEQ ID NO: 362622 - DNA, 55 bp, Artificial
  Synthetic oligonucleotide
ccggagtacttcaaataaggacttccgggtgctctttgcagaactgctgacaagg

SEQ ID NO: 362623 - DNA, 55 bp, Artificial
  Synthetic oligonucleotide
ccggagtatacctcccttagatcactaattgcctcgtcaggtaccttggagttta

SEQ ID NO: 362624 - DNA, 55 bp, Artificial
  Synthetic oligonucleotide
ccggagtatttgacgattggtgggtccacgtagaagcctggaataaatttctaga

SEQ ID NO: 362625 - DNA, 55 bp, Artificial
  Synthetic oligonucleotide
ccggagtccctatcgggcattgatgagtgttccattaggatcctctcctaatgct

SEQ ID NO: 362626 - DNA, 55 bp, Artificial
  Synthetic oligonucleotide
ccggagtcgttagagtctcgcgcgccccgtgaaacatctcacctatgcgtgagct

SEQ ID NO: 362627 - DNA, 60 bp, Artificial
  Synthetic oligonucleotide
ccggagtctgaagttgaagatgtatgacgatatgctgggtgcatctggagtagggtctac

SEQ ID NO: 362628 - DNA, 55 bp, Artificial
  Synthetic oligonucleotide
ccggagtgaaggggtttggttttagagctggcaatgatgtgtggctgggcaggac

SEQ ID NO: 362629 - DNA, 55 bp, Artificial
  Synthetic oligonucleotide
ccggagtgcttcgattagtaagatagcatatacacttagcacagacctatatgcc

SEQ ID NO: 362630 - DNA, 53 bp, Artificial
  Synthetic oligonucleotide
ccggagtggcgcttagaattggggagacaataaaagggttggtggaaattcca

SEQ ID NO: 362631 - DNA, 55 bp, Artificial
  Synthetic oligonucleotide
ccggagtgggtctggggtggcgatgccgcaagtaccggcacgcaaatgtttgtct

SEQ ID NO: 362632 - DNA, 58 bp, Artificial
  Synthetic oligonucleotide
ccggagtggtaactgctacgaatgttccccactcagccgtgttgacatcggagtcaac

SEQ ID NO: 362633 - DNA, 55 bp, Artificial
  Synthetic oligonucleotide
ccggagtggtacaaagactgactgctgacacagaagggactttctgctgacacag

SEQ ID NO: 362634 - DNA, 55 bp, Artificial
  Synthetic oligonucleotide
ccggagtggtacaaagactgatgacacagcagggactttccgcctgggactttcc

SEQ ID NO: 362635 - DNA, 60 bp, Artificial
  Synthetic oligonucleotide
ccggagttacaggtcatctgagagtggtcataatcgcgagttcagggaaccagatggtag

SEQ ID NO: 362636 - DNA, 55 bp, Artificial
  Synthetic oligonucleotide
ccggagttctaccagaacgaagactgctgggactgctgacacagagattgctgac

SEQ ID NO: 362637 - DNA, 55 bp, Artificial
  Synthetic oligonucleotide
ccggagttctataggaactgctgatacagaagggactttccgccggagtttccac

SEQ ID NO: 362638 - DNA, 55 bp, Artificial
  Synthetic oligonucleotide
ccggatacagtcagacgacatggagagtttatctaaggtcccatgactttgatgc

SEQ ID NO: 362639 - DNA, 55 bp, Artificial
  Synthetic oligonucleotide
ccggataccttgcgcttagtcaacgactcgattaactggactgtagacgggcaag

SEQ ID NO: 362640 - DNA, 51 bp, Artificial
  Synthetic oligonucleotide
ccggatacgcttgggtacgagttaatacgggatttaatttgtattttacgc

SEQ ID NO: 362641 - DNA, 55 bp, Artificial
  Synthetic oligonucleotide
ccggatacggtgggttacgatctgatacgtgatcttataggtgtgattcgtgcca

SEQ ID NO: 362642 - DNA, 55 bp, Artificial
  Synthetic oligonucleotide
ccggatacgttggggtacgatcttatacgcgatcttatacttgtgattcgtgcga

SEQ ID NO: 362643 - DNA, 55 bp, Artificial
  Synthetic oligonucleotide
ccggatatcaaaggcggcctttcaccatggacatggtgtgacaactacgattctg

SEQ ID NO: 362644 - DNA, 54 bp, Artificial
  Synthetic oligonucleotide
ccggatatgactgcactaaacattatgcaatcaaggagtgcacaatgtgcatta

SEQ ID NO: 362645 - DNA, 55 bp, Artificial
  Synthetic oligonucleotide
ccggatatgatgagtaggaccgagagacagggttcactctcttccggctagcagg

SEQ ID NO: 362646 - DNA, 60 bp, Artificial
  Synthetic oligonucleotide
ccggatatgattcaagtatcattgaatgctggcgctagaggtgatgtgcaacagattttt

SEQ ID NO: 362647 - DNA, 55 bp, Artificial
  Synthetic oligonucleotide
ccggatcacgttcgacacgcgatacacgggcggattccagaactggcaccaggcg

SEQ ID NO: 362648 - DNA, 55 bp, Artificial
  Synthetic oligonucleotide
ccggatcctgggaaacaggtttaacgggctctctgtggtggagggccgacgcatc

SEQ ID NO: 362649 - DNA, 55 bp, Artificial
  Synthetic oligonucleotide
ccggatctggattgttattatgtcgtggttccggaagaatggtcggtccaggtgg

SEQ ID NO: 362650 - DNA, 59 bp, Artificial
  Synthetic oligonucleotide
ccggatctgtatgattacaaggagaaccgattcattgaaattggagtgacacggaggga

SEQ ID NO: 362651 - DNA, 56 bp, Artificial
  Synthetic oligonucleotide
ccggatgacggtaatatattaattggtggtgactatagccaacaggaaccacgaag

SEQ ID NO: 362652 - DNA, 60 bp, Artificial
  Synthetic oligonucleotide
ccggatgagattaaatccatatggttcgactctctcagaggtttaagtcgaagacatcta

SEQ ID NO: 362653 - DNA, 58 bp, Artificial
  Synthetic oligonucleotide
ccggatgatggaagcataacagggccttgcgaatctaatggggacaaagggcttggag

SEQ ID NO: 362654 - DNA, 55 bp, Artificial
  Synthetic oligonucleotide
ccggatgcagcacgtagaacagggagattccaagttgctgacattcaaatagatg

SEQ ID NO: 362655 - DNA, 55 bp, Artificial
  Synthetic oligonucleotide
ccggatgccaacccaactgggcaattaggccacaataagcccgacttggttgatg

SEQ ID NO: 362656 - DNA, 55 bp, Artificial
  Synthetic oligonucleotide
ccggatgctacatatcttggacctctgaattgcaagtcatgttggcagaaggttg

SEQ ID NO: 362657 - DNA, 55 bp, Artificial
  Synthetic oligonucleotide
ccggatggagaagaagaagggatagtccagcagggttgggccgcctccgtcaagg

SEQ ID NO: 362658 - DNA, 60 bp, Artificial
  Synthetic oligonucleotide
ccggatggagtcccttctaaagacgatcctcgcgtaagtgatgagattgatctctgtgct

SEQ ID NO: 362659 - DNA, 55 bp, Artificial
  Synthetic oligonucleotide
ccggatggtagaccaccgtccacagtgtcagacccagttaccagacttggaccct

SEQ ID NO: 362660 - DNA, 55 bp, Artificial
  Synthetic oligonucleotide
ccggatgtacctcgtgcaaccgctgagtatctacaggtgcgattcaactatgcgt

SEQ ID NO: 362661 - DNA, 57 bp, Artificial
  Synthetic oligonucleotide
ccggatgttcagggtgctgatcctacagaaatggctagggacttagttcatcttaaa

SEQ ID NO: 362662 - DNA, 60 bp, Artificial
  Synthetic oligonucleotide
ccggatgtttctggcgatgataacatacataacaagagatcagcctgagtggttcagaaa

SEQ ID NO: 362663 - DNA, 59 bp, Artificial
  Synthetic oligonucleotide
ccggattagaaagtcatgcttgccgtgactttcctagaacttgctgggcaagtttgtca

SEQ ID NO: 362664 - DNA, 55 bp, Artificial
  Synthetic oligonucleotide
ccggattatggcaagaggaattcttggcacttaccaagccggtgttggagtcatg

SEQ ID NO: 362665 - DNA, 58 bp, Artificial
  Synthetic oligonucleotide
ccggattcacaataatcaccttctttggtgatgtagttcttgactgcgttggtgtcct

SEQ ID NO: 362666 - DNA, 60 bp, Artificial
  Synthetic oligonucleotide
ccggattccattgaatcaccttatgccccttgggtatttgcatgtgctcctgatcggtgc

SEQ ID NO: 362667 - DNA, 55 bp, Artificial
  Synthetic oligonucleotide
ccggattgccttctgggtacaacgtcattttcttcttgtctggattagcagaaca

SEQ ID NO: 362668 - DNA, 60 bp, Artificial
  Synthetic oligonucleotide
ccggattgcgacttcctgtggtgtacgactggtaacatcctcgtgcagacgcaggagacc

SEQ ID NO: 362669 - DNA, 55 bp, Artificial
  Synthetic oligonucleotide
ccggattggcgcattactaccaactttcatcaaaacctcgtcgaccaaaaagtca

SEQ ID NO: 362670 - DNA, 60 bp, Artificial
  Synthetic oligonucleotide
ccggattgttcttggcagccatcatgtacgcatacgtccaataccgaaagcctcaatgca

SEQ ID NO: 362671 - DNA, 56 bp, Artificial
  Synthetic oligonucleotide
ccggatttatacgattacaaagagaatcgcttcattgaaatcggagtaaccaggag

SEQ ID NO: 362672 - DNA, 55 bp, Artificial
  Synthetic oligonucleotide
ccggatttcaatcactttgtggtgttcgatacctttgcagcgcaagcgctgtggg

SEQ ID NO: 362673 - DNA, 55 bp, Artificial
  Synthetic oligonucleotide
ccggatttcatcctagccacagacattgccgagatgggagcaaacttgtgcgttg

SEQ ID NO: 362674 - DNA, 57 bp, Artificial
  Synthetic oligonucleotide
ccggatttgacctctgactcgtggtccactgtcagcggttcggaggacgttgtgtgt

SEQ ID NO: 362675 - DNA, 55 bp, Artificial
  Synthetic oligonucleotide
ccggatttgcaatagtttctaaggacaatggaattagaatagggtcaagggggca

SEQ ID NO: 362676 - DNA, 60 bp, Artificial
  Synthetic oligonucleotide
ccggcaaattcagatgggacatacacttccacattatagaactgaggggcatttcatgga

SEQ ID NO: 362677 - DNA, 60 bp, Artificial
  Synthetic oligonucleotide
ccggcaacatggaaagtgagccgggagctgtgtcatcgcttcgtggtgaaacggcgatgg

SEQ ID NO: 362678 - DNA, 50 bp, Artificial
  Synthetic oligonucleotide
ccggcaataaggaatggcaaacatggctactgccgatgatcttagtgaga

SEQ ID NO: 362679 - DNA, 52 bp, Artificial
  Synthetic oligonucleotide
ccggcaatacgtactcgaccacgtgtcgagaatcccggatcgggcgcttcag

SEQ ID NO: 362680 - DNA, 59 bp, Artificial
  Synthetic oligonucleotide
ccggcacacggcccagatgacgccccttctggaaagcgcgagcacgctacgcccggtga

SEQ ID NO: 362681 - DNA, 60 bp, Artificial
  Synthetic oligonucleotide
ccggcacactaaccctagttttagacgcatagtagctccatcatttagatatgatgttac

SEQ ID NO: 362682 - DNA, 55 bp, Artificial
  Synthetic oligonucleotide
ccggcacgaacatacgttcgaagactgaacgtctaatggtctaaccattgccggc

SEQ ID NO: 362683 - DNA, 53 bp, Artificial
  Synthetic oligonucleotide
ccggcactaacctggttctttatgccgcccctcttagtccgctcttacccctc

SEQ ID NO: 362684 - DNA, 52 bp, Artificial
  Synthetic oligonucleotide
ccggcagaaaagccggacaatcagcccgaattaacgggtattacttttgaag

SEQ ID NO: 362685 - DNA, 55 bp, Artificial
  Synthetic oligonucleotide
ccggcagagggcaacatgttcaagccttccgaggaagaaatcctagctcacaacc

SEQ ID NO: 362686 - DNA, 55 bp, Artificial
  Synthetic oligonucleotide
ccggcagctggattaggtccattcccatcaacaacattaggacccaataccaccg

SEQ ID NO: 362687 - DNA, 60 bp, Artificial
  Synthetic oligonucleotide
ccggcaggtaggatgctcgtgtgcatgggcgaacaacccgcacatggtccgttcacctcc

SEQ ID NO: 362688 - DNA, 52 bp, Artificial
  Synthetic oligonucleotide
ccggcagttttccaaagaaaaatggatcactgtttcaagggaacggaggcct

SEQ ID NO: 362689 - DNA, 50 bp, Artificial
  Synthetic oligonucleotide
ccggcatatcgttgcttggaccagggccccacgccggttggtacccgggt

SEQ ID NO: 362690 - DNA, 55 bp, Artificial
  Synthetic oligonucleotide
ccggcatccttggtgtgatgggattgtggacactgtcagaaatgctgaggacggc

SEQ ID NO: 362691 - DNA, 55 bp, Artificial
  Synthetic oligonucleotide
ccggcatcggacccacggttgtcttataccatgttaggagagatcctgaactatt

SEQ ID NO: 362692 - DNA, 60 bp, Artificial
  Synthetic oligonucleotide
ccggcatgcggcttaatgcgtatcggataacgtttgacacatcagttcctaggttggaca

SEQ ID NO: 362693 - DNA, 55 bp, Artificial
  Synthetic oligonucleotide
ccggcatgggcataggcaatctacctacaattgcatgggtccatcgctttatgcg

SEQ ID NO: 362694 - DNA, 53 bp, Artificial
  Synthetic oligonucleotide
ccggcatgggtgtgggagtgggcaatctcacgattttcccacaccagtggata

SEQ ID NO: 362695 - DNA, 60 bp, Artificial
  Synthetic oligonucleotide
ccggcattccaaccagcagtcaagatcaggttgagatattgtacattccaaggtattgcg

SEQ ID NO: 362696 - DNA, 55 bp, Artificial
  Synthetic oligonucleotide
ccggcatttaggaagggtttgctgaaatataatgaacctgttcgagtgggattgg

SEQ ID NO: 362697 - DNA, 55 bp, Artificial
  Synthetic oligonucleotide
ccggcatttgcccagacggacagtaaatcccacttaagcgcagcgcaggaatcgg

SEQ ID NO: 362698 - DNA, 55 bp, Artificial
  Synthetic oligonucleotide
ccggccaagggtcttacagcacttggtcggtctggcatccagttcacagaagatc

SEQ ID NO: 362699 - DNA, 55 bp, Artificial
  Synthetic oligonucleotide
ccggccatataactagctgcacttccgaatggctgagtttatgccgcccgtccgc

SEQ ID NO: 362700 - DNA, 57 bp, Artificial
  Synthetic oligonucleotide
ccggccatctttggctgcctgccctcattgttgccatactgccgggcatcatttggc

SEQ ID NO: 362701 - DNA, 60 bp, Artificial
  Synthetic oligonucleotide
ccggcccatatgccaatgcatcctatggtgaatccctcgaaggggtcttctgggttgcta

SEQ ID NO: 362702 - DNA, 58 bp, Artificial
  Synthetic oligonucleotide
ccggcccatttcgaaataaagatgtcaggcccacctccctgcgatcgcaccgagccag

SEQ ID NO: 362703 - DNA, 52 bp, Artificial
  Synthetic oligonucleotide
ccggcccccgaatgcggctaacctaaaccccggagccttgaaacacaatcca

SEQ ID NO: 362704 - DNA, 56 bp, Artificial
  Synthetic oligonucleotide
ccggcccccgtatttcattacgggcattcccgaggtgaagcttgcaagctagacac

SEQ ID NO: 362705 - DNA, 56 bp, Artificial
  Synthetic oligonucleotide
ccggccccctctgtctgccctccggactccgacgctgagtcctgctcttccatgcc

SEQ ID NO: 362706 - DNA, 52 bp, Artificial
  Synthetic oligonucleotide
ccggcccccttacaggcggctacaagtccccccacggacacttctgccgccc

SEQ ID NO: 362707 - DNA, 60 bp, Artificial
  Synthetic oligonucleotide
ccggcccctgaatgcggctaatccaaccccacatctgtcgcacacaatccagtgtgtagg

SEQ ID NO: 362708 - DNA, 60 bp, Artificial
  Synthetic oligonucleotide
ccggcccctgaatgcggctaatcccaaccacggagcgagtgctcacaatccagtgagtgg

SEQ ID NO: 362709 - DNA, 55 bp, Artificial
  Synthetic oligonucleotide
ccggcccctgaatgcggctaatcccaacctcggagcaggtggtcacataccagtg

SEQ ID NO: 362710 - DNA, 57 bp, Artificial
  Synthetic oligonucleotide
ccggcccctgaatgcggctaatcccaactgcggagcacacgcccacaaaccagtggg

SEQ ID NO: 362711 - DNA, 55 bp, Artificial
  Synthetic oligonucleotide
ccggcccctgaatgcggctaatcctaaccacggagcaatcgctcacgacccagtg

SEQ ID NO: 362712 - DNA, 55 bp, Artificial
  Synthetic oligonucleotide
ccggcccctgaatgtggctaaccttaaccccgcagccgttactcacaatccagtg

SEQ ID NO: 362713 - DNA, 59 bp, Artificial
  Synthetic oligonucleotide
ccggcccctgaatgtggctaaccttaaccctgcagctagtgtatgtaatccaacatatg

SEQ ID NO: 362714 - DNA, 50 bp, Artificial
  Synthetic oligonucleotide
ccggcccgacgtttcgactgccttaatcagtgccacgatcaaccggccac

SEQ ID NO: 362715 - DNA, 60 bp, Artificial
  Synthetic oligonucleotide
ccggcccgcatttcagtaccatatgttggtatctcaaacgcctactcacacttctatgac

SEQ ID NO: 362716 - DNA, 55 bp, Artificial
  Synthetic oligonucleotide
ccggcccggggatgagttgtacctgaccgagccagctatagcttggtttgaggct

SEQ ID NO: 362717 - DNA, 55 bp, Artificial
  Synthetic oligonucleotide
ccggccctatacttcctgacttataggcgggaggtggaagtcgagtctcctgagc

SEQ ID NO: 362718 - DNA, 55 bp, Artificial
  Synthetic oligonucleotide
ccggccctgataatgtcaagagcctctgcaacaccaggtgcattgacggcgttat

SEQ ID NO: 362719 - DNA, 55 bp, Artificial
  Synthetic oligonucleotide
ccggccgatagctttaaggggcagggatggcgactccttgcgcctattacggcct

SEQ ID NO: 362720 - DNA, 55 bp, Artificial
  Synthetic oligonucleotide
ccggccgattataagaatgctcagagattagctgcaagatcggtgttgaaagcgt

SEQ ID NO: 362721 - DNA, 55 bp, Artificial
  Synthetic oligonucleotide
ccggccgctatcagatgtcttggtatcctcttggatctggtaaccacacactagc

SEQ ID NO: 362722 - DNA, 56 bp, Artificial
  Synthetic oligonucleotide
ccggccgtcgtcttcagtgagcacaaaaagagggaggggatcagtttcgactactg

SEQ ID NO: 362723 - DNA, 55 bp, Artificial
  Synthetic oligonucleotide
ccggccgtgagggagcgtgctgattttgtgaatagactgaagcaattgccactgc

SEQ ID NO: 362724 - DNA, 57 bp, Artificial
  Synthetic oligonucleotide
ccggcctcctgaatgcggctaaccctaaccccggagcatatggtggcaacccagcca

SEQ ID NO: 362725 - DNA, 53 bp, Artificial
  Synthetic oligonucleotide
ccggcgaatcgtccccacatagcagttcctcggacccccttccaaaggaccga

SEQ ID NO: 362726 - DNA, 60 bp, Artificial
  Synthetic oligonucleotide
ccggcgacggaagtcgctatgactttaggatattcaaaccctagagatgcaataagcaga

SEQ ID NO: 362727 - DNA, 58 bp, Artificial
  Synthetic oligonucleotide
ccggcgacttagtagatacggagtggttctcgtggacgccttatgatgcgtctgggcc

SEQ ID NO: 362728 - DNA, 55 bp, Artificial
  Synthetic oligonucleotide
ccggcgacttcgattcagtgatagactgcaacacgtgtgtcactcagacagtcga

SEQ ID NO: 362729 - DNA, 54 bp, Artificial
  Synthetic oligonucleotide
ccggcgagaataccaaaacttatggctgtcggccttttctgccctcccaggaaa

SEQ ID NO: 362730 - DNA, 57 bp, Artificial
  Synthetic oligonucleotide
ccggcgagacccgaaagttgacgactcgccgatcgtggcgtgctcggccgcctacta

SEQ ID NO: 362731 - DNA, 55 bp, Artificial
  Synthetic oligonucleotide
ccggcgagagatccgatattatcaccgattttgaagctagtgaagcgaaggtgat

SEQ ID NO: 362732 - DNA, 55 bp, Artificial
  Synthetic oligonucleotide
ccggcgagctacgggatcgctagcgatggtgtgacgctgcagttcgatagcgtga

SEQ ID NO: 362733 - DNA, 52 bp, Artificial
  Synthetic oligonucleotide
ccggcgagtgtagggtccgggatacctttgtgtctactgtctgtcctcgcac

SEQ ID NO: 362734 - DNA, 53 bp, Artificial
  Synthetic oligonucleotide
ccggcgagttggcaaggaccagtgggggccgggggcttggagagggactccaa

SEQ ID NO: 362735 - DNA, 51 bp, Artificial
  Synthetic oligonucleotide
ccggcgatctgattgctatgtgcctgaccagaaagtaatcgcctttctggt

SEQ ID NO: 362736 - DNA, 58 bp, Artificial
  Synthetic oligonucleotide
ccggcgatgactcgcttctcgatagcgagcctcccgttcgagaccagtgggccgccgt

SEQ ID NO: 362737 - DNA, 55 bp, Artificial
  Synthetic oligonucleotide
ccggcgatgactgtttgatcatatgcgaacggccgatgtgtgatcctagtgacgc

SEQ ID NO: 362738 - DNA, 55 bp, Artificial
  Synthetic oligonucleotide
ccggcgatgggcagccgtacgcgtgggtcattaaggccggtaagtcgcagcggaa

SEQ ID NO: 362739 - DNA, 53 bp, Artificial
  Synthetic oligonucleotide
ccggcgcagataccgggtcgacgtataagttaaagtacgaatcgaacacgtac

SEQ ID NO: 362740 - DNA, 55 bp, Artificial
  Synthetic oligonucleotide
ccggcgcatgataacttgatgggtacgatgtggctgaacgcgggatcagaaatcc

SEQ ID NO: 362741 - DNA, 55 bp, Artificial
  Synthetic oligonucleotide
ccggcgccattcatatggggttccagtacgatatggctgacacccttcccgtgag

SEQ ID NO: 362742 - DNA, 55 bp, Artificial
  Synthetic oligonucleotide
ccggcgcctaaacagcaatgggttttattgtgcgctctactggcaaaggggcgca

SEQ ID NO: 362743 - DNA, 55 bp, Artificial
  Synthetic oligonucleotide
ccggcgctgcagacacccctgagacctccgcgggtgcatcacagggcacagaaaa

SEQ ID NO: 362744 - DNA, 55 bp, Artificial
  Synthetic oligonucleotide
ccggcgctttgcgatcaacacgttgtctatgcgattcagtgagtgacgtgacttg

SEQ ID NO: 362745 - DNA, 55 bp, Artificial
  Synthetic oligonucleotide
ccggcggaggtcccgcaatttgggtaaggtcatcgataccctaacatgcggcttc

SEQ ID NO: 362746 - DNA, 57 bp, Artificial
  Synthetic oligonucleotide
ccggcggatgactttggggccgcactcatgcggaagaacgtgcatacttgttatgcg

SEQ ID NO: 362747 - DNA, 55 bp, Artificial
  Synthetic oligonucleotide
ccggcgggacctgcgaatcatggccaacgcaatatgctcagccgtccctgtgaac

SEQ ID NO: 362748 - DNA, 55 bp, Artificial
  Synthetic oligonucleotide
ccggcgggccctcacacaaccaccacctgagaagggtcaattcccatggcaacgt

SEQ ID NO: 362749 - DNA, 55 bp, Artificial
  Synthetic oligonucleotide
ccggcgtaaagaaaccagctcagaatgtgtggcctcgctgctagcagccatttcc

SEQ ID NO: 362750 - DNA, 55 bp, Artificial
  Synthetic oligonucleotide
ccggcgtactttggggaagagccggtggtagaattagcacagtttgcggataagc

SEQ ID NO: 362751 - DNA, 54 bp, Artificial
  Synthetic oligonucleotide
ccggcgtcatttccgggttcccacgctacgtcaccgctcagcgactttcaaatt

SEQ ID NO: 362752 - DNA, 55 bp, Artificial
  Synthetic oligonucleotide
ccggcgtctcagtggtctacgctgaacccagttctagccgccggcgaaattggct

SEQ ID NO: 362753 - DNA, 60 bp, Artificial
  Synthetic oligonucleotide
ccggcgtgcgagcaagttgaccatggtccgtcgtgcaagtgtcccagagtcacgtcatac

SEQ ID NO: 362754 - DNA, 54 bp, Artificial
  Synthetic oligonucleotide
ccggctaaattttatgaaaccgtcatcaagaaagttagacatttaaggactgaa

SEQ ID NO: 362755 - DNA, 55 bp, Artificial
  Synthetic oligonucleotide
ccggctacaacgatcctccgtaggaagcgttggtgtcttggacattgccgagttg

SEQ ID NO: 362756 - DNA, 52 bp, Artificial
  Synthetic oligonucleotide
ccggctagctacggcgttacagaaagagatcggagaaagaacacatgcggag

SEQ ID NO: 362757 - DNA, 55 bp, Artificial
  Synthetic oligonucleotide
ccggctagctacttcgggaaacctagtaacaccatgaaagttgcggagagcttcg

SEQ ID NO: 362758 - DNA, 55 bp, Artificial
  Synthetic oligonucleotide
ccggctatacttcacccgatagactatgaatttaatcaatacttcttaacgcacc

SEQ ID NO: 362759 - DNA, 60 bp, Artificial
  Synthetic oligonucleotide
ccggctattttggcaggaggattggcaaccgcgtatatggcatgccatttggaagccgtc

SEQ ID NO: 362760 - DNA, 55 bp, Artificial
  Synthetic oligonucleotide
ccggctcatacgagacccgaaagcagttaaggtgttgagttacgaagcagacaga

SEQ ID NO: 362761 - DNA, 55 bp, Artificial
  Synthetic oligonucleotide
ccggctcatcttcaccaaggtgattactggaacatgacccctttccgtcacaccg

SEQ ID NO: 362762 - DNA, 55 bp, Artificial
  Synthetic oligonucleotide
ccggctccaggggaagatgtatgacttcgacgatgatcgagtgtcagcattcacc

SEQ ID NO: 362763 - DNA, 55 bp, Artificial
  Synthetic oligonucleotide
ccggctctaccatctcgttcgctctgcctgggttctgcaggccccgaaagagtcc

SEQ ID NO: 362764 - DNA, 56 bp, Artificial
  Synthetic oligonucleotide
ccggctgaagatgggcattccaccctatattcggacgttatgtttttatctggtgg

SEQ ID NO: 362765 - DNA, 60 bp, Artificial
  Synthetic oligonucleotide
ccggctgcaactgcactagctaatacgatagaggtattcagatcgaacggtcttacagct

SEQ ID NO: 362766 - DNA, 60 bp, Artificial
  Synthetic oligonucleotide
ccggctgcatacgcagctcagggttacaaggtgctagtgctcaatccctctgttgctgca

SEQ ID NO: 362767 - DNA, 55 bp, Artificial
  Synthetic oligonucleotide
ccggctgccaagggatcactgccaatgaaattcagatcctcatcgactcggacac

SEQ ID NO: 362768 - DNA, 55 bp, Artificial
  Synthetic oligonucleotide
ccggctgcgtctcagttggacttgtccggctggttcgttgctggatacagtgggg

SEQ ID NO: 362769 - DNA, 55 bp, Artificial
  Synthetic oligonucleotide
ccggctgtcataccacatgcgagtcatgttatccattctcaaccaagaagggatg

SEQ ID NO: 362770 - DNA, 60 bp, Artificial
  Synthetic oligonucleotide
ccggctgttccctgaagtgaatttggataactacaatttgcctggacctagcaatgtgca

SEQ ID NO: 362771 - DNA, 59 bp, Artificial
  Synthetic oligonucleotide
ccggctgttcgacactgctagagccaacaggtggagctacctagacgacagtagtcccc

SEQ ID NO: 362772 - DNA, 55 bp, Artificial
  Synthetic oligonucleotide
ccggctgttgccgtttaatacacgcccgcgaggaagtttacgctgattcggaatg

SEQ ID NO: 362773 - DNA, 56 bp, Artificial
  Synthetic oligonucleotide
ccggcttaattaaagtgccgtacttcgtgcgcgctcaagggctcattcgcgcatgc

SEQ ID NO: 362774 - DNA, 53 bp, Artificial
  Synthetic oligonucleotide
ccggcttacacttccctgcgaaggggtgtgtcttcccgcgtaccatttacgtc

SEQ ID NO: 362775 - DNA, 55 bp, Artificial
  Synthetic oligonucleotide
ccggcttcccaagggtggagtctatcaaattggttcaatggttttatatcatggc

SEQ ID NO: 362776 - DNA, 55 bp, Artificial
  Synthetic oligonucleotide
ccggcttcgaccgtagcctcgactcacccggttacagcggcattcgtgactcgtt

SEQ ID NO: 362777 - DNA, 58 bp, Artificial
  Synthetic oligonucleotide
ccggcttggtttcagctgcgaggggtcgtgaaatgatacaagaagctaacgattacaa

SEQ ID NO: 362778 - DNA, 58 bp, Artificial
  Synthetic oligonucleotide
ccggctttggccactctgccctatgccgccacagctctcaaattattcgcccccaccc

SEQ ID NO: 362779 - DNA, 60 bp, Artificial
  Synthetic oligonucleotide
ccggcttttattatggcgagagcctcttgcacacttgctgcattaactgcgttatggtag

SEQ ID NO: 362780 - DNA, 55 bp, Artificial
  Synthetic oligonucleotide
ccgggaaacggaagaggtcaggtgatgcgtccagttctaaggttgctcggccgaa

SEQ ID NO: 362781 - DNA, 57 bp, Artificial
  Synthetic oligonucleotide
ccgggaaactaagagtcgtgctgcaaagaaggctaaacgtctggccgagattcaaga

SEQ ID NO: 362782 - DNA, 59 bp, Artificial
  Synthetic oligonucleotide
ccgggaaaggtttgtagtgctcaatcaaacgtccatattgataaacacgtctcagtgca

SEQ ID NO: 362783 - DNA, 57 bp, Artificial
  Synthetic oligonucleotide
ccgggaaatgattgtcaaagtgatcgatacgtcgaaaccgtaggggcagtcgtgata

SEQ ID NO: 362784 - DNA, 55 bp, Artificial
  Synthetic oligonucleotide
ccgggaaccagcagattggagaagctgcgtgaaacgagaaacaatgcctttaagg

SEQ ID NO: 362785 - DNA, 55 bp, Artificial
  Synthetic oligonucleotide
ccgggaagaggcgactagctgagtactcaaagtaggacagttttgttgcccagtc

SEQ ID NO: 362786 - DNA, 55 bp, Artificial
  Synthetic oligonucleotide
ccgggaatcatcacgggatccgcagtaggatgtgatccagaggtgttttggtcaa

SEQ ID NO: 362787 - DNA, 55 bp, Artificial
  Synthetic oligonucleotide
ccgggaattccattgttgacacttactttgacggttatgaagtggccacaggagg

SEQ ID NO: 362788 - DNA, 60 bp, Artificial
  Synthetic oligonucleotide
ccgggacaggtataatctggcgactgatgaattggggtgcatgctccgattcatattgat

SEQ ID NO: 362789 - DNA, 50 bp, Artificial
  Synthetic oligonucleotide
ccgggaccgttcgcgcaaacaaataacgttccagttaattggggacctgg

SEQ ID NO: 362790 - DNA, 51 bp, Artificial
  Synthetic oligonucleotide
ccgggacgaattcctccggagggtagcaacccctggtatagtcgcggggta

SEQ ID NO: 362791 - DNA, 55 bp, Artificial
  Synthetic oligonucleotide
ccgggagacgttggaacatcaactaggtcgcctccaaagggaggtcaatcaagac

SEQ ID NO: 362792 - DNA, 55 bp, Artificial
  Synthetic oligonucleotide
ccgggagatggcatgtaaatatacgttttacgcaattaatcgccgtctcgaggat

SEQ ID NO: 362793 - DNA, 55 bp, Artificial
  Synthetic oligonucleotide
ccgggagcacggagaatcgattttcactggctatttcttgatcccaatgacgcag

SEQ ID NO: 362794 - DNA, 55 bp, Artificial
  Synthetic oligonucleotide
ccgggagcagcctactgccatccggatgttttcctggaaagtgggattcgggccc

SEQ ID NO: 362795 - DNA, 56 bp, Artificial
  Synthetic oligonucleotide
ccgggagcggatacggatatgtatgaactaagaaacttcatgagactaaaaggtta

SEQ ID NO: 362796 - DNA, 60 bp, Artificial
  Synthetic oligonucleotide
ccgggagctcattttccaggtgtggcaaaggtcctggagatactggcatgatgaacaagg

SEQ ID NO: 362797 - DNA, 59 bp, Artificial
  Synthetic oligonucleotide
ccgggaggacatgccggggcgtcttattgccacgaatactcacaacttcagtggctcaa

SEQ ID NO: 362798 - DNA, 54 bp, Artificial
  Synthetic oligonucleotide
ccgggaggagggcgtttacagcgtcttacatcaacgggacggattggcacgacg

SEQ ID NO: 362799 - DNA, 53 bp, Artificial
  Synthetic oligonucleotide
ccgggaggggctaatggtacgctgtgcccacggcggaaatgagccctaccgtt

SEQ ID NO: 362800 - DNA, 60 bp, Artificial
  Synthetic oligonucleotide
ccgggagtcatgaccgtcagccagtcctcatcctcgttggctaggattattgatggaatg

SEQ ID NO: 362801 - DNA, 52 bp, Artificial
  Synthetic oligonucleotide
ccgggagtgggggttaagagtggtagtccaaccacctgtgaccttaattcag

SEQ ID NO: 362802 - DNA, 59 bp, Artificial
  Synthetic oligonucleotide
ccgggatactccgcggtgcacacaacctcgactgcgtgttaagagagggcgccacgcta

SEQ ID NO: 362803 - DNA, 60 bp, Artificial
  Synthetic oligonucleotide
ccgggatctacgtgatacaacctcagctctgtatcgggaagccttagagtctcctgagca

SEQ ID NO: 362804 - DNA, 60 bp, Artificial
  Synthetic oligonucleotide
ccgggatgaataagctagtcggcgcactaagatgttatgcgtattgtttgatactcgcgt

SEQ ID NO: 362805 - DNA, 55 bp, Artificial
  Synthetic oligonucleotide
ccgggatgaatctagaaactctcggcaccctgattggttctaaactgcagaagcc

SEQ ID NO: 362806 - DNA, 55 bp, Artificial
  Synthetic oligonucleotide
ccgggatgccgagtatttaacctcctccacccttcgagagatgagtcttgtgttg

SEQ ID NO: 362807 - DNA, 54 bp, Artificial
  Synthetic oligonucleotide
ccgggatgggcgaccagtacacttttgggctcttcaacaacagtgcggggaact

SEQ ID NO: 362808 - DNA, 59 bp, Artificial
  Synthetic oligonucleotide
ccgggatgtggaaaaactgccgaaatcttgagtaaggcagatttcaagcgtgatctgat

SEQ ID NO: 362809 - DNA, 57 bp, Artificial
  Synthetic oligonucleotide
ccgggcaaggaagacacctagggatggaagacctcctctagacaaagaccagtgcgc

SEQ ID NO: 362810 - DNA, 55 bp, Artificial
  Synthetic oligonucleotide
ccgggcaatcacagaacttgtggaaccccgtgataccatgttctatcttagcggg

SEQ ID NO: 362811 - DNA, 59 bp, Artificial
  Synthetic oligonucleotide
ccgggcaatcgacgtcggttacatgtgtgaggacaccatcacgtacgaatgtcctaagc

SEQ ID NO: 362812 - DNA, 55 bp, Artificial
  Synthetic oligonucleotide
ccgggcaggaagaactgtttctaccagaggaacaggtcaaagcgagacatttgtt

SEQ ID NO: 362813 - DNA, 53 bp, Artificial
  Synthetic oligonucleotide
ccgggcatatttcaacacgcccggtttacccgtgtgtcaagaccacctggagt

SEQ ID NO: 362814 - DNA, 59 bp, Artificial
  Synthetic oligonucleotide
ccgggcattgtttaatatacaggaaggggaggatgatttaaatgctgtgtgtgcactaa

SEQ ID NO: 362815 - DNA, 55 bp, Artificial
  Synthetic oligonucleotide
ccgggccaaacgattgccgctttctatcaacagacagtcatgctctttggcacaa

SEQ ID NO: 362816 - DNA, 55 bp, Artificial
  Synthetic oligonucleotide
ccgggccacagtaggagatttcaagttcacttttgggtcaatgttgatcgggttg

SEQ ID NO: 362817 - DNA, 55 bp, Artificial
  Synthetic oligonucleotide
ccgggccagaagagaagcaccacagtatatgaactatacaatcaataccactaaa

SEQ ID NO: 362818 - DNA, 53 bp, Artificial
  Synthetic oligonucleotide
ccgggccataagtgaacttgtggaacctaaggacaccatgttttatctttccg

SEQ ID NO: 362819 - DNA, 54 bp, Artificial
  Synthetic oligonucleotide
ccgggccatcaatatgctgaaacgcggcataccccgcgtgttcccactagtggg

SEQ ID NO: 362820 - DNA, 55 bp, Artificial
  Synthetic oligonucleotide
ccgggccatgtgttctaacatgattctcaatcttcctggtgaggcacactcggcg

SEQ ID NO: 362821 - DNA, 55 bp, Artificial
  Synthetic oligonucleotide
ccgggcccggaccgtccgcgctaagcttctgtccagaggaggcagagctgctata

SEQ ID NO: 362822 - DNA, 55 bp, Artificial
  Synthetic oligonucleotide
ccgggcctgttgtcattcggacagattgtgttacgggctgcaacaacttatggcc

SEQ ID NO: 362823 - DNA, 54 bp, Artificial
  Synthetic oligonucleotide
ccgggccttaattctattgggcctctgagcccaactctagacatggatgcgcat

SEQ ID NO: 362824 - DNA, 59 bp, Artificial
  Synthetic oligonucleotide
ccgggcgaagttaggaacagctgttgttgatacgctacaggtggcagacggtgcaatta

SEQ ID NO: 362825 - DNA, 57 bp, Artificial
  Synthetic oligonucleotide
ccgggcgactctgatcctgagacgaaagatgggacgaaccgccctgttcccacggca

SEQ ID NO: 362826 - DNA, 55 bp, Artificial
  Synthetic oligonucleotide
ccgggcgctacaagaagatcagcgccagcttctaccaccccgattcgccgcacaa

SEQ ID NO: 362827 - DNA, 50 bp, Artificial
  Synthetic oligonucleotide
ccgggcgtagccgtacagcatattcccccgtggaaacgtttgtttccggg

SEQ ID NO: 362828 - DNA, 53 bp, Artificial
  Synthetic oligonucleotide
ccgggcgtatacaatagggatgtttgcgctgaactctacggcgcagagtgggg

SEQ ID NO: 362829 - DNA, 53 bp, Artificial
  Synthetic oligonucleotide
ccgggcgtgtttagtggattcattaactcaattttggttgcaggtaccggaaa

SEQ ID NO: 362830 - DNA, 55 bp, Artificial
  Synthetic oligonucleotide
ccgggcgtttaccgaatcatggctgccagactcatcgggtcatcacaaattggag

SEQ ID NO: 362831 - DNA, 54 bp, Artificial
  Synthetic oligonucleotide
ccgggctagttgctaatagtgaatctagattcgaaggcgctgttactattaaca

SEQ ID NO: 362832 - DNA, 55 bp, Artificial
  Synthetic oligonucleotide
ccgggctatgcgacgcagacccacggtgcttggcatgtgaagaatttgcgcatgg

SEQ ID NO: 362833 - DNA, 53 bp, Artificial
  Synthetic oligonucleotide
ccgggctcccaatgatcccggcaacgttcccgttgacggacaacaccaagaaa

SEQ ID NO: 362834 - DNA, 55 bp, Artificial
  Synthetic oligonucleotide
ccgggctccgcttgcactgatggtacctcttacgaaacttggagagacttcggcc

SEQ ID NO: 362835 - DNA, 55 bp, Artificial
  Synthetic oligonucleotide
ccgggctctgcaggatcccaaagtcaagggtctgtattttcctgctggtggctcc

SEQ ID NO: 362836 - DNA, 56 bp, Artificial
  Synthetic oligonucleotide
ccgggcttacctacgggaactgctggttgcccctgatgtccagcccatctcccgtc

SEQ ID NO: 362837 - DNA, 57 bp, Artificial
  Synthetic oligonucleotide
ccgggcttatcacgagtcccaaatgtgggacgacaacatattcctaacgctcactta

SEQ ID NO: 362838 - DNA, 54 bp, Artificial
  Synthetic oligonucleotide
ccgggctttcatttcacccaaagctgagacccgttctacttccaggcaagacgg

SEQ ID NO: 362839 - DNA, 51 bp, Artificial
  Synthetic oligonucleotide
ccggggaacccggctaagccccgaaatgtctggttccgccggctccacttc

SEQ ID NO: 362840 - DNA, 55 bp, Artificial
  Synthetic oligonucleotide
ccggggaagcagcgtagtggagaggacaaccgactggctttcctgttgattgggc

SEQ ID NO: 362841 - DNA, 55 bp, Artificial
  Synthetic oligonucleotide
ccggggaagttgtcccacaattgctccagtatatgtttgtgccacctggagcccc

SEQ ID NO: 362842 - DNA, 58 bp, Artificial
  Synthetic oligonucleotide
ccggggaccaaatatccactgctcaaactgctgaaccactatcaaacaacaccaccca

SEQ ID NO: 362843 - DNA, 52 bp, Artificial
  Synthetic oligonucleotide
ccggggacccacgagtttgaaccggggacgttgtggactcaatgttagtcga

SEQ ID NO: 362844 - DNA, 53 bp, Artificial
  Synthetic oligonucleotide
ccggggaggagttaacaaactatataactaactacacttccgaatggctgagt

SEQ ID NO: 362845 - DNA, 55 bp, Artificial
  Synthetic oligonucleotide
ccggggaggtagacagtgggaaccagtttcgagtcgcttgtctctcgcgcgcaga

SEQ ID NO: 362846 - DNA, 53 bp, Artificial
  Synthetic oligonucleotide
ccggggaggttgtaaagccatggattcaaaaaacccgctccatgcgatttaaa

SEQ ID NO: 362847 - DNA, 54 bp, Artificial
  Synthetic oligonucleotide
ccggggataggatcgggtggtgggtttgaaagggcagccgcattatagcttcct

SEQ ID NO: 362848 - DNA, 52 bp, Artificial
  Synthetic oligonucleotide
ccggggatcccgttaccagtgtgtccaacaccgtatattcactggtgatcta

SEQ ID NO: 362849 - DNA, 55 bp, Artificial
  Synthetic oligonucleotide
ccggggcaggagcgacacggtgacgcgaaacaaactataaattatgatgatctgg

SEQ ID NO: 362850 - DNA, 55 bp, Artificial
  Synthetic oligonucleotide
ccggggcatggaaattccattagtaatcattatgttgcatgggtggggtttggga

SEQ ID NO: 362851 - DNA, 60 bp, Artificial
  Synthetic oligonucleotide
ccggggcatgtcgtctggttcgtctgggatgacggacacggagatgcgcagctggcttga

SEQ ID NO: 362852 - DNA, 55 bp, Artificial
  Synthetic oligonucleotide
ccggggccaccaaaccctgcaggattcctgtgatggcgacggctcatggtgaaga

SEQ ID NO: 362853 - DNA, 54 bp, Artificial
  Synthetic oligonucleotide
ccggggccatcatagttctccccgaagacagggtgggtactacattgttccaac

SEQ ID NO: 362854 - DNA, 60 bp, Artificial
  Synthetic oligonucleotide
ccggggcggccagtgatcaccgtgcaggacaatgaacacatgcgcacggtgatataccag

SEQ ID NO: 362855 - DNA, 55 bp, Artificial
  Synthetic oligonucleotide
ccggggctagcaattggatgttcctccccccaatggtcccgagtgaggcttatcc

SEQ ID NO: 362856 - DNA, 55 bp, Artificial
  Synthetic oligonucleotide
ccggggctccaatcacaactataccatcccatggtggttttgaggtaacatcatc

SEQ ID NO: 362857 - DNA, 54 bp, Artificial
  Synthetic oligonucleotide
ccggggctctctgccgggtgcaacaagataatcctcatgaggataattagatct

SEQ ID NO: 362858 - DNA, 56 bp, Artificial
  Synthetic oligonucleotide
ccgggggaacgcccctccggtatgttcgactcgtccgtcctctgtgagtgctatga

SEQ ID NO: 362859 - DNA, 60 bp, Artificial
  Synthetic oligonucleotide
ccgggggagcgtccttccggcatgttcgactcgtccatcctctgcgagtgctatgacgcg

SEQ ID NO: 362860 - DNA, 54 bp, Artificial
  Synthetic oligonucleotide
ccgggggagttggacaacaatggtgaactgcgacaccttttcagtggagtaaac

SEQ ID NO: 362861 - DNA, 55 bp, Artificial
  Synthetic oligonucleotide
ccggggggggcgtgacgctgtcatcctactcacgtgtgttatacacccggctttg

SEQ ID NO: 362862 - DNA, 55 bp, Artificial
  Synthetic oligonucleotide
ccggggtcaaacttttgatcacgtgactttcgtgaccgaatccaacgatcctaga

SEQ ID NO: 362863 - DNA, 53 bp, Artificial
  Synthetic oligonucleotide
ccggggtcgttaccgattccgaggaagggaaatccataatccacgtatatgga

SEQ ID NO: 362864 - DNA, 58 bp, Artificial
  Synthetic oligonucleotide
ccggggtgacaagaatggctcgggatggcatgaagttgcccctccggtgcatgctggg

SEQ ID NO: 362865 - DNA, 54 bp, Artificial
  Synthetic oligonucleotide
ccggggtgtgtcccttgtgttaacgagagtaacgccctgaggtgctgggtggcg

SEQ ID NO: 362866 - DNA, 55 bp, Artificial
  Synthetic oligonucleotide
ccggggttatgtggtcgacgtttcgtacaacggccacgtgattcctgtgatattg

SEQ ID NO: 362867 - DNA, 58 bp, Artificial
  Synthetic oligonucleotide
ccggggttatgtggttgacgtgtcatacgacggccacgtgattccagtgatattagac

SEQ ID NO: 362868 - DNA, 55 bp, Artificial
  Synthetic oligonucleotide
ccggggttggctttcagttattgaaaacaagctagtagtaactgctccaaatgaa

SEQ ID NO: 362869 - DNA, 55 bp, Artificial
  Synthetic oligonucleotide
ccggggttggggataatattcatagcttgccgcacggaggtcagtacagagacgg

SEQ ID NO: 362870 - DNA, 55 bp, Artificial
  Synthetic oligonucleotide
ccgggtaaaaggtcgcagctacgtcataagtcacgtgactgggcaggtactaaac

SEQ ID NO: 362871 - DNA, 53 bp, Artificial
  Synthetic oligonucleotide
ccgggtaagggtggctctaatatacatagttagtttatcgtttggaagtcctg

SEQ ID NO: 362872 - DNA, 50 bp, Artificial
  Synthetic oligonucleotide
ccgggtacatggaattcgcaccacccagcgctttagaagacgcctcgcct

SEQ ID NO: 362873 - DNA, 53 bp, Artificial
  Synthetic oligonucleotide
ccgggtacgctccagttaattggggacacggtgaattatccgattcaacgttg

SEQ ID NO: 362874 - DNA, 58 bp, Artificial
  Synthetic oligonucleotide
ccgggtagactcatacatcaaactgttaagtttgaatgtgtctgggtctgtaattgcc

SEQ ID NO: 362875 - DNA, 55 bp, Artificial
  Synthetic oligonucleotide
ccgggtatcaaaccgtatatgcgcttcgacttctttaagatgttagatttgtcga

SEQ ID NO: 362876 - DNA, 57 bp, Artificial
  Synthetic oligonucleotide
ccgggtcaaaggacacacctacgtcatatgtcacgtggggaggccctactgcgcaaa

SEQ ID NO: 362877 - DNA, 52 bp, Artificial
  Synthetic oligonucleotide
ccgggtcaaaggtcgccgctacgtcataagtcacgtggggggggtcccactg

SEQ ID NO: 362878 - DNA, 55 bp, Artificial
  Synthetic oligonucleotide
ccgggtcaagaaaacacttgggctatatgcgggcatctatccttctgagaagtca

SEQ ID NO: 362879 - DNA, 52 bp, Artificial
  Synthetic oligonucleotide
ccgggtcagactccactctccttccagcttcactccacaaaagactccgatt

SEQ ID NO: 362880 - DNA, 53 bp, Artificial
  Synthetic oligonucleotide
ccgggtccagggactccctgcgcatgatgccaatggccctgagcatcagtcgc

SEQ ID NO: 362881 - DNA, 56 bp, Artificial
  Synthetic oligonucleotide
ccgggtccagtatgcctgttcctagcctgtttagatgtctgtacgggtggagttcg

SEQ ID NO: 362882 - DNA, 60 bp, Artificial
  Synthetic oligonucleotide
ccgggtccattgtcctataagatgcttctcggagtgcgatctactcatggaggccagtgg

SEQ ID NO: 362883 - DNA, 55 bp, Artificial
  Synthetic oligonucleotide
ccgggtccccgaccatatggaatcaccatgtgggtcacagggtttccgtgtcagg

SEQ ID NO: 362884 - DNA, 55 bp, Artificial
  Synthetic oligonucleotide
ccgggtccggggcaagcggatccgtaactgtcgttagcgacgcacagactactgt

SEQ ID NO: 362885 - DNA, 55 bp, Artificial
  Synthetic oligonucleotide
ccgggtctcatctgatggcaaaggcacagtctctgttaacaaagtcgaggacctc

SEQ ID NO: 362886 - DNA, 55 bp, Artificial
  Synthetic oligonucleotide
ccgggtctgagcggaataacgctgcgtttcgtcaactcttagtggttgttaggcg

SEQ ID NO: 362887 - DNA, 52 bp, Artificial
  Synthetic oligonucleotide
ccgggtctgatctcctcaatcatcagacatttgccccagaacatggttttca

SEQ ID NO: 362888 - DNA, 55 bp, Artificial
  Synthetic oligonucleotide
ccgggtcttcagggactccgcgtacggagggtgccgatccgataggtggtcgatc

SEQ ID NO: 362889 - DNA, 55 bp, Artificial
  Synthetic oligonucleotide
ccgggtgactgtggaggcccgattgtcgcaacaagtgacatgaaagttgttggtt

SEQ ID NO: 362890 - DNA, 55 bp, Artificial
  Synthetic oligonucleotide
ccgggtgattataccttgactcctctgtaactcactgtccctcgtgagcgcgcct

SEQ ID NO: 362891 - DNA, 50 bp, Artificial
  Synthetic oligonucleotide
ccgggtgctacacagccgctccatcctgtcctacgagcgttacgtggact

SEQ ID NO: 362892 - DNA, 60 bp, Artificial
  Synthetic oligonucleotide
ccgggtgcttgccgcttatctgggacgatctccggagcctgctgatctggttctaccaaa

SEQ ID NO: 362893 - DNA, 55 bp, Artificial
  Synthetic oligonucleotide
ccgggtggctcgtatggctgatactcgtgagcagccggaattcggtttgcagcga

SEQ ID NO: 362894 - DNA, 55 bp, Artificial
  Synthetic oligonucleotide
ccgggtggctttacatcagtgctaaacaatcctcgcactgtcgatatcggtaaca

SEQ ID NO: 362895 - DNA, 60 bp, Artificial
  Synthetic oligonucleotide
ccgggtgtaatgagtttctgaactcagattgaccctgtgtataggatgatgtgaatgatt

SEQ ID NO: 362896 - DNA, 55 bp, Artificial
  Synthetic oligonucleotide
ccgggtgtatattaattcagcagttctaaaaccgttgtacgagtctctcatgaag

SEQ ID NO: 362897 - DNA, 55 bp, Artificial
  Synthetic oligonucleotide
ccgggtgtatccatgtttgagttccaagaggagaaggaacagtctgttaattggc

SEQ ID NO: 362898 - DNA, 55 bp, Artificial
  Synthetic oligonucleotide
ccgggtgtcattcctccagtgaacgtagatagaccaattccattaggacgtcgag

SEQ ID NO: 362899 - DNA, 55 bp, Artificial
  Synthetic oligonucleotide
ccgggttaacatggctgtagaccctaagcaggtgcaaatgtttattgttggctgc

SEQ ID NO: 362900 - DNA, 50 bp, Artificial
  Synthetic oligonucleotide
ccgggttacaaatacctcggacccggtaacggactcgacaaaggagagcc

SEQ ID NO: 362901 - DNA, 51 bp, Artificial
  Synthetic oligonucleotide
ccgggttaccgcactcggtaccctggattcgccccagacggcgtctatcaa

SEQ ID NO: 362902 - DNA, 48 bp, Artificial
  Synthetic oligonucleotide
ccgggttatccaacccaggtcaccccggtacaacgtttgtttgggtcg

SEQ ID NO: 362903 - DNA, 55 bp, Artificial
  Synthetic oligonucleotide
ccgggttattcaccgtagaacccaagcgcgccagtcataccgcaacacctacctc

SEQ ID NO: 362904 - DNA, 55 bp, Artificial
  Synthetic oligonucleotide
ccgggttcaaggacctcgatttcctgaagagacgatgggagttggaaccagggca

SEQ ID NO: 362905 - DNA, 54 bp, Artificial
  Synthetic oligonucleotide
ccgggttcagattgggcttataccttaaatctgtccgaagtggtatctgggtta

SEQ ID NO: 362906 - DNA, 54 bp, Artificial
  Synthetic oligonucleotide
ccgggttcaggaggctcaatttggctagcttcgctcgcaccacgtttgctgcca

SEQ ID NO: 362907 - DNA, 53 bp, Artificial
  Synthetic oligonucleotide
ccgggttcccacgctacgtcaccgatcagcgactttcaaattccgtcgaccgt

SEQ ID NO: 362908 - DNA, 55 bp, Artificial
  Synthetic oligonucleotide
ccgggttcccacgttacgtcacttttgcccttacatgtgactgtgccatagggcg

SEQ ID NO: 362909 - DNA, 60 bp, Artificial
  Synthetic oligonucleotide
ccgggttctcactggatcttacaatgtggatgcatcagtagatcgcaggtcgttgttgaa

SEQ ID NO: 362910 - DNA, 55 bp, Artificial
  Synthetic oligonucleotide
ccgggttctgccgctactacctcaacgcaacccatcgcaaccggaaggaccttgc

SEQ ID NO: 362911 - DNA, 52 bp, Artificial
  Synthetic oligonucleotide
ccgggttggtcaaggtcgcctcgagtttcttccggtccacacccgaagatct

SEQ ID NO: 362912 - DNA, 56 bp, Artificial
  Synthetic oligonucleotide
ccgggttgtagatagtttcccccgcgtagccagatcccatggatggcggccattaa

SEQ ID NO: 362913 - DNA, 53 bp, Artificial
  Synthetic oligonucleotide
ccgggttgtcaatatgctaaaacgcggtgtatcccgcgtgaatcccttaacgg

SEQ ID NO: 362914 - DNA, 50 bp, Artificial
  Synthetic oligonucleotide
ccgggtttatacgggccactgtggaaagactcacccgggaacgggaagag

SEQ ID NO: 362915 - DNA, 55 bp, Artificial
  Synthetic oligonucleotide
ccgggtttcccaaatggccagataccacagcagctcatggcctgtatcagcaggt

SEQ ID NO: 362916 - DNA, 57 bp, Artificial
  Synthetic oligonucleotide
ccgggtttggtgcaatggactttaagctattacaggaatcaaaggctgaggtgccat

SEQ ID NO: 362917 - DNA, 60 bp, Artificial
  Synthetic oligonucleotide
ccggtaaaacatgatgatcatttattgcaagactctgaattagctggactgctgtcaatg

SEQ ID NO: 362918 - DNA, 54 bp, Artificial
  Synthetic oligonucleotide
ccggtaaagctccacgacaccctggtcttaggcgccagtgggcaaactaatacc

SEQ ID NO: 362919 - DNA, 52 bp, Artificial
  Synthetic oligonucleotide
ccggtaacaaacgtgggctctaacccgactattctggtacaccgtctatccc

SEQ ID NO: 362920 - DNA, 59 bp, Artificial
  Synthetic oligonucleotide
ccggtaagacggaggctgaacttcgagacagctatcgtgccctacacttggaatgctgt

SEQ ID NO: 362921 - DNA, 54 bp, Artificial
  Synthetic oligonucleotide
ccggtaaggtcttaagcgacctcaagctccctggcttagcggtccaccgtaaga

SEQ ID NO: 362922 - DNA, 55 bp, Artificial
  Synthetic oligonucleotide
ccggtaatacactacgtgtatactgatagtatcaacgacaattgggctttaaacc

SEQ ID NO: 362923 - DNA, 55 bp, Artificial
  Synthetic oligonucleotide
ccggtaatactaaaagatggtccagagcgtgtcatcttagcaggaccgatgccag

SEQ ID NO: 362924 - DNA, 55 bp, Artificial
  Synthetic oligonucleotide
ccggtaatgccatgatcacaacaggttccaccgcccctgtggtctgtgcttaccc

SEQ ID NO: 362925 - DNA, 53 bp, Artificial
  Synthetic oligonucleotide
ccggtaatggccaaggtgtggtaccctgcctcgattacaaccccgtcccaatg

SEQ ID NO: 362926 - DNA, 57 bp, Artificial
  Synthetic oligonucleotide
ccggtacaacggtcatctggacggcgcaccggacacgtacggccgctgagacgttca

SEQ ID NO: 362927 - DNA, 55 bp, Artificial
  Synthetic oligonucleotide
ccggtaccacagtttccgaagtgaaggccaattggaatatggtctgggacttcga

SEQ ID NO: 362928 - DNA, 55 bp, Artificial
  Synthetic oligonucleotide
ccggtaccagtcgcaatgccatcactactcttggaaagttcggtcagcaatctgg

SEQ ID NO: 362929 - DNA, 55 bp, Artificial
  Synthetic oligonucleotide
ccggtaccgtccgcttgtgccgaacgctgtcggcgggtacgccatatctatctct

SEQ ID NO: 362930 - DNA, 55 bp, Artificial
  Synthetic oligonucleotide
ccggtacgagaacagcgagtggacgggcaccgttgaactacgcggcatttgggac

SEQ ID NO: 362931 - DNA, 51 bp, Artificial
  Synthetic oligonucleotide
ccggtacgcaagtactactcagacaccccctactacccctgggcccccaaa

SEQ ID NO: 362932 - DNA, 53 bp, Artificial
  Synthetic oligonucleotide
ccggtactaataagcaagtggattataatgcacaacgattaatgcgtacaggt

SEQ ID NO: 362933 - DNA, 55 bp, Artificial
  Synthetic oligonucleotide
ccggtactgccccctgtattgaatgcgacgccccctgcggtagatggtacaagcg

SEQ ID NO: 362934 - DNA, 55 bp, Artificial
  Synthetic oligonucleotide
ccggtactgtttctcagaattacccaacgttacgcttgcaaaattatgcgcactc

SEQ ID NO: 362935 - DNA, 54 bp, Artificial
  Synthetic oligonucleotide
ccggtagaccgagagaccgaccaatccgttggggtccttgtgggtctgtgcgaa

SEQ ID NO: 362936 - DNA, 55 bp, Artificial
  Synthetic oligonucleotide
ccggtagagcactctcctgtggagccagactcctcctcgggaaccggaaaggcgg

SEQ ID NO: 362937 - DNA, 55 bp, Artificial
  Synthetic oligonucleotide
ccggtagatatggcctggtgagagtctagacgaccgcgggcctccagtagaaggg

SEQ ID NO: 362938 - DNA, 56 bp, Artificial
  Synthetic oligonucleotide
ccggtagatcctaacctagagccctggaatcatccggggagtcagcctaaaactgc

SEQ ID NO: 362939 - DNA, 56 bp, Artificial
  Synthetic oligonucleotide
ccggtagcagttatggtacagggtcagtgtggacgaggaacaacgaagtcgtcgtc

SEQ ID NO: 362940 - DNA, 57 bp, Artificial
  Synthetic oligonucleotide
ccggtagcattaagctcacatttctattctgcgggacggcattagcaaccggtaaac

SEQ ID NO: 362941 - DNA, 58 bp, Artificial
  Synthetic oligonucleotide
ccggtagcttctcccgtattatctgcaaggctgcctctttagaaggtgcgttcaaggc

SEQ ID NO: 362942 - DNA, 60 bp, Artificial
  Synthetic oligonucleotide
ccggtaggctcttgggaaacccagaatgcgaattgctgctcacggtgagctcatggtcct

SEQ ID NO: 362943 - DNA, 59 bp, Artificial
  Synthetic oligonucleotide
ccggtaggtctctttggtgcaggatagggtatgaccgatgtggggaggacgatcatgac

SEQ ID NO: 362944 - DNA, 55 bp, Artificial
  Synthetic oligonucleotide
ccggtagtaatgtgtcggtcaccagtggactgtcgtgggccgaggttggtagtcc

SEQ ID NO: 362945 - DNA, 55 bp, Artificial
  Synthetic oligonucleotide
ccggtagtacaatttccatggaattggatctttaagggagaagaatgacgaggaa

SEQ ID NO: 362946 - DNA, 55 bp, Artificial
  Synthetic oligonucleotide
ccggtagtacacgggtgcccattgccgcctgctaaggcccctccgataccacctc

SEQ ID NO: 362947 - DNA, 55 bp, Artificial
  Synthetic oligonucleotide
ccggtagtgtgtaatctgcccattaatagacccatttatgaagacaaacttgctg

SEQ ID NO: 362948 - DNA, 52 bp, Artificial
  Synthetic oligonucleotide
ccggtataacggtattgggctccgtaaccatcccatatggatttcggaggtt

SEQ ID NO: 362949 - DNA, 58 bp, Artificial
  Synthetic oligonucleotide
ccggtatattaagctataacgaaaagtcacgtgtgaaagagacatgcacgtgacggag

SEQ ID NO: 362950 - DNA, 55 bp, Artificial
  Synthetic oligonucleotide
ccggtatcaggtgttacgtaaattccatgcgactgttgtcggtggacccacaggg

SEQ ID NO: 362951 - DNA, 56 bp, Artificial
  Synthetic oligonucleotide
ccggtatctatttttaatcgttctaatgtagtcagcattaacgctgcttaatttaa

SEQ ID NO: 362952 - DNA, 60 bp, Artificial
  Synthetic oligonucleotide
ccggtatgctatgtcgtgcacttcctgggccgggtctacgtcctaatataagaagctgca

SEQ ID NO: 362953 - DNA, 55 bp, Artificial
  Synthetic oligonucleotide
ccggtatgctgtggctctccactctatttatgacattccgtgcgagcagatcggg

SEQ ID NO: 362954 - DNA, 55 bp, Artificial
  Synthetic oligonucleotide
ccggtatgcttgcacgccagttttactcccctcccctcattgtaacttagaagca

SEQ ID NO: 362955 - DNA, 55 bp, Artificial
  Synthetic oligonucleotide
ccggtatgggaaatggtagtgaagtatcgggcacaacaccggaatggataagtag

SEQ ID NO: 362956 - DNA, 51 bp, Artificial
  Synthetic oligonucleotide
ccggtatgggtaggggcccttccaccgaataccagaaccttgtacctgagc

SEQ ID NO: 362957 - DNA, 60 bp, Artificial
  Synthetic oligonucleotide
ccggtatgttgccgatcgttaaagccattgaatctgctacgtctgcgctggttcagcacg

SEQ ID NO: 362958 - DNA, 55 bp, Artificial
  Synthetic oligonucleotide
ccggtattctctgccgaccagattgtccagactaatgttatatagatcagcaatc

SEQ ID NO: 362959 - DNA, 59 bp, Artificial
  Synthetic oligonucleotide
ccggtcaaagttgatatgcttcaccaaggcaaaaacaacagcgatcgttatccgcaaga

SEQ ID NO: 362960 - DNA, 55 bp, Artificial
  Synthetic oligonucleotide
ccggtcaagggctgttggattactcaagagtcacttatgcctttcacctggacta

SEQ ID NO: 362961 - DNA, 55 bp, Artificial
  Synthetic oligonucleotide
ccggtcacaaccagctcatgataacttgatgggtacaatgtggctgaatgcggga

SEQ ID NO: 362962 - DNA, 57 bp, Artificial
  Synthetic oligonucleotide
ccggtcacatgcgtccatggcttggtacgcttccctctggccaccgggggacgacca

SEQ ID NO: 362963 - DNA, 55 bp, Artificial
  Synthetic oligonucleotide
ccggtcacttaaggccggtctatggcggccaaatagtgagagagctaggggactg

SEQ ID NO: 362964 - DNA, 55 bp, Artificial
  Synthetic oligonucleotide
ccggtcagactactaagtgttcgagcttttggaaacttgtcgcattgctgtgcct

SEQ ID NO: 362965 - DNA, 60 bp, Artificial
  Synthetic oligonucleotide
ccggtcagtggcttgtgctatccaggagacctcaacgattatgaagaactgaagcactta

SEQ ID NO: 362966 - DNA, 51 bp, Artificial
  Synthetic oligonucleotide
ccggtcatgcgcagatgcgcagaaaagtggaactattcacctatatgcgct

SEQ ID NO: 362967 - DNA, 60 bp, Artificial
  Synthetic oligonucleotide
ccggtcatttgcttgacatactcaaagattgtcctaaaacaatgcactcatatgttcctg

SEQ ID NO: 362968 - DNA, 55 bp, Artificial
  Synthetic oligonucleotide
ccggtccacacccgaagaccttgagagagcagagaaacagctcagagcacgtgac

SEQ ID NO: 362969 - DNA, 55 bp, Artificial
  Synthetic oligonucleotide
ccggtccatgcaagaacgtgccagaacagtacctgcagaggtactttacatgacc

SEQ ID NO: 362970 - DNA, 58 bp, Artificial
  Synthetic oligonucleotide
ccggtccattgaccgaatgcgatatagaaggttaccgtacattctacagggtatgcac

SEQ ID NO: 362971 - DNA, 53 bp, Artificial
  Synthetic oligonucleotide
ccggtccgatggaaagacaacaaccgctgaaggttaaagccagagcccccgtc

SEQ ID NO: 362972 - DNA, 52 bp, Artificial
  Synthetic oligonucleotide
ccggtccttggcacgccactctggcgtatcccctcagattggccgcgttggc

SEQ ID NO: 362973 - DNA, 55 bp, Artificial
  Synthetic oligonucleotide
ccggtcctttcacgcctagtgtatgctcgtttacagaggttagctacattaagcg

SEQ ID NO: 362974 - DNA, 54 bp, Artificial
  Synthetic oligonucleotide
ccggtcgcccaggtaggtaccgaacgatgagagaggtacctagaccgtacaggc

SEQ ID NO: 362975 - DNA, 55 bp, Artificial
  Synthetic oligonucleotide
ccggtcggtgaacagtataaagtctccctgtgactccacattgacgcaaagatcc

SEQ ID NO: 362976 - DNA, 51 bp, Artificial
  Synthetic oligonucleotide
ccggtcgtagatttctccgtcctcccggtcgtagatttctccgtcctcccg

SEQ ID NO: 362977 - DNA, 60 bp, Artificial
  Synthetic oligonucleotide
ccggtcgtgcaaggttgaacttcgaatcggcatacacgaaccgagatgctgcttgcatag

SEQ ID NO: 362978 - DNA, 53 bp, Artificial
  Synthetic oligonucleotide
ccggtctccccgagatgtataataaacgcctcgtttcgccggtccccgtgtgc

SEQ ID NO: 362979 - DNA, 55 bp, Artificial
  Synthetic oligonucleotide
ccggtctcgcacgagctaaggagcaggagaaccatcacatgggccttggtctagc

SEQ ID NO: 362980 - DNA, 52 bp, Artificial
  Synthetic oligonucleotide
ccggtctcgttgagttacgcgagaagcgcaactttgaggagatggacagaat

SEQ ID NO: 362981 - DNA, 51 bp, Artificial
  Synthetic oligonucleotide
ccggtctgccggctctatgacagggagcaactgccttggcctagctgctct

SEQ ID NO: 362982 - DNA, 50 bp, Artificial
  Synthetic oligonucleotide
ccggtctgtgaatatgatgggaatgttatttcaggttacaggaaggtgat

SEQ ID NO: 362983 - DNA, 55 bp, Artificial
  Synthetic oligonucleotide
ccggtctttccaacggtcttttctcctcggatgctctcggtcgcggtgcggcttc

SEQ ID NO: 362984 - DNA, 60 bp, Artificial
  Synthetic oligonucleotide
ccggtgaaattgagacatggaatatctctctctcccaattctctaatcagcttcttataa

SEQ ID NO: 362985 - DNA, 55 bp, Artificial
  Synthetic oligonucleotide
ccggtgaacacaacagatgattccacaagctactacatgaccctgacactcagct

SEQ ID NO: 362986 - DNA, 55 bp, Artificial
  Synthetic oligonucleotide
ccggtgacagaaaagcctatacaatccatggtgacactagaaattggtatggcgg

SEQ ID NO: 362987 - DNA, 60 bp, Artificial
  Synthetic oligonucleotide
ccggtgacccataccaaagaattgctccacacagagcacaatgggatgctgtgtgcaaca

SEQ ID NO: 362988 - DNA, 60 bp, Artificial
  Synthetic oligonucleotide
ccggtgagactatgatcactgtgccgtcaggtggcatctgtagtctgcttggcacctatg

SEQ ID NO: 362989 - DNA, 55 bp, Artificial
  Synthetic oligonucleotide
ccggtgagcatatgatgcctgactatgttaggggtatttctaagaccactgtacg

SEQ ID NO: 362990 - DNA, 55 bp, Artificial
  Synthetic oligonucleotide
ccggtgagcccgaatagggtgaatccgtgtggctccctctattcggggtagtcaa

SEQ ID NO: 362991 - DNA, 55 bp, Artificial
  Synthetic oligonucleotide
ccggtgataatattcacaaattcgccaacggaggtagttacagagacgggtcaaa

SEQ ID NO: 362992 - DNA, 60 bp, Artificial
  Synthetic oligonucleotide
ccggtgatattagcgtggctgagcggttccagtgtgcggcctctcactcactaggggccg

SEQ ID NO: 362993 - DNA, 59 bp, Artificial
  Synthetic oligonucleotide
ccggtgatggagataggctgtacccacggctgaaactctatgatccgttatccggtatg

SEQ ID NO: 362994 - DNA, 55 bp, Artificial
  Synthetic oligonucleotide
ccggtgcaaacctcggcaagcagggtgtggaagtaggacattttcatgtcaggcc

SEQ ID NO: 362995 - DNA, 60 bp, Artificial
  Synthetic oligonucleotide
ccggtgcaaactggcgaccctactacgatcacagcgcgcatagtcgcaacctcggtacag

SEQ ID NO: 362996 - DNA, 59 bp, Artificial
  Synthetic oligonucleotide
ccggtgcacctatccctggtaaatgggatgactacacgtggcagacatcctccaatccg

SEQ ID NO: 362997 - DNA, 57 bp, Artificial
  Synthetic oligonucleotide
ccggtgcactcccaattattgtgggcgatctcagaataagaatgcaccaatccctgc

SEQ ID NO: 362998 - DNA, 55 bp, Artificial
  Synthetic oligonucleotide
ccggtgccacagaggggacacacaaattcaaacaaggaggtcgttcgaactgaaa

SEQ ID NO: 362999 - DNA, 55 bp, Artificial
  Synthetic oligonucleotide
ccggtgcctaaagctccggatcgtgtgcctgcctgtgggtgttacagtgagggag

SEQ ID NO: 363000 - DNA, 60 bp, Artificial
  Synthetic oligonucleotide
ccggtgcgactctatgtaattgaaggcacttggaggatttgctaactgagaattcatatg

SEQ ID NO: 363001 - DNA, 55 bp, Artificial
  Synthetic oligonucleotide
ccggtgctagaaacaacacaacacaaggattacctgtaatgttaactccaggctc

SEQ ID NO: 363002 - DNA, 55 bp, Artificial
  Synthetic oligonucleotide
ccggtgctagacagagtaacaaaactcaaggcataccaatcagaatgcccagcgg

SEQ ID NO: 363003 - DNA, 60 bp, Artificial
  Synthetic oligonucleotide
ccggtgctcttgggatactaggctgcggttatatccttgctaagtgtgaggatcttgctg

SEQ ID NO: 363004 - DNA, 60 bp, Artificial
  Synthetic oligonucleotide
ccggtgcttaaatccatagtctgcacagtcgatatggagaaatatggaacagccgcagtt

SEQ ID NO: 363005 - DNA, 55 bp, Artificial
  Synthetic oligonucleotide
ccggtgcttcgggacaggctatcccttctgatgtggttgagactaggcatgtggt

SEQ ID NO: 363006 - DNA, 60 bp, Artificial
  Synthetic oligonucleotide
ccggtggaatgacacccctgagcatgcacattggcgacgaacgactggaaaatcaagcgt

SEQ ID NO: 363007 - DNA, 58 bp, Artificial
  Synthetic oligonucleotide
ccggtggagaactggcgttacatggtgattgaggtccctgatttcagcgaaccaatcg

SEQ ID NO: 363008 - DNA, 52 bp, Artificial
  Synthetic oligonucleotide
ccggtggaggtacactttatccaccgccgaaaattcgtaaatgtacacggga

SEQ ID NO: 363009 - DNA, 55 bp, Artificial
  Synthetic oligonucleotide
ccggtggcagtgtagctcatagtgccagagggttaactagcctttttagtatggg

SEQ ID NO: 363010 - DNA, 54 bp, Artificial
  Synthetic oligonucleotide
ccggtggcccccctccaacgagtggagcatgtacaggggggtacgtcatccgta

SEQ ID NO: 363011 - DNA, 55 bp, Artificial
  Synthetic oligonucleotide
ccggtggctactttaccttcttgaggtgggtgaactggaattatgtggtgacacc

SEQ ID NO: 363012 - DNA, 56 bp, Artificial
  Synthetic oligonucleotide
ccggtgggcaaaggatcacgtggttgaggtggagcatgaattctacgtcaaaaagg

SEQ ID NO: 363013 - DNA, 53 bp, Artificial
  Synthetic oligonucleotide
ccggtgggccttataacttgaccgtcggcagttgggtaagagaccacgtccgc

SEQ ID NO: 363014 - DNA, 56 bp, Artificial
  Synthetic oligonucleotide
ccggtgggcgtcagatcacgtgaccgaggtgactcacgagttttacgtcagaaagg

SEQ ID NO: 363015 - DNA, 50 bp, Artificial
  Synthetic oligonucleotide
ccggtggggagtatgcttgactatcgctggccagataaggcttaaacatc

SEQ ID NO: 363016 - DNA, 52 bp, Artificial
  Synthetic oligonucleotide
ccggtgggggacaattgtgtcacgattcaaggattgtgccgcattggcaacc

SEQ ID NO: 363017 - DNA, 53 bp, Artificial
  Synthetic oligonucleotide
ccggtgggggcgtcttgataatttatttggccttccaactttggattcctgtg

SEQ ID NO: 363018 - DNA, 55 bp, Artificial
  Synthetic oligonucleotide
ccggtggtaagactaaatctaagtcgagtgctgatgtcgctccggctgatacttt

SEQ ID NO: 363019 - DNA, 55 bp, Artificial
  Synthetic oligonucleotide
ccggtggtcaaccccgctttcagtgcggaggggctcctagatgcctttgcatcca

SEQ ID NO: 363020 - DNA, 53 bp, Artificial
  Synthetic oligonucleotide
ccggtggtgccacaacaacgaataaccgttcgtacggtcatccgtccttcaag

SEQ ID NO: 363021 - DNA, 60 bp, Artificial
  Synthetic oligonucleotide
ccggtggttgtctcaatcaagagtgcgtaactcagtcagctgtcggtcgattcccagtgt

SEQ ID NO: 363022 - DNA, 50 bp, Artificial
  Synthetic oligonucleotide
ccggtgtattggggttactttaacttttctgcttttgtggtacccttatc

SEQ ID NO: 363023 - DNA, 60 bp, Artificial
  Synthetic oligonucleotide
ccggtgtctctcaacttcttctatgtaattggtgtctggagtcccatatataggtgagac

SEQ ID NO: 363024 - DNA, 60 bp, Artificial
  Synthetic oligonucleotide
ccggtgtgcctgcctttattgagtcactgattgattcagtgcatgcctatgaagagaaaa

SEQ ID NO: 363025 - DNA, 55 bp, Artificial
  Synthetic oligonucleotide
ccggtgtggccctctactctttacatgacctttggccagctgatgttgcggaggc

SEQ ID NO: 363026 - DNA, 55 bp, Artificial
  Synthetic oligonucleotide
ccggtgttatggtgattgacataacccgatgtgctggtttcgtccccggtatacc

SEQ ID NO: 363027 - DNA, 57 bp, Artificial
  Synthetic oligonucleotide
ccggtgttggtatgcccatcagttttcagagacgaactggtgacgcatttacttatt

SEQ ID NO: 363028 - DNA, 55 bp, Artificial
  Synthetic oligonucleotide
ccggtgtttataatccagaatggactcatttgacgccaggaggggaaatacgaac

SEQ ID NO: 363029 - DNA, 53 bp, Artificial
  Synthetic oligonucleotide
ccggtgtttcaccccggtcagcccccggcgaggttaccgccttctgctctgcc

SEQ ID NO: 363030 - DNA, 58 bp, Artificial
  Synthetic oligonucleotide
ccggttaaggtgagtgagctagcgacatctctagaacagttgggaaaactaggtgagc

SEQ ID NO: 363031 - DNA, 60 bp, Artificial
  Synthetic oligonucleotide
ccggttaatcagtccagcggctgacctggtgatggataatacccaggctgcattttgcac

SEQ ID NO: 363032 - DNA, 55 bp, Artificial
  Synthetic oligonucleotide
ccggttacacttctaattaaacgtatgcccgaatcccacaactaatcatactcat

SEQ ID NO: 363033 - DNA, 55 bp, Artificial
  Synthetic oligonucleotide
ccggttacattgcgcccatatcgtacatttagcgaggttgagcaaccggcaagcc

SEQ ID NO: 363034 - DNA, 53 bp, Artificial
  Synthetic oligonucleotide
ccggttagacttttcgtcaaacaggaaccccattctcgacaaaagattgaaca

SEQ ID NO: 363035 - DNA, 55 bp, Artificial
  Synthetic oligonucleotide
ccggttataccatacatgtgcagtgtaacgcctcaaaattccaccaagggtgcct

SEQ ID NO: 363036 - DNA, 54 bp, Artificial
  Synthetic oligonucleotide
ccggttatatccgggtccggggcaagcggatccgtaactgtcgttagcgacgca

SEQ ID NO: 363037 - DNA, 54 bp, Artificial
  Synthetic oligonucleotide
ccggttatctctccactcaccaacttgacggtatttatcccgaaaactgggcac

SEQ ID NO: 363038 - DNA, 53 bp, Artificial
  Synthetic oligonucleotide
ccggttatctgaatcttccctgacggatgtccgcggtagcaagcgatatgcta

SEQ ID NO: 363039 - DNA, 55 bp, Artificial
  Synthetic oligonucleotide
ccggttatgtgcaatgcgtttccacttccaatgcgtttccacttccaaaacgcgt

SEQ ID NO: 363040 - DNA, 55 bp, Artificial
  Synthetic oligonucleotide
ccggttattccacacaaattagggatgacaaggattcagagtaccacccaggtcc

SEQ ID NO: 363041 - DNA, 52 bp, Artificial
  Synthetic oligonucleotide
ccggttcaaatgacagctaatcaagatgtttggtctctcagcagcactccat

SEQ ID NO: 363042 - DNA, 51 bp, Artificial
  Synthetic oligonucleotide
ccggttcaacaaccgaaacgttccagtataaaacctggctacttagatccc

SEQ ID NO: 363043 - DNA, 55 bp, Artificial
  Synthetic oligonucleotide
ccggttcaagcagttcagatggcaaaacaagtaccttctgctcgaggagtgttac

SEQ ID NO: 363044 - DNA, 60 bp, Artificial
  Synthetic oligonucleotide
ccggttcaaggatgacagctcatatgaagaaatcaatggcattagacgcccgaaacatct

SEQ ID NO: 363045 - DNA, 54 bp, Artificial
  Synthetic oligonucleotide
ccggttcaatcaataccagattaccagtatggcagtgcggttttccccggctag

SEQ ID NO: 363046 - DNA, 60 bp, Artificial
  Synthetic oligonucleotide
ccggttcaggctgcatctattatcagaagtgtgtgcttacaattgactgatgaataaaca

SEQ ID NO: 363047 - DNA, 55 bp, Artificial
  Synthetic oligonucleotide
ccggttccaccacaggacatctcacacactgcgctggctatcaacatgatgagat

SEQ ID NO: 363048 - DNA, 55 bp, Artificial
  Synthetic oligonucleotide
ccggttccagctactataacgtaccataagaagagtataacctcccagttctcac

SEQ ID NO: 363049 - DNA, 55 bp, Artificial
  Synthetic oligonucleotide
ccggttcccaatcaatcagaagcatatatccaattgcaactggcaggttagccgt

SEQ ID NO: 363050 - DNA, 53 bp, Artificial
  Synthetic oligonucleotide
ccggttcgaaggaatagggttgttggttcccataaccatccagtaagcgacca

SEQ ID NO: 363051 - DNA, 55 bp, Artificial
  Synthetic oligonucleotide
ccggttcgtgtaacggtgcaacagctatctttggtaacgtccattgtcaggcggc

SEQ ID NO: 363052 - DNA, 59 bp, Artificial
  Synthetic oligonucleotide
ccggttctacataaaacacgtgttcaaacgtgtgctgtctgtggagaaggatacgctga

SEQ ID NO: 363053 - DNA, 59 bp, Artificial
  Synthetic oligonucleotide
ccggttctatgttcaaatgtgtactgagcttaaactcaacgaccatgaagggcggctga

SEQ ID NO: 363054 - DNA, 54 bp, Artificial
  Synthetic oligonucleotide
ccggttctttagggttcgagatcagagaggggacgtactcttatctcccgaaga

SEQ ID NO: 363055 - DNA, 55 bp, Artificial
  Synthetic oligonucleotide
ccggttgaagtgcgcaaatgccctgaatttacactcgaatctaagagggtgtctc

SEQ ID NO: 363056 - DNA, 57 bp, Artificial
  Synthetic oligonucleotide
ccggttgacttgaagcagaggtgaggagccgagctgatagtcctaaggtaactactt

SEQ ID NO: 363057 - DNA, 60 bp, Artificial
  Synthetic oligonucleotide
ccggttgatataatgctagctcaacagggtcattgctggttccttcaatgtcaatccatg

SEQ ID NO: 363058 - DNA, 56 bp, Artificial
  Synthetic oligonucleotide
ccggttgcacccggtgactaaaactttgcacctggatattttggcaggacatataa

SEQ ID NO: 363059 - DNA, 57 bp, Artificial
  Synthetic oligonucleotide
ccggttgccaaaagatcgtacaacaatacgagcggagagcaaatgctaataatttgg

SEQ ID NO: 363060 - DNA, 55 bp, Artificial
  Synthetic oligonucleotide
ccggttggagacgcgccacgtcataatcagaaacgtctatgcgaccgcttgtttt

SEQ ID NO: 363061 - DNA, 60 bp, Artificial
  Synthetic oligonucleotide
ccggttggtatgtcgtcatatcctctgcgcttccacaggcgatacagtcgccatgctatg

SEQ ID NO: 363062 - DNA, 51 bp, Artificial
  Synthetic oligonucleotide
ccggttgtcctcgatttgaaaccagggatgcttggccgtggacttccagga

SEQ ID NO: 363063 - DNA, 54 bp, Artificial
  Synthetic oligonucleotide
ccggtttcccctgccttaagggggtcacaaggataatgtctggtggagcaccta

SEQ ID NO: 363064 - DNA, 55 bp, Artificial
  Synthetic oligonucleotide
ccggtttcccgtatttgcaattgctttgccagtccctttgggccccgatgagctc

SEQ ID NO: 363065 - DNA, 57 bp, Artificial
  Synthetic oligonucleotide
ccggtttgaaaaggatatcattgtcaccgccaacagaaaatccgctgaagatgtgcg

SEQ ID NO: 363066 - DNA, 55 bp, Artificial
  Synthetic oligonucleotide
ccggtttgagaaagctggacttagggcagatcaaccttctgccagtggccattcc

SEQ ID NO: 363067 - DNA, 56 bp, Artificial
  Synthetic oligonucleotide
ccggtttgagataattgaaggaagagaccgaacaatggcctggacagtggtaaaca

SEQ ID NO: 363068 - DNA, 55 bp, Artificial
  Synthetic oligonucleotide
ccggtttggacacattcgcgaaccaaaggtgagagcatgatggtagagctcaagc

SEQ ID NO: 363069 - DNA, 55 bp, Artificial
  Synthetic oligonucleotide
ccggtttgggagtgtacgatcagatttgtgtcctgcccacacatgctcaacctac

SEQ ID NO: 363070 - DNA, 60 bp, Artificial
  Synthetic oligonucleotide
ccggtttgtggcaaagtttcatgaggcaaatggatttgagactggttctgctattggatg

SEQ ID NO: 363071 - DNA, 55 bp, Artificial
  Synthetic oligonucleotide
ccggttttcacgctggtggcttatgccactgcggaggtcactccggctaatacac

SEQ ID NO: 363072 - DNA, 52 bp, Artificial
  Synthetic oligonucleotide
ccggttttgggaactggttgacaaagaaagggctctgcaccaagaagggaaa

SEQ ID NO: 363073 - DNA, 51 bp, Artificial
  Synthetic oligonucleotide
ccggtttttgtctgcagaccaacgcattaacgcaatacgagcggcgtctaa

SEQ ID NO: 363074 - DNA, 60 bp, Artificial
  Synthetic oligonucleotide
ccgtaaaagtgctagtggtatggatgctgtgaccttcttgactataaagatggacgctat

SEQ ID NO: 363075 - DNA, 55 bp, Artificial
  Synthetic oligonucleotide
ccgtaaaccattggtcaatctctttccccctgcgctctcctagaaactctggagt

SEQ ID NO: 363076 - DNA, 55 bp, Artificial
  Synthetic oligonucleotide
ccgtaaactctcgactccactatccgaaacatatcctcgaacagaccacccaaaa

SEQ ID NO: 363077 - DNA, 55 bp, Artificial
  Synthetic oligonucleotide
ccgtaaccttaaaagctaatgaccaagtattagctagatacgaaatgtcaggttc

SEQ ID NO: 363078 - DNA, 55 bp, Artificial
  Synthetic oligonucleotide
ccgtaacgacataacctgacctgtcagaccagccgggaccattccatgtctgaac

SEQ ID NO: 363079 - DNA, 55 bp, Artificial
  Synthetic oligonucleotide
ccgtaacgccgagacgtgcctcagataatgggcacgcagtttcaggagccgtccg

SEQ ID NO: 363080 - DNA, 55 bp, Artificial
  Synthetic oligonucleotide
ccgtaacgggcctccccgccctcatagatgaggccaccctccccgcttggagtca

SEQ ID NO: 363081 - DNA, 55 bp, Artificial
  Synthetic oligonucleotide
ccgtaactaagtctttgcctgttgtcggaccaatggtctcggcagctgaaactgc

SEQ ID NO: 363082 - DNA, 54 bp, Artificial
  Synthetic oligonucleotide
ccgtaactgttacgtagagaaatcgaaagttggttatcgtgtttacagcggata

SEQ ID NO: 363083 - DNA, 51 bp, Artificial
  Synthetic oligonucleotide
ccgtaacttagaagtttgaaacaaaagaccaataggaggtaactatccaag

SEQ ID NO: 363084 - DNA, 55 bp, Artificial
  Synthetic oligonucleotide
ccgtaacttggagcgtgtttagtaatacatcgtacagaacatgatcaacagatcg

SEQ ID NO: 363085 - DNA, 52 bp, Artificial
  Synthetic oligonucleotide
ccgtaagaccaccgtgggcggtatatgaaaactatgggtacggacttccgtg

SEQ ID NO: 363086 - DNA, 54 bp, Artificial
  Synthetic oligonucleotide
ccgtaagacggccgcacacgcccgcagggttacagccacctacggaatcgaccc

SEQ ID NO: 363087 - DNA, 50 bp, Artificial
  Synthetic oligonucleotide
ccgtaagcaacactcaattgttgttagcacaagtacccacttgtgatttg

SEQ ID NO: 363088 - DNA, 60 bp, Artificial
  Synthetic oligonucleotide
ccgtaagcatcttagcaaagaataatgcgattgtagcgaacacaaaagaggttcagcaca

SEQ ID NO: 363089 - DNA, 56 bp, Artificial
  Synthetic oligonucleotide
ccgtaaggataccgaccactggctgggctcgtcacccctcctttgtgtctcacaaa

SEQ ID NO: 363090 - DNA, 54 bp, Artificial
  Synthetic oligonucleotide
ccgtaaggttttataagtctatctctctctgcaaatggtaaacgacgtaattcc

SEQ ID NO: 363091 - DNA, 56 bp, Artificial
  Synthetic oligonucleotide
ccgtaagtctatcggcacgaaccagagcccgttggactggccccgctgagcgaaac

SEQ ID NO: 363092 - DNA, 55 bp, Artificial
  Synthetic oligonucleotide
ccgtaataactaaactcagccatgttggattgtacaatctgttattcaccaacac

SEQ ID NO: 363093 - DNA, 59 bp, Artificial
  Synthetic oligonucleotide
ccgtaatcagatacgaacagttgaacgccaagttgctcactctgcaaataaacgctggg

SEQ ID NO: 363094 - DNA, 55 bp, Artificial
  Synthetic oligonucleotide
ccgtaatcccaacccaacaagagacacccgaagtctcagaaggagccaaatacca

SEQ ID NO: 363095 - DNA, 55 bp, Artificial
  Synthetic oligonucleotide
ccgtaatccctctgctaagagggacgcacttcaggtggctaccttttcctggacc

SEQ ID NO: 363096 - DNA, 54 bp, Artificial
  Synthetic oligonucleotide
ccgtaatctacgcatcacgcctttcctctgactgtaccacgcctgtaatatttc

SEQ ID NO: 363097 - DNA, 54 bp, Artificial
  Synthetic oligonucleotide
ccgtaatgatatctccatactagtaggtccacccaactgggaaggtctactatc

SEQ ID NO: 363098 - DNA, 58 bp, Artificial
  Synthetic oligonucleotide
ccgtaatgcaacggaacgatatatgccacgatacggtcttcagcgaaacttgaccgac

SEQ ID NO: 363099 - DNA, 53 bp, Artificial
  Synthetic oligonucleotide
ccgtaatggattttacctgctaaagtatgatgaagaatggtacccagaggagt

SEQ ID NO: 363100 - DNA, 54 bp, Artificial
  Synthetic oligonucleotide
ccgtacaacttcaaaaccctctgggtggacgaagggttgatggtacatactggc

SEQ ID NO: 363101 - DNA, 51 bp, Artificial
  Synthetic oligonucleotide
ccgtacaacttggtggtgaacctgaccctacaaccccggttttcacaatta

SEQ ID NO: 363102 - DNA, 55 bp, Artificial
  Synthetic oligonucleotide
ccgtacaatcagtcattacaggagaatcgtatggagagaccgttaagcaggcggt

SEQ ID NO: 363103 - DNA, 55 bp, Artificial
  Synthetic oligonucleotide
ccgtacacactggagaccaacaccaagttggaaatgagaccacagaacatggaac

SEQ ID NO: 363104 - DNA, 56 bp, Artificial
  Synthetic oligonucleotide
ccgtacacgcaggtggcacctctacccggcaactactcacgttgtactaatgccgt

SEQ ID NO: 363105 - DNA, 55 bp, Artificial
  Synthetic oligonucleotide
ccgtacaggtggattcttttcgtgcctagctatgttgagaccgctccagtatgct

SEQ ID NO: 363106 - DNA, 55 bp, Artificial
  Synthetic oligonucleotide
ccgtacagttattgggacaactgtaccccatccattagaaatgttgggtccacaa

SEQ ID NO: 363107 - DNA, 55 bp, Artificial
  Synthetic oligonucleotide
ccgtacataagtgggaaaatcacgcgcacaaattaacttgtgattgaacgttcgg

SEQ ID NO: 363108 - DNA, 60 bp, Artificial
  Synthetic oligonucleotide
ccgtacatagcacaaatgtgcttaaacgacgaatgtggtccatcatcattgtctagtcat

SEQ ID NO: 363109 - DNA, 55 bp, Artificial
  Synthetic oligonucleotide
ccgtacatccgattctacaagatcctaatcgtactcgtagcccgcgttcgacaag

SEQ ID NO: 363110 - DNA, 58 bp, Artificial
  Synthetic oligonucleotide
ccgtacatggcattcctggaagactctgacttgatgagtttcgccccaggcaattacc

SEQ ID NO: 363111 - DNA, 50 bp, Artificial
  Synthetic oligonucleotide
ccgtaccaccgacccccgagcaaacacaggcccaacagttgccctattca

SEQ ID NO: 363112 - DNA, 56 bp, Artificial
  Synthetic oligonucleotide
ccgtaccagccggctacaattccattcagcgtgcttttaccgaacaaagcgtctcc

SEQ ID NO: 363113 - DNA, 55 bp, Artificial
  Synthetic oligonucleotide
ccgtaccagcgcgaaactagaagatggaccacgagttcaggaagattcgtgaagg

SEQ ID NO: 363114 - DNA, 56 bp, Artificial
  Synthetic oligonucleotide
ccgtaccataaagataatgaggcagtatacccaaagaacaatccaattttgacaat

SEQ ID NO: 363115 - DNA, 52 bp, Artificial
  Synthetic oligonucleotide
ccgtaccccttcacacttcggtgggagggcggagttcacaaggacggtattc

SEQ ID NO: 363116 - DNA, 59 bp, Artificial
  Synthetic oligonucleotide
ccgtacccttcatgtcaacctgtgctgcgtacgcttggttctatgatggttatccttct

SEQ ID NO: 363117 - DNA, 55 bp, Artificial
  Synthetic oligonucleotide
ccgtaccgacgattcggagacggcggtaatcctcaacagcagggaccaccaccaa

SEQ ID NO: 363118 - DNA, 51 bp, Artificial
  Synthetic oligonucleotide
ccgtaccgatcggaaccccacacggagcactcccgtccgccccctcctaaa

SEQ ID NO: 363119 - DNA, 58 bp, Artificial
  Synthetic oligonucleotide
ccgtaccggatgtctctaaagtggtggcgaagcagcagacgatctctaaatcgcccgg

SEQ ID NO: 363120 - DNA, 51 bp, Artificial
  Synthetic oligonucleotide
ccgtaccggcaaacgtttctgtattaagtccgtgtatgtactaggtaaggt

SEQ ID NO: 363121 - DNA, 58 bp, Artificial
  Synthetic oligonucleotide
ccgtacctatcgcacaacctgcgcagtatgcaaacacccaagcgagcaaccgggttaa

SEQ ID NO: 363122 - DNA, 53 bp, Artificial
  Synthetic oligonucleotide
ccgtacctcctacctctcctgggacccctactcaccctcctactcatactaac

SEQ ID NO: 363123 - DNA, 51 bp, Artificial
  Synthetic oligonucleotide
ccgtacctgcttaaacagattccgagattaatagaaaggaagagatcgtat

SEQ ID NO: 363124 - DNA, 50 bp, Artificial
  Synthetic oligonucleotide
ccgtacctgtctcccctttaggcggctaaacggactagtgttcccgggag

SEQ ID NO: 363125 - DNA, 55 bp, Artificial
  Synthetic oligonucleotide
ccgtacctgtctccctatgagaaggctaaacggactgattttcacgggtggagga

SEQ ID NO: 363126 - DNA, 58 bp, Artificial
  Synthetic oligonucleotide
ccgtacgagtgggagggtgaagatcctacccaatgcgatgcaaatgttccgtccgtca

SEQ ID NO: 363127 - DNA, 54 bp, Artificial
  Synthetic oligonucleotide
ccgtacgatagtctacttttatacgcttttgtagtttagggccatttgatgtta

SEQ ID NO: 363128 - DNA, 55 bp, Artificial
  Synthetic oligonucleotide
ccgtacgattaaaagcggaacggtatcagcaagccgtaacattacatcggatgag

SEQ ID NO: 363129 - DNA, 52 bp, Artificial
  Synthetic oligonucleotide
ccgtacgcctaacgccgtgacccctaccgtcgagaaccgcgtcctagacaag

SEQ ID NO: 363130 - DNA, 55 bp, Artificial
  Synthetic oligonucleotide
ccgtacgccttcagggccccagtcatccaaggaatcaccgtctgcaagacagctt

SEQ ID NO: 363131 - DNA, 55 bp, Artificial
  Synthetic oligonucleotide
ccgtacggctatgaaaacggccgttacgtccattggctacatatgggatcgggag

SEQ ID NO: 363132 - DNA, 52 bp, Artificial
  Synthetic oligonucleotide
ccgtacgggttgcagcattcgaggacgtcgttggaggtcgcggcgtgagttt

SEQ ID NO: 363133 - DNA, 50 bp, Artificial
  Synthetic oligonucleotide
ccgtacgtgcccctggcggtgtccgtagcgtattgtgcggccgtcgttta

SEQ ID NO: 363134 - DNA, 55 bp, Artificial
  Synthetic oligonucleotide
ccgtacgtgtacttcactatcccttcatacttgatgatcgctggtgacttggtgg

SEQ ID NO: 363135 - DNA, 55 bp, Artificial
  Synthetic oligonucleotide
ccgtactaacaaccgctttaacaacaacagcagatgcccaacttgtttcgacgag

SEQ ID NO: 363136 - DNA, 55 bp, Artificial
  Synthetic oligonucleotide
ccgtactcacccgcctcttgcggacatgtcactgaagaacgagaggtgttggctt

SEQ ID NO: 363137 - DNA, 56 bp, Artificial
  Synthetic oligonucleotide
ccgtactcctgcttctgttggacctacgtttaggcttcaaagcgttaactggctgc

SEQ ID NO: 363138 - DNA, 53 bp, Artificial
  Synthetic oligonucleotide
ccgtactctgtccgtctgtccgactgacgtcgttatactactgtaggccggac

SEQ ID NO: 363139 - DNA, 55 bp, Artificial
  Synthetic oligonucleotide
ccgtactgaatgtcacaatccagtgatgattcgaagcctataacgggcggacgtg

SEQ ID NO: 363140 - DNA, 54 bp, Artificial
  Synthetic oligonucleotide
ccgtactgatggcatcgttcgttccccttgtaggggaccccaagcttgagggta

SEQ ID NO: 363141 - DNA, 54 bp, Artificial
  Synthetic oligonucleotide
ccgtacttagggttcacagtgaaatccaactgtgaacccactaattgtttccag

SEQ ID NO: 363142 - DNA, 51 bp, Artificial
  Synthetic oligonucleotide
ccgtacttccacttacgcccctaaccaggttactatcgtaatcaaccacgc

SEQ ID NO: 363143 - DNA, 54 bp, Artificial
  Synthetic oligonucleotide
ccgtacttcgtgttgctttgccagtccctttgggcccccatgaattccttgaaa

SEQ ID NO: 363144 - DNA, 53 bp, Artificial
  Synthetic oligonucleotide
ccgtacttcgttgttcggggaagaaagaatgggaagctcgttaacgctcttga

SEQ ID NO: 363145 - DNA, 54 bp, Artificial
  Synthetic oligonucleotide
ccgtacttctcttggttctacgcgtggagttcacaccggaactattggccaaac

SEQ ID NO: 363146 - DNA, 54 bp, Artificial
  Synthetic oligonucleotide
ccgtacttggggtttaccgtcaggtcatactggctgccgacgagtcccttccaa

SEQ ID NO: 363147 - DNA, 54 bp, Artificial
  Synthetic oligonucleotide
ccgtacttggtgttggactgccagtccctctgggcccccatgaattccttaaag

SEQ ID NO: 363148 - DNA, 57 bp, Artificial
  Synthetic oligonucleotide
ccgtacttggttgtcaactcctgaaaagtatagaggcagggatgccccgaccattga

SEQ ID NO: 363149 - DNA, 59 bp, Artificial
  Synthetic oligonucleotide
ccgtactttgtcgttttgcgccctatatgcgctatattgaagctaaactccacgaggca

SEQ ID NO: 363150 - DNA, 60 bp, Artificial
  Synthetic oligonucleotide
ccgtactttgtgcgcgctcaaggcctcatccgtgcatgcatgttggtgcggaaagtcgct

SEQ ID NO: 363151 - DNA, 55 bp, Artificial
  Synthetic oligonucleotide
ccgtagaactggtaaacccaaacgtggatggaccctttcaagtcatgagcggaca

SEQ ID NO: 363152 - DNA, 60 bp, Artificial
  Synthetic oligonucleotide
ccgtagaccgtatggcacgcccatggatttcggtcatgtgttcaacatgttcgacaacga

SEQ ID NO: 363153 - DNA, 57 bp, Artificial
  Synthetic oligonucleotide
ccgtagagcacgctgatgtttttgtagatgactacaacaccggcgttaactcgtatg

SEQ ID NO: 363154 - DNA, 58 bp, Artificial
  Synthetic oligonucleotide
ccgtagagcacttagaacagcaaactcgagcaccggaggagtttgtgagggatgttaa

SEQ ID NO: 363155 - DNA, 55 bp, Artificial
  Synthetic oligonucleotide
ccgtagagtactggaagctaatgcgtaaggagcatagcctgctcttccttgcaag

SEQ ID NO: 363156 - DNA, 60 bp, Artificial
  Synthetic oligonucleotide
ccgtagcaaacagtgtgagcacgctcacatagacacgatgctcccctccccccggacctg

SEQ ID NO: 363157 - DNA, 55 bp, Artificial
  Synthetic oligonucleotide
ccgtagccacccatactccctcctcaatcgcgaaaccaacctataacacctctgc

SEQ ID NO: 363158 - DNA, 60 bp, Artificial
  Synthetic oligonucleotide
ccgtagccgaggcactctgtgaacatcgccgctctgatgggtgctgtaaacgcacttggc

SEQ ID NO: 363159 - DNA, 55 bp, Artificial
  Synthetic oligonucleotide
ccgtagcggacgtaagcattgcgcgctacccgtgcaaggacttgcagcagtatag

SEQ ID NO: 363160 - DNA, 55 bp, Artificial
  Synthetic oligonucleotide
ccgtagctaagtttgctagtgtatacgcaaagctaggtaacgcggcaaccccaag

SEQ ID NO: 363161 - DNA, 59 bp, Artificial
  Synthetic oligonucleotide
ccgtagctggagtgtccaactacgagctgatcccaaacccagaactcctcaagaacatg

SEQ ID NO: 363162 - DNA, 55 bp, Artificial
  Synthetic oligonucleotide
ccgtagctgtgagtcccatagctgtgttttatccctgacgagctgtagcaggctt

SEQ ID NO: 363163 - DNA, 55 bp, Artificial
  Synthetic oligonucleotide
ccgtaggaaccagcattgctacgtacgtaaaacaaatcggggagatgctgttctc

SEQ ID NO: 363164 - DNA, 53 bp, Artificial
  Synthetic oligonucleotide
ccgtaggaggagtggtagcaatcttattcatcggaacatgttgtctgagatgt

SEQ ID NO: 363165 - DNA, 55 bp, Artificial
  Synthetic oligonucleotide
ccgtaggagtaggcatcttcctgcttcctgctcggtaggcaggaggccttaagca

SEQ ID NO: 363166 - DNA, 55 bp, Artificial
  Synthetic oligonucleotide
ccgtagggaacaaatgtttgcacgacatttttttaataggcatggcactatgggc

SEQ ID NO: 363167 - DNA, 56 bp, Artificial
  Synthetic oligonucleotide
ccgtagggactccgcgcaaggacctaagcgtctctagatccacgggatctgaaaac

SEQ ID NO: 363168 - DNA, 54 bp, Artificial
  Synthetic oligonucleotide
ccgtaggggtaaggtaaaatggatcctgagtgttattatgtccatgttcgtggg

SEQ ID NO: 363169 - DNA, 52 bp, Artificial
  Synthetic oligonucleotide
ccgtagggtttgcccaacactacggcggcgcgtttgttgttagaactgggac

SEQ ID NO: 363170 - DNA, 58 bp, Artificial
  Synthetic oligonucleotide
ccgtaggtaaatacatgtgagtctagagtcccgtgtgagttgtaacggtagacatctg

SEQ ID NO: 363171 - DNA, 50 bp, Artificial
  Synthetic oligonucleotide
ccgtaggtccctgaaaaacctaagagaagtctgtaatttaccttattgca

SEQ ID NO: 363172 - DNA, 57 bp, Artificial
  Synthetic oligonucleotide
ccgtagtaactttgctagtggacgttatggtatctacaactactttggtattgcagc

SEQ ID NO: 363173 - DNA, 57 bp, Artificial
  Synthetic oligonucleotide
ccgtagtagattacataaatcaaatagttcaggtaatgtccaaacgatcaaggtcac

SEQ ID NO: 363174 - DNA, 57 bp, Artificial
  Synthetic oligonucleotide
ccgtagtagtctagtttatacaacagctagttatgtaacgccattagggatcattaa

SEQ ID NO: 363175 - DNA, 55 bp, Artificial
  Synthetic oligonucleotide
ccgtagtatacgccgacggagatgaactgtattcagtgcacgttaggcacgcaac

SEQ ID NO: 363176 - DNA, 55 bp, Artificial
  Synthetic oligonucleotide
ccgtagtcaccgttcgactggtagtcgccacatccaacagtcccgtctggccacg

SEQ ID NO: 363177 - DNA, 56 bp, Artificial
  Synthetic oligonucleotide
ccgtagtcgacgggattcttgcttcacccgggatactccgcggtgcacacaacctc

SEQ ID NO: 363178 - DNA, 54 bp, Artificial
  Synthetic oligonucleotide
ccgtagtggaccaggctcctttgaaatcgtacgacattaagaatatggtatcga

SEQ ID NO: 363179 - DNA, 54 bp, Artificial
  Synthetic oligonucleotide
ccgtagtggggtccattcttgaacaggatgaccacaagttctaccattactctg

SEQ ID NO: 363180 - DNA, 55 bp, Artificial
  Synthetic oligonucleotide
ccgtagttattaaacgtatccaacaatgcgccattgtgtccaaatccaatattcg

SEQ ID NO: 363181 - DNA, 54 bp, Artificial
  Synthetic oligonucleotide
ccgtagttggtagaggcggaagacttgtaaatttcaatattgggacgaggagta

SEQ ID NO: 363182 - DNA, 55 bp, Artificial
  Synthetic oligonucleotide
ccgtatacacttcatcgtgatgttggacagactttattatattgcagggccggac

SEQ ID NO: 363183 - DNA, 55 bp, Artificial
  Synthetic oligonucleotide
ccgtatacgtcactgacaatgtattagcattgttggtacatgaggatattaactc

SEQ ID NO: 363184 - DNA, 55 bp, Artificial
  Synthetic oligonucleotide
ccgtatactgcccttgcgatctacagtatggtgtcacagcaggcatcacgcctac

SEQ ID NO: 363185 - DNA, 53 bp, Artificial
  Synthetic oligonucleotide
ccgtataggcttaaactaagtgcccgtgaacttgctggaccccgtgaaggctg

SEQ ID NO: 363186 - DNA, 60 bp, Artificial
  Synthetic oligonucleotide
ccgtatatcaatactatgatatgtatcacgagaagccaataatctatatggtaggatcag

SEQ ID NO: 363187 - DNA, 59 bp, Artificial
  Synthetic oligonucleotide
ccgtatatgaaatacaattgggaacaacgtgcttaacatacaaagcgctcaacatgaat

SEQ ID NO: 363188 - DNA, 55 bp, Artificial
  Synthetic oligonucleotide
ccgtatatgcggaatgattttgaccggaacgagatgcccgatctaccaggtgtga

SEQ ID NO: 363189 - DNA, 60 bp, Artificial
  Synthetic oligonucleotide
ccgtatatgcggttcgaactaaagtcaatgagaacccgctatatgcacagacctccgagc

SEQ ID NO: 363190 - DNA, 60 bp, Artificial
  Synthetic oligonucleotide
ccgtatatggagcggctggcgggtaaacatcctagcatttactgtgggcacgatactaca

SEQ ID NO: 363191 - DNA, 55 bp, Artificial
  Synthetic oligonucleotide
ccgtatcaggtgtaaacgcttgcttgcggttcgggtaacgtatgaaccgagcgac

SEQ ID NO: 363192 - DNA, 55 bp, Artificial
  Synthetic oligonucleotide
ccgtatcatgagccgttacattctagggacctaccaggctggagtgggcgtcatg

SEQ ID NO: 363193 - DNA, 53 bp, Artificial
  Synthetic oligonucleotide
ccgtatcattactattgtagaccgtgcatacgtcctgtcaaacgaagagaacc

SEQ ID NO: 363194 - DNA, 55 bp, Artificial
  Synthetic oligonucleotide
ccgtatccagaattaaagcttccactatctagaacaatgtgtttgcaatctatgg

SEQ ID NO: 363195 - DNA, 50 bp, Artificial
  Synthetic oligonucleotide
ccgtatcccaccccccgccgttccggttacccattcaacagaacttacaa

SEQ ID NO: 363196 - DNA, 59 bp, Artificial
  Synthetic oligonucleotide
ccgtatccgatacgctcaagatagccttggtcctgtcgcctacggagaagagactgttc

SEQ ID NO: 363197 - DNA, 52 bp, Artificial
  Synthetic oligonucleotide
ccgtatcctctgtcgatactcgccatccgtccgtagtcctggctttagcaaa

SEQ ID NO: 363198 - DNA, 55 bp, Artificial
  Synthetic oligonucleotide
ccgtatcgcgtcgaactgattaaccgcatcgggcaggaagcagtagacgaaatcg

SEQ ID NO: 363199 - DNA, 55 bp, Artificial
  Synthetic oligonucleotide
ccgtatctggatgtggtatacccttgttctggtgtatagcgggtcctctactctg

SEQ ID NO: 363200 - DNA, 60 bp, Artificial
  Synthetic oligonucleotide
ccgtatctgggtgcggtgccatagcgtactgcatatccaagttctggggctatggggcaa

SEQ ID NO: 363201 - DNA, 55 bp, Artificial
  Synthetic oligonucleotide
ccgtatctgtacgtgatacaccctcgttctggtgtacaacgggtcctctactctg

SEQ ID NO: 363202 - DNA, 55 bp, Artificial
  Synthetic oligonucleotide
ccgtatgacgcccaagtatcccctcgaccaagcacagctcgacgaggcccaagta

SEQ ID NO: 363203 - DNA, 60 bp, Artificial
  Synthetic oligonucleotide
ccgtatgagtactttatagctcagcatgcagttgtggagaaaatgctgatacatgccaaa

SEQ ID NO: 363204 - DNA, 55 bp, Artificial
  Synthetic oligonucleotide
ccgtatgcaagcaaagcaacatatgaaagtatgccggtatgaaggtgaatgggtc

SEQ ID NO: 363205 - DNA, 48 bp, Artificial
  Synthetic oligonucleotide
ccgtatgcgggtcttagtttttgggaggttaatcttaaggaaaagttt

SEQ ID NO: 363206 - DNA, 56 bp, Artificial
  Synthetic oligonucleotide
ccgtatgcgggtgagatgtatttttcgccagaatgttatccgagcgttttccttcg

SEQ ID NO: 363207 - DNA, 55 bp, Artificial
  Synthetic oligonucleotide
ccgtatggaaattctatgttcttctatgctaaaagagaacagatgtatgtcaggc

SEQ ID NO: 363208 - DNA, 57 bp, Artificial
  Synthetic oligonucleotide
ccgtatggaacggttgatcattgggttgattgggttgttgacacaatcatgcttaag

SEQ ID NO: 363209 - DNA, 60 bp, Artificial
  Synthetic oligonucleotide
ccgtatgggatcatgaaggtcttcttcgccagggctggtgattgtgttgagaacaattca

SEQ ID NO: 363210 - DNA, 60 bp, Artificial
  Synthetic oligonucleotide
ccgtatggtatgatgtacctctgcttgtgaagaaatggagttgtggtggagaacaaatct

SEQ ID NO: 363211 - DNA, 57 bp, Artificial
  Synthetic oligonucleotide
ccgtatgttagtggaggcaaatcacaaggtcactaaggttgacgggagaacgatgaa

SEQ ID NO: 363212 - DNA, 50 bp, Artificial
  Synthetic oligonucleotide
ccgtattagagttagtttacaattgagttcatacggtgtagtcagaccat

SEQ ID NO: 363213 - DNA, 55 bp, Artificial
  Synthetic oligonucleotide
ccgtattcaaagtcaggatgtacgtgggagggatcgagcataggttggacgctgc

SEQ ID NO: 363214 - DNA, 60 bp, Artificial
  Synthetic oligonucleotide
ccgtattcaacaccaatcaatccaatggacgtggctagatcgtcagccaacgtagttgga

SEQ ID NO: 363215 - DNA, 55 bp, Artificial
  Synthetic oligonucleotide
ccgtattcgagaaagtgccacttatatatataccgaggatgggaggaaacgcgtc

SEQ ID NO: 363216 - DNA, 55 bp, Artificial
  Synthetic oligonucleotide
ccgtattgaaccagtatgtatgctaattcacggcactccaggcacaggcaagtcc

SEQ ID NO: 363217 - DNA, 54 bp, Artificial
  Synthetic oligonucleotide
ccgtattgaacctgtatgtctaattatcagaggctcacctggtactgggaagtc

SEQ ID NO: 363218 - DNA, 56 bp, Artificial
  Synthetic oligonucleotide
ccgtattgaacctgtatgtcttatcattagaggctcaccaggcactggaaagtccc

SEQ ID NO: 363219 - DNA, 59 bp, Artificial
  Synthetic oligonucleotide
ccgtattgcaattacacaaaattctggtacatcaacgacactaggactggaaggcacac

SEQ ID NO: 363220 - DNA, 55 bp, Artificial
  Synthetic oligonucleotide
ccgtattggagtttgtaatgccagagtcaagcctcaagatggcaacgtgcaccga

SEQ ID NO: 363221 - DNA, 59 bp, Artificial
  Synthetic oligonucleotide
ccgtattgtgctatcgtatcagtttacttccaggtccatgtagaatcattatagttcct

SEQ ID NO: 363222 - DNA, 55 bp, Artificial
  Synthetic oligonucleotide
ccgtatttacctctgtaaccgtgttggctggttctgccgcctcactccttaccgc

SEQ ID NO: 363223 - DNA, 55 bp, Artificial
  Synthetic oligonucleotide
ccgtatttcgtcagggctcacgctctgctgaggatgtgcacgatggtgaggcgcc

SEQ ID NO: 363224 - DNA, 52 bp, Artificial
  Synthetic oligonucleotide
ccgtatttcgtgttgctttgccagtccctttgggcccccataaactctttaa

SEQ ID NO: 363225 - DNA, 55 bp, Artificial
  Synthetic oligonucleotide
ccgtatttctcacggtccaatcgttggagtcgatcgcatagggattccgacggtg

SEQ ID NO: 363226 - DNA, 55 bp, Artificial
  Synthetic oligonucleotide
ccgtatttgatcctgacggatcactacattttactttacctagtaggcctagagc

SEQ ID NO: 363227 - DNA, 55 bp, Artificial
  Synthetic oligonucleotide
ccgtatttggacgtggtagactctggtcctcgtgtatagtatgtcctcgacgttg

SEQ ID NO: 363228 - DNA, 60 bp, Artificial
  Synthetic oligonucleotide
ccgtcaaagatgctttaacactacaagaattggctgacacatgcccagtcactctaaatt

SEQ ID NO: 363229 - DNA, 59 bp, Artificial
  Synthetic oligonucleotide
ccgtcaaagattcgaagctgatactgcgaccactctcgtgactccgggtggtggggcta

SEQ ID NO: 363230 - DNA, 60 bp, Artificial
  Synthetic oligonucleotide
ccgtcaaagcgcctttgcaggcgctttgcatagagatggtcatccaggcgaacgacgtag

SEQ ID NO: 363231 - DNA, 55 bp, Artificial
  Synthetic oligonucleotide
ccgtcaacaagctctccagtggggtacagcgatgggtaagaaggtaggcttagcg

SEQ ID NO: 363232 - DNA, 55 bp, Artificial
  Synthetic oligonucleotide
ccgtcaacggccggtagcacatgtagccacgctgcccctgatcagcgcgtggcta

SEQ ID NO: 363233 - DNA, 60 bp, Artificial
  Synthetic oligonucleotide
ccgtcaacggggtcctgtggactgtatattatggtgctggctctaagacacttgctggcc

SEQ ID NO: 363234 - DNA, 53 bp, Artificial
  Synthetic oligonucleotide
ccgtcaactggtctaacccagaaaccgggggtccgcctgagtgtctggctcgg

SEQ ID NO: 363235 - DNA, 55 bp, Artificial
  Synthetic oligonucleotide
ccgtcaagagaatgcatacagttcaatgataaacgagagttgttcggagtccggt

SEQ ID NO: 363236 - DNA, 51 bp, Artificial
  Synthetic oligonucleotide
ccgtcaagccttactttaaagatctcggattcagtatgaaggtggaagccc

SEQ ID NO: 363237 - DNA, 55 bp, Artificial
  Synthetic oligonucleotide
ccgtcaagttagcggaagttcagcgacgctgtcgcttccatactatggtgagggc

SEQ ID NO: 363238 - DNA, 55 bp, Artificial
  Synthetic oligonucleotide
ccgtcaatacccaggacgcggcggaaacggtcaaagcgcgttgagcagttcgtcg

SEQ ID NO: 363239 - DNA, 55 bp, Artificial
  Synthetic oligonucleotide
ccgtcaataggattgatgcaaacaattggtcgtacatttaacgcatacaagcacc

SEQ ID NO: 363240 - DNA, 55 bp, Artificial
  Synthetic oligonucleotide
ccgtcaatccaaacttctccgaactagtaaactaccgtctcaccgcggcagattc

SEQ ID NO: 363241 - DNA, 55 bp, Artificial
  Synthetic oligonucleotide
ccgtcaatcgttagcgtcccacatttggtgtccgtatgacgtcacggggtcaacc

SEQ ID NO: 363242 - DNA, 56 bp, Artificial
  Synthetic oligonucleotide
ccgtcacacaatctttcttggggacatctatttcgggggtcctctggacagtatac

SEQ ID NO: 363243 - DNA, 59 bp, Artificial
  Synthetic oligonucleotide
ccgtcacattgggttccaacaagtcgaacaacctggtacatacacgctaagcatgaatg

SEQ ID NO: 363244 - DNA, 55 bp, Artificial
  Synthetic oligonucleotide
ccgtcaccaccggtcatcatagtggatgtggcgcggggaccctcctcggactatt

SEQ ID NO: 363245 - DNA, 52 bp, Artificial
  Synthetic oligonucleotide
ccgtcaccgcttcgtaaccattccaaagggcggttacggtcgcccttgataa

SEQ ID NO: 363246 - DNA, 55 bp, Artificial
  Synthetic oligonucleotide
ccgtcacctccagtggagactttctgaagtactatttcaccagtgccgttaggcc

SEQ ID NO: 363247 - DNA, 55 bp, Artificial
  Synthetic oligonucleotide
ccgtcacgccctcctgggcgcagcccggatcgagttcttccacgcacagttgttc

SEQ ID NO: 363248 - DNA, 58 bp, Artificial
  Synthetic oligonucleotide
ccgtcacgtgtacgacgtggccctctactatgggaggcgcgttgatctttctgtacgc

SEQ ID NO: 363249 - DNA, 55 bp, Artificial
  Synthetic oligonucleotide
ccgtcactgagagagacatcaggactgaggagtccatatatcgggcttgttcctt

SEQ ID NO: 363250 - DNA, 55 bp, Artificial
  Synthetic oligonucleotide
ccgtcactgtacccatcacaatatctatcagccctatgtgtgctgaattctctgg

SEQ ID NO: 363251 - DNA, 57 bp, Artificial
  Synthetic oligonucleotide
ccgtcacttattcagaaaatggcttacaaacctggttcactgttcacgacagaggat

SEQ ID NO: 363252 - DNA, 60 bp, Artificial
  Synthetic oligonucleotide
ccgtcacttcccacgcaacggacaatcaaacatgtccgcatcatcacaagatggcatacg

SEQ ID NO: 363253 - DNA, 55 bp, Artificial
  Synthetic oligonucleotide
ccgtcagaactatgtgggatcccttattgaacgattttccagaatccgttcacgg

SEQ ID NO: 363254 - DNA, 55 bp, Artificial
  Synthetic oligonucleotide
ccgtcagatttgctcgcgcggccagattcgggttctctgtggacggaaaccgctg

SEQ ID NO: 363255 - DNA, 55 bp, Artificial
  Synthetic oligonucleotide
ccgtcagcgttacatagaactcgccacttgctagccgattcttgatttcggtctc

SEQ ID NO: 363256 - DNA, 57 bp, Artificial
  Synthetic oligonucleotide
ccgtcagctacgacacctcccctcgcgcgtcagatacccccattactctcttataaa

SEQ ID NO: 363257 - DNA, 58 bp, Artificial
  Synthetic oligonucleotide
ccgtcaggcaaactcagcgttttatctatgccgacggaccagccctaaatgggcactg

SEQ ID NO: 363258 - DNA, 55 bp, Artificial
  Synthetic oligonucleotide
ccgtcaggcggcatctgcagtctgcttggcacctatgcccgcggatctgatgaag

SEQ ID NO: 363259 - DNA, 54 bp, Artificial
  Synthetic oligonucleotide
ccgtcaggtggatccgtgggccagcagaataagggccgtcggattttccgtcgg

SEQ ID NO: 363260 - DNA, 57 bp, Artificial
  Synthetic oligonucleotide
ccgtcagtaccatacatttgttcgaagttcctactctctgacgagttcggtaataca

SEQ ID NO: 363261 - DNA, 54 bp, Artificial
  Synthetic oligonucleotide
ccgtcagtcgccccttacttttggattgagccgaccggcttgatcccccacgat

SEQ ID NO: 363262 - DNA, 52 bp, Artificial
  Synthetic oligonucleotide
ccgtcataaaggtgatttcgtccgcgtgtaaaacctattgcgggaaaacctc

SEQ ID NO: 363263 - DNA, 55 bp, Artificial
  Synthetic oligonucleotide
ccgtcatcctcttgtcatggatctctactacaactgaccctacggcgttgatggg

SEQ ID NO: 363264 - DNA, 60 bp, Artificial
  Synthetic oligonucleotide
ccgtcatcttggacgacttttatgggtggctgccttattgcgagatgctccgcctctgcg

SEQ ID NO: 363265 - DNA, 53 bp, Artificial
  Synthetic oligonucleotide
ccgtcatgatgagacatgatcccgtccccctgcacctcttcgctattctgact

SEQ ID NO: 363266 - DNA, 60 bp, Artificial
  Synthetic oligonucleotide
ccgtcatgtcagtgactgtagtagcaggtcccgtccttacgctttcatcacctgtggtgg

SEQ ID NO: 363267 - DNA, 60 bp, Artificial
  Synthetic oligonucleotide
ccgtcatgtcctcctgcttgaactcatcaaacgatgagtccctatacatgatagccaaga

SEQ ID NO: 363268 - DNA, 55 bp, Artificial
  Synthetic oligonucleotide
ccgtcatgttagaaccaagttcagagtgctggccactatgggccagggtgcattc

SEQ ID NO: 363269 - DNA, 53 bp, Artificial
  Synthetic oligonucleotide
ccgtcattaagaaccataattaacacctatacctcgttaaccaattattgccg

SEQ ID NO: 363270 - DNA, 55 bp, Artificial
  Synthetic oligonucleotide
ccgtcattaggggcatctgttaatggggatacagcaagagagttgtctaccgaaa

SEQ ID NO: 363271 - DNA, 56 bp, Artificial
  Synthetic oligonucleotide
ccgtcattcataaaatagattcggaaaaggttgtgtttcaagtgtttaatgaatca

SEQ ID NO: 363272 - DNA, 55 bp, Artificial
  Synthetic oligonucleotide
ccgtcattccggcagttgatatttaggtaatacgaacagccacaggtcagatcga

SEQ ID NO: 363273 - DNA, 55 bp, Artificial
  Synthetic oligonucleotide
ccgtcattctcttgtcgtggatctccactatcaccgaccccgtcgcgttgatcgg

SEQ ID NO: 363274 - DNA, 55 bp, Artificial
  Synthetic oligonucleotide
ccgtcattcttctgtcatgaatctccactataactgaacctacggcgttaattgg

SEQ ID NO: 363275 - DNA, 59 bp, Artificial
  Synthetic oligonucleotide
ccgtcattgcgaaacactaaccccaatgctgatgtcttcgcatccatgacgagtctagc

SEQ ID NO: 363276 - DNA, 55 bp, Artificial
  Synthetic oligonucleotide
ccgtcattggccacatctgaaagcaaggccaaacaggctatattaatgggcatag

SEQ ID NO: 363277 - DNA, 60 bp, Artificial
  Synthetic oligonucleotide
ccgtcattgggtgccgaaatgtgtcgacatggttgcgcacgatccatcaacacatcggcg

SEQ ID NO: 363278 - DNA, 55 bp, Artificial
  Synthetic oligonucleotide
ccgtccaaaaccgcgtccacagccgtgtcttcgcttaatgccgtctggccatgta

SEQ ID NO: 363279 - DNA, 55 bp, Artificial
  Synthetic oligonucleotide
ccgtccaagcacatggatgtcatcaggttgctcgttgttcctgtacaacaggggt

SEQ ID NO: 363280 - DNA, 52 bp, Artificial
  Synthetic oligonucleotide
ccgtccaagggggggaagaagccggcacggctgatagtctaccccgaccttg

SEQ ID NO: 363281 - DNA, 55 bp, Artificial
  Synthetic oligonucleotide
ccgtccacacaagcagtcccttagttattcaggtgcctagggcgtgtagggcaat

SEQ ID NO: 363282 - DNA, 56 bp, Artificial
  Synthetic oligonucleotide
ccgtccacatgatgtcgtggggtcacacgttaagtcccgtaatgctgacagcgttg

SEQ ID NO: 363283 - DNA, 60 bp, Artificial
  Synthetic oligonucleotide
ccgtccactcggccgactcgctccgccaatatcttcatgatcatgtctgcgtgaactgtc

SEQ ID NO: 363284 - DNA, 55 bp, Artificial
  Synthetic oligonucleotide
ccgtccaggtggggatcaacatggatggccctagtgttgaggcactgtaccagcg

SEQ ID NO: 363285 - DNA, 53 bp, Artificial
  Synthetic oligonucleotide
ccgtccatcccccaccccgagagggtcgcccaggaatggcgggaccccactca

SEQ ID NO: 363286 - DNA, 60 bp, Artificial
  Synthetic oligonucleotide
ccgtccatggcaaattgagcttcacgcggctttaatggcggaaccagatgatcggagtat

SEQ ID NO: 363287 - DNA, 60 bp, Artificial
  Synthetic oligonucleotide
ccgtccattctgtgcaggaagtttagtgagcacgctaacagatatgacccagacaactca

SEQ ID NO: 363288 - DNA, 60 bp, Artificial
  Synthetic oligonucleotide
ccgtccattctgtgcggagagtctggtgagcacgctagcgaacataactcagataaccca

SEQ ID NO: 363289 - DNA, 59 bp, Artificial
  Synthetic oligonucleotide
ccgtcccaccagcagttgcccccgctcctccagatccaccaatctgggtcccagctggc

SEQ ID NO: 363290 - DNA, 55 bp, Artificial
  Synthetic oligonucleotide
ccgtcccagttgcgttaattggaacctgttgcctgtactctatgacacaatgatc

SEQ ID NO: 363291 - DNA, 60 bp, Artificial
  Synthetic oligonucleotide
ccgtccccgccatcatgcttgaccaacttcactattttgctacctggaccattcctgctg

SEQ ID NO: 363292 - DNA, 55 bp, Artificial
  Synthetic oligonucleotide
ccgtccccgtgagcaatggtggggacggagattcgaaattgaatcttgccatccg

SEQ ID NO: 363293 - DNA, 55 bp, Artificial
  Synthetic oligonucleotide
ccgtccccttgtagcaccatgtaaacttaggcagatagtaaaccattggggtata

SEQ ID NO: 363294 - DNA, 52 bp, Artificial
  Synthetic oligonucleotide
ccgtcccgctgacaagaactaagttacccgcctaagtcggtcttgtcaaccc

SEQ ID NO: 363295 - DNA, 57 bp, Artificial
  Synthetic oligonucleotide
ccgtcccggttcaggcttcaggccacactgaatcgcgggcgtgcgttaaatactgcg

SEQ ID NO: 363296 - DNA, 56 bp, Artificial
  Synthetic oligonucleotide
ccgtccctctcaggcaccgtcttgtgcctcagaaaacttacgacgccctcttcact

SEQ ID NO: 363297 - DNA, 55 bp, Artificial
  Synthetic oligonucleotide
ccgtccgaggcttctggcccaggatgttttacctgtccgtgttgggccgacgatg

SEQ ID NO: 363298 - DNA, 55 bp, Artificial
  Synthetic oligonucleotide
ccgtccgcgctaggacagttactgcgaagcagtgacattttcgccgtaggcgaag

SEQ ID NO: 363299 - DNA, 52 bp, Artificial
  Synthetic oligonucleotide
ccgtccgcggcagacgaaacggaaacccctctagaaaattacaccacgtcta

SEQ ID NO: 363300 - DNA, 55 bp, Artificial
  Synthetic oligonucleotide
ccgtccgctgtctggttcgacaaggtacgtggcacgacctggaggttatgctgct

SEQ ID NO: 363301 - DNA, 54 bp, Artificial
  Synthetic oligonucleotide
ccgtccgttacccggctaactacttcgaaagcctagtaacatcatgaacgttgc

SEQ ID NO: 363302 - DNA, 55 bp, Artificial
  Synthetic oligonucleotide
ccgtccgttgccgccactctaggctttggggcgtacatgtctaaggcacatggtg

SEQ ID NO: 363303 - DNA, 55 bp, Artificial
  Synthetic oligonucleotide
ccgtccgttgctgctaccttgggttttggggcgtacatgtctaaggcacatggtg

SEQ ID NO: 363304 - DNA, 58 bp, Artificial
  Synthetic oligonucleotide
ccgtcctagaccaagcagagaccgcgggggcgagactagttgtgctcgccaccgctac

SEQ ID NO: 363305 - DNA, 53 bp, Artificial
  Synthetic oligonucleotide
ccgtcctccctgccgcttggtttaacggatggtctgactttggaaacaccaag

SEQ ID NO: 363306 - DNA, 53 bp, Artificial
  Synthetic oligonucleotide
ccgtcctcctcagacgagaagtccgcggctccggggctaaaactcactccggg

SEQ ID NO: 363307 - DNA, 55 bp, Artificial
  Synthetic oligonucleotide
ccgtcctgccaggattgttgcattactgctgaaccaaagaaggccatgactatgc

SEQ ID NO: 363308 - DNA, 55 bp, Artificial
  Synthetic oligonucleotide
ccgtcctgctttcatcaaggatgctgacgctcattggatcacttcaatcaatccg

SEQ ID NO: 363309 - DNA, 52 bp, Artificial
  Synthetic oligonucleotide
ccgtcctggtttcccgattcaggcgagggaactaacgtcgatgcagtcgatc

SEQ ID NO: 363310 - DNA, 54 bp, Artificial
  Synthetic oligonucleotide
ccgtccttcccttttcttattattccgaggatgttccccagccagggattctca

SEQ ID NO: 363311 - DNA, 60 bp, Artificial
  Synthetic oligonucleotide
ccgtccttgtaaatgtatgacttgacgtcggagctccattagctcctgtatgttcggatg

SEQ ID NO: 363312 - DNA, 58 bp, Artificial
  Synthetic oligonucleotide
ccgtccttgtcgatataggacttgacgtcggagctggatttagctccctgaatgtttg

SEQ ID NO: 363313 - DNA, 54 bp, Artificial
  Synthetic oligonucleotide
ccgtcgaaaggtgccaaggggtcttgtgattgatctgccgtagttttaaattta

SEQ ID NO: 363314 - DNA, 55 bp, Artificial
  Synthetic oligonucleotide
ccgtcgacctggaattctccccattccaaagtgtctccatccttatcgacgtagg

SEQ ID NO: 363315 - DNA, 55 bp, Artificial
  Synthetic oligonucleotide
ccgtcgaggtctggcagccgttctggacatgacagcacaacaggaacgggagaca

SEQ ID NO: 363316 - DNA, 55 bp, Artificial
  Synthetic oligonucleotide
ccgtcgatctgaaattctccccattcgattgtgtcaccgtccttgtccagatagg

SEQ ID NO: 363317 - DNA, 56 bp, Artificial
  Synthetic oligonucleotide
ccgtcgatgtatttccctcaaataatcccagaacacaggatcaccatttttcccca

SEQ ID NO: 363318 - DNA, 54 bp, Artificial
  Synthetic oligonucleotide
ccgtcgcagcagttaaggcggcggggagtggtcttagtaaacgtgtgaagcgca

SEQ ID NO: 363319 - DNA, 55 bp, Artificial
  Synthetic oligonucleotide
ccgtcgcagctctatcgaatacagagctcgttctgtccagatagctgtctcctgg

SEQ ID NO: 363320 - DNA, 54 bp, Artificial
  Synthetic oligonucleotide
ccgtcgcccacgatgcctcaggcaacagagtttactacctcacgcgcgaccccc

SEQ ID NO: 363321 - DNA, 55 bp, Artificial
  Synthetic oligonucleotide
ccgtcgccgccatttctactatgtttgcggacggagcctcaccggtactggttta

SEQ ID NO: 363322 - DNA, 55 bp, Artificial
  Synthetic oligonucleotide
ccgtcgccgttggactcgatgcaagtcggttcgaccaacacgtgtcagttgaagc

SEQ ID NO: 363323 - DNA, 60 bp, Artificial
  Synthetic oligonucleotide
ccgtcgcgataccctgtgtgctatggccgtcaccgctgtcctgtttgaaacctcaggcac

SEQ ID NO: 363324 - DNA, 51 bp, Artificial
  Synthetic oligonucleotide
ccgtcgctaaaagccacgtgcaccactcattgtgatcatcctgactctgaa

SEQ ID NO: 363325 - DNA, 56 bp, Artificial
  Synthetic oligonucleotide
ccgtcgctcgatgatctgctttgcaggtgatgtgtacgcacgcttcgttgagaccc

SEQ ID NO: 363326 - DNA, 55 bp, Artificial
  Synthetic oligonucleotide
ccgtcgctttagatacggtctgaagagagggccctctacggaaggagtgccggag

SEQ ID NO: 363327 - DNA, 55 bp, Artificial
  Synthetic oligonucleotide
ccgtcggagcagctgtacgacttctgtgacgtgccggagccgaccgacctgatct

SEQ ID NO: 363328 - DNA, 55 bp, Artificial
  Synthetic oligonucleotide
ccgtcggagcgtgcctcggtggtgaatttcgctgccggtagggctgccatacatt

SEQ ID NO: 363329 - DNA, 55 bp, Artificial
  Synthetic oligonucleotide
ccgtcggatcagatgctagtctcgttgtggcaaacatagggtcttcttggaaagc

SEQ ID NO: 363330 - DNA, 59 bp, Artificial
  Synthetic oligonucleotide
ccgtcggatgaggatccaagggtgtcttggtcctgagacatcttggtgtcactggaacc

SEQ ID NO: 363331 - DNA, 55 bp, Artificial
  Synthetic oligonucleotide
ccgtcggcagttgggtcagagaccatgtccgctcaattgttgagggcgcgtggga

SEQ ID NO: 363332 - DNA, 57 bp, Artificial
  Synthetic oligonucleotide
ccgtcggcgctgaatcctgccgacgacccttctcggggccgcttggggctctctcgc

SEQ ID NO: 363333 - DNA, 55 bp, Artificial
  Synthetic oligonucleotide
ccgtcgggctcatttgataagatcctgtttggtaaatcgtgagggacgcaagtcg

SEQ ID NO: 363334 - DNA, 55 bp, Artificial
  Synthetic oligonucleotide
ccgtcggggttctttatggcgatggtcgacggtgagtatcggccgatcatcaagc

SEQ ID NO: 363335 - DNA, 55 bp, Artificial
  Synthetic oligonucleotide
ccgtcgtagatgatggcagtggagtcgttgatttcccaggagtagaatgagatac

SEQ ID NO: 363336 - DNA, 55 bp, Artificial
  Synthetic oligonucleotide
ccgtcgtatgtgctgaactgctgtcacgacttactggtcacgcagtccggtgcag

SEQ ID NO: 363337 - DNA, 58 bp, Artificial
  Synthetic oligonucleotide
ccgtcgtcctaactagctcgcttaattgggccactgacatcgttatggttgattgggc

SEQ ID NO: 363338 - DNA, 50 bp, Artificial
  Synthetic oligonucleotide
ccgtcgtctgtattcattattagacgagtcaccgactatttggatagaca

SEQ ID NO: 363339 - DNA, 55 bp, Artificial
  Synthetic oligonucleotide
ccgtcgtgccaaggtggaattccttgtcaggacccaaaatcctgagacgactggt

SEQ ID NO: 363340 - DNA, 60 bp, Artificial
  Synthetic oligonucleotide
ccgtcgtgctctctcggaaatacacctccttcccatggctgctaggctgtgctgccaact

SEQ ID NO: 363341 - DNA, 55 bp, Artificial
  Synthetic oligonucleotide
ccgtcgtgctctgtgaggcgtatgacacggggtgcgcgtggtacgagttaacacc

SEQ ID NO: 363342 - DNA, 54 bp, Artificial
  Synthetic oligonucleotide
ccgtcgttgaacaggttcaggtgttttaacttgcgtggtaaagccatgattccc

SEQ ID NO: 363343 - DNA, 58 bp, Artificial
  Synthetic oligonucleotide
ccgtcgttggccacatttgtggcccgtgtgtggcgaagttcaagatttgccaactggc

SEQ ID NO: 363344 - DNA, 56 bp, Artificial
  Synthetic oligonucleotide
ccgtctaaatggggcagcctgggacacgggctcccaggacgtacacgaaacagata

SEQ ID NO: 363345 - DNA, 59 bp, Artificial
  Synthetic oligonucleotide
ccgtctaattgcgttcgcatcgcgaggcaatcacgtgtctcccacgcattacgtccctg

SEQ ID NO: 363346 - DNA, 54 bp, Artificial
  Synthetic oligonucleotide
ccgtctacaataatgttaccgctacgcagtccgttcaaacgtggaagcaggggt

SEQ ID NO: 363347 - DNA, 55 bp, Artificial
  Synthetic oligonucleotide
ccgtctacgtaaacagactgaatagggctgaggttcctactaatgattgagaagc

SEQ ID NO: 363348 - DNA, 57 bp, Artificial
  Synthetic oligonucleotide
ccgtctactacgtacacttcctggggtgtgtcctcccactgaatataagcaacagcg

SEQ ID NO: 363349 - DNA, 59 bp, Artificial
  Synthetic oligonucleotide
ccgtctactcgagatctaatcgacaccgcctcagctctgtaccgggaggccttagagtc

SEQ ID NO: 363350 - DNA, 55 bp, Artificial
  Synthetic oligonucleotide
ccgtctagtcctacctttctttacattatctcaagggacacgccaattaacgtca

SEQ ID NO: 363351 - DNA, 58 bp, Artificial
  Synthetic oligonucleotide
ccgtctagtgcccttgcttattctagtttcgtttatcgcatccatactttacagacac

SEQ ID NO: 363352 - DNA, 58 bp, Artificial
  Synthetic oligonucleotide
ccgtctatagcgcctcaaggccatgcctttcactttgacgctcggttaaatataactc

SEQ ID NO: 363353 - DNA, 60 bp, Artificial
  Synthetic oligonucleotide
ccgtctatgcgaccgcagcggatatgcaatatccgttcggctcaccactaactgactctg

SEQ ID NO: 363354 - DNA, 59 bp, Artificial
  Synthetic oligonucleotide
ccgtctattcgatctgtggtgggagtctgtcgattcgtttgccccgcgagcaacgcttg

SEQ ID NO: 363355 - DNA, 60 bp, Artificial
  Synthetic oligonucleotide
ccgtctcatggaccagcaacagcatagttactttctgtggactagacaatgaacctggat

SEQ ID NO: 363356 - DNA, 55 bp, Artificial
  Synthetic oligonucleotide
ccgtctcgccgtattctcgcacaacatacgaggaatgtaacgggactctggagga

SEQ ID NO: 363357 - DNA, 56 bp, Artificial
  Synthetic oligonucleotide
ccgtctcgcttctacctagcaactgtgggtgtgttgggccggatgctgggaaaatt

SEQ ID NO: 363358 - DNA, 58 bp, Artificial
  Synthetic oligonucleotide
ccgtctcggaagtgggtccctgctcactggaagttgacagaccaacgtcaggccacaa

SEQ ID NO: 363359 - DNA, 50 bp, Artificial
  Synthetic oligonucleotide
ccgtctcgggacaatgagccctacgctaattggggtaaccgtggctgccg

SEQ ID NO: 363360 - DNA, 60 bp, Artificial
  Synthetic oligonucleotide
ccgtctctacgcagtcaggcatgatgtagttgatcaactgatcaagcatgattggtctga

SEQ ID NO: 363361 - DNA, 50 bp, Artificial
  Synthetic oligonucleotide
ccgtctctagtacggaaaataggcctgtgattgtccccccaaatggttac

SEQ ID NO: 363362 - DNA, 55 bp, Artificial
  Synthetic oligonucleotide
ccgtctctcttacattttgcactaaaccttgacggaagttctcccgggccatagc

SEQ ID NO: 363363 - DNA, 50 bp, Artificial
  Synthetic oligonucleotide
ccgtctgaagtcactaaacgttaacggtcacgtttacggtgaacgggttg

SEQ ID NO: 363364 - DNA, 58 bp, Artificial
  Synthetic oligonucleotide
ccgtctgaatatacgttggcagataggtacgttaccaccagagaggaattcgcgtcta

SEQ ID NO: 363365 - DNA, 56 bp, Artificial
  Synthetic oligonucleotide
ccgtctgaattgccctcaccattactggatgagttggggaagttaccggaggatct

SEQ ID NO: 363366 - DNA, 55 bp, Artificial
  Synthetic oligonucleotide
ccgtctgagcagggtttttgggccgtgtacccaaactgtgcggtcggatctgccg

SEQ ID NO: 363367 - DNA, 57 bp, Artificial
  Synthetic oligonucleotide
ccgtctgatattgatatctagcggtcattatacatttgggaataagtttctgatgtc

SEQ ID NO: 363368 - DNA, 60 bp, Artificial
  Synthetic oligonucleotide
ccgtctgcaagacagcttacacatccacagctatcgacatcgttacaacagtcttcggcc

SEQ ID NO: 363369 - DNA, 57 bp, Artificial
  Synthetic oligonucleotide
ccgtctgcactgtaatcacagccaaacagagcgagaaatggccttggttgggatcaa

SEQ ID NO: 363370 - DNA, 55 bp, Artificial
  Synthetic oligonucleotide
ccgtctgcccttggtctgttttataggcgtagccgcttagttgggccagaggccc

SEQ ID NO: 363371 - DNA, 50 bp, Artificial
  Synthetic oligonucleotide
ccgtctgcgactccagcgatcttagcaccctccatcagtcggttcggggg

SEQ ID NO: 363372 - DNA, 59 bp, Artificial
  Synthetic oligonucleotide
ccgtctgctggcctcctctagcagatcttccgtcgacttgaaatgtaccccagtcgacg

SEQ ID NO: 363373 - DNA, 57 bp, Artificial
  Synthetic oligonucleotide
ccgtctgcttggtaagctggcatgtattctgtacccgttacagggtctaaccatgtt

SEQ ID NO: 363374 - DNA, 55 bp, Artificial
  Synthetic oligonucleotide
ccgtctggagactatatggtgtccactcattatcatagaagtgaactagataagg

SEQ ID NO: 363375 - DNA, 60 bp, Artificial
  Synthetic oligonucleotide
ccgtctggagtgcgatgtaatagatggacggcgtacattgcatgtaattgtaacaagaat

SEQ ID NO: 363376 - DNA, 55 bp, Artificial
  Synthetic oligonucleotide
ccgtctggatagatataaccatagaaaggcctaaatacttgaaagattgcgggtg

SEQ ID NO: 363377 - DNA, 60 bp, Artificial
  Synthetic oligonucleotide
ccgtctggcatgtttgactccattgtcctctgcgaggcatatgacactggctgtgcctgg

SEQ ID NO: 363378 - DNA, 60 bp, Artificial
  Synthetic oligonucleotide
ccgtctggcggcatctgcagtctgattggcacgtatgcccggggctccggtgagggtgaa

SEQ ID NO: 363379 - DNA, 60 bp, Artificial
  Synthetic oligonucleotide
ccgtctgggacggtggctcctacatctatcaatctttcctcaaggatgagttgcgcccca

SEQ ID NO: 363380 - DNA, 55 bp, Artificial
  Synthetic oligonucleotide
ccgtctggttcctagttacttaacatgctcatctgatgtgaaggaagtcaaaggg

SEQ ID NO: 363381 - DNA, 55 bp, Artificial
  Synthetic oligonucleotide
ccgtctgtagccttaccagctcgttagagactgacttacagaggcttggaagctc

SEQ ID NO: 363382 - DNA, 59 bp, Artificial
  Synthetic oligonucleotide
ccgtctgtcgccgccactttaggtttcggagcgtatatgtctaaagcacatggtgtcga

SEQ ID NO: 363383 - DNA, 55 bp, Artificial
  Synthetic oligonucleotide
ccgtctgttgtgtctagaagtatggttgatccaagatatgagcattggaccgcgg

SEQ ID NO: 363384 - DNA, 60 bp, Artificial
  Synthetic oligonucleotide
ccgtcttatgcactgatgaatcagtgcgacgtgacatcttatgtgacgtatcctattctt

SEQ ID NO: 363385 - DNA, 55 bp, Artificial
  Synthetic oligonucleotide
ccgtcttcttgaggaccccactactctgaacataaggggaggagccagcccaacc

SEQ ID NO: 363386 - DNA, 55 bp, Artificial
  Synthetic oligonucleotide
ccgtcttgctgttcaagacttactacagtcagcacgtaccaaagtgttacgtgag

SEQ ID NO: 363387 - DNA, 55 bp, Artificial
  Synthetic oligonucleotide
ccgtcttgggagtcctacaaagagggtgccacaagtcaaccttaacaattcactg

SEQ ID NO: 363388 - DNA, 57 bp, Artificial
  Synthetic oligonucleotide
ccgtctttaaattctctataatctggcgttacattacttaatactatgtgttagcga

SEQ ID NO: 363389 - DNA, 54 bp, Artificial
  Synthetic oligonucleotide
ccgtctttaagataatggttccaaccataccgactgatataatggaaagctcta

SEQ ID NO: 363390 - DNA, 60 bp, Artificial
  Synthetic oligonucleotide
ccgtctttctccacgtaggtcttgacatctgttgagctcttagctgcctgaatgttcgga

SEQ ID NO: 363391 - DNA, 58 bp, Artificial
  Synthetic oligonucleotide
ccgtctttctcctcccactcatgggggctgtttcagcatacactaccgtactgtcgaa

SEQ ID NO: 363392 - DNA, 52 bp, Artificial
  Synthetic oligonucleotide
ccgtctttgacagcctcatatttcattgcgggggcgtagaccgcatgccggg

SEQ ID NO: 363393 - DNA, 55 bp, Artificial
  Synthetic oligonucleotide
ccgtctttgagaatttgatcaggccaacttacgtaggctgtattgaggtgcctga

SEQ ID NO: 363394 - DNA, 55 bp, Artificial
  Synthetic oligonucleotide
ccgtctttggggttgcgtcggtacatgagaatgtgcgctaaaaacaatcgtaccg

SEQ ID NO: 363395 - DNA, 55 bp, Artificial
  Synthetic oligonucleotide
ccgtgaaacagtgcatccaaaagcgtgaacagcgtacatgtatcactgatagggg

SEQ ID NO: 363396 - DNA, 51 bp, Artificial
  Synthetic oligonucleotide
ccgtgaacaatttcctatcgtatccgaagcaatggagtggaactaatgcct

SEQ ID NO: 363397 - DNA, 60 bp, Artificial
  Synthetic oligonucleotide
ccgtgaacaccaggatcgcttacatctccgattctctacatttcatggaaccagctgatg

SEQ ID NO: 363398 - DNA, 55 bp, Artificial
  Synthetic oligonucleotide
ccgtgaacctatcatttctggtcatggtggcctgtttaaagcgtttttcggctag

SEQ ID NO: 363399 - DNA, 60 bp, Artificial
  Synthetic oligonucleotide
ccgtgaacgagtccagactttgaagctcaggaagcacttgtgtatctgtagtgcttgcct

SEQ ID NO: 363400 - DNA, 55 bp, Artificial
  Synthetic oligonucleotide
ccgtgaactacttacatgcttagctgatatcctatttagtaaggcagacaccgtg

SEQ ID NO: 363401 - DNA, 60 bp, Artificial
  Synthetic oligonucleotide
ccgtgaactcctaacggagagaatgaatccgctgatcagtcacgaagtctatgagacctt

SEQ ID NO: 363402 - DNA, 55 bp, Artificial
  Synthetic oligonucleotide
ccgtgaactgggttccgataggccgcaccacctggagcatccatgcgagtggtga

SEQ ID NO: 363403 - DNA, 60 bp, Artificial
  Synthetic oligonucleotide
ccgtgaagagaatggtgatgtagataagctagagatctaaccaatctctatgtggactac

SEQ ID NO: 363404 - DNA, 55 bp, Artificial
  Synthetic oligonucleotide
ccgtgaagatattgaaatgacaaaatccatgttgaagcttaaagctgatgagcct

SEQ ID NO: 363405 - DNA, 60 bp, Artificial
  Synthetic oligonucleotide
ccgtgaagctcatatacggcaacaccattgacgcaaatccaaatgcgggtatcgtccgag

SEQ ID NO: 363406 - DNA, 55 bp, Artificial
  Synthetic oligonucleotide
ccgtgaaggaccctcgaccactaatgacaatggtctcattggccgcgcagcggca

SEQ ID NO: 363407 - DNA, 60 bp, Artificial
  Synthetic oligonucleotide
ccgtgaatgatctaactgacgaagtagctgattttatcccatcgagtgtcgaaattgtaa

SEQ ID NO: 363408 - DNA, 57 bp, Artificial
  Synthetic oligonucleotide
ccgtgacaaatgcgcaaaattatggggttaatttacctattacaggatccatggaca

SEQ ID NO: 363409 - DNA, 55 bp, Artificial
  Synthetic oligonucleotide
ccgtgacacactctgttaacctgcttgaagacagccacaacggaaaactatgtag

SEQ ID NO: 363410 - DNA, 54 bp, Artificial
  Synthetic oligonucleotide
ccgtgacaccgtaatgtccccaaccgatagtgtacatcttttcccacggtactg

SEQ ID NO: 363411 - DNA, 60 bp, Artificial
  Synthetic oligonucleotide
ccgtgacagcgacattcgcgttactgcccaaggctaagaggttcgcacagtggttgctcg

SEQ ID NO: 363412 - DNA, 55 bp, Artificial
  Synthetic oligonucleotide
ccgtgacaggtgccaggtctgcaattgcagggctcttagacacgacaaagaccct

SEQ ID NO: 363413 - DNA, 55 bp, Artificial
  Synthetic oligonucleotide
ccgtgacattattatcccaatgcttggaacatggccaaccatgcaggaccttgca

SEQ ID NO: 363414 - DNA, 56 bp, Artificial
  Synthetic oligonucleotide
ccgtgaccagacctatcaggacgttcgtgaggctcgttgcccgaaccctgtttcca

SEQ ID NO: 363415 - DNA, 55 bp, Artificial
  Synthetic oligonucleotide
ccgtgacgacatacccttagtaagcacgcccgagggtgctggcagagggccatct

SEQ ID NO: 363416 - DNA, 55 bp, Artificial
  Synthetic oligonucleotide
ccgtgacgatagacttgaggcagcagccttgggtatagctccgggattcccaccg

SEQ ID NO: 363417 - DNA, 60 bp, Artificial
  Synthetic oligonucleotide
ccgtgacgattagcgagcattgtgggaagaggggaccctccgtgcgcaccacgactgaca

SEQ ID NO: 363418 - DNA, 60 bp, Artificial
  Synthetic oligonucleotide
ccgtgacgctatctataaatggggagctgaagtgccagctcatcgccagtatgaactcga

SEQ ID NO: 363419 - DNA, 54 bp, Artificial
  Synthetic oligonucleotide
ccgtgacggacgggtgtaccggtcaacggatgaatggtttacgcttgcgttgta

SEQ ID NO: 363420 - DNA, 52 bp, Artificial
  Synthetic oligonucleotide
ccgtgacggggggggccgtaagcgcaagtcaaacggtagccagggccgttgc

SEQ ID NO: 363421 - DNA, 55 bp, Artificial
  Synthetic oligonucleotide
ccgtgacgggtccatcagtaaattgttgtctcctgagcgacgcagacgtgtgtcc

SEQ ID NO: 363422 - DNA, 57 bp, Artificial
  Synthetic oligonucleotide
ccgtgactatttcacagaacgtctaaaacatctctcccgcgactggaaaatcttcca

SEQ ID NO: 363423 - DNA, 58 bp, Artificial
  Synthetic oligonucleotide
ccgtgactttaagactatgccccgcgaagcagtcgagtttttcaagatgcaacgcaag

SEQ ID NO: 363424 - DNA, 51 bp, Artificial
  Synthetic oligonucleotide
ccgtgagaagccgtctgtcgaagactgacctcgccgtgatctctttcgtgc

SEQ ID NO: 363425 - DNA, 58 bp, Artificial
  Synthetic oligonucleotide
ccgtgagagtctactggagaaggcacgcatcaacctaaaggaccgcgtaatggaatac

SEQ ID NO: 363426 - DNA, 55 bp, Artificial
  Synthetic oligonucleotide
ccgtgagccatattcgtgtgagagcattagtgtcgagaacatgtcacattatttg

SEQ ID NO: 363427 - DNA, 60 bp, Artificial
  Synthetic oligonucleotide
ccgtgaggcccaatctctctgtggacgtgtaccgcatagaactgctccgcccaatactgg

SEQ ID NO: 363428 - DNA, 57 bp, Artificial
  Synthetic oligonucleotide
ccgtgagggcgcccatcgcagctggtggaaacttccggagggagagaccacttgttg

SEQ ID NO: 363429 - DNA, 60 bp, Artificial
  Synthetic oligonucleotide
ccgtgagtattttggcgaagaataacgctatcgtagcgaatacaagagaggttcagcata

SEQ ID NO: 363430 - DNA, 55 bp, Artificial
  Synthetic oligonucleotide
ccgtgagtgtgggtttgtttcgtactcatctggttctcagcactcctcgcgatgg

SEQ ID NO: 363431 - DNA, 55 bp, Artificial
  Synthetic oligonucleotide
ccgtgagtttgaatatccacgttatacgcataagtagtacaccatgagtctatca

SEQ ID NO: 363432 - DNA, 60 bp, Artificial
  Synthetic oligonucleotide
ccgtgatagaagaacttgacacttcgtattgtatagagaccgatttggatctatactgta

SEQ ID NO: 363433 - DNA, 59 bp, Artificial
  Synthetic oligonucleotide
ccgtgatagattcgtagttttgaatcagtcgtccataatagttaatactccgcatatta

SEQ ID NO: 363434 - DNA, 58 bp, Artificial
  Synthetic oligonucleotide
ccgtgatagggtccattcgattctactcgccgtgacgaatccaacgagcccatggaca

SEQ ID NO: 363435 - DNA, 60 bp, Artificial
  Synthetic oligonucleotide
ccgtgatatctgatgagaggctgaaatgctggctctgtaaaaaaccatctcatcaacaga

SEQ ID NO: 363436 - DNA, 55 bp, Artificial
  Synthetic oligonucleotide
ccgtgatcagtatctatttcatctacctaagaatctctaaacacgtacgcgaaat

SEQ ID NO: 363437 - DNA, 60 bp, Artificial
  Synthetic oligonucleotide
ccgtgatcatggcaatttattgacatgtaatacgagcacccgcacggtagatcaattcgt

SEQ ID NO: 363438 - DNA, 58 bp, Artificial
  Synthetic oligonucleotide
ccgtgatcccacaggacgcatccggtgcactcccagttcttgtgcgcgatcccgctgt

SEQ ID NO: 363439 - DNA, 55 bp, Artificial
  Synthetic oligonucleotide
ccgtgatgattttgtttatccatgctgctgtgtcacaactgagtctgggtcagca

SEQ ID NO: 363440 - DNA, 60 bp, Artificial
  Synthetic oligonucleotide
ccgtgatggaccttgtggtatcggatttagtgtgaattaccagaggcgtacaggagatgc

SEQ ID NO: 363441 - DNA, 55 bp, Artificial
  Synthetic oligonucleotide
ccgtgatgtcccccgaatacaccaatgttagcccgctgctaacacgcccaacgta

SEQ ID NO: 363442 - DNA, 55 bp, Artificial
  Synthetic oligonucleotide
ccgtgatgtccgtatggaatggagaatttgttcttgactagtgctggtgaccttg

SEQ ID NO: 363443 - DNA, 55 bp, Artificial
  Synthetic oligonucleotide
ccgtgcaaaaccaatgccccacacaccagctcctctggcagcctcatctggtccg

SEQ ID NO: 363444 - DNA, 55 bp, Artificial
  Synthetic oligonucleotide
ccgtgcaacattgcgcgctccgtcatgcacgaaaaccgtgcaacatcagcggtcc

SEQ ID NO: 363445 - DNA, 57 bp, Artificial
  Synthetic oligonucleotide
ccgtgcacggacaggtaggcgtggttttgttgatactgattaccctctttacactca

SEQ ID NO: 363446 - DNA, 55 bp, Artificial
  Synthetic oligonucleotide
ccgtgcagaacctccctgacatggaattacctcccaagcaatgctgcatcgtcat

SEQ ID NO: 363447 - DNA, 54 bp, Artificial
  Synthetic oligonucleotide
ccgtgcagacttcggagagagcaagtatgtgtatactcatagcggtcactggca

SEQ ID NO: 363448 - DNA, 56 bp, Artificial
  Synthetic oligonucleotide
ccgtgcagcatgtagtgtccctccgggtagggcttgatcgactgtaggtgtccgaa

SEQ ID NO: 363449 - DNA, 51 bp, Artificial
  Synthetic oligonucleotide
ccgtgcagtaattgtcaaaaccaaattgttttcagcaactgaacaagttcg

SEQ ID NO: 363450 - DNA, 52 bp, Artificial
  Synthetic oligonucleotide
ccgtgcagttccgcattccgaagtacaatttaaccggttttatgggtgttcg

SEQ ID NO: 363451 - DNA, 55 bp, Artificial
  Synthetic oligonucleotide
ccgtgcataggtgagcactgggatgcagccaagccctgtgatgctgacagagggg

SEQ ID NO: 363452 - DNA, 58 bp, Artificial
  Synthetic oligonucleotide
ccgtgcatggtaatgctcggttgtactttaagagtgttgggaatcagtgagtcccatg

SEQ ID NO: 363453 - DNA, 60 bp, Artificial
  Synthetic oligonucleotide
ccgtgccaagaattatgtcgaagcgaccagcagatatagggattttcactcccgtctcca

SEQ ID NO: 363454 - DNA, 55 bp, Artificial
  Synthetic oligonucleotide
ccgtgccaagtacagcgccaagactgcgcgctcaatcggtagccagctattgaca

SEQ ID NO: 363455 - DNA, 60 bp, Artificial
  Synthetic oligonucleotide
ccgtgcccatagtgttgatgatatggatgtccgggagtgggtggctatcaacagacccat

SEQ ID NO: 363456 - DNA, 55 bp, Artificial
  Synthetic oligonucleotide
ccgtgccccatcctaacattgaggaggtcgccctatccaccactggggagatccc

SEQ ID NO: 363457 - DNA, 54 bp, Artificial
  Synthetic oligonucleotide
ccgtgccccgccccccccggaagagcggcaagagagtcgctcccagactccggc

SEQ ID NO: 363458 - DNA, 55 bp, Artificial
  Synthetic oligonucleotide
ccgtgcccgctttgaagtcaaccacaaagtcatatggaacgcagaatacggacgc

SEQ ID NO: 363459 - DNA, 55 bp, Artificial
  Synthetic oligonucleotide
ccgtgccgggatcagagacatttgaccaatagttgactagtataatagcccttgg

SEQ ID NO: 363460 - DNA, 55 bp, Artificial
  Synthetic oligonucleotide
ccgtgcgactatctccttcaataacgatactaataggtctgtctggccgcgcagc

SEQ ID NO: 363461 - DNA, 55 bp, Artificial
  Synthetic oligonucleotide
ccgtgcgagtgcagtgaagagactgttttgtccgcaagctcatgtcgagttgacg

SEQ ID NO: 363462 - DNA, 57 bp, Artificial
  Synthetic oligonucleotide
ccgtgcgagtgcccccattgccctcgtcacaaacaaaaggagatcgtgggctcaaag

SEQ ID NO: 363463 - DNA, 51 bp, Artificial
  Synthetic oligonucleotide
ccgtgcgatagcttgcacgaggttttcagtcatcttaccgccgtgcgagtc

SEQ ID NO: 363464 - DNA, 55 bp, Artificial
  Synthetic oligonucleotide
ccgtgcgattgaagcaattctcgatctttacggaaagaaatttgatccagcgagc

SEQ ID NO: 363465 - DNA, 55 bp, Artificial
  Synthetic oligonucleotide
ccgtgcgcaaaattgaaagtataaagtcagccgttgagatacggtattgcgtatt

SEQ ID NO: 363466 - DNA, 55 bp, Artificial
  Synthetic oligonucleotide
ccgtgcggattgaatatagtcgctggatatgacaggtacagacgtatccatgttc

SEQ ID NO: 363467 - DNA, 54 bp, Artificial
  Synthetic oligonucleotide
ccgtgcggttgcaggaactgtgaggtcaagcttcgcatttttgtccacgccaca

SEQ ID NO: 363468 - DNA, 57 bp, Artificial
  Synthetic oligonucleotide
ccgtgctaaaaacgagatgcaaatatacggagatatacccattaaagtatggtgttg

SEQ ID NO: 363469 - DNA, 54 bp, Artificial
  Synthetic oligonucleotide
ccgtgcttcccgtagtagcccggttgctctacggcgtagtctccggttcgtagc

SEQ ID NO: 363470 - DNA, 60 bp, Artificial
  Synthetic oligonucleotide
ccgtgcttgctatgccggagacgacttagtgcgtgatcgagcttgcgaagaacgagccgg

SEQ ID NO: 363471 - DNA, 55 bp, Artificial
  Synthetic oligonucleotide
ccgtggaaacgcaatgtgtgataggttaatacttctcggcgtttgaacctcgttg

SEQ ID NO: 363472 - DNA, 51 bp, Artificial
  Synthetic oligonucleotide
ccgtggaaagttcctttgtagatgttaatatagacgagccagatcctttaa

SEQ ID NO: 363473 - DNA, 55 bp, Artificial
  Synthetic oligonucleotide
ccgtggaaatgccgagacgaacaaaggctcgttggaattgtcttagcgagacaaa

SEQ ID NO: 363474 - DNA, 56 bp, Artificial
  Synthetic oligonucleotide
ccgtggaacggctcatttctggactgggtacttacctatcgtcagaagtgaatccc

SEQ ID NO: 363475 - DNA, 52 bp, Artificial
  Synthetic oligonucleotide
ccgtggacacaacagttatgctttcgacgctcaagcccgtgaacttgttagc

SEQ ID NO: 363476 - DNA, 55 bp, Artificial
  Synthetic oligonucleotide
ccgtggactccttacgtataggtggagtgcagaggaaagattcatatttgagcac

SEQ ID NO: 363477 - DNA, 60 bp, Artificial
  Synthetic oligonucleotide
ccgtggagaagctggtgcttcgacagcagtctacaagaagtctgcaagaagagcgcaatc

SEQ ID NO: 363478 - DNA, 58 bp, Artificial
  Synthetic oligonucleotide
ccgtggaggctctcaatgggtatttggacaagcacagggacgaagtcgacaaagcaag

SEQ ID NO: 363479 - DNA, 60 bp, Artificial
  Synthetic oligonucleotide
ccgtggatacggactccgccgtagttcatgtgctcagccattgcccggagtgtcttgtgt

SEQ ID NO: 363480 - DNA, 55 bp, Artificial
  Synthetic oligonucleotide
ccgtggatccaaatatgcggtgggcttcacgtcaggcattggcttgggctgttgt

SEQ ID NO: 363481 - DNA, 55 bp, Artificial
  Synthetic oligonucleotide
ccgtggattaggcttaaaatgggagtttcttctcacttcttctacccagctccaa

SEQ ID NO: 363482 - DNA, 55 bp, Artificial
  Synthetic oligonucleotide
ccgtggcaagcgagaggcgacactatgttcttcacgttatacaggatgacaggag

SEQ ID NO: 363483 - DNA, 55 bp, Artificial
  Synthetic oligonucleotide
ccgtggcaataatggtaacatgaccttcaattactacgcaaacacttatcagaat

SEQ ID NO: 363484 - DNA, 54 bp, Artificial
  Synthetic oligonucleotide
ccgtggcacacggtgtgttcaaccccgagtttgggcccgccgccttgtctaaca

SEQ ID NO: 363485 - DNA, 60 bp, Artificial
  Synthetic oligonucleotide
ccgtggcatggtctcccatcgagttacatctaccgaccgacaatgtggtgcggtatatga

SEQ ID NO: 363486 - DNA, 55 bp, Artificial
  Synthetic oligonucleotide
ccgtggcattgtgggcgggaagtatgttcaggcagcgctcttacgattgggcgca

SEQ ID NO: 363487 - DNA, 50 bp, Artificial
  Synthetic oligonucleotide
ccgtggccacactcttcccgctgatccaaacggctccagttgcggggtca

SEQ ID NO: 363488 - DNA, 53 bp, Artificial
  Synthetic oligonucleotide
ccgtggcctattgacgcatccttgctcgctgaagctggcaaggactacgggtt

SEQ ID NO: 363489 - DNA, 60 bp, Artificial
  Synthetic oligonucleotide
ccgtggcctgactttcctcgagatgcttcatctgcgtactacctttgagcgtgaaacgat

SEQ ID NO: 363490 - DNA, 55 bp, Artificial
  Synthetic oligonucleotide
ccgtggcgagcacaaggtatgtttgttagcatttgcgttaaataacactccccac

SEQ ID NO: 363491 - DNA, 54 bp, Artificial
  Synthetic oligonucleotide
ccgtggcgctcttctgcgggaacctcaaaggttagccgtaatttgaattattcc

SEQ ID NO: 363492 - DNA, 58 bp, Artificial
  Synthetic oligonucleotide
ccgtggcgtcggaaagtatgacgccgctgacctcagtaccttaagcggtctatcagcc

SEQ ID NO: 363493 - DNA, 59 bp, Artificial
  Synthetic oligonucleotide
ccgtggctacggctggacatgtctgacaaggctatcttccgccgctacccccacctgcg

SEQ ID NO: 363494 - DNA, 60 bp, Artificial
  Synthetic oligonucleotide
ccgtggctcatggtgatgctgtgggtaagttcgacatcacacacagcaagacagaaaagc

SEQ ID NO: 363495 - DNA, 55 bp, Artificial
  Synthetic oligonucleotide
ccgtggctccttaaaccactttatccctgagcttagccctattagtgtcaccact

SEQ ID NO: 363496 - DNA, 53 bp, Artificial
  Synthetic oligonucleotide
ccgtggctctcggcctagttggggccccacggacccccggcgtaggtcgcgca

SEQ ID NO: 363497 - DNA, 49 bp, Artificial
  Synthetic oligonucleotide
ccgtgggaacgggtcaaagtccaaggggaaggggtggagccctggggcg

SEQ ID NO: 363498 - DNA, 53 bp, Artificial
  Synthetic oligonucleotide
ccgtgggagacgcgggttcacgcgtcgtcaaaaagttggtggtcaactccgta

SEQ ID NO: 363499 - DNA, 60 bp, Artificial
  Synthetic oligonucleotide
ccgtgggagagttcgaatcaattgggatccgcatggagatattggcacagctggagatta

SEQ ID NO: 363500 - DNA, 55 bp, Artificial
  Synthetic oligonucleotide
ccgtgggagttcggcgagtgcaggaccgcaggcaggaagacgacgctgcaggacg

SEQ ID NO: 363501 - DNA, 60 bp, Artificial
  Synthetic oligonucleotide
ccgtgggcaattcaacaataactacacaagaggcagcgaatatagttcttggatatggtg

SEQ ID NO: 363502 - DNA, 51 bp, Artificial
  Synthetic oligonucleotide
ccgtgggccccgatccagtttatcggataggcaacctccgaagggtttaaa

SEQ ID NO: 363503 - DNA, 53 bp, Artificial
  Synthetic oligonucleotide
ccgtgggctaaagtggttggtttggtgtactcacctcttactacgaccattcc

SEQ ID NO: 363504 - DNA, 55 bp, Artificial
  Synthetic oligonucleotide
ccgtgggctagaacatctactgcttgacgggctaagagtgatctgtccgcggtgt

SEQ ID NO: 363505 - DNA, 55 bp, Artificial
  Synthetic oligonucleotide
ccgtggggcgtagtgctcgaggtgcgcgcgcgccctgaagggggcaacccaaccg

SEQ ID NO: 363506 - DNA, 54 bp, Artificial
  Synthetic oligonucleotide
ccgtggggtgcagaaccgatatttactttacgatcacttaaggtccaactgtcc

SEQ ID NO: 363507 - DNA, 56 bp, Artificial
  Synthetic oligonucleotide
ccgtgggtcggaccacgcccgcagatcaaagtcgtggataggaggaaataggtgag

SEQ ID NO: 363508 - DNA, 55 bp, Artificial
  Synthetic oligonucleotide
ccgtgggtgtatccaaatcactctgacattttgtggacccatgatggcgagaggg

SEQ ID NO: 363509 - DNA, 55 bp, Artificial
  Synthetic oligonucleotide
ccgtgggttcgcatctcatttgggtgccggcattgttggttttgccgtgtcgatg

SEQ ID NO: 363510 - DNA, 57 bp, Artificial
  Synthetic oligonucleotide
ccgtggtaccggtggcagtactggctatgtacctataggtgaaggcccagcaatacg

SEQ ID NO: 363511 - DNA, 55 bp, Artificial
  Synthetic oligonucleotide
ccgtggtatgagtttcacggtaagtaactcaaacatttatgtcttattggattcg

SEQ ID NO: 363512 - DNA, 55 bp, Artificial
  Synthetic oligonucleotide
ccgtggtattagttataaggttacagtcggtgctctcgtcgccaacgaaggctgg

SEQ ID NO: 363513 - DNA, 55 bp, Artificial
  Synthetic oligonucleotide
ccgtggtgacattttccccgagtagatagaacgacacttacatttcaccgtctag

SEQ ID NO: 363514 - DNA, 55 bp, Artificial
  Synthetic oligonucleotide
ccgtggtgagggctactgctacaccaatcggtttgatttcgcgtaagtctccgca

SEQ ID NO: 363515 - DNA, 55 bp, Artificial
  Synthetic oligonucleotide
ccgtggtggaaataattcacccagacggatcccactcaggatatgccacctgtgt

SEQ ID NO: 363516 - DNA, 55 bp, Artificial
  Synthetic oligonucleotide
ccgtggtggcattcgtgtgacgttcatgttctgtggttcagcaatggccactggg

SEQ ID NO: 363517 - DNA, 52 bp, Artificial
  Synthetic oligonucleotide
ccgtggtggtgggaacgaccgataagaagggcgcgcctacctacaactgggg

SEQ ID NO: 363518 - DNA, 55 bp, Artificial
  Synthetic oligonucleotide
ccgtggtgtgcaactgcaaaccagtaacctgctatggccaatcgtgaaggtacag

SEQ ID NO: 363519 - DNA, 55 bp, Artificial
  Synthetic oligonucleotide
ccgtggtgtgtttgtgagttcttacttaataggcgtgcgcgagcataattcgtcg

SEQ ID NO: 363520 - DNA, 55 bp, Artificial
  Synthetic oligonucleotide
ccgtggttacaggaactgaacacttgcgttgcgatgatgtaccaggttgtgcgta

SEQ ID NO: 363521 - DNA, 60 bp, Artificial
  Synthetic oligonucleotide
ccgtggttggattatctgcgttgagaaccttggcataagtgtcgtttgcagattggcaac

SEQ ID NO: 363522 - DNA, 51 bp, Artificial
  Synthetic oligonucleotide
ccgtggttgtttgtacggctgggttcggcttccgttatctaactggtacgg

SEQ ID NO: 363523 - DNA, 55 bp, Artificial
  Synthetic oligonucleotide
ccgtggtttcctcaagaaggtaccatagacattaagagatggcgtagagtaggag

SEQ ID NO: 363524 - DNA, 55 bp, Artificial
  Synthetic oligonucleotide
ccgtgtaacatcgggggggtcggcaacaacactctgacttgccccacggattgct

SEQ ID NO: 363525 - DNA, 54 bp, Artificial
  Synthetic oligonucleotide
ccgtgtaactcgacacgacgcgacattcgcgcgtagacgacatatgtgctcccc

SEQ ID NO: 363526 - DNA, 60 bp, Artificial
  Synthetic oligonucleotide
ccgtgtaaggtccagtcatttgagcagcggcatgatatctctcatgttggcaaggtcatg

SEQ ID NO: 363527 - DNA, 55 bp, Artificial
  Synthetic oligonucleotide
ccgtgtaaggttgatttacatacacaggcaatagaaggggcatggggttctggtg

SEQ ID NO: 363528 - DNA, 55 bp, Artificial
  Synthetic oligonucleotide
ccgtgtacctcaagtatcgtaagttgctgcctaaacagctgcagcgtaatactat

SEQ ID NO: 363529 - DNA, 59 bp, Artificial
  Synthetic oligonucleotide
ccgtgtacgctgccgtgttgctgcttatgctattgttttgggttgctatactcccccca

SEQ ID NO: 363530 - DNA, 55 bp, Artificial
  Synthetic oligonucleotide
ccgtgtacttccggcagaatgaacggactggcgaagtcggccgggagttcgtgcc

SEQ ID NO: 363531 - DNA, 55 bp, Artificial
  Synthetic oligonucleotide
ccgtgtatatggcttattctgggaaacaatacaagtgtgtggccgaggcttacgc

SEQ ID NO: 363532 - DNA, 51 bp, Artificial
  Synthetic oligonucleotide
ccgtgtatcttttaaacttggttttcaataaacaaggccgtgggagtttca

SEQ ID NO: 363533 - DNA, 55 bp, Artificial
  Synthetic oligonucleotide
ccgtgtatgcgacaagttcattctaaaacacaagtgcaaggtgatattagtgagg

SEQ ID NO: 363534 - DNA, 53 bp, Artificial
  Synthetic oligonucleotide
ccgtgtattcctcgtttatgtaccgatcatacaggcaacgacttcgggcttaa

SEQ ID NO: 363535 - DNA, 55 bp, Artificial
  Synthetic oligonucleotide
ccgtgtcacagaggtatggagcatcgcttccgtggtattcctagaggtctcattg

SEQ ID NO: 363536 - DNA, 58 bp, Artificial
  Synthetic oligonucleotide
ccgtgtcatacgggaattatacggagaagtattgtgaatggggagccatatccgtctc

SEQ ID NO: 363537 - DNA, 53 bp, Artificial
  Synthetic oligonucleotide
ccgtgtcccacatagcggggctgttgggccattcaggcttgcgaatcttagtg

SEQ ID NO: 363538 - DNA, 52 bp, Artificial
  Synthetic oligonucleotide
ccgtgtcccggcggcgtacgctagccagggctacaaggtgttggtcttgaac

SEQ ID NO: 363539 - DNA, 55 bp, Artificial
  Synthetic oligonucleotide
ccgtgtcgcagtagactgtagctttgtacttgatcatgcgaacgggtttcccgtc

SEQ ID NO: 363540 - DNA, 55 bp, Artificial
  Synthetic oligonucleotide
ccgtgtcgcgtcaatctacgttgaggttgatagtgtaacatacgacggttcacag

SEQ ID NO: 363541 - DNA, 57 bp, Artificial
  Synthetic oligonucleotide
ccgtgtcttggtttgcctctacgggaggccgcgattctaagatcgatgtgtggagtt

SEQ ID NO: 363542 - DNA, 50 bp, Artificial
  Synthetic oligonucleotide
ccgtgtcttggtttgcttccactggcggacgcgattctaagatcgatgtg

SEQ ID NO: 363543 - DNA, 53 bp, Artificial
  Synthetic oligonucleotide
ccgtgtgatgacgtttgaaaaggcatgcgaacgtgagggcaaatcagtcgtta

SEQ ID NO: 363544 - DNA, 55 bp, Artificial
  Synthetic oligonucleotide
ccgtgtgcacgaccccagcttcttggacagaccacggtccttggtcacgttccag

SEQ ID NO: 363545 - DNA, 60 bp, Artificial
  Synthetic oligonucleotide
ccgtgtggccgaatccgtctgcactaattgtgtagtggccccatgtgggcctcatttcca

SEQ ID NO: 363546 - DNA, 57 bp, Artificial
  Synthetic oligonucleotide
ccgtgtgggtgacagtccgcaaagttcctgcctcatcggacttatccgttaccgcca

SEQ ID NO: 363547 - DNA, 56 bp, Artificial
  Synthetic oligonucleotide
ccgtgtggtaagatcacatgtaaacgttgtatggttgagacacctgacattattga

SEQ ID NO: 363548 - DNA, 54 bp, Artificial
  Synthetic oligonucleotide
ccgtgtgtagccttgaatagacgaggcaaatagctctgcacgctgctattaaaa

SEQ ID NO: 363549 - DNA, 55 bp, Artificial
  Synthetic oligonucleotide
ccgtgtgtgcgggcaataatatatacgtactgacaggtaatgatacgttcggcgt

SEQ ID NO: 363550 - DNA, 60 bp, Artificial
  Synthetic oligonucleotide
ccgtgtgtgtcatgtggaacagagaccacttggtgactgaatcaagggctagtggcactg

SEQ ID NO: 363551 - DNA, 55 bp, Artificial
  Synthetic oligonucleotide
ccgtgttgattcagaagcacgtaacctgaaagtgtttaacgaatggatatccgct

SEQ ID NO: 363552 - DNA, 60 bp, Artificial
  Synthetic oligonucleotide
ccgtgttgctgtgtcacttatgatgatggatcgccagttttgtcagaattcaaagcacca

SEQ ID NO: 363553 - DNA, 55 bp, Artificial
  Synthetic oligonucleotide
ccgtgtttccgcttacgcatatgtctgtctctccaccgtcctccggtatagatag

SEQ ID NO: 363554 - DNA, 51 bp, Artificial
  Synthetic oligonucleotide
ccgtgtttccgtagaacggttttacgtacacggagagtgatgtaacagcgt

SEQ ID NO: 363555 - DNA, 51 bp, Artificial
  Synthetic oligonucleotide
ccgtgtttcgatttcaatgccttaaagaaaacgtgcgctgagaggaccttc

SEQ ID NO: 363556 - DNA, 55 bp, Artificial
  Synthetic oligonucleotide
ccgtgtttcgtacacgtgaaaatggacgctgtatttgtttgagtaacgctgtatc

SEQ ID NO: 363557 - DNA, 56 bp, Artificial
  Synthetic oligonucleotide
ccgtgtttggggtgaccgcacttgttctgccgactctaagtgggcattcaagaacg

SEQ ID NO: 363558 - DNA, 50 bp, Artificial
  Synthetic oligonucleotide
ccgtgttttgagcacgacgattctccatcgacatcggctacttgccctct

SEQ ID NO: 363559 - DNA, 53 bp, Artificial
  Synthetic oligonucleotide
ccgttaaaaattccagactatcgaatcctaaattggaacaccaagattaagga

SEQ ID NO: 363560 - DNA, 60 bp, Artificial
  Synthetic oligonucleotide
ccgttaaagtcgaatgggatgaatacatcagcgaagttgtatggtatgatgaacgttgat

SEQ ID NO: 363561 - DNA, 58 bp, Artificial
  Synthetic oligonucleotide
ccgttaaatatcttcagctagtagaaaagacatattctccagacactctcgggtacga

SEQ ID NO: 363562 - DNA, 54 bp, Artificial
  Synthetic oligonucleotide
ccgttaaccataagtagcggttcttctgacctagttaatgtagatttctctacc

SEQ ID NO: 363563 - DNA, 52 bp, Artificial
  Synthetic oligonucleotide
ccgttaaccccgggagccagtagtgtactgaacaggactttgttgggagaag

SEQ ID NO: 363564 - DNA, 53 bp, Artificial
  Synthetic oligonucleotide
ccgttaaccgcccacctactccgagaagcctagtacctaattggatttatcaa

SEQ ID NO: 363565 - DNA, 55 bp, Artificial
  Synthetic oligonucleotide
ccgttaacgcaatctactgtgtgccttagtggaagtgaacattcgtttgggcgga

SEQ ID NO: 363566 - DNA, 53 bp, Artificial
  Synthetic oligonucleotide
ccgttaacggaatacgacgccttaaacgcggaatcatcaacactaacgcttaa

SEQ ID NO: 363567 - DNA, 53 bp, Artificial
  Synthetic oligonucleotide
ccgttaactaattggtggtctgattttcatcggtcgtcgtatttatcggaccc

SEQ ID NO: 363568 - DNA, 51 bp, Artificial
  Synthetic oligonucleotide
ccgttaactcgcggggttagtaccgacgtataatacccatcaaaacttgaa

SEQ ID NO: 363569 - DNA, 54 bp, Artificial
  Synthetic oligonucleotide
ccgttaactcgttctcttactccgagtgcgtgagttaaccgttaacttgatctc

SEQ ID NO: 363570 - DNA, 59 bp, Artificial
  Synthetic oligonucleotide
ccgttaactgagacgccgtcgatggaaattgcagaaatatctcagttaggtcatgggaa

SEQ ID NO: 363571 - DNA, 52 bp, Artificial
  Synthetic oligonucleotide
ccgttaattcttataccaatacgccctataccggggcgttggggctccttga

SEQ ID NO: 363572 - DNA, 58 bp, Artificial
  Synthetic oligonucleotide
ccgttaattgagccgccgttgacggaaactgcagaacgatctcagttaggtcatggga

SEQ ID NO: 363573 - DNA, 58 bp, Artificial
  Synthetic oligonucleotide
ccgttacaacctatgacgtcataggtcctatataagagatgacggactcaccggtctc

SEQ ID NO: 363574 - DNA, 58 bp, Artificial
  Synthetic oligonucleotide
ccgttacaagatgcaatttgtcaagagaactcagacatttactccggaccaaagatac

SEQ ID NO: 363575 - DNA, 55 bp, Artificial
  Synthetic oligonucleotide
ccgttaccacacggaagggtaagaagtcgctcgtgaccaacgtgccaactctgac

SEQ ID NO: 363576 - DNA, 55 bp, Artificial
  Synthetic oligonucleotide
ccgttaccacattcaaggataatgtaaatctgatgacttacggcgacgacaacat

SEQ ID NO: 363577 - DNA, 58 bp, Artificial
  Synthetic oligonucleotide
ccgttaccagtaaattttgcatgtgcctattgatagttactgtagttctactgcctct

SEQ ID NO: 363578 - DNA, 52 bp, Artificial
  Synthetic oligonucleotide
ccgttaccccatatgattttggagtatcggcctctatctgggagtaccagat

SEQ ID NO: 363579 - DNA, 59 bp, Artificial
  Synthetic oligonucleotide
ccgttaccggtatatattctgtgggatggcccgtgtgcgtgaagttttctcatcgatca

SEQ ID NO: 363580 - DNA, 52 bp, Artificial
  Synthetic oligonucleotide
ccgttaccgttcctggctatactcccagaacaaagaccggaggcgttcaacc

SEQ ID NO: 363581 - DNA, 55 bp, Artificial
  Synthetic oligonucleotide
ccgttacgacaagacgcaccgttctcccgctgacgtcgtgtcgtctgccttctac

SEQ ID NO: 363582 - DNA, 55 bp, Artificial
  Synthetic oligonucleotide
ccgttacgcatgcgctaattgtagtacactaccaccgggtagtgccttatacccc

SEQ ID NO: 363583 - DNA, 55 bp, Artificial
  Synthetic oligonucleotide
ccgttactatgctgcatgggaatattcacgtcatttctctccgtgtgatatgatt

SEQ ID NO: 363584 - DNA, 53 bp, Artificial
  Synthetic oligonucleotide
ccgttactggagacgtggaaaaagcctgactatgaaccacccgtggtccatgg

SEQ ID NO: 363585 - DNA, 55 bp, Artificial
  Synthetic oligonucleotide
ccgttacttgtctgtgactgactatagtgtaattaagtctagagattccgagtgt

SEQ ID NO: 363586 - DNA, 60 bp, Artificial
  Synthetic oligonucleotide
ccgttagacaagatcttgagagacagcttggagaattacgtaatgagtttaatgcattgt

SEQ ID NO: 363587 - DNA, 60 bp, Artificial
  Synthetic oligonucleotide
ccgttagacgctcccatcgttcaacggacacctcaccgctcatacggcagtcgctgcact

SEQ ID NO: 363588 - DNA, 53 bp, Artificial
  Synthetic oligonucleotide
ccgttagatttggtgccgtaccttttcgcgttcccatcttgcccctggagtcc

SEQ ID NO: 363589 - DNA, 55 bp, Artificial
  Synthetic oligonucleotide
ccgttatagtactacctgcacgccatgcatatgatgcctataagacttttatgcg

SEQ ID NO: 363590 - DNA, 58 bp, Artificial
  Synthetic oligonucleotide
ccgttatatattgaatggatcaacttaccacgcatgtccgagaattccgcacgtaaac

SEQ ID NO: 363591 - DNA, 59 bp, Artificial
  Synthetic oligonucleotide
ccgttatatctgcaatagttgattttgctactataaaagcaatacgtgatacttacggc

SEQ ID NO: 363592 - DNA, 58 bp, Artificial
  Synthetic oligonucleotide
ccgttatattgagatataacgaaaagtcacgtatgaaagagacatgaacgtgacggag

SEQ ID NO: 363593 - DNA, 60 bp, Artificial
  Synthetic oligonucleotide
ccgttatcagctacgactgagacaatgtgtagccatgtttatggctatgtcacgtcttgt

SEQ ID NO: 363594 - DNA, 57 bp, Artificial
  Synthetic oligonucleotide
ccgttatccgctcttgtacttcgaaaagcccagtatcaccttggaatcttcgatgcg

SEQ ID NO: 363595 - DNA, 57 bp, Artificial
  Synthetic oligonucleotide
ccgttatccgcttgggtacttcgagaaacctagtatcatcttggaatcttcgatgcg

SEQ ID NO: 363596 - DNA, 56 bp, Artificial
  Synthetic oligonucleotide
ccgttatccgcttgggtacttcgagaagcctagtaccacctttggatcttcgatgc

SEQ ID NO: 363597 - DNA, 56 bp, Artificial
  Synthetic oligonucleotide
ccgttatccgctttggtacttcgagaagcctagtaccactttggaattctcgatgc

SEQ ID NO: 363598 - DNA, 55 bp, Artificial
  Synthetic oligonucleotide
ccgttatcggacatctcgttcaattgtgatccagaacccatcatacgaaaaccga

SEQ ID NO: 363599 - DNA, 55 bp, Artificial
  Synthetic oligonucleotide
ccgttatctaggcggtattcggcccttgtgacatcaccaacttcgatcaagaccc

SEQ ID NO: 363600 - DNA, 55 bp, Artificial
  Synthetic oligonucleotide
ccgttatggaaatgaacccagctttaaaacagtatggctcgtttgcagaagctag

SEQ ID NO: 363601 - DNA, 57 bp, Artificial
  Synthetic oligonucleotide
ccgttatggctgattcaactacaccgtctgagaaccatggtgctgatgcaaaagggt

SEQ ID NO: 363602 - DNA, 55 bp, Artificial
  Synthetic oligonucleotide
ccgttattgagtacctcctgtttgacgtaggtctagctaatgctcttttgatcac

SEQ ID NO: 363603 - DNA, 55 bp, Artificial
  Synthetic oligonucleotide
ccgttcaaagagaaaacgcttcgctcaataaggtcattaccgctctgggtaagga

SEQ ID NO: 363604 - DNA, 57 bp, Artificial
  Synthetic oligonucleotide
ccgttcaacgagtcgtcaagttacggctcgtcactgataacgcattacggcaaacgc

SEQ ID NO: 363605 - DNA, 55 bp, Artificial
  Synthetic oligonucleotide
ccgttcaacgtctttacttacattggacgtatcacaatgacacctggttctgatg

SEQ ID NO: 363606 - DNA, 55 bp, Artificial
  Synthetic oligonucleotide
ccgttcacagaatgtgggacgcattgtgtatgcggtgcccgctatgatacttctg

SEQ ID NO: 363607 - DNA, 60 bp, Artificial
  Synthetic oligonucleotide
ccgttcaccttcgtttacttgtttgcattcaatcaatctgcatcaactccgagctggcgt

SEQ ID NO: 363608 - DNA, 57 bp, Artificial
  Synthetic oligonucleotide
ccgttcacggttttagatgtatgctagcagttaaatatcttcagttagtagaaaaga

SEQ ID NO: 363609 - DNA, 55 bp, Artificial
  Synthetic oligonucleotide
ccgttcagagcacgacgtggacaccaacaccgacgctgttctgtggctggtcggt

SEQ ID NO: 363610 - DNA, 55 bp, Artificial
  Synthetic oligonucleotide
ccgttcagagcacttacgttcttctgtagcgtatggctgtgcgatactacacgaa

SEQ ID NO: 363611 - DNA, 55 bp, Artificial
  Synthetic oligonucleotide
ccgttcaggcatggtggacctccaacaacggcgtccaagcgcaagcagcatttgt

SEQ ID NO: 363612 - DNA, 51 bp, Artificial
  Synthetic oligonucleotide
ccgttcatgtacaatgccatggcgggtgcctacccctcatactcgacaaat

SEQ ID NO: 363613 - DNA, 51 bp, Artificial
  Synthetic oligonucleotide
ccgttccaaaatgataattcacctgtatatactattagcattgatactaat

SEQ ID NO: 363614 - DNA, 54 bp, Artificial
  Synthetic oligonucleotide
ccgttccaaatttggttgttcgagcgtagcccttccaacttctgcttcgtttga

SEQ ID NO: 363615 - DNA, 55 bp, Artificial
  Synthetic oligonucleotide
ccgttccagcaaagataccgcagaataaacacaagtccagacatcattggaatcc

SEQ ID NO: 363616 - DNA, 55 bp, Artificial
  Synthetic oligonucleotide
ccgttccagccgaccacggggcgcacctctctttacgcggtctccccgtctgtgc

SEQ ID NO: 363617 - DNA, 51 bp, Artificial
  Synthetic oligonucleotide
ccgttcccaaaacaggcactttaggacccactactggtgtaaagggtagta

SEQ ID NO: 363618 - DNA, 54 bp, Artificial
  Synthetic oligonucleotide
ccgttccccgtgctgattccacaggatggtgtgtgtaccgtcgaaagggtttac

SEQ ID NO: 363619 - DNA, 55 bp, Artificial
  Synthetic oligonucleotide
ccgttccgactgatgaactgtaaatgacacgtgatgcagtgttgccctaatccct

SEQ ID NO: 363620 - DNA, 52 bp, Artificial
  Synthetic oligonucleotide
ccgttcctcctacaggtaaggttgtggttaacgggtggactctcatcgagtt

SEQ ID NO: 363621 - DNA, 53 bp, Artificial
  Synthetic oligonucleotide
ccgttcgaaaaattatcaaggtaggcggaggtcacgtcttctcaacctttgac

SEQ ID NO: 363622 - DNA, 56 bp, Artificial
  Synthetic oligonucleotide
ccgttcgaaagtcggatgtgatgacggaagctctgcagacaaacggtctttacggg

SEQ ID NO: 363623 - DNA, 54 bp, Artificial
  Synthetic oligonucleotide
ccgttcgaactactcgggatggtaccagaattaaggacagtgacctcgaataag

SEQ ID NO: 363624 - DNA, 55 bp, Artificial
  Synthetic oligonucleotide
ccgttcgaatgagtttctatatcgtaacacgcaatgaccgggacaatctcgcgag

SEQ ID NO: 363625 - DNA, 59 bp, Artificial
  Synthetic oligonucleotide
ccgttcgacataaagcgctgcgagagccttgggatagggtctgtacttggtggcgcaaa

SEQ ID NO: 363626 - DNA, 53 bp, Artificial
  Synthetic oligonucleotide
ccgttcgaccttccaatgaacttatatccagggttcctagggatcattttggg

SEQ ID NO: 363627 - DNA, 56 bp, Artificial
  Synthetic oligonucleotide
ccgttcgatgtacagacggtgtcttttaccctataaggatgttgttgaaatgccta

SEQ ID NO: 363628 - DNA, 58 bp, Artificial
  Synthetic oligonucleotide
ccgttcgcagcctttactaagggctctttgccacaagttcgtaatgggatgacataca

SEQ ID NO: 363629 - DNA, 51 bp, Artificial
  Synthetic oligonucleotide
ccgttcgccaacaggttgttagaaacccctgcaaggaaccccactcctcgg

SEQ ID NO: 363630 - DNA, 55 bp, Artificial
  Synthetic oligonucleotide
ccgttcgcggtggcctcgaacgaaggaatgtccccgtgtcatccggagacaattg

SEQ ID NO: 363631 - DNA, 55 bp, Artificial
  Synthetic oligonucleotide
ccgttcggccagaatgtcctcgctgatttgtccaacgacccaagcatttagcgat

SEQ ID NO: 363632 - DNA, 55 bp, Artificial
  Synthetic oligonucleotide
ccgttcggtcattacttggcagccaatacaaacgcctgaaagacgcggttcggcg

SEQ ID NO: 363633 - DNA, 55 bp, Artificial
  Synthetic oligonucleotide
ccgttcggtcgctggttcgagtccagcaagaaccataaataaatggagagtgaaa

SEQ ID NO: 363634 - DNA, 53 bp, Artificial
  Synthetic oligonucleotide
ccgttcgtcttaccccgaaggacgtccgtactcttaccactgatgtgcccgcc

SEQ ID NO: 363635 - DNA, 60 bp, Artificial
  Synthetic oligonucleotide
ccgttcgtttatccggagcatttaacgcctcagctgcagcgtcgttagctgtctggcaac

SEQ ID NO: 363636 - DNA, 52 bp, Artificial
  Synthetic oligonucleotide
ccgttcgtttctgacctctctcggatacggattcgaaggtgacatgttgact

SEQ ID NO: 363637 - DNA, 55 bp, Artificial
  Synthetic oligonucleotide
ccgttctaacctcatcattagccacatcgtaaaagtaagtggctggatccccacc

SEQ ID NO: 363638 - DNA, 55 bp, Artificial
  Synthetic oligonucleotide
ccgttctatgaagatgggtcttctccaaaggtaacaataggcagtaacgaggtgc

SEQ ID NO: 363639 - DNA, 60 bp, Artificial
  Synthetic oligonucleotide
ccgttctcggatgagaaattcaaacctctcttctctgatgttcacctcgctgaggagaat

SEQ ID NO: 363640 - DNA, 59 bp, Artificial
  Synthetic oligonucleotide
ccgttctctatctctaaacctatctaccgccttcatagtcattcgagttctacaactgc

SEQ ID NO: 363641 - DNA, 56 bp, Artificial
  Synthetic oligonucleotide
ccgttctgcgctacgtggtttgccccctgtcgatcgaacatactgcttcgacgggt

SEQ ID NO: 363642 - DNA, 55 bp, Artificial
  Synthetic oligonucleotide
ccgttctgctactgccttcaacaattaaacttataggcctcaatggccgcgcagc

SEQ ID NO: 363643 - DNA, 57 bp, Artificial
  Synthetic oligonucleotide
ccgttcttgacataatgtgcctctataattaacaaatctaagcaagcaaggttgatc

SEQ ID NO: 363644 - DNA, 56 bp, Artificial
  Synthetic oligonucleotide
ccgttgaacacatggaaactactatgcggtccccggtctttacagacaactcatcc

SEQ ID NO: 363645 - DNA, 60 bp, Artificial
  Synthetic oligonucleotide
ccgttgaagtcgaatggaatgagcaggtctccgtatgtgtacttgacgatcccatcatac

SEQ ID NO: 363646 - DNA, 55 bp, Artificial
  Synthetic oligonucleotide
ccgttgaagtcgaatggtggaaccatctggacgtatgtgtatggtatgtcgcact

SEQ ID NO: 363647 - DNA, 54 bp, Artificial
  Synthetic oligonucleotide
ccgttgacactacgttaagtgttagtgcttacaggacttcggtccgtggttcac

SEQ ID NO: 363648 - DNA, 55 bp, Artificial
  Synthetic oligonucleotide
ccgttgactctttaggcgcaaacgtggtatttactgatgcaccacaatcgactga

SEQ ID NO: 363649 - DNA, 54 bp, Artificial
  Synthetic oligonucleotide
ccgttgaggaaacttacgagcccaatacattgggccacgatttaattagggatc

SEQ ID NO: 363650 - DNA, 52 bp, Artificial
  Synthetic oligonucleotide
ccgttgaggcccccacggcccaagcttcgtctaggatgcaatagacgaggtg

SEQ ID NO: 363651 - DNA, 55 bp, Artificial
  Synthetic oligonucleotide
ccgttgagggtagaggatttcgacaggcgtatactgagttcatgaatgcagcgtg

SEQ ID NO: 363652 - DNA, 56 bp, Artificial
  Synthetic oligonucleotide
ccgttgatgtgtggtttgaccatgacaaagctaaagcctttccatacacaaactgg

SEQ ID NO: 363653 - DNA, 55 bp, Artificial
  Synthetic oligonucleotide
ccgttgcacccatgtgtgcggaatacaatggtctgagattggcatcacaccaggg

SEQ ID NO: 363654 - DNA, 50 bp, Artificial
  Synthetic oligonucleotide
ccgttgcacgcgacggcttttgctctgtcaaccccggacagtctgtacgg

SEQ ID NO: 363655 - DNA, 55 bp, Artificial
  Synthetic oligonucleotide
ccgttgcatttcttaaaatttgtctgtttgttgcggttgtgactagacctagtgg

SEQ ID NO: 363656 - DNA, 60 bp, Artificial
  Synthetic oligonucleotide
ccgttgccatgccagtcttagcgctcctaactccgggaatgagggccttgtatctggaca

SEQ ID NO: 363657 - DNA, 56 bp, Artificial
  Synthetic oligonucleotide
ccgttgcccttatacaagagtttgccagaagagtagagaaaggtggaattcagagt

SEQ ID NO: 363658 - DNA, 56 bp, Artificial
  Synthetic oligonucleotide
ccgttgccgccaccctaggttttggggcgtacatgtctaaggcacatggtgttgac

SEQ ID NO: 363659 - DNA, 55 bp, Artificial
  Synthetic oligonucleotide
ccgttgcgagcttgactcagaggctcaaacaggtaactcctgggcggattgccac

SEQ ID NO: 363660 - DNA, 54 bp, Artificial
  Synthetic oligonucleotide
ccgttgctaaagaattcatctgttgtcgtacctctattttcgtgggacaaccgt

SEQ ID NO: 363661 - DNA, 55 bp, Artificial
  Synthetic oligonucleotide
ccgttgctaccacacactcctggacccctaagagaaaccgctccatcctcaacac

SEQ ID NO: 363662 - DNA, 56 bp, Artificial
  Synthetic oligonucleotide
ccgttgctagagggtgcgctttatatagcgagtgcctggatggtaggtccaaggcc

SEQ ID NO: 363663 - DNA, 53 bp, Artificial
  Synthetic oligonucleotide
ccgttggaaataccctgcaaaagagctaagttatagcatcgtagataactata

SEQ ID NO: 363664 - DNA, 53 bp, Artificial
  Synthetic oligonucleotide
ccgttggaacacgagtttccggaaactcttcacggtttccgttgtatgctcgc

SEQ ID NO: 363665 - DNA, 55 bp, Artificial
  Synthetic oligonucleotide
ccgttggaactgcacaatcagcgttagttaccaaacatgttgtaaagggcaagtg

SEQ ID NO: 363666 - DNA, 58 bp, Artificial
  Synthetic oligonucleotide
ccgttggaggtgtcctgcctatgtgcgtacgtcacggaccgtgccgcagcaaccgccc

SEQ ID NO: 363667 - DNA, 59 bp, Artificial
  Synthetic oligonucleotide
ccgttggatctaatgttccgacgattggcggtggttctgatgcttcgattgtttcacta

SEQ ID NO: 363668 - DNA, 55 bp, Artificial
  Synthetic oligonucleotide
ccgttggatggctgatatatggccacttcaacagggtcctcagctctaccctcta

SEQ ID NO: 363669 - DNA, 55 bp, Artificial
  Synthetic oligonucleotide
ccgttggatttccagatcggcaggaatcaatatgattgcaacgtattccgagcag

SEQ ID NO: 363670 - DNA, 55 bp, Artificial
  Synthetic oligonucleotide
ccgttggcactatgcccaactgtatattgccccaggcaagatatttaaatacggg

SEQ ID NO: 363671 - DNA, 49 bp, Artificial
  Synthetic oligonucleotide
ccgttggcctaaaaaccccgttccatttttcggcggattgctgtaaaac

SEQ ID NO: 363672 - DNA, 55 bp, Artificial
  Synthetic oligonucleotide
ccgttggcggtggaaggcgtccatatgccaagctgactaactttaccgttggcgg

SEQ ID NO: 363673 - DNA, 53 bp, Artificial
  Synthetic oligonucleotide
ccgttgggaatatcaccaactacatgccctttgggttgtcccgtaagaaggta

SEQ ID NO: 363674 - DNA, 58 bp, Artificial
  Synthetic oligonucleotide
ccgttgggacgcgtggtacacgtgtactccagcctccgtccattctgaaacgcatcgc

SEQ ID NO: 363675 - DNA, 50 bp, Artificial
  Synthetic oligonucleotide
ccgttgggactgtaggttaagcaacctacgatgcgtaccaaagctaatta

SEQ ID NO: 363676 - DNA, 50 bp, Artificial
  Synthetic oligonucleotide
ccgttgggcgtgtgttccggtgtcggtttcgacgatacacccgtgccgaa

SEQ ID NO: 363677 - DNA, 54 bp, Artificial
  Synthetic oligonucleotide
ccgttggggcacggaaaggtatatcaaccgaatgtttagccgtcgagagtttca

SEQ ID NO: 363678 - DNA, 58 bp, Artificial
  Synthetic oligonucleotide
ccgttgggtagccgagttgtaaggctaggatctctacgactgagacttatacacatag

SEQ ID NO: 363679 - DNA, 54 bp, Artificial
  Synthetic oligonucleotide
ccgttgggttacattaaggtgtgtaaccagctgggtggtacctggaggtcattc

SEQ ID NO: 363680 - DNA, 55 bp, Artificial
  Synthetic oligonucleotide
ccgttggtctcagtgaaattggacaagacaagcactttgaccaatgggtgttgcc

SEQ ID NO: 363681 - DNA, 57 bp, Artificial
  Synthetic oligonucleotide
ccgttggtggttcgactgccggaaaatttatcaccatgatgccggtcaatagttcac

SEQ ID NO: 363682 - DNA, 54 bp, Artificial
  Synthetic oligonucleotide
ccgttgtaaagatacttttacaatgtaattcatgttagcttgtaactttttgtc

SEQ ID NO: 363683 - DNA, 53 bp, Artificial
  Synthetic oligonucleotide
ccgttgtaatttctagggtccctaggatataaataacacgtcaccgaggctgg

SEQ ID NO: 363684 - DNA, 55 bp, Artificial
  Synthetic oligonucleotide
ccgttgtactttgtttcgcgcttggtataatcgctgggggtcaaagatgagtgtt

SEQ ID NO: 363685 - DNA, 55 bp, Artificial
  Synthetic oligonucleotide
ccgttgtatgctcgccgtgaaataccttcaggctgttcgagagtcgtacgatcct

SEQ ID NO: 363686 - DNA, 58 bp, Artificial
  Synthetic oligonucleotide
ccgttgtcaaaaatggacatgggagttcctctattagcaattggatgttactcacaag

SEQ ID NO: 363687 - DNA, 60 bp, Artificial
  Synthetic oligonucleotide
ccgttgtccagtagatgttgctcttacattggatagattctacactgggaaggtggtgac

SEQ ID NO: 363688 - DNA, 56 bp, Artificial
  Synthetic oligonucleotide
ccgttgtcctaaccagttcgtttaattgggccatagacatggtaatgttggactca

SEQ ID NO: 363689 - DNA, 55 bp, Artificial
  Synthetic oligonucleotide
ccgttgtgattgctacgatgtataatgttttacgccgtgcttactaccccataga

SEQ ID NO: 363690 - DNA, 50 bp, Artificial
  Synthetic oligonucleotide
ccgttgtggtacatgatgtcgaacacgataatcgtttgatttaccatttc

SEQ ID NO: 363691 - DNA, 57 bp, Artificial
  Synthetic oligonucleotide
ccgttgtggttgccacttggggtcgcaggacaagacttgtacagctttgactcaacg

SEQ ID NO: 363692 - DNA, 54 bp, Artificial
  Synthetic oligonucleotide
ccgttgttaagggaaaatacaacaccactctgctcaacggaagtgcgttccaac

SEQ ID NO: 363693 - DNA, 55 bp, Artificial
  Synthetic oligonucleotide
ccgttgttatcagtgttcgcgttacaagaaatcatgcagaaagtgagacaggtgc

SEQ ID NO: 363694 - DNA, 60 bp, Artificial
  Synthetic oligonucleotide
ccgttgttgagacaagatcacaacatcctctattctgattgtgttgcctttaaacatggc

SEQ ID NO: 363695 - DNA, 57 bp, Artificial
  Synthetic oligonucleotide
ccgttgttggtgccgcaattgcggcacctgtagcgggccaacaaaatgtaattgacc

SEQ ID NO: 363696 - DNA, 56 bp, Artificial
  Synthetic oligonucleotide
ccgttgtttactctgcaatggaaacggatgaaaatacagtcgtaactgttacaata

SEQ ID NO: 363697 - DNA, 54 bp, Artificial
  Synthetic oligonucleotide
ccgttgtttgcgaataagaaattcgctaagatattcccttcaaatccgttgaag

SEQ ID NO: 363698 - DNA, 56 bp, Artificial
  Synthetic oligonucleotide
ccgtttaaaggactgtcaactgatagaaagatggacgaagtatcacaagtgggaat

SEQ ID NO: 363699 - DNA, 50 bp, Artificial
  Synthetic oligonucleotide
ccgtttaacgtcctttccgaaagtgggagtgtaagttcaagacgaatcgt

SEQ ID NO: 363700 - DNA, 58 bp, Artificial
  Synthetic oligonucleotide
ccgtttacacattccggaaagtttgtgattggtgtagttatcgacagtatgtatgtca

SEQ ID NO: 363701 - DNA, 53 bp, Artificial
  Synthetic oligonucleotide
ccgtttacacgaaccacccgttgatatcggtcatatatataccggtggtttta

SEQ ID NO: 363702 - DNA, 54 bp, Artificial
  Synthetic oligonucleotide
ccgtttaccacgagaccaacccggaagcgtacatcgcagcgttacctgaagcgg

SEQ ID NO: 363703 - DNA, 52 bp, Artificial
  Synthetic oligonucleotide
ccgtttaccagatcctaataaatttggatttcctgacacctccttttataac

SEQ ID NO: 363704 - DNA, 59 bp, Artificial
  Synthetic oligonucleotide
ccgtttagcaatcctgtgctgtgctttgatagaggggggcttcaagggtgacgaattga

SEQ ID NO: 363705 - DNA, 55 bp, Artificial
  Synthetic oligonucleotide
ccgtttagcatgatttctggtgatacgtcaatcggagtatcatctattagagatc

SEQ ID NO: 363706 - DNA, 55 bp, Artificial
  Synthetic oligonucleotide
ccgtttatggactcctggagggtccaagggctgatcgcacttggcctcagacccc

SEQ ID NO: 363707 - DNA, 60 bp, Artificial
  Synthetic oligonucleotide
ccgtttattggccattggtgtcgcgcatatcaacgcaactgcactgcacgcgtggtccaa

SEQ ID NO: 363708 - DNA, 60 bp, Artificial
  Synthetic oligonucleotide
ccgtttattgtctacaaaagcttatctaggtattgcaatgatcaacacgtgtcctctatg

SEQ ID NO: 363709 - DNA, 59 bp, Artificial
  Synthetic oligonucleotide
ccgtttcaactgcaaacatagcacttagctggagttcagtagaacacagaggtaacaaa

SEQ ID NO: 363710 - DNA, 55 bp, Artificial
  Synthetic oligonucleotide
ccgtttcacaatgtcagcaaatacgcatttgggaattgccccatgtacgttggag

SEQ ID NO: 363711 - DNA, 55 bp, Artificial
  Synthetic oligonucleotide
ccgtttcacggggttccgcaaagctgagatggttcgtcgaaagaaatatggtagc

SEQ ID NO: 363712 - DNA, 55 bp, Artificial
  Synthetic oligonucleotide
ccgtttcagtgacctgcgtgtggggttccgtgtcttggtttgcctccactggagg

SEQ ID NO: 363713 - DNA, 52 bp, Artificial
  Synthetic oligonucleotide
ccgtttccgagtatacagggtgcgttcacctcactggcaacaaatgacatca

SEQ ID NO: 363714 - DNA, 60 bp, Artificial
  Synthetic oligonucleotide
ccgtttcgatcagcacgtatctgtagaagcgctaagatttgagcactccatctacaaatc

SEQ ID NO: 363715 - DNA, 55 bp, Artificial
  Synthetic oligonucleotide
ccgtttctacggcaggtgcaaccgtggactcggattcgtccatgatccaccggac

SEQ ID NO: 363716 - DNA, 55 bp, Artificial
  Synthetic oligonucleotide
ccgtttctagatatattcggatcggtaaacgcttgcaggggaacattgaaggtgg

SEQ ID NO: 363717 - DNA, 58 bp, Artificial
  Synthetic oligonucleotide
ccgtttctggtatcattgtttagctagagggcaagtacagacaaactttgactcacag

SEQ ID NO: 363718 - DNA, 49 bp, Artificial
  Synthetic oligonucleotide
ccgtttcttaagggttcgggatcaacgggggaatgtactcctatccccc

SEQ ID NO: 363719 - DNA, 53 bp, Artificial
  Synthetic oligonucleotide
ccgtttcttatggtgagtggaccaaacgaattttagagttcggcttgataacc

SEQ ID NO: 363720 - DNA, 52 bp, Artificial
  Synthetic oligonucleotide
ccgtttgaattactcccctcgtgggggatatgggccgaagtccaacaaggcc

SEQ ID NO: 363721 - DNA, 55 bp, Artificial
  Synthetic oligonucleotide
ccgtttgacactgaacacaatatgctgtagaaatagccattcgacgagcttttgg

SEQ ID NO: 363722 - DNA, 55 bp, Artificial
  Synthetic oligonucleotide
ccgtttgacttcgagagatgtaattttccgctcctcgggtatcatcgtgggtaac

SEQ ID NO: 363723 - DNA, 57 bp, Artificial
  Synthetic oligonucleotide
ccgtttgcattgttgatttgcacgctatacacatgctcgtgaaagttgtcacatata

SEQ ID NO: 363724 - DNA, 54 bp, Artificial
  Synthetic oligonucleotide
ccgtttgctttgttctaggtggatttcctttagctgcggttctttagcagccgg

SEQ ID NO: 363725 - DNA, 56 bp, Artificial
  Synthetic oligonucleotide
ccgtttggctagcggttagctccttttgatgtatggtattgaatacaccacaactc

SEQ ID NO: 363726 - DNA, 55 bp, Artificial
  Synthetic oligonucleotide
ccgtttgtaaacgctgacacagttgagccaattaatgctgtcgcattcgacaacg

SEQ ID NO: 363727 - DNA, 55 bp, Artificial
  Synthetic oligonucleotide
ccgtttgtggaatacccggaaatatcaaaactggaagcgctatcgcagtacccat

SEQ ID NO: 363728 - DNA, 53 bp, Artificial
  Synthetic oligonucleotide
ccgttttaccacacacagatcctaacccaatctatcttacacagaacatagtg

SEQ ID NO: 363729 - DNA, 47 bp, Artificial
  Synthetic oligonucleotide
ccgttttatctttaccccgttccgttatttatccccaatccgttatt

SEQ ID NO: 363730 - DNA, 54 bp, Artificial
  Synthetic oligonucleotide
ccgttttatttgatgtctctagacttccagagtgggcctcccacctttaaagcg

SEQ ID NO: 363731 - DNA, 54 bp, Artificial
  Synthetic oligonucleotide
ccgttttcaactttgcgtcaaatgtgcagcgaagcacacgcaacacgtcttcgt

SEQ ID NO: 363732 - DNA, 51 bp, Artificial
  Synthetic oligonucleotide
ccgttttcattaaacggtagtcgtgtttgacacgctaagacctttacaaag

SEQ ID NO: 363733 - DNA, 55 bp, Artificial
  Synthetic oligonucleotide
ccgttttcggtcgaggcaaggtgagtacaagttcaaacaaactttgactgactca

SEQ ID NO: 363734 - DNA, 55 bp, Artificial
  Synthetic oligonucleotide
ccgttttgaaaattgtagaatatgtggaagtcattgtaatggctaacttccttcc

SEQ ID NO: 363735 - DNA, 55 bp, Artificial
  Synthetic oligonucleotide
ccgttttgacagtacgaaatgtcctgttcagacggttatcgtcatcccctccctc

SEQ ID NO: 363736 - DNA, 55 bp, Artificial
  Synthetic oligonucleotide
ccgttttgataacatttcagcactaccaacggatccgacatgtaaacttgacgcg

SEQ ID NO: 363737 - DNA, 55 bp, Artificial
  Synthetic oligonucleotide
ccgttttgcgaaatgaatctgccagttccgttttatcaaggccagcttgctctgc

SEQ ID NO: 363738 - DNA, 56 bp, Artificial
  Synthetic oligonucleotide
ccgttttgctgagggtggagttgcaagtaaaccaagtatttgtggagaagcaggcc

SEQ ID NO: 363739 - DNA, 55 bp, Artificial
  Synthetic oligonucleotide
ccgtttttgctgttctcgcgtgggaaccacttcgcagcgagaccgttcttgtcgt

SEQ ID NO: 363740 - DNA, 57 bp, Artificial
  Synthetic oligonucleotide
cctaaaaccaatagtggtatttgccaatcaagcgtgcgaagcaatcggcgttagtat

SEQ ID NO: 363741 - DNA, 55 bp, Artificial
  Synthetic oligonucleotide
cctaaaacccctcccgtgtgtccgttctcatgtccttatgatacttgtatattca

SEQ ID NO: 363742 - DNA, 52 bp, Artificial
  Synthetic oligonucleotide
cctaaaacgtagaaaattactactaaccataccgcattttgcatatttaccc

SEQ ID NO: 363743 - DNA, 60 bp, Artificial
  Synthetic oligonucleotide
cctaaaactccttgtactaagtgttattgcaaacgctgctgctatcattgtctagcttgc

SEQ ID NO: 363744 - DNA, 56 bp, Artificial
  Synthetic oligonucleotide
cctaaaactgcttgtagttcgtgttattgtaaagcctgtagctaccactgtacagt

SEQ ID NO: 363745 - DNA, 55 bp, Artificial
  Synthetic oligonucleotide
cctaaaactgtttgtaccaattgctatcgtaaaaagtgttgtcttcattgccaag

SEQ ID NO: 363746 - DNA, 55 bp, Artificial
  Synthetic oligonucleotide
cctaaaagagcaacagctcctagggctttggggctgctcaggaaaactcatctgc

SEQ ID NO: 363747 - DNA, 55 bp, Artificial
  Synthetic oligonucleotide
cctaaaagttccgtacgaacagtttcaactgcaccagaacttctggacgcgatcc

SEQ ID NO: 363748 - DNA, 58 bp, Artificial
  Synthetic oligonucleotide
cctaaaatgttcaggttctcagccattatcatatccaccacttcgactaactcctccg

SEQ ID NO: 363749 - DNA, 60 bp, Artificial
  Synthetic oligonucleotide
cctaaaattctgactagcggaggctagaaggagagagatgggtgcgagagcgtcagtatt

SEQ ID NO: 363750 - DNA, 60 bp, Artificial
  Synthetic oligonucleotide
cctaaaattgcttgtaataagtgctattgcaaagcttgctgctaccattgtctagtttgc

SEQ ID NO: 363751 - DNA, 54 bp, Artificial
  Synthetic oligonucleotide
cctaaacaaatttcgttcacattgtcagccgggagtaacgcccaacgtgcaacg

SEQ ID NO: 363752 - DNA, 52 bp, Artificial
  Synthetic oligonucleotide
cctaaacaatttgtacccgtgcaggttgttgattctaggtggaacaatcttc

SEQ ID NO: 363753 - DNA, 56 bp, Artificial
  Synthetic oligonucleotide
cctaaacacatatacttaaataattggcagattaaaaacataggccacttaatcca

SEQ ID NO: 363754 - DNA, 55 bp, Artificial
  Synthetic oligonucleotide
cctaaacatacacgtgcttggattccacgaccacccagagcaactggatacacac

SEQ ID NO: 363755 - DNA, 53 bp, Artificial
  Synthetic oligonucleotide
cctaaaccctcccatctctacaactgggttgtttgcaaccacccctccgacga

SEQ ID NO: 363756 - DNA, 55 bp, Artificial
  Synthetic oligonucleotide
cctaaaccgattcaaataagtcgtcccagaagccgtcagggatgtcgtccagact

SEQ ID NO: 363757 - DNA, 55 bp, Artificial
  Synthetic oligonucleotide
cctaaacctcttgaaactattgtcaatcccttggggacgtttgataatcctgcat

SEQ ID NO: 363758 - DNA, 52 bp, Artificial
  Synthetic oligonucleotide
cctaaaccttaaaagaggtcaaacagagtacgggtcttatgggactgcttta

SEQ ID NO: 363759 - DNA, 51 bp, Artificial
  Synthetic oligonucleotide
cctaaacgggatccgcctccgggagtacccactgacgaaatgttattaaac

SEQ ID NO: 363760 - DNA, 56 bp, Artificial
  Synthetic oligonucleotide
cctaaactttagtagggttgtgagtgaagtccttgaattagctactgagtgcccag

SEQ ID NO: 363761 - DNA, 60 bp, Artificial
  Synthetic oligonucleotide
cctaaactttgcatacttggtggcatatcaagccactgtctgcgctcgtgcaaaggcgag

SEQ ID NO: 363762 - DNA, 58 bp, Artificial
  Synthetic oligonucleotide
cctaaagacctagcccacattgtcttcccagtacgactgtcaccctcaatcactatac

SEQ ID NO: 363763 - DNA, 60 bp, Artificial
  Synthetic oligonucleotide
cctaaagcacgagcccacattgtcttgcctgttcgactatctccttcgactatcaaacta

SEQ ID NO: 363764 - DNA, 56 bp, Artificial
  Synthetic oligonucleotide
cctaaagccatgtgtaaaactaaccccaatctgtgtcactttaaattgcactaata

SEQ ID NO: 363765 - DNA, 55 bp, Artificial
  Synthetic oligonucleotide
cctaaagccatgtgtgaagttaaccccactttgtgttacgttacattgtgctgcc

SEQ ID NO: 363766 - DNA, 55 bp, Artificial
  Synthetic oligonucleotide
cctaaaggagcagttcagctgaggttttgcacatatgagcaggcaaaggaacgcg

SEQ ID NO: 363767 - DNA, 55 bp, Artificial
  Synthetic oligonucleotide
cctaaaggagtggaagaaggttccattgggaaagtgtgcaggactttgctagcga

SEQ ID NO: 363768 - DNA, 55 bp, Artificial
  Synthetic oligonucleotide
cctaaagggtatgtctggagaattacaagaagatggtcacttagcatctagctac

SEQ ID NO: 363769 - DNA, 54 bp, Artificial
  Synthetic oligonucleotide
cctaaaggtacagaataatactattgttctatttgtaagtatattaccgccgta

SEQ ID NO: 363770 - DNA, 58 bp, Artificial
  Synthetic oligonucleotide
cctaaagtcagagggcaagcgggtaggatgaattattattggacactattggatcaag

SEQ ID NO: 363771 - DNA, 53 bp, Artificial
  Synthetic oligonucleotide
cctaaagtcagatgctgcggctccttggaatgtcagcccgcggctcacgcaga

SEQ ID NO: 363772 - DNA, 53 bp, Artificial
  Synthetic oligonucleotide
cctaaagtccgaaaatgtagagatcaacgttttagggcacaatcctgggtccc

SEQ ID NO: 363773 - DNA, 57 bp, Artificial
  Synthetic oligonucleotide
cctaaagttagaggacaagcaggcaggatgaactattattggacactattggaccag

SEQ ID NO: 363774 - DNA, 57 bp, Artificial
  Synthetic oligonucleotide
cctaaataattatgatttgcctaaggagtggggttatgagcagggtcttgtcattag

SEQ ID NO: 363775 - DNA, 56 bp, Artificial
  Synthetic oligonucleotide
cctaaatacatgctacttagcattacatcatgatttggaaaattggacagtgagcc

SEQ ID NO: 363776 - DNA, 56 bp, Artificial
  Synthetic oligonucleotide
cctaaatacccttaagaaacgaccagtctgagggcgtaagctcgtccagatcttga

SEQ ID NO: 363777 - DNA, 55 bp, Artificial
  Synthetic oligonucleotide
cctaaatcagggttcccgaggttcacaatccccttcactggggtagcatcagcat

SEQ ID NO: 363778 - DNA, 55 bp, Artificial
  Synthetic oligonucleotide
cctaaatccccaccactcatcaccgtaatacagctcttttctgctgtgccatctc

SEQ ID NO: 363779 - DNA, 55 bp, Artificial
  Synthetic oligonucleotide
cctaaatccggctatctcatgcggcgcatagcggataaccattcgccccgcgtcg

SEQ ID NO: 363780 - DNA, 58 bp, Artificial
  Synthetic oligonucleotide
cctaaatcggaaacgcgtcttccaattctagatataagagtgtcatcgcagttgtaaa

SEQ ID NO: 363781 - DNA, 60 bp, Artificial
  Synthetic oligonucleotide
cctaaatctgccagaatggttatacatagtagaaaaggacaatccaatcaacagcctctg

SEQ ID NO: 363782 - DNA, 55 bp, Artificial
  Synthetic oligonucleotide
cctaaatcttggacaaaagagatacaccaaaacaacatactggtgggacgggctc

SEQ ID NO: 363783 - DNA, 59 bp, Artificial
  Synthetic oligonucleotide
cctaaatgagtcggagtgtaacaagatgattgacagctacctaaagagcagggggtcta

SEQ ID NO: 363784 - DNA, 58 bp, Artificial
  Synthetic oligonucleotide
cctaaatggcatttatgtaatatcctcaatgaatttgaatttcaaacgtgaaagcggc

SEQ ID NO: 363785 - DNA, 51 bp, Artificial
  Synthetic oligonucleotide
cctaaatggtaacggagacccaaacaacatggacagggcagtcaaactgta

SEQ ID NO: 363786 - DNA, 57 bp, Artificial
  Synthetic oligonucleotide
cctaaattacttccggatctgtatgattacaaggagaaccgattcattgaaattgga

SEQ ID NO: 363787 - DNA, 55 bp, Artificial
  Synthetic oligonucleotide
cctaaattagagccctggaaccatccaggaagccagcctacaactccttgtaaca

SEQ ID NO: 363788 - DNA, 51 bp, Artificial
  Synthetic oligonucleotide
cctaaattggggagaaatgggctatgtaactggtatcggcagttacggtgg

SEQ ID NO: 363789 - DNA, 53 bp, Artificial
  Synthetic oligonucleotide
cctaaatttctccccgacttgtacgactataaagagaaccgattcattgaaat

SEQ ID NO: 363790 - DNA, 53 bp, Artificial
  Synthetic oligonucleotide
cctaaatttctgttacccgctttacaccatttaaagtacctgtgtcgcagtcg

SEQ ID NO: 363791 - DNA, 55 bp, Artificial
  Synthetic oligonucleotide
cctaaatttgtggagacgtatctgtagtgttatttctactcacatgggaccatgg

SEQ ID NO: 363792 - DNA, 54 bp, Artificial
  Synthetic oligonucleotide
cctaaattttccaactgttaagcaattttcaaacggcgcgtatattgtaaagca

SEQ ID NO: 363793 - DNA, 53 bp, Artificial
  Synthetic oligonucleotide
cctaacaaaacaagaagatggggttattccctgaatttcatgggttatgtaat

SEQ ID NO: 363794 - DNA, 55 bp, Artificial
  Synthetic oligonucleotide
cctaacaacatgggttctgaatcgagaagtcgcagacgaactatgccaaatgatg

SEQ ID NO: 363795 - DNA, 60 bp, Artificial
  Synthetic oligonucleotide
cctaacaagtgtggtgcagaatagcgactacacgccccaagaggccagcactcaaactat

SEQ ID NO: 363796 - DNA, 59 bp, Artificial
  Synthetic oligonucleotide
cctaacaatacctgatgttcaaaagataatcgatggagtgaaagagttagcttcagaaa

SEQ ID NO: 363797 - DNA, 58 bp, Artificial
  Synthetic oligonucleotide
cctaacaattactgaggatactgcccgtacggctaacctcgcgcttgagattgactcc

SEQ ID NO: 363798 - DNA, 56 bp, Artificial
  Synthetic oligonucleotide
cctaacaattgaagccgaatctccggggtccaatacgcttgctcccagcccgatag

SEQ ID NO: 363799 - DNA, 57 bp, Artificial
  Synthetic oligonucleotide
cctaacacaaagtactaaggtctctaccatgtcaagcagaaactgggttatgaaaga

SEQ ID NO: 363800 - DNA, 55 bp, Artificial
  Synthetic oligonucleotide
cctaacactacaaattatggtcaagagaattccacggagtgtatacaacgacttc

SEQ ID NO: 363801 - DNA, 55 bp, Artificial
  Synthetic oligonucleotide
cctaacaggcagtagcaagccgaggcttaaacaggcaagtcgaggctaaacaggc

SEQ ID NO: 363802 - DNA, 60 bp, Artificial
  Synthetic oligonucleotide
cctaacaggcggagatgactgacgccctagatctagaaatggacggcatcagtaccgagc

SEQ ID NO: 363803 - DNA, 56 bp, Artificial
  Synthetic oligonucleotide
cctaacatagggccaaggccattcgtaagaggacaacaggggagaatggattacta

SEQ ID NO: 363804 - DNA, 51 bp, Artificial
  Synthetic oligonucleotide
cctaacatgtaaaattcattcacggcctggtaggggcagtgtcccttggac

SEQ ID NO: 363805 - DNA, 55 bp, Artificial
  Synthetic oligonucleotide
cctaaccaagacccagcatctattctgccagttataccgttagatcccgcccgtc

SEQ ID NO: 363806 - DNA, 58 bp, Artificial
  Synthetic oligonucleotide
cctaaccacaggtctacatttagttatccgcagtgctcgcactttaacggcatcgagc

SEQ ID NO: 363807 - DNA, 55 bp, Artificial
  Synthetic oligonucleotide
cctaaccactatctgttgaaaatgtaatattaggtgcacgctaacgacacatgaa

SEQ ID NO: 363808 - DNA, 53 bp, Artificial
  Synthetic oligonucleotide
cctaaccccacgttgttaaaagggatcatggttatgacgggagagaggcaatt

SEQ ID NO: 363809 - DNA, 54 bp, Artificial
  Synthetic oligonucleotide
cctaaccctgacattcggtgactcccctgatctttttgttcccgaaatctctct

SEQ ID NO: 363810 - DNA, 59 bp, Artificial
  Synthetic oligonucleotide
cctaaccgatgatcaggtagaagtggtcactgcacgagaactggtagagtcacaaaccc

SEQ ID NO: 363811 - DNA, 53 bp, Artificial
  Synthetic oligonucleotide
cctaaccgttatctcgagaaacaggtaaaagctggcaaccgttccggccacgc

SEQ ID NO: 363812 - DNA, 50 bp, Artificial
  Synthetic oligonucleotide
cctaaccttaccaaatatttacccttggacaaaggcattaaaccgtatta

SEQ ID NO: 363813 - DNA, 55 bp, Artificial
  Synthetic oligonucleotide
cctaacgaagaagtaaaattcctgtctgctgaccaacggattaacgcaattcgcg

SEQ ID NO: 363814 - DNA, 55 bp, Artificial
  Synthetic oligonucleotide
cctaacgacgtcagaaatgtttgggatgtgtacaacgtgttccgggacgtgccaa

SEQ ID NO: 363815 - DNA, 59 bp, Artificial
  Synthetic oligonucleotide
cctaacgcacgtgcccacatcgtcttccctgttcttgaatcaccttctactatgagact

SEQ ID NO: 363816 - DNA, 55 bp, Artificial
  Synthetic oligonucleotide
cctaacgcgaagtgtcacgcttggggtgttgcggaagatgctaaccacaagttag

SEQ ID NO: 363817 - DNA, 51 bp, Artificial
  Synthetic oligonucleotide
cctaacgcgtacggaaggtaaactggtatggaagacactttccggcgaccc

SEQ ID NO: 363818 - DNA, 52 bp, Artificial
  Synthetic oligonucleotide
cctaacggaacggctctacgtaggcggccccatggtaaactccaagggacag

SEQ ID NO: 363819 - DNA, 55 bp, Artificial
  Synthetic oligonucleotide
cctaacgggcaaagagagttggcaattggatctctgatagttcctttgagcttgg

SEQ ID NO: 363820 - DNA, 57 bp, Artificial
  Synthetic oligonucleotide
cctaacgtccagcctgtaggacgcttcggtgacttccccgcatgttgccgctcgtcc

SEQ ID NO: 363821 - DNA, 57 bp, Artificial
  Synthetic oligonucleotide
cctaacgtgccggtaacaggagtcgagttctctcgtaaagatcctgtagagctgacc

SEQ ID NO: 363822 - DNA, 56 bp, Artificial
  Synthetic oligonucleotide
cctaactacctcatttgcttgctccttgattgtcttttagggagcatactactact

SEQ ID NO: 363823 - DNA, 54 bp, Artificial
  Synthetic oligonucleotide
cctaactacgacgactctaaattcggcccaagcactgagctatacggcggtgac

SEQ ID NO: 363824 - DNA, 59 bp, Artificial
  Synthetic oligonucleotide
cctaactatatgactcaatatcattgggttattgtggatcgtgatgttggttctacgtt

SEQ ID NO: 363825 - DNA, 60 bp, Artificial
  Synthetic oligonucleotide
cctaactcaagcgtaggatgatatctgaggtcagtagttgctttgaacgtcgagcgtgta

SEQ ID NO: 363826 - DNA, 59 bp, Artificial
  Synthetic oligonucleotide
cctaactcaatcatgagtaggtacttaaagcttctggttaaggcatctgggctattcaa

SEQ ID NO: 363827 - DNA, 55 bp, Artificial
  Synthetic oligonucleotide
cctaactcagaacatggctcgtcaattggacatcgcgttgaacgattacctattg

SEQ ID NO: 363828 - DNA, 58 bp, Artificial
  Synthetic oligonucleotide
cctaactcgagtattgtgtacgagaccaatgataccattctacactttccgggatgtg

SEQ ID NO: 363829 - DNA, 60 bp, Artificial
  Synthetic oligonucleotide
cctaactctaaatgatctaggctggcatacttgggatcagtataatgcaggtaattggac

SEQ ID NO: 363830 - DNA, 54 bp, Artificial
  Synthetic oligonucleotide
cctaactgatttaagtacagcagtactaattgtctaaacctagctaaataagtc

SEQ ID NO: 363831 - DNA, 60 bp, Artificial
  Synthetic oligonucleotide
cctaactttctactgagccaatcatattgcgcctgacgagtctagatatgtgggaaagac

SEQ ID NO: 363832 - DNA, 55 bp, Artificial
  Synthetic oligonucleotide
cctaagaagaacaatactccccaaagttgcagtgtaaaacatttcgtgaggagga

SEQ ID NO: 363833 - DNA, 55 bp, Artificial
  Synthetic oligonucleotide
cctaagaatccggcacctccagtaacggcatatactgacatgtttaatttcagac

SEQ ID NO: 363834 - DNA, 50 bp, Artificial
  Synthetic oligonucleotide
cctaagacctgcaggaacacgtggggtggaaccttccccattaatgccta

SEQ ID NO: 363835 - DNA, 52 bp, Artificial
  Synthetic oligonucleotide
cctaagagagtaacacgcgctcccagagtggcccgtgtgacaccccaacccc

SEQ ID NO: 363836 - DNA, 55 bp, Artificial
  Synthetic oligonucleotide
cctaagagcaccaattacgaaagggcactgggtggaacagcattgtggaagcacg

SEQ ID NO: 363837 - DNA, 59 bp, Artificial
  Synthetic oligonucleotide
cctaagagcacttacctgcctaatagcacttggaataacagtacgggatcaaatgacag

SEQ ID NO: 363838 - DNA, 55 bp, Artificial
  Synthetic oligonucleotide
cctaagagcttgcaagtagcttataaatcgattgtggaggagacagtcgcacagg

SEQ ID NO: 363839 - DNA, 60 bp, Artificial
  Synthetic oligonucleotide
cctaagagtgcggctacattgagtgatgacgatcctattgacgtagccgtaagtcaccct

SEQ ID NO: 363840 - DNA, 55 bp, Artificial
  Synthetic oligonucleotide
cctaagagtttggattcgctagctgtccggatggtagtgttacctgtggtccacc

SEQ ID NO: 363841 - DNA, 52 bp, Artificial
  Synthetic oligonucleotide
cctaagatattcgagataactgggtgtatagtgtcatcatgccgtaacttga

SEQ ID NO: 363842 - DNA, 55 bp, Artificial
  Synthetic oligonucleotide
cctaagatggttgattctttccagaccagagtagtttatgacgccgagtcgttgc

SEQ ID NO: 363843 - DNA, 57 bp, Artificial
  Synthetic oligonucleotide
cctaagattatcaagattatgtattccttgacccgggggcaggtctttattgtctga

SEQ ID NO: 363844 - DNA, 55 bp, Artificial
  Synthetic oligonucleotide
cctaagattctaaagacacatcctagcatatgtccaaaacaccctcgccaccata

SEQ ID NO: 363845 - DNA, 56 bp, Artificial
  Synthetic oligonucleotide
cctaagcaataactcaacagataaagtagacacactaacagaaaccggagttcctg

SEQ ID NO: 363846 - DNA, 56 bp, Artificial
  Synthetic oligonucleotide
cctaagcagtgcatgcaacttaacctgacaagtgatgaaaagtatgctaaaggggt

SEQ ID NO: 363847 - DNA, 60 bp, Artificial
  Synthetic oligonucleotide
cctaagcccatcgccattctcaaaggatcttctggcgggccgctactatgctccaaagga

SEQ ID NO: 363848 - DNA, 55 bp, Artificial
  Synthetic oligonucleotide
cctaagcctagatatcaattgggtactggtgtcacacttgcagtccaaggtatgg

SEQ ID NO: 363849 - DNA, 55 bp, Artificial
  Synthetic oligonucleotide
cctaagccttcgtcttccatatcttcgtctgcggtagtaggcccgcctacgacga

SEQ ID NO: 363850 - DNA, 59 bp, Artificial
  Synthetic oligonucleotide
cctaagcgacaacggcactaatggtatccagcatgctatgtaccttagaggggttaaca

SEQ ID NO: 363851 - DNA, 53 bp, Artificial
  Synthetic oligonucleotide
cctaagcgtatcccacctttgaaagcacctcctaacgaaagacctaattggga

SEQ ID NO: 363852 - DNA, 54 bp, Artificial
  Synthetic oligonucleotide
cctaagcgtgatgccccatggcgtttaatggcgggaacttcaaaggtttcccgc

SEQ ID NO: 363853 - DNA, 58 bp, Artificial
  Synthetic oligonucleotide
cctaagcgtgtcgcagacaacgggcacgccgtttcaggggccgtacgtgatgccgcac

SEQ ID NO: 363854 - DNA, 55 bp, Artificial
  Synthetic oligonucleotide
cctaagctccaccagagtgcataggtctgatgatattagaagggaccagattgct

SEQ ID NO: 363855 - DNA, 59 bp, Artificial
  Synthetic oligonucleotide
cctaagctgctcggtagctcttttttcgaatgacgttatatatcttgagaggccctcca

SEQ ID NO: 363856 - DNA, 57 bp, Artificial
  Synthetic oligonucleotide
cctaaggaaaagcctgatccatatgcaaagtttaacttctggaatgtggaccttaca

SEQ ID NO: 363857 - DNA, 60 bp, Artificial
  Synthetic oligonucleotide
cctaaggacaagatcttcaatgatgcaatgaacaaggccaagaggatgtacgaaacagtg

SEQ ID NO: 363858 - DNA, 51 bp, Artificial
  Synthetic oligonucleotide
cctaaggacaagattaaggttggaaagacaagattgattgaagcctccagt

SEQ ID NO: 363859 - DNA, 55 bp, Artificial
  Synthetic oligonucleotide
cctaaggacagtagggacaatgtttcagtggactataaacaaacgcaactatgta

SEQ ID NO: 363860 - DNA, 55 bp, Artificial
  Synthetic oligonucleotide
cctaaggaggcgctgttagctttggctaaaaggaatggagggatacagtggatgg

SEQ ID NO: 363861 - DNA, 55 bp, Artificial
  Synthetic oligonucleotide
cctaaggcactcccgaagaatgttcctaaggagtatgcttttattggaccgaagc

SEQ ID NO: 363862 - DNA, 57 bp, Artificial
  Synthetic oligonucleotide
cctaaggcatggttaagtgctctttactttgaaggtaggactttgatgcaatgggta

SEQ ID NO: 363863 - DNA, 60 bp, Artificial
  Synthetic oligonucleotide
cctaaggctgcaagaggtcaatacagtgggtttgtgagaactctattccagcaaatgagg

SEQ ID NO: 363864 - DNA, 54 bp, Artificial
  Synthetic oligonucleotide
cctaaggcttccctggtgtcatacttcttcgggtcaatcccgaggtccttgtat

SEQ ID NO: 363865 - DNA, 55 bp, Artificial
  Synthetic oligonucleotide
cctaagggagctgttcagttgaggttatgctcgtatgaacaagcaaagaagcgtg

SEQ ID NO: 363866 - DNA, 58 bp, Artificial
  Synthetic oligonucleotide
cctaagggatgtgaaggcccatgtaaggtccaatcttttgatgcgaaaaatgatattg

SEQ ID NO: 363867 - DNA, 52 bp, Artificial
  Synthetic oligonucleotide
cctaagggcgaacgcaatagcatggacttttggcgaaaggtaattaaaaagt

SEQ ID NO: 363868 - DNA, 53 bp, Artificial
  Synthetic oligonucleotide
cctaagggtttgaagaactctacgaatcaaggtatgaagattactgttgattc

SEQ ID NO: 363869 - DNA, 60 bp, Artificial
  Synthetic oligonucleotide
cctaaggtaagagaaacaataagaagaactgagccagcagcagagggagtaggagcagcg

SEQ ID NO: 363870 - DNA, 55 bp, Artificial
  Synthetic oligonucleotide
cctaaggtagagactagaggacttttcggagccattgcaggtttcattgaagggg

SEQ ID NO: 363871 - DNA, 53 bp, Artificial
  Synthetic oligonucleotide
cctaaggtatctgcctttcagtatagggtgtttagggtacagttacctgaccc

SEQ ID NO: 363872 - DNA, 53 bp, Artificial
  Synthetic oligonucleotide
cctaaggtcacacacctgcaaaccggtatcggttaaaacacaccctctatagt

SEQ ID NO: 363873 - DNA, 52 bp, Artificial
  Synthetic oligonucleotide
cctaaggtcagtcctaatcaatacagggtgttccgttgtaaattaccggacc

SEQ ID NO: 363874 - DNA, 60 bp, Artificial
  Synthetic oligonucleotide
cctaagtaccgagatacaattggatacaaagcaataattctacccgaagcatcatcactg

SEQ ID NO: 363875 - DNA, 55 bp, Artificial
  Synthetic oligonucleotide
cctaagtatgttggggtgaaaagtctcaaattggcagttggtttaaggaatgtgc

SEQ ID NO: 363876 - DNA, 57 bp, Artificial
  Synthetic oligonucleotide
cctaagtcacagttactttccacttccatcctaggaaccacatattggtgttactca

SEQ ID NO: 363877 - DNA, 53 bp, Artificial
  Synthetic oligonucleotide
cctaagtctcttgcccaacttaaagttcttcttccccgcgcccacctcgaagc

SEQ ID NO: 363878 - DNA, 60 bp, Artificial
  Synthetic oligonucleotide
cctaagtgatgttctttccaacgttgaacaacgagctgctattgcttttcagcggacgca

SEQ ID NO: 363879 - DNA, 50 bp, Artificial
  Synthetic oligonucleotide
cctaagttgttgggtgtccgttataaattaaagatgactttggcccacaa

SEQ ID NO: 363880 - DNA, 57 bp, Artificial
  Synthetic oligonucleotide
cctaagtttcttggacgttaatgccacgtttgagatcccactatctgatgaacaaat

SEQ ID NO: 363881 - DNA, 55 bp, Artificial
  Synthetic oligonucleotide
cctaataacggcgctgttgctggacacaaagaagggttgaaagaagtgagaaagg

SEQ ID NO: 363882 - DNA, 53 bp, Artificial
  Synthetic oligonucleotide
cctaataagaagaagacgttcactacgggttactttcgtgaaagttgtggtgc

SEQ ID NO: 363883 - DNA, 51 bp, Artificial
  Synthetic oligonucleotide
cctaataatgagagaggaaacccgggagtaaaagggtgggcctttgactac

SEQ ID NO: 363884 - DNA, 60 bp, Artificial
  Synthetic oligonucleotide
cctaatacgagcattgacattgaacacaatgacaaaggatgctgaaagaggcaaattaaa

SEQ ID NO: 363885 - DNA, 50 bp, Artificial
  Synthetic oligonucleotide
cctaatacgcaggcgcacaaaggggctccgcccccttaaacccccagggg

SEQ ID NO: 363886 - DNA, 56 bp, Artificial
  Synthetic oligonucleotide
cctaatagctttgcaatttgcctttcgtctgatagggacacccgagttctcggact

SEQ ID NO: 363887 - DNA, 58 bp, Artificial
  Synthetic oligonucleotide
cctaataggcaccaacgacctggccactaatataggccaggccagagcagaaaggttc

SEQ ID NO: 363888 - DNA, 50 bp, Artificial
  Synthetic oligonucleotide
cctaataggtggacctgtaattaggaagggcgtttcttttttccggctag

SEQ ID NO: 363889 - DNA, 51 bp, Artificial
  Synthetic oligonucleotide
cctaatagtaccaaatatttgcccctagacaaagggattaaaccttattac

SEQ ID NO: 363890 - DNA, 53 bp, Artificial
  Synthetic oligonucleotide
cctaatagttccaagcaaatcacctcatatgagtccggcctttatggtaaaca

SEQ ID NO: 363891 - DNA, 55 bp, Artificial
  Synthetic oligonucleotide
cctaatatacactcctatgatgattctattagctataaacaaggatactttagta

SEQ ID NO: 363892 - DNA, 60 bp, Artificial
  Synthetic oligonucleotide
cctaatatactcccatattctgcatcattcaccctgaatagatcacagccagcacatgat

SEQ ID NO: 363893 - DNA, 54 bp, Artificial
  Synthetic oligonucleotide
cctaatatagtacctttactgcctaataatacacattcagttgtacttcaggga

SEQ ID NO: 363894 - DNA, 56 bp, Artificial
  Synthetic oligonucleotide
cctaatatcaggaccggggtgagaacaattaccactggcagccctattacttattc

SEQ ID NO: 363895 - DNA, 55 bp, Artificial
  Synthetic oligonucleotide
cctaatccacctccaccagaacattgtggacgtgcagtacttgtacggggtgggg

SEQ ID NO: 363896 - DNA, 57 bp, Artificial
  Synthetic oligonucleotide
cctaatccaccttgtctctaaaggcttattaagtggtcagattataggatatgaccc

SEQ ID NO: 363897 - DNA, 55 bp, Artificial
  Synthetic oligonucleotide
cctaatcccctcttccaaattattgaagtcgaaaggaggtataatcccatcatgc

SEQ ID NO: 363898 - DNA, 55 bp, Artificial
  Synthetic oligonucleotide
cctaatcctgaattcatggaattaatacgcacagctaatatagccccttatcctt

SEQ ID NO: 363899 - DNA, 53 bp, Artificial
  Synthetic oligonucleotide
cctaatcgcacgttgacgttgtttcgctgctcggtgttgcgctttgatagagg

SEQ ID NO: 363900 - DNA, 60 bp, Artificial
  Synthetic oligonucleotide
cctaatcgtcaacactagaggcgccagtgaggccagaccgcagaaagtatggttaagaca

SEQ ID NO: 363901 - DNA, 54 bp, Artificial
  Synthetic oligonucleotide
cctaatctccactttcggtgtgtgaccctaagccattggacttctttactttac

SEQ ID NO: 363902 - DNA, 58 bp, Artificial
  Synthetic oligonucleotide
cctaatctccgagttgcgtagggaaagtaatcgcaggttcaacattggcaatgtacta

SEQ ID NO: 363903 - DNA, 59 bp, Artificial
  Synthetic oligonucleotide
cctaatgaaaaacatgttagctgtctctcaatataatagacacaatacgtttagaattg

SEQ ID NO: 363904 - DNA, 55 bp, Artificial
  Synthetic oligonucleotide
cctaatgacaggacaaacagctaatgctacctccctcctggggacgatgacagac

SEQ ID NO: 363905 - DNA, 55 bp, Artificial
  Synthetic oligonucleotide
cctaatgactctaagagcctctgacttactgcctccccattcgagggtgtctccg

SEQ ID NO: 363906 - DNA, 55 bp, Artificial
  Synthetic oligonucleotide
cctaatgagggcaaagtggaatgcgtttgtagagacaactggacaggggccaacc

SEQ ID NO: 363907 - DNA, 55 bp, Artificial
  Synthetic oligonucleotide
cctaatgaggtcgcttttaacgtgtttcctttcacacgtgcgaccaggtcgtcac

SEQ ID NO: 363908 - DNA, 51 bp, Artificial
  Synthetic oligonucleotide
cctaatgatatgacttttaggagactggacagcatgataagagtgaagccg

SEQ ID NO: 363909 - DNA, 55 bp, Artificial
  Synthetic oligonucleotide
cctaatgcaaataacaaacagacttgggttaataaacctcttgatgcgccttcgg

SEQ ID NO: 363910 - DNA, 55 bp, Artificial
  Synthetic oligonucleotide
cctaatgcagacttgtttgcggttgctagatattaattaccgaatgagaacaagt

SEQ ID NO: 363911 - DNA, 55 bp, Artificial
  Synthetic oligonucleotide
cctaatgcatcatttaattggaaaggtatccaaaggttgggacccaaatttgcca

SEQ ID NO: 363912 - DNA, 55 bp, Artificial
  Synthetic oligonucleotide
cctaatgcatgccctgaacttgggtccacaatatcacctttcagagaaggaggag

SEQ ID NO: 363913 - DNA, 60 bp, Artificial
  Synthetic oligonucleotide
cctaatgccagtgaagatacagatgaggaattggacaatgccatctacactatttgtgat

SEQ ID NO: 363914 - DNA, 55 bp, Artificial
  Synthetic oligonucleotide
cctaatgcttaccacatcatcaaactattaactcaaacaattcaagccatgggac

SEQ ID NO: 363915 - DNA, 55 bp, Artificial
  Synthetic oligonucleotide
cctaatggctagccgcaaacagcagaacaggcgtgccacgcgcaacacgactaac

SEQ ID NO: 363916 - DNA, 57 bp, Artificial
  Synthetic oligonucleotide
cctaatggtggcatacatgttagaaagggaactggtacgcaagaccagattccttcc

SEQ ID NO: 363917 - DNA, 52 bp, Artificial
  Synthetic oligonucleotide
cctaatgtcaacaatcgtagttgccgagtgggtaaaggccggaaaacccaac

SEQ ID NO: 363918 - DNA, 60 bp, Artificial
  Synthetic oligonucleotide
cctaatgtgaatgaagatcttcatgttttccatgatgcgaacgtcaactgtgaacctgac

SEQ ID NO: 363919 - DNA, 55 bp, Artificial
  Synthetic oligonucleotide
cctaatgtgtatgctcacggtacatacccagattggatattagcacaaacaatga

SEQ ID NO: 363920 - DNA, 54 bp, Artificial
  Synthetic oligonucleotide
cctaattaatactacataggataaggttgtattctattatttaatgggcccgaa

SEQ ID NO: 363921 - DNA, 58 bp, Artificial
  Synthetic oligonucleotide
cctaattatggaacaagtcatcaattcatcccgagctgtcgctcacactagtgccgct

SEQ ID NO: 363922 - DNA, 55 bp, Artificial
  Synthetic oligonucleotide
cctaattcaaaatgcgcatgctgtggaaagaattctattggctgccactgatgac

SEQ ID NO: 363923 - DNA, 58 bp, Artificial
  Synthetic oligonucleotide
cctaattgacggctctgatgttagtcatgctaccatcaaccgatatgctcttaagttt

SEQ ID NO: 363924 - DNA, 55 bp, Artificial
  Synthetic oligonucleotide
cctaattgcattcttagagatctgcaagccagaggtcctgctaggtactctagtc

SEQ ID NO: 363925 - DNA, 58 bp, Artificial
  Synthetic oligonucleotide
cctaattggaaggtcacttgctgagaaactcaacagctcagtgtactcactaccccca

SEQ ID NO: 363926 - DNA, 55 bp, Artificial
  Synthetic oligonucleotide
cctaattgggagagaaaaggcactccgagaatcacacctggctgagattgatgac

SEQ ID NO: 363927 - DNA, 60 bp, Artificial
  Synthetic oligonucleotide
cctaattgggtgcggcaagatatatcctacagtgcgttagatgagtttcctacttatatg

SEQ ID NO: 363928 - DNA, 59 bp, Artificial
  Synthetic oligonucleotide
cctaattgtggctatgagcataatcttaactcgttgatgttgtatgtgacaaaaacctt

SEQ ID NO: 363929 - DNA, 59 bp, Artificial
  Synthetic oligonucleotide
cctaatttctctcaaacggtgaatgagagaacgataattgatatatttacgatttgcag

SEQ ID NO: 363930 - DNA, 53 bp, Artificial
  Synthetic oligonucleotide
cctacaaaattggaacctcagggtcttgccctaacattaccaatggaaacgga

SEQ ID NO: 363931 - DNA, 55 bp, Artificial
  Synthetic oligonucleotide
cctacaaaccttgacaagtgtacatctcctgggctgtgctactcctgggctgtgc

SEQ ID NO: 363932 - DNA, 56 bp, Artificial
  Synthetic oligonucleotide
cctacaaagtgtatagttgcgatcgagttcgcggacaataaagttagcgcggttta

SEQ ID NO: 363933 - DNA, 60 bp, Artificial
  Synthetic oligonucleotide
cctacaaatgcccccggatcactgaggcggaaccagatgacgttgactgctggtgcaatg

SEQ ID NO: 363934 - DNA, 57 bp, Artificial
  Synthetic oligonucleotide
cctacaaattgaccgttaactctgagcggaggacccctgatgaggactttcagattg

SEQ ID NO: 363935 - DNA, 57 bp, Artificial
  Synthetic oligonucleotide
cctacaaattttactatatccgtgcaagtcgaatacattcaggtttacactacacca

SEQ ID NO: 363936 - DNA, 52 bp, Artificial
  Synthetic oligonucleotide
cctacaacaagtcgttgggggtctgccccatccgaacgcagccccgctggag

SEQ ID NO: 363937 - DNA, 53 bp, Artificial
  Synthetic oligonucleotide
cctacaacagggcttatttgtactataagttaatgggggccctttgtagtcca

SEQ ID NO: 363938 - DNA, 56 bp, Artificial
  Synthetic oligonucleotide
cctacaaccacgcagaccgggataggttcgatgccccaattggcgtcgagaaacaa

SEQ ID NO: 363939 - DNA, 52 bp, Artificial
  Synthetic oligonucleotide
cctacaacgacagcacgcatgggcttaggcatacgagacttaccagaccaca

SEQ ID NO: 363940 - DNA, 60 bp, Artificial
  Synthetic oligonucleotide
cctacaactcccatcgcgagagctgcgtgggaaacagcaagacacactccagtcaattcc

SEQ ID NO: 363941 - DNA, 52 bp, Artificial
  Synthetic oligonucleotide
cctacaactccttgtaacaagtgttactgtaaagtatgttgctatcactgcc

SEQ ID NO: 363942 - DNA, 57 bp, Artificial
  Synthetic oligonucleotide
cctacaactccttgtactaagtgctattgtaaacgctgtagctatcattgtttagtt

SEQ ID NO: 363943 - DNA, 60 bp, Artificial
  Synthetic oligonucleotide
cctacaactgcttgtagcacgtgttactgtaaaaggtgttgctatcattgttaccactgc

SEQ ID NO: 363944 - DNA, 59 bp, Artificial
  Synthetic oligonucleotide
cctacaactgtcgccggtgtctcgattgagttttaatgaggcatctgttaattgtggtc

SEQ ID NO: 363945 - DNA, 60 bp, Artificial
  Synthetic oligonucleotide
cctacaagaacactaagagggagccagctctgataatctggggaatccaccactcaggat

SEQ ID NO: 363946 - DNA, 53 bp, Artificial
  Synthetic oligonucleotide
cctacaagacaatgggacggaagggatacaacgggcaatgtttcaaaggggtg

SEQ ID NO: 363947 - DNA, 55 bp, Artificial
  Synthetic oligonucleotide
cctacaagatgtccctttagttagcaattatgcgcgtcctgcactgtgggtttcg

SEQ ID NO: 363948 - DNA, 54 bp, Artificial
  Synthetic oligonucleotide
cctacaagctttaactgcctacctaacttattttagtgctaaagtaggtcaagc

SEQ ID NO: 363949 - DNA, 60 bp, Artificial
  Synthetic oligonucleotide
cctacaagtatctactatggtacccctagtggctccctggtatctagtgatgctcaacta

SEQ ID NO: 363950 - DNA, 55 bp, Artificial
  Synthetic oligonucleotide
cctacaagtattgatagaaagcatagagcactcacagtaataaagtgtcctccat

SEQ ID NO: 363951 - DNA, 55 bp, Artificial
  Synthetic oligonucleotide
cctacaagttgagaccattggtcgatcaaattgctcgttattcgaatacaactga

SEQ ID NO: 363952 - DNA, 60 bp, Artificial
  Synthetic oligonucleotide
cctacaagttgctatggaagactatcaagcgcttgtgcaggtaaggtagcatatacactg

SEQ ID NO: 363953 - DNA, 55 bp, Artificial
  Synthetic oligonucleotide
cctacaataaatttcacacccacgatgtctcaacttatgagcactgtgagatacc

SEQ ID NO: 363954 - DNA, 55 bp, Artificial
  Synthetic oligonucleotide
cctacaatccgacaagttcaggcctggtggagcgcacaaatggcattctcaagac

SEQ ID NO: 363955 - DNA, 54 bp, Artificial
  Synthetic oligonucleotide
cctacacaacccaacaaagggtttgttccgtacgactacaactttggcagagca

SEQ ID NO: 363956 - DNA, 55 bp, Artificial
  Synthetic oligonucleotide
cctacacacacaagcaatagaaggggcatggggttctggtgtagggtttacactc

SEQ ID NO: 363957 - DNA, 59 bp, Artificial
  Synthetic oligonucleotide
cctacaccaaggacgaagtcaataatataatttcgcctaaagctgacaagagctatgtc

SEQ ID NO: 363958 - DNA, 55 bp, Artificial
  Synthetic oligonucleotide
cctacaccaggtgtggggcgggtccctggcttacgcccaggtgtataattcacta

SEQ ID NO: 363959 - DNA, 57 bp, Artificial
  Synthetic oligonucleotide
cctacacccttgtgataaaatatgaagtcatactcgttctaagattaaatgttctaa

SEQ ID NO: 363960 - DNA, 55 bp, Artificial
  Synthetic oligonucleotide
cctacaccgctccccaccgtgtgttgtcaacagtgtacaacgggaagacaacgta

SEQ ID NO: 363961 - DNA, 55 bp, Artificial
  Synthetic oligonucleotide
cctacacgatttcgtaaaaaattcctctcaccccagcgtcgccatattaattcac

SEQ ID NO: 363962 - DNA, 55 bp, Artificial
  Synthetic oligonucleotide
cctacacgcagtatgcgcgtgtgttgccgctcgcggcaatgccgatacttgcgag

SEQ ID NO: 363963 - DNA, 52 bp, Artificial
  Synthetic oligonucleotide
cctacacggaaatctaaatgaggaggctaaaatacatcttgagactgtagag

SEQ ID NO: 363964 - DNA, 54 bp, Artificial
  Synthetic oligonucleotide
cctacagacaggtggaacctagcgtgtctcaacttgcggtggatcataagcgag

SEQ ID NO: 363965 - DNA, 55 bp, Artificial
  Synthetic oligonucleotide
cctacagatgaatatgctatccctaagaggagctgccagatgaaagacaggggct

SEQ ID NO: 363966 - DNA, 60 bp, Artificial
  Synthetic oligonucleotide
cctacagattagacaagagacgacagcataaacaggaactagctgacactgcacaagagg

SEQ ID NO: 363967 - DNA, 59 bp, Artificial
  Synthetic oligonucleotide
cctacagcagcaccaggagtaggaccagtgtctcaagatttagaggcacggggagcaat

SEQ ID NO: 363968 - DNA, 59 bp, Artificial
  Synthetic oligonucleotide
cctacagcggaggttgcaagttaatggtctccgagcagtaactgacctgaatggaccta

SEQ ID NO: 363969 - DNA, 59 bp, Artificial
  Synthetic oligonucleotide
cctacagctcaatgccccctcttgagggggagcctggtgaccctgacctaagctcaggc

SEQ ID NO: 363970 - DNA, 59 bp, Artificial
  Synthetic oligonucleotide
cctacagggtaaccactctgaacgtctcaatacattttgaaattgcgtctaagctatca

SEQ ID NO: 363971 - DNA, 57 bp, Artificial
  Synthetic oligonucleotide
cctacaggtttgtgactccaggagagcggccttcgggcatgttggattcttcggtcc

SEQ ID NO: 363972 - DNA, 57 bp, Artificial
  Synthetic oligonucleotide
cctacagtactggacacgttgcggggattgattacccgcctctctagagtggcaggg

SEQ ID NO: 363973 - DNA, 55 bp, Artificial
  Synthetic oligonucleotide
cctacagtcaattcaaagtagggaaacacatcgagcctgcattccctccttttgc

SEQ ID NO: 363974 - DNA, 55 bp, Artificial
  Synthetic oligonucleotide
cctacagtccactgtatactctgccaacagagactgtgagatgaacgtctccaac

SEQ ID NO: 363975 - DNA, 60 bp, Artificial
  Synthetic oligonucleotide
cctacatacagagtttcaatcagtcaccctcactatgcagaggcttttggccaaccattc

SEQ ID NO: 363976 - DNA, 53 bp, Artificial
  Synthetic oligonucleotide
cctacatacataatatggatccccagttgttggaggattggaacttcggtgta

SEQ ID NO: 363977 - DNA, 55 bp, Artificial
  Synthetic oligonucleotide
cctacatacccagtgggtgacctgtagatggggaatggtattgcttgcattatgt

SEQ ID NO: 363978 - DNA, 60 bp, Artificial
  Synthetic oligonucleotide
cctacatacgtttgatgaactatttggtgcgattatccacagccatggaaccctgtctat

SEQ ID NO: 363979 - DNA, 60 bp, Artificial
  Synthetic oligonucleotide
cctacatagagactgagacaggtatgatgcagggaatccttcactatactagctctctat

SEQ ID NO: 363980 - DNA, 55 bp, Artificial
  Synthetic oligonucleotide
cctacatagcggcaccaccggggcagtgtgctcttcgctcttcaacgggactcca

SEQ ID NO: 363981 - DNA, 52 bp, Artificial
  Synthetic oligonucleotide
cctacatcacaaatgcgcttttagcttggaacaccaatgtgtttggtagtag

SEQ ID NO: 363982 - DNA, 60 bp, Artificial
  Synthetic oligonucleotide
cctacatcattatggctagcatgttcaagaacttcaagctcgacgttgagtatggtcaaa

SEQ ID NO: 363983 - DNA, 54 bp, Artificial
  Synthetic oligonucleotide
cctacatccaggatcggggaaaacaagaagatatcttccagctatagtccgtga

SEQ ID NO: 363984 - DNA, 57 bp, Artificial
  Synthetic oligonucleotide
cctacatgcctgggtaaaattcgaacactctattaaactacgatcgaacagattgaa

SEQ ID NO: 363985 - DNA, 55 bp, Artificial
  Synthetic oligonucleotide
cctacatggaacagcaacaggaggtatatgcatatatcaaggcttataatctggg

SEQ ID NO: 363986 - DNA, 54 bp, Artificial
  Synthetic oligonucleotide
cctacatgtccaattgctactgcaacatccccggacacggttgtgcctactgga

SEQ ID NO: 363987 - DNA, 60 bp, Artificial
  Synthetic oligonucleotide
cctacattacctgataacgttcaatatgttatacaatgtataggatcaagaacataccaa

SEQ ID NO: 363988 - DNA, 55 bp, Artificial
  Synthetic oligonucleotide
cctacattgagagtgccacaaggtaaattggatttaccaacagtcagagaattag

SEQ ID NO: 363989 - DNA, 55 bp, Artificial
  Synthetic oligonucleotide
cctaccaaaaccaagggcacaagcagagtcattcctgtcgacaaatggtgcttac

SEQ ID NO: 363990 - DNA, 56 bp, Artificial
  Synthetic oligonucleotide
cctaccaaactcaacggctcttggaacgtgatgcaagaggcggtacccgctacgtc

SEQ ID NO: 363991 - DNA, 55 bp, Artificial
  Synthetic oligonucleotide
cctaccaaagcgaatggtgatctgatatgttgtcaagtctctaggtctttgagag

SEQ ID NO: 363992 - DNA, 55 bp, Artificial
  Synthetic oligonucleotide
cctaccaaatggtatgagggcctagttgacaaaattaaggatgctatgtacaccg

SEQ ID NO: 363993 - DNA, 57 bp, Artificial
  Synthetic oligonucleotide
cctaccaacctcgggtttgcctaccccatgcactagcaaagcactacaccacagtcc

SEQ ID NO: 363994 - DNA, 60 bp, Artificial
  Synthetic oligonucleotide
cctaccaacttggctcagaacacaattgcaatagatggactagaagcgttagatgcacta

SEQ ID NO: 363995 - DNA, 54 bp, Artificial
  Synthetic oligonucleotide
cctaccaagaaccaaatcgttctgggtaattctggtgatcctaagtacgttgac

SEQ ID NO: 363996 - DNA, 58 bp, Artificial
  Synthetic oligonucleotide
cctaccaagaagtcgtatgcaagatgccatgcgtactgggggtacgacgtgggtacga

SEQ ID NO: 363997 - DNA, 55 bp, Artificial
  Synthetic oligonucleotide
cctaccaagagatcttgcccacatggttttaccagttctagaagcaccttcaatc

SEQ ID NO: 363998 - DNA, 55 bp, Artificial
  Synthetic oligonucleotide
cctaccaagcgagatttggtaccattacagccaggaacttcgacacaatacgcct

SEQ ID NO: 363999 - DNA, 52 bp, Artificial
  Synthetic oligonucleotide
cctaccaattaggcagaacattgggtttctggaatcccactcgtaaaaactt

SEQ ID NO: 364000 - DNA, 56 bp, Artificial
  Synthetic oligonucleotide
cctaccacattatgcactcaaatggcaacgagttagaaaagcccagatgtatggat

SEQ ID NO: 364001 - DNA, 55 bp, Artificial
  Synthetic oligonucleotide
cctaccacctgcgcgctcttgatggtgctacagtcgcacgcgtcgctgtcttccg

SEQ ID NO: 364002 - DNA, 54 bp, Artificial
  Synthetic oligonucleotide
cctaccacctgtacaaaatactagaaacgttacacctgtatctattaaagcaag

SEQ ID NO: 364003 - DNA, 60 bp, Artificial
  Synthetic oligonucleotide
cctaccacgactattcgattgtatatcagtacagcacattcgtttgtgagttcgacagtt

SEQ ID NO: 364004 - DNA, 54 bp, Artificial
  Synthetic oligonucleotide
cctaccacgcccctccagtattacctctggaactttgacgagagaaggggacaa

SEQ ID NO: 364005 - DNA, 55 bp, Artificial
  Synthetic oligonucleotide
cctaccacgcgcgttagcgcctccccgcaacgtgcgcgtgactggctgctaccag

SEQ ID NO: 364006 - DNA, 55 bp, Artificial
  Synthetic oligonucleotide
cctaccagaaggagattacgatgttagagagtactttttacacctttactcacaa

SEQ ID NO: 364007 - DNA, 57 bp, Artificial
  Synthetic oligonucleotide
cctaccagacctgacacctcggcatgcagattttacactttggctagtaaaacttgg

SEQ ID NO: 364008 - DNA, 60 bp, Artificial
  Synthetic oligonucleotide
cctaccagccagctacaactactgcaggctagtgagtcggagtctaacagtaaggtcaag

SEQ ID NO: 364009 - DNA, 55 bp, Artificial
  Synthetic oligonucleotide
cctaccaggccgctggaacctctatggttactgtccctagcgggggcgtttgtga

SEQ ID NO: 364010 - DNA, 53 bp, Artificial
  Synthetic oligonucleotide
cctaccaggggggtccgtggtcacattgaacctccatggtgatgcaatattcg

SEQ ID NO: 364011 - DNA, 60 bp, Artificial
  Synthetic oligonucleotide
cctaccagtagcaggcggaacaagcagtgtgtacatcgaagtattgcatttaactcaagg

SEQ ID NO: 364012 - DNA, 56 bp, Artificial
  Synthetic oligonucleotide
cctaccagtcaggaattccaatgttaggcctgagtgcaacttgttacaaacgttaa

SEQ ID NO: 364013 - DNA, 50 bp, Artificial
  Synthetic oligonucleotide
cctaccatagagttggaactgtatgaaccagacgagataattcacctttg

SEQ ID NO: 364014 - DNA, 55 bp, Artificial
  Synthetic oligonucleotide
cctaccatcgaggacggtagaatcctagatgatcctcccatgtgttacagagggc

SEQ ID NO: 364015 - DNA, 60 bp, Artificial
  Synthetic oligonucleotide
cctaccatctgggtgcgcatggtaatgatgacacactttttctccatactccaatcccag

SEQ ID NO: 364016 - DNA, 56 bp, Artificial
  Synthetic oligonucleotide
cctaccatgttaaacgaggagcgtctcacgtcgacgtttacaaggtggatgttgta

SEQ ID NO: 364017 - DNA, 54 bp, Artificial
  Synthetic oligonucleotide
cctaccattccgacccctgcgggtccaatcacccacgatgtacctggaagcttg

SEQ ID NO: 364018 - DNA, 59 bp, Artificial
  Synthetic oligonucleotide
cctacccacgctcccactcacaccgcccctgctctgtccagaggtaaacgtgatgtgtc

SEQ ID NO: 364019 - DNA, 55 bp, Artificial
  Synthetic oligonucleotide
cctacccatggtcaacgccatgggacgctagttgtgaacaaggtgcgaagagcct

SEQ ID NO: 364020 - DNA, 55 bp, Artificial
  Synthetic oligonucleotide
cctacccattgatccaccccaagagcagagaatgtcacgcaagcctgtcacacgc

SEQ ID NO: 364021 - DNA, 55 bp, Artificial
  Synthetic oligonucleotide
cctaccccgatccactggatgcatcacacttagctgaaactggctctagatatgg

SEQ ID NO: 364022 - DNA, 55 bp, Artificial
  Synthetic oligonucleotide
cctacccctagtggttctatggtaacatctgatgcacaactatttaataaaccat

SEQ ID NO: 364023 - DNA, 54 bp, Artificial
  Synthetic oligonucleotide
cctacccgacgcacgagcataaacgatcgcaagttaaacgtagctaactttctg

SEQ ID NO: 364024 - DNA, 55 bp, Artificial
  Synthetic oligonucleotide
cctacccgctgtggatgtcagcgagagtgtcacagaggacgcgcattccctccga

SEQ ID NO: 364025 - DNA, 55 bp, Artificial
  Synthetic oligonucleotide
cctaccctaccctacatgttgacctatgtgacctagtgggagacacctgggaacc

SEQ ID NO: 364026 - DNA, 55 bp, Artificial
  Synthetic oligonucleotide
cctaccctcccactatagaacccaacactggtgtctaccctctaccagcggcact

SEQ ID NO: 364027 - DNA, 50 bp, Artificial
  Synthetic oligonucleotide
cctaccctctcagtcgggtttttgatcactggtggacttgtgttaacaat

SEQ ID NO: 364028 - DNA, 50 bp, Artificial
  Synthetic oligonucleotide
cctaccgactcttcgtaaggtggtaggtcaagttaacgaaaatattaccg

SEQ ID NO: 364029 - DNA, 55 bp, Artificial
  Synthetic oligonucleotide
cctaccgagagctcattgggaggtggcgagaggatccgatgaagacaacgaggcc

SEQ ID NO: 364030 - DNA, 53 bp, Artificial
  Synthetic oligonucleotide
cctaccgatgcccgaaagccgtcgccgacttgttcggcgtcaaaactttcaac

SEQ ID NO: 364031 - DNA, 55 bp, Artificial
  Synthetic oligonucleotide
cctaccggtcctcgttgtatgataaaattcgatgatggaatatggtcacatctag

SEQ ID NO: 364032 - DNA, 57 bp, Artificial
  Synthetic oligonucleotide
cctaccgtagccgcgacttccgttttgacggaaagctcactccacaggttgctgata

SEQ ID NO: 364033 - DNA, 60 bp, Artificial
  Synthetic oligonucleotide
cctacctacaaacattactatgttgccgtcattcagaagatttactcagatgataggaat

SEQ ID NO: 364034 - DNA, 55 bp, Artificial
  Synthetic oligonucleotide
cctacctacaactttggcactaatgagacggacgtcttcgtccttaataacacca

SEQ ID NO: 364035 - DNA, 56 bp, Artificial
  Synthetic oligonucleotide
cctacctaccctgcttggagttttcatgttaataagttctgactacataacaaaga

SEQ ID NO: 364036 - DNA, 56 bp, Artificial
  Synthetic oligonucleotide
cctacctataaaaatgacaactttaaggagtatttgcgtcacgtggaagaatatga

SEQ ID NO: 364037 - DNA, 55 bp, Artificial
  Synthetic oligonucleotide
cctacctcactagtcgagcggatatcaattgcgacgacatttataaacatgacgt

SEQ ID NO: 364038 - DNA, 55 bp, Artificial
  Synthetic oligonucleotide
cctacctctaccatggacatcaggggccacaacagaaacaccaacctggaataag

SEQ ID NO: 364039 - DNA, 60 bp, Artificial
  Synthetic oligonucleotide
cctacctctaggctgcagatacaatcaaacctagtgaatctgatactaaatagccggtgg

SEQ ID NO: 364040 - DNA, 60 bp, Artificial
  Synthetic oligonucleotide
cctacctctgaaggaacttattggaggcatggtacaacatggtgtggtcgagttgcatgg

SEQ ID NO: 364041 - DNA, 55 bp, Artificial
  Synthetic oligonucleotide
cctacctctttacaacacctcattaacatcccaccatgcaagccactttctatcc

SEQ ID NO: 364042 - DNA, 60 bp, Artificial
  Synthetic oligonucleotide
cctacctgaacctgggtctgtctgttccagtgcttcggctgagtgtgcggcagctcttga

SEQ ID NO: 364043 - DNA, 60 bp, Artificial
  Synthetic oligonucleotide
cctacctgaacgcctgtctggttgttctcagcgcctgcctgtacgttagcagctacgtta

SEQ ID NO: 364044 - DNA, 59 bp, Artificial
  Synthetic oligonucleotide
cctacctgcttatttgttgcaggcatggcagagctaggtgcattttttgctgtccttca

SEQ ID NO: 364045 - DNA, 55 bp, Artificial
  Synthetic oligonucleotide
cctacctgtactcagaaagagcttttgagctatggtgttaccaagagttcagttc

SEQ ID NO: 364046 - DNA, 53 bp, Artificial
  Synthetic oligonucleotide
cctaccttccagaaggtgtgaacaagttaccctcctttgcggagttatttgga

SEQ ID NO: 364047 - DNA, 58 bp, Artificial
  Synthetic oligonucleotide
cctaccttttggcagagaagtgacccgtgtccctcactctagatttaatgttggcaca

SEQ ID NO: 364048 - DNA, 54 bp, Artificial
  Synthetic oligonucleotide
cctacgaaagattatcccgataccaaatcgacttggacacaagaacgttccacc

SEQ ID NO: 364049 - DNA, 55 bp, Artificial
  Synthetic oligonucleotide
cctacgaagctgcttgatacgtaacgaggaggcggagtggcggttcactacccgg

SEQ ID NO: 364050 - DNA, 55 bp, Artificial
  Synthetic oligonucleotide
cctacgaccctccgcagtacgtaaagtacgatgcctacttagcagacgtcaatgg

SEQ ID NO: 364051 - DNA, 50 bp, Artificial
  Synthetic oligonucleotide
cctacgagaaacttagctgggatcagcggatcttccatttctcggaaatc

SEQ ID NO: 364052 - DNA, 53 bp, Artificial
  Synthetic oligonucleotide
cctacgagagcgaaccgtgtttgttagagttgtgtgtacggaatcgcgcttaa

SEQ ID NO: 364053 - DNA, 55 bp, Artificial
  Synthetic oligonucleotide
cctacgagatctggccgtggctgtggaaccagtcgtcttctcccgagtggagacc

SEQ ID NO: 364054 - DNA, 51 bp, Artificial
  Synthetic oligonucleotide
cctacgagttatcctatgaatttaagtgatctgggaagcatccttagatca

SEQ ID NO: 364055 - DNA, 60 bp, Artificial
  Synthetic oligonucleotide
cctacgatgactgatgagattatgatggtagtacgtgtcgaaaaaggtcgcactctagta

SEQ ID NO: 364056 - DNA, 60 bp, Artificial
  Synthetic oligonucleotide
cctacgcaaacatagccactcagctaaaaggtttgcaagcaatttcagtgctcgatatgc

SEQ ID NO: 364057 - DNA, 55 bp, Artificial
  Synthetic oligonucleotide
cctacgcaactggacacagacattgcaacactcttcttggctcaaggcagtccag

SEQ ID NO: 364058 - DNA, 55 bp, Artificial
  Synthetic oligonucleotide
cctacgcatgaatcatactactagcatcatagtgtgctcgtcttttccactgccg

SEQ ID NO: 364059 - DNA, 55 bp, Artificial
  Synthetic oligonucleotide
cctacgcatgctgaatgcggagagactgtggacatagatggtagggaagtcaagg

SEQ ID NO: 364060 - DNA, 55 bp, Artificial
  Synthetic oligonucleotide
cctacgccaacgacttcacggccttcgaccaatcacaggatggcgccatgctaca

SEQ ID NO: 364061 - DNA, 55 bp, Artificial
  Synthetic oligonucleotide
cctacgccacctgtagcccgagtgcagagtacggatgaatatgtggaaagaactg

SEQ ID NO: 364062 - DNA, 55 bp, Artificial
  Synthetic oligonucleotide
cctacgcgcgcgccaatctccatgatgccgactaacaccctcgtacgtagggcct

SEQ ID NO: 364063 - DNA, 57 bp, Artificial
  Synthetic oligonucleotide
cctacgcgctcgtatgaagtcgagtacggcagaagagaaagtcacgcgcaccagcgt

SEQ ID NO: 364064 - DNA, 51 bp, Artificial
  Synthetic oligonucleotide
cctacgcggggcaccaggaacgctcgggtcagaatcgtggccttgactggc

SEQ ID NO: 364065 - DNA, 52 bp, Artificial
  Synthetic oligonucleotide
cctacgcgggtagaccactactctacgcacccgccctagctaccccggagtt

SEQ ID NO: 364066 - DNA, 55 bp, Artificial
  Synthetic oligonucleotide
cctacgctgcacgggccaacacccttgctgtataggctaggagccgtccaaaacg

SEQ ID NO: 364067 - DNA, 55 bp, Artificial
  Synthetic oligonucleotide
cctacgctgcatgggcctacgcccctgctatataggctgggagccgtccaaaatg

SEQ ID NO: 364068 - DNA, 57 bp, Artificial
  Synthetic oligonucleotide
cctacgcttagccagttagcccataatctaagtattgttagagataacaataacctc

SEQ ID NO: 364069 - DNA, 55 bp, Artificial
  Synthetic oligonucleotide
cctacgcttatcggccatgtattcaagttcgtctgtaatcaatgggtctcccggc

SEQ ID NO: 364070 - DNA, 55 bp, Artificial
  Synthetic oligonucleotide
cctacgcttgcacagggcgaattaggtatcgaacttgacacgggtcgtttcaaga

SEQ ID NO: 364071 - DNA, 57 bp, Artificial
  Synthetic oligonucleotide
cctacggaagtggaacctacatggggcaagcaactagacttgttgccatgaaagagg

SEQ ID NO: 364072 - DNA, 60 bp, Artificial
  Synthetic oligonucleotide
cctacggaccaacaattgtgctacacttgtgttgccgtacgtgaactcgctagctattga

SEQ ID NO: 364073 - DNA, 53 bp, Artificial
  Synthetic oligonucleotide
cctacggactaccaattcttcaacccggactttataacaatcagaccctccta

SEQ ID NO: 364074 - DNA, 51 bp, Artificial
  Synthetic oligonucleotide
cctacggagggggacacgccacttttagattctccctacaagtactgtgcg

SEQ ID NO: 364075 - DNA, 57 bp, Artificial
  Synthetic oligonucleotide
cctacggagtatcacaagtcatgagggtaagcgtttaaagatggttttacatgcagg

SEQ ID NO: 364076 - DNA, 58 bp, Artificial
  Synthetic oligonucleotide
cctacggatggaaagcacataaagcaggcgtagtgatgcactcaatggtaccccttat

SEQ ID NO: 364077 - DNA, 55 bp, Artificial
  Synthetic oligonucleotide
cctacggcaagttggtgactcacatattggagacttaacaaatggctaaatccgt

SEQ ID NO: 364078 - DNA, 59 bp, Artificial
  Synthetic oligonucleotide
cctacggcagcgccaagtggcattgggcaatatggaaacaaaagagtcaaaggctatac

SEQ ID NO: 364079 - DNA, 55 bp, Artificial
  Synthetic oligonucleotide
cctacggcgttaattggtacctgttgtctgtattctattacgcaatggtcgattt

SEQ ID NO: 364080 - DNA, 54 bp, Artificial
  Synthetic oligonucleotide
cctacgggaaacagagctatggaactcccaagtactgtaggtccctattggtag

SEQ ID NO: 364081 - DNA, 53 bp, Artificial
  Synthetic oligonucleotide
cctacgggaggtttttagccaaccctaggcagatgctgaggggggtctcggtg

SEQ ID NO: 364082 - DNA, 60 bp, Artificial
  Synthetic oligonucleotide
cctacggggcaggaagaggaggattgccatctaaagctttcatggagcaaaatgtcatca

SEQ ID NO: 364083 - DNA, 57 bp, Artificial
  Synthetic oligonucleotide
cctacggggtaacccgtaggacgcttcaatgtagacatggtgcgaagagtcgattga

SEQ ID NO: 364084 - DNA, 55 bp, Artificial
  Synthetic oligonucleotide
cctacgggtggaaggaacagcataaagtaccgcgattacgcgccctgtcaaaaca

SEQ ID NO: 364085 - DNA, 55 bp, Artificial
  Synthetic oligonucleotide
cctacgggtgtcaaattaatgttgccaaaaggtcattggggattagtgataggaa

SEQ ID NO: 364086 - DNA, 53 bp, Artificial
  Synthetic oligonucleotide
cctacgtaccctaatgcagttcaagaaacgatcaccaggacggtttagaaggg

SEQ ID NO: 364087 - DNA, 55 bp, Artificial
  Synthetic oligonucleotide
cctacgtatataagtccctggctacggttcaacctcgcgtgttgagcagctccac

SEQ ID NO: 364088 - DNA, 58 bp, Artificial
  Synthetic oligonucleotide
cctacgtcaaacataatctacgaatagtctaatctacgaatagaatatacaaacatta

SEQ ID NO: 364089 - DNA, 55 bp, Artificial
  Synthetic oligonucleotide
cctacgtcatagatgacgtaggagggcgtactctgtaaacacggaagtaggcccc

SEQ ID NO: 364090 - DNA, 56 bp, Artificial
  Synthetic oligonucleotide
cctacgtccgcacatcgcttctagatcaccgccctccgactccgttggcccgtttg

SEQ ID NO: 364091 - DNA, 55 bp, Artificial
  Synthetic oligonucleotide
cctacgtcggcacagtggccttttgtgcccttgacacctgctgacacaactcatt

SEQ ID NO: 364092 - DNA, 55 bp, Artificial
  Synthetic oligonucleotide
cctacgtctcgccttgctcgccttataaacgaagcttacgaccctccagtgctac

SEQ ID NO: 364093 - DNA, 57 bp, Artificial
  Synthetic oligonucleotide
cctacgtctgctgatcctactctgtccccaacccctaatttttggcttgaatacagc

SEQ ID NO: 364094 - DNA, 50 bp, Artificial
  Synthetic oligonucleotide
cctacgtggcagtgccacgagaaggctcaaagtcctcgttttattgtgtg

SEQ ID NO: 364095 - DNA, 52 bp, Artificial
  Synthetic oligonucleotide
cctacgtgttatcacaaggttctagagtattacgtgcaacggtatgtcagct

SEQ ID NO: 364096 - DNA, 55 bp, Artificial
  Synthetic oligonucleotide
cctacgttatgaccaaggtcttcataaataagcggatagttgaaagagtacgagt

SEQ ID NO: 364097 - DNA, 52 bp, Artificial
  Synthetic oligonucleotide
cctacgttccgtcgctttttcccgacataagtttgcgcttgaaatccgttgt

SEQ ID NO: 364098 - DNA, 53 bp, Artificial
  Synthetic oligonucleotide
cctacgttgctggggagcgtattgatttgccctggggcctcctactttaacca

SEQ ID NO: 364099 - DNA, 60 bp, Artificial
  Synthetic oligonucleotide
cctacgttggaatgagatcagccgccgttacgttgatgatgaacctgagttctacacacc

SEQ ID NO: 364100 - DNA, 58 bp, Artificial
  Synthetic oligonucleotide
cctactaaactatgcaaggaattacattcctcacatgggccgtttactcagcccattg

SEQ ID NO: 364101 - DNA, 54 bp, Artificial
  Synthetic oligonucleotide
cctactaagtttagacgtggttggtcgtctactaaacgaagaagctattcacga

SEQ ID NO: 364102 - DNA, 55 bp, Artificial
  Synthetic oligonucleotide
cctactagtactgctattggtactactgctactggtagtactgctactactgagg

SEQ ID NO: 364103 - DNA, 58 bp, Artificial
  Synthetic oligonucleotide
cctactatcagtgtcgctatcgcaaagaatgatccattcgttaaagccctttccgact

SEQ ID NO: 364104 - DNA, 60 bp, Artificial
  Synthetic oligonucleotide
cctactatcttacaagcccgaccaagttgacttatacaacacgcgagcgacacacgcaca

SEQ ID NO: 364105 - DNA, 56 bp, Artificial
  Synthetic oligonucleotide
cctactatgctatacaataagatggaattcgaaccctttcaatctttggtacctaa

SEQ ID NO: 364106 - DNA, 50 bp, Artificial
  Synthetic oligonucleotide
cctactcaagttatgggaaccccttgtcctcacaaagctaggagacgtgc

SEQ ID NO: 364107 - DNA, 58 bp, Artificial
  Synthetic oligonucleotide
cctactcacaagtaccgtgctgcatactggaccacctgtatcaggatggctgtggatg

SEQ ID NO: 364108 - DNA, 55 bp, Artificial
  Synthetic oligonucleotide
cctactcagaatggacttcacctaatggctatcagaaagcatggttaggggcata

SEQ ID NO: 364109 - DNA, 53 bp, Artificial
  Synthetic oligonucleotide
cctactcatgcactctttatccctgaccttaaccataaggattaggcaaggag

SEQ ID NO: 364110 - DNA, 55 bp, Artificial
  Synthetic oligonucleotide
cctactccacaggagcttattgctaatcctactcggtggggttatcagcacgttc

SEQ ID NO: 364111 - DNA, 60 bp, Artificial
  Synthetic oligonucleotide
cctactcccaacagacgcggggcctacttggctgcatcatcactagcctcacaggccggg

SEQ ID NO: 364112 - DNA, 56 bp, Artificial
  Synthetic oligonucleotide
cctactcccatctctcctccattgagggacactcatcctcaggccatgcagtggaa

SEQ ID NO: 364113 - DNA, 59 bp, Artificial
  Synthetic oligonucleotide
cctactcccgataatagtggtccagcaatggatggaagacaatggttggattggcgaga

SEQ ID NO: 364114 - DNA, 55 bp, Artificial
  Synthetic oligonucleotide
cctactccgccctcacgtgttagggtgacccggacacaatatcataatccctcct

SEQ ID NO: 364115 - DNA, 55 bp, Artificial
  Synthetic oligonucleotide
cctactctcctgatacattaggttacgatttaattcgtgacttaattttagtcat

SEQ ID NO: 364116 - DNA, 55 bp, Artificial
  Synthetic oligonucleotide
cctactctcgtttcaagcaagtctcgttggtaaacaggtaatgaattagtctctc

SEQ ID NO: 364117 - DNA, 53 bp, Artificial
  Synthetic oligonucleotide
cctactctgaactaataaagagtggtaaaaatccatacctgtatttcaataaa

SEQ ID NO: 364118 - DNA, 58 bp, Artificial
  Synthetic oligonucleotide
cctactctgttatctcaaccttgtagggtccacgtgcggctgattcgccggttcgctc

SEQ ID NO: 364119 - DNA, 55 bp, Artificial
  Synthetic oligonucleotide
cctactcttcaacctgaggaaagtcgacaaagtaggaaagagatgggtcacgctt

SEQ ID NO: 364120 - DNA, 55 bp, Artificial
  Synthetic oligonucleotide
cctactgaaagcacacctgtcactgcatttgggcgggcctttaacagagctagag

SEQ ID NO: 364121 - DNA, 55 bp, Artificial
  Synthetic oligonucleotide
cctactgaagcttcaactcaaattggggatacagaatggaaagatacactgtctc

SEQ ID NO: 364122 - DNA, 60 bp, Artificial
  Synthetic oligonucleotide
cctactgaatgtattgggtacgggcgaagagctgcctgatcccctcagcccaggtgagcg

SEQ ID NO: 364123 - DNA, 51 bp, Artificial
  Synthetic oligonucleotide
cctactgaggcacctacctgagaggcgtagaccaatgaccgccatccgcac

SEQ ID NO: 364124 - DNA, 55 bp, Artificial
  Synthetic oligonucleotide
cctactgcaactacccatcagctcacgaggggcaggtaccaagtttacagtttct

SEQ ID NO: 364125 - DNA, 55 bp, Artificial
  Synthetic oligonucleotide
cctactgcatgacaggggttctgatagaaggaaaatgctttgtcccagaccgaag

SEQ ID NO: 364126 - DNA, 55 bp, Artificial
  Synthetic oligonucleotide
cctactgcgcaacctgcgcgaaaggatggcgaaccctgtgatcccaacacccgac

SEQ ID NO: 364127 - DNA, 55 bp, Artificial
  Synthetic oligonucleotide
cctactgctaatggtacgatagcttcgcttgatgctaacacacttggcttccaca

SEQ ID NO: 364128 - DNA, 56 bp, Artificial
  Synthetic oligonucleotide
cctactggaactcttttcacgcccttgagtaccttaatccaggaatatctgacagt

SEQ ID NO: 364129 - DNA, 56 bp, Artificial
  Synthetic oligonucleotide
cctactggaagctgaataatgcccgctggtgggacggctacgcgggccacgagaca

SEQ ID NO: 364130 - DNA, 55 bp, Artificial
  Synthetic oligonucleotide
cctactgggcctatgtgcctttcccgcccttaattcgggcagtcacatggatgga

SEQ ID NO: 364131 - DNA, 56 bp, Artificial
  Synthetic oligonucleotide
cctactggggagaaagtgtgggaccgtgggaatgtcacacttttgtgtgactgccc

SEQ ID NO: 364132 - DNA, 55 bp, Artificial
  Synthetic oligonucleotide
cctactggggtattacaacttcaggtgggagagcatggcaggacacagacttcgg

SEQ ID NO: 364133 - DNA, 53 bp, Artificial
  Synthetic oligonucleotide
cctactgggtggggtagggatccggactgaatccgtagtatttcggtacaaca

SEQ ID NO: 364134 - DNA, 53 bp, Artificial
  Synthetic oligonucleotide
cctactggtggggaaggaaatccacgttttgcccgtgactgtatagaagtggg

SEQ ID NO: 364135 - DNA, 59 bp, Artificial
  Synthetic oligonucleotide
cctactgtagtgagttttacaatcaaggatcagaccgtgagttttagaatgtgtgatct

SEQ ID NO: 364136 - DNA, 59 bp, Artificial
  Synthetic oligonucleotide
cctactgtcgcaagggtcatggccctgccggggccacctatctgccacggaggcctcca

SEQ ID NO: 364137 - DNA, 55 bp, Artificial
  Synthetic oligonucleotide
cctactgtgactaagtgtacttttaagaaatacggtccttctgggtctgcagaac

SEQ ID NO: 364138 - DNA, 59 bp, Artificial
  Synthetic oligonucleotide
cctactgtgtgtcaagttgctggagttgcctacaatgacggtctcacactctttaacgg

SEQ ID NO: 364139 - DNA, 55 bp, Artificial
  Synthetic oligonucleotide
cctactgttggcactacgcgcctcgacagtgcggtatcgtacccgcttcgcaggt

SEQ ID NO: 364140 - DNA, 55 bp, Artificial
  Synthetic oligonucleotide
cctacttattctaaagaagaaaaggactttctccaggcagagggaggacaagtga

SEQ ID NO: 364141 - DNA, 57 bp, Artificial
  Synthetic oligonucleotide
cctacttcaacgcaatctacaaatggggcgcccaagaaggaggctgcctcccaggct

SEQ ID NO: 364142 - DNA, 57 bp, Artificial
  Synthetic oligonucleotide
cctacttccacgagtactccactctgcagtggttgactctcgggaaactaataataa

SEQ ID NO: 364143 - DNA, 52 bp, Artificial
  Synthetic oligonucleotide
cctacttcctaaagtcttacagagacctataaagccggatgagacacaactc

SEQ ID NO: 364144 - DNA, 51 bp, Artificial
  Synthetic oligonucleotide
cctacttctagagaagctgtaacttattttatgaacgtgcttgcaggtgga

SEQ ID NO: 364145 - DNA, 57 bp, Artificial
  Synthetic oligonucleotide
cctacttctggctggcaggtcctgtggcatgtacggtcttaagggacccgacattta

SEQ ID NO: 364146 - DNA, 55 bp, Artificial
  Synthetic oligonucleotide
cctacttgtagacatagaactgcagcatttatagtaagaaaccattctgaggaag

SEQ ID NO: 364147 - DNA, 60 bp, Artificial
  Synthetic oligonucleotide
cctacttgtcctgcgatccccaaggctgcagaatgtatgctttgagccaaggcacaacac

SEQ ID NO: 364148 - DNA, 57 bp, Artificial
  Synthetic oligonucleotide
cctacttgttcctgctcctcccaatagtcatgtacttatttctgcctataatttagg

SEQ ID NO: 364149 - DNA, 55 bp, Artificial
  Synthetic oligonucleotide
cctactttaaggttgtaggtgaacaatcacaggtgatcgcagagaaggtgtcccc

SEQ ID NO: 364150 - DNA, 57 bp, Artificial
  Synthetic oligonucleotide
cctactttcaacgtgaaggctacgatagtgccagggcgggtactgccgtaagtgcca

SEQ ID NO: 364151 - DNA, 51 bp, Artificial
  Synthetic oligonucleotide
cctactttcaactggggtcaaaatgatacggacgtttttgtccttaacaac

SEQ ID NO: 364152 - DNA, 50 bp, Artificial
  Synthetic oligonucleotide
cctactttcagtaggggtaggcatctatctccttcccaaccgatagacgg

SEQ ID NO: 364153 - DNA, 50 bp, Artificial
  Synthetic oligonucleotide
cctactttcgaggcaacagggccaatcaagcaggcgataatcaacgcaaa

SEQ ID NO: 364154 - DNA, 54 bp, Artificial
  Synthetic oligonucleotide
cctactttgatccggcttatttcaggctcgggcaagaaatggttagaagatccg

SEQ ID NO: 364155 - DNA, 56 bp, Artificial
  Synthetic oligonucleotide
cctacttttaaataactcaccatacatcccgacttgtctatccatatcagatagtg

SEQ ID NO: 364156 - DNA, 59 bp, Artificial
  Synthetic oligonucleotide
cctagaaagtactatgcgtcaactctatcatttaccatgactaggtgcatcctaccttt

SEQ ID NO: 364157 - DNA, 51 bp, Artificial
  Synthetic oligonucleotide
cctagaaatacacaagatcatgttcgatcgttgtgcctattggcttggcac

SEQ ID NO: 364158 - DNA, 60 bp, Artificial
  Synthetic oligonucleotide
cctagaaatagggaatgtggagaacataacatgtaatgatggtcctagccttatcagcac

SEQ ID NO: 364159 - DNA, 55 bp, Artificial
  Synthetic oligonucleotide
cctagaaatcgtcacaaaaggaaccagtgcaagaccacactttgttgtggcaacc

SEQ ID NO: 364160 - DNA, 60 bp, Artificial
  Synthetic oligonucleotide
cctagaacagatccaaaagtagtcaatgtaggacctagcgacatgtttgtacatgctggt

SEQ ID NO: 364161 - DNA, 52 bp, Artificial
  Synthetic oligonucleotide
cctagaacccctgttaaacgtattgatggtaaacgtcgaggtaatcaggtaa

SEQ ID NO: 364162 - DNA, 57 bp, Artificial
  Synthetic oligonucleotide
cctagaacgcagcagccgcaaattcacatttatgcggccccgtgggattctgatgac

SEQ ID NO: 364163 - DNA, 55 bp, Artificial
  Synthetic oligonucleotide
cctagaacgcgatcgcaggtcgttggattgacttccaaactgaaggatttcacca

SEQ ID NO: 364164 - DNA, 57 bp, Artificial
  Synthetic oligonucleotide
cctagaactgcttgtactaagtgttattgtaaaggctgttgctaccattgtctagtt

SEQ ID NO: 364165 - DNA, 55 bp, Artificial
  Synthetic oligonucleotide
cctagaactgtaattatagtggaccatctaggccaacggagatccgtgagtattg

SEQ ID NO: 364166 - DNA, 54 bp, Artificial
  Synthetic oligonucleotide
cctagaagaataagacagggcttggaaaggattttgctataagacggaccgacc

SEQ ID NO: 364167 - DNA, 60 bp, Artificial
  Synthetic oligonucleotide
cctagaagattgagtttttgtcttgacagcctctcatcctgccctatgtagttcagacat

SEQ ID NO: 364168 - DNA, 53 bp, Artificial
  Synthetic oligonucleotide
cctagaaggccccgtaatgccccctgagagccccgtagacggacgaacggtgc

SEQ ID NO: 364169 - DNA, 55 bp, Artificial
  Synthetic oligonucleotide
cctagaatggtgactatggcgttttcgaacatgggccgaggagtgttggtggagg

SEQ ID NO: 364170 - DNA, 54 bp, Artificial
  Synthetic oligonucleotide
cctagaatttgaaaaattaggactaactggatgggaagacttagaccaggattc

SEQ ID NO: 364171 - DNA, 55 bp, Artificial
  Synthetic oligonucleotide
cctagacaaccatcacctgcctctagaaacggccatctccaagtccctctgtacc

SEQ ID NO: 364172 - DNA, 56 bp, Artificial
  Synthetic oligonucleotide
cctagacccaactttcaccatcactactcaaaccgtccctcaagacgctgtctccc

SEQ ID NO: 364173 - DNA, 55 bp, Artificial
  Synthetic oligonucleotide
cctagacctactcctgtgatcgtatcttccaactctgttatcaaaccctgctgag

SEQ ID NO: 364174 - DNA, 52 bp, Artificial
  Synthetic oligonucleotide
cctagacgtttaggaaatgatactaacgtactaaaccaaggcggagaagtag

SEQ ID NO: 364175 - DNA, 55 bp, Artificial
  Synthetic oligonucleotide
cctagactcattcctccgtcgatatttctcttggctcacaaccagctcctgacgc

SEQ ID NO: 364176 - DNA, 56 bp, Artificial
  Synthetic oligonucleotide
cctagactttcatgactcaaatgttaagaacctttacgacaaggttcgactacagc

SEQ ID NO: 364177 - DNA, 55 bp, Artificial
  Synthetic oligonucleotide
cctagagaagggtgaggcaaactgcactcgccaacacatgcaagccgcaatgtac

SEQ ID NO: 364178 - DNA, 54 bp, Artificial
  Synthetic oligonucleotide
cctagagacccctatcaccttagtatttgaagttaaactctctttgaattacac

SEQ ID NO: 364179 - DNA, 55 bp, Artificial
  Synthetic oligonucleotide
cctagagacgaagatgagctccgaatctatgaagcacaggcatcgcgcatcaaag

SEQ ID NO: 364180 - DNA, 55 bp, Artificial
  Synthetic oligonucleotide
cctagagagtgaaatgataataccaaagaacctggccggaccagtatcacagcac

SEQ ID NO: 364181 - DNA, 55 bp, Artificial
  Synthetic oligonucleotide
cctagagataaaataagaccaccaacatggctatcaaaagagggcaaaagcatat

SEQ ID NO: 364182 - DNA, 55 bp, Artificial
  Synthetic oligonucleotide
cctagagataacttcatcaggaacgtacaggttagcccagaattcttctcgggcc

SEQ ID NO: 364183 - DNA, 55 bp, Artificial
  Synthetic oligonucleotide
cctagagccatggcaacacccgggaagtcagcctacaacaccttgtagcaagtgt

SEQ ID NO: 364184 - DNA, 53 bp, Artificial
  Synthetic oligonucleotide
cctagagccctggaaacatccgggaagtcggcctacaactgcttgtacaaatt

SEQ ID NO: 364185 - DNA, 58 bp, Artificial
  Synthetic oligonucleotide
cctagagccctggaatcacccgggaagtcagcctacaactgagtgtagcacgtgttac

SEQ ID NO: 364186 - DNA, 53 bp, Artificial
  Synthetic oligonucleotide
cctagagccctggaatcatccgggaagtaaacctacaaccgcttgtagttcgt

SEQ ID NO: 364187 - DNA, 55 bp, Artificial
  Synthetic oligonucleotide
cctagaggaagttgatggggtcggacattggtccactattgtgaaatttattagg

SEQ ID NO: 364188 - DNA, 60 bp, Artificial
  Synthetic oligonucleotide
cctagaggctacaggatcgcgcgtaatggatgcagctgactgtttccgtaattcagcaga

SEQ ID NO: 364189 - DNA, 55 bp, Artificial
  Synthetic oligonucleotide
cctagagtaccgtacgagagatattccagataacgcgcttgcggttagcgttttg

SEQ ID NO: 364190 - DNA, 58 bp, Artificial
  Synthetic oligonucleotide
cctagagtagatataccaaagattgctagatctttttatgaactatttgagcaaaaag

SEQ ID NO: 364191 - DNA, 59 bp, Artificial
  Synthetic oligonucleotide
cctagagtgcttgtctttgacgagtcagtgccttgccgctgtaggactttcttaaagaa

SEQ ID NO: 364192 - DNA, 55 bp, Artificial
  Synthetic oligonucleotide
cctagagtggacacataaaaggcatatagcccaatcactttgggtatgttcccaa

SEQ ID NO: 364193 - DNA, 55 bp, Artificial
  Synthetic oligonucleotide
cctagagttagctaacatcatgtgtgaacgcttcgcgtttgacttctattcccac

SEQ ID NO: 364194 - DNA, 55 bp, Artificial
  Synthetic oligonucleotide
cctagatacgagaagcaagtcgcaggatacctcacagaactcaaattttggggcg

SEQ ID NO: 364195 - DNA, 55 bp, Artificial
  Synthetic oligonucleotide
cctagatatagataatgggtgcccaactgagtaagaacactgctggatcacatac

SEQ ID NO: 364196 - DNA, 55 bp, Artificial
  Synthetic oligonucleotide
cctagatatgttcagaactgcttttggaggaaaatacatgagaagtggctggggt

SEQ ID NO: 364197 - DNA, 60 bp, Artificial
  Synthetic oligonucleotide
cctagatcccgtctcgggttcatattgtgcaggaccactaagacagtgtatccggtgcac

SEQ ID NO: 364198 - DNA, 60 bp, Artificial
  Synthetic oligonucleotide
cctagatcctgcaagaaggaagggtgttgctgtggtaacagacacaactaccctgatgag

SEQ ID NO: 364199 - DNA, 60 bp, Artificial
  Synthetic oligonucleotide
cctagatcttggaggtacgatatatatatccgattgttacctaattgagctggaagttgc

SEQ ID NO: 364200 - DNA, 55 bp, Artificial
  Synthetic oligonucleotide
cctagatgggataactttctaagacgtccagtcgctcaacgactaccgaacttag

SEQ ID NO: 364201 - DNA, 60 bp, Artificial
  Synthetic oligonucleotide
cctagatgtgtggacatacaatgctgagctcctggttctaatggagaatgagaggacact

SEQ ID NO: 364202 - DNA, 60 bp, Artificial
  Synthetic oligonucleotide
cctagattacactctgttgtatgacactctaccagagactgttagcgataatattactct

SEQ ID NO: 364203 - DNA, 55 bp, Artificial
  Synthetic oligonucleotide
cctagattgcattcatgcagtatctcgcccaaagggaagcagagcaggagacggc

SEQ ID NO: 364204 - DNA, 59 bp, Artificial
  Synthetic oligonucleotide
cctagatttaccagatactcgacaacctcaagatgtccattcccagaagccaatctaac

SEQ ID NO: 364205 - DNA, 55 bp, Artificial
  Synthetic oligonucleotide
cctagatttctgtttcctatgcaatcgattaccaggcacgtgatcgctcgagggc

SEQ ID NO: 364206 - DNA, 55 bp, Artificial
  Synthetic oligonucleotide
cctagcaaatcatgggcatcgtgttctcctattccagctatcatgatgcataaga

SEQ ID NO: 364207 - DNA, 55 bp, Artificial
  Synthetic oligonucleotide
cctagcaactgtgggtgtgttgggccggatgctgggaaaattttcgtagtcccgc

SEQ ID NO: 364208 - DNA, 54 bp, Artificial
  Synthetic oligonucleotide
cctagcaagtaatagacatccccgaaagccctaccaaataagtagtcaggtacc

SEQ ID NO: 364209 - DNA, 60 bp, Artificial
  Synthetic oligonucleotide
cctagcaagtcttgggcatcgtgtgcacccatacctcacttcctagtgcacagactcctt

SEQ ID NO: 364210 - DNA, 55 bp, Artificial
  Synthetic oligonucleotide
cctagcaagtgttatcagtttgcactaggacaggggaccacactggacaacagac

SEQ ID NO: 364211 - DNA, 53 bp, Artificial
  Synthetic oligonucleotide
cctagcaagttcactgaaccgatgaaagacctaatggttaaaaccctacccgc

SEQ ID NO: 364212 - DNA, 51 bp, Artificial
  Synthetic oligonucleotide
cctagcacaccaacgacagtccctgcgttgcactccacactcacgtcgtgc

SEQ ID NO: 364213 - DNA, 55 bp, Artificial
  Synthetic oligonucleotide
cctagcacgaaaacacatagcccgagaaatgcacccagagtactataaagactgc

SEQ ID NO: 364214 - DNA, 58 bp, Artificial
  Synthetic oligonucleotide
cctagcagaaggacaacaagcgtgcagcacttgccagaccatcactgtacttggtcga

SEQ ID NO: 364215 - DNA, 55 bp, Artificial
  Synthetic oligonucleotide
cctagcagcttgttttgctcgcagccggtctggagcacgtctcatcggaaccgac

SEQ ID NO: 364216 - DNA, 59 bp, Artificial
  Synthetic oligonucleotide
cctagcatatggctttatggcttaggacaacacatctatgaaacttatggagatacttg

SEQ ID NO: 364217 - DNA, 51 bp, Artificial
  Synthetic oligonucleotide
cctagcatcggagtggatgatccctacgcacaacacgcgcctggccggaga

SEQ ID NO: 364218 - DNA, 50 bp, Artificial
  Synthetic oligonucleotide
cctagcatgcgtatatcgaagtgagtgtgttgcattaccagctcccgtag

SEQ ID NO: 364219 - DNA, 60 bp, Artificial
  Synthetic oligonucleotide
cctagcattagtcccgcagtacaagccactcccaacagagatggataccctaggtcaatg

SEQ ID NO: 364220 - DNA, 55 bp, Artificial
  Synthetic oligonucleotide
cctagccaaacccattgcaaatcttatcaatggtaccttaaggcaatcacctgat

SEQ ID NO: 364221 - DNA, 57 bp, Artificial
  Synthetic oligonucleotide
cctagccaaactgaaagggagtacgttgttggtcattggcgatcctatccacgtaca

SEQ ID NO: 364222 - DNA, 60 bp, Artificial
  Synthetic oligonucleotide
cctagccacaaagcaagagtgctggctgaggcaatgagtcaaacaaacaacataaatgta

SEQ ID NO: 364223 - DNA, 51 bp, Artificial
  Synthetic oligonucleotide
cctagccacagggcgcacagccgcacaggggcacacacagcgccattccca

SEQ ID NO: 364224 - DNA, 52 bp, Artificial
  Synthetic oligonucleotide
cctagccagcttagcttccacatcctgacggtatgcaggatcagagctatag

SEQ ID NO: 364225 - DNA, 55 bp, Artificial
  Synthetic oligonucleotide
cctagccaggtaccacggctttaagctaactctttacagacacccaacagtagac

SEQ ID NO: 364226 - DNA, 60 bp, Artificial
  Synthetic oligonucleotide
cctagccatgttagtgaatgtcaaggagtcacaggcaaaggagttcacgaaagttgtcag

SEQ ID NO: 364227 - DNA, 56 bp, Artificial
  Synthetic oligonucleotide
cctagcccacattgttttgcccgtacgactatcaccctcaataacaatacttatgg

SEQ ID NO: 364228 - DNA, 59 bp, Artificial
  Synthetic oligonucleotide
cctagcccagacagcctaccgcttcgccggccaactgccacaatcacccgattcaacta

SEQ ID NO: 364229 - DNA, 55 bp, Artificial
  Synthetic oligonucleotide
cctagcccagtcgtggttggcaccactgaccggagaggccaacccacattcacct

SEQ ID NO: 364230 - DNA, 55 bp, Artificial
  Synthetic oligonucleotide
cctagccctcctgtgcgttcaagaatttctcggacacaataccagaatccatcct

SEQ ID NO: 364231 - DNA, 53 bp, Artificial
  Synthetic oligonucleotide
cctagccgtttaaaggtaacacgtgttaccatcttaagtcaagagtggttcca

SEQ ID NO: 364232 - DNA, 55 bp, Artificial
  Synthetic oligonucleotide
cctagcctactttgagatggcgaaggagtggttggaggtgcagtgtggattggca

SEQ ID NO: 364233 - DNA, 55 bp, Artificial
  Synthetic oligonucleotide
cctagcctggtattcgttgaagccagcgagtattacccagctagataccaatcac

SEQ ID NO: 364234 - DNA, 60 bp, Artificial
  Synthetic oligonucleotide
cctagcgacaccatccagacaagacatgtgaaaaactaccactcgcgttcagagtccacc

SEQ ID NO: 364235 - DNA, 55 bp, Artificial
  Synthetic oligonucleotide
cctagcgagcgaaagccgcttttccttccacctgaatcagatcccgagcatgttg

SEQ ID NO: 364236 - DNA, 57 bp, Artificial
  Synthetic oligonucleotide
cctagcgcgttcggaaaggacacaagagtaaagtgtgacagctatccgggagtgaaa

SEQ ID NO: 364237 - DNA, 55 bp, Artificial
  Synthetic oligonucleotide
cctagcgggtacgcacaaacggactgcgtgttggaagcaatggctttccttgaag

SEQ ID NO: 364238 - DNA, 55 bp, Artificial
  Synthetic oligonucleotide
cctagcgtattgaaagcagtggtccttaaagtctttctaagtgatactgagggta

SEQ ID NO: 364239 - DNA, 60 bp, Artificial
  Synthetic oligonucleotide
cctagctcttatagggccactctacgtgctgcaggcctccctactgcgcatcccctactt

SEQ ID NO: 364240 - DNA, 58 bp, Artificial
  Synthetic oligonucleotide
cctagctgatctaggcgacaaggagctatctccaatagatgggcaatgcgtttcatta

SEQ ID NO: 364241 - DNA, 58 bp, Artificial
  Synthetic oligonucleotide
cctagctgatttaggcgataaggagttatctcccatagataagcagtgcgtcacacta

SEQ ID NO: 364242 - DNA, 60 bp, Artificial
  Synthetic oligonucleotide
cctagctgcgacagaccaatcagatggaatgctgaaacctgagaggtctattcgactcct

SEQ ID NO: 364243 - DNA, 60 bp, Artificial
  Synthetic oligonucleotide
cctagctgtgacctccagagtgctcatgggaatccctgcatgaaagagaaactcgtgatg

SEQ ID NO: 364244 - DNA, 51 bp, Artificial
  Synthetic oligonucleotide
cctagcttcagtttgtctgattctagtggggatgtttctcctatttacagg

SEQ ID NO: 364245 - DNA, 60 bp, Artificial
  Synthetic oligonucleotide
cctagcttcgctgggctcattgatccaaaacttcccccagatgtgttgtcaacaatttgc

SEQ ID NO: 364246 - DNA, 54 bp, Artificial
  Synthetic oligonucleotide
cctagctttgaagtataatactactgaattttttcaaacgaagggttcgagaga

SEQ ID NO: 364247 - DNA, 59 bp, Artificial
  Synthetic oligonucleotide
cctagctttgctcgtcctcatgctcccccaacgggcgtatgcgtggtcgggtgaagaca

SEQ ID NO: 364248 - DNA, 53 bp, Artificial
  Synthetic oligonucleotide
cctaggaaacccattgataaagtggcgcgcttgtttggggcttataaaggacc

SEQ ID NO: 364249 - DNA, 60 bp, Artificial
  Synthetic oligonucleotide
cctaggaatgctattccttgggtttatgagtgcagcaggaagcactatgggcgcagcggc

SEQ ID NO: 364250 - DNA, 53 bp, Artificial
  Synthetic oligonucleotide
cctaggacccctgctcgtgttacaggcggggtttttcttgttgacaagaatcc

SEQ ID NO: 364251 - DNA, 56 bp, Artificial
  Synthetic oligonucleotide
cctaggacctgcaagaacatgtggagcgggaccttccccattaacgcctacaccac

SEQ ID NO: 364252 - DNA, 55 bp, Artificial
  Synthetic oligonucleotide
cctaggacctgtagaaacatgtggagcgggaccttccccattaacgcccacacaa

SEQ ID NO: 364253 - DNA, 55 bp, Artificial
  Synthetic oligonucleotide
cctaggacctgtaggaacatgtggagtggaactttccccattaacgcctacacca

SEQ ID NO: 364254 - DNA, 55 bp, Artificial
  Synthetic oligonucleotide
cctaggacgatggtctgccccgacgctctgaaccgacggttccacttcgacatcg

SEQ ID NO: 364255 - DNA, 58 bp, Artificial
  Synthetic oligonucleotide
cctaggagaatcagacagggcttcgaaagagctttgctataacatgggaggcaagtgg

SEQ ID NO: 364256 - DNA, 55 bp, Artificial
  Synthetic oligonucleotide
cctaggatacccaaacctgattgagaggacacacgaattcttcgagaagagcttg

SEQ ID NO: 364257 - DNA, 52 bp, Artificial
  Synthetic oligonucleotide
cctaggcaagttggaactggattttgatttgtgtgagggtaccacagttgtt

SEQ ID NO: 364258 - DNA, 55 bp, Artificial
  Synthetic oligonucleotide
cctaggccagggatcaaatccaaggcacagctgtgacctactccatagctgtagc

SEQ ID NO: 364259 - DNA, 55 bp, Artificial
  Synthetic oligonucleotide
cctaggcggaccatatccctaggcgcaatatcccctagaagagggttcttggttc

SEQ ID NO: 364260 - DNA, 58 bp, Artificial
  Synthetic oligonucleotide
cctaggcggctccaaattcagcgtttgcactgtcgtgtccaacacacccgtggacgcc

SEQ ID NO: 364261 - DNA, 55 bp, Artificial
  Synthetic oligonucleotide
cctaggcgggactgtccacattgttgttgtcccatatgtagttggcattgtcagc

SEQ ID NO: 364262 - DNA, 55 bp, Artificial
  Synthetic oligonucleotide
cctagggatgtcgtgtgttggtcatgacctgtcgtagcacgaatacttatgatgg

SEQ ID NO: 364263 - DNA, 55 bp, Artificial
  Synthetic oligonucleotide
cctagggatttaaggacgtgaactctgttgagatctctgtgaaattcagagggtg

SEQ ID NO: 364264 - DNA, 55 bp, Artificial
  Synthetic oligonucleotide
cctagggatttggggctactctggaaaactcatctgcaccactaatgtcccctgg

SEQ ID NO: 364265 - DNA, 55 bp, Artificial
  Synthetic oligonucleotide
cctagggcaatgatgcacccaagctttgctgggctcattgatcccaagcttcccc

SEQ ID NO: 364266 - DNA, 60 bp, Artificial
  Synthetic oligonucleotide
cctagggcagcatcggtcaggtgactagcagccggctctaaggagcgctgaaagtgctag

SEQ ID NO: 364267 - DNA, 55 bp, Artificial
  Synthetic oligonucleotide
cctagggttgaatgcccgaggccaaagcattgctagggcccaaagtgcttcgacc

SEQ ID NO: 364268 - DNA, 59 bp, Artificial
  Synthetic oligonucleotide
cctaggtagatcggggtacacgattcacgtgcagtgcaacgcatccaaatttcaccaag

SEQ ID NO: 364269 - DNA, 52 bp, Artificial
  Synthetic oligonucleotide
cctaggtatggcctattgcgcaatttgagagataggagtctggcacgctatg

SEQ ID NO: 364270 - DNA, 55 bp, Artificial
  Synthetic oligonucleotide
cctaggtgacttcaaacagggcatagacagtcgcaggacccgtagaccaggcata

SEQ ID NO: 364271 - DNA, 59 bp, Artificial
  Synthetic oligonucleotide
cctaggtgcttagtccactatccctataggctttggcattatccttgtaccatcaatta

SEQ ID NO: 364272 - DNA, 54 bp, Artificial
  Synthetic oligonucleotide
cctaggtggggcgcgcatacctaggggtgattaacgcacgcgcaacctaaaccc

SEQ ID NO: 364273 - DNA, 55 bp, Artificial
  Synthetic oligonucleotide
cctaggtggttgacgcgcgaaggtccacagttaactcgcagggtgccgatcatag

SEQ ID NO: 364274 - DNA, 60 bp, Artificial
  Synthetic oligonucleotide
cctaggtgtgactatcaagcaggacataataaggtaggatctctacaatacttggcactg

SEQ ID NO: 364275 - DNA, 55 bp, Artificial
  Synthetic oligonucleotide
cctaggtgtgagtatcaagcaggacacaacaaggtagggtctctacagtacctgg

SEQ ID NO: 364276 - DNA, 56 bp, Artificial
  Synthetic oligonucleotide
cctaggttcgggtcatagacgattgggctttcgccacggaaatcgaccaacactgc

SEQ ID NO: 364277 - DNA, 58 bp, Artificial
  Synthetic oligonucleotide
cctaggttcgtccagagggttcaaagattcaccttctttgtcaagaagcgatgaatga

SEQ ID NO: 364278 - DNA, 60 bp, Artificial
  Synthetic oligonucleotide
cctaggttgtcaatcatatacttgaagcatagtgacaacttagcatcaaacttgcttaga

SEQ ID NO: 364279 - DNA, 60 bp, Artificial
  Synthetic oligonucleotide
cctagtaacaccatgaaagttgcggagagcttcgttcagcactcccccagtgtagatcag

SEQ ID NO: 364280 - DNA, 53 bp, Artificial
  Synthetic oligonucleotide
cctagtaacggtgcggggttaacacgtaagactaagacgtcgctgagtgttag

SEQ ID NO: 364281 - DNA, 60 bp, Artificial
  Synthetic oligonucleotide
cctagtactatgtgaagctggatactggaccgttccagatatagaagacaatactacaga

SEQ ID NO: 364282 - DNA, 58 bp, Artificial
  Synthetic oligonucleotide
cctagtactgctactatcaagaatgatcttcgagaccgttatcaagttctaaggaaat

SEQ ID NO: 364283 - DNA, 59 bp, Artificial
  Synthetic oligonucleotide
cctagtagaaaacatttcatagtcgcaactaacatcattgagaacggtgtcaccttaga

SEQ ID NO: 364284 - DNA, 55 bp, Artificial
  Synthetic oligonucleotide
cctagtagtggagaagacaaagaagtgcactaccatttagttgtcaaccaagcag

SEQ ID NO: 364285 - DNA, 51 bp, Artificial
  Synthetic oligonucleotide
cctagtagttataggaatgccacatcactgttaccagaaagcgtagtcagg

SEQ ID NO: 364286 - DNA, 55 bp, Artificial
  Synthetic oligonucleotide
cctagtatcaccatgaaggttgcgtggcgtttcgctccgcacaaccccagtgtag

SEQ ID NO: 364287 - DNA, 60 bp, Artificial
  Synthetic oligonucleotide
cctagtattatgtgaagctggatactggactgtaccagatatagaaactaatactacaga

SEQ ID NO: 364288 - DNA, 55 bp, Artificial
  Synthetic oligonucleotide
cctagtattctgtccgacttttcttcgctcgtgtcaaatatccaggacatctcac

SEQ ID NO: 364289 - DNA, 56 bp, Artificial
  Synthetic oligonucleotide
cctagtcgactggccaagttccttagggaaaacggctacaagattctgcagccacg

SEQ ID NO: 364290 - DNA, 56 bp, Artificial
  Synthetic oligonucleotide
cctagtcgcagttctctttcggttgacagtgctagtaataggaatttcggggcgac

SEQ ID NO: 364291 - DNA, 58 bp, Artificial
  Synthetic oligonucleotide
cctagtcgtctggatgcgcaagaacgtttacaaaaggcttacgctagtgttacatctc

SEQ ID NO: 364292 - DNA, 54 bp, Artificial
  Synthetic oligonucleotide
cctagtctaaatctttacagtggcctagagacctactacagtaaactttcgccc

SEQ ID NO: 364293 - DNA, 58 bp, Artificial
  Synthetic oligonucleotide
cctagtctctagcccgccagatgtaaatagggtgaccactagagaggaactcgaggcg

SEQ ID NO: 364294 - DNA, 55 bp, Artificial
  Synthetic oligonucleotide
cctagtctgagatgataagattcaagggctgtgattgggcaagttggtactcaag

SEQ ID NO: 364295 - DNA, 56 bp, Artificial
  Synthetic oligonucleotide
cctagtcttatgggaacagcagtttatgataaataatgacctgatagacaaaagtg

SEQ ID NO: 364296 - DNA, 55 bp, Artificial
  Synthetic oligonucleotide
cctagtgaacctaatagtataccgtgggcaccactagaaccacctttgagtatgc

SEQ ID NO: 364297 - DNA, 55 bp, Artificial
  Synthetic oligonucleotide
cctagtgaagaaatggcgcacgtacggaatgtcaagataccctggtattgttctg

SEQ ID NO: 364298 - DNA, 60 bp, Artificial
  Synthetic oligonucleotide
cctagtgacatgtatgtgcatgttgggaatctcatatatagaaatttgcacctcttcaat

SEQ ID NO: 364299 - DNA, 57 bp, Artificial
  Synthetic oligonucleotide
cctagtgactccaaggtctacctgccaccggccccagtgtctaaggtggtcagcacg

SEQ ID NO: 364300 - DNA, 55 bp, Artificial
  Synthetic oligonucleotide
cctagtggatggcgttgtctcgtagaggtccagatctctcctgttggcaactcga

SEQ ID NO: 364301 - DNA, 60 bp, Artificial
  Synthetic oligonucleotide
cctagtggctcaatggtgacatctgatgcccaattatttaacaagccatactggttacag

SEQ ID NO: 364302 - DNA, 59 bp, Artificial
  Synthetic oligonucleotide
cctagtggctctatggttacttcggatgcacaactatttaataagccatactggttaca

SEQ ID NO: 364303 - DNA, 55 bp, Artificial
  Synthetic oligonucleotide
cctagtgtattccatgatatcttcgagggaagtaaggaaccagctgtcttgcaca

SEQ ID NO: 364304 - DNA, 59 bp, Artificial
  Synthetic oligonucleotide
cctagtgtccagaagttaacagaagatagatggaacaggcacctgaaaaccagagacca

SEQ ID NO: 364305 - DNA, 56 bp, Artificial
  Synthetic oligonucleotide
cctagtgtggattataacaggttgcctgtgctgggtaatgttattggcaagggggg

SEQ ID NO: 364306 - DNA, 59 bp, Artificial
  Synthetic oligonucleotide
cctagtgtgttctacgatgtcttcccaggttctaaggaaccagctgtctcacgagataa

SEQ ID NO: 364307 - DNA, 51 bp, Artificial
  Synthetic oligonucleotide
cctagttcaggagtacagcactggtcatgggctatcaatgcacagggacga

SEQ ID NO: 364308 - DNA, 57 bp, Artificial
  Synthetic oligonucleotide
cctagttcggttaagatatggcgaacagattagagccaagtttggggccgagctgga

SEQ ID NO: 364309 - DNA, 55 bp, Artificial
  Synthetic oligonucleotide
cctagttctagacgaatacaccctactcactgaattacctccagcgtacgctctc

SEQ ID NO: 364310 - DNA, 55 bp, Artificial
  Synthetic oligonucleotide
cctataaaatcgttgctacaaatctgaggtgtcctaaggagacgttgcgacattg

SEQ ID NO: 364311 - DNA, 56 bp, Artificial
  Synthetic oligonucleotide
cctataaaattgtatcactcaaatacacgcgaaaggtgtgtattcaattggggaca

SEQ ID NO: 364312 - DNA, 55 bp, Artificial
  Synthetic oligonucleotide
cctataaactcctgggtcagtcatttggtcagcagacgctgaggagcagcagacg

SEQ ID NO: 364313 - DNA, 54 bp, Artificial
  Synthetic oligonucleotide
cctataaagtctggttgctggaaaactatggttacttccaattccaaggtgacc

SEQ ID NO: 364314 - DNA, 55 bp, Artificial
  Synthetic oligonucleotide
cctataagatcataccagagaaagagaggtttagttgtcttgtttactaaccacc

SEQ ID NO: 364315 - DNA, 60 bp, Artificial
  Synthetic oligonucleotide
cctataagatgctcctcggagtgcgatctactcatggaggccagtggccagtactcgtct

SEQ ID NO: 364316 - DNA, 51 bp, Artificial
  Synthetic oligonucleotide
cctataaggcggaagtagaaactactaacggattacaatttaagaacggta

SEQ ID NO: 364317 - DNA, 54 bp, Artificial
  Synthetic oligonucleotide
cctataatggccttgcacacaatcactcccgcagagagcgtcttagctcaattc

SEQ ID NO: 364318 - DNA, 59 bp, Artificial
  Synthetic oligonucleotide
cctataatgttctcaaacaagatggcgagattagggaaaggatacatgttcgaaagcaa

SEQ ID NO: 364319 - DNA, 55 bp, Artificial
  Synthetic oligonucleotide
cctataatgttttcgaacaaaatggcaaggttagggaaaggatacatgttcgaga

SEQ ID NO: 364320 - DNA, 59 bp, Artificial
  Synthetic oligonucleotide
cctatacaagacttgtcttgcagattgctatacgcaataccggactaccggtctgagca

SEQ ID NO: 364321 - DNA, 60 bp, Artificial
  Synthetic oligonucleotide
cctatacaatatccggaatctccacattccggaggtctgcttgaagtgggaattgatgga

SEQ ID NO: 364322 - DNA, 57 bp, Artificial
  Synthetic oligonucleotide
cctatacagaaagaaacatgggagacgtggtggacggagtattggcaggctacctgt

SEQ ID NO: 364323 - DNA, 60 bp, Artificial
  Synthetic oligonucleotide
cctatacataagcgttcacattatgtgacgggtgccccaatgcgtatactcagaggagta

SEQ ID NO: 364324 - DNA, 59 bp, Artificial
  Synthetic oligonucleotide
cctataccacgctaaagtgtttcagccaacaacaggcagtgttagcctactcaacgaca

SEQ ID NO: 364325 - DNA, 59 bp, Artificial
  Synthetic oligonucleotide
cctataccactagcttaggtgcaggccctgtttccatctccgcggtcgctgttctagcc

SEQ ID NO: 364326 - DNA, 55 bp, Artificial
  Synthetic oligonucleotide
cctataccgcaaaaccggccatacatttcggcgattacacgcggacaattgtacg

SEQ ID NO: 364327 - DNA, 59 bp, Artificial
  Synthetic oligonucleotide
cctataccgttgtactttgttccaagcaaatataatcctgctgacggcccatccaggca

SEQ ID NO: 364328 - DNA, 55 bp, Artificial
  Synthetic oligonucleotide
cctatacgaattatgtgggtgatgtgcgaagtctgactccagttataccggattc

SEQ ID NO: 364329 - DNA, 59 bp, Artificial
  Synthetic oligonucleotide
cctatacgccaccgtggtacttcctccagaggccctgtacaagcatccaacgcaactgc

SEQ ID NO: 364330 - DNA, 58 bp, Artificial
  Synthetic oligonucleotide
cctatacgctttacagctggcaagaaacagtgttgggcctattagaagaagagcccaa

SEQ ID NO: 364331 - DNA, 58 bp, Artificial
  Synthetic oligonucleotide
cctatacgtctctggacatgacccagggctcatctttgggatccgacttaaaattaca

SEQ ID NO: 364332 - DNA, 55 bp, Artificial
  Synthetic oligonucleotide
cctatactacttgggtcacgttccgcgacgaagaagaggacaactgcactggact

SEQ ID NO: 364333 - DNA, 59 bp, Artificial
  Synthetic oligonucleotide
cctatactatatcctacaaaataggatacaccttgtcaaactctcaccacagcctagag

SEQ ID NO: 364334 - DNA, 57 bp, Artificial
  Synthetic oligonucleotide
cctatacttatctgcctacaaattggactggaaggtgtgtacttgtcacccttctgc

SEQ ID NO: 364335 - DNA, 54 bp, Artificial
  Synthetic oligonucleotide
cctatagaaaaggcaaaattagtggtaacaacctattggggattaatgccagga

SEQ ID NO: 364336 - DNA, 60 bp, Artificial
  Synthetic oligonucleotide
cctatagacaaatatacaaacttagcagacccctcacttaatgtcacaggacatatggaa

SEQ ID NO: 364337 - DNA, 57 bp, Artificial
  Synthetic oligonucleotide
cctatagaggtgtactcagaggcggacctattggacgaaatggaggagggggacaca

SEQ ID NO: 364338 - DNA, 55 bp, Artificial
  Synthetic oligonucleotide
cctatagattctcataaaggatacgttgtatctagacgtggagatctagaaacac

SEQ ID NO: 364339 - DNA, 50 bp, Artificial
  Synthetic oligonucleotide
cctatagctgcctgaagctcttcatatttggaagactgatccctttcggc

SEQ ID NO: 364340 - DNA, 55 bp, Artificial
  Synthetic oligonucleotide
cctatagctgctgtattgggaagcgcgctagtagtcagtaaagcagttcctgcaa

SEQ ID NO: 364341 - DNA, 60 bp, Artificial
  Synthetic oligonucleotide
cctataggaaaattgccagagatattccgattgccgtcgcttgcaaagacaacgccacat

SEQ ID NO: 364342 - DNA, 58 bp, Artificial
  Synthetic oligonucleotide
cctataggggctacgctttatggaatagggttgtcacagccgctggcttgactccttc

SEQ ID NO: 364343 - DNA, 50 bp, Artificial
  Synthetic oligonucleotide
cctatagggtgcgcgatataatcatgctgtacatttacgtgtatagcctc

SEQ ID NO: 364344 - DNA, 57 bp, Artificial
  Synthetic oligonucleotide
cctataggttaagatctactaacaattatattatgtcattggatgtaaatttcgttc

SEQ ID NO: 364345 - DNA, 51 bp, Artificial
  Synthetic oligonucleotide
cctataggtttgaggcatagaattttactgccatacaccactccccgtaag

SEQ ID NO: 364346 - DNA, 57 bp, Artificial
  Synthetic oligonucleotide
cctatagtaacaaatgcacagggacaaatggtacatcagtccctctcccccaggact

SEQ ID NO: 364347 - DNA, 55 bp, Artificial
  Synthetic oligonucleotide
cctatagtcatgagaccccaactttaagatacgacaggtcgcactcagtagttca

SEQ ID NO: 364348 - DNA, 57 bp, Artificial
  Synthetic oligonucleotide
cctatagtggaataagaaccaatggagcgacaagtgcctgcagaagatcaggttctt

SEQ ID NO: 364349 - DNA, 54 bp, Artificial
  Synthetic oligonucleotide
cctatataaaacctttcacctaaacccagggattgtgactggcagcgccgtcgg

SEQ ID NO: 364350 - DNA, 58 bp, Artificial
  Synthetic oligonucleotide
cctatatatgggacagcaaaatttaaagagtggtggcactccggaggctatggctttg

SEQ ID NO: 364351 - DNA, 51 bp, Artificial
  Synthetic oligonucleotide
cctatatcaaagcagtaagtactgactggtagatgtaatgttggagttact

SEQ ID NO: 364352 - DNA, 54 bp, Artificial
  Synthetic oligonucleotide
cctatatcaaatgaagggttgttcctttaaccctgtatggaaagtacctgatat

SEQ ID NO: 364353 - DNA, 56 bp, Artificial
  Synthetic oligonucleotide
cctatatccatggataaacccccaccaccagctataacagaccttttacgctcagt

SEQ ID NO: 364354 - DNA, 60 bp, Artificial
  Synthetic oligonucleotide
cctatatccggagagacacattgtgtcaagcaactgtgaaagaggtacgcacagctttgc

SEQ ID NO: 364355 - DNA, 60 bp, Artificial
  Synthetic oligonucleotide
cctatatctacaagagaggtaatgactatgtggtcattggagtccacacggctgccgcac

SEQ ID NO: 364356 - DNA, 60 bp, Artificial
  Synthetic oligonucleotide
cctatatggcctctcaagtcccgacatcaatcaagttgcgcgtacctgctgtaaatcata

SEQ ID NO: 364357 - DNA, 56 bp, Artificial
  Synthetic oligonucleotide
cctatatgtttgagcccgagggtcctaaacccatacagggctacaacgattggcta

SEQ ID NO: 364358 - DNA, 57 bp, Artificial
  Synthetic oligonucleotide
cctatattaacaataaggagaaggaggtcctcgtgctatggggaattcaccatccac

SEQ ID NO: 364359 - DNA, 52 bp, Artificial
  Synthetic oligonucleotide
cctatattaagttaaaatgtttgcgtttcaagggaaccgtaaagatcgagcg

SEQ ID NO: 364360 - DNA, 54 bp, Artificial
  Synthetic oligonucleotide
cctatattggaagattgtcctattaaccgttcaaactggaactaacactgtgac

SEQ ID NO: 364361 - DNA, 56 bp, Artificial
  Synthetic oligonucleotide
cctatcaaaatttcggtcacaaattttagcaaactcaagctcagcttagtgttcac

SEQ ID NO: 364362 - DNA, 55 bp, Artificial
  Synthetic oligonucleotide
cctatcaaagacgtcctcataaagactatacatggagaaagaagacaacctgcat

SEQ ID NO: 364363 - DNA, 60 bp, Artificial
  Synthetic oligonucleotide
cctatcaatggattattagaaattgggagactgtgaagattcaatggtctcaagacccca

SEQ ID NO: 364364 - DNA, 60 bp, Artificial
  Synthetic oligonucleotide
cctatcactaatcatagtaggatgtcctactgggaatcattcggagttgaccctaagata

SEQ ID NO: 364365 - DNA, 52 bp, Artificial
  Synthetic oligonucleotide
cctatcagctgcagtacttaaaactaagatagacagatctagtcaagtgtca

SEQ ID NO: 364366 - DNA, 60 bp, Artificial
  Synthetic oligonucleotide
cctatcaggcacgtcggtctcgaaaactgctttatctagcatgtctaacgatagatcgac

SEQ ID NO: 364367 - DNA, 55 bp, Artificial
  Synthetic oligonucleotide
cctatcagtgaatgtcgtaaagaactcacgccaatgacgaccagattaggttatg

SEQ ID NO: 364368 - DNA, 59 bp, Artificial
  Synthetic oligonucleotide
cctatcataactctcatcttactaggcagtttcttcctattcaatatagattaggttaa

SEQ ID NO: 364369 - DNA, 60 bp, Artificial
  Synthetic oligonucleotide
cctatcatcggaacttttagtgaccgcgcaattagagttgaatgcgacgatcacaccgat

SEQ ID NO: 364370 - DNA, 55 bp, Artificial
  Synthetic oligonucleotide
cctatcatgaaactaacagggacgcatatatttctctaatccctgatgcctctgc

SEQ ID NO: 364371 - DNA, 55 bp, Artificial
  Synthetic oligonucleotide
cctatcatgtgattggggtactattgtgctactgttagctagatttacatgtgcc

SEQ ID NO: 364372 - DNA, 56 bp, Artificial
  Synthetic oligonucleotide
cctatcattttcaatgaagaatcgacacataataggagtgaacctatgtatagggg

SEQ ID NO: 364373 - DNA, 55 bp, Artificial
  Synthetic oligonucleotide
cctatcccggtcacgataagggagcatgctggaacctggtactccaccctaccag

SEQ ID NO: 364374 - DNA, 53 bp, Artificial
  Synthetic oligonucleotide
cctatcccgtgttctaaagtgtggtccctccctggtataatccagggagggac

SEQ ID NO: 364375 - DNA, 57 bp, Artificial
  Synthetic oligonucleotide
cctatccctgagcccaactataagagggccctgtggagggtgtccgcagaggagtac

SEQ ID NO: 364376 - DNA, 60 bp, Artificial
  Synthetic oligonucleotide
cctatccgcgtgactctaatgggcgcatcctattggaggaactgatccaggtgttgcgtt

SEQ ID NO: 364377 - DNA, 57 bp, Artificial
  Synthetic oligonucleotide
cctatcctacagatttagctccagacgtctcactatgcaggtttttaggtttaaggc

SEQ ID NO: 364378 - DNA, 56 bp, Artificial
  Synthetic oligonucleotide
cctatcctgtgccacagtcaggaagtattacacaccccaaattcgccggaaaagga

SEQ ID NO: 364379 - DNA, 51 bp, Artificial
  Synthetic oligonucleotide
cctatcgcactcatcctatgttgatgctgcaaaccactgtggaaccatcgc

SEQ ID NO: 364380 - DNA, 60 bp, Artificial
  Synthetic oligonucleotide
cctatcggaaaaatgcttctacgtgtaatccaattcaaacataagtatatgcatacacat

SEQ ID NO: 364381 - DNA, 60 bp, Artificial
  Synthetic oligonucleotide
cctatcgtcttgcactgcttcgaagatctcagacccagtgacgaagacgaaggagaatac

SEQ ID NO: 364382 - DNA, 60 bp, Artificial
  Synthetic oligonucleotide
cctatctaaggacaatgcgattagaataggggaggatgcccatatcctagtcacaagaga

SEQ ID NO: 364383 - DNA, 55 bp, Artificial
  Synthetic oligonucleotide
cctatctccgttcaaagaactgctatattgaatgctctacaacacggcgtcgcac

SEQ ID NO: 364384 - DNA, 55 bp, Artificial
  Synthetic oligonucleotide
cctatctcctggtgcttcagatatgaacattccaagtgaccttttaaccttcaac

SEQ ID NO: 364385 - DNA, 60 bp, Artificial
  Synthetic oligonucleotide
cctatctcggggcttcgggtacccacgatcatgatgagccaacgatcatcgcggattggg

SEQ ID NO: 364386 - DNA, 55 bp, Artificial
  Synthetic oligonucleotide
cctatctcggtacgactctacccggttacaggtggacgcggagagcagccctcct

SEQ ID NO: 364387 - DNA, 60 bp, Artificial
  Synthetic oligonucleotide
cctatctgaaaactaagacaggaatgatgcagggcatattgcactacacttcatcacttc

SEQ ID NO: 364388 - DNA, 60 bp, Artificial
  Synthetic oligonucleotide
cctatctgatgtcaccataccctaatgttgtgctagttgcatttaaacatgctatcctca

SEQ ID NO: 364389 - DNA, 59 bp, Artificial
  Synthetic oligonucleotide
cctatctgcttcaaattaagggacaccttaaagaagcatgaagatgcttatagaaagga

SEQ ID NO: 364390 - DNA, 54 bp, Artificial
  Synthetic oligonucleotide
cctatctgtccaagctcaggtatggatcacagtagcaaaggccatgactgcata

SEQ ID NO: 364391 - DNA, 55 bp, Artificial
  Synthetic oligonucleotide
cctatctttacgttattggagcacattcagatcgcaggcaacggttcgattgcaa

SEQ ID NO: 364392 - DNA, 55 bp, Artificial
  Synthetic oligonucleotide
cctatctttactaaaggttgggaggacttatggatgaatccatcggaaatagtag

SEQ ID NO: 364393 - DNA, 59 bp, Artificial
  Synthetic oligonucleotide
cctatctttgtgtctggtaggcgcgtgagagtggactgaaaaagtagagtttctctctc

SEQ ID NO: 364394 - DNA, 55 bp, Artificial
  Synthetic oligonucleotide
cctatgaagaatcagttagcaaaccgaatccttactagggtggggaaggagttga

SEQ ID NO: 364395 - DNA, 60 bp, Artificial
  Synthetic oligonucleotide
cctatgaagatttggtcaatgagtgttctgatcttgtaatcatgctcggctcacagccgg

SEQ ID NO: 364396 - DNA, 55 bp, Artificial
  Synthetic oligonucleotide
cctatgacacctaacatatccggtacttaaggacctgggttttgaagactctcaa

SEQ ID NO: 364397 - DNA, 60 bp, Artificial
  Synthetic oligonucleotide
cctatgacagacgtgatagattgcactgcatccctggtggacccctttgcagcattctat

SEQ ID NO: 364398 - DNA, 55 bp, Artificial
  Synthetic oligonucleotide
cctatgacattttgaacagattagttactgctaaggacaaggctcgatatggacc

SEQ ID NO: 364399 - DNA, 60 bp, Artificial
  Synthetic oligonucleotide
cctatgaccatacacaatacagagaagaagcgctcttgaatagactcaacattaatccgg

SEQ ID NO: 364400 - DNA, 60 bp, Artificial
  Synthetic oligonucleotide
cctatgaccatacacaatatagagaagaggcactcctaaacagactcaacattaatccgg

SEQ ID NO: 364401 - DNA, 58 bp, Artificial
  Synthetic oligonucleotide
cctatgactatcctaaataccaggatgaaagcaaattaaacaggcaggaaatagaatc

SEQ ID NO: 364402 - DNA, 58 bp, Artificial
  Synthetic oligonucleotide
cctatgactggggtacagttatacgtgggcgtttagatgatcgtatatgtgaattgca

SEQ ID NO: 364403 - DNA, 60 bp, Artificial
  Synthetic oligonucleotide
cctatgagcctacatggaatggaagacacagagagagaagtgttagtgtggaagtatgac

SEQ ID NO: 364404 - DNA, 55 bp, Artificial
  Synthetic oligonucleotide
cctatgaggctcgtcatgatgtttcccatactggtaaggttatatgtgtgaccga

SEQ ID NO: 364405 - DNA, 59 bp, Artificial
  Synthetic oligonucleotide
cctatgagggtccagacaattgaggaggtccagagtggtacccaatatgttctgaccaa

SEQ ID NO: 364406 - DNA, 57 bp, Artificial
  Synthetic oligonucleotide
cctatgagtttacaagttggtagtataagatgggatgtctctaagatatcaccgcgc

SEQ ID NO: 364407 - DNA, 55 bp, Artificial
  Synthetic oligonucleotide
cctatgatcgtaggagtcttagtaaggataaagaaaccgttgcgtgggtgcgtaa

SEQ ID NO: 364408 - DNA, 59 bp, Artificial
  Synthetic oligonucleotide
cctatgatgatttatctggtttggagaaggattgagaatttttctatgcctcaaggtaa

SEQ ID NO: 364409 - DNA, 55 bp, Artificial
  Synthetic oligonucleotide
cctatgatgcttgtcgctactaaaggtttcatgccccgtttgaacgttcaatggg

SEQ ID NO: 364410 - DNA, 54 bp, Artificial
  Synthetic oligonucleotide
cctatgatgttaaccgattacttgttaacgcaaactcccgaaacgcgagcaaat

SEQ ID NO: 364411 - DNA, 60 bp, Artificial
  Synthetic oligonucleotide
cctatgattggacattaaacaggaatcagccggctgcaactgcgttagctaacactatag

SEQ ID NO: 364412 - DNA, 60 bp, Artificial
  Synthetic oligonucleotide
cctatgcaacgctatcaatggagagtcctcccacaaggaatgactaatagccctacgtta

SEQ ID NO: 364413 - DNA, 60 bp, Artificial
  Synthetic oligonucleotide
cctatgcagagtgcctatcatgaaactaacagggacgcatatatttctctaatccctgat

SEQ ID NO: 364414 - DNA, 57 bp, Artificial
  Synthetic oligonucleotide
cctatgcatgtgagtggcggactaagctaggctttggggtaataactttcccaatcg

SEQ ID NO: 364415 - DNA, 55 bp, Artificial
  Synthetic oligonucleotide
cctatgcattccacttggactatgaaaagtggaacaaccatcagaggctggaatc

SEQ ID NO: 364416 - DNA, 54 bp, Artificial
  Synthetic oligonucleotide
cctatgcattgcctcaattattacggtcatagcagcagttcacctgtacatacg

SEQ ID NO: 364417 - DNA, 55 bp, Artificial
  Synthetic oligonucleotide
cctatgccaaacttgaacctacaccaaaatcgcaacttgatttagactcccttgc

SEQ ID NO: 364418 - DNA, 58 bp, Artificial
  Synthetic oligonucleotide
cctatgccatagggtcgcagctcccttgcgagccagagcctgacgtgactgtagtcac

SEQ ID NO: 364419 - DNA, 59 bp, Artificial
  Synthetic oligonucleotide
cctatgccatattgcagttgtggcccctccttttgttagtattggctctgccccgcagg

SEQ ID NO: 364420 - DNA, 55 bp, Artificial
  Synthetic oligonucleotide
cctatgccattggctgacacagcacagatggtgcctgagagttcttgcagcatgg

SEQ ID NO: 364421 - DNA, 55 bp, Artificial
  Synthetic oligonucleotide
cctatgccccggagttcaagcatccagagaaacttgacggtcagtatgttgagcc

SEQ ID NO: 364422 - DNA, 58 bp, Artificial
  Synthetic oligonucleotide
cctatgccgatttacgtatagtggatgttttacgagagcgatttcgacttatgtcttc

SEQ ID NO: 364423 - DNA, 59 bp, Artificial
  Synthetic oligonucleotide
cctatgccgtagggtctcagctcccttgcgagccagagcccgacgtgagcgtagttacc

SEQ ID NO: 364424 - DNA, 54 bp, Artificial
  Synthetic oligonucleotide
cctatgccttatgtcccttacccccgttcgacggaagtgtacgttcgatctata

SEQ ID NO: 364425 - DNA, 60 bp, Artificial
  Synthetic oligonucleotide
cctatgcgaagcatctaatcaagaccagaaatgcattttatacacctggcggaaagacac

SEQ ID NO: 364426 - DNA, 60 bp, Artificial
  Synthetic oligonucleotide
cctatgcgactctatatcttagttcacggttattatactagagcctgcttaatttctata

SEQ ID NO: 364427 - DNA, 55 bp, Artificial
  Synthetic oligonucleotide
cctatgctcgtccatcagaagtggcaaaagaacagaggctacgtaaagctcgttc

SEQ ID NO: 364428 - DNA, 55 bp, Artificial
  Synthetic oligonucleotide
cctatgctcgtgctcttagagctcagctggctgccacagacaaaattaaggcctc

SEQ ID NO: 364429 - DNA, 60 bp, Artificial
  Synthetic oligonucleotide
cctatgcttgaatggcctggaggctatggtggagtcctcttgtgtaggcatggagtctga

SEQ ID NO: 364430 - DNA, 60 bp, Artificial
  Synthetic oligonucleotide
cctatggaacatggagcatatctcttggagcgggatcctattagacttgggccttggacc

SEQ ID NO: 364431 - DNA, 58 bp, Artificial
  Synthetic oligonucleotide
cctatggaatcaatgaggaaggattctcttttcttgcggtcgatggaaaaatgtacaa

SEQ ID NO: 364432 - DNA, 60 bp, Artificial
  Synthetic oligonucleotide
cctatggacgaccctaattttactcagcagagactggctgcagcgttcaataatcctact

SEQ ID NO: 364433 - DNA, 60 bp, Artificial
  Synthetic oligonucleotide
cctatggagacacctgggcaggagttgaagctttgctaagaatactgcaacaactactgt

SEQ ID NO: 364434 - DNA, 57 bp, Artificial
  Synthetic oligonucleotide
cctatggagatacgtggacgggagtggaagctataacaagaattctgaaccaactac

SEQ ID NO: 364435 - DNA, 53 bp, Artificial
  Synthetic oligonucleotide
cctatggagcattcacatgtttcatatccgttatctgtcatcccgaatttgtc

SEQ ID NO: 364436 - DNA, 51 bp, Artificial
  Synthetic oligonucleotide
cctatggatcctggtagggtccaagtgccgattaaccgggttgtgccccat

SEQ ID NO: 364437 - DNA, 58 bp, Artificial
  Synthetic oligonucleotide
cctatggatttcggacaggtgttcaacatgttcgacaacgagcctagtaccgctactg

SEQ ID NO: 364438 - DNA, 58 bp, Artificial
  Synthetic oligonucleotide
cctatggcaaaccagaggtctttaagcatcggaatcctccttagatagcgtagcttcc

SEQ ID NO: 364439 - DNA, 58 bp, Artificial
  Synthetic oligonucleotide
cctatggcaacgtcctcgttcaacatcaatgaactggtagcctcccacggcgataaag

SEQ ID NO: 364440 - DNA, 52 bp, Artificial
  Synthetic oligonucleotide
cctatggcacggaaccttggacattacgtgacacaagccaggaaatgtggga

SEQ ID NO: 364441 - DNA, 55 bp, Artificial
  Synthetic oligonucleotide
cctatggctcagccaccacaggataccacatcttgaaggcgaacacagttagtca

SEQ ID NO: 364442 - DNA, 55 bp, Artificial
  Synthetic oligonucleotide
cctatggcttctaatcaggaatctcggatattctcgttgggagagtggtcaacgc

SEQ ID NO: 364443 - DNA, 59 bp, Artificial
  Synthetic oligonucleotide
cctatggctttttctgcccccacattctcacttgccaatctcttgaatggcagttacgg

SEQ ID NO: 364444 - DNA, 58 bp, Artificial
  Synthetic oligonucleotide
cctatgggaatattttactgagtggtaatcaaactgctaggatgattaaatacaacta

SEQ ID NO: 364445 - DNA, 56 bp, Artificial
  Synthetic oligonucleotide
cctatgggaccaaagcctaaagccctgtgtacagttaactcctctctgtgtcacct

SEQ ID NO: 364446 - DNA, 55 bp, Artificial
  Synthetic oligonucleotide
cctatgggagacaggtcaattcgtcacacctgacgtcatccgcctcggtaatgcg

SEQ ID NO: 364447 - DNA, 60 bp, Artificial
  Synthetic oligonucleotide
cctatgggccattgctggctgcgacgggaggactgcgaggaataaatcgatccttgagac

SEQ ID NO: 364448 - DNA, 57 bp, Artificial
  Synthetic oligonucleotide
cctatgggcgtgggcctcagcccgtttctcctggctcagtttactagtgccatttgt

SEQ ID NO: 364449 - DNA, 53 bp, Artificial
  Synthetic oligonucleotide
cctatgggctggcttgagctacgccgtaaggttaatgggcaagtcaaagatct

SEQ ID NO: 364450 - DNA, 59 bp, Artificial
  Synthetic oligonucleotide
cctatggggaaacccataggacgctttaatattgacatggtgcgaagagtctactgagc

SEQ ID NO: 364451 - DNA, 55 bp, Artificial
  Synthetic oligonucleotide
cctatggggacacttggacaggggttgaagttatgataagaatactgcaacaact

SEQ ID NO: 364452 - DNA, 60 bp, Artificial
  Synthetic oligonucleotide
cctatggggagacccataggacgctctaatgtggacatggtgcgaagagcctattgagct

SEQ ID NO: 364453 - DNA, 59 bp, Artificial
  Synthetic oligonucleotide
cctatgggttaacccataggacgctctaatacagacatggtgcgaagagtttattgagc

SEQ ID NO: 364454 - DNA, 50 bp, Artificial
  Synthetic oligonucleotide
cctatggtacataggtgatggcacctcttatcagtgttacttacagggcc

SEQ ID NO: 364455 - DNA, 60 bp, Artificial
  Synthetic oligonucleotide
cctatggtactgctatggaatttggtcaggtgtttaacatgtatgataatgagcccagta

SEQ ID NO: 364456 - DNA, 60 bp, Artificial
  Synthetic oligonucleotide
cctatggtctagttatagacacgtgtcaaatagtgaccgccccactgttgatacagtcta

SEQ ID NO: 364457 - DNA, 56 bp, Artificial
  Synthetic oligonucleotide
cctatggtgcatacaagttttgggatgtggaccttacggagcgcctatcgatggac

SEQ ID NO: 364458 - DNA, 55 bp, Artificial
  Synthetic oligonucleotide
cctatggttgctggacgaaggaagtggaggaactaatggcggagccatgtcaccg

SEQ ID NO: 364459 - DNA, 58 bp, Artificial
  Synthetic oligonucleotide
cctatggtttcggacatcagaacaaaggagtgtatgtggcagggtacaaaatcataaa

SEQ ID NO: 364460 - DNA, 57 bp, Artificial
  Synthetic oligonucleotide
cctatgtacacgaagccacggttttatcggtggcgaaggagcagtgatgttccacgg

SEQ ID NO: 364461 - DNA, 55 bp, Artificial
  Synthetic oligonucleotide
cctatgtacagatcatacaccatcctggctaagagctactcctggtagatccttt

SEQ ID NO: 364462 - DNA, 50 bp, Artificial
  Synthetic oligonucleotide
cctatgtagaactaccagatatgaaacgattcccagatgcactggaatgg

SEQ ID NO: 364463 - DNA, 60 bp, Artificial
  Synthetic oligonucleotide
cctatgtatatgtagattattgggacgactcaaaagcatttcgaaatatggtgtatgtta

SEQ ID NO: 364464 - DNA, 55 bp, Artificial
  Synthetic oligonucleotide
cctatgtatcggtgtatcggtgtcttatttatatgtaggagagttactaaaaccc

SEQ ID NO: 364465 - DNA, 56 bp, Artificial
  Synthetic oligonucleotide
cctatgtccacgctccgatatggtaaggttcagtctgcccctaggttcgacccctc

SEQ ID NO: 364466 - DNA, 55 bp, Artificial
  Synthetic oligonucleotide
cctatgtcccgttggcctgatgagcatggtaggccgatttgtgatttggtagccc

SEQ ID NO: 364467 - DNA, 55 bp, Artificial
  Synthetic oligonucleotide
cctatgtcccgtttgtccgaagagcatgttaggccgatctgggatttggtagccc

SEQ ID NO: 364468 - DNA, 59 bp, Artificial
  Synthetic oligonucleotide
cctatgtcgccgccagaggagctgttgagccgctcacgccgtctgcactccagcgaatt

SEQ ID NO: 364469 - DNA, 55 bp, Artificial
  Synthetic oligonucleotide
cctatgtcggagatccatgagtccattcgctggactaaggatgcacgtaacaccc

SEQ ID NO: 364470 - DNA, 52 bp, Artificial
  Synthetic oligonucleotide
cctatgtgccattgtcaccgtctgttacaccttctgcagtatcaatatatgg

SEQ ID NO: 364471 - DNA, 55 bp, Artificial
  Synthetic oligonucleotide
cctatgtggatatagaggatggagtgtttgctattgagctgatgcaaatgcgagg

SEQ ID NO: 364472 - DNA, 55 bp, Artificial
  Synthetic oligonucleotide
cctatgttaatagtaggagccaattttggttgcagcctttagcagatgccaaggt

SEQ ID NO: 364473 - DNA, 60 bp, Artificial
  Synthetic oligonucleotide
cctatgttaatgctgtaccaatggactctatgcttaggcataacaactggagtctagtga

SEQ ID NO: 364474 - DNA, 55 bp, Artificial
  Synthetic oligonucleotide
cctatgttcaagactggagtcaatgttcgctctcagtcgcttggtgctggaaccg

SEQ ID NO: 364475 - DNA, 60 bp, Artificial
  Synthetic oligonucleotide
cctatgttgaacacggacatgacctgtgacacattaatgatgtgggaagctgtgtcatgt

SEQ ID NO: 364476 - DNA, 55 bp, Artificial
  Synthetic oligonucleotide
cctatgttggtaatgtcaatattagcagcagggaaccgataaacaactgctcttt

SEQ ID NO: 364477 - DNA, 55 bp, Artificial
  Synthetic oligonucleotide
cctatgtttaacacccataggcagcctctcttcgctcacttgcgtaggcgagggg

SEQ ID NO: 364478 - DNA, 60 bp, Artificial
  Synthetic oligonucleotide
cctatgtttacgtagactattgggatgactcgcaagcatttagaaacatggtttatgtga

SEQ ID NO: 364479 - DNA, 56 bp, Artificial
  Synthetic oligonucleotide
cctatgttttcagagttgacgaggatgctccttgaaagaatagatacttccaagtt

SEQ ID NO: 364480 - DNA, 55 bp, Artificial
  Synthetic oligonucleotide
cctattaaaccagcaaaagccgattactgggattactcctaaacaaactgagcag

SEQ ID NO: 364481 - DNA, 57 bp, Artificial
  Synthetic oligonucleotide
cctattaacgtcactaaagaaaatacgggctcttatgtcaggctctatctctgggga

SEQ ID NO: 364482 - DNA, 50 bp, Artificial
  Synthetic oligonucleotide
cctattaactaacagcagtcggcgaaatgtagaacattatttccaactcg

SEQ ID NO: 364483 - DNA, 60 bp, Artificial
  Synthetic oligonucleotide
cctattacacacaattccttggaagcacaggcattgttaaacgagcaggaggcggatgct

SEQ ID NO: 364484 - DNA, 55 bp, Artificial
  Synthetic oligonucleotide
cctattacaccaagcctatccaggtacctaaggacctgtgttttgaagactctca

SEQ ID NO: 364485 - DNA, 55 bp, Artificial
  Synthetic oligonucleotide
cctattacagctgccgtcatttctcgcgataggtcttacgtttctaagtctggct

SEQ ID NO: 364486 - DNA, 54 bp, Artificial
  Synthetic oligonucleotide
cctattacattcagtggaccgaaatgccgtttggtgacgaacctgaatttcgtg

SEQ ID NO: 364487 - DNA, 60 bp, Artificial
  Synthetic oligonucleotide
cctattacgccaaagtgatgcgtacgcctataccggtcgtcatggcactgggcgctctat

SEQ ID NO: 364488 - DNA, 59 bp, Artificial
  Synthetic oligonucleotide
cctattactgcaaacacaaagacagatattatcccataaatgtcagaaaatatcagtgg

SEQ ID NO: 364489 - DNA, 54 bp, Artificial
  Synthetic oligonucleotide
cctattagaggtggagtattaataagggtgttgtgattgtttacgtgtttcgat

SEQ ID NO: 364490 - DNA, 55 bp, Artificial
  Synthetic oligonucleotide
cctattagcagcacacctactccaggggttagtcgcatagctgctccccgcttgt

SEQ ID NO: 364491 - DNA, 53 bp, Artificial
  Synthetic oligonucleotide
cctattaggagtgttaacttctccatcagttccgtagagaactacggtttttg

SEQ ID NO: 364492 - DNA, 55 bp, Artificial
  Synthetic oligonucleotide
cctattagtgcagagtggtttactgaaccatttgaaatccgctgggcactaatgg

SEQ ID NO: 364493 - DNA, 56 bp, Artificial
  Synthetic oligonucleotide
cctattagttatgccaacggaagtggccccgaccaacgcccctactgctggcacta

SEQ ID NO: 364494 - DNA, 57 bp, Artificial
  Synthetic oligonucleotide
cctattagtttccagagacgcactggtgacgcgtttacctattttggcaataccatc

SEQ ID NO: 364495 - DNA, 58 bp, Artificial
  Synthetic oligonucleotide
cctattcagcgcaatagcaggtttcatagaaaatgggtgggagggaatgatagacggt

SEQ ID NO: 364496 - DNA, 57 bp, Artificial
  Synthetic oligonucleotide
cctattccgtctgaggagcctagatatccgtgtctacttggtcgctacgttagtggg

SEQ ID NO: 364497 - DNA, 58 bp, Artificial
  Synthetic oligonucleotide
cctattcgccctacatacgcctatcggccagtgcagggtaaccttcagtgtcctatta

SEQ ID NO: 364498 - DNA, 58 bp, Artificial
  Synthetic oligonucleotide
cctattcgggatcgatactttccatttcgtggcaagtagagagacagggtagcgcctc

SEQ ID NO: 364499 - DNA, 60 bp, Artificial
  Synthetic oligonucleotide
cctattctgtgagtccagaagctttctgatgtcatcggagccttgacagcttagaaccat

SEQ ID NO: 364500 - DNA, 56 bp, Artificial
  Synthetic oligonucleotide
cctattgataatgtcatgggaatgataggtatattacctgatatgactccaagcac

SEQ ID NO: 364501 - DNA, 55 bp, Artificial
  Synthetic oligonucleotide
cctattgcatcagaaaataacacttgtgatgttgtgcctatcaatggagctaagg

SEQ ID NO: 364502 - DNA, 60 bp, Artificial
  Synthetic oligonucleotide
cctattgctgcagagattctgcaagcaatgcaaaaattgcttgttgccgattcatccttt

SEQ ID NO: 364503 - DNA, 51 bp, Artificial
  Synthetic oligonucleotide
cctattggacttttccaagttgaggttttaaacaggttaacttacaatagc

SEQ ID NO: 364504 - DNA, 54 bp, Artificial
  Synthetic oligonucleotide
cctattggaggtacccgagcgggtggggcaagttcgcgaagggctactacattc

SEQ ID NO: 364505 - DNA, 55 bp, Artificial
  Synthetic oligonucleotide
cctattggccaccagaatacaatgctttcgcagcaaccacatgttaagatagatt

SEQ ID NO: 364506 - DNA, 55 bp, Artificial
  Synthetic oligonucleotide
cctattgggttcctttcctcatttacgagaacattgtgcgcagttgctttgtttc

SEQ ID NO: 364507 - DNA, 56 bp, Artificial
  Synthetic oligonucleotide
cctattggtccaggagagggttgcacgccctgcttccttacgaccccggtggcata

SEQ ID NO: 364508 - DNA, 55 bp, Artificial
  Synthetic oligonucleotide
cctattgtctcgcgaaccgtcactacagctcctgttacatcagtcgttgacgcgt

SEQ ID NO: 364509 - DNA, 57 bp, Artificial
  Synthetic oligonucleotide
cctattgtgcagagacagtggaatatcatttgatgacctccgtttgcactgcatatt

SEQ ID NO: 364510 - DNA, 58 bp, Artificial
  Synthetic oligonucleotide
cctattgtgctcctggaagcccatgattctccgggccgtatttcaattgggcctcgta

SEQ ID NO: 364511 - DNA, 55 bp, Artificial
  Synthetic oligonucleotide
cctattgtggttggtgacgttgactgtgcagccttcgaggcagcatgcgatagcg

SEQ ID NO: 364512 - DNA, 55 bp, Artificial
  Synthetic oligonucleotide
cctattgttcaggctcgtaaccaaccactgctggcacgcttaatgcctgaagtgc

SEQ ID NO: 364513 - DNA, 59 bp, Artificial
  Synthetic oligonucleotide
cctatttaacagggcaggtactgtaggcgatgctattccagatgacttaatgattaagg

SEQ ID NO: 364514 - DNA, 55 bp, Artificial
  Synthetic oligonucleotide
cctatttaaggaatgccctagatgggaatcctgtttcggtggactgtaaatataa

SEQ ID NO: 364515 - DNA, 54 bp, Artificial
  Synthetic oligonucleotide
cctatttagggggtaaattcgtcaccttattcggacactcggcaagggatctga

SEQ ID NO: 364516 - DNA, 55 bp, Artificial
  Synthetic oligonucleotide
cctatttataggcgggagttcagtgcgggatgttagttaggccgaaggcccacta

SEQ ID NO: 364517 - DNA, 57 bp, Artificial
  Synthetic oligonucleotide
cctatttatcctgactgtcttgctagacaagaaaccctaccttccagaaggtgtgaa

SEQ ID NO: 364518 - DNA, 60 bp, Artificial
  Synthetic oligonucleotide
cctatttccgcaagcaccaccattcatatttcatgccacagttggacttacattacgtat

SEQ ID NO: 364519 - DNA, 55 bp, Artificial
  Synthetic oligonucleotide
cctatttcttgtctctgagtcccttgagtatgacacctagtctgtacgatagcat

SEQ ID NO: 364520 - DNA, 52 bp, Artificial
  Synthetic oligonucleotide
cctatttggaaaggaccggcacaactcctgtggaaaggtgagggggcagtag

SEQ ID NO: 364521 - DNA, 60 bp, Artificial
  Synthetic oligonucleotide
cctatttggcatcggatctagctgaacgcgaattgactagggatacgcacaaggccattg

SEQ ID NO: 364522 - DNA, 56 bp, Artificial
  Synthetic oligonucleotide
cctatttggctcgtagattacaggtccgcggattgcgagctgttgtcaagcctgaa

SEQ ID NO: 364523 - DNA, 55 bp, Artificial
  Synthetic oligonucleotide
cctatttggggagaccaggtcgaatagtctctgattttggcacttgaacttccct

SEQ ID NO: 364524 - DNA, 54 bp, Artificial
  Synthetic oligonucleotide
cctatttggggatctaaaaccccatttggagaaacagcgtgctcgtaagaccga

SEQ ID NO: 364525 - DNA, 58 bp, Artificial
  Synthetic oligonucleotide
cctatttgtaactacacgaaattctggtatgtgaatgacaccataactgggaaacata

SEQ ID NO: 364526 - DNA, 58 bp, Artificial
  Synthetic oligonucleotide
cctatttgtgtagatctgaaacataaggcaccacaacaaataaaatgtcctccactta

SEQ ID NO: 364527 - DNA, 60 bp, Artificial
  Synthetic oligonucleotide
cctatttgttcacacttatcttaaaagcactaggaatgaggccataagagcattctcctg

SEQ ID NO: 364528 - DNA, 55 bp, Artificial
  Synthetic oligonucleotide
cctatttgttccaccatgccaacaccgaacttttcattctcactggagactcgcg

SEQ ID NO: 364529 - DNA, 52 bp, Artificial
  Synthetic oligonucleotide
cctattttattcccgattgccgagacgaaaccttcgaagtatttaaacgata

SEQ ID NO: 364530 - DNA, 58 bp, Artificial
  Synthetic oligonucleotide
cctcaaaaacgtcagaaatacattcttccgaaagtgtgaccaagcttggacggcatca

SEQ ID NO: 364531 - DNA, 55 bp, Artificial
  Synthetic oligonucleotide
cctcaaaaccagatcatgatggaaatacgcctctccatattgtatgctctaaaac

SEQ ID NO: 364532 - DNA, 57 bp, Artificial
  Synthetic oligonucleotide
cctcaaaacctgacacatcagtgtgtagattttacaccttagatagtaaaacttgga

SEQ ID NO: 364533 - DNA, 60 bp, Artificial
  Synthetic oligonucleotide
cctcaaaaggagtcatcgtccctgtggtgcacacagtcaagagtgcaccaggcgaggcat

SEQ ID NO: 364534 - DNA, 56 bp, Artificial
  Synthetic oligonucleotide
cctcaaaaggctcttttctcggccttctgccgaggaaaatgtggtggtgagccacc

SEQ ID NO: 364535 - DNA, 59 bp, Artificial
  Synthetic oligonucleotide
cctcaaaatgtgtacatgtacgcgactcttgagcccttctttggttctagaagctccta

SEQ ID NO: 364536 - DNA, 55 bp, Artificial
  Synthetic oligonucleotide
cctcaaacatgaggacttcctaggcaaactcaagctgaaagcaaaagtggctttc

SEQ ID NO: 364537 - DNA, 58 bp, Artificial
  Synthetic oligonucleotide
cctcaaacattccctcacggtcacgggcctcgtgctaccagagttttctgagtcaagc

SEQ ID NO: 364538 - DNA, 59 bp, Artificial
  Synthetic oligonucleotide
cctcaaacccaccctccatggaccaacacccttgctatacagactgggtgctgttcaga

SEQ ID NO: 364539 - DNA, 55 bp, Artificial
  Synthetic oligonucleotide
cctcaaacggtgtctgccagtcggactcaacaatgattcagtttgcggaattgtc

SEQ ID NO: 364540 - DNA, 52 bp, Artificial
  Synthetic oligonucleotide
cctcaaagaccgggaagcaaccccgaacgaccacactttcgttccgcgagat

SEQ ID NO: 364541 - DNA, 52 bp, Artificial
  Synthetic oligonucleotide
cctcaaagagaacggttagtttggaagttagtaggggttcaaattgatagag

SEQ ID NO: 364542 - DNA, 58 bp, Artificial
  Synthetic oligonucleotide
cctcaaaggaacttgtgttttaaagcataaaatgttagaagagtcataccgcagcaga

SEQ ID NO: 364543 - DNA, 57 bp, Artificial
  Synthetic oligonucleotide
cctcaaaggttcgcccgttcagtcgacgagcaattgaagttgtttcatcacgcgttc

SEQ ID NO: 364544 - DNA, 55 bp, Artificial
  Synthetic oligonucleotide
cctcaaagtacacgcatgagaagcccgagggacactataactggcaccacggggc

SEQ ID NO: 364545 - DNA, 57 bp, Artificial
  Synthetic oligonucleotide
cctcaaagtataagctaaatttccacctccgatgatcctaagagaaagccaacatta

SEQ ID NO: 364546 - DNA, 56 bp, Artificial
  Synthetic oligonucleotide
cctcaaataagccattttgcctgacaaaacaatttgaaggtgatgtagtcctttcg

SEQ ID NO: 364547 - DNA, 55 bp, Artificial
  Synthetic oligonucleotide
cctcaaatagcaactgtccaaactgcaattggaccgattaccctccaacaccagg

SEQ ID NO: 364548 - DNA, 55 bp, Artificial
  Synthetic oligonucleotide
cctcaaatcttgcgtacctcgtatacgaaagtatgacatcaggtcttagtagcgt

SEQ ID NO: 364549 - DNA, 55 bp, Artificial
  Synthetic oligonucleotide
cctcaaatggcacttttagcgtcggcgcgttgagaccaacggtcagtacatccgc

SEQ ID NO: 364550 - DNA, 50 bp, Artificial
  Synthetic oligonucleotide
cctcaaatgtattatctattgacggctctaatctattagttgttagtgct

SEQ ID NO: 364551 - DNA, 58 bp, Artificial
  Synthetic oligonucleotide
cctcaacaacactaggccaccgctgggcaattggttcggttgtacctggatgaactca

SEQ ID NO: 364552 - DNA, 56 bp, Artificial
  Synthetic oligonucleotide
cctcaacaatttagtgcgaggggttaacgagcgggtgttctacacagaccacaaga

SEQ ID NO: 364553 - DNA, 57 bp, Artificial
  Synthetic oligonucleotide
cctcaacaatttcgtatttaatactgtcatgcatgagcaaactatcccttaatggcg

SEQ ID NO: 364554 - DNA, 54 bp, Artificial
  Synthetic oligonucleotide
cctcaacacaaacggtttttcgagtacgtaggaacgccctatgttatcatacaa

SEQ ID NO: 364555 - DNA, 55 bp, Artificial
  Synthetic oligonucleotide
cctcaacaggcgtgtcggcaaccgttctgtccatttgaggaagctcattctggcg

SEQ ID NO: 364556 - DNA, 59 bp, Artificial
  Synthetic oligonucleotide
cctcaacatcagtacgactctgagctagaactgcggatggggtgccccaacaccccaac

SEQ ID NO: 364557 - DNA, 55 bp, Artificial
  Synthetic oligonucleotide
cctcaacatgataatttgatgggcacgatgtggttgaatgcaggttcagagattc

SEQ ID NO: 364558 - DNA, 56 bp, Artificial
  Synthetic oligonucleotide
cctcaaccaacctcctacaggtttgcgatttagaatcacgcactccccctgccctc

SEQ ID NO: 364559 - DNA, 60 bp, Artificial
  Synthetic oligonucleotide
cctcaaccactaatgacaatggtctcagcggccgcgcagcggcatcacacacattttcag

SEQ ID NO: 364560 - DNA, 57 bp, Artificial
  Synthetic oligonucleotide
cctcaacctatcatgtaaacccacatataacacctgtacctaccgctatccaactaa

SEQ ID NO: 364561 - DNA, 55 bp, Artificial
  Synthetic oligonucleotide
cctcaaccttccctggagcagtgctgaaagtaatgtttggaggaacagagagacg

SEQ ID NO: 364562 - DNA, 51 bp, Artificial
  Synthetic oligonucleotide
cctcaacgtggttgggagaaaacatatcgaagtcgggtctttccccctcgg

SEQ ID NO: 364563 - DNA, 58 bp, Artificial
  Synthetic oligonucleotide
cctcaactaacgtctacaacataaacggtgacaataatgctttcacaccaaattcaga

SEQ ID NO: 364564 - DNA, 60 bp, Artificial
  Synthetic oligonucleotide
cctcaactggctaagcttctgctcgaacatcgaaggaaatgacaaggtgacctctgcagc

SEQ ID NO: 364565 - DNA, 55 bp, Artificial
  Synthetic oligonucleotide
cctcaacttccaatcagaagttagcagctgcaagcttttaggattccatagcgat

SEQ ID NO: 364566 - DNA, 55 bp, Artificial
  Synthetic oligonucleotide
cctcaacttttgaggaagccagtctgccgacatccaaggaacggtcttggctcag

SEQ ID NO: 364567 - DNA, 55 bp, Artificial
  Synthetic oligonucleotide
cctcaagaaacgaccagtcggaggctgtgaggtcatccaaattcggaagactagg

SEQ ID NO: 364568 - DNA, 55 bp, Artificial
  Synthetic oligonucleotide
cctcaagaaacgccaagtcgctggttgtaagcgagtgaaaaccttgaaatccagg

SEQ ID NO: 364569 - DNA, 55 bp, Artificial
  Synthetic oligonucleotide
cctcaagaacggcagtggagttactgcagatgcatgtcgtgcgcaggcaatgaag

SEQ ID NO: 364570 - DNA, 60 bp, Artificial
  Synthetic oligonucleotide
cctcaagacagtaagactcatcaagtctctctaccacagcagtaagtaatacatgtaatg

SEQ ID NO: 364571 - DNA, 54 bp, Artificial
  Synthetic oligonucleotide
cctcaagacccaatccaatttgcatttaaacccacaatttttaagccgttcata

SEQ ID NO: 364572 - DNA, 55 bp, Artificial
  Synthetic oligonucleotide
cctcaagagatgttgaggaaccgtccataaagggttcgatggcccgtggtgagtt

SEQ ID NO: 364573 - DNA, 56 bp, Artificial
  Synthetic oligonucleotide
cctcaagaggggaatcagacacctcttcggagacgtcctccgactcagaaaaggag

SEQ ID NO: 364574 - DNA, 56 bp, Artificial
  Synthetic oligonucleotide
cctcaagatccgtactggcagcgcctacaacacatactcgaccgtccgggacagct

SEQ ID NO: 364575 - DNA, 57 bp, Artificial
  Synthetic oligonucleotide
cctcaagcactcggaccccatggtcccgcacgtcatgaagtgctacgaagaggttgt

SEQ ID NO: 364576 - DNA, 60 bp, Artificial
  Synthetic oligonucleotide
cctcaagctcctacgtcggaaatacagctgactgactacggagccctcacattggactgc

SEQ ID NO: 364577 - DNA, 55 bp, Artificial
  Synthetic oligonucleotide
cctcaaggcaaccctcgtggctgtgtgtggaatgtggccgctggcaatccccttc

SEQ ID NO: 364578 - DNA, 55 bp, Artificial
  Synthetic oligonucleotide
cctcaaggccacgtaaactgcagaggactgctcccattaagaccgggacgaggga

SEQ ID NO: 364579 - DNA, 55 bp, Artificial
  Synthetic oligonucleotide
cctcaaggctggagtgcatcaccagccatattccaggcaacagtgggcaggcagc

SEQ ID NO: 364580 - DNA, 55 bp, Artificial
  Synthetic oligonucleotide
cctcaaggggcgaacgagaactgtaggcacaccaaccggacaattacctacaaga

SEQ ID NO: 364581 - DNA, 55 bp, Artificial
  Synthetic oligonucleotide
cctcaagggtccatggtctgtcggaatgacgaagttttatggagggtggaacgaa

SEQ ID NO: 364582 - DNA, 52 bp, Artificial
  Synthetic oligonucleotide
cctcaaggtgatcaggctcatcaagatcctataccaaagcagtaagtagtac

SEQ ID NO: 364583 - DNA, 56 bp, Artificial
  Synthetic oligonucleotide
cctcaagtcgcagtgggtcacaaaggtggaaaagctgggtctacccaagattaagc

SEQ ID NO: 364584 - DNA, 55 bp, Artificial
  Synthetic oligonucleotide
cctcaagtcgggtctgatgcgcgcgggcactaaacgcgccgctcgtgatggtgcg

SEQ ID NO: 364585 - DNA, 55 bp, Artificial
  Synthetic oligonucleotide
cctcaagtgatgggaagagcttctcgctctgcgagtcgcattccgaacaaagtag

SEQ ID NO: 364586 - DNA, 60 bp, Artificial
  Synthetic oligonucleotide
cctcaataaacaatacttttctgattaatagcggcctgctgtgtccaatctatcattcct

SEQ ID NO: 364587 - DNA, 55 bp, Artificial
  Synthetic oligonucleotide
cctcaatacctgaggatagaccctgaccgataccagatacaacgaaaggaacacg

SEQ ID NO: 364588 - DNA, 58 bp, Artificial
  Synthetic oligonucleotide
cctcaatatctgaatataagaaccttagtataggcgatgctctcttaaactggtgagt

SEQ ID NO: 364589 - DNA, 55 bp, Artificial
  Synthetic oligonucleotide
cctcaatccaaattacccctaccagagttgaactatacagatatattcaaagtcc

SEQ ID NO: 364590 - DNA, 58 bp, Artificial
  Synthetic oligonucleotide
cctcaatgacaagcactcaaatggaacagtaaaagacaggagtccctttcgtacatta

SEQ ID NO: 364591 - DNA, 55 bp, Artificial
  Synthetic oligonucleotide
cctcaatgcgatgttcccaaagatgtgttcgaccaatggttgttcagctacatag

SEQ ID NO: 364592 - DNA, 60 bp, Artificial
  Synthetic oligonucleotide
cctcaatgctgataatcgccttaggatcatgccatgaaacggtctgtctatacacgtttg

SEQ ID NO: 364593 - DNA, 54 bp, Artificial
  Synthetic oligonucleotide
cctcaatgctggtccccgtaggagtggtttaatacccaaccgcatggaacggac

SEQ ID NO: 364594 - DNA, 60 bp, Artificial
  Synthetic oligonucleotide
cctcaatggacttgcagtcacttaaaaagaaattgcttatccaatgggatgtgtgcgaaa

SEQ ID NO: 364595 - DNA, 50 bp, Artificial
  Synthetic oligonucleotide
cctcaatgtaactatctacaggaaacagtaggctgggcaggaaacagtag

SEQ ID NO: 364596 - DNA, 55 bp, Artificial
  Synthetic oligonucleotide
cctcaattcaaatggattgggagaaaaccactagtgtgttcccatacttcaaaga

SEQ ID NO: 364597 - DNA, 54 bp, Artificial
  Synthetic oligonucleotide
cctcaattcacgacacgcgcggcggtgtgtacccctgggagggtaggtacctta

SEQ ID NO: 364598 - DNA, 55 bp, Artificial
  Synthetic oligonucleotide
cctcaattgggtagaaaacagaaatcaggcacagctcaattatgcaccgtgccat

SEQ ID NO: 364599 - DNA, 53 bp, Artificial
  Synthetic oligonucleotide
cctcaatttgcgacacgcgcggcggtgtgtacccctgggagggtaggtaccgg

SEQ ID NO: 364600 - DNA, 55 bp, Artificial
  Synthetic oligonucleotide
cctcacaaaatactgcttaaattggaggtaccaagtcatcatcccctttgcgcgt

SEQ ID NO: 364601 - DNA, 58 bp, Artificial
  Synthetic oligonucleotide
cctcacaacctttagccactaccctcataggtgaacttgcaagttattatacacactg

SEQ ID NO: 364602 - DNA, 60 bp, Artificial
  Synthetic oligonucleotide
cctcacaacgacaatcacaatcagcgggccaaccaattgttcatcgcgtttatgctttac

SEQ ID NO: 364603 - DNA, 55 bp, Artificial
  Synthetic oligonucleotide
cctcacaacggaacccctgagcacgggagggagcacgcagggtctgacgagcata

SEQ ID NO: 364604 - DNA, 60 bp, Artificial
  Synthetic oligonucleotide
cctcacaagatccttgatggaagagactgcacactaatagatgctctacttggggatcct

SEQ ID NO: 364605 - DNA, 56 bp, Artificial
  Synthetic oligonucleotide
cctcacaataccgcagagtctagactcgtggtggacttctctcagttttttagggg

SEQ ID NO: 364606 - DNA, 60 bp, Artificial
  Synthetic oligonucleotide
cctcacaatgttaatcttagcaatcgagagtatcctcctgaaggcccgagttcataccga

SEQ ID NO: 364607 - DNA, 60 bp, Artificial
  Synthetic oligonucleotide
cctcacacaatccctctacctcgatggggccagcgtctgtcactgggcagcatggcgaac

SEQ ID NO: 364608 - DNA, 58 bp, Artificial
  Synthetic oligonucleotide
cctcacaccagatctctgtatgttggccctccacgggccgtcctattggggcctagaa

SEQ ID NO: 364609 - DNA, 60 bp, Artificial
  Synthetic oligonucleotide
cctcacaccatcgcactcagcccggtccaaatacgggtatggtgcacaggacgtcagaag

SEQ ID NO: 364610 - DNA, 52 bp, Artificial
  Synthetic oligonucleotide
cctcacactctgcgcactatctgaagtcacaaacctggctcctgacatcata

SEQ ID NO: 364611 - DNA, 58 bp, Artificial
  Synthetic oligonucleotide
cctcacagacaatccacgccccaatgaccccacagtaggcaaatgtaatgacccttac

SEQ ID NO: 364612 - DNA, 55 bp, Artificial
  Synthetic oligonucleotide
cctcacagacctgatggacagcgaatccctcgtgttagtcccttccctctccggg

SEQ ID NO: 364613 - DNA, 55 bp, Artificial
  Synthetic oligonucleotide
cctcacagcattcgagattcaccagcgtgtatcagaggttgttggggtgaataaa

SEQ ID NO: 364614 - DNA, 55 bp, Artificial
  Synthetic oligonucleotide
cctcacagccgttgtatgtacccctagttggaataagaccgggcccatcattctc

SEQ ID NO: 364615 - DNA, 55 bp, Artificial
  Synthetic oligonucleotide
cctcacaggacaggagctgctcactgtatacggcgcaggggtcctaacactgccc

SEQ ID NO: 364616 - DNA, 60 bp, Artificial
  Synthetic oligonucleotide
cctcacagtagagcaattgctcactgtgatctacgagaaaatgtgtgacgacctcaaatt

SEQ ID NO: 364617 - DNA, 50 bp, Artificial
  Synthetic oligonucleotide
cctcacagtggaaggattccgacagcaaaatgcatacttttggagttgct

SEQ ID NO: 364618 - DNA, 55 bp, Artificial
  Synthetic oligonucleotide
cctcacagtgtcatggccgtcgccctagtggccgagccccactacatggagcaac

SEQ ID NO: 364619 - DNA, 55 bp, Artificial
  Synthetic oligonucleotide
cctcacatacccacacttaggcccctactcaaaaaacagacttgtcacaataacc

SEQ ID NO: 364620 - DNA, 55 bp, Artificial
  Synthetic oligonucleotide
cctcacatcagaatagtcaaggtaggagatcctccaaaacatggagtcaggtatc

SEQ ID NO: 364621 - DNA, 60 bp, Artificial
  Synthetic oligonucleotide
cctcacatcgacatgggtgacctacggaacgtgcaatcaagctggagagcatagacgcga

SEQ ID NO: 364622 - DNA, 55 bp, Artificial
  Synthetic oligonucleotide
cctcaccactcttggttatggaactttgcagctatcttatattgattctttgtgc

SEQ ID NO: 364623 - DNA, 55 bp, Artificial
  Synthetic oligonucleotide
cctcaccataactagtcttcttcggaaactccacgagtggatcaacacggattgg

SEQ ID NO: 364624 - DNA, 53 bp, Artificial
  Synthetic oligonucleotide
cctcacccgagaaatgttcaaaacgcaagcgggtctccacctaaaccctatgt

SEQ ID NO: 364625 - DNA, 60 bp, Artificial
  Synthetic oligonucleotide
cctcacccgatcctggatcatttgctgtgccacgttgattacggcagtaaagaggaacta

SEQ ID NO: 364626 - DNA, 60 bp, Artificial
  Synthetic oligonucleotide
cctcaccgccattgtgatgaagcacagatctatcttggaagatcacccccagcagcctct

SEQ ID NO: 364627 - DNA, 54 bp, Artificial
  Synthetic oligonucleotide
cctcaccgtccctggcgaactgtggatcgtcatcctgacgcggccggtcaaggg

SEQ ID NO: 364628 - DNA, 57 bp, Artificial
  Synthetic oligonucleotide
cctcaccttcaccctagcgggactatatgaacaaaaactgctccacagaaacaggtg

SEQ ID NO: 364629 - DNA, 56 bp, Artificial
  Synthetic oligonucleotide
cctcaccttcttgttggttcttctggactatcaaggtatgttgcccgtttgtcctc

SEQ ID NO: 364630 - DNA, 60 bp, Artificial
  Synthetic oligonucleotide
cctcacctttgagccatcaaccatcgctctgattgcttatatttggctagtcagtccaac

SEQ ID NO: 364631 - DNA, 57 bp, Artificial
  Synthetic oligonucleotide
cctcacgaatgcagctgagcgttttgagaccatctaccctaggcatcgggcttcaga

SEQ ID NO: 364632 - DNA, 56 bp, Artificial
  Synthetic oligonucleotide
cctcacgatcgatagtaacttataacggatttccttcagtcaatacgacgaattct

SEQ ID NO: 364633 - DNA, 58 bp, Artificial
  Synthetic oligonucleotide
cctcacggaggccttttggggtggagccctcaagctcagggcgtgacaacaatattgc

SEQ ID NO: 364634 - DNA, 53 bp, Artificial
  Synthetic oligonucleotide
cctcacggcggtgggtcacgggggcgtccttttacaggacgactctgggtgaa

SEQ ID NO: 364635 - DNA, 52 bp, Artificial
  Synthetic oligonucleotide
cctcacgtacggagcccgagaccctattccaacgtaccctatttacctgccc

SEQ ID NO: 364636 - DNA, 55 bp, Artificial
  Synthetic oligonucleotide
cctcactacacagccctgttcgtagtgacagtccgcagctaacagcgtttagcct

SEQ ID NO: 364637 - DNA, 60 bp, Artificial
  Synthetic oligonucleotide
cctcactaccagtgatgcgggatgagttcaaatacatggtatatcaagtggagaggggac

SEQ ID NO: 364638 - DNA, 55 bp, Artificial
  Synthetic oligonucleotide
cctcactaggagtcctcccctggatgaagtttacaacctcagaggggatcgataa

SEQ ID NO: 364639 - DNA, 55 bp, Artificial
  Synthetic oligonucleotide
cctcactataccgtttgcaccttgttggggtctcctcattccaaccatctgcagg

SEQ ID NO: 364640 - DNA, 50 bp, Artificial
  Synthetic oligonucleotide
cctcactatcatggcgaacgacaaaccaacactggacgtgcgcatgataa

SEQ ID NO: 364641 - DNA, 60 bp, Artificial
  Synthetic oligonucleotide
cctcactatgactcagctcatgaggcggctacaccagtggataagctcggattgcactac

SEQ ID NO: 364642 - DNA, 59 bp, Artificial
  Synthetic oligonucleotide
cctcactcaagtgcttaaggaatatggattgagacccacccggccagacaaatcagaag

SEQ ID NO: 364643 - DNA, 55 bp, Artificial
  Synthetic oligonucleotide
cctcactcaggagaagagcacgctgtaggtaatgacacaggaaaacatggcgagg

SEQ ID NO: 364644 - DNA, 57 bp, Artificial
  Synthetic oligonucleotide
cctcactctcaacatccgggcgcccctacaattttctggacccgccttgactgctag

SEQ ID NO: 364645 - DNA, 60 bp, Artificial
  Synthetic oligonucleotide
cctcactctgtactggctgctttagaggacactgtcgactatcctgctcgtgctcatact

SEQ ID NO: 364646 - DNA, 60 bp, Artificial
  Synthetic oligonucleotide
cctcactgcggtgctaaacacactgaatcagcctaactgtgtcttggtgttcacaggcga

SEQ ID NO: 364647 - DNA, 60 bp, Artificial
  Synthetic oligonucleotide
cctcactgcttactccttgttattcacacctcaacattatgcaactatgatggctgaatc

SEQ ID NO: 364648 - DNA, 60 bp, Artificial
  Synthetic oligonucleotide
cctcactgtaacccagctcctgaggcgactgcaccagtggataagctcggagtgtaccac

SEQ ID NO: 364649 - DNA, 55 bp, Artificial
  Synthetic oligonucleotide
cctcactgtctgtgtcgctagtattggtgggagtcgtgacactgtacctgggagc

SEQ ID NO: 364650 - DNA, 60 bp, Artificial
  Synthetic oligonucleotide
cctcactgtgacccagctcctgagacgactgcacgactgggtgagctcggagtgcaccac

SEQ ID NO: 364651 - DNA, 55 bp, Artificial
  Synthetic oligonucleotide
cctcactgttaataatggtgacgtcaatgttgggaagtatagggtcaatcctagt

SEQ ID NO: 364652 - DNA, 55 bp, Artificial
  Synthetic oligonucleotide
cctcactgttgcctggtttgatcagaatggactccagcatattgcccccgtccaa

SEQ ID NO: 364653 - DNA, 55 bp, Artificial
  Synthetic oligonucleotide
cctcacttaatgaggcgactacttttagaggaaccatatcttatgttgatgtctc

SEQ ID NO: 364654 - DNA, 50 bp, Artificial
  Synthetic oligonucleotide
cctcacttgagccagatctctgcgaagaggctgttcataaatttggattc

SEQ ID NO: 364655 - DNA, 55 bp, Artificial
  Synthetic oligonucleotide
cctcagaaaggcaacaagaaggctgatccagctgatagtaagtgggagggacgaa

SEQ ID NO: 364656 - DNA, 55 bp, Artificial
  Synthetic oligonucleotide
cctcagaacagattgccaggctatcattagttactacaacaagagtaactcaaac

SEQ ID NO: 364657 - DNA, 55 bp, Artificial
  Synthetic oligonucleotide
cctcagaagttcacctcatctgccaacggagtgaccacacattacgtttcacaga

SEQ ID NO: 364658 - DNA, 59 bp, Artificial
  Synthetic oligonucleotide
cctcagaatggctttcggtcatttgtatgagactttccacgcaaatcctgggacgataa

SEQ ID NO: 364659 - DNA, 54 bp, Artificial
  Synthetic oligonucleotide
cctcagaattactttctctatcacttaatctgcaatcatccattaacctctctc

SEQ ID NO: 364660 - DNA, 55 bp, Artificial
  Synthetic oligonucleotide
cctcagaattgacggttatgaagacagatatgcagcagatggctctattacagcg

SEQ ID NO: 364661 - DNA, 60 bp, Artificial
  Synthetic oligonucleotide
cctcagacacccaacattcaccgtgcatacactcggtgtccctgacaaggtgagtatcag

SEQ ID NO: 364662 - DNA, 51 bp, Artificial
  Synthetic oligonucleotide
cctcagacactgattgagattgtaggctcatcaaacctaatctcctcttca

SEQ ID NO: 364663 - DNA, 60 bp, Artificial
  Synthetic oligonucleotide
cctcagacccaattaaagaccatctggagattcggacagaatgtctgtgatgccatccaa

SEQ ID NO: 364664 - DNA, 58 bp, Artificial
  Synthetic oligonucleotide
cctcagacggcgggccttctagatgtattcagggataatggtactagagtcccacttg

SEQ ID NO: 364665 - DNA, 55 bp, Artificial
  Synthetic oligonucleotide
cctcagagaaaatggctacaaaatcctgcagccgcggtctctgcccgagaatgag

SEQ ID NO: 364666 - DNA, 60 bp, Artificial
  Synthetic oligonucleotide
cctcagagcatctgctgcatcagtcacttgttggaaagaggtccccttttcagaatgcct

SEQ ID NO: 364667 - DNA, 59 bp, Artificial
  Synthetic oligonucleotide
cctcagagcctgcagaggttctactcagacgaagagcgtgaatgtttctctgatgggga

SEQ ID NO: 364668 - DNA, 60 bp, Artificial
  Synthetic oligonucleotide
cctcagaggctaaagtctcgaacaaagatttagctcataatctacgaatcaccacttatc

SEQ ID NO: 364669 - DNA, 51 bp, Artificial
  Synthetic oligonucleotide
cctcagataaaaccagtaacgacgcagattatcacatcccgttataaacca

SEQ ID NO: 364670 - DNA, 58 bp, Artificial
  Synthetic oligonucleotide
cctcagataatgagacgatcgcgagccctcctaccacaaccgtttcctctcccttcac

SEQ ID NO: 364671 - DNA, 55 bp, Artificial
  Synthetic oligonucleotide
cctcagatctctctttggcaacgacccattgtcacagtaaacataggaggacagc

SEQ ID NO: 364672 - DNA, 60 bp, Artificial
  Synthetic oligonucleotide
cctcagatgaggagaggaacaatgcacagctagagtttgatgatgagcccaaggtgattg

SEQ ID NO: 364673 - DNA, 55 bp, Artificial
  Synthetic oligonucleotide
cctcagatgggcttgctaggcatgtaactcattgccctaagcggaaggagaaagt

SEQ ID NO: 364674 - DNA, 55 bp, Artificial
  Synthetic oligonucleotide
cctcagatgtcacaattggcagaaagactttgaggcgagcgacgccgtaggggtg

SEQ ID NO: 364675 - DNA, 60 bp, Artificial
  Synthetic oligonucleotide
cctcagattattgggatggttacagtggacaattagtttgtataattgatgatatcggcc

SEQ ID NO: 364676 - DNA, 55 bp, Artificial
  Synthetic oligonucleotide
cctcagatttaatgggaaaacaacaactcaggtagaggttaagtattccaggaca

SEQ ID NO: 364677 - DNA, 58 bp, Artificial
  Synthetic oligonucleotide
cctcagatttgttggtcagtcgtcttgccagtttagagagctgtgtagaaaacctact

SEQ ID NO: 364678 - DNA, 55 bp, Artificial
  Synthetic oligonucleotide
cctcagcacagcagacaaccccaagcccaatgacttccccagcgcaatcgatcct

SEQ ID NO: 364679 - DNA, 56 bp, Artificial
  Synthetic oligonucleotide
cctcagcagaacacttaatccttgtgttcctgatatatactgtttgccaactttat

SEQ ID NO: 364680 - DNA, 54 bp, Artificial
  Synthetic oligonucleotide
cctcagcagcctacccaaaggggctcgagaacaaagccctggccagaaaacccg

SEQ ID NO: 364681 - DNA, 60 bp, Artificial
  Synthetic oligonucleotide
cctcagccctccataaacgcaccaggcttccatctgccacccaccgactcacaacaatcc

SEQ ID NO: 364682 - DNA, 59 bp, Artificial
  Synthetic oligonucleotide
cctcagccggcctaccctacataggcaaaaccaaaggagacacgactgcagaggcgctc

SEQ ID NO: 364683 - DNA, 54 bp, Artificial
  Synthetic oligonucleotide
cctcagcctgtggtgcaggtccccccggtagaccatcggccggggggtgagtcc

SEQ ID NO: 364684 - DNA, 59 bp, Artificial
  Synthetic oligonucleotide
cctcagccttagctagtggtgccgcttcgaaattatttggaggctctcagcgtggagtt

SEQ ID NO: 364685 - DNA, 55 bp, Artificial
  Synthetic oligonucleotide
cctcagccttctatccctgctgaaggctctcatctcgtgaaccccaaatccgcag

SEQ ID NO: 364686 - DNA, 57 bp, Artificial
  Synthetic oligonucleotide
cctcagcgcattgtaggaatagtcggacgaggtccgacactactacaaaaacggtga

SEQ ID NO: 364687 - DNA, 53 bp, Artificial
  Synthetic oligonucleotide
cctcagcgccgtccttacaagttttgcggtttctgacggtagaatgttccccc

SEQ ID NO: 364688 - DNA, 59 bp, Artificial
  Synthetic oligonucleotide
cctcagcggggtttcatggactatgaagatcctcataggggtggttataacatggatag

SEQ ID NO: 364689 - DNA, 55 bp, Artificial
  Synthetic oligonucleotide
cctcagcggttgcttctttggcggctcctgatgtttccgcaagcagctcatccgc

SEQ ID NO: 364690 - DNA, 59 bp, Artificial
  Synthetic oligonucleotide
cctcagcgtctccgctattgtttaagtcaagggtttctccgagactttctgcacgctgc

SEQ ID NO: 364691 - DNA, 58 bp, Artificial
  Synthetic oligonucleotide
cctcagctctgtatcgggaggcctttcttgagtatttggtgtcttttggagtgtggat

SEQ ID NO: 364692 - DNA, 57 bp, Artificial
  Synthetic oligonucleotide
cctcaggaccaggaattagatacccaaagacatttggctggctatggaaattagtcc

SEQ ID NO: 364693 - DNA, 55 bp, Artificial
  Synthetic oligonucleotide
cctcaggacgtcgtccctttggtagctcgcatggcaactaaagcctttcctaggg

SEQ ID NO: 364694 - DNA, 60 bp, Artificial
  Synthetic oligonucleotide
cctcaggagagggtatagacagcgtggtaagaaatccgccgtggtgagtctagatagaga

SEQ ID NO: 364695 - DNA, 56 bp, Artificial
  Synthetic oligonucleotide
cctcaggagttaactacatcggacagtgtcctcacttttgaactaacggacatcgt

SEQ ID NO: 364696 - DNA, 55 bp, Artificial
  Synthetic oligonucleotide
cctcaggattccgcggtgatatacttgatcgataaaaggtttacttacaagaacg

SEQ ID NO: 364697 - DNA, 54 bp, Artificial
  Synthetic oligonucleotide
cctcaggattgacaaggcaattggccctgggaagatcaccgacaatgcagagca

SEQ ID NO: 364698 - DNA, 55 bp, Artificial
  Synthetic oligonucleotide
cctcaggattgggacgttcttaccgacactattagttggtctccctcactcccga

SEQ ID NO: 364699 - DNA, 60 bp, Artificial
  Synthetic oligonucleotide
cctcaggcacagggcacactacaaaccttgccagcaaatccgcctcctgcctctaccaat

SEQ ID NO: 364700 - DNA, 55 bp, Artificial
  Synthetic oligonucleotide
cctcaggcactgactctgtatcagacataaatgtcagtagtggtagtactataac

SEQ ID NO: 364701 - DNA, 60 bp, Artificial
  Synthetic oligonucleotide
cctcaggcgtgattaacgttaaggttgcctcttctgatcaagtcatggatgcgggttctc

SEQ ID NO: 364702 - DNA, 55 bp, Artificial
  Synthetic oligonucleotide
cctcagggaatgcttaatagtccaactatttgtcagacttttgtaggtcgagctc

SEQ ID NO: 364703 - DNA, 53 bp, Artificial
  Synthetic oligonucleotide
cctcagggatcaacacaacaagtagacgctgctgtgaataaaattttgcagaa

SEQ ID NO: 364704 - DNA, 60 bp, Artificial
  Synthetic oligonucleotide
cctcagggggtaggtagggggatctttgcgatgacactgccacttgcatatatgcaacgg

SEQ ID NO: 364705 - DNA, 55 bp, Artificial
  Synthetic oligonucleotide
cctcagggtagcaccgcgtgaagcattttgtgagaacttgagtgaactatatcac

SEQ ID NO: 364706 - DNA, 55 bp, Artificial
  Synthetic oligonucleotide
cctcaggtcgtactcatgtgattgaattcacaacgttcagaggaacatcccaagg

SEQ ID NO: 364707 - DNA, 55 bp, Artificial
  Synthetic oligonucleotide
cctcaggttgtgattgaaccggatctgtacgtggtacactctggtcctcgtgtac

SEQ ID NO: 364708 - DNA, 59 bp, Artificial
  Synthetic oligonucleotide
cctcaggttgtggttgaacctgatttggatgtggtacactctggtcgttgtgtacagag

SEQ ID NO: 364709 - DNA, 55 bp, Artificial
  Synthetic oligonucleotide
cctcaggttgtggttgaactgtatttgtaccgttatgatatcgtggttccccagg

SEQ ID NO: 364710 - DNA, 60 bp, Artificial
  Synthetic oligonucleotide
cctcaggttgtggttgaatcttatctgcagcaatagtaggtgtctcgcacctagatctgt

SEQ ID NO: 364711 - DNA, 55 bp, Artificial
  Synthetic oligonucleotide
cctcagtaaagacaacattcttacaatagctttaccaagaattgtacctgatggc

SEQ ID NO: 364712 - DNA, 55 bp, Artificial
  Synthetic oligonucleotide
cctcagtacttgaagcgctatcgcagtactcatttcgtctcacgttctccagctg

SEQ ID NO: 364713 - DNA, 58 bp, Artificial
  Synthetic oligonucleotide
cctcagtagtgtaacacacttcgagaaagtgaagattttgcccaaagataggtggaca

SEQ ID NO: 364714 - DNA, 52 bp, Artificial
  Synthetic oligonucleotide
cctcagtatttgtctgacatttaagtgccaaacgttgcacatcggcgaatct

SEQ ID NO: 364715 - DNA, 59 bp, Artificial
  Synthetic oligonucleotide
cctcagtcaaaagagaggaagaagtgcttacaggcaatctccaaacattgaaaataaga

SEQ ID NO: 364716 - DNA, 55 bp, Artificial
  Synthetic oligonucleotide
cctcagtcgagatgcccactattgatattagcaaagacctgtctgaagcggaatg

SEQ ID NO: 364717 - DNA, 55 bp, Artificial
  Synthetic oligonucleotide
cctcagtctcttatcactaccttctgcagctatgagtaatcacatcaaactagcc

SEQ ID NO: 364718 - DNA, 55 bp, Artificial
  Synthetic oligonucleotide
cctcagtgcacaggtttgaccccgttattgcatctccttgaacgttcatatgata

SEQ ID NO: 364719 - DNA, 59 bp, Artificial
  Synthetic oligonucleotide
cctcagtgcagatacacccacggaagcaacgcaaagtgcacttctccgaggggactcgg

SEQ ID NO: 364720 - DNA, 55 bp, Artificial
  Synthetic oligonucleotide
cctcagtgttcaagagggtggcctgcaactctagtttgagtctgtcgtctcattg

SEQ ID NO: 364721 - DNA, 55 bp, Artificial
  Synthetic oligonucleotide
cctcagtgtttctatgacgtggacacaaagccagcctacgggcagaccaggtact

SEQ ID NO: 364722 - DNA, 60 bp, Artificial
  Synthetic oligonucleotide
cctcagttagaagcaccacagaaagtggaaagatcattccagagtggtgctgtcgggcct

SEQ ID NO: 364723 - DNA, 55 bp, Artificial
  Synthetic oligonucleotide
cctcagttaggctgcgggcctacctaaatacaccagggttgcccgtttgccagga

SEQ ID NO: 364724 - DNA, 50 bp, Artificial
  Synthetic oligonucleotide
cctcagttaggttgcgggcttatctaaatacaccaggattgcccgtctgc

SEQ ID NO: 364725 - DNA, 55 bp, Artificial
  Synthetic oligonucleotide
cctcagttgctaatgcaggataggatagcaattcatgaaataagttcactatggg

SEQ ID NO: 364726 - DNA, 58 bp, Artificial
  Synthetic oligonucleotide
cctcagttggtcaatgtgggtggtcaccaatggaaggcggctttaaaaagactatgca

SEQ ID NO: 364727 - DNA, 56 bp, Artificial
  Synthetic oligonucleotide
cctcagtttaatcttagccttgaccgggtcagcgctcccttatgcgtttcttcaac

SEQ ID NO: 364728 - DNA, 55 bp, Artificial
  Synthetic oligonucleotide
cctcagtttctaacgctaaggcgcaatcagcagatatttctaggtgatgacgcgt

SEQ ID NO: 364729 - DNA, 59 bp, Artificial
  Synthetic oligonucleotide
cctcagttttccctgagcacacgtgacccacacttggaccatgcggtcaaagttgtcac

SEQ ID NO: 364730 - DNA, 56 bp, Artificial
  Synthetic oligonucleotide
cctcagtttttgtcaagttgactgatcccccggcacaggtctcagttccgtttatg

SEQ ID NO: 364731 - DNA, 58 bp, Artificial
  Synthetic oligonucleotide
cctcataaaacaaaaagatggggctactcccttaacttcatgggatatgtgattggca

SEQ ID NO: 364732 - DNA, 55 bp, Artificial
  Synthetic oligonucleotide
cctcataaccgctctgtggagacgagcgtgactccacccggcatccagtgggccc

SEQ ID NO: 364733 - DNA, 55 bp, Artificial
  Synthetic oligonucleotide
cctcataatccattgcgagtgtgcgacaagactgctacaatagcaggttttccag

SEQ ID NO: 364734 - DNA, 55 bp, Artificial
  Synthetic oligonucleotide
cctcataatccttggacgtggactgtgtctagggctgcctgccatcgttttgtgg

SEQ ID NO: 364735 - DNA, 60 bp, Artificial
  Synthetic oligonucleotide
cctcatacagcacagtcatgatggtggtttaaatcttgccgaccttaacccacttgtgaa

SEQ ID NO: 364736 - DNA, 55 bp, Artificial
  Synthetic oligonucleotide
cctcatactactgattctggtatataggctggaaacacgacactgttacgatccc

SEQ ID NO: 364737 - DNA, 55 bp, Artificial
  Synthetic oligonucleotide
cctcatacttataatacccgagtgtctttgctcacggattcttagaactgtttcc

SEQ ID NO: 364738 - DNA, 55 bp, Artificial
  Synthetic oligonucleotide
cctcatagccgacccgcttcaatacaggactcaacatctgcgacctcactacgtc

SEQ ID NO: 364739 - DNA, 58 bp, Artificial
  Synthetic oligonucleotide
cctcatagtgctgacgactctgtgtacactgacgtggctagcgaaacatcaatcagca

SEQ ID NO: 364740 - DNA, 57 bp, Artificial
  Synthetic oligonucleotide
cctcatataacactgagttttagtaacgagaagacggtgagaatagatactacaaaa

SEQ ID NO: 364741 - DNA, 55 bp, Artificial
  Synthetic oligonucleotide
cctcatatcccactattgggtaagatggccatttacattgccagaatgtcaaatc

SEQ ID NO: 364742 - DNA, 55 bp, Artificial
  Synthetic oligonucleotide
cctcatatttctgcaagctcacttgaatggattgaccctgacagttctttgagag

SEQ ID NO: 364743 - DNA, 55 bp, Artificial
  Synthetic oligonucleotide
cctcatcaaatttacaggacactatgccgatcgatagtagcaacattctcgggat

SEQ ID NO: 364744 - DNA, 55 bp, Artificial
  Synthetic oligonucleotide
cctcatcaacacctatgcccgaggatctgacgagggcaatcgccacaccagcgag

SEQ ID NO: 364745 - DNA, 55 bp, Artificial
  Synthetic oligonucleotide
cctcatcaaccgataatagactatcggactcttctatcgttataactcgagaata

SEQ ID NO: 364746 - DNA, 59 bp, Artificial
  Synthetic oligonucleotide
cctcatcacgaaaactgcaaaggcctgccaaccttaggctgaaacagtgactaggccga

SEQ ID NO: 364747 - DNA, 60 bp, Artificial
  Synthetic oligonucleotide
cctcatcatgacgaatccgtgacgcggacatgataacaagcgtactgtcctcgacgattg

SEQ ID NO: 364748 - DNA, 55 bp, Artificial
  Synthetic oligonucleotide
cctcatcatgttagacattttgtatttagcaaaccagcagatctcaagaggggac

SEQ ID NO: 364749 - DNA, 55 bp, Artificial
  Synthetic oligonucleotide
cctcatccacccaaccatgccaatgaaggagatacacgaatccattcgctggact

SEQ ID NO: 364750 - DNA, 55 bp, Artificial
  Synthetic oligonucleotide
cctcatccactacccctccccttatctacctcaaataaaactacctcacattcga

SEQ ID NO: 364751 - DNA, 55 bp, Artificial
  Synthetic oligonucleotide
cctcatccgccgactacttgagatcggcatagacgaatacaacggcagggacata

SEQ ID NO: 364752 - DNA, 55 bp, Artificial
  Synthetic oligonucleotide
cctcatccggcaccctggaatttacccaagaaagcttcaattggactggagtcgc

SEQ ID NO: 364753 - DNA, 55 bp, Artificial
  Synthetic oligonucleotide
cctcatccggcaccctggagtttaacgatgaaagtttcgattggactggagtctc

SEQ ID NO: 364754 - DNA, 55 bp, Artificial
  Synthetic oligonucleotide
cctcatccgtggacaggtacagacgtttaaccggcttcatgcttaccccagcgca

SEQ ID NO: 364755 - DNA, 56 bp, Artificial
  Synthetic oligonucleotide
cctcatccgtggtccttccgaagctgaactcttagcccatcaaaccgcaaaacaag

SEQ ID NO: 364756 - DNA, 55 bp, Artificial
  Synthetic oligonucleotide
cctcatcgcaggatccctcgccacctactgcctcaacttacccgccttgcgacgt

SEQ ID NO: 364757 - DNA, 55 bp, Artificial
  Synthetic oligonucleotide
cctcatcggttgcattattgggatttcgtatcgagtcgagggacgaggcctccac

SEQ ID NO: 364758 - DNA, 54 bp, Artificial
  Synthetic oligonucleotide
cctcatcgtataccccgaccttggggtcagggtgtgcgagaagatggccctata

SEQ ID NO: 364759 - DNA, 55 bp, Artificial
  Synthetic oligonucleotide
cctcatctcagagatgttaagtaaggaatacgctgagaggcaaggcaaaacccca

SEQ ID NO: 364760 - DNA, 52 bp, Artificial
  Synthetic oligonucleotide
cctcatctcagcgcgcgactccgccaagagcctggctgattgtggctaccat

SEQ ID NO: 364761 - DNA, 60 bp, Artificial
  Synthetic oligonucleotide
cctcatctctgggtacagttggaggcagatcgcgcacttgtttgttgaggtgatttcaca

SEQ ID NO: 364762 - DNA, 60 bp, Artificial
  Synthetic oligonucleotide
cctcatcttcaactgtgagtgctgcaaaagtcttcagatccctctaggacccgaaaggcc

SEQ ID NO: 364763 - DNA, 60 bp, Artificial
  Synthetic oligonucleotide
cctcatcttgggtcaacagggtgtctccacacgtttgacgagctatttggtgccaggatc

SEQ ID NO: 364764 - DNA, 55 bp, Artificial
  Synthetic oligonucleotide
cctcatgaatgagttagttcgtggcacgggaatgtacaatcaagctctgttcgag

SEQ ID NO: 364765 - DNA, 55 bp, Artificial
  Synthetic oligonucleotide
cctcatgagagaagggaaactactggttgtggccttaaaagaagtgagtaaggac

SEQ ID NO: 364766 - DNA, 60 bp, Artificial
  Synthetic oligonucleotide
cctcatgattgtctgtgcatgaatagtaggtcacattccggcgattcaatattaggcgtt

SEQ ID NO: 364767 - DNA, 54 bp, Artificial
  Synthetic oligonucleotide
cctcatgcttgtttgtacatacagtgctaaggagcgtgagggcagaagctgtcc

SEQ ID NO: 364768 - DNA, 60 bp, Artificial
  Synthetic oligonucleotide
cctcatggacgagtttggtgcagctcctaagacggactatatggacgaagtcactatgtt

SEQ ID NO: 364769 - DNA, 60 bp, Artificial
  Synthetic oligonucleotide
cctcatggatatcataggattggggcgtgtacttacgaaagtgctcattatgtagcacgt

SEQ ID NO: 364770 - DNA, 57 bp, Artificial
  Synthetic oligonucleotide
cctcatggcatgtcctgtatggacccactcaagtccccagtccacccgacccccaag

SEQ ID NO: 364771 - DNA, 57 bp, Artificial
  Synthetic oligonucleotide
cctcatggcgcccaatggtggggacctcaaaggtaagccgcacttccaatttctctc

SEQ ID NO: 364772 - DNA, 55 bp, Artificial
  Synthetic oligonucleotide
cctcatgtcgtttctgggaggaaaggtactgacgtttgccaaccactccagccac

SEQ ID NO: 364773 - DNA, 55 bp, Artificial
  Synthetic oligonucleotide
cctcatgttgaggctcgcgccaatgagcggcacttgatcactctgggtggcagtg

SEQ ID NO: 364774 - DNA, 55 bp, Artificial
  Synthetic oligonucleotide
cctcatgttgcaaatccgtttagacaatatgctagaaaacatgaagctgacattg

SEQ ID NO: 364775 - DNA, 55 bp, Artificial
  Synthetic oligonucleotide
cctcatgttggacctactggttcactgccaagttttgacgatctgtttgggtgca

SEQ ID NO: 364776 - DNA, 55 bp, Artificial
  Synthetic oligonucleotide
cctcattaaccttatgcagccccggcaactggtcttccgcccagaggttttctgg

SEQ ID NO: 364777 - DNA, 55 bp, Artificial
  Synthetic oligonucleotide
cctcattacgtgttagggatattcataggagtaggtttagtctagtttaccagaa

SEQ ID NO: 364778 - DNA, 55 bp, Artificial
  Synthetic oligonucleotide
cctcattcgatagtagccatctccttcgcttttgcacgtgtacgaatcggggtct

SEQ ID NO: 364779 - DNA, 55 bp, Artificial
  Synthetic oligonucleotide
cctcattcgggaatcgaacccgacactacgacttggaaggacggtatgtgaccac

SEQ ID NO: 364780 - DNA, 50 bp, Artificial
  Synthetic oligonucleotide
cctcattctgccaggtctaaatttggctacggggcaaaggacgttcgaag

SEQ ID NO: 364781 - DNA, 60 bp, Artificial
  Synthetic oligonucleotide
cctcattgaattcaccattcttaagcttatgatgtagctttctcacaagttttcttatgg

SEQ ID NO: 364782 - DNA, 55 bp, Artificial
  Synthetic oligonucleotide
cctcattgacctcaattaatgttcaggcaagtgcactattcacactcgcgcgagg

SEQ ID NO: 364783 - DNA, 55 bp, Artificial
  Synthetic oligonucleotide
cctcattgaggccaatctcttgtggggcaccaaagctaccagggtcgagacggag

SEQ ID NO: 364784 - DNA, 58 bp, Artificial
  Synthetic oligonucleotide
cctcattggctggcctgtacgtcattgggttgaagtctggccgttcgattgggtccac

SEQ ID NO: 364785 - DNA, 48 bp, Artificial
  Synthetic oligonucleotide
cctcattgggggggtccgggggggcttgcccccgtaagctgggttacc

SEQ ID NO: 364786 - DNA, 53 bp, Artificial
  Synthetic oligonucleotide
cctcatttaaatttctaccctccgtttctaataccggagtgtctagcccttca

SEQ ID NO: 364787 - DNA, 55 bp, Artificial
  Synthetic oligonucleotide
cctcatttctatggctagtgaggaccagcttaatgcaataatggccgactgggcg

SEQ ID NO: 364788 - DNA, 55 bp, Artificial
  Synthetic oligonucleotide
cctccaaaagctattgacccaacttcccgtgggcaacaactctggaacgcatgtc

SEQ ID NO: 364789 - DNA, 55 bp, Artificial
  Synthetic oligonucleotide
cctccaaaatgccgttaagtacataaaggagagcaaccatcaactcctatctgtg

SEQ ID NO: 364790 - DNA, 59 bp, Artificial
  Synthetic oligonucleotide
cctccaaagcagtcttcagcaaaaattctgaagtcgtactactacttgtctggaagtga

SEQ ID NO: 364791 - DNA, 55 bp, Artificial
  Synthetic oligonucleotide
cctccaaaggtaattccacaatggaagcatcttactctgtcgctcttcccagtgt

SEQ ID NO: 364792 - DNA, 55 bp, Artificial
  Synthetic oligonucleotide
cctccaaccggatggaaaggtttatcaatggacaagaaacggaattgcatctgga

SEQ ID NO: 364793 - DNA, 53 bp, Artificial
  Synthetic oligonucleotide
cctccaactcctattgtaaactttcaccttaattacaaattctaggccctcaa

SEQ ID NO: 364794 - DNA, 55 bp, Artificial
  Synthetic oligonucleotide
cctccaagaaactatcccacggaagttcgctactactggggacctcctggcagcg

SEQ ID NO: 364795 - DNA, 60 bp, Artificial
  Synthetic oligonucleotide
cctccaagaattgcaggaaaatatcaccgcacacgaacaacatctcgtcactgccaggca

SEQ ID NO: 364796 - DNA, 52 bp, Artificial
  Synthetic oligonucleotide
cctccaagacatcagctgtcttaggtatggccactcgccccctgaggcgact

SEQ ID NO: 364797 - DNA, 55 bp, Artificial
  Synthetic oligonucleotide
cctccaagatgtgtatacaatcgaccccacgttgacattgcgtcagatagagtta

SEQ ID NO: 364798 - DNA, 60 bp, Artificial
  Synthetic oligonucleotide
cctccaagccatgtaataagcaacgtcgcaagcatacctatccaagtgatagcgataagt

SEQ ID NO: 364799 - DNA, 53 bp, Artificial
  Synthetic oligonucleotide
cctccaaggacccatttgggccaaagtccccgacaccgacaatcacttccacc

SEQ ID NO: 364800 - DNA, 55 bp, Artificial
  Synthetic oligonucleotide
cctccaaggattaacatccttgagcgagaagtaagacgaagagtagtagtgcagg

SEQ ID NO: 364801 - DNA, 60 bp, Artificial
  Synthetic oligonucleotide
cctccaagggcaatcttgagttggaggaagacaatatcggcttgcatgcacgggcgcaga

SEQ ID NO: 364802 - DNA, 60 bp, Artificial
  Synthetic oligonucleotide
cctccaatatgtgtcagcaacctacgacatctctagggttgaacatgccattgtgtacta

SEQ ID NO: 364803 - DNA, 56 bp, Artificial
  Synthetic oligonucleotide
cctccaatattacagggttgctattaaccagagatggtggtaacagtagtaacaac

SEQ ID NO: 364804 - DNA, 50 bp, Artificial
  Synthetic oligonucleotide
cctccaatcgattgaacgcacttgggaacataatccttgggctcaagcta

SEQ ID NO: 364805 - DNA, 58 bp, Artificial
  Synthetic oligonucleotide
cctccaatcttggcgcaagaggagattcgggttgaggaaaatgtcagacgacttggtg

SEQ ID NO: 364806 - DNA, 55 bp, Artificial
  Synthetic oligonucleotide
cctccaatgactctacccgaatggatgcagtggaggtaccgacagaatgtcaaca

SEQ ID NO: 364807 - DNA, 55 bp, Artificial
  Synthetic oligonucleotide
cctccacaagcactcctaagtcccctttgcgtggtgtgacatcccctggcaggcg

SEQ ID NO: 364808 - DNA, 60 bp, Artificial
  Synthetic oligonucleotide
cctccacaggctactcgacaaccctctctctgggcaggcatggaaagaatgggctaacac

SEQ ID NO: 364809 - DNA, 52 bp, Artificial
  Synthetic oligonucleotide
cctccacatactcactaccacctgatccgtctcactttgatggttacaagca

SEQ ID NO: 364810 - DNA, 52 bp, Artificial
  Synthetic oligonucleotide
cctccaccaagtggctctcaaagaacgctttctatgctctgccttcaaaaat

SEQ ID NO: 364811 - DNA, 60 bp, Artificial
  Synthetic oligonucleotide
cctccaccagaacatcgttgatgtccaatacctttacggtgtcggctcagctgtggtgtc

SEQ ID NO: 364812 - DNA, 57 bp, Artificial
  Synthetic oligonucleotide
cctccaccagatttggggatttcactctccttggctcgtgtagtctagattcaccct

SEQ ID NO: 364813 - DNA, 52 bp, Artificial
  Synthetic oligonucleotide
cctccaccccaaagatttcgcccgatacggcccagaccctctccccctagcc

SEQ ID NO: 364814 - DNA, 54 bp, Artificial
  Synthetic oligonucleotide
cctccaccgctagcaaggattcttccaaatcctctaaggttaaggttcacaact

SEQ ID NO: 364815 - DNA, 57 bp, Artificial
  Synthetic oligonucleotide
cctccacctaatcaaaattccaacacatagacacataaaaggcaagccttgcccgaa

SEQ ID NO: 364816 - DNA, 58 bp, Artificial
  Synthetic oligonucleotide
cctccacgcctccaaggtaggcagtgcccattacgtggccgttgaatcgtgcctccac

SEQ ID NO: 364817 - DNA, 55 bp, Artificial
  Synthetic oligonucleotide
cctccacgtggcactgggcaacaggcgcagacaccgataaagggacatttgtgac

SEQ ID NO: 364818 - DNA, 55 bp, Artificial
  Synthetic oligonucleotide
cctccacttgaattgggagattgcagcatcgccggatggctacttgggaatccag

SEQ ID NO: 364819 - DNA, 55 bp, Artificial
  Synthetic oligonucleotide
cctccagaatcacttataacagcccttgttgaggaataccaaaatcctgtctcag

SEQ ID NO: 364820 - DNA, 55 bp, Artificial
  Synthetic oligonucleotide
cctccagagaactgctgatccctgcgaagactacaaacaagggccgataatcgca

SEQ ID NO: 364821 - DNA, 57 bp, Artificial
  Synthetic oligonucleotide
cctccagaggaccccttcagcgaacagaagacctctcactcggtgggagtaagacca

SEQ ID NO: 364822 - DNA, 58 bp, Artificial
  Synthetic oligonucleotide
cctccagaggaccccttcagcgaacagaagggcgtgtcgagcagtaggagtaagacca

SEQ ID NO: 364823 - DNA, 60 bp, Artificial
  Synthetic oligonucleotide
cctccagaggaccccttcagcgaacagagagccctgacgcgcgaggagtaagaccatagc

SEQ ID NO: 364824 - DNA, 53 bp, Artificial
  Synthetic oligonucleotide
cctccagagtgaactcgcccccaccctcccatcccaaccagaaccttccccga

SEQ ID NO: 364825 - DNA, 60 bp, Artificial
  Synthetic oligonucleotide
cctccagatccagacactgcagcatgctgggtccaccatgataacagtcccctccggagg

SEQ ID NO: 364826 - DNA, 55 bp, Artificial
  Synthetic oligonucleotide
cctccagcacatcttctaactcttctactgctacctctgtgtactcaaatcaaac

SEQ ID NO: 364827 - DNA, 55 bp, Artificial
  Synthetic oligonucleotide
cctccagcatcaagctggatccaaatgtgctagttaagacaaccatgctattatc

SEQ ID NO: 364828 - DNA, 58 bp, Artificial
  Synthetic oligonucleotide
cctccagcttatagaccaccaaatgcccctatcctatccacacttccggagactactg

SEQ ID NO: 364829 - DNA, 60 bp, Artificial
  Synthetic oligonucleotide
cctccaggattctggggcactgaagaggagattcccttacattatgcacattcgagcagc

SEQ ID NO: 364830 - DNA, 55 bp, Artificial
  Synthetic oligonucleotide
cctccaggcagcagggacccttttccacagagcaacgccccaatagtggacgagg

SEQ ID NO: 364831 - DNA, 60 bp, Artificial
  Synthetic oligonucleotide
cctccaggtcaactgagtgtggggctccgtctcgtcagaggatgggtcagatagtcacaa

SEQ ID NO: 364832 - DNA, 55 bp, Artificial
  Synthetic oligonucleotide
cctccaggtgaattgagaaaggcaatttgcttggccgaaggagaaggaagtggtg

SEQ ID NO: 364833 - DNA, 54 bp, Artificial
  Synthetic oligonucleotide
cctccaggttgggagcctgcggaacccaaacgagaggaggtggaccaattccca

SEQ ID NO: 364834 - DNA, 55 bp, Artificial
  Synthetic oligonucleotide
cctccagtaaatatagacagaccgatcccactaggtcgcagagacgttcctggac

SEQ ID NO: 364835 - DNA, 55 bp, Artificial
  Synthetic oligonucleotide
cctccagtaaatgttgataggccgattccactaggacgcagagatgttcctgggc

SEQ ID NO: 364836 - DNA, 55 bp, Artificial
  Synthetic oligonucleotide
cctccagtaatattacattctcccaattgttcttgccagttttgctcatcggagc

SEQ ID NO: 364837 - DNA, 60 bp, Artificial
  Synthetic oligonucleotide
cctccagtagctcgtcggtatctgtgccatgtccgcccctgccgtatggatcgctgcggg

SEQ ID NO: 364838 - DNA, 55 bp, Artificial
  Synthetic oligonucleotide
cctccagttccaccgccaaggaggaaaagcgtggtgcacctggatgattccaccg

SEQ ID NO: 364839 - DNA, 55 bp, Artificial
  Synthetic oligonucleotide
cctccatagaatggaggcagggaaggtatgtgacacaaatagaccctgacctggc

SEQ ID NO: 364840 - DNA, 55 bp, Artificial
  Synthetic oligonucleotide
cctccatagaatggaggttgagaagatatagcacacaagtagaccctaacctggc

SEQ ID NO: 364841 - DNA, 51 bp, Artificial
  Synthetic oligonucleotide
cctccatcattaaaacctagattggaggttgagttccttaaacgtaaaccc

SEQ ID NO: 364842 - DNA, 57 bp, Artificial
  Synthetic oligonucleotide
cctccatctgctagtttacaggatacctataggtttgttacctctcaggctattacg

SEQ ID NO: 364843 - DNA, 55 bp, Artificial
  Synthetic oligonucleotide
cctccatgattcccataagaccccaagaatgcggcgcttgtacaattggtatgtt

SEQ ID NO: 364844 - DNA, 56 bp, Artificial
  Synthetic oligonucleotide
cctccatgatttgtcatgcaaatttctgccattgtatgctagtgaagcaaagagaa

SEQ ID NO: 364845 - DNA, 55 bp, Artificial
  Synthetic oligonucleotide
cctccatggaaaagacatttaccagcactacatcaaaattttggatccatacctc

SEQ ID NO: 364846 - DNA, 60 bp, Artificial
  Synthetic oligonucleotide
cctccatgtgcttgacctgaggataagtctcctagagggaactcattacatactaaggaa

SEQ ID NO: 364847 - DNA, 55 bp, Artificial
  Synthetic oligonucleotide
cctccattagaagcatgttgattaagtgaggaccaagctaactacctggtatccg

SEQ ID NO: 364848 - DNA, 60 bp, Artificial
  Synthetic oligonucleotide
cctccattcctttggatgggatatgagctccatcctgacaagtggacagtccagcctata

SEQ ID NO: 364849 - DNA, 60 bp, Artificial
  Synthetic oligonucleotide
cctccattcgtagatacagagatcacaggacccagcatacatccgggcatgatggccctg

SEQ ID NO: 364850 - DNA, 55 bp, Artificial
  Synthetic oligonucleotide
cctccattgtgctagatcctcgtggcagcggagatctgactcagtgaacggcgac

SEQ ID NO: 364851 - DNA, 55 bp, Artificial
  Synthetic oligonucleotide
cctcccaaatatatcgtaggtaaattcttcgcatgctcagtatcccaccatggga

SEQ ID NO: 364852 - DNA, 55 bp, Artificial
  Synthetic oligonucleotide
cctcccaaggtccatgagtcgacgcaaaggtcctcgaaagcatgttgtcctttcg

SEQ ID NO: 364853 - DNA, 55 bp, Artificial
  Synthetic oligonucleotide
cctcccacacttggagaaatcccgaccgaaaattctgtgtctgcccagatggcag

SEQ ID NO: 364854 - DNA, 55 bp, Artificial
  Synthetic oligonucleotide
cctcccaccacacaaacccgggagagccgtggagctagacctactcggctggtcc

SEQ ID NO: 364855 - DNA, 60 bp, Artificial
  Synthetic oligonucleotide
cctcccactcagaacgcagatgaagccagcgacacacagctcaagaccggagcaagcaac

SEQ ID NO: 364856 - DNA, 55 bp, Artificial
  Synthetic oligonucleotide
cctcccactgtacccgcttgacttgaaaatcaaattcggccttagatagttcact

SEQ ID NO: 364857 - DNA, 60 bp, Artificial
  Synthetic oligonucleotide
cctcccagatatatgcgacattccctgctagagctgaagtgatgggttcccttgtgcgtg

SEQ ID NO: 364858 - DNA, 59 bp, Artificial
  Synthetic oligonucleotide
cctcccaggataccttattctatggttgggccctgttgtgtctttctcatgcaccatcg

SEQ ID NO: 364859 - DNA, 55 bp, Artificial
  Synthetic oligonucleotide
cctcccatcaataacaggaaccaatgttatgccatatgatgttaaatctttggca

SEQ ID NO: 364860 - DNA, 50 bp, Artificial
  Synthetic oligonucleotide
cctcccatcagcggacaaattagctgttcatcaaatattacagggctgtt

SEQ ID NO: 364861 - DNA, 60 bp, Artificial
  Synthetic oligonucleotide
cctcccatgagatccttcagtaacattgtctgactgtagctcaggcccacttgaggtggg

SEQ ID NO: 364862 - DNA, 55 bp, Artificial
  Synthetic oligonucleotide
cctcccatgttttctagtgcggagctttataattggttcactttaaccaatttga

SEQ ID NO: 364863 - DNA, 59 bp, Artificial
  Synthetic oligonucleotide
cctccccaatgcgatcattttctggagtttgacgctgacttgataattgaacgaaggga

SEQ ID NO: 364864 - DNA, 60 bp, Artificial
  Synthetic oligonucleotide
cctccccaatgtgatcaatttctggagttttcctctgatttgataattgagcgaagagaa

SEQ ID NO: 364865 - DNA, 58 bp, Artificial
  Synthetic oligonucleotide
cctccccagatcccccaccttgaaaactgtgtttcgctgaacactcctcatggacata

SEQ ID NO: 364866 - DNA, 60 bp, Artificial
  Synthetic oligonucleotide
cctccccagtcacatgcgtggacatacggccaacggcgcagcctagtggatgttggaatg

SEQ ID NO: 364867 - DNA, 53 bp, Artificial
  Synthetic oligonucleotide
cctccccatgggggactgttgggttggagccctcaagctcagggcctactcac

SEQ ID NO: 364868 - DNA, 53 bp, Artificial
  Synthetic oligonucleotide
cctcccccaagcggtgactcgggccattccacaggggtggatactaccaattc

SEQ ID NO: 364869 - DNA, 57 bp, Artificial
  Synthetic oligonucleotide
cctccccgaattcctaaggggtatgtagcacacaatcaccgagaggtgacgacgaca

SEQ ID NO: 364870 - DNA, 56 bp, Artificial
  Synthetic oligonucleotide
cctccccgagtgcgctttaagcagactgcggccctcaatccggctaccctgttacc

SEQ ID NO: 364871 - DNA, 50 bp, Artificial
  Synthetic oligonucleotide
cctccccgcagtacgtcgtggaatccgaccccccccagggattggttttc

SEQ ID NO: 364872 - DNA, 60 bp, Artificial
  Synthetic oligonucleotide
cctcccctacacataacgatggctgacattctgctaaggcacataaccatgtattggcat

SEQ ID NO: 364873 - DNA, 52 bp, Artificial
  Synthetic oligonucleotide
cctcccctcaaaaagaagaaaatgcctggtaccttcgggggaatactagctg

SEQ ID NO: 364874 - DNA, 55 bp, Artificial
  Synthetic oligonucleotide
cctccccttcctaatctccctccggttttctgaggcgggagctgagttggcagta

SEQ ID NO: 364875 - DNA, 57 bp, Artificial
  Synthetic oligonucleotide
cctcccctttcgggtgcaacccaccgggtcaatagatgtcaactgctatgcagggga

SEQ ID NO: 364876 - DNA, 53 bp, Artificial
  Synthetic oligonucleotide
cctcccgagtatttccggagcgcacctgctttacgggacctccacttcttaac

SEQ ID NO: 364877 - DNA, 54 bp, Artificial
  Synthetic oligonucleotide
cctcccgatgctcgattccctcccttcccccgagggtcgcccaggaatggcttg

SEQ ID NO: 364878 - DNA, 53 bp, Artificial
  Synthetic oligonucleotide
cctcccgatgtccgaatccatccctcccccccgagggtcgcccaggaatggcg

SEQ ID NO: 364879 - DNA, 52 bp, Artificial
  Synthetic oligonucleotide
cctcccgattccgcccatccccacccccaagagggtcgcccaggaatggcgg

SEQ ID NO: 364880 - DNA, 55 bp, Artificial
  Synthetic oligonucleotide
cctcccggaattatgtccgagccctttgaaactagttgacggccagacttgcgat

SEQ ID NO: 364881 - DNA, 54 bp, Artificial
  Synthetic oligonucleotide
cctcccgggtgtttcctcttcctaggcccggaatcgacctccatctgatccgtc

SEQ ID NO: 364882 - DNA, 55 bp, Artificial
  Synthetic oligonucleotide
cctcccggttatctcgacttgctctgcctaatactacccagggagtcaactattt

SEQ ID NO: 364883 - DNA, 54 bp, Artificial
  Synthetic oligonucleotide
cctcccggttcgaccaacacgtctcgaaagaggcgttggagtttgaacacagga

SEQ ID NO: 364884 - DNA, 55 bp, Artificial
  Synthetic oligonucleotide
cctcccgtaattggtgaaccaccaactccgagcctacaatcagcgtcatctctgc

SEQ ID NO: 364885 - DNA, 55 bp, Artificial
  Synthetic oligonucleotide
cctcccgtcatccacgttctcaggacaataatcaccggacaggtaataaaagccg

SEQ ID NO: 364886 - DNA, 55 bp, Artificial
  Synthetic oligonucleotide
cctcccgtgtcctacacgctacatcggtctcctcttacaaaactcaaggagcttc

SEQ ID NO: 364887 - DNA, 55 bp, Artificial
  Synthetic oligonucleotide
cctcccgttcgagagagcaaccatcatagcagcatttacaggaaacactgaaggt

SEQ ID NO: 364888 - DNA, 57 bp, Artificial
  Synthetic oligonucleotide
cctcccgtttaacatggagagactacgccatggacttttgaagctatacatggaagc

SEQ ID NO: 364889 - DNA, 60 bp, Artificial
  Synthetic oligonucleotide
cctccctaactgtgaatgtaagaggatcagggatgaggatactagtaagaggcaattctc

SEQ ID NO: 364890 - DNA, 58 bp, Artificial
  Synthetic oligonucleotide
cctccctacataatatgatagttagtctcgaacgcagagtcttccgagtaaagaacgc

SEQ ID NO: 364891 - DNA, 55 bp, Artificial
  Synthetic oligonucleotide
cctccctagtagcttccctccatcaccagcagctagatagccttatatcagaggc

SEQ ID NO: 364892 - DNA, 55 bp, Artificial
  Synthetic oligonucleotide
cctccctatgtagattcatcggactgcgtgttgagtcatctgtgttgagggtccg

SEQ ID NO: 364893 - DNA, 56 bp, Artificial
  Synthetic oligonucleotide
cctccctcaggtcaaagggcagagactttcgaaatcaaatccaggcctataatagt

SEQ ID NO: 364894 - DNA, 60 bp, Artificial
  Synthetic oligonucleotide
cctccctccgaatttctgtggcgggagctgagttggcagttctgctataaactgtctgaa

SEQ ID NO: 364895 - DNA, 55 bp, Artificial
  Synthetic oligonucleotide
cctccctgactggcataactacacaccagggccaggaattagataccccgtaacc

SEQ ID NO: 364896 - DNA, 54 bp, Artificial
  Synthetic oligonucleotide
cctccctgagttatgtaaatttactatatttggtagagaagtttgccctacaac

SEQ ID NO: 364897 - DNA, 52 bp, Artificial
  Synthetic oligonucleotide
cctccctgcggatgtgtcctaccaaaaaaacttgatagggggggaggcttaa

SEQ ID NO: 364898 - DNA, 55 bp, Artificial
  Synthetic oligonucleotide
cctccctgtcagagttggtatgaacatgaatgaggatggccccatcatctttgag

SEQ ID NO: 364899 - DNA, 55 bp, Artificial
  Synthetic oligonucleotide
cctccctgttcatattaacatctcactatttaattagctgaaccgacccaaagtc

SEQ ID NO: 364900 - DNA, 53 bp, Artificial
  Synthetic oligonucleotide
cctcccttacaagctgcacccagttaggggcaacccgtatagggaccgtggag

SEQ ID NO: 364901 - DNA, 54 bp, Artificial
  Synthetic oligonucleotide
cctcccttaccgcttctgaactccttcaagcccttcaaacaattccaatccctg

SEQ ID NO: 364902 - DNA, 55 bp, Artificial
  Synthetic oligonucleotide
cctcccttcgataccgtattgtacgacaacatcaggacggttcgtaaggacaaca

SEQ ID NO: 364903 - DNA, 56 bp, Artificial
  Synthetic oligonucleotide
cctcccttgggggagcactgggccaagggtctcacctgcgacggtgtacaggttca

SEQ ID NO: 364904 - DNA, 53 bp, Artificial
  Synthetic oligonucleotide
cctccctttatccagccctcactccttctctaggcgccaaacctaaacctcaa

SEQ ID NO: 364905 - DNA, 60 bp, Artificial
  Synthetic oligonucleotide
cctccctttctatggatggggtatgagctccatccagacaaatggacagtacagtccatc

SEQ ID NO: 364906 - DNA, 57 bp, Artificial
  Synthetic oligonucleotide
cctcccttttcaatgtaagccttgacatcggacgatgatttaacgccctgaatgttc

SEQ ID NO: 364907 - DNA, 55 bp, Artificial
  Synthetic oligonucleotide
cctcccttttcttcacagattgtgttgagctcgctgtggttggggatgacaattt

SEQ ID NO: 364908 - DNA, 55 bp, Artificial
  Synthetic oligonucleotide
cctcccttttgtcaagtttgttttcaagtcttatgcctaaaatgcaaggtcagcc

SEQ ID NO: 364909 - DNA, 59 bp, Artificial
  Synthetic oligonucleotide
cctccgaaagaccatattgtgacgcacccccaataccacgcccagtcatttacagctgc

SEQ ID NO: 364910 - DNA, 55 bp, Artificial
  Synthetic oligonucleotide
cctccgaacagcagttatttaacaagccttactggctgcgaagggcccagggaca

SEQ ID NO: 364911 - DNA, 55 bp, Artificial
  Synthetic oligonucleotide
cctccgaacccaggaatcagagtgtgtttgtatcaatggtacctgcacagtggta

SEQ ID NO: 364912 - DNA, 55 bp, Artificial
  Synthetic oligonucleotide
cctccgaaggcaatctaagcccttctcaagtctccacaacatccgagcacccatc

SEQ ID NO: 364913 - DNA, 55 bp, Artificial
  Synthetic oligonucleotide
cctccgacaaagggccatttaacaattggcaactctgttgatccaaagatagtgg

SEQ ID NO: 364914 - DNA, 55 bp, Artificial
  Synthetic oligonucleotide
cctccgaccatccagagtgggtgcgagccctggggaaatactatgcctcgggtac

SEQ ID NO: 364915 - DNA, 54 bp, Artificial
  Synthetic oligonucleotide
cctccgaccgatatcgcccctcttgacagcgaccccgttctttcggtccgaaca

SEQ ID NO: 364916 - DNA, 53 bp, Artificial
  Synthetic oligonucleotide
cctccgactacgcctggcggacctttgtgttcgtctccttcggtttgttaata

SEQ ID NO: 364917 - DNA, 55 bp, Artificial
  Synthetic oligonucleotide
cctccgagctaatgatgtgctttggctttctctcaccgctgccgagtatgaccag

SEQ ID NO: 364918 - DNA, 55 bp, Artificial
  Synthetic oligonucleotide
cctccgagtctgtgatctgagcaagaaggttgatgacggtatttccgtcggttct

SEQ ID NO: 364919 - DNA, 55 bp, Artificial
  Synthetic oligonucleotide
cctccgagtggcatttggacacaccatgtgacaaagttcctagcattttagttcc

SEQ ID NO: 364920 - DNA, 54 bp, Artificial
  Synthetic oligonucleotide
cctccgatccgaggggcccaaccaccgaatttggagagcacttccggccgaatg

SEQ ID NO: 364921 - DNA, 59 bp, Artificial
  Synthetic oligonucleotide
cctccgatgaactgggtttcagttctaggcccaaattacatgttgggctatagcgcata

SEQ ID NO: 364922 - DNA, 58 bp, Artificial
  Synthetic oligonucleotide
cctccgatgatacagttaagaagccaacattagtccgggatccccgtgtgagccgata

SEQ ID NO: 364923 - DNA, 56 bp, Artificial
  Synthetic oligonucleotide
cctccgcaggccaaatcagtgtgcaacctacgttttctgtacaaagaaacctccca

SEQ ID NO: 364924 - DNA, 55 bp, Artificial
  Synthetic oligonucleotide
cctccgcgctaatgatgtgctttggctttcacttacagctgctgagtatgatcag

SEQ ID NO: 364925 - DNA, 60 bp, Artificial
  Synthetic oligonucleotide
cctccgctgcaccccgtcgtcgatctgccccaactggggctgcgccgctgactgctatat

SEQ ID NO: 364926 - DNA, 60 bp, Artificial
  Synthetic oligonucleotide
cctccggaccgtcagactcatcaagcgcctctatcaaagcagtgagtagtttatgtgatg

SEQ ID NO: 364927 - DNA, 55 bp, Artificial
  Synthetic oligonucleotide
cctccggcacacaatgccgaaggacaggagggactctggtacagatctgtgtgtc

SEQ ID NO: 364928 - DNA, 55 bp, Artificial
  Synthetic oligonucleotide
cctccggcccctgaatgtggctaaccttaaacccgcagccaaggtgtgcaaacca

SEQ ID NO: 364929 - DNA, 56 bp, Artificial
  Synthetic oligonucleotide
cctccggcccctgaatgtggctaaccttaaccccgcagccgctgcccataatccaa

SEQ ID NO: 364930 - DNA, 56 bp, Artificial
  Synthetic oligonucleotide
cctccggcccctgaatgtggctaaccttaaccctgcagctagagcacgtaacccaa

SEQ ID NO: 364931 - DNA, 53 bp, Artificial
  Synthetic oligonucleotide
cctccggccgcgcacgttaggctctggtttgtaaccctacttccgcgttcttg

SEQ ID NO: 364932 - DNA, 55 bp, Artificial
  Synthetic oligonucleotide
cctccggcgtattgacttcttcttggctattctgtgctggactttgatgggtacc

SEQ ID NO: 364933 - DNA, 56 bp, Artificial
  Synthetic oligonucleotide
cctccgggaggaaaggtgagtactccaaattctgaattgtctgctctaagaaagga

SEQ ID NO: 364934 - DNA, 55 bp, Artificial
  Synthetic oligonucleotide
cctccgggctttcctcgcatcggactggctcattctcggagagggcggacggtcc

SEQ ID NO: 364935 - DNA, 59 bp, Artificial
  Synthetic oligonucleotide
cctccgggttgtgaaggtccctgtaaagttcagtcctatgagcagcgtgatgacgtcaa

SEQ ID NO: 364936 - DNA, 55 bp, Artificial
  Synthetic oligonucleotide
cctccggttcaggaactgttcaggatgtataaagccgctggttatgcctgtgttg

SEQ ID NO: 364937 - DNA, 55 bp, Artificial
  Synthetic oligonucleotide
cctccggtttgcagtaccgggtgcataataacagcatcgccaatttacgcagagg

SEQ ID NO: 364938 - DNA, 52 bp, Artificial
  Synthetic oligonucleotide
cctccgtcacgtaaatctataagtaaaccgctaggcatattaccaactccct

SEQ ID NO: 364939 - DNA, 54 bp, Artificial
  Synthetic oligonucleotide
cctccgtccaacgctgactacttcggcagaatgaatcttccgaccaacatcgaa

SEQ ID NO: 364940 - DNA, 55 bp, Artificial
  Synthetic oligonucleotide
cctccgtcgtcgtgttggcctcctcttggaaatcttgtgttggaccttgattggg

SEQ ID NO: 364941 - DNA, 55 bp, Artificial
  Synthetic oligonucleotide
cctccgtggcattagttataaagtcacggtcggcgctcttggcgccaacgagggt

SEQ ID NO: 364942 - DNA, 52 bp, Artificial
  Synthetic oligonucleotide
cctccgtggtaagctctccttttgggaggccggtaccactaaggccggctac

SEQ ID NO: 364943 - DNA, 54 bp, Artificial
  Synthetic oligonucleotide
cctccgtgtacctaagaatactctcgacttgtacgggaaagccctcacaaacgc

SEQ ID NO: 364944 - DNA, 55 bp, Artificial
  Synthetic oligonucleotide
cctccgtgtcggccactgtttctaatctctctaggttgttaaacgacacaattgg

SEQ ID NO: 364945 - DNA, 60 bp, Artificial
  Synthetic oligonucleotide
cctccgtgttttggatgcattacttagcggtgccgcctgccttgaatcaggcgcggtcta

SEQ ID NO: 364946 - DNA, 59 bp, Artificial
  Synthetic oligonucleotide
cctccgttcaggcgttcttgaacataactattggaggacagtcgactactgcagtagtg

SEQ ID NO: 364947 - DNA, 55 bp, Artificial
  Synthetic oligonucleotide
cctcctaactcaggtgactgtattacaaatagctacgccattactagaatccgca

SEQ ID NO: 364948 - DNA, 58 bp, Artificial
  Synthetic oligonucleotide
cctcctacacctgtgacaaaggttctatgcacagacacctatgtaacccgcagggaaa

SEQ ID NO: 364949 - DNA, 55 bp, Artificial
  Synthetic oligonucleotide
cctcctacgccctcctatataaaaacctcctccgacatccagcaatctttgttgg

SEQ ID NO: 364950 - DNA, 55 bp, Artificial
  Synthetic oligonucleotide
cctcctactagggaggagttagaagagcttttaagagccagcccagaattgttct

SEQ ID NO: 364951 - DNA, 58 bp, Artificial
  Synthetic oligonucleotide
cctcctacttgttgaatctacgtacgctccagatactgttgggtacgatcttgtacgc

SEQ ID NO: 364952 - DNA, 55 bp, Artificial
  Synthetic oligonucleotide
cctcctagacataatagagcctgtaggtgaggacctgcacttagtgctgggtggg

SEQ ID NO: 364953 - DNA, 53 bp, Artificial
  Synthetic oligonucleotide
cctcctagacattatgatagaggacatcaaaactggagccttcagtgaggttg

SEQ ID NO: 364954 - DNA, 58 bp, Artificial
  Synthetic oligonucleotide
cctcctagaccatgcgcagttgagccggccgtgaacgtttgcggtcctgtttactgct

SEQ ID NO: 364955 - DNA, 55 bp, Artificial
  Synthetic oligonucleotide
cctcctagcaccgatccggccccagatcacgctacgataggagtgagccagtcgt

SEQ ID NO: 364956 - DNA, 60 bp, Artificial
  Synthetic oligonucleotide
cctcctataccaatgcggagttggaacatgcgaagttatgttgtcaagcactcttgacct

SEQ ID NO: 364957 - DNA, 55 bp, Artificial
  Synthetic oligonucleotide
cctcctatctcactccatagaaccgattactcttcccacctggactaaggctacc

SEQ ID NO: 364958 - DNA, 55 bp, Artificial
  Synthetic oligonucleotide
cctcctatggatgatttaatcgtagatacatatgcgtttgctgttccttgacgga

SEQ ID NO: 364959 - DNA, 55 bp, Artificial
  Synthetic oligonucleotide
cctcctcaaacgacggtctgaacaccttggagctcaaaccttcaagtgacggacc

SEQ ID NO: 364960 - DNA, 55 bp, Artificial
  Synthetic oligonucleotide
cctcctcaatggctctgggctagttgtggccattggggatcaatagtcttaaccc

SEQ ID NO: 364961 - DNA, 55 bp, Artificial
  Synthetic oligonucleotide
cctcctcacgtatcgccaatattctcacagaatgtaacacattgataggtcgcgg

SEQ ID NO: 364962 - DNA, 59 bp, Artificial
  Synthetic oligonucleotide
cctcctcacgtgtgctcgctaaatccgtacaaccgcgcttctgactgccaagggagtgt

SEQ ID NO: 364963 - DNA, 55 bp, Artificial
  Synthetic oligonucleotide
cctcctcactctgctcggtcaaagttcgggtatagtgcgaaggacgctcgctccc

SEQ ID NO: 364964 - DNA, 55 bp, Artificial
  Synthetic oligonucleotide
cctcctcatgacctaaatatagcgctacgtcatttccgtggctccaagtcgcggc

SEQ ID NO: 364965 - DNA, 60 bp, Artificial
  Synthetic oligonucleotide
cctcctccacgacgaagatagcgcttgttgtgagccctcatgttctcccagctatacctc

SEQ ID NO: 364966 - DNA, 55 bp, Artificial
  Synthetic oligonucleotide
cctcctccacggctagttcaggtcaaaatggatcctctacaactcctccagcctc

SEQ ID NO: 364967 - DNA, 55 bp, Artificial
  Synthetic oligonucleotide
cctcctcccagttctgtatatgttgctactcctagtgggtccatgattacctctg

SEQ ID NO: 364968 - DNA, 58 bp, Artificial
  Synthetic oligonucleotide
cctcctccggcggtagaatctccgcctcctcatgatctgtaacgtgacgtcacttccg

SEQ ID NO: 364969 - DNA, 54 bp, Artificial
  Synthetic oligonucleotide
cctcctccggttctgcgcgctagcgcggaaggtggccggaggccattacgtgca

SEQ ID NO: 364970 - DNA, 55 bp, Artificial
  Synthetic oligonucleotide
cctcctccgttgtacgctcaggaaaagagacaggacccaatacagcacccagcag

SEQ ID NO: 364971 - DNA, 55 bp, Artificial
  Synthetic oligonucleotide
cctcctcctctgattggacttctatctcgttcgtcacctgaaagaggaggtggtg

SEQ ID NO: 364972 - DNA, 60 bp, Artificial
  Synthetic oligonucleotide
cctcctcctgcctccaccaatcggcagacaggaagacagcctactcccatctctccacct

SEQ ID NO: 364973 - DNA, 59 bp, Artificial
  Synthetic oligonucleotide
cctcctcgccttacctcctcgccctgacgtcatcaatatgttgtctcttaagtggtgct

SEQ ID NO: 364974 - DNA, 55 bp, Artificial
  Synthetic oligonucleotide
cctcctcgggctcaatcggtagaagtggggctcgcgaacaggtcgcgttggcgag

SEQ ID NO: 364975 - DNA, 55 bp, Artificial
  Synthetic oligonucleotide
cctcctctatcaactgtcccattgtctttccagtctttgccttaagcctctgcag

SEQ ID NO: 364976 - DNA, 55 bp, Artificial
  Synthetic oligonucleotide
cctcctctcgttaggtatggtttatgtcctcgcaattacccaaactcgaggaatc

SEQ ID NO: 364977 - DNA, 60 bp, Artificial
  Synthetic oligonucleotide
cctcctctgcttcatccactaccctaactgttgacatatctacagacacttcatctacaa

SEQ ID NO: 364978 - DNA, 55 bp, Artificial
  Synthetic oligonucleotide
cctcctctgtccgacctcggtagaccgaaaggactgactcaggtttgagaccaca

SEQ ID NO: 364979 - DNA, 55 bp, Artificial
  Synthetic oligonucleotide
cctcctcttagctggtaggtcttgtggctcgaccaccaatgtcaacacccacctc

SEQ ID NO: 364980 - DNA, 60 bp, Artificial
  Synthetic oligonucleotide
cctcctcttggcttgcctgtgtgccttcctgatagaggggggatgtgagggtgatgaaga

SEQ ID NO: 364981 - DNA, 55 bp, Artificial
  Synthetic oligonucleotide
cctcctctttcgaccccgcctcgatcctccctttatccagccctcactccttctc

SEQ ID NO: 364982 - DNA, 55 bp, Artificial
  Synthetic oligonucleotide
cctcctgactgatgctatcaccctcctcaaattggttgaaggcaattatcttctg

SEQ ID NO: 364983 - DNA, 55 bp, Artificial
  Synthetic oligonucleotide
cctcctgagccccagactgatccttatagtcaatataaattctgggaagtcgatc

SEQ ID NO: 364984 - DNA, 55 bp, Artificial
  Synthetic oligonucleotide
cctcctgatggcccttttcttggcttgcctgtgcgctgtcttgatagagggcgga

SEQ ID NO: 364985 - DNA, 55 bp, Artificial
  Synthetic oligonucleotide
cctcctgatgggcctagaccgctgccctatttcactgccgcagagatcatgggga

SEQ ID NO: 364986 - DNA, 52 bp, Artificial
  Synthetic oligonucleotide
cctcctgcaaaactattaaaggaaaggggtttcttcggagctattgctggtt

SEQ ID NO: 364987 - DNA, 55 bp, Artificial
  Synthetic oligonucleotide
cctcctgcagaccgcgtcccgtcaggcagaggttatcacccctgttgtccaaacc

SEQ ID NO: 364988 - DNA, 55 bp, Artificial
  Synthetic oligonucleotide
cctcctgcatgttcatgagtgacattgaatatgtacaagttttgagaggccatgc

SEQ ID NO: 364989 - DNA, 54 bp, Artificial
  Synthetic oligonucleotide
cctcctgcggccctctctggccattccaataactaataccacacccccctttcc

SEQ ID NO: 364990 - DNA, 55 bp, Artificial
  Synthetic oligonucleotide
cctcctggcaacttgcacaagtccgacaaccctgaacgaccaggcgtcttcgttc

SEQ ID NO: 364991 - DNA, 55 bp, Artificial
  Synthetic oligonucleotide
cctcctgggggagctccagtgggtctccaaggggactcctgtcctccgagaacac

SEQ ID NO: 364992 - DNA, 60 bp, Artificial
  Synthetic oligonucleotide
cctcctggttatttagatctcgtacttatcatcacacaacatttggagctgactttctat

SEQ ID NO: 364993 - DNA, 55 bp, Artificial
  Synthetic oligonucleotide
cctcctgtctcgtgaggagatatccctgacgttatcctctatcgatacgtctaca

SEQ ID NO: 364994 - DNA, 58 bp, Artificial
  Synthetic oligonucleotide
cctcctgtgatgaaacagattggttcgctggtaacgagtggtgtgagggtagttattc

SEQ ID NO: 364995 - DNA, 60 bp, Artificial
  Synthetic oligonucleotide
cctcctgtgccacaaacatcaacatcagagagtggtcatatttaattgaagaccctaatg

SEQ ID NO: 364996 - DNA, 60 bp, Artificial
  Synthetic oligonucleotide
cctcctgtgcccgatatctctttgtgtagattcatcggactgcgcgttgaatcatctgtg

SEQ ID NO: 364997 - DNA, 57 bp, Artificial
  Synthetic oligonucleotide
cctccttaagggagatgtttttccacaatgagagttgtgatgccccaatagtgggaa

SEQ ID NO: 364998 - DNA, 55 bp, Artificial
  Synthetic oligonucleotide
cctccttacaggttctttgaagcacgagtgacacctttggatcatcggatcctta

SEQ ID NO: 364999 - DNA, 55 bp, Artificial
  Synthetic oligonucleotide
cctccttccgacggaagattaattcgaatgagtgctgctttagtcggaataagtt

SEQ ID NO: 365000 - DNA, 55 bp, Artificial
  Synthetic oligonucleotide
cctccttcgccactatcactgggggtggtttgaaggatgttatcgaaaccctctc

SEQ ID NO: 365001 - DNA, 53 bp, Artificial
  Synthetic oligonucleotide
cctccttgacaaacactcccgactcctttccccaagtaacacactggtagccc

SEQ ID NO: 365002 - DNA, 55 bp, Artificial
  Synthetic oligonucleotide
cctccttgctagactattgttgtttgtaatttgaatcgttgaggattctcaccta

SEQ ID NO: 365003 - DNA, 55 bp, Artificial
  Synthetic oligonucleotide
cctccttgtccgaagtagtgttacagaatcgtagaggcctagatctactattcct

SEQ ID NO: 365004 - DNA, 58 bp, Artificial
  Synthetic oligonucleotide
cctcctttgacggtatttgtctggtcgctcaggtgcttccccagcactagacctggca

SEQ ID NO: 365005 - DNA, 59 bp, Artificial
  Synthetic oligonucleotide
cctccttttatgcgaagacggaagtgagtaagctctgcggattggtagaccgcatggga

SEQ ID NO: 365006 - DNA, 52 bp, Artificial
  Synthetic oligonucleotide
cctcgaaaacgcggtattcaaggttatccgtacccgtcaggccgtcgtgtgg

SEQ ID NO: 365007 - DNA, 55 bp, Artificial
  Synthetic oligonucleotide
cctcgaaacaccccaggtgagatattgtttgatctggccctcgggccagggctca

SEQ ID NO: 365008 - DNA, 52 bp, Artificial
  Synthetic oligonucleotide
cctcgaaaggggtcgtctacggggtagccatcgaaggactgccgaaggggta

SEQ ID NO: 365009 - DNA, 58 bp, Artificial
  Synthetic oligonucleotide
cctcgaaatatgtatcagccacgtacacctacgtccgctgactttattcgtatttcag

SEQ ID NO: 365010 - DNA, 58 bp, Artificial
  Synthetic oligonucleotide
cctcgaacgcctcaaaacattccatttggactgtccctatggatggaccgaatgtgat

SEQ ID NO: 365011 - DNA, 55 bp, Artificial
  Synthetic oligonucleotide
cctcgaactgacttggttgagtactatgccggagatgtgttcagacgtatcttgg

SEQ ID NO: 365012 - DNA, 58 bp, Artificial
  Synthetic oligonucleotide
cctcgaactggataagcacgtggagatgagggctcccatcttcgtgtagttctcgaca

SEQ ID NO: 365013 - DNA, 57 bp, Artificial
  Synthetic oligonucleotide
cctcgaagatctcttggtaatcctaatcaaaaagtctactatttcaaacgattcaca

SEQ ID NO: 365014 - DNA, 56 bp, Artificial
  Synthetic oligonucleotide
cctcgaagcaattgaaaacaaccatttgaccaccctgcttaaggacaaggacagcc

SEQ ID NO: 365015 - DNA, 60 bp, Artificial
  Synthetic oligonucleotide
cctcgaaggcttaatacgatcacctacgaatgaggagatgatagctaacgccacgcatag

SEQ ID NO: 365016 - DNA, 60 bp, Artificial
  Synthetic oligonucleotide
cctcgaataaccaagtagtgccatgtgaaccaatcacaatagaaaggaacatagtgcatt

SEQ ID NO: 365017 - DNA, 60 bp, Artificial
  Synthetic oligonucleotide
cctcgaatcgacctccaagatgtgtatacaattgatcctgcactgactctgcgtcagata

SEQ ID NO: 365018 - DNA, 60 bp, Artificial
  Synthetic oligonucleotide
cctcgaatcgacctccaagatgtgtatacgcttgatcccacactgacgttgcgtcagata

SEQ ID NO: 365019 - DNA, 55 bp, Artificial
  Synthetic oligonucleotide
cctcgaatgaatcgcttcgtgatgctactattgcccgtatccgtgaacctgctgg

SEQ ID NO: 365020 - DNA, 56 bp, Artificial
  Synthetic oligonucleotide
cctcgaatttaaatcaagcctcaccgcaccccagaccattaattgaatacgaagaa

SEQ ID NO: 365021 - DNA, 55 bp, Artificial
  Synthetic oligonucleotide
cctcgacaacgcattcgtcatgatggggtcggactcgtactcccgatcccgacac

SEQ ID NO: 365022 - DNA, 55 bp, Artificial
  Synthetic oligonucleotide
cctcgacactggtcccggctgggagcactgagtacatcccacgatactaccccac

SEQ ID NO: 365023 - DNA, 58 bp, Artificial
  Synthetic oligonucleotide
cctcgacatacagtggaccacatggatctgtataagttcatggggcgtgcccattact

SEQ ID NO: 365024 - DNA, 55 bp, Artificial
  Synthetic oligonucleotide
cctcgacatctgcccaatggtaagttggagcttgtatgttctgttggtgacgggt

SEQ ID NO: 365025 - DNA, 55 bp, Artificial
  Synthetic oligonucleotide
cctcgaccttcatgggagtgcagctagcacgtgtcaagctagcgtctaaggtcaa

SEQ ID NO: 365026 - DNA, 55 bp, Artificial
  Synthetic oligonucleotide
cctcgacggagagtatggcgatccctgtccacttcactctggtgttcttgacccc

SEQ ID NO: 365027 - DNA, 53 bp, Artificial
  Synthetic oligonucleotide
cctcgagaaattcataagaagctgtgacaccacggagctgcacgtggaacgga

SEQ ID NO: 365028 - DNA, 58 bp, Artificial
  Synthetic oligonucleotide
cctcgagaataagagaagatcgcatactaatgaatgtcgaaactttgtcgcctatttt

SEQ ID NO: 365029 - DNA, 53 bp, Artificial
  Synthetic oligonucleotide
cctcgagagggttcacatccccaacccgcgggccggctattcttcttgttctt

SEQ ID NO: 365030 - DNA, 55 bp, Artificial
  Synthetic oligonucleotide
cctcgagatattcccatgtggataggacgaaatgccccagcaatagaaggagtat

SEQ ID NO: 365031 - DNA, 60 bp, Artificial
  Synthetic oligonucleotide
cctcgaggagagttggcattcttgcgtatccgcgatgctaagcaagctgctgtaggaacg

SEQ ID NO: 365032 - DNA, 55 bp, Artificial
  Synthetic oligonucleotide
cctcgaggcgaacggtcctgagcaatatgttctatcgtttgacgcctcccgccag

SEQ ID NO: 365033 - DNA, 60 bp, Artificial
  Synthetic oligonucleotide
cctcgagggtacttcaaaatgcgcactgggaaaagttcaataatgagatcagatgcacct

SEQ ID NO: 365034 - DNA, 59 bp, Artificial
  Synthetic oligonucleotide
cctcgagggtatttcaatacagatagattgcctctattcgcaaacttgaggcgttaatg

SEQ ID NO: 365035 - DNA, 60 bp, Artificial
  Synthetic oligonucleotide
cctcgaggtcatgacaagcacatgggtcctagcagggggggtgctagccgctgtggcagc

SEQ ID NO: 365036 - DNA, 60 bp, Artificial
  Synthetic oligonucleotide
cctcgaggttacttcaaagtgcacactgggaaaagctcagtaatgaggtcagatgcacct

SEQ ID NO: 365037 - DNA, 52 bp, Artificial
  Synthetic oligonucleotide
cctcgaggtttacgtcctaacaacctttggcaaacggacgttactcatattc

SEQ ID NO: 365038 - DNA, 59 bp, Artificial
  Synthetic oligonucleotide
cctcgagtatgggcggtgtggaaaacaagaaggatcaagaacaaggcgttcagtgctga

SEQ ID NO: 365039 - DNA, 55 bp, Artificial
  Synthetic oligonucleotide
cctcgagttacagttgaggtgtgtaaaacaaagaaggtatctcagactgacccaa

SEQ ID NO: 365040 - DNA, 60 bp, Artificial
  Synthetic oligonucleotide
cctcgagttcacgacaagttcttggtggactcgattgagcgcgctaggagggctgctcaa

SEQ ID NO: 365041 - DNA, 60 bp, Artificial
  Synthetic oligonucleotide
cctcgagttggctggcaggtgcgaagcagaatttgagcaggacgtacccgagaatatgga

SEQ ID NO: 365042 - DNA, 55 bp, Artificial
  Synthetic oligonucleotide
cctcgatgataactgttattcggctctgatggaggcatttcatcatgggccggag

SEQ ID NO: 365043 - DNA, 60 bp, Artificial
  Synthetic oligonucleotide
cctcgatgtcgatagatgtgttgtcccatgctctcccagaaacttgtgatctggagccaa

SEQ ID NO: 365044 - DNA, 55 bp, Artificial
  Synthetic oligonucleotide
cctcgatgttgattacaccgccttgtgtcgtgaacgtgatgattctatcccgacc

SEQ ID NO: 365045 - DNA, 56 bp, Artificial
  Synthetic oligonucleotide
cctcgattgggtacgccgacaacgcgtggtgtacaatgaccaggccaccgctttcc

SEQ ID NO: 365046 - DNA, 55 bp, Artificial
  Synthetic oligonucleotide
cctcgatttcagagaatttccgtgtcacgactatcccaattgttccaatggagca

SEQ ID NO: 365047 - DNA, 60 bp, Artificial
  Synthetic oligonucleotide
cctcgatttcatgacgctgtgctacggctccatgaccacaaagtacatttctacaactag

SEQ ID NO: 365048 - DNA, 55 bp, Artificial
  Synthetic oligonucleotide
cctcgattttcgatagtgcccagaattatggaatcaacttgccaataactggatc

SEQ ID NO: 365049 - DNA, 55 bp, Artificial
  Synthetic oligonucleotide
cctcgcaacgaccgaatgctggtgaagacggacattgctctacaactacccaaag

SEQ ID NO: 365050 - DNA, 51 bp, Artificial
  Synthetic oligonucleotide
cctcgcaatccaggaagcgacacgactagtcaggttgagaagcttgctatc

SEQ ID NO: 365051 - DNA, 55 bp, Artificial
  Synthetic oligonucleotide
cctcgcagagcgtttctaccgttacgatcgggggtggatacgcacttttctcgga

SEQ ID NO: 365052 - DNA, 55 bp, Artificial
  Synthetic oligonucleotide
cctcgcagattcctgagctaccgaaagaagccgttgagcctactatcagtacagg

SEQ ID NO: 365053 - DNA, 56 bp, Artificial
  Synthetic oligonucleotide
cctcgcaggtttcattgcggttgggtgaggagtcggggataatttcggcttcatac

SEQ ID NO: 365054 - DNA, 55 bp, Artificial
  Synthetic oligonucleotide
cctcgcatagccaggtttgctgaagaatacgtccgcctggtagttcccgaagcga

SEQ ID NO: 365055 - DNA, 60 bp, Artificial
  Synthetic oligonucleotide
cctcgcatcttcacaacgtacttgggacagccaactctccactgagcgtgtttgaagcca

SEQ ID NO: 365056 - DNA, 60 bp, Artificial
  Synthetic oligonucleotide
cctcgccaaatatcaacggagtttgggtgatgatggatggaagtgaacaagttgaatatc

SEQ ID NO: 365057 - DNA, 55 bp, Artificial
  Synthetic oligonucleotide
cctcgccagcttgttttccgtcccgaggttttctggaatcaccctatccagcgcg

SEQ ID NO: 365058 - DNA, 55 bp, Artificial
  Synthetic oligonucleotide
cctcgccaggctcatatggtggttacaatacttcatcaccagagccgaggcgtgc

SEQ ID NO: 365059 - DNA, 55 bp, Artificial
  Synthetic oligonucleotide
cctcgccatagatttcgagctgcaggagttcaccaacccagcggtcgtgatccag

SEQ ID NO: 365060 - DNA, 55 bp, Artificial
  Synthetic oligonucleotide
cctcgccgcaacaacttgctcttcgttccctccctcgctggacactcattcgaac

SEQ ID NO: 365061 - DNA, 55 bp, Artificial
  Synthetic oligonucleotide
cctcgccggcataggacaatacaagaatgcaattgctcaatctatcccggccacg

SEQ ID NO: 365062 - DNA, 55 bp, Artificial
  Synthetic oligonucleotide
cctcgccttccgatatgaatttacacggcatttcatagactactgtaatcgatgt

SEQ ID NO: 365063 - DNA, 55 bp, Artificial
  Synthetic oligonucleotide
cctcgcgcatggcgtgagggcccttgaggacgggataaatttcgcaacagggaac

SEQ ID NO: 365064 - DNA, 53 bp, Artificial
  Synthetic oligonucleotide
cctcgcggggggtaagtacgtccagatggcgttattagcccttggtaggtgga

SEQ ID NO: 365065 - DNA, 55 bp, Artificial
  Synthetic oligonucleotide
cctcgcgtgggacgaggcgcggttctacagctacaactccggcgcattcacacaa

SEQ ID NO: 365066 - DNA, 60 bp, Artificial
  Synthetic oligonucleotide
cctcgctaaattgtgtagaggtgcccggagtggggcttggagatctagattcatcagagg

SEQ ID NO: 365067 - DNA, 55 bp, Artificial
  Synthetic oligonucleotide
cctcgctagcgtagatagtgaagaagtgcgccaatactgcagggatcaaggctgg

SEQ ID NO: 365068 - DNA, 60 bp, Artificial
  Synthetic oligonucleotide
cctcgctgaatgaatctgctgtgctgacgccacgctggttatgaccagcaatgcacacat

SEQ ID NO: 365069 - DNA, 56 bp, Artificial
  Synthetic oligonucleotide
cctcgctgccatggctaccttctatgaagtcattgttcgcgtcccatttgacgtgg

SEQ ID NO: 365070 - DNA, 55 bp, Artificial
  Synthetic oligonucleotide
cctcgcttagcccgcaaggaaatacttacgttcatcacttcgatagttcttccgt

SEQ ID NO: 365071 - DNA, 55 bp, Artificial
  Synthetic oligonucleotide
cctcgcttaggactcctattcccatggagaaactcctagatgaggttcttgcccc

SEQ ID NO: 365072 - DNA, 60 bp, Artificial
  Synthetic oligonucleotide
cctcgcttctacaaacgcaggatcaatcaatgctcccactgtgtcggacagtagagcctt

SEQ ID NO: 365073 - DNA, 57 bp, Artificial
  Synthetic oligonucleotide
cctcgcttgtggcatcgaacttcatcgctcgcgtgcgctccctaagacgcttaacga

SEQ ID NO: 365074 - DNA, 54 bp, Artificial
  Synthetic oligonucleotide
cctcggaagtcttggaccagtacgtaaaatcggacagcgagtagatacggggcg

SEQ ID NO: 365075 - DNA, 52 bp, Artificial
  Synthetic oligonucleotide
cctcggacggcgggcccctcattgatctcctcactgaggaccctccgccata

SEQ ID NO: 365076 - DNA, 54 bp, Artificial
  Synthetic oligonucleotide
cctcggacttaacccgtgttctactatcatccaacacatcatgttctatcaagt

SEQ ID NO: 365077 - DNA, 54 bp, Artificial
  Synthetic oligonucleotide
cctcggaggagtgggactcaaaatcggagacggactttctgtagtggacggaaa

SEQ ID NO: 365078 - DNA, 55 bp, Artificial
  Synthetic oligonucleotide
cctcggagtgaggggagtgtagtggtctcggtatctatcataaacgtaacttggg

SEQ ID NO: 365079 - DNA, 58 bp, Artificial
  Synthetic oligonucleotide
cctcggatcgcaacacattgccggagctctccaagtgggggatcccccgcgccacctg

SEQ ID NO: 365080 - DNA, 60 bp, Artificial
  Synthetic oligonucleotide
cctcggatgagaagagaaggctgtacatgggcaccgggaggaatgacacgttcacatacg

SEQ ID NO: 365081 - DNA, 55 bp, Artificial
  Synthetic oligonucleotide
cctcggatgattttgctctaattgtgaatgcacccaatcacgaggggattcaagc

SEQ ID NO: 365082 - DNA, 55 bp, Artificial
  Synthetic oligonucleotide
cctcggattacttttacccagcggtatctaacagaaatatgtgaggaagcctcct

SEQ ID NO: 365083 - DNA, 55 bp, Artificial
  Synthetic oligonucleotide
cctcggatttcttgttcttcgttctttcgattgtggtatgtattattttctatac

SEQ ID NO: 365084 - DNA, 55 bp, Artificial
  Synthetic oligonucleotide
cctcggatttgcactaccaatcatcttgaaagccctctacatgttatccacaaga

SEQ ID NO: 365085 - DNA, 59 bp, Artificial
  Synthetic oligonucleotide
cctcggcagctacatgcccagcaagaagaatggaagaagcggaccccaaccacataaaa

SEQ ID NO: 365086 - DNA, 55 bp, Artificial
  Synthetic oligonucleotide
cctcggcagtaagtctccatggtgggcctgcaacgaatagagactatctccggca

SEQ ID NO: 365087 - DNA, 55 bp, Artificial
  Synthetic oligonucleotide
cctcggcatacagtaaacctatctgccctagctgcagtgatgaatcagggtgaag

SEQ ID NO: 365088 - DNA, 60 bp, Artificial
  Synthetic oligonucleotide
cctcggcatacgcgtcgttggcagactggcaacctcctctagctgatcttccatcgactt

SEQ ID NO: 365089 - DNA, 60 bp, Artificial
  Synthetic oligonucleotide
cctcggccaatcgggagatgatagtgtgcaatgggctggtataagaatcagcgaacgtga

SEQ ID NO: 365090 - DNA, 53 bp, Artificial
  Synthetic oligonucleotide
cctcggccgaccacaaccgatcaggtttacatggtgtgtttggtaaacacggt

SEQ ID NO: 365091 - DNA, 55 bp, Artificial
  Synthetic oligonucleotide
cctcggcgacctaatggccagtgaaacctacggacgcatctacatgccggacgac

SEQ ID NO: 365092 - DNA, 57 bp, Artificial
  Synthetic oligonucleotide
cctcggcgatggagttgagggagaaactaccaggtagtcaattattacgatccactc

SEQ ID NO: 365093 - DNA, 55 bp, Artificial
  Synthetic oligonucleotide
cctcggcgccatcgcgagagggcaaaggtgggcgcggtccgaagcgtatgagggg

SEQ ID NO: 365094 - DNA, 60 bp, Artificial
  Synthetic oligonucleotide
cctcggctagccaactgtccgctccatctctcaaggcgacttgcaccgctaaccatgact

SEQ ID NO: 365095 - DNA, 55 bp, Artificial
  Synthetic oligonucleotide
cctcggctgtggaagaggtggctggtcatattactgcgctgggctgaagaaagtc

SEQ ID NO: 365096 - DNA, 55 bp, Artificial
  Synthetic oligonucleotide
cctcgggaagaactagagagcgtgcgtgcacagtgggtgcataagatactggcta

SEQ ID NO: 365097 - DNA, 55 bp, Artificial
  Synthetic oligonucleotide
cctcgggaggtagactctgccgataataccggggtagtgggccatggcagtcaag

SEQ ID NO: 365098 - DNA, 56 bp, Artificial
  Synthetic oligonucleotide
cctcgggcagtcaatgtgaaacaaggacccaaagaaatttactcagagtttgtaga

SEQ ID NO: 365099 - DNA, 55 bp, Artificial
  Synthetic oligonucleotide
cctcgggctggagccttttaccgtcgaatcatcacggtggatgtgcgctcccctg

SEQ ID NO: 365100 - DNA, 55 bp, Artificial
  Synthetic oligonucleotide
cctcgggctggcaggatctgcaatgggcacagtatcaacagtactgacgatccag

SEQ ID NO: 365101 - DNA, 59 bp, Artificial
  Synthetic oligonucleotide
cctcgggctttcatgcttaggggatcgcaaatagagtacgacatgaaagccaccagagg

SEQ ID NO: 365102 - DNA, 54 bp, Artificial
  Synthetic oligonucleotide
cctcggggacgttttcgtcaaacttcgctcttagtatgggtaatcatcctcttc

SEQ ID NO: 365103 - DNA, 55 bp, Artificial
  Synthetic oligonucleotide
cctcggggataatactgtctcatcatgcagcaatctagcctctacgataacccgc

SEQ ID NO: 365104 - DNA, 53 bp, Artificial
  Synthetic oligonucleotide
cctcggggggggcgggaactttactaaacagactccgagatgccattggacac

SEQ ID NO: 365105 - DNA, 52 bp, Artificial
  Synthetic oligonucleotide
cctcggggggggcgggggctttactaaacagactccgagacgccattggatc

SEQ ID NO: 365106 - DNA, 60 bp, Artificial
  Synthetic oligonucleotide
cctcgggtcaggcagagcacgatcatcattttcacatcatccttccaagtggctccacct

SEQ ID NO: 365107 - DNA, 56 bp, Artificial
  Synthetic oligonucleotide
cctcgggtccacgacaaataccttgtggactcgaccgagcgggctaggagggcagc

SEQ ID NO: 365108 - DNA, 56 bp, Artificial
  Synthetic oligonucleotide
cctcgggtctgagtttgagcaaacgacagtagtctcggaggttccgcttagccagg

SEQ ID NO: 365109 - DNA, 55 bp, Artificial
  Synthetic oligonucleotide
cctcgggtgtaacttcatccgtgggatgtatggcggtttgaggattgaaggtcac

SEQ ID NO: 365110 - DNA, 60 bp, Artificial
  Synthetic oligonucleotide
cctcgggtgtgcatgttggccaagagaatcattgaattgagtgattggtatccccatgag

SEQ ID NO: 365111 - DNA, 52 bp, Artificial
  Synthetic oligonucleotide
cctcgggttcttaccccttggttgttcccgccgatggttatttcagatttga

SEQ ID NO: 365112 - DNA, 59 bp, Artificial
  Synthetic oligonucleotide
cctcgggtttgcctaccccatgcactagcaaagcactacaccacagtcctcgaagggca

SEQ ID NO: 365113 - DNA, 55 bp, Artificial
  Synthetic oligonucleotide
cctcggtaggaccgagatgccgcgcattagaggaaattcctgtgcgcgatgtgga

SEQ ID NO: 365114 - DNA, 57 bp, Artificial
  Synthetic oligonucleotide
cctcggtatcaaaaggctgatgcggataatcaattactcgagcatgcatgcaatgtt

SEQ ID NO: 365115 - DNA, 55 bp, Artificial
  Synthetic oligonucleotide
cctcggtccagatcgagattggtcctagccatgagaatactgcccttaggtatgc

SEQ ID NO: 365116 - DNA, 55 bp, Artificial
  Synthetic oligonucleotide
cctcggtccagattgagattggtcctagccatccaaataccgctcttaggtatgc

SEQ ID NO: 365117 - DNA, 52 bp, Artificial
  Synthetic oligonucleotide
cctcggtctgattgccccaatactttagtttaaaagagtcggccattacggg

SEQ ID NO: 365118 - DNA, 56 bp, Artificial
  Synthetic oligonucleotide
cctcggtcttatcggagatggtttaggaagtagttatatcacatactggaatggtt

SEQ ID NO: 365119 - DNA, 55 bp, Artificial
  Synthetic oligonucleotide
cctcggtgaatctccgcgccactcactgacctcactaggttacgtgacacagagc

SEQ ID NO: 365120 - DNA, 54 bp, Artificial
  Synthetic oligonucleotide
cctcggtgcaagatctgtaccccacctgtcgcacgggggactgccccccggacg

SEQ ID NO: 365121 - DNA, 60 bp, Artificial
  Synthetic oligonucleotide
cctcggtgtaaagtaggaatgcatttgttaacgtctggaatactggcattgtatatgcat

SEQ ID NO: 365122 - DNA, 60 bp, Artificial
  Synthetic oligonucleotide
cctcggtgttaaccagtgctgctgataaagtgattttctggagtgaaataatacattgtg

SEQ ID NO: 365123 - DNA, 54 bp, Artificial
  Synthetic oligonucleotide
cctcggtttaaaaccggtgcattatccacacgtaagggcactcaaactgaagcc

SEQ ID NO: 365124 - DNA, 55 bp, Artificial
  Synthetic oligonucleotide
cctcgtaaccattgagagtataaagtagaggttctctattctttgtacgattagg

SEQ ID NO: 365125 - DNA, 60 bp, Artificial
  Synthetic oligonucleotide
cctcgtaatactacccgcctgtgatgccgatggacctggatcgattgccgaatcgtccaa

SEQ ID NO: 365126 - DNA, 55 bp, Artificial
  Synthetic oligonucleotide
cctcgtaatgtgcttcagggcattgtgaagagaatttcgcgtagatatgctaaca

SEQ ID NO: 365127 - DNA, 59 bp, Artificial
  Synthetic oligonucleotide
cctcgtagagtgaaaaaatcccactcggatgccaggtcaagggcacgccgagcttgatg

SEQ ID NO: 365128 - DNA, 55 bp, Artificial
  Synthetic oligonucleotide
cctcgtaggacattggagactgagttacttcgtattatttcagcgaaacagagtg

SEQ ID NO: 365129 - DNA, 55 bp, Artificial
  Synthetic oligonucleotide
cctcgtatcgatttcgtgactcaacttccgggttcccacgttacgtcacttctgc

SEQ ID NO: 365130 - DNA, 60 bp, Artificial
  Synthetic oligonucleotide
cctcgtatgtacacattattgcatccaatccgccaaaccgtcaacagatcgcttaacatt

SEQ ID NO: 365131 - DNA, 55 bp, Artificial
  Synthetic oligonucleotide
cctcgtattaggtccaccactattggtacgcgtgtcaccaacactgagctgctcg

SEQ ID NO: 365132 - DNA, 55 bp, Artificial
  Synthetic oligonucleotide
cctcgtattcctgattggattggacattatcctggtggtaaaggttctacaggtc

SEQ ID NO: 365133 - DNA, 55 bp, Artificial
  Synthetic oligonucleotide
cctcgtattgatctgattacctgctttgcagcgggcaaggccgataataatcggc

SEQ ID NO: 365134 - DNA, 55 bp, Artificial
  Synthetic oligonucleotide
cctcgtcaaaccatttaaaccaattacggaacatcagaatgagcgttggactggc

SEQ ID NO: 365135 - DNA, 58 bp, Artificial
  Synthetic oligonucleotide
cctcgtcaattgattgagtcgttcaacaagaacgaacctggaatgaaatctagccgga

SEQ ID NO: 365136 - DNA, 55 bp, Artificial
  Synthetic oligonucleotide
cctcgtcacaaacaaaaggaggtcatgggtgaatcgtcccatgtaccgcaagccc

SEQ ID NO: 365137 - DNA, 55 bp, Artificial
  Synthetic oligonucleotide
cctcgtcacaaacaaaaggcgagcatggacacagaggcccatgtatcggaagccc

SEQ ID NO: 365138 - DNA, 54 bp, Artificial
  Synthetic oligonucleotide
cctcgtcacaaacaaacgccgggcgtggtccaacagacccaattacaggaagcc

SEQ ID NO: 365139 - DNA, 56 bp, Artificial
  Synthetic oligonucleotide
cctcgtcacaaatcgaaagcggtcatggactcacaggcccatgaatcgaaagccca

SEQ ID NO: 365140 - DNA, 55 bp, Artificial
  Synthetic oligonucleotide
cctcgtcacatcttcgactcctgtactgacaacactctcacacgacacatccgcg

SEQ ID NO: 365141 - DNA, 55 bp, Artificial
  Synthetic oligonucleotide
cctcgtcagacacccagaaatactggagttcagtggaagtgcgcccaccgaaagc

SEQ ID NO: 365142 - DNA, 55 bp, Artificial
  Synthetic oligonucleotide
cctcgtcagcataagacagtacaggactgcaattgttcaatctatcccggccacg

SEQ ID NO: 365143 - DNA, 60 bp, Artificial
  Synthetic oligonucleotide
cctcgtcatcttttcgcagagaagtatgacaggatcatgctggacggtagagccatgaca

SEQ ID NO: 365144 - DNA, 60 bp, Artificial
  Synthetic oligonucleotide
cctcgtcatttatgcttgtgtgatggaattgatcagtatgcctgcatttatagacttaaa

SEQ ID NO: 365145 - DNA, 60 bp, Artificial
  Synthetic oligonucleotide
cctcgtccaactcacccagcccaatgtgaaccaagcagcagtaggtggcagtgttggtgc

SEQ ID NO: 365146 - DNA, 52 bp, Artificial
  Synthetic oligonucleotide
cctcgtccggaaaggaggaccgttctttaaatcaagcttcccggcgcagaag

SEQ ID NO: 365147 - DNA, 55 bp, Artificial
  Synthetic oligonucleotide
cctcgtcctccatgtgaccattcacgttttctagatgtatttgccaccatgctac

SEQ ID NO: 365148 - DNA, 55 bp, Artificial
  Synthetic oligonucleotide
cctcgtcgaggtcaaaactaccgttgctctcatttaccgaagattgtagatcttc

SEQ ID NO: 365149 - DNA, 55 bp, Artificial
  Synthetic oligonucleotide
cctcgtctaggaactctttatacgaggaagttggtcctggattgcaaaggaagat

SEQ ID NO: 365150 - DNA, 55 bp, Artificial
  Synthetic oligonucleotide
cctcgtctcacctgataaacctggtgtttcattggttcgtattgctaaggtacgc

SEQ ID NO: 365151 - DNA, 60 bp, Artificial
  Synthetic oligonucleotide
cctcgtgacatgttacgtaaccatgtgcattgatccatgttctccatttttcagttagct

SEQ ID NO: 365152 - DNA, 58 bp, Artificial
  Synthetic oligonucleotide
cctcgtgagactatttacctacccactactgatagtgtggcttcgtatgtaacaccac

SEQ ID NO: 365153 - DNA, 54 bp, Artificial
  Synthetic oligonucleotide
cctcgtgagcataacccgtggggacttggttgtgcctaaataccgttcatttgg

SEQ ID NO: 365154 - DNA, 60 bp, Artificial
  Synthetic oligonucleotide
cctcgtgattgtccccagattcgtgggttgacaccaacacagaaatgtgctgtgttgtcg

SEQ ID NO: 365155 - DNA, 58 bp, Artificial
  Synthetic oligonucleotide
cctcgtgatttagcactcaaattagagttgttatctcagactttaaataaacgtgaca

SEQ ID NO: 365156 - DNA, 55 bp, Artificial
  Synthetic oligonucleotide
cctcgtggacgatatcaagaagcaattaggtttgtagaaagatggcaaccatctt

SEQ ID NO: 365157 - DNA, 60 bp, Artificial
  Synthetic oligonucleotide
cctcgtggactcgatagagcgcgctaagagggcagctcaagcctgcctaagcatgggtta

SEQ ID NO: 365158 - DNA, 50 bp, Artificial
  Synthetic oligonucleotide
cctcgtggtacctgaatcatcggtttcacagtgccacgtacgcaattcca

SEQ ID NO: 365159 - DNA, 56 bp, Artificial
  Synthetic oligonucleotide
cctcgtggtggaaccatcagttaagtagagggttcacaataccacactacagaacg

SEQ ID NO: 365160 - DNA, 51 bp, Artificial
  Synthetic oligonucleotide
cctcgtggttccatatgtcaattatcggaactatgtggagattacgaccaa

SEQ ID NO: 365161 - DNA, 55 bp, Artificial
  Synthetic oligonucleotide
cctcgtgtcggaggtgagctttgggttccatctctaacagagggtgggagttcta

SEQ ID NO: 365162 - DNA, 52 bp, Artificial
  Synthetic oligonucleotide
cctcgttaacggggatgacattctctttcggtgtccggaacggactattcct

SEQ ID NO: 365163 - DNA, 51 bp, Artificial
  Synthetic oligonucleotide
cctcgttagtgggtccccacgtatatggcggggaaaaaacttaatcttcca

SEQ ID NO: 365164 - DNA, 60 bp, Artificial
  Synthetic oligonucleotide
cctcgttcacatactggtggcaaattcgcttgtactgttcatgctgctctggcataagct

SEQ ID NO: 365165 - DNA, 55 bp, Artificial
  Synthetic oligonucleotide
cctcgttctcgacttaacgacaaaacagaagaaatcaaggacttgcagacagaga

SEQ ID NO: 365166 - DNA, 55 bp, Artificial
  Synthetic oligonucleotide
cctcgttgacctgtgtgagtcagggacgtcccgaggcttgagccgtgtgacaagc

SEQ ID NO: 365167 - DNA, 55 bp, Artificial
  Synthetic oligonucleotide
cctcgttgatagagactatcatctgtcattcatctcaagaagcagtggcattggt

SEQ ID NO: 365168 - DNA, 57 bp, Artificial
  Synthetic oligonucleotide
cctcgttgctgtaaatcttggggcttaagtcaagatggccgcaaaggtaattatgac

SEQ ID NO: 365169 - DNA, 54 bp, Artificial
  Synthetic oligonucleotide
cctcgtttcaccggataaacctggtgtcacattggttcgagtcgctaaggtacg

SEQ ID NO: 365170 - DNA, 55 bp, Artificial
  Synthetic oligonucleotide
cctcgtttgacaacatgcaaacgtctgatggtcgcaagtggaccgccactctccc

SEQ ID NO: 365171 - DNA, 48 bp, Artificial
  Synthetic oligonucleotide
cctctaaaagggactttcccctgggactttccggggaggtgtggtttg

SEQ ID NO: 365172 - DNA, 56 bp, Artificial
  Synthetic oligonucleotide
cctctaaagctgtaaagttaaagatagtatatggcgttagttagtgtgatggttct

SEQ ID NO: 365173 - DNA, 50 bp, Artificial
  Synthetic oligonucleotide
cctctaaagggtccagggtaccttcttgacgtagggcgatttctttttta

SEQ ID NO: 365174 - DNA, 58 bp, Artificial
  Synthetic oligonucleotide
cctctaaaggtcactaagcactccgagcgccagcgaggagtgcgacccttccccctga

SEQ ID NO: 365175 - DNA, 60 bp, Artificial
  Synthetic oligonucleotide
cctctaaatgttggatcgagcctgacattaataaaggtcctcatgaattttgttcgcagc

SEQ ID NO: 365176 - DNA, 57 bp, Artificial
  Synthetic oligonucleotide
cctctaacaaaattaatccggtaatacactacgtgtatactgatagtatcaacgaca

SEQ ID NO: 365177 - DNA, 55 bp, Artificial
  Synthetic oligonucleotide
cctctaacatctcacaatacccttcaaaccccagcaaccctatacactctaactg

SEQ ID NO: 365178 - DNA, 60 bp, Artificial
  Synthetic oligonucleotide
cctctaaccggctatgcaattgatgaatctgtgacatgcgacatttcactagtccaggat

SEQ ID NO: 365179 - DNA, 57 bp, Artificial
  Synthetic oligonucleotide
cctctaacggcattcacatgtccccaaggtcactacgaatggaatgtggtccctttc

SEQ ID NO: 365180 - DNA, 55 bp, Artificial
  Synthetic oligonucleotide
cctctaagaaagctaaggggtggttttatagacatcactatgaaagtagacatcc

SEQ ID NO: 365181 - DNA, 57 bp, Artificial
  Synthetic oligonucleotide
cctctaagactattcctatgggtctaatcggccgcgcagcggaacaccccacattac

SEQ ID NO: 365182 - DNA, 55 bp, Artificial
  Synthetic oligonucleotide
cctctaagatgtgtactggggtgggttgctctggctaactctaagaagttccagc

SEQ ID NO: 365183 - DNA, 60 bp, Artificial
  Synthetic oligonucleotide
cctctaagcaagcacccagacaagacggccctgtacagggcgctgacgaggcacacgcgg

SEQ ID NO: 365184 - DNA, 55 bp, Artificial
  Synthetic oligonucleotide
cctctaagctatgtgagaatgtctcagcagtaatgtgtacagacatgatgacagc

SEQ ID NO: 365185 - DNA, 58 bp, Artificial
  Synthetic oligonucleotide
cctctaaggttagtgcgaggctcctctcagtagaggaagcctgcgcgttgaccccgcc

SEQ ID NO: 365186 - DNA, 54 bp, Artificial
  Synthetic oligonucleotide
cctctaagtacgtcccactgtttaccttgaaggagcgattagagtttcgtagac

SEQ ID NO: 365187 - DNA, 59 bp, Artificial
  Synthetic oligonucleotide
cctctaatacgtggcgcactctggagtctcgctcgaagcttgtttattgaacgactact

SEQ ID NO: 365188 - DNA, 55 bp, Artificial
  Synthetic oligonucleotide
cctctaataggcatataatcgtaacatgatcacgagtttcgtgtgttttgaaccc

SEQ ID NO: 365189 - DNA, 55 bp, Artificial
  Synthetic oligonucleotide
cctctaataggtgaatctacacccactgatcatgtgtttgtatttgaaggctcag

SEQ ID NO: 365190 - DNA, 51 bp, Artificial
  Synthetic oligonucleotide
cctctaatatctcttatcattctcaatgtttcactatctgctaatggaact

SEQ ID NO: 365191 - DNA, 60 bp, Artificial
  Synthetic oligonucleotide
cctctaatgataattatcagacgccaatagctaattcggttacagtcagacaagatctgg

SEQ ID NO: 365192 - DNA, 60 bp, Artificial
  Synthetic oligonucleotide
cctctaattctagacacctgtactatcgaagggctagtctatggcaatccttcttgtgat

SEQ ID NO: 365193 - DNA, 55 bp, Artificial
  Synthetic oligonucleotide
cctctacaatacgagcgcgaccatatacgtcattacctttccaccacagcttttc

SEQ ID NO: 365194 - DNA, 55 bp, Artificial
  Synthetic oligonucleotide
cctctacactcggacctggtcggtctcgggcttttctagttgtttctcaccgctc

SEQ ID NO: 365195 - DNA, 55 bp, Artificial
  Synthetic oligonucleotide
cctctacagtccatactacctaaaccccacaaggataaaccttgactggatgacc

SEQ ID NO: 365196 - DNA, 55 bp, Artificial
  Synthetic oligonucleotide
cctctacagtcgtgcagagactgttgctactgtaacacccacaactcgttcgtac

SEQ ID NO: 365197 - DNA, 56 bp, Artificial
  Synthetic oligonucleotide
cctctacatcagtgagttgattcatacaaactttctacctacattcttcacttcac

SEQ ID NO: 365198 - DNA, 55 bp, Artificial
  Synthetic oligonucleotide
cctctacatcgctatactcgttaccgttgtccgtgatagtggcactgtaggtagg

SEQ ID NO: 365199 - DNA, 55 bp, Artificial
  Synthetic oligonucleotide
cctctacatgctccattggggaaaagaagcagtaaaccactttcaccttggtgat

SEQ ID NO: 365200 - DNA, 52 bp, Artificial
  Synthetic oligonucleotide
cctctacattagtaaagctaatcaattttttaacgactacccgacgttatta

SEQ ID NO: 365201 - DNA, 52 bp, Artificial
  Synthetic oligonucleotide
cctctaccagggagtgctaaatttgtaggttcacaccccttttcctttccga

SEQ ID NO: 365202 - DNA, 60 bp, Artificial
  Synthetic oligonucleotide
cctctacgactgtgccttgagagggaattggacttgtgtgccgggggatgcattacgata

SEQ ID NO: 365203 - DNA, 59 bp, Artificial
  Synthetic oligonucleotide
cctctacgttgtacatcttgaaataaaggggatttgatatctcccagatatacacgcca

SEQ ID NO: 365204 - DNA, 53 bp, Artificial
  Synthetic oligonucleotide
cctctactctgggttcacacccagaacgatggtttgccccgacgctctgaacc

SEQ ID NO: 365205 - DNA, 57 bp, Artificial
  Synthetic oligonucleotide
cctctactcttatttcttgtcttatgatgttttctaagcccaataacttatcactcg

SEQ ID NO: 365206 - DNA, 60 bp, Artificial
  Synthetic oligonucleotide
cctctactggtaaagcgctcagtgttctcgctgactgcacatcctgggatcagacgtttc

SEQ ID NO: 365207 - DNA, 53 bp, Artificial
  Synthetic oligonucleotide
cctctactgtccctatctttaatccggaatggcaaactccttcctttcctaaa

SEQ ID NO: 365208 - DNA, 52 bp, Artificial
  Synthetic oligonucleotide
cctctacttctaaacaaacttcccaagaggaaattattggagccattgaagg

SEQ ID NO: 365209 - DNA, 60 bp, Artificial
  Synthetic oligonucleotide
cctctagaagagtcagagaagtactacaacgcattatccgagctatcagtgcttgagaat

SEQ ID NO: 365210 - DNA, 55 bp, Artificial
  Synthetic oligonucleotide
cctctagacattgttgacacccagtgcaaatatcctgattatatcaaaatggcca

SEQ ID NO: 365211 - DNA, 60 bp, Artificial
  Synthetic oligonucleotide
cctctagagatgttgtcagaatgatatatcagtctctttcccctaatgatttgttggctc

SEQ ID NO: 365212 - DNA, 60 bp, Artificial
  Synthetic oligonucleotide
cctctagatcaactagctgttggactctatcctatgagaggatgggtcaaattatgacaa

SEQ ID NO: 365213 - DNA, 60 bp, Artificial
  Synthetic oligonucleotide
cctctagatcaactgagtgctgaactctgccaagcagagagatgggccaaattgtgacaa

SEQ ID NO: 365214 - DNA, 54 bp, Artificial
  Synthetic oligonucleotide
cctctagatcaactgggtgtcaggccctatcctacagaaggatgggtcagattg

SEQ ID NO: 365215 - DNA, 57 bp, Artificial
  Synthetic oligonucleotide
cctctagatcaactgtgtgttggactctatcctgtcgaaggatgggtcaaattgtga

SEQ ID NO: 365216 - DNA, 60 bp, Artificial
  Synthetic oligonucleotide
cctctagatttgtctgcgtcctcacagactgaatatgaggcttatcccctagcaccgttg

SEQ ID NO: 365217 - DNA, 60 bp, Artificial
  Synthetic oligonucleotide
cctctagcccgttctagacgcccacgtaggcgcagacgagcagcaatcacgcagaacaat

SEQ ID NO: 365218 - DNA, 52 bp, Artificial
  Synthetic oligonucleotide
cctctagcctgggtatcttgcttactctccgcgatactctctatggttcaag

SEQ ID NO: 365219 - DNA, 52 bp, Artificial
  Synthetic oligonucleotide
cctctagcggcggcctaccgagaaaaacttgaaaccccggttgtgcctcacc

SEQ ID NO: 365220 - DNA, 53 bp, Artificial
  Synthetic oligonucleotide
cctctagctttattgttgccacaacaaatttgcccaaattccgccccgttacg

SEQ ID NO: 365221 - DNA, 55 bp, Artificial
  Synthetic oligonucleotide
cctctaggcaactttccctcaatcattacttattgtcgcctgactcctttgctgt

SEQ ID NO: 365222 - DNA, 53 bp, Artificial
  Synthetic oligonucleotide
cctctagggcgtagtgttgtgggataccctagagtacacgtaaaacacccgcc

SEQ ID NO: 365223 - DNA, 57 bp, Artificial
  Synthetic oligonucleotide
cctctagtaaaactatggtatgagttagaaacagagcccataataggagcagaaacc

SEQ ID NO: 365224 - DNA, 55 bp, Artificial
  Synthetic oligonucleotide
cctctagtaaaattatggtaccaattagaaaaagaccccatagtaggagcagaga

SEQ ID NO: 365225 - DNA, 55 bp, Artificial
  Synthetic oligonucleotide
cctctatactgagtaagagtaaaagtttgaggtacactattggagggagcaagcc

SEQ ID NO: 365226 - DNA, 56 bp, Artificial
  Synthetic oligonucleotide
cctctatcaaagacaggccggaaacaaaaaactgctctttcgatataaccacagta

SEQ ID NO: 365227 - DNA, 60 bp, Artificial
  Synthetic oligonucleotide
cctctatcagaatgctgatgcatatgtttcagttgggtcatcaaaatacaaccgaaggtt

SEQ ID NO: 365228 - DNA, 60 bp, Artificial
  Synthetic oligonucleotide
cctctatcgatcagggttctgtattcacgtgcagtgcaatgctagtaaattccaccaagg

SEQ ID NO: 365229 - DNA, 50 bp, Artificial
  Synthetic oligonucleotide
cctctatctactattcagcagtattcgaagactttcttcgtcctgccgct

SEQ ID NO: 365230 - DNA, 56 bp, Artificial
  Synthetic oligonucleotide
cctctatctcgttgttccccactgcgctggctgaagcccaggtatgcccttgtgga

SEQ ID NO: 365231 - DNA, 55 bp, Artificial
  Synthetic oligonucleotide
cctctatctgaaatgatgaaaactgggacaccatgcaggcgagcaatctctcgga

SEQ ID NO: 365232 - DNA, 56 bp, Artificial
  Synthetic oligonucleotide
cctctatctgagaccgaattacagttcattaaagcactaaatagcctcaaatcaac

SEQ ID NO: 365233 - DNA, 60 bp, Artificial
  Synthetic oligonucleotide
cctctattacattgtacaatacatgtctcattgctctaattacattgtttaaactaataa

SEQ ID NO: 365234 - DNA, 57 bp, Artificial
  Synthetic oligonucleotide
cctctattacgtggcgcgacgtggattctcgctcggaggttgtttattgaacgacaa

SEQ ID NO: 365235 - DNA, 58 bp, Artificial
  Synthetic oligonucleotide
cctctattacgtggcgcgctgtggagtctcgctcaaagtttgtttattgaacgactac

SEQ ID NO: 365236 - DNA, 55 bp, Artificial
  Synthetic oligonucleotide
cctctattcaatgaatttccaggaccaagatatttatatccaggaacagttaatc

SEQ ID NO: 365237 - DNA, 60 bp, Artificial
  Synthetic oligonucleotide
cctctattgacaccccgttagcaacacattggtccagtattgtgtcaattgtatctgctt

SEQ ID NO: 365238 - DNA, 60 bp, Artificial
  Synthetic oligonucleotide
cctctattgagcggtgatccgaggatgactcaattagccatccagtaccaacaatacaat

SEQ ID NO: 365239 - DNA, 55 bp, Artificial
  Synthetic oligonucleotide
cctctattgatttccttggagccacgattggcaggtcaaagataaggctccagcc

SEQ ID NO: 365240 - DNA, 60 bp, Artificial
  Synthetic oligonucleotide
cctctattgtgtgcatcaacacatagatgtaagagacaccaaggaagctttagacaagat

SEQ ID NO: 365241 - DNA, 60 bp, Artificial
  Synthetic oligonucleotide
cctctcaaactagctggttcctagagttcttgatctccaatgtgactcaaaacacattat

SEQ ID NO: 365242 - DNA, 60 bp, Artificial
  Synthetic oligonucleotide
cctctcaattctaatgctatgatggtttctgagtccatgctagatcgcattgcaagtgga

SEQ ID NO: 365243 - DNA, 55 bp, Artificial
  Synthetic oligonucleotide
cctctcacatacttctgattctgctagtgtgcacatggtagtggtttgccctcct

SEQ ID NO: 365244 - DNA, 55 bp, Artificial
  Synthetic oligonucleotide
cctctcacctctcacagttattcaatcccatgcttactctggagttcgactgata

SEQ ID NO: 365245 - DNA, 55 bp, Artificial
  Synthetic oligonucleotide
cctctcagaaccatggctagaagggtggggaaatgcattttacagtgtcctcgga

SEQ ID NO: 365246 - DNA, 57 bp, Artificial
  Synthetic oligonucleotide
cctctcagatcgtgagttgattctatcgtgggagcccgggaaaactaggcctccatt

SEQ ID NO: 365247 - DNA, 53 bp, Artificial
  Synthetic oligonucleotide
cctctcagccaaattacaccaggtatgatattccacaagaatacattcctaac

SEQ ID NO: 365248 - DNA, 55 bp, Artificial
  Synthetic oligonucleotide
cctctcaggaccctccacgtccaggaaaaggtctcgtaccaccagctcctctacc

SEQ ID NO: 365249 - DNA, 60 bp, Artificial
  Synthetic oligonucleotide
cctctcaggggagtcgatttccgtgcgcggtccagtgacctggctgacgacttcatcgcc

SEQ ID NO: 365250 - DNA, 55 bp, Artificial
  Synthetic oligonucleotide
cctctcaggtcgagctcggctgcctcttaggtagtcgctccccgagggtctttag

SEQ ID NO: 365251 - DNA, 52 bp, Artificial
  Synthetic oligonucleotide
cctctcatagactaacccaccgagtacccccgtggcccctctcgtcaaccct

SEQ ID NO: 365252 - DNA, 55 bp, Artificial
  Synthetic oligonucleotide
cctctcatccgctcgttttccacgtgtgccggacccaccctggccggtcatttcc

SEQ ID NO: 365253 - DNA, 60 bp, Artificial
  Synthetic oligonucleotide
cctctcatcctagacacctgcaccatcgaaggactggtatacggcaatccttcttgtgac

SEQ ID NO: 365254 - DNA, 60 bp, Artificial
  Synthetic oligonucleotide
cctctcatcctagacacctgcactatcgaagggctgatatacggtaatccctcttgtgat

SEQ ID NO: 365255 - DNA, 55 bp, Artificial
  Synthetic oligonucleotide
cctctcatcctgctctatgtagttcaggcataattctcttaattctgaaatagtc

SEQ ID NO: 365256 - DNA, 60 bp, Artificial
  Synthetic oligonucleotide
cctctcatgatgaacaagtgaggttcagagaattgggtgccaaaacctatggagaatcac

SEQ ID NO: 365257 - DNA, 55 bp, Artificial
  Synthetic oligonucleotide
cctctcatgcaaagtggagataagcacgtgacactcagcgacaatttgaaggagg

SEQ ID NO: 365258 - DNA, 55 bp, Artificial
  Synthetic oligonucleotide
cctctcatgtccgttcacatatctctgatccttctggactgagattctccgttaa

SEQ ID NO: 365259 - DNA, 52 bp, Artificial
  Synthetic oligonucleotide
cctctccaaaaagggatatatattgtacgataatgtggtcactcttccgttg

SEQ ID NO: 365260 - DNA, 58 bp, Artificial
  Synthetic oligonucleotide
cctctccacactacgtcggatcctgcccctggggatgcccaggatttctctggactta

SEQ ID NO: 365261 - DNA, 60 bp, Artificial
  Synthetic oligonucleotide
cctctccagtctaatgcatcagcttctcctactgtagcaatgtctatgactgtaactcca

SEQ ID NO: 365262 - DNA, 60 bp, Artificial
  Synthetic oligonucleotide
cctctccattgctcgtggggacttagctctctgcccttactcattcgcataagccttttg

SEQ ID NO: 365263 - DNA, 59 bp, Artificial
  Synthetic oligonucleotide
cctctcccagagcaccataccagagaccattcttgagttgactgatgcgttagccttag

SEQ ID NO: 365264 - DNA, 54 bp, Artificial
  Synthetic oligonucleotide
cctctcccttcttcggcgaatttacaccacagattaaatgacggggtaacacag

SEQ ID NO: 365265 - DNA, 54 bp, Artificial
  Synthetic oligonucleotide
cctctccgagggtaacgaacgacgcatttaaagtgcccaggccttgaaagcgga

SEQ ID NO: 365266 - DNA, 55 bp, Artificial
  Synthetic oligonucleotide
cctctccgctggggagtccttcaatgtccgcctcatgcagaaccctgctctttcc

SEQ ID NO: 365267 - DNA, 60 bp, Artificial
  Synthetic oligonucleotide
cctctcctagtaacagccgctttgaatctgtggcatggtctgccactgcatgtagcgatg

SEQ ID NO: 365268 - DNA, 55 bp, Artificial
  Synthetic oligonucleotide
cctctcctgcgggctattattcccgaaggccgagaggtacgagaagaaggcctgg

SEQ ID NO: 365269 - DNA, 55 bp, Artificial
  Synthetic oligonucleotide
cctctcctgggacccctactcaccctcctactcatactaaccattgggccatgcg

SEQ ID NO: 365270 - DNA, 60 bp, Artificial
  Synthetic oligonucleotide
cctctccttagtgatgacactatcaggatagtcgatgattgcacgtttcaattggcatct

SEQ ID NO: 365271 - DNA, 51 bp, Artificial
  Synthetic oligonucleotide
cctctcgagggagagccgggggaccccgatctcagcgacgggtcctggtct

SEQ ID NO: 365272 - DNA, 59 bp, Artificial
  Synthetic oligonucleotide
cctctcgcaaaggacttattagctccaatggccagaaagttttatgataactcaatgag

SEQ ID NO: 365273 - DNA, 60 bp, Artificial
  Synthetic oligonucleotide
cctctcgcactacgactacttcattcctgacatctctatcttcctcttgtcagaagtatc

SEQ ID NO: 365274 - DNA, 55 bp, Artificial
  Synthetic oligonucleotide
cctctcgccctgcgaagtaacgcgctcactctttcttacaacgcacccttaaacg

SEQ ID NO: 365275 - DNA, 60 bp, Artificial
  Synthetic oligonucleotide
cctctcgcgagggctgcgtgggaaacagctagacacactccagtcaactcctggctaggc

SEQ ID NO: 365276 - DNA, 60 bp, Artificial
  Synthetic oligonucleotide
cctctcgggcacatacgatgtacagaggattccaacgagcgacgagatcccatagtttct

SEQ ID NO: 365277 - DNA, 55 bp, Artificial
  Synthetic oligonucleotide
cctctcgtcgaaactgctggtatgtctgttcttactcaatctccaaacctccgta

SEQ ID NO: 365278 - DNA, 57 bp, Artificial
  Synthetic oligonucleotide
cctctcgtcgttctggttactcattcaatagaacatacagtggaaacaggagtttcc

SEQ ID NO: 365279 - DNA, 55 bp, Artificial
  Synthetic oligonucleotide
cctctctaagttggagcggatgttatgattctgcaagacaaaatcctttggctgt

SEQ ID NO: 365280 - DNA, 59 bp, Artificial
  Synthetic oligonucleotide
cctctctaccaaggatctgaccacatatggattcggacaccaaaacaaagcggtgtaca

SEQ ID NO: 365281 - DNA, 55 bp, Artificial
  Synthetic oligonucleotide
cctctctactagtacgcagacgttcttgggcacatcagtggggggggtcatgtgg

SEQ ID NO: 365282 - DNA, 57 bp, Artificial
  Synthetic oligonucleotide
cctctctagcagtggcgcccgaacagggtacctgaaagcgaaagtagaaccagagga

SEQ ID NO: 365283 - DNA, 55 bp, Artificial
  Synthetic oligonucleotide
cctctctagggtcacagaaactctcgcttcatccttactttgatagttatcgcac

SEQ ID NO: 365284 - DNA, 55 bp, Artificial
  Synthetic oligonucleotide
cctctctataacaagctagatgacactgaaaactctaacatagcacatggggaca

SEQ ID NO: 365285 - DNA, 60 bp, Artificial
  Synthetic oligonucleotide
cctctctattccagttatcctgcatgaggtcccattgagggatatcttacttgttattat

SEQ ID NO: 365286 - DNA, 54 bp, Artificial
  Synthetic oligonucleotide
cctctctcagggccatcagtgcagctccacccagaacctacagtcaaagtgcat

SEQ ID NO: 365287 - DNA, 55 bp, Artificial
  Synthetic oligonucleotide
cctctctccacctactgcgtctttcggtccggttatgtcgacagccactccaaca

SEQ ID NO: 365288 - DNA, 55 bp, Artificial
  Synthetic oligonucleotide
cctctctcccttcaatctctacacgatggatacaacgctcaccttcatccttcgg

SEQ ID NO: 365289 - DNA, 55 bp, Artificial
  Synthetic oligonucleotide
cctctctctcacaataatatcgtccacctttctgtaagcgtttgtcgcacgtgtg

SEQ ID NO: 365290 - DNA, 59 bp, Artificial
  Synthetic oligonucleotide
cctctctctgtcaattttgaaattcagacacttgttcttataatgagaatacttgccag

SEQ ID NO: 365291 - DNA, 60 bp, Artificial
  Synthetic oligonucleotide
cctctctgacagagtagcttctgacaaagcagggaattcggccacaaacacacagtctac

SEQ ID NO: 365292 - DNA, 55 bp, Artificial
  Synthetic oligonucleotide
cctctctgcaaggagatgtctttagcgacgccgacgtttcagacatggctgacta

SEQ ID NO: 365293 - DNA, 58 bp, Artificial
  Synthetic oligonucleotide
cctctctgcgttactttaaattgtaccaatgctaatttgaccaatagcaataacataa

SEQ ID NO: 365294 - DNA, 60 bp, Artificial
  Synthetic oligonucleotide
cctctctgctggggcaatgaatgagctagacatagcagcctgcataggctggatgaatga

SEQ ID NO: 365295 - DNA, 55 bp, Artificial
  Synthetic oligonucleotide
cctctctgtgtccctatctgtaagtgaccttgagtcatcaccaggtttctctttg

SEQ ID NO: 365296 - DNA, 60 bp, Artificial
  Synthetic oligonucleotide
cctctcttattaacaacagttcttccaataacaattgctgcatctcagaaaggcactgtc

SEQ ID NO: 365297 - DNA, 55 bp, Artificial
  Synthetic oligonucleotide
cctctcttgcattaatgtcgacttgtattgaggggaaagaggagattgcatccag

SEQ ID NO: 365298 - DNA, 55 bp, Artificial
  Synthetic oligonucleotide
cctctcttgccactaaatgccctgataaccctcccactcctaaggtgcaagatag

SEQ ID NO: 365299 - DNA, 55 bp, Artificial
  Synthetic oligonucleotide
cctctcttgggaagctaagttggtagttatattactctaaactatctgatgtcac

SEQ ID NO: 365300 - DNA, 60 bp, Artificial
  Synthetic oligonucleotide
cctctgaagatcaaatcatgtggcaggatgttgtgaacggtctttagatcagggagtctt

SEQ ID NO: 365301 - DNA, 55 bp, Artificial
  Synthetic oligonucleotide
cctctgaagctcagctgtttaacagaccatattggatacagcgctcccagggcca

SEQ ID NO: 365302 - DNA, 55 bp, Artificial
  Synthetic oligonucleotide
cctctgaccagcctctcaccgtcagaatggtcatagataggatctggggacctga

SEQ ID NO: 365303 - DNA, 55 bp, Artificial
  Synthetic oligonucleotide
cctctgaccttttctggaccagttgtgtctcaactcgtatcactcccacctctgc

SEQ ID NO: 365304 - DNA, 58 bp, Artificial
  Synthetic oligonucleotide
cctctgactcctctaaccctgtacgtgttgaggatgtaatgaacacaacggaatattg

SEQ ID NO: 365305 - DNA, 59 bp, Artificial
  Synthetic oligonucleotide
cctctgactggaacggctaaacatatcgaagaatgctcatgttacggggagcgggcagg

SEQ ID NO: 365306 - DNA, 55 bp, Artificial
  Synthetic oligonucleotide
cctctgacttactgcctgtgttaatggcttgggcgtaagcatcattggctgactg

SEQ ID NO: 365307 - DNA, 55 bp, Artificial
  Synthetic oligonucleotide
cctctgagacaaacaaaaatacccgaatttgctcgtgtgagacgggtatgggaaa

SEQ ID NO: 365308 - DNA, 55 bp, Artificial
  Synthetic oligonucleotide
cctctgagccctccacctgatcatactagaacctattttgctggtgctataggtg

SEQ ID NO: 365309 - DNA, 60 bp, Artificial
  Synthetic oligonucleotide
cctctgatcaggaagccagaagtagaggttcaagctgcgcctttcacctgtcgtcagtgt

SEQ ID NO: 365310 - DNA, 54 bp, Artificial
  Synthetic oligonucleotide
cctctgatccatccccttggagagtttccaacctttataaaggacaagacggcc

SEQ ID NO: 365311 - DNA, 52 bp, Artificial
  Synthetic oligonucleotide
cctctgatctttagtaaggaaggaactattgatggcagcattcattggtcgg

SEQ ID NO: 365312 - DNA, 60 bp, Artificial
  Synthetic oligonucleotide
cctctgatgacaagatggatggtggctaatggttacgtaactgacagatgctcacctata

SEQ ID NO: 365313 - DNA, 58 bp, Artificial
  Synthetic oligonucleotide
cctctgatggcacggccgcccatactactccccaggactcaactgcgggtacgttgga

SEQ ID NO: 365314 - DNA, 55 bp, Artificial
  Synthetic oligonucleotide
cctctgatttgtagaaccgtatgaaactgccgtagtcccgcagtcgtacacgcgc

SEQ ID NO: 365315 - DNA, 55 bp, Artificial
  Synthetic oligonucleotide
cctctgcaagcagcaatacagaagcaggggcaaggacagtggacatatcagatat

SEQ ID NO: 365316 - DNA, 60 bp, Artificial
  Synthetic oligonucleotide
cctctgcaaggtgcttagagatgttcacggcgttgacccagagtcacaggagaaatctgg

SEQ ID NO: 365317 - DNA, 55 bp, Artificial
  Synthetic oligonucleotide
cctctgcacagaaatattatctggacaacacgtctcactatgtgaggtcgaggac

SEQ ID NO: 365318 - DNA, 55 bp, Artificial
  Synthetic oligonucleotide
cctctgcacatgttgcatttaacgccttggcatatgtgtcgttagctgtctgctg

SEQ ID NO: 365319 - DNA, 59 bp, Artificial
  Synthetic oligonucleotide
cctctgcactgaaccacaagggttctagtggtgaatcgttggtgtctactcttgacacc

SEQ ID NO: 365320 - DNA, 50 bp, Artificial
  Synthetic oligonucleotide
cctctgcagcatcatttgtgagcgcatgatcaacgcgctctgaatgtata

SEQ ID NO: 365321 - DNA, 55 bp, Artificial
  Synthetic oligonucleotide
cctctgcatctggtagtattgtagtaagtccaagtgttactaccgattatacgat

SEQ ID NO: 365322 - DNA, 55 bp, Artificial
  Synthetic oligonucleotide
cctctgccagggagaacaatgaagaagaggcggccaccacctccgaggtttcccc

SEQ ID NO: 365323 - DNA, 59 bp, Artificial
  Synthetic oligonucleotide
cctctgcgggagtagagccgtagcgatggggggagatgctaggagttggaggagaccga

SEQ ID NO: 365324 - DNA, 55 bp, Artificial
  Synthetic oligonucleotide
cctctgctactaggacagaccgacgccaccaaggctcttgggaagactagggcga

SEQ ID NO: 365325 - DNA, 58 bp, Artificial
  Synthetic oligonucleotide
cctctgctatgtctaatccacctgttctgggtggaactctccgattgggcccccgcgc

SEQ ID NO: 365326 - DNA, 60 bp, Artificial
  Synthetic oligonucleotide
cctctgctctgcatcgggaggccttagagtctcccgaacattgtacagctcaccatacag

SEQ ID NO: 365327 - DNA, 60 bp, Artificial
  Synthetic oligonucleotide
cctctgctctgtatcgggaggctctagagtctccggagcattgttcacctcaccatacgg

SEQ ID NO: 365328 - DNA, 55 bp, Artificial
  Synthetic oligonucleotide
cctctggacgtactgcgcacgtacacgagtccacaaaacactcatgcaacgtcca

SEQ ID NO: 365329 - DNA, 52 bp, Artificial
  Synthetic oligonucleotide
cctctggagttttataaactgcttgtttaccactttgcccccacttctaagt

SEQ ID NO: 365330 - DNA, 55 bp, Artificial
  Synthetic oligonucleotide
cctctggatatggatgaccgacatggtcaaacactatcccatcctccaaccggat

SEQ ID NO: 365331 - DNA, 55 bp, Artificial
  Synthetic oligonucleotide
cctctggatccagattatagaccctatactgcctttacggtaccatcagttaata

SEQ ID NO: 365332 - DNA, 60 bp, Artificial
  Synthetic oligonucleotide
cctctggatcgctatcaaccaggctgctcagtctcttgtcaaacagtgtgatctggtcat

SEQ ID NO: 365333 - DNA, 60 bp, Artificial
  Synthetic oligonucleotide
cctctggatgcatacagaaggtcattcttaccaaacgttgagatggcattaagctggcct

SEQ ID NO: 365334 - DNA, 55 bp, Artificial
  Synthetic oligonucleotide
cctctggcaatgcagtctgtaaagtcatggcctcagctgtatacttcttatcagc

SEQ ID NO: 365335 - DNA, 55 bp, Artificial
  Synthetic oligonucleotide
cctctggctagcggttagctccttttaatgtatggtattgaaaataccacagttt

SEQ ID NO: 365336 - DNA, 60 bp, Artificial
  Synthetic oligonucleotide
cctctggcttactgcctgtgttaagtgctgcggcgtaagcgtcgttggctgtctgctgtc

SEQ ID NO: 365337 - DNA, 55 bp, Artificial
  Synthetic oligonucleotide
cctctgggacgacttcggtatggacaatgtggtgaaagacgcactgcggctgcag

SEQ ID NO: 365338 - DNA, 59 bp, Artificial
  Synthetic oligonucleotide
cctctgggagtcacgaattaacgtggctactaggggtgatgcccaccgctagctgctac

SEQ ID NO: 365339 - DNA, 58 bp, Artificial
  Synthetic oligonucleotide
cctctgggattctttcacgatcaccagttggacccatcgttcggagccaactgaaaca

SEQ ID NO: 365340 - DNA, 55 bp, Artificial
  Synthetic oligonucleotide
cctctgggcactcggtcctgatctcttcgacagaagtctcaaccaggtcaccttg

SEQ ID NO: 365341 - DNA, 57 bp, Artificial
  Synthetic oligonucleotide
cctctgggcccccatgaattccttaaagtgctttagataatgggggtccacatcatc

SEQ ID NO: 365342 - DNA, 55 bp, Artificial
  Synthetic oligonucleotide
cctctggggactgcacatgccggcacatgccgtgcttgccgtcaattaacagtgg

SEQ ID NO: 365343 - DNA, 59 bp, Artificial
  Synthetic oligonucleotide
cctctggggtgccctgcacctcccaatggaactccatcgcccactggcttcacaccctc

SEQ ID NO: 365344 - DNA, 60 bp, Artificial
  Synthetic oligonucleotide
cctctgggtctcgcaaacatggtcatggcgcctctgggcttcgatcaggctcgcatggtt

SEQ ID NO: 365345 - DNA, 59 bp, Artificial
  Synthetic oligonucleotide
cctctgggtttgaaattacgtcttctggtactaccacaccagctgtgttggacatcaca

SEQ ID NO: 365346 - DNA, 57 bp, Artificial
  Synthetic oligonucleotide
cctctggtaacaccatatggggcacccaatgctccagtggttttgtcctggtcgggc

SEQ ID NO: 365347 - DNA, 60 bp, Artificial
  Synthetic oligonucleotide
cctctggtcgtccaaggtggtcagaaattgtccaaggctgctaagcgattgctcggcgct

SEQ ID NO: 365348 - DNA, 55 bp, Artificial
  Synthetic oligonucleotide
cctctggtctcaccgaatccctcaatgcgtcgcccgctgtttcggggttgagagc

SEQ ID NO: 365349 - DNA, 59 bp, Artificial
  Synthetic oligonucleotide
cctctggtttcaactaaagatgggtacattctaggtctgcatagtctaggcaatttcac

SEQ ID NO: 365350 - DNA, 58 bp, Artificial
  Synthetic oligonucleotide
cctctgtaacataggaccctgtcaaatatatgccacaggcctagaactctcaaacccc

SEQ ID NO: 365351 - DNA, 59 bp, Artificial
  Synthetic oligonucleotide
cctctgtaactactttcacttcgtagctcatttggactcaatcacttgctacgacgacc

SEQ ID NO: 365352 - DNA, 55 bp, Artificial
  Synthetic oligonucleotide
cctctgtaagtgcttaccccttcttacgtgcttcctcaggatgccgccagtgggg

SEQ ID NO: 365353 - DNA, 60 bp, Artificial
  Synthetic oligonucleotide
cctctgtagagaatactaaagactgtctaggcatgagattctcaggagggacatcgtcca

SEQ ID NO: 365354 - DNA, 54 bp, Artificial
  Synthetic oligonucleotide
cctctgtagcaagtctcaatgacatgacgcctgtcggaagaatggtgacagcta

SEQ ID NO: 365355 - DNA, 59 bp, Artificial
  Synthetic oligonucleotide
cctctgtatccttgttacgttgaagccataaagagacatggcgacgagttggctaagtg

SEQ ID NO: 365356 - DNA, 55 bp, Artificial
  Synthetic oligonucleotide
cctctgtccgaccttggtagaccgaaaggaccgactcaggcctgagatcacactc

SEQ ID NO: 365357 - DNA, 55 bp, Artificial
  Synthetic oligonucleotide
cctctgtctaaactgcttaagccttctaatgggcatcaccccaagatgtcccttc

SEQ ID NO: 365358 - DNA, 55 bp, Artificial
  Synthetic oligonucleotide
cctctgtgaacgtgagcgcaaagtgagcaggaaaagagttgtcgctgaattgcga

SEQ ID NO: 365359 - DNA, 50 bp, Artificial
  Synthetic oligonucleotide
cctctgtgatacctcgtggcaaccctgatcggaaccttgatactctacag

SEQ ID NO: 365360 - DNA, 55 bp, Artificial
  Synthetic oligonucleotide
cctctgtggaaataacatggcatacacctatttaccccaaaactggacaggactt

SEQ ID NO: 365361 - DNA, 57 bp, Artificial
  Synthetic oligonucleotide
cctctgtggtagccattacctccgtttcgacgctagccgccttcacatgggcgaacg

SEQ ID NO: 365362 - DNA, 55 bp, Artificial
  Synthetic oligonucleotide
cctctgtgtaattagacatttgctaatggtggactctatgatgtcctctatgtcc

SEQ ID NO: 365363 - DNA, 55 bp, Artificial
  Synthetic oligonucleotide
cctctgttaaagtgtgtatgattggaacaatctcaaaattacaaccaggagacac

SEQ ID NO: 365364 - DNA, 55 bp, Artificial
  Synthetic oligonucleotide
cctctgttacccaggggatttcaacgactatgaagaactgaaacacctgttgagc

SEQ ID NO: 365365 - DNA, 60 bp, Artificial
  Synthetic oligonucleotide
cctctgttatatcaccttccttatctatgtatgtgctgccttgtgtcttctgcttttgga

SEQ ID NO: 365366 - DNA, 55 bp, Artificial
  Synthetic oligonucleotide
cctcttaccgactttgcccagggctggggccctatcagttatgccaacggaagtg

SEQ ID NO: 365367 - DNA, 58 bp, Artificial
  Synthetic oligonucleotide
cctcttacgctaagcatctcgtaaagacgcgtgatgctttttattcgacaggtggaaa

SEQ ID NO: 365368 - DNA, 59 bp, Artificial
  Synthetic oligonucleotide
cctcttaggcctggccctcagttctactgggtggttttcaccagccattatggctgctg

SEQ ID NO: 365369 - DNA, 55 bp, Artificial
  Synthetic oligonucleotide
cctcttaggctaatacttctatgaagagatgctttggatagggtaacagcggcgg

SEQ ID NO: 365370 - DNA, 58 bp, Artificial
  Synthetic oligonucleotide
cctcttagtaactgtagtgttctctctcctcagaaagtccttgatattgttggccatt

SEQ ID NO: 365371 - DNA, 54 bp, Artificial
  Synthetic oligonucleotide
cctcttataactcctgcttggggttataactacgggtatcgactgcctaacgat

SEQ ID NO: 365372 - DNA, 55 bp, Artificial
  Synthetic oligonucleotide
cctcttatctgctgccgccagactatatcaaggagcgtgttttagggtcgacatc

SEQ ID NO: 365373 - DNA, 60 bp, Artificial
  Synthetic oligonucleotide
cctcttatgcagggggtggcatatcgcctgataaagtgggaacggcagttcgatcagttg

SEQ ID NO: 365374 - DNA, 60 bp, Artificial
  Synthetic oligonucleotide
cctcttcagtatcaagaggatcatctatcagatcagtaggatcatcagtttcagcatgga

SEQ ID NO: 365375 - DNA, 60 bp, Artificial
  Synthetic oligonucleotide
cctcttcatctggttaggggcaggctatggcatcacatgcatagcaggttacatggtgta

SEQ ID NO: 365376 - DNA, 55 bp, Artificial
  Synthetic oligonucleotide
cctcttccacaccatggatgacacagatacaacaaagcttgtgatcatggtatac

SEQ ID NO: 365377 - DNA, 55 bp, Artificial
  Synthetic oligonucleotide
cctcttccatgtgtctaatcagtgcgattgcgtcacccttgactgagcacgcgaa

SEQ ID NO: 365378 - DNA, 60 bp, Artificial
  Synthetic oligonucleotide
cctcttcccgccgcttctgctcccaattggacatgcttgtcaaattgacatacacaggtg

SEQ ID NO: 365379 - DNA, 59 bp, Artificial
  Synthetic oligonucleotide
cctcttcctggtgtgaagccaccaagcaatttcttggttgttgaagaatgactacactc

SEQ ID NO: 365380 - DNA, 59 bp, Artificial
  Synthetic oligonucleotide
cctcttctaccacttccttggaagggctggatacacggttcatgttcaatgtaatgcta

SEQ ID NO: 365381 - DNA, 60 bp, Artificial
  Synthetic oligonucleotide
cctcttctggagtaagataccagtaatgttagatggtcatctcatagccttcgactactc

SEQ ID NO: 365382 - DNA, 57 bp, Artificial
  Synthetic oligonucleotide
cctcttctttggttagagagcacttcggatatgtgaggaaatagttttttgcactta

SEQ ID NO: 365383 - DNA, 58 bp, Artificial
  Synthetic oligonucleotide
cctcttgaaggctgcagtgttccctttaagacacccattaattgacaaagcctcagtg

SEQ ID NO: 365384 - DNA, 55 bp, Artificial
  Synthetic oligonucleotide
cctcttgacggatcgaacaaagacttcccgatccctttcgagtaccttgctcgta

SEQ ID NO: 365385 - DNA, 60 bp, Artificial
  Synthetic oligonucleotide
cctcttgagagacttcagcttgattgcagcgaggactgtggaactgggactgagacgggg

SEQ ID NO: 365386 - DNA, 60 bp, Artificial
  Synthetic oligonucleotide
cctcttgatagaatagagaacatgattcatgttgaccttgtcctccagctcagtgtggct

SEQ ID NO: 365387 - DNA, 60 bp, Artificial
  Synthetic oligonucleotide
cctcttgatgcggactacatgggccttgtgcgaatccatcacactggccactggacctct

SEQ ID NO: 365388 - DNA, 55 bp, Artificial
  Synthetic oligonucleotide
cctcttgcagagagcccggtactttccagtagtcaaggagactccatggttacag

SEQ ID NO: 365389 - DNA, 60 bp, Artificial
  Synthetic oligonucleotide
cctcttgcagatctgccgtctatctggaactctccccattcggaggtatctccgtctttc

SEQ ID NO: 365390 - DNA, 55 bp, Artificial
  Synthetic oligonucleotide
cctcttgcatcgcctaggcaacggggctagcgcatgcgcgctagagtagggactt

SEQ ID NO: 365391 - DNA, 55 bp, Artificial
  Synthetic oligonucleotide
cctcttgcctatgatgcactatggttgctatgcttgtattacatacttcacacat

SEQ ID NO: 365392 - DNA, 55 bp, Artificial
  Synthetic oligonucleotide
cctcttgccttattaattggtagttgtggtttcttccggggcaatctcacagttg

SEQ ID NO: 365393 - DNA, 57 bp, Artificial
  Synthetic oligonucleotide
cctcttgcgataggggtggtgtagccatagttccaacaggcaccgtaaagtgtagaa

SEQ ID NO: 365394 - DNA, 57 bp, Artificial
  Synthetic oligonucleotide
cctcttgctagttttgcccagggctggggccctatcagtcacaccaacggaagtggc

SEQ ID NO: 365395 - DNA, 55 bp, Artificial
  Synthetic oligonucleotide
cctcttggatcatgcctgctgtgataggcaatgtttgaaagactatcctctcctt

SEQ ID NO: 365396 - DNA, 60 bp, Artificial
  Synthetic oligonucleotide
cctcttggctattctgtgttgcactttgattggtacctgagtacaatggactgttgaggg

SEQ ID NO: 365397 - DNA, 52 bp, Artificial
  Synthetic oligonucleotide
cctcttgggttaatggtggcttcggactttgttggaagatttggttcgccct

SEQ ID NO: 365398 - DNA, 55 bp, Artificial
  Synthetic oligonucleotide
cctcttggtaaccagaagctgtcgctgcagattaagcaacgttcctaacgttggc

SEQ ID NO: 365399 - DNA, 51 bp, Artificial
  Synthetic oligonucleotide
cctcttggtactttctcgcctgagtctacaaagcgagaaacctgcccctct

SEQ ID NO: 365400 - DNA, 55 bp, Artificial
  Synthetic oligonucleotide
cctcttggttccaacaaaggtggctcttccacttccccaaaatccacatccaatg

SEQ ID NO: 365401 - DNA, 55 bp, Artificial
  Synthetic oligonucleotide
cctcttgtcgtgaatctccacgatgacggaacctgcggcgtttatgggtacctgc

SEQ ID NO: 365402 - DNA, 57 bp, Artificial
  Synthetic oligonucleotide
cctcttgtggtggcccccctcattagctggttcccactcaattacgatcactgtacg

SEQ ID NO: 365403 - DNA, 53 bp, Artificial
  Synthetic oligonucleotide
cctcttgtgtgtggagaagcttattggttagtggataggagaactggggttaa

SEQ ID NO: 365404 - DNA, 57 bp, Artificial
  Synthetic oligonucleotide
cctctttatgaaaccagctaaactaagatacttccaccgaggccccacacatggcga

SEQ ID NO: 365405 - DNA, 56 bp, Artificial
  Synthetic oligonucleotide
cctctttcatgatattgacgtgtggaaacgtttgttgaagataggtgctggttttt

SEQ ID NO: 365406 - DNA, 55 bp, Artificial
  Synthetic oligonucleotide
cctctttctttcgtttagcctgacttcgagcaacgaaatgtggtgtaccactagc

SEQ ID NO: 365407 - DNA, 55 bp, Artificial
  Synthetic oligonucleotide
cctctttgaaaattcttgcgtgagctattcctgctggcaggaagaagagtcgccc

SEQ ID NO: 365408 - DNA, 55 bp, Artificial
  Synthetic oligonucleotide
cctctttgaaaggagtgaattgcttatcgccaagatcgcgagcaagtgtgagtga

SEQ ID NO: 365409 - DNA, 54 bp, Artificial
  Synthetic oligonucleotide
cctctttgcagttcggttccgaagtaacaggcctttgccgttggtttggctcca

SEQ ID NO: 365410 - DNA, 55 bp, Artificial
  Synthetic oligonucleotide
cctctttgcggttcttacgcactttagaggaacaatcttgtcccccacaacgaca

SEQ ID NO: 365411 - DNA, 60 bp, Artificial
  Synthetic oligonucleotide
cctctttggagtgtgccatgccagaggttctggtgattttgatctgggatagaattgctc

SEQ ID NO: 365412 - DNA, 54 bp, Artificial
  Synthetic oligonucleotide
cctctttggagtgtgccatgctggaagctccggtgattttgatccgggatagag

SEQ ID NO: 365413 - DNA, 60 bp, Artificial
  Synthetic oligonucleotide
cctctttggatctgcgtaaaaggaaatcaagtgaccatccaagccctgtatggaatagca

SEQ ID NO: 365414 - DNA, 55 bp, Artificial
  Synthetic oligonucleotide
cctctttgtagacaagtggtacactcaagaggatctgtgttccgttaatcttgtg

SEQ ID NO: 365415 - DNA, 60 bp, Artificial
  Synthetic oligonucleotide
cctctttgtatagttatacaagctccagtaggtttgtgccaatgatacgctctggtacat

SEQ ID NO: 365416 - DNA, 56 bp, Artificial
  Synthetic oligonucleotide
cctcttttcccttgcatgggcttgctaccacaatggttcctccaggtataccaacc

SEQ ID NO: 365417 - DNA, 57 bp, Artificial
  Synthetic oligonucleotide
cctcttttggaaagtgtgacaatgagatataagaagtttctgacaaatacataccgc

SEQ ID NO: 365418 - DNA, 55 bp, Artificial
  Synthetic oligonucleotide
cctctttttcacggatgttcttaaagttaagatggaggctgacgctttacctgct

SEQ ID NO: 365419 - DNA, 52 bp, Artificial
  Synthetic oligonucleotide
cctgaaaatttctacatccatcagagaaaagattttgacaagttggcagagt

SEQ ID NO: 365420 - DNA, 60 bp, Artificial
  Synthetic oligonucleotide
cctgaaacaagttcgattgaacccagttgtcgatggtggctggttctctcagcagtggag

SEQ ID NO: 365421 - DNA, 55 bp, Artificial
  Synthetic oligonucleotide
cctgaaacaatatgacagtgatgagccggagcccaaatcgctagcaagttggatc

SEQ ID NO: 365422 - DNA, 53 bp, Artificial
  Synthetic oligonucleotide
cctgaaaccgtacacggttttaggtgtatgctttcgattaaatacctacagct

SEQ ID NO: 365423 - DNA, 54 bp, Artificial
  Synthetic oligonucleotide
cctgaaacgacgacgaaacttaaacatatccccggccaggtactatagaatcca

SEQ ID NO: 365424 - DNA, 60 bp, Artificial
  Synthetic oligonucleotide
cctgaaacgcatgggataagggctcgaaagcattgtaaaggtgcagtatggacctgctcc

SEQ ID NO: 365425 - DNA, 56 bp, Artificial
  Synthetic oligonucleotide
cctgaaactccaatccagaggcaacaactttccgaagcttgggaaaactctcaatg

SEQ ID NO: 365426 - DNA, 57 bp, Artificial
  Synthetic oligonucleotide
cctgaaactccttgtaacaagtgttactgtaaacgctgtagctatcattgtctagtt

SEQ ID NO: 365427 - DNA, 58 bp, Artificial
  Synthetic oligonucleotide
cctgaaactgcgaggtcgatcgtcctagacccggatgcagtactaaagaacggtgcta

SEQ ID NO: 365428 - DNA, 54 bp, Artificial
  Synthetic oligonucleotide
cctgaaagaaacgaacaagggcaaacgctttggagtaaaacgaatgatgcaggg

SEQ ID NO: 365429 - DNA, 60 bp, Artificial
  Synthetic oligonucleotide
cctgaaagatctattcggctcctcaagacaggtgaatgcaaaatagcaggagtattatcc

SEQ ID NO: 365430 - DNA, 60 bp, Artificial
  Synthetic oligonucleotide
cctgaaagatgatgtctctactattaagtcagaaataacatatgagaagaacaacactgg

SEQ ID NO: 365431 - DNA, 54 bp, Artificial
  Synthetic oligonucleotide
cctgaaagcgttaccagttacgcgtggcaaacctccaccaacccaagcgtcttc

SEQ ID NO: 365432 - DNA, 59 bp, Artificial
  Synthetic oligonucleotide
cctgaaaggaatgaacaaggacaaaccctctggagcaaaacaaacgatgctggatcaga

SEQ ID NO: 365433 - DNA, 55 bp, Artificial
  Synthetic oligonucleotide
cctgaaaggccacctcaggtgctatatgatccatctattgatgcaacagcccaga

SEQ ID NO: 365434 - DNA, 55 bp, Artificial
  Synthetic oligonucleotide
cctgaaaggctagatatttgtgttttgtctttatatacttgggcaccaagtttgg

SEQ ID NO: 365435 - DNA, 57 bp, Artificial
  Synthetic oligonucleotide
cctgaaagtgttctacccagacgttgcgaatgctgagttaccacgcatgctggtaga

SEQ ID NO: 365436 - DNA, 60 bp, Artificial
  Synthetic oligonucleotide
cctgaaatacaagcatgggcgagcgtgaaatatgagtgggcgaaacagagggctatatac

SEQ ID NO: 365437 - DNA, 55 bp, Artificial
  Synthetic oligonucleotide
cctgaaatacttcaacgaatcaacgagaaagaaaatcgaaaagataagacctctc

SEQ ID NO: 365438 - DNA, 54 bp, Artificial
  Synthetic oligonucleotide
cctgaaatcaatggaattgcctgatgaaattaagacagatattgaacaacaact

SEQ ID NO: 365439 - DNA, 59 bp, Artificial
  Synthetic oligonucleotide
cctgaaatgtgttcagttcttataaaatgtctgtccaaagctaagaatgaagaacatgc

SEQ ID NO: 365440 - DNA, 60 bp, Artificial
  Synthetic oligonucleotide
cctgaaatgttgatcgcagaatcacaattgcttacatagtctaaaactggatgcttgttc

SEQ ID NO: 365441 - DNA, 58 bp, Artificial
  Synthetic oligonucleotide
cctgaaatttgcagacttaacccacacaaagtatatatctatggtgataacctcgccg

SEQ ID NO: 365442 - DNA, 56 bp, Artificial
  Synthetic oligonucleotide
cctgaacaattcagaacgttcgagagagcttttgtctgctcccggtgccccgtggt

SEQ ID NO: 365443 - DNA, 55 bp, Artificial
  Synthetic oligonucleotide
cctgaacaccagatcacctgggaccccatcgatggacgcgttgtcagctcgcctc

SEQ ID NO: 365444 - DNA, 55 bp, Artificial
  Synthetic oligonucleotide
cctgaacatgaaacatatcttgatcggtttggtgaactattcagtgaactaggcc

SEQ ID NO: 365445 - DNA, 56 bp, Artificial
  Synthetic oligonucleotide
cctgaacattgtcagacaagcattccgtaacgacataagacgttacccactaggaa

SEQ ID NO: 365446 - DNA, 57 bp, Artificial
  Synthetic oligonucleotide
cctgaaccgtgcttcgttatccgcaaccagcggctaacgtatgtacactgggccctc

SEQ ID NO: 365447 - DNA, 50 bp, Artificial
  Synthetic oligonucleotide
cctgaaccgttaaggttattagagcctacacaattagcagtataagagtc

SEQ ID NO: 365448 - DNA, 57 bp, Artificial
  Synthetic oligonucleotide
cctgaacctatttctcttgaggatagtgtttttggcatagagggcctagaagcttta

SEQ ID NO: 365449 - DNA, 56 bp, Artificial
  Synthetic oligonucleotide
cctgaacctcagcggaaaacctacccatcgtactatgatgtacaactttcccacta

SEQ ID NO: 365450 - DNA, 59 bp, Artificial
  Synthetic oligonucleotide
cctgaacgactcgtggttgagtaggagaatgatccagagaacaactggtttcttcagac

SEQ ID NO: 365451 - DNA, 55 bp, Artificial
  Synthetic oligonucleotide
cctgaacgagcgtgatgaactactccaggaagtggatgagcttaagcgtgagctg

SEQ ID NO: 365452 - DNA, 55 bp, Artificial
  Synthetic oligonucleotide
cctgaacgccatgcttgagactgctcgtcgtaacatggactatgaggatacagcc

SEQ ID NO: 365453 - DNA, 60 bp, Artificial
  Synthetic oligonucleotide
cctgaacgtggcgagaacggctacgaacattggcagttgatctgctgtacacgcaagaaa

SEQ ID NO: 365454 - DNA, 55 bp, Artificial
  Synthetic oligonucleotide
cctgaacgttagttgcttacttcaggctggtttaccaaagtcttgcttgaaatat

SEQ ID NO: 365455 - DNA, 60 bp, Artificial
  Synthetic oligonucleotide
cctgaactagcaaagaacctgatcacagaatacggccgatttgacccaggagccatgaac

SEQ ID NO: 365456 - DNA, 53 bp, Artificial
  Synthetic oligonucleotide
cctgaactataccttggaaaatagaggacttcagaccccaccggagggagttc

SEQ ID NO: 365457 - DNA, 55 bp, Artificial
  Synthetic oligonucleotide
cctgaactattagccactaaagatgaacaactagctgatatcctatggaacaacg

SEQ ID NO: 365458 - DNA, 55 bp, Artificial
  Synthetic oligonucleotide
cctgaactcaatccttgagtctactcctgacactaaactgtttggagtcgagact

SEQ ID NO: 365459 - DNA, 60 bp, Artificial
  Synthetic oligonucleotide
cctgaactcatcatcagttaaacttgtcttgagtgagaaggatgtggcgaaaggagcagg

SEQ ID NO: 365460 - DNA, 55 bp, Artificial
  Synthetic oligonucleotide
cctgaactgagaagacaaattcaagcctgtatcaggggaagcttaacaatccgac

SEQ ID NO: 365461 - DNA, 60 bp, Artificial
  Synthetic oligonucleotide
cctgaacttattgacgaaacattcaccatgggcaatgtcgcagttttgtgtgaccgaatc

SEQ ID NO: 365462 - DNA, 60 bp, Artificial
  Synthetic oligonucleotide
cctgaacttggtcccattagtgttactacttgtgagctctacgagctcgtggaggctatg

SEQ ID NO: 365463 - DNA, 59 bp, Artificial
  Synthetic oligonucleotide
cctgaagacggaggtcacaaaccctgcagtcctgcgcaaactgtgcattgaagctagaa

SEQ ID NO: 365464 - DNA, 54 bp, Artificial
  Synthetic oligonucleotide
cctgaagactggaatttgactcattggaaacccgtacgtgtggctaaaaccacc

SEQ ID NO: 365465 - DNA, 55 bp, Artificial
  Synthetic oligonucleotide
cctgaagagaccctccatcaagtaatgacacaacaaccaggggactcttcattcc

SEQ ID NO: 365466 - DNA, 55 bp, Artificial
  Synthetic oligonucleotide
cctgaagaggtactttagagcagatgagcaataccccttcttggtgcaccccgtc

SEQ ID NO: 365467 - DNA, 55 bp, Artificial
  Synthetic oligonucleotide
cctgaagatatgaccaccgcttgttcaacttatcttagaccgtgtcgcaagatga

SEQ ID NO: 365468 - DNA, 58 bp, Artificial
  Synthetic oligonucleotide
cctgaagccagacaggccataaggtcgctcacagagcggctttatatcgggggtcccc

SEQ ID NO: 365469 - DNA, 54 bp, Artificial
  Synthetic oligonucleotide
cctgaaggacggaaaactctgggttggtgatcagtactttaggatacccagaac

SEQ ID NO: 365470 - DNA, 51 bp, Artificial
  Synthetic oligonucleotide
cctgaagggcctagacggtaggccaatccgcctgcagggtaagaaccatgc

SEQ ID NO: 365471 - DNA, 53 bp, Artificial
  Synthetic oligonucleotide
cctgaaggtacaaacggggtaggggcgggctgtactggctggtttgaggtaga

SEQ ID NO: 365472 - DNA, 55 bp, Artificial
  Synthetic oligonucleotide
cctgaaggtggtcagactcatcaaggctctctatcaaagcagtaagtagtacatg

SEQ ID NO: 365473 - DNA, 57 bp, Artificial
  Synthetic oligonucleotide
cctgaagtaattaaatactgtgaaggtaacaaatggatcataccagcggaatgtaag

SEQ ID NO: 365474 - DNA, 51 bp, Artificial
  Synthetic oligonucleotide
cctgaagtacttccggaaattgaagataacctttccgacagtatgtcaatc

SEQ ID NO: 365475 - DNA, 55 bp, Artificial
  Synthetic oligonucleotide
cctgaagtcagaagaaccatgtccatggtccatttgggcgcggtcaaaatattgc

SEQ ID NO: 365476 - DNA, 55 bp, Artificial
  Synthetic oligonucleotide
cctgaagtcctctggaaccacccgatccagcgagtcatacacaatgagctggagc

SEQ ID NO: 365477 - DNA, 55 bp, Artificial
  Synthetic oligonucleotide
cctgaagtcgggacaccggtccaaacggcgcttgtaggtgcgttcgatctaccga

SEQ ID NO: 365478 - DNA, 55 bp, Artificial
  Synthetic oligonucleotide
cctgaagtcgttgacttgtacaacgtcgtcacacgctatgcgtatgagactccgc

SEQ ID NO: 365479 - DNA, 55 bp, Artificial
  Synthetic oligonucleotide
cctgaagtctatagatcttggaggattgcctgatgaagatttgataattggcctc

SEQ ID NO: 365480 - DNA, 60 bp, Artificial
  Synthetic oligonucleotide
cctgaagtctgcttgaaatgggatttgatggatgaggattaccagggtcgtttatgcaac

SEQ ID NO: 365481 - DNA, 55 bp, Artificial
  Synthetic oligonucleotide
cctgaataaaaaactggttgtccattataatcccatttccaacctctgttcacaa

SEQ ID NO: 365482 - DNA, 60 bp, Artificial
  Synthetic oligonucleotide
cctgaatacattcaagatccgcccagattgcggagtcaatcgatggtaaactactaagtc

SEQ ID NO: 365483 - DNA, 55 bp, Artificial
  Synthetic oligonucleotide
cctgaatagcctgaatgcaaatctgagatacttcggagcttgtcagaagctcacg

SEQ ID NO: 365484 - DNA, 54 bp, Artificial
  Synthetic oligonucleotide
cctgaatattcagaatttaaggcaccgactaaaaaccacatagttcttgggaac

SEQ ID NO: 365485 - DNA, 58 bp, Artificial
  Synthetic oligonucleotide
cctgaatattgtagtgactcagatgcaactgctgtcgacaaaccaacaagaccagacg

SEQ ID NO: 365486 - DNA, 55 bp, Artificial
  Synthetic oligonucleotide
cctgaatatttagattcgaaggatgcaactgccgtggataagcccacacagcccg

SEQ ID NO: 365487 - DNA, 55 bp, Artificial
  Synthetic oligonucleotide
cctgaatcacgggagataaacatgttatatgcatttacgctgggcaggaaactgc

SEQ ID NO: 365488 - DNA, 55 bp, Artificial
  Synthetic oligonucleotide
cctgaatcctggacccgatttcctgcatgtttctatgcttggcatgaatgacttt

SEQ ID NO: 365489 - DNA, 60 bp, Artificial
  Synthetic oligonucleotide
cctgaatctactcccaataggtgttgggcatatatgtctataaatggcgtggaatcttgt

SEQ ID NO: 365490 - DNA, 60 bp, Artificial
  Synthetic oligonucleotide
cctgaatctgatgattgattcatccgacttggtgcccaacttcatgatgagagacccatc

SEQ ID NO: 365491 - DNA, 60 bp, Artificial
  Synthetic oligonucleotide
cctgaatgaagaccactggctgagccgagagaattcaggaggtggagtagaaggctcagg

SEQ ID NO: 365492 - DNA, 59 bp, Artificial
  Synthetic oligonucleotide
cctgaatgacaattacggaataaccagagaacaagctttcaatttattaagatcagatc

SEQ ID NO: 365493 - DNA, 60 bp, Artificial
  Synthetic oligonucleotide
cctgaatgacaattatgggataactagagagcaagcattcaatttgttaaggtcagaccc

SEQ ID NO: 365494 - DNA, 52 bp, Artificial
  Synthetic oligonucleotide
cctgaatgaggagtggcgcgagatgtttatctgaatggctacagttgtgagc

SEQ ID NO: 365495 - DNA, 60 bp, Artificial
  Synthetic oligonucleotide
cctgaatgatgccacatatcagaggacaagggcacttgtacgtactgggatggatcccag

SEQ ID NO: 365496 - DNA, 52 bp, Artificial
  Synthetic oligonucleotide
cctgaatgcggctaatctcaaccccggagccactgggtggtgaaccaaccac

SEQ ID NO: 365497 - DNA, 60 bp, Artificial
  Synthetic oligonucleotide
cctgaatggttcaggaatgttttgagcatcgcccctataatgttctcaaacaaaatggca

SEQ ID NO: 365498 - DNA, 55 bp, Artificial
  Synthetic oligonucleotide
cctgaatgtgatgtaccacaatgcgaaagtgaaccgccccggttttcctggagag

SEQ ID NO: 365499 - DNA, 60 bp, Artificial
  Synthetic oligonucleotide
cctgaatgtggctaaccttaaccctgcagccagtgcgcacaaaccagtgtgtagctggtc

SEQ ID NO: 365500 - DNA, 60 bp, Artificial
  Synthetic oligonucleotide
cctgaatgtgtcgcatgccaccttattgcaagtatcgatcggatgagtatccggtatata

SEQ ID NO: 365501 - DNA, 59 bp, Artificial
  Synthetic oligonucleotide
cctgaatgttcggatggaaatgtgctgaccgagttggggacaccaagtcgaagaatctg

SEQ ID NO: 365502 - DNA, 59 bp, Artificial
  Synthetic oligonucleotide
cctgaatgtttggatggaaatgtgttgatctacttggggataccaggtcgaagaatctg

SEQ ID NO: 365503 - DNA, 60 bp, Artificial
  Synthetic oligonucleotide
cctgaattaaggtcattttcaagttggatccagaatgagttcaacaaggcatgcgagctg

SEQ ID NO: 365504 - DNA, 51 bp, Artificial
  Synthetic oligonucleotide
cctgaattagtgcctaaagttgaccaaacgcatccaataccattgggtaga

SEQ ID NO: 365505 - DNA, 60 bp, Artificial
  Synthetic oligonucleotide
cctgaattatattcagatcctctaggtgttcgttccatcgatagctataaacacatgatt

SEQ ID NO: 365506 - DNA, 55 bp, Artificial
  Synthetic oligonucleotide
cctgaattcaggacggaccttttagcggaaggtgcgttggatgcaccaagtcgcc

SEQ ID NO: 365507 - DNA, 56 bp, Artificial
  Synthetic oligonucleotide
cctgaattccactttgactagcctgaacatgtagtagtcgaaggggtaatggtacg

SEQ ID NO: 365508 - DNA, 60 bp, Artificial
  Synthetic oligonucleotide
cctgaattgaggaccttggcatacgtgtcgttggcagattgctgacctcctctagcagat

SEQ ID NO: 365509 - DNA, 52 bp, Artificial
  Synthetic oligonucleotide
cctgacaaacacagtttgtagagtaaattttcgtaggggttcctacttccag

SEQ ID NO: 365510 - DNA, 55 bp, Artificial
  Synthetic oligonucleotide
cctgacaacatatgacacgaaacgacttggaaatacacaactctgcgtgcaacct

SEQ ID NO: 365511 - DNA, 60 bp, Artificial
  Synthetic oligonucleotide
cctgacaagctctacaacatgatgtggacaatagcccagaagctgaatggcgtgagctgt

SEQ ID NO: 365512 - DNA, 55 bp, Artificial
  Synthetic oligonucleotide
cctgacaaggaagtgtggacagtaaatgatatccaaaaattagtaggaaagttaa

SEQ ID NO: 365513 - DNA, 55 bp, Artificial
  Synthetic oligonucleotide
cctgacaaggtccccgccatgttgcggcactggatggatgaaacctccttctctg

SEQ ID NO: 365514 - DNA, 60 bp, Artificial
  Synthetic oligonucleotide
cctgacaatgactcctgctgacaagtcaaaggagttcaacaatgtgacatgggaaaacgt

SEQ ID NO: 365515 - DNA, 53 bp, Artificial
  Synthetic oligonucleotide
cctgacacaagaacctgcaagatttttgcttttcatggctggaactacattaa

SEQ ID NO: 365516 - DNA, 55 bp, Artificial
  Synthetic oligonucleotide
cctgacacagatgccactgcagtagataaacccaccagacctgatgtttccgtga

SEQ ID NO: 365517 - DNA, 59 bp, Artificial
  Synthetic oligonucleotide
cctgacacgtatgggtcaatgtggatggtcaccatttatgggaggtttccataaacgca

SEQ ID NO: 365518 - DNA, 58 bp, Artificial
  Synthetic oligonucleotide
cctgacactcctaccaacgttgagcgccacttgagtagagctgtcttgattatgcaat

SEQ ID NO: 365519 - DNA, 55 bp, Artificial
  Synthetic oligonucleotide
cctgacactctttcgtcggtcacaacggatgaaatcaacagaatcttcagaccaa

SEQ ID NO: 365520 - DNA, 55 bp, Artificial
  Synthetic oligonucleotide
cctgacagactgatggctcaccgagggattcagcggtatgattgcatcacaccac

SEQ ID NO: 365521 - DNA, 58 bp, Artificial
  Synthetic oligonucleotide
cctgacagtattccaatagtaagagtggacgcatcattaataaataacgttgcgtttc

SEQ ID NO: 365522 - DNA, 60 bp, Artificial
  Synthetic oligonucleotide
cctgacataatccccaagattgagcacagcactgttgcagacaatatacttaagtatggt

SEQ ID NO: 365523 - DNA, 54 bp, Artificial
  Synthetic oligonucleotide
cctgacatacctccctcacacgcgttaccgcccctacggtcccccacacacgtg

SEQ ID NO: 365524 - DNA, 60 bp, Artificial
  Synthetic oligonucleotide
cctgacatctagctctaagtacacttatcgacggaagctcacaaacccacttgaggagac

SEQ ID NO: 365525 - DNA, 55 bp, Artificial
  Synthetic oligonucleotide
cctgacatgaaccactttacctacagtggtggtagttgtcaagccaattcgcgcc

SEQ ID NO: 365526 - DNA, 55 bp, Artificial
  Synthetic oligonucleotide
cctgacatgtagtgatgtcttcctaacgatcttgcccattgggtctttcctgtcc

SEQ ID NO: 365527 - DNA, 59 bp, Artificial
  Synthetic oligonucleotide
cctgacatgttcaaaattgacgattggttgcaggatagagatggttccaagtttggtcg

SEQ ID NO: 365528 - DNA, 55 bp, Artificial
  Synthetic oligonucleotide
cctgacattctcagtggggctcaatagctatgctatggggtcacagctcccttgc

SEQ ID NO: 365529 - DNA, 55 bp, Artificial
  Synthetic oligonucleotide
cctgacattgtcccagatattaatacaggtgaactagaggtcataactgaacctg

SEQ ID NO: 365530 - DNA, 55 bp, Artificial
  Synthetic oligonucleotide
cctgaccaataaactcggctcgccagtcctatcgatatccgcgtctcgcgtgtgg

SEQ ID NO: 365531 - DNA, 50 bp, Artificial
  Synthetic oligonucleotide
cctgaccaatgaggtaggggtacaccttgccacacgcaattgaatcagcg

SEQ ID NO: 365532 - DNA, 55 bp, Artificial
  Synthetic oligonucleotide
cctgaccacctccttgctactattgtgttcccaccagagattcttgctggtgctc

SEQ ID NO: 365533 - DNA, 55 bp, Artificial
  Synthetic oligonucleotide
cctgaccagaagacgtgtatggatgcagagaacgcagttatcggaggcaactgga

SEQ ID NO: 365534 - DNA, 55 bp, Artificial
  Synthetic oligonucleotide
cctgaccagacccaaaatgttcaattccagaatggtaggtgtacaattgacggtc

SEQ ID NO: 365535 - DNA, 60 bp, Artificial
  Synthetic oligonucleotide
cctgaccagggtcatgcatctctgttacgcttctttgcctatttctctggagaggtgatt

SEQ ID NO: 365536 - DNA, 53 bp, Artificial
  Synthetic oligonucleotide
cctgaccaggttaagccccctgaacccaaagatccttatgctgacaaaaactt

SEQ ID NO: 365537 - DNA, 58 bp, Artificial
  Synthetic oligonucleotide
cctgacccgagtgatattcttaagatatacaatgctggagactatgtaatatctattc

SEQ ID NO: 365538 - DNA, 55 bp, Artificial
  Synthetic oligonucleotide
cctgaccctaacaggttttcttttggtgacacaacagtacatgatcctacaaagg

SEQ ID NO: 365539 - DNA, 54 bp, Artificial
  Synthetic oligonucleotide
cctgaccgtcactatgtcgttgtccgacaggaagggcctgtttcgtagttccgt

SEQ ID NO: 365540 - DNA, 58 bp, Artificial
  Synthetic oligonucleotide
cctgacctcggataaagcagtggggtatataacatctgcagtgccctaccggtccgta

SEQ ID NO: 365541 - DNA, 55 bp, Artificial
  Synthetic oligonucleotide
cctgaccttgcccaagactgctggttatgcttacaaataggaaatcccgtacccc

SEQ ID NO: 365542 - DNA, 60 bp, Artificial
  Synthetic oligonucleotide
cctgacgaggctggatttggctcgtttggctcctgagattccgggtgtcgctcatgtgta

SEQ ID NO: 365543 - DNA, 60 bp, Artificial
  Synthetic oligonucleotide
cctgacgcactcaatcacggaattccactcagtgaaaccgtctgttggcgattcggctca

SEQ ID NO: 365544 - DNA, 60 bp, Artificial
  Synthetic oligonucleotide
cctgacgcatatgcatataccacaccaccatcgcctaatatggctaatgaaaaccattta

SEQ ID NO: 365545 - DNA, 60 bp, Artificial
  Synthetic oligonucleotide
cctgacgcctgtttcttcgatccctgtgctacaggcagctcgtgtgaaacagagccatgg

SEQ ID NO: 365546 - DNA, 57 bp, Artificial
  Synthetic oligonucleotide
cctgacgcgattgacctggaaccgattacagaagatgtcccaggttgatttccggga

SEQ ID NO: 365547 - DNA, 59 bp, Artificial
  Synthetic oligonucleotide
cctgacgctccgcctacgcaaatacagctgcctgaggttgttgacttgtataacgttgt

SEQ ID NO: 365548 - DNA, 55 bp, Artificial
  Synthetic oligonucleotide
cctgacggaaaggatgtgtcactgttttgccaaatggtctccagcgtagacttcg

SEQ ID NO: 365549 - DNA, 55 bp, Artificial
  Synthetic oligonucleotide
cctgacggcgttttccagcttggaggagccggtcgctcttcgttcacctctcgtc

SEQ ID NO: 365550 - DNA, 55 bp, Artificial
  Synthetic oligonucleotide
cctgacggggagtcataccctcgggagcaacttcccatacaccagtctcctggtt

SEQ ID NO: 365551 - DNA, 58 bp, Artificial
  Synthetic oligonucleotide
cctgacgtagcagttaaggctggcccgataactggtgatagtccgataaacgagcgga

SEQ ID NO: 365552 - DNA, 56 bp, Artificial
  Synthetic oligonucleotide
cctgacgtatgggagacctatacacgggctagaaacaccagaccctttagagctct

SEQ ID NO: 365553 - DNA, 60 bp, Artificial
  Synthetic oligonucleotide
cctgacgtcactctagcatttgagcgggacttggcatcagtagaggctgcacccaatgaa

SEQ ID NO: 365554 - DNA, 56 bp, Artificial
  Synthetic oligonucleotide
cctgacgtgatgcaaaaagtacatgaaagaattgaaaacgcaaaacaaggaatacg

SEQ ID NO: 365555 - DNA, 53 bp, Artificial
  Synthetic oligonucleotide
cctgacgtggatctaaaccgtggtaaagaccctccgcaaagtgtaccccgaga

SEQ ID NO: 365556 - DNA, 59 bp, Artificial
  Synthetic oligonucleotide
cctgacgtggccgcgtgccgattttacacgctagaatcagtcatgtggagcaaggaatc

SEQ ID NO: 365557 - DNA, 59 bp, Artificial
  Synthetic oligonucleotide
cctgacgttcttcgcgaattatccattttgaaatccactgatcgcatcttcgttgtacc

SEQ ID NO: 365558 - DNA, 55 bp, Artificial
  Synthetic oligonucleotide
cctgacgttttcagatgcgcagagtgccatcaaccagtgcagaacttttagaggt

SEQ ID NO: 365559 - DNA, 55 bp, Artificial
  Synthetic oligonucleotide
cctgactaactcgttcaactgtcccattgatatcgtgatattggaccccgctctc

SEQ ID NO: 365560 - DNA, 55 bp, Artificial
  Synthetic oligonucleotide
cctgactacaatccaccattgctggaggtttggaagtccccgacgtacgaccctc

SEQ ID NO: 365561 - DNA, 60 bp, Artificial
  Synthetic oligonucleotide
cctgactatgcatcgctccggtccattgtagcatcctcaggaacattggaattcacagca

SEQ ID NO: 365562 - DNA, 55 bp, Artificial
  Synthetic oligonucleotide
cctgactatgttagaggacaaggcaacaacagaagagcttcagactatgcaaagg

SEQ ID NO: 365563 - DNA, 55 bp, Artificial
  Synthetic oligonucleotide
cctgactcaaaatatggctcgtcagttggacattgcgctgaacgattacctattg

SEQ ID NO: 365564 - DNA, 55 bp, Artificial
  Synthetic oligonucleotide
cctgactcaccggtccacgagtccactcgtataggactaacaccatctccacctc

SEQ ID NO: 365565 - DNA, 55 bp, Artificial
  Synthetic oligonucleotide
cctgactcgaaaagcgattactggtggtttccacccgatgcagacctcacaccag

SEQ ID NO: 365566 - DNA, 57 bp, Artificial
  Synthetic oligonucleotide
cctgactggtgaaattaatgacttggaatttaggtcagaaaagttgcataacactac

SEQ ID NO: 365567 - DNA, 58 bp, Artificial
  Synthetic oligonucleotide
cctgactggttaactccttcttttcctgatattcatttacatcaagatttaatacaca

SEQ ID NO: 365568 - DNA, 55 bp, Artificial
  Synthetic oligonucleotide
cctgacttaattgcagagcttttatgccttatgcgtatgtggggacatccttcct

SEQ ID NO: 365569 - DNA, 55 bp, Artificial
  Synthetic oligonucleotide
cctgacttcctcacagaggctatagttcactctgtgttcatacttagttattata

SEQ ID NO: 365570 - DNA, 52 bp, Artificial
  Synthetic oligonucleotide
cctgactttatgagccagagcatgcttaacaattttcgctctttcatcctgg

SEQ ID NO: 365571 - DNA, 55 bp, Artificial
  Synthetic oligonucleotide
cctgagaagggaggtcgtaagccagctcgccttattgtgttccccgatctgggtg

SEQ ID NO: 365572 - DNA, 60 bp, Artificial
  Synthetic oligonucleotide
cctgagaagtggtcgttcgcacaagcttgcgcgtcccttgacaagaccacttctagcggc

SEQ ID NO: 365573 - DNA, 55 bp, Artificial
  Synthetic oligonucleotide
cctgagaatcttcgtttgcttcttgagactgttcgagcgagattgataccgatgc

SEQ ID NO: 365574 - DNA, 55 bp, Artificial
  Synthetic oligonucleotide
cctgagaatgaggcgaaggactttacaaagagggttcgtgatcttgtgggttcaa

SEQ ID NO: 365575 - DNA, 60 bp, Artificial
  Synthetic oligonucleotide
cctgagagaccagataagataacacttgctgagtttagacaattgtctgcttagctccta

SEQ ID NO: 365576 - DNA, 57 bp, Artificial
  Synthetic oligonucleotide
cctgagagagcagagatcctggatctttgggtatataacactcagggattcctcccc

SEQ ID NO: 365577 - DNA, 59 bp, Artificial
  Synthetic oligonucleotide
cctgagagccttcgcgcaggctatgaccaggtactccgcccctcctggtgaccctccca

SEQ ID NO: 365578 - DNA, 56 bp, Artificial
  Synthetic oligonucleotide
cctgagaggcctcttcctaggtccggagtctacctccatctggtctgttcgggccc

SEQ ID NO: 365579 - DNA, 55 bp, Artificial
  Synthetic oligonucleotide
cctgagagtgccaccaacatgaccctagataacatccggttccgccagggacccc

SEQ ID NO: 365580 - DNA, 57 bp, Artificial
  Synthetic oligonucleotide
cctgagagtgtttctcttatgtgggtctaagggatccgggacttaggctcgcagttg

SEQ ID NO: 365581 - DNA, 55 bp, Artificial
  Synthetic oligonucleotide
cctgagatgtaccatgcttacatggatgatcccctatcgccgatgttgaacggga

SEQ ID NO: 365582 - DNA, 50 bp, Artificial
  Synthetic oligonucleotide
cctgagatgttcaagccgctctcatctttagtcactatttgaagacagtc

SEQ ID NO: 365583 - DNA, 60 bp, Artificial
  Synthetic oligonucleotide
cctgagattataagtagactgcaacaacattgaaaccccgcgacacaaatctgtctcgcg

SEQ ID NO: 365584 - DNA, 55 bp, Artificial
  Synthetic oligonucleotide
cctgagattgatcctaatcaaccatgggatagttcagagaatcctcttgaggatc

SEQ ID NO: 365585 - DNA, 55 bp, Artificial
  Synthetic oligonucleotide
cctgagcaaattcatgaaagttgggtttgccagattctttggccaacaggttgag

SEQ ID NO: 365586 - DNA, 54 bp, Artificial
  Synthetic oligonucleotide
cctgagcaagtatatacagacgtgggagggttagtgtttaaactagggaaggtg

SEQ ID NO: 365587 - DNA, 57 bp, Artificial
  Synthetic oligonucleotide
cctgagcaagtcctatgcaaacaacaaagagaaagaagtcctcgtactatggggtgt

SEQ ID NO: 365588 - DNA, 55 bp, Artificial
  Synthetic oligonucleotide
cctgagcataatcctatatcaccaaggactctaaatgcctgggtcaaggtggtag

SEQ ID NO: 365589 - DNA, 60 bp, Artificial
  Synthetic oligonucleotide
cctgagcattgctcacctcaccatactgcactcagagatgcccctatcttatcgagactt

SEQ ID NO: 365590 - DNA, 60 bp, Artificial
  Synthetic oligonucleotide
cctgagccaagcgcgtttgatccaccagcttcaggagaggatatgagattaatctacccc

SEQ ID NO: 365591 - DNA, 54 bp, Artificial
  Synthetic oligonucleotide
cctgagccactcccctattctaagtcgaaggagaagacctcaggggttaaagga

SEQ ID NO: 365592 - DNA, 50 bp, Artificial
  Synthetic oligonucleotide
cctgagcccatgtcaccggttctatatttttgtccgcatctctagattcc

SEQ ID NO: 365593 - DNA, 55 bp, Artificial
  Synthetic oligonucleotide
cctgagccgggcaagcagagaagtgctgacgacaacagattggctttcaccctcc

SEQ ID NO: 365594 - DNA, 50 bp, Artificial
  Synthetic oligonucleotide
cctgagcctataatacacacggagagggttctaggcctctcacaagtgtt

SEQ ID NO: 365595 - DNA, 56 bp, Artificial
  Synthetic oligonucleotide
cctgagcctttctccccccattgtcaacccattccatcgtccggcccagactccgc

SEQ ID NO: 365596 - DNA, 55 bp, Artificial
  Synthetic oligonucleotide
cctgagcgaccacgttgaaatatgttaacgcctaacggcgaatccctatccttgg

SEQ ID NO: 365597 - DNA, 60 bp, Artificial
  Synthetic oligonucleotide
cctgagcgccacaatggcacgggccaaagaagtcaaagatgccgagatcttcaaacttct

SEQ ID NO: 365598 - DNA, 55 bp, Artificial
  Synthetic oligonucleotide
cctgagctcactattcaggacaagcctcacaagtttgtgacaccacagatgaagg

SEQ ID NO: 365599 - DNA, 60 bp, Artificial
  Synthetic oligonucleotide
cctgagcttacactcatgatgtcatgtttcacgtatgcattcaaggagaagatcttgtac

SEQ ID NO: 365600 - DNA, 55 bp, Artificial
  Synthetic oligonucleotide
cctgagcttattcagtatgacgactcaattgttgatgttgagatcccattcttcc

SEQ ID NO: 365601 - DNA, 55 bp, Artificial
  Synthetic oligonucleotide
cctgaggaaactattatatttgaacatcctagtatatatacacctcctgacccgg

SEQ ID NO: 365602 - DNA, 58 bp, Artificial
  Synthetic oligonucleotide
cctgaggaagcaatgctgccaccagggacctactcaaataagttttacaacacggtga

SEQ ID NO: 365603 - DNA, 60 bp, Artificial
  Synthetic oligonucleotide
cctgaggaaggtacactgctgttgtccgatattagacttccgcgatgctcagaggaagac

SEQ ID NO: 365604 - DNA, 55 bp, Artificial
  Synthetic oligonucleotide
cctgaggaatgtgtatgcttgaggcacgcacgataacagcgatgtggtggtaata

SEQ ID NO: 365605 - DNA, 58 bp, Artificial
  Synthetic oligonucleotide
cctgaggaggttacgaaatggctggtccatagtccaacaggatattattaacacagta

SEQ ID NO: 365606 - DNA, 55 bp, Artificial
  Synthetic oligonucleotide
cctgaggagttgttactagacgagatcgaatccgttgccaatgatctgcagctgg

SEQ ID NO: 365607 - DNA, 60 bp, Artificial
  Synthetic oligonucleotide
cctgaggatagggacattagcatggatattatttatcctaccccagagttgcctgttgtc

SEQ ID NO: 365608 - DNA, 55 bp, Artificial
  Synthetic oligonucleotide
cctgaggatgaaggtccgcaacgagaaccttatgatgaatggttaatggataccc

SEQ ID NO: 365609 - DNA, 55 bp, Artificial
  Synthetic oligonucleotide
cctgaggatgttattccagactcattattctcattcagacatactatggtgctgt

SEQ ID NO: 365610 - DNA, 55 bp, Artificial
  Synthetic oligonucleotide
cctgaggattacacgattcagacacacgatttaagttttgtgtcgtcgactgatg

SEQ ID NO: 365611 - DNA, 55 bp, Artificial
  Synthetic oligonucleotide
cctgaggcaactgacctccactgttatgagcaattacccggcagctcagatgagg

SEQ ID NO: 365612 - DNA, 58 bp, Artificial
  Synthetic oligonucleotide
cctgaggcggagatgggtggtgctaaagtcggacaggcattcgaggcagatgcactag

SEQ ID NO: 365613 - DNA, 59 bp, Artificial
  Synthetic oligonucleotide
cctgaggctaccttcagagctcggctggatttaggtattccaggtgacgtgcccaaata

SEQ ID NO: 365614 - DNA, 60 bp, Artificial
  Synthetic oligonucleotide
cctgaggctgagatagagaaggaaggacctcttccaagtgtagatggttattacgagcga

SEQ ID NO: 365615 - DNA, 60 bp, Artificial
  Synthetic oligonucleotide
cctgaggctttatctgccgcgcttcctaatgacgctgggctaatcttggctgataaggca

SEQ ID NO: 365616 - DNA, 55 bp, Artificial
  Synthetic oligonucleotide
cctgaggggtctcttcctaggtccggagtctatctccatccggtccgctcgggcc

SEQ ID NO: 365617 - DNA, 55 bp, Artificial
  Synthetic oligonucleotide
cctgaggtaccaagttatgaggggctatgggaaaacccctttgatccacactgcc

SEQ ID NO: 365618 - DNA, 54 bp, Artificial
  Synthetic oligonucleotide
cctgaggtctgtggatgcacagcttcttaagggtgctgcggtgttaacaccgcg

SEQ ID NO: 365619 - DNA, 55 bp, Artificial
  Synthetic oligonucleotide
cctgaggtgtgcgacccggtgtgtgatgtgtacctgcttaacaatagcctacacg

SEQ ID NO: 365620 - DNA, 55 bp, Artificial
  Synthetic oligonucleotide
cctgaggttaagacagcagtgcgaccatccaacacaaattccagaaccaagcctg

SEQ ID NO: 365621 - DNA, 55 bp, Artificial
  Synthetic oligonucleotide
cctgaggttgaagtgctgacacactcgctaacacatggggcagctcatcagcttt

SEQ ID NO: 365622 - DNA, 60 bp, Artificial
  Synthetic oligonucleotide
cctgaggttgtggttgaacctgatttggtctgatatcatgtcgtggttcctgttgaatgg

SEQ ID NO: 365623 - DNA, 55 bp, Artificial
  Synthetic oligonucleotide
cctgagtaattgaaacgaagcgagtaagcttaactctaaaagatccacgaccggc

SEQ ID NO: 365624 - DNA, 55 bp, Artificial
  Synthetic oligonucleotide
cctgagtacagcggatatgagagggtgatgaaggtcgcattctttaatgcccagg

SEQ ID NO: 365625 - DNA, 60 bp, Artificial
  Synthetic oligonucleotide
cctgagtataaggcattatcgtgtacgctctagaaagaattctactgctattggcgtgtc

SEQ ID NO: 365626 - DNA, 55 bp, Artificial
  Synthetic oligonucleotide
cctgagtatgtgttttcaccaggcataatccctgaatcaaatcatagtgtctgtg

SEQ ID NO: 365627 - DNA, 60 bp, Artificial
  Synthetic oligonucleotide
cctgagtattctatctagagcaagcttttcagtagattgattcgacatctgatttctttt

SEQ ID NO: 365628 - DNA, 60 bp, Artificial
  Synthetic oligonucleotide
cctgagtcaaagatcatgctggacatgctaagtcaacatgaacctcgagaaaatctggga

SEQ ID NO: 365629 - DNA, 57 bp, Artificial
  Synthetic oligonucleotide
cctgagtcaagggctagcttttgggctgccttcggtttgacgggggatgagcagttg

SEQ ID NO: 365630 - DNA, 60 bp, Artificial
  Synthetic oligonucleotide
cctgagtcagtgcttgtcaatacttaccaatggatcatcagaaattgggagactgtaaag

SEQ ID NO: 365631 - DNA, 55 bp, Artificial
  Synthetic oligonucleotide
cctgagtcatatcgactctggcgtacttaacggcatattactaaccgctaaggct

SEQ ID NO: 365632 - DNA, 55 bp, Artificial
  Synthetic oligonucleotide
cctgagtctgtccacggtttccggtgtatgctcgccgtgaaataccttcagctgg

SEQ ID NO: 365633 - DNA, 55 bp, Artificial
  Synthetic oligonucleotide
cctgagtgctctctctcaaatttaaactcataccagaactcataatccaattcct

SEQ ID NO: 365634 - DNA, 52 bp, Artificial
  Synthetic oligonucleotide
cctgagtggaaacccaacaactagattactcaaatatgactaccccacaaaa

SEQ ID NO: 365635 - DNA, 53 bp, Artificial
  Synthetic oligonucleotide
cctgagtgggaaagtgaacgaattaggcctttgtggcctaaggacgaatggtt

SEQ ID NO: 365636 - DNA, 55 bp, Artificial
  Synthetic oligonucleotide
cctgagttcaatgtcattacaagtaaccgtgaacgaggtagccatactatggcag

SEQ ID NO: 365637 - DNA, 57 bp, Artificial
  Synthetic oligonucleotide
cctgagttcttaaacaatacagaacctctctgcaatgtatccgggtttgcaatagtt

SEQ ID NO: 365638 - DNA, 55 bp, Artificial
  Synthetic oligonucleotide
cctgagttggtattgacattaaactccactacattaccttataccgttggatctc

SEQ ID NO: 365639 - DNA, 60 bp, Artificial
  Synthetic oligonucleotide
cctgataacgttcaatatgttatacaatgcataggatcacggacgtaccaaatagaagat

SEQ ID NO: 365640 - DNA, 59 bp, Artificial
  Synthetic oligonucleotide
cctgataataatgaaccgagcgggtacgcacaaacggactgcgtgttggaagcaatggc

SEQ ID NO: 365641 - DNA, 60 bp, Artificial
  Synthetic oligonucleotide
cctgataatgaagtgctccagtaccctgacgagttttacactgtcgccgtcagcaagtat

SEQ ID NO: 365642 - DNA, 59 bp, Artificial
  Synthetic oligonucleotide
cctgataccgttcatggttttaggtgtatgctcgctgtaaaatacttgcagttggtaga

SEQ ID NO: 365643 - DNA, 51 bp, Artificial
  Synthetic oligonucleotide
cctgatacctaactactcttaagaaacgaccagtctgaggctgtaagttcg

SEQ ID NO: 365644 - DNA, 60 bp, Artificial
  Synthetic oligonucleotide
cctgatactatcaacggcttgccagtagatgtcaataagacagtatctgatatgtcgttg

SEQ ID NO: 365645 - DNA, 55 bp, Artificial
  Synthetic oligonucleotide
cctgatactggtcaaggtgctaccgatgttgttctagctaacggtagattggggc

SEQ ID NO: 365646 - DNA, 55 bp, Artificial
  Synthetic oligonucleotide
cctgatacttcctccaatagattttatactttagaaagccagatgtggtcccctg

SEQ ID NO: 365647 - DNA, 55 bp, Artificial
  Synthetic oligonucleotide
cctgatagaccaggacaaacatggccacctttacagatgcagagatcgacgatct

SEQ ID NO: 365648 - DNA, 56 bp, Artificial
  Synthetic oligonucleotide
cctgatagaggatccgtctcagctcatgctggattggctaatcacggggaataagc

SEQ ID NO: 365649 - DNA, 59 bp, Artificial
  Synthetic oligonucleotide
cctgatagggcgtagcagagacctgctactccgctagtaaaaactctgctgtacatggc

SEQ ID NO: 365650 - DNA, 53 bp, Artificial
  Synthetic oligonucleotide
cctgatataaaggaaaattttacaggacttataagggaaaatcagatagttta

SEQ ID NO: 365651 - DNA, 55 bp, Artificial
  Synthetic oligonucleotide
cctgatataacttttcctactgcacctatgggaacaccctttagtcctgtaactc

SEQ ID NO: 365652 - DNA, 55 bp, Artificial
  Synthetic oligonucleotide
cctgatattagcaggtatgctcctcaaaccgaacgggatattgatagttaagacc

SEQ ID NO: 365653 - DNA, 57 bp, Artificial
  Synthetic oligonucleotide
cctgatattcgttatgggctgcttaggcgggcccactttcgtgcacgaagtggtaag

SEQ ID NO: 365654 - DNA, 59 bp, Artificial
  Synthetic oligonucleotide
cctgatcaattattaacttctagcaataaagcactaaaactactattgattcaaggata

SEQ ID NO: 365655 - DNA, 55 bp, Artificial
  Synthetic oligonucleotide
cctgatcactggtcttcaaccgggagccaatgcacaagttacctatgatcaacgt

SEQ ID NO: 365656 - DNA, 60 bp, Artificial
  Synthetic oligonucleotide
cctgatcagctacgacgaatacctggagagagcaacagaaatagactacatgtcacctac

SEQ ID NO: 365657 - DNA, 55 bp, Artificial
  Synthetic oligonucleotide
cctgatcatataatcgtacgtttatgcgaacgcaatgaacataagcctgactcct

SEQ ID NO: 365658 - DNA, 60 bp, Artificial
  Synthetic oligonucleotide
cctgatccatgatggtgaccgtgctgtcgtgacttatgagggtgacactagtgcaggcta

SEQ ID NO: 365659 - DNA, 52 bp, Artificial
  Synthetic oligonucleotide
cctgatcccgttcaggttcggggggaccaaccggccggagaatctggtggcc

SEQ ID NO: 365660 - DNA, 55 bp, Artificial
  Synthetic oligonucleotide
cctgatccggaccactttgatggatataaacaacaggcagtggttattatggacg

SEQ ID NO: 365661 - DNA, 55 bp, Artificial
  Synthetic oligonucleotide
cctgatccggattttctggacattgttcgtttacataggcctgccttaacatccc

SEQ ID NO: 365662 - DNA, 51 bp, Artificial
  Synthetic oligonucleotide
cctgatcgcaggagatcttggctagctctgctagatccttaaacagtgcgt

SEQ ID NO: 365663 - DNA, 60 bp, Artificial
  Synthetic oligonucleotide
cctgatcgccagcgtaggagcagttaccctctctaacttccaagggaaggtgatgatgac

SEQ ID NO: 365664 - DNA, 60 bp, Artificial
  Synthetic oligonucleotide
cctgatcgctcctcgaggttacttcaaaatgcgcactgggaaaagctcaataatgagatc

SEQ ID NO: 365665 - DNA, 55 bp, Artificial
  Synthetic oligonucleotide
cctgatcggagagggtccatgtgaaccaggggattgtggaggaaaactactgtgt

SEQ ID NO: 365666 - DNA, 55 bp, Artificial
  Synthetic oligonucleotide
cctgatctactaacgcagaaaggagtgtttggacagaacgctcagtaccactatc

SEQ ID NO: 365667 - DNA, 60 bp, Artificial
  Synthetic oligonucleotide
cctgatctggggccactatgtctgcacgttgcggctccacagctagaactttatttgaat

SEQ ID NO: 365668 - DNA, 55 bp, Artificial
  Synthetic oligonucleotide
cctgatcttagtaaatacgtgaagcgtggtgactactactttacagctgcacccc

SEQ ID NO: 365669 - DNA, 56 bp, Artificial
  Synthetic oligonucleotide
cctgatcttagtattaggggatccaaattcacaaacaagagcccaggaactcctaa

SEQ ID NO: 365670 - DNA, 51 bp, Artificial
  Synthetic oligonucleotide
cctgatcttagtattagggggtccaagttcacaaacaaaaacccaggaact

SEQ ID NO: 365671 - DNA, 54 bp, Artificial
  Synthetic oligonucleotide
cctgatgaacgcatgacatatttgaatcatgctgattacaacttgaattctccg

SEQ ID NO: 365672 - DNA, 55 bp, Artificial
  Synthetic oligonucleotide
cctgatgacattcgaccattttacatccacccggtcatggatccagacacttacg

SEQ ID NO: 365673 - DNA, 60 bp, Artificial
  Synthetic oligonucleotide
cctgatgaccatctcaaagagagatcaagtctcagatatggaaatgtccttgatgtgaat

SEQ ID NO: 365674 - DNA, 60 bp, Artificial
  Synthetic oligonucleotide
cctgatgaggtcgtgcctagtgatgatggcactgaccgtgtggtcagggcagttaattgt

SEQ ID NO: 365675 - DNA, 52 bp, Artificial
  Synthetic oligonucleotide
cctgatgagttctttttcgttacgctcagctagccagattgaattgcggaaa

SEQ ID NO: 365676 - DNA, 60 bp, Artificial
  Synthetic oligonucleotide
cctgatgatcatctcaaggagagatcaagccctagatatggaaatgtccttgatgtaaat

SEQ ID NO: 365677 - DNA, 60 bp, Artificial
  Synthetic oligonucleotide
cctgatgatgattactggccacataggtcccttaaagtacgaatgagcgatgagtatatc

SEQ ID NO: 365678 - DNA, 55 bp, Artificial
  Synthetic oligonucleotide
cctgatgatggagaggatccgaagaccttggagctgatggtggaacaccagtacc

SEQ ID NO: 365679 - DNA, 55 bp, Artificial
  Synthetic oligonucleotide
cctgatgcacagtgatgtcgtcccatgtgcgtaaatccattaccatctttagcgc

SEQ ID NO: 365680 - DNA, 51 bp, Artificial
  Synthetic oligonucleotide
cctgatgcaggctgggcaaggtcaaatatcacattatattatgacacattt

SEQ ID NO: 365681 - DNA, 60 bp, Artificial
  Synthetic oligonucleotide
cctgatgcatgtacaaaaagtgttgtcagctagcacagtgtgtaagttgcagagttgcac

SEQ ID NO: 365682 - DNA, 60 bp, Artificial
  Synthetic oligonucleotide
cctgatgctgtgtgctgcgataaaaggtttcaagactgttcttactccgttgatcttccg

SEQ ID NO: 365683 - DNA, 59 bp, Artificial
  Synthetic oligonucleotide
cctgatgcttccgagtgtgtcacgttgagcctctatgggttccctctagccattggcgg

SEQ ID NO: 365684 - DNA, 55 bp, Artificial
  Synthetic oligonucleotide
cctgatggaccgtcttgctgcgaagaattcggttgcatacaactgtgattattca

SEQ ID NO: 365685 - DNA, 58 bp, Artificial
  Synthetic oligonucleotide
cctgatggagaggatatgtcattattctgtcaaatggtatccagtgtgacatttatac

SEQ ID NO: 365686 - DNA, 60 bp, Artificial
  Synthetic oligonucleotide
cctgatggattgggccgtaaatttgataagtcgtctgcatgggccaacaggcccatgtac

SEQ ID NO: 365687 - DNA, 58 bp, Artificial
  Synthetic oligonucleotide
cctgatgtacctatagagcatgcacctacacaggtttttccatttcctttggccccta

SEQ ID NO: 365688 - DNA, 60 bp, Artificial
  Synthetic oligonucleotide
cctgatgtacctcagagccgcttcctctcatagtcacgcctacaccttgcttcaaatgaa

SEQ ID NO: 365689 - DNA, 58 bp, Artificial
  Synthetic oligonucleotide
cctgatgtagtaccacttaatgggaattctagtgagtatatattaattaattgcaata

SEQ ID NO: 365690 - DNA, 53 bp, Artificial
  Synthetic oligonucleotide
cctgatgtcaacaggcaaggttctcggaatacacgttggtggaaacggccacc

SEQ ID NO: 365691 - DNA, 60 bp, Artificial
  Synthetic oligonucleotide
cctgatgtgacgtcgacggtagtatgggcgggcatatcttcttctaatctgaaatatagc

SEQ ID NO: 365692 - DNA, 55 bp, Artificial
  Synthetic oligonucleotide
cctgatgtgggagctcatcagtttgcttgtgtaccaccttcaaaaggtacaccac

SEQ ID NO: 365693 - DNA, 60 bp, Artificial
  Synthetic oligonucleotide
cctgatgttatgaaaagaattgcacctatgctctataaatcttctaaatcaagggtagtc

SEQ ID NO: 365694 - DNA, 60 bp, Artificial
  Synthetic oligonucleotide
cctgatgttccccgtggatgtgaagggccatgcaaagtccagtcttatgagcaacgtgat

SEQ ID NO: 365695 - DNA, 55 bp, Artificial
  Synthetic oligonucleotide
cctgattacatataccgtgctatggatttatccagtgtcgaaggcggaaaccagc

SEQ ID NO: 365696 - DNA, 54 bp, Artificial
  Synthetic oligonucleotide
cctgattacgatagggacgagccccaggacgggggggatcggaccgcccatatg

SEQ ID NO: 365697 - DNA, 55 bp, Artificial
  Synthetic oligonucleotide
cctgattagtactaaattcaaactcgactcttccctcaccactctccaagatccc

SEQ ID NO: 365698 - DNA, 58 bp, Artificial
  Synthetic oligonucleotide
cctgattatcttaaaatgagcaaggaggctagtggggattctatgttcttttttgcaa

SEQ ID NO: 365699 - DNA, 60 bp, Artificial
  Synthetic oligonucleotide
cctgattattcgcagagcttcctctgcacatgttgcatttaacgccttggcatatgtgtc

SEQ ID NO: 365700 - DNA, 57 bp, Artificial
  Synthetic oligonucleotide
cctgattcacagctcttttggtggcctcttccaccccccaaatgtctggataagacc

SEQ ID NO: 365701 - DNA, 57 bp, Artificial
  Synthetic oligonucleotide
cctgattcacgaggctagatcgccccggccggttgctcccaatactgcggtcccggc

SEQ ID NO: 365702 - DNA, 55 bp, Artificial
  Synthetic oligonucleotide
cctgattctactcaggcctaaattcatgttgaccacacaaggcagatgggctatg

SEQ ID NO: 365703 - DNA, 55 bp, Artificial
  Synthetic oligonucleotide
cctgattctacttataagcgacaagaagctctctggaagcaacttgtctccgcag

SEQ ID NO: 365704 - DNA, 53 bp, Artificial
  Synthetic oligonucleotide
cctgattggattcctatggttggaggtaaacacttcggagtaaacctccctaa

SEQ ID NO: 365705 - DNA, 56 bp, Artificial
  Synthetic oligonucleotide
cctgattggctgctacctcttcttttaggcctctacggtgatcttacccccgcctg

SEQ ID NO: 365706 - DNA, 60 bp, Artificial
  Synthetic oligonucleotide
cctgattggtgaaggttgcccaaaacctcacagattgacttcaaattcattgtgttcatg

SEQ ID NO: 365707 - DNA, 53 bp, Artificial
  Synthetic oligonucleotide
cctgattggtttataaacggttcaaataccagacactttcccggagatgccaa

SEQ ID NO: 365708 - DNA, 60 bp, Artificial
  Synthetic oligonucleotide
cctgattgtccgactagcggagatagtagtgaatcgtctaatcgccgagtgaagcgtgac

SEQ ID NO: 365709 - DNA, 56 bp, Artificial
  Synthetic oligonucleotide
cctgattgttggatttactccgctgactatctactcaccaggtcttattaaggtta

SEQ ID NO: 365710 - DNA, 59 bp, Artificial
  Synthetic oligonucleotide
cctgatttaattcccctctttgaaaattcttgcgtgagctattcctgctggcaggaaga

SEQ ID NO: 365711 - DNA, 55 bp, Artificial
  Synthetic oligonucleotide
cctgatttgacaatggtggacacaaaggtggatccctccagggcaggaaagctgc

SEQ ID NO: 365712 - DNA, 55 bp, Artificial
  Synthetic oligonucleotide
cctgatttggacatggaagttgtgttcgagacacaaggcaattcaacctcatccg

SEQ ID NO: 365713 - DNA, 57 bp, Artificial
  Synthetic oligonucleotide
cctgatttggatgtggtacactctggtcgttgtgtacagagggtcctccactcgttg

SEQ ID NO: 365714 - DNA, 55 bp, Artificial
  Synthetic oligonucleotide
cctgatttggtctgatatcatgtcgtggttcctgttgaatggtcggctgatgtgt

SEQ ID NO: 365715 - DNA, 60 bp, Artificial
  Synthetic oligonucleotide
cctgatttggttcccctcttcgagaatactgctgtcagttatgcttgctggcaggaagag

SEQ ID NO: 365716 - DNA, 55 bp, Artificial
  Synthetic oligonucleotide
cctgatttgtactgttattatgtcgtgttggtagttgaacggtctctcgtcgtgg

SEQ ID NO: 365717 - DNA, 60 bp, Artificial
  Synthetic oligonucleotide
cctgatttgtatgtggcgctaaccagggccaagaaaagcctcacaatactgcagccataa

SEQ ID NO: 365718 - DNA, 55 bp, Artificial
  Synthetic oligonucleotide
cctgattttcaggggtacaccaccatgaaataggggtgccttagggaaatagctg

SEQ ID NO: 365719 - DNA, 52 bp, Artificial
  Synthetic oligonucleotide
cctgatttttaacaccgttatacatgagaaaataggggaccatcagacagtg

SEQ ID NO: 365720 - DNA, 55 bp, Artificial
  Synthetic oligonucleotide
cctgcaaactgtcaatgcactccagagcgccactggtacacaaacaccgtacacc

SEQ ID NO: 365721 - DNA, 55 bp, Artificial
  Synthetic oligonucleotide
cctgcaaagtatcaggcacgtgtccttctgatgtcattcccaaggtggaaggcaa

SEQ ID NO: 365722 - DNA, 56 bp, Artificial
  Synthetic oligonucleotide
cctgcaacagaatcacacgaaatgcggtccttcgtttgagagatagccaattttaa

SEQ ID NO: 365723 - DNA, 55 bp, Artificial
  Synthetic oligonucleotide
cctgcaacaggtgaacattgggatgctgcaaagacctgtgctgagagaccaccaa

SEQ ID NO: 365724 - DNA, 55 bp, Artificial
  Synthetic oligonucleotide
cctgcaaccgacgttgctcatgctcgggcgtaaacttatgcgtgacgtggaaggg

SEQ ID NO: 365725 - DNA, 60 bp, Artificial
  Synthetic oligonucleotide
cctgcaacgtgtctttacagtagcttccattagaagcatgttgattaagtgaggaccaga

SEQ ID NO: 365726 - DNA, 60 bp, Artificial
  Synthetic oligonucleotide
cctgcaagagagcaaatgtgaatgatttctttaacaggctaaattggctggtgaaatcag

SEQ ID NO: 365727 - DNA, 55 bp, Artificial
  Synthetic oligonucleotide
cctgcaagagagttgtcactcagctttatatgctccgccaaacaggcagactccc

SEQ ID NO: 365728 - DNA, 60 bp, Artificial
  Synthetic oligonucleotide
cctgcaagaggctaggatcgtattagaggcaaacgttatggagatattaggaatcgcaat

SEQ ID NO: 365729 - DNA, 50 bp, Artificial
  Synthetic oligonucleotide
cctgcaagcactaaccaccttcgtctcagtggcaggaattatctacataa

SEQ ID NO: 365730 - DNA, 55 bp, Artificial
  Synthetic oligonucleotide
cctgcaagctcttcgtagttaaaattgtgtttcaagtattcgttaagttctacac

SEQ ID NO: 365731 - DNA, 55 bp, Artificial
  Synthetic oligonucleotide
cctgcaaggcgttcgatcagacagatttcccctctgttagtctggtcgatgaggc

SEQ ID NO: 365732 - DNA, 55 bp, Artificial
  Synthetic oligonucleotide
cctgcaaggtgggaagatgcttcattcacagattctagtgtggaagaggagccgg

SEQ ID NO: 365733 - DNA, 55 bp, Artificial
  Synthetic oligonucleotide
cctgcaagtcatcttggcgaaccataggtgaaccgtgccacgggcctgcctaccg

SEQ ID NO: 365734 - DNA, 55 bp, Artificial
  Synthetic oligonucleotide
cctgcaatccttcgtaatagtgctcatttatcacattcgttaaagtcccgactcc

SEQ ID NO: 365735 - DNA, 60 bp, Artificial
  Synthetic oligonucleotide
cctgcaattcgcttagtgtgtaaatgttatgcttgttgtgggatgtacaataacatctag

SEQ ID NO: 365736 - DNA, 60 bp, Artificial
  Synthetic oligonucleotide
cctgcacaacatcattgagcggggtctgtgattgcttggccatgcaagccattgtcaagc

SEQ ID NO: 365737 - DNA, 52 bp, Artificial
  Synthetic oligonucleotide
cctgcacacacccggctgtataccttgtgttcagaccggcaacacatccaag

SEQ ID NO: 365738 - DNA, 55 bp, Artificial
  Synthetic oligonucleotide
cctgcacaggccaatgccttcatgcggactgtgtccctgccgaagggcgtgcata

SEQ ID NO: 365739 - DNA, 60 bp, Artificial
  Synthetic oligonucleotide
cctgcacaggtgattgtccagaaagatgtggctgtacatcatctacttgcctccacaagg

SEQ ID NO: 365740 - DNA, 56 bp, Artificial
  Synthetic oligonucleotide
cctgcacagttaacaactcagtggaaatttcaacaggaactatgtcagtttccact

SEQ ID NO: 365741 - DNA, 55 bp, Artificial
  Synthetic oligonucleotide
cctgcacccgataagattatagctagtattcaactcgccccttggaacggggtta

SEQ ID NO: 365742 - DNA, 58 bp, Artificial
  Synthetic oligonucleotide
cctgcaccgtgtgatatcggtcgtggtttgaaacgccaagacccctcgaggatcgcaa

SEQ ID NO: 365743 - DNA, 60 bp, Artificial
  Synthetic oligonucleotide
cctgcacctccagccgctctgacgcctcaaccatccagttctccggactgttcgaaggac

SEQ ID NO: 365744 - DNA, 56 bp, Artificial
  Synthetic oligonucleotide
cctgcaccttcgtcaggaccgccgattctatccttttgaacgacacccctgaggtg

SEQ ID NO: 365745 - DNA, 55 bp, Artificial
  Synthetic oligonucleotide
cctgcacgtcggggacgatgtatatctaggggtggcgtcatacgcagacgcgacc

SEQ ID NO: 365746 - DNA, 55 bp, Artificial
  Synthetic oligonucleotide
cctgcactcttacgtgactatgttgtgctctgtgaaggttcggttccgccgagct

SEQ ID NO: 365747 - DNA, 55 bp, Artificial
  Synthetic oligonucleotide
cctgcagaaatggactccgtctacgacattcgtgtcgtctaccctgtacataacc

SEQ ID NO: 365748 - DNA, 55 bp, Artificial
  Synthetic oligonucleotide
cctgcagaagtatttacaggtcaagccatagagaaagagattgcctacatacaac

SEQ ID NO: 365749 - DNA, 55 bp, Artificial
  Synthetic oligonucleotide
cctgcagagacccgttaccctctactacaactgttgaacagcactcgaacacccc

SEQ ID NO: 365750 - DNA, 58 bp, Artificial
  Synthetic oligonucleotide
cctgcagagagctatctttactcactatcgacatggttgtgttcacagcaggatagga

SEQ ID NO: 365751 - DNA, 60 bp, Artificial
  Synthetic oligonucleotide
cctgcagaggaaggggggccagattccacagttgccttgccccttagagctcatgtggga

SEQ ID NO: 365752 - DNA, 55 bp, Artificial
  Synthetic oligonucleotide
cctgcagaggattggaaataagtaggggtcagcctttaggcgttggaagtactgg

SEQ ID NO: 365753 - DNA, 59 bp, Artificial
  Synthetic oligonucleotide
cctgcagattttgatgaacttttgattgactggcgtattaagtttttgtaactgtgata

SEQ ID NO: 365754 - DNA, 55 bp, Artificial
  Synthetic oligonucleotide
cctgcaggaaagaaggcaacttactgatggagtgtggagctcctagatctcaggg

SEQ ID NO: 365755 - DNA, 55 bp, Artificial
  Synthetic oligonucleotide
cctgcaggaacaaatagcatggatgacgggtaacccacctgttccagtaggagac

SEQ ID NO: 365756 - DNA, 55 bp, Artificial
  Synthetic oligonucleotide
cctgcaggaacccaacgacggtggcggggctaaagctgacggcctactccaaatc

SEQ ID NO: 365757 - DNA, 55 bp, Artificial
  Synthetic oligonucleotide
cctgcaggacgctaccagatccgcctactgttaccatttgtgtagttcgttgtgg

SEQ ID NO: 365758 - DNA, 59 bp, Artificial
  Synthetic oligonucleotide
cctgcaggcctggagttatggtgtaaggcgtctggttgtgtctatggagggaaaccata

SEQ ID NO: 365759 - DNA, 55 bp, Artificial
  Synthetic oligonucleotide
cctgcaggggtaaacaaccgcacccggttgcctatatcttttcagaagcctctcc

SEQ ID NO: 365760 - DNA, 55 bp, Artificial
  Synthetic oligonucleotide
cctgcagggtcctatttgggccaaaattcctcacacggatggacactttcacccg

SEQ ID NO: 365761 - DNA, 55 bp, Artificial
  Synthetic oligonucleotide
cctgcaggtgttaaaagtactccgtttacagaggcgcttgtgtctacgataaacc

SEQ ID NO: 365762 - DNA, 55 bp, Artificial
  Synthetic oligonucleotide
cctgcagtagactgtaagagtggccagtctggagctttggctgacaggctgcccc

SEQ ID NO: 365763 - DNA, 55 bp, Artificial
  Synthetic oligonucleotide
cctgcagtcgtgcggccggctgtatgtgggccagcgccactattccgccttcgag

SEQ ID NO: 365764 - DNA, 60 bp, Artificial
  Synthetic oligonucleotide
cctgcagtgggtaataacagcgttaagatcagtgaggcatatgtcacatagaccaggaaa

SEQ ID NO: 365765 - DNA, 55 bp, Artificial
  Synthetic oligonucleotide
cctgcagtgttttaggcacactgtactcattcatggtgactattccagggggaaa

SEQ ID NO: 365766 - DNA, 60 bp, Artificial
  Synthetic oligonucleotide
cctgcagttgacttctctggtctcaccccaatctctcatgccttcgccggagagtttttc

SEQ ID NO: 365767 - DNA, 55 bp, Artificial
  Synthetic oligonucleotide
cctgcagttgtggatattgcttccaagcctagtgttgtcatactatctacagatg

SEQ ID NO: 365768 - DNA, 60 bp, Artificial
  Synthetic oligonucleotide
cctgcatacaaaacgtcatgcatccctgttcaacatgaacgcgggtttgggaagaagcaa

SEQ ID NO: 365769 - DNA, 55 bp, Artificial
  Synthetic oligonucleotide
cctgcatatgtacctagtgtggtcacagtcaatgaaacagttaagtgctttggag

SEQ ID NO: 365770 - DNA, 60 bp, Artificial
  Synthetic oligonucleotide
cctgcatcaacggcgtgtgttggactgtctatcatggcgccggctcaaagaccctagctg

SEQ ID NO: 365771 - DNA, 57 bp, Artificial
  Synthetic oligonucleotide
cctgcatcaatcggtgagcttaggggtttggcagccgccttacccgacggatcggcc

SEQ ID NO: 365772 - DNA, 55 bp, Artificial
  Synthetic oligonucleotide
cctgcatcactacttacatttgtgactatcaatcacgtttattttaactgcttat

SEQ ID NO: 365773 - DNA, 55 bp, Artificial
  Synthetic oligonucleotide
cctgcatctcgtccggaacgttcgtgaacgacgagagtggaaacggaggaaccca

SEQ ID NO: 365774 - DNA, 56 bp, Artificial
  Synthetic oligonucleotide
cctgcatcttcttcggggacattgttctccgccaaggggaagggacctagaatcta

SEQ ID NO: 365775 - DNA, 55 bp, Artificial
  Synthetic oligonucleotide
cctgcatgaaagcctgctgaggcgtaagagacgtagaagaaaacgtttgtatgcc

SEQ ID NO: 365776 - DNA, 54 bp, Artificial
  Synthetic oligonucleotide
cctgcatgatgccaatgttaggaacctgcatgaacaaatcaagcgggccctaaa

SEQ ID NO: 365777 - DNA, 59 bp, Artificial
  Synthetic oligonucleotide
cctgcatggaatggaggacccggagaaagaagtgttgctgtggaagtttgacagtcgcc

SEQ ID NO: 365778 - DNA, 54 bp, Artificial
  Synthetic oligonucleotide
cctgcattaccactatgccctggagatggaactggagacgaaaaccattccgcc

SEQ ID NO: 365779 - DNA, 60 bp, Artificial
  Synthetic oligonucleotide
cctgcattcaagatgcagagatattatgagattagagataggatacacggccttgagcca

SEQ ID NO: 365780 - DNA, 60 bp, Artificial
  Synthetic oligonucleotide
cctgcattctctccctaggggcagcctgcgctgacgctaacatgactctacatgagggcg

SEQ ID NO: 365781 - DNA, 53 bp, Artificial
  Synthetic oligonucleotide
cctgcatttcgtccggaacgttagtgaatgaggacaacgggaacggagggacc

SEQ ID NO: 365782 - DNA, 60 bp, Artificial
  Synthetic oligonucleotide
cctgcatttctgcctgacactcgtaagatagttggagttctggacaaggaagttcttgaa

SEQ ID NO: 365783 - DNA, 55 bp, Artificial
  Synthetic oligonucleotide
cctgccaacaaaggcaagtttcatgtttacgttgagtgtaacgggcaaatggccg

SEQ ID NO: 365784 - DNA, 58 bp, Artificial
  Synthetic oligonucleotide
cctgccaactttgcctaaacaatggatcgcgaaaggtaaggctcatcttcctcaggta

SEQ ID NO: 365785 - DNA, 55 bp, Artificial
  Synthetic oligonucleotide
cctgccaatagactctcacaataatctatctgatcacacattgacgctaacgcag

SEQ ID NO: 365786 - DNA, 55 bp, Artificial
  Synthetic oligonucleotide
cctgccacctgttgtagcaaaagagatagtagccagctgtgataagtgtcaattg

SEQ ID NO: 365787 - DNA, 60 bp, Artificial
  Synthetic oligonucleotide
cctgccacgcgcgttagcgccacctcgcaatgtgcgtgtgaccgggtgctaccagtgcgg

SEQ ID NO: 365788 - DNA, 55 bp, Artificial
  Synthetic oligonucleotide
cctgccagacgcccgcatatataatcctgatgccgagcgcctggtctgggcttgc

SEQ ID NO: 365789 - DNA, 55 bp, Artificial
  Synthetic oligonucleotide
cctgccaggtctcatgaaatccggttcatattgcacatcatctaccaactccaga

SEQ ID NO: 365790 - DNA, 55 bp, Artificial
  Synthetic oligonucleotide
cctgccaggttgccttaccaaccttggaatgttcgggcagaattgcgcatatcat

SEQ ID NO: 365791 - DNA, 56 bp, Artificial
  Synthetic oligonucleotide
cctgccagtttggaacaggctatgcgcaaaggactagttgaaggtgtggtcatctc

SEQ ID NO: 365792 - DNA, 55 bp, Artificial
  Synthetic oligonucleotide
cctgccataattcgcgccgtagaactagattatgataatagcgctgtaaacttgc

SEQ ID NO: 365793 - DNA, 55 bp, Artificial
  Synthetic oligonucleotide
cctgccatggaaattaatgttgagagacacatcaatagagcaatgactattctcc

SEQ ID NO: 365794 - DNA, 58 bp, Artificial
  Synthetic oligonucleotide
cctgccatggtaaggatcctgaggataagatttctctcgtaaagggtcctcctcacaa

SEQ ID NO: 365795 - DNA, 55 bp, Artificial
  Synthetic oligonucleotide
cctgccattatctaaattagactacaacccagatgccagcaccaaactacccatc

SEQ ID NO: 365796 - DNA, 55 bp, Artificial
  Synthetic oligonucleotide
cctgccattattcggtttcctattaactgtgcacacagtgaaaattcgcagtgtg

SEQ ID NO: 365797 - DNA, 60 bp, Artificial
  Synthetic oligonucleotide
cctgccattggagaacactggacaaagggcactgcttgtaagcctactactgtggttcag

SEQ ID NO: 365798 - DNA, 60 bp, Artificial
  Synthetic oligonucleotide
cctgccattggtgtgtaccctcttagtaggtaccgtgctcaggttagtgattatgtgcac

SEQ ID NO: 365799 - DNA, 58 bp, Artificial
  Synthetic oligonucleotide
cctgcccacgaaacatccctctttacaagtgacacttgctcgcgtgacaacctcaccc

SEQ ID NO: 365800 - DNA, 52 bp, Artificial
  Synthetic oligonucleotide
cctgcccagaggacaagacatgtgttgtggcagtcttattggcagctcaaaa

SEQ ID NO: 365801 - DNA, 56 bp, Artificial
  Synthetic oligonucleotide
cctgccccacagactgcttccggaagcaccccgaggctacctacaccaagtgcggt

SEQ ID NO: 365802 - DNA, 55 bp, Artificial
  Synthetic oligonucleotide
cctgccccacctgtgctcaacagtatgccaacttgccagccagtgatttgctcaa

SEQ ID NO: 365803 - DNA, 60 bp, Artificial
  Synthetic oligonucleotide
cctgccccctacggcagggcatattaaatgtacttccaatgtcactgcagtattgacgga

SEQ ID NO: 365804 - DNA, 52 bp, Artificial
  Synthetic oligonucleotide
cctgcccgcaagactaaaaggtcacccccgaataggggcaacctccaggttc

SEQ ID NO: 365805 - DNA, 55 bp, Artificial
  Synthetic oligonucleotide
cctgccctgactttgacaacttgcttaaagagatgatgcttttcccgagagaagc

SEQ ID NO: 365806 - DNA, 54 bp, Artificial
  Synthetic oligonucleotide
cctgccctgagctcgagcagggcttactgtatatgccacaggagctcacagtat

SEQ ID NO: 365807 - DNA, 57 bp, Artificial
  Synthetic oligonucleotide
cctgccgaacgacaggcaacgaaccaattaagtcgttaagaagtcactgacacgagc

SEQ ID NO: 365808 - DNA, 55 bp, Artificial
  Synthetic oligonucleotide
cctgccggtgtctctatctatcgtgtctatgccacgttgctcgcacatgcgtatc

SEQ ID NO: 365809 - DNA, 60 bp, Artificial
  Synthetic oligonucleotide
cctgcctaaatcactatcgaccctgagttatttaggcagcattgcaccagttcaatggaa

SEQ ID NO: 365810 - DNA, 55 bp, Artificial
  Synthetic oligonucleotide
cctgcctacacagacactttctcctgggattcaactgacgaagtcggatcctcga

SEQ ID NO: 365811 - DNA, 60 bp, Artificial
  Synthetic oligonucleotide
cctgcctacactgcgaatccgtctccgttccaacctcctcagatgcaatggtcgcccact

SEQ ID NO: 365812 - DNA, 60 bp, Artificial
  Synthetic oligonucleotide
cctgcctacattgccggagaccatgcacggacgacagccaactgtgaaggacatagtcct

SEQ ID NO: 365813 - DNA, 55 bp, Artificial
  Synthetic oligonucleotide
cctgcctatgacgcattggttgaatcgctacgtaacagaactaacgctcacatca

SEQ ID NO: 365814 - DNA, 56 bp, Artificial
  Synthetic oligonucleotide
cctgcctcaattcgagtttcgaacggcaacaatcatggaactcattccccgccccc

SEQ ID NO: 365815 - DNA, 60 bp, Artificial
  Synthetic oligonucleotide
cctgcctcgacagaatagctgctggcacctttaatgcaggagagttttctcttcccacct

SEQ ID NO: 365816 - DNA, 55 bp, Artificial
  Synthetic oligonucleotide
cctgcctctcaaaagcttatgggcagatgtggctgctgagttatttccaccggcg

SEQ ID NO: 365817 - DNA, 55 bp, Artificial
  Synthetic oligonucleotide
cctgcctctctttgtcggtgaagtctcccctgtgaggcctcttcctaggtccgga

SEQ ID NO: 365818 - DNA, 59 bp, Artificial
  Synthetic oligonucleotide
cctgcctctgtcggcttaacagaagaacacgggagtgttcgtgcacaaagtcctggcca

SEQ ID NO: 365819 - DNA, 60 bp, Artificial
  Synthetic oligonucleotide
cctgcctgagagtgttaacagtgtgtgcccatttcataccgcgtctgccctggggtagag

SEQ ID NO: 365820 - DNA, 59 bp, Artificial
  Synthetic oligonucleotide
cctgcctggttgggtcctccttgtagtgggatccagccggttctggtgctgttgagcca

SEQ ID NO: 365821 - DNA, 55 bp, Artificial
  Synthetic oligonucleotide
cctgcctgtacgttagcagctacgttaggtccaccgccccctaggagggacatag

SEQ ID NO: 365822 - DNA, 55 bp, Artificial
  Synthetic oligonucleotide
cctgcctgtgagctacaactattgcagactagtgagcaggagcctaaccgtgcgg

SEQ ID NO: 365823 - DNA, 60 bp, Artificial
  Synthetic oligonucleotide
cctgcctgtgtttatggccttacagtagccagtgggtatgacttcgagagagagggatac

SEQ ID NO: 365824 - DNA, 50 bp, Artificial
  Synthetic oligonucleotide
cctgccttaatgaacgattattctggtattgaaggcgtttacgggttaga

SEQ ID NO: 365825 - DNA, 59 bp, Artificial
  Synthetic oligonucleotide
cctgccttgatagtctgggggatccaccattctgggtcagccactgaacagaccaaact

SEQ ID NO: 365826 - DNA, 60 bp, Artificial
  Synthetic oligonucleotide
cctgcctttaggagccagtctttactgactgatctaggccgtcaagctatgacatacgcg

SEQ ID NO: 365827 - DNA, 55 bp, Artificial
  Synthetic oligonucleotide
cctgcctttcatagcggcgacgcggccaaacagagtggcggacagcctgtcaaca

SEQ ID NO: 365828 - DNA, 55 bp, Artificial
  Synthetic oligonucleotide
cctgcgaatttcacactgcaaggaaaatcccccaactggtatttgtccctacaga

SEQ ID NO: 365829 - DNA, 55 bp, Artificial
  Synthetic oligonucleotide
cctgcgacagcgataggtatatccatttgcttacgctttcttgcaaacgtgatgg

SEQ ID NO: 365830 - DNA, 55 bp, Artificial
  Synthetic oligonucleotide
cctgcgacgagagagaagggaacgtacttcccatggctagcgttcggttcttcag

SEQ ID NO: 365831 - DNA, 59 bp, Artificial
  Synthetic oligonucleotide
cctgcgactgcagcctgatagatggctccaacggatggagtccgctcaaataccctcgg

SEQ ID NO: 365832 - DNA, 55 bp, Artificial
  Synthetic oligonucleotide
cctgcgacttgtgtggctcatacaacatttactggatcgaaagcggaatggattt

SEQ ID NO: 365833 - DNA, 55 bp, Artificial
  Synthetic oligonucleotide
cctgcgagggacgtccttcgtctacgtcccgtcagtggtgaatcctggggacgac

SEQ ID NO: 365834 - DNA, 55 bp, Artificial
  Synthetic oligonucleotide
cctgcgatccactttagtggtggagcaatgacaagtttgggcaacgaaattcgca

SEQ ID NO: 365835 - DNA, 55 bp, Artificial
  Synthetic oligonucleotide
cctgcgatccgaccgcaaccggtcgtgaagaccacttggaccgtgaggggtccga

SEQ ID NO: 365836 - DNA, 59 bp, Artificial
  Synthetic oligonucleotide
cctgcgatctattcctaaccaccatttagttggtgggacatctgcccatgtcttaattg

SEQ ID NO: 365837 - DNA, 55 bp, Artificial
  Synthetic oligonucleotide
cctgcgatttgcctgttctcccggtgaggtgagcgtgctttatgccgtcgctccg

SEQ ID NO: 365838 - DNA, 60 bp, Artificial
  Synthetic oligonucleotide
cctgcgcacgatggtggcaggtggcggaggctattcccattgcatatgggattacgctgc

SEQ ID NO: 365839 - DNA, 55 bp, Artificial
  Synthetic oligonucleotide
cctgcgcgaaggatgaaaagaccaagctaatcaaggtctacgagaagcccaagac

SEQ ID NO: 365840 - DNA, 57 bp, Artificial
  Synthetic oligonucleotide
cctgcgcgctttccaatagttacgccaggagaggcgtcagttggcaaggaggtttgt

SEQ ID NO: 365841 - DNA, 56 bp, Artificial
  Synthetic oligonucleotide
cctgcgcgggacgtccttagtctacgtccagtaggcgctgaatcccgcggacgacc

SEQ ID NO: 365842 - DNA, 55 bp, Artificial
  Synthetic oligonucleotide
cctgcgcgtcgatttccggtgaacctcctaccagcccaggagatcccgtgaaaac

SEQ ID NO: 365843 - DNA, 60 bp, Artificial
  Synthetic oligonucleotide
cctgcgctaagtttgctacggttctcatatcatcgaccctcgcggcacattgaccgtgcg

SEQ ID NO: 365844 - DNA, 52 bp, Artificial
  Synthetic oligonucleotide
cctgcgcttcccggaccaaggggagttacaggtcaacgggtggtcctccgaa

SEQ ID NO: 365845 - DNA, 55 bp, Artificial
  Synthetic oligonucleotide
cctgcggacgaaagtcgctcggagtcaggacttcagctgtccgggaggattcgga

SEQ ID NO: 365846 - DNA, 53 bp, Artificial
  Synthetic oligonucleotide
cctgcggagactggcgtaaccacctctggacactatgcgctttagacgacgca

SEQ ID NO: 365847 - DNA, 51 bp, Artificial
  Synthetic oligonucleotide
cctgcggcgatacacccgtggtcatcgcgtacttgcgccctcggaagtcgc

SEQ ID NO: 365848 - DNA, 60 bp, Artificial
  Synthetic oligonucleotide
cctgcggcgtttatgggtacctgctgtctgtattctatgacgcaatggtcgatcttcata

SEQ ID NO: 365849 - DNA, 55 bp, Artificial
  Synthetic oligonucleotide
cctgcgggcagcaatactgctttgtaaagcattgagatgtttatgtgtatgcata

SEQ ID NO: 365850 - DNA, 56 bp, Artificial
  Synthetic oligonucleotide
cctgcggtacagtactacagggcccgtcgtgttcagggttgcctctgggatttgct

SEQ ID NO: 365851 - DNA, 60 bp, Artificial
  Synthetic oligonucleotide
cctgcggtcgcaatgccggtgccagcgtccggcttgtccaggcggtagagcgtcggatct

SEQ ID NO: 365852 - DNA, 55 bp, Artificial
  Synthetic oligonucleotide
cctgcgtactgagcggcgttattggttagctcgtcaggcggtgaggttaaacccc

SEQ ID NO: 365853 - DNA, 55 bp, Artificial
  Synthetic oligonucleotide
cctgcgtccattgtaaatgacgagtctgtcgttggagtgagagctgctaggccga

SEQ ID NO: 365854 - DNA, 58 bp, Artificial
  Synthetic oligonucleotide
cctgcgtcgcgctccacatttacgtttgtgcgcgcacgggaaccgatggacttttgtc

SEQ ID NO: 365855 - DNA, 55 bp, Artificial
  Synthetic oligonucleotide
cctgcgtgcttaccaggtaacaccaagataattggcccggggaagtttgacacga

SEQ ID NO: 365856 - DNA, 60 bp, Artificial
  Synthetic oligonucleotide
cctgcgtgtgaaagtggggaagtaatcaacttagctgcgcgcatgtctcagatgtggatg

SEQ ID NO: 365857 - DNA, 60 bp, Artificial
  Synthetic oligonucleotide
cctgcgtgtgagagcggggaagttatcaatcttgctgcgcgtatgtctcagatgtggatg

SEQ ID NO: 365858 - DNA, 60 bp, Artificial
  Synthetic oligonucleotide
cctgcgtgtggaaggcgggggatcaatcacacactccaatagcgcatggcctgcgatgac

SEQ ID NO: 365859 - DNA, 55 bp, Artificial
  Synthetic oligonucleotide
cctgcgttatgaatgcagctagtgcgtccgtgggtctgatgagcggttccagtgc

SEQ ID NO: 365860 - DNA, 55 bp, Artificial
  Synthetic oligonucleotide
cctgcgttgcactccacacttacgttgtgcgtacgcggggcccaatggaccttcg

SEQ ID NO: 365861 - DNA, 55 bp, Artificial
  Synthetic oligonucleotide
cctgcgttgtgatattgagctaacttttgtcataaccagcgcacaagacccttca

SEQ ID NO: 365862 - DNA, 56 bp, Artificial
  Synthetic oligonucleotide
cctgctaagcatcgcctcgttgttaactataaaactagtgaatctccgggttttca

SEQ ID NO: 365863 - DNA, 55 bp, Artificial
  Synthetic oligonucleotide
cctgctacagttgcttggagcagtacaatacctggtgacatagttgcaagaggtg

SEQ ID NO: 365864 - DNA, 56 bp, Artificial
  Synthetic oligonucleotide
cctgctacgggtaccatactttgtaagggcccatgccctgctacgagtgtgtaccc

SEQ ID NO: 365865 - DNA, 55 bp, Artificial
  Synthetic oligonucleotide
cctgctactaatgtagattctatatatgtggcttgtgttgctacttggtgtggcg

SEQ ID NO: 365866 - DNA, 60 bp, Artificial
  Synthetic oligonucleotide
cctgctactgtcgacactcgcagatgtttattcagttttgagacctgagtttgcgatcca

SEQ ID NO: 365867 - DNA, 60 bp, Artificial
  Synthetic oligonucleotide
cctgctagcagcctgatagttagggaacacagtgcttcggcacgcttagttagttagaac

SEQ ID NO: 365868 - DNA, 57 bp, Artificial
  Synthetic oligonucleotide
cctgctaggcatcacctgggaaaattgtcaggattgtaccaaatgaagggttgtacc

SEQ ID NO: 365869 - DNA, 56 bp, Artificial
  Synthetic oligonucleotide
cctgctaggttctatcctaccagcactaaatatttgcccctagacaaagggattaa

SEQ ID NO: 365870 - DNA, 60 bp, Artificial
  Synthetic oligonucleotide
cctgctataagagaaagaatcagacgaactgagccagcagcagagggagtaggagcagca

SEQ ID NO: 365871 - DNA, 55 bp, Artificial
  Synthetic oligonucleotide
cctgctatcaccctgtatgactatacttacgggtctccatggccgcgcagcggca

SEQ ID NO: 365872 - DNA, 59 bp, Artificial
  Synthetic oligonucleotide
cctgctatccggcccgagctggttccaacaaagtggtggcacctcactcatagatgtcc

SEQ ID NO: 365873 - DNA, 55 bp, Artificial
  Synthetic oligonucleotide
cctgctatcgaggttgaattaccgttttatagttcacttagattcgtcaatcccc

SEQ ID NO: 365874 - DNA, 60 bp, Artificial
  Synthetic oligonucleotide
cctgctcaaccagatgtatgttaatcgtggacttggcacttgcaaagatggtctcgttaa

SEQ ID NO: 365875 - DNA, 60 bp, Artificial
  Synthetic oligonucleotide
cctgctcacagtagtgaaaggggaccagatatgcattgggtaccatgccaataactctac

SEQ ID NO: 365876 - DNA, 55 bp, Artificial
  Synthetic oligonucleotide
cctgctcacgatccggatttgaaagaagttactgttggtgatcaaaccagtcagc

SEQ ID NO: 365877 - DNA, 55 bp, Artificial
  Synthetic oligonucleotide
cctgctcactacaaggaattgtcagacttaaacaccatcagtcatcctctgatgg

SEQ ID NO: 365878 - DNA, 55 bp, Artificial
  Synthetic oligonucleotide
cctgctcacttgtatgtgcctgatcttgtcttttccaagcatttggctggaccac

SEQ ID NO: 365879 - DNA, 55 bp, Artificial
  Synthetic oligonucleotide
cctgctccaactgtgggaaagccttagacgcttgctagcctactgccagtatggg

SEQ ID NO: 365880 - DNA, 60 bp, Artificial
  Synthetic oligonucleotide
cctgctccccggtggtttcgatccatggcttcacgatgtgttgcatagatggaagatatc

SEQ ID NO: 365881 - DNA, 54 bp, Artificial
  Synthetic oligonucleotide
cctgctcctttacaaccacgcctgcgctatcaactggcctaatccatctacacc

SEQ ID NO: 365882 - DNA, 60 bp, Artificial
  Synthetic oligonucleotide
cctgctcgggaggaccacctgctgtcttatctcaatgaacacgtgtgcgtaaatgctaga

SEQ ID NO: 365883 - DNA, 58 bp, Artificial
  Synthetic oligonucleotide
cctgctcgttgtgtataatgggtcctctactcggcacatcttgaaatagaggggattt

SEQ ID NO: 365884 - DNA, 55 bp, Artificial
  Synthetic oligonucleotide
cctgctctaccaatcaatgtccattctaccaattacgtatttggaaagtattcag

SEQ ID NO: 365885 - DNA, 60 bp, Artificial
  Synthetic oligonucleotide
cctgctctgcacattacgtcaatctgatggccgatggttcctacgtggatttcacgctag

SEQ ID NO: 365886 - DNA, 55 bp, Artificial
  Synthetic oligonucleotide
cctgctctttccagaccgcacttggaatgtgacttacactggaacaagcaaagca

SEQ ID NO: 365887 - DNA, 55 bp, Artificial
  Synthetic oligonucleotide
cctgctgaaacagagcctacagtccttaaaggtgaaccagtcgggtacaaacgac

SEQ ID NO: 365888 - DNA, 52 bp, Artificial
  Synthetic oligonucleotide
cctgctgaacgcccacggtttcaacggtcacgagcaacagttaaaccctgaa

SEQ ID NO: 365889 - DNA, 55 bp, Artificial
  Synthetic oligonucleotide
cctgctgaatggaatggcatctccaacccaagatatctcacccaatccccgaaga

SEQ ID NO: 365890 - DNA, 55 bp, Artificial
  Synthetic oligonucleotide
cctgctgagactacggtgaggctccgggcttatttcaacacgcccggtctacccg

SEQ ID NO: 365891 - DNA, 55 bp, Artificial
  Synthetic oligonucleotide
cctgctgagactattgcaatgacactggtgaagatggcatataggaaaacgatga

SEQ ID NO: 365892 - DNA, 55 bp, Artificial
  Synthetic oligonucleotide
cctgctgagctctgtgatttccgcggatcttctgggtccccaattctgtgtgatg

SEQ ID NO: 365893 - DNA, 50 bp, Artificial
  Synthetic oligonucleotide
cctgctgggggtattccttgcgtggcttggcctaaacatgagaaacccta

SEQ ID NO: 365894 - DNA, 55 bp, Artificial
  Synthetic oligonucleotide
cctgctggtggctccagttcagaaacagtgaaccctgttccgactactgtctctc

SEQ ID NO: 365895 - DNA, 50 bp, Artificial
  Synthetic oligonucleotide
cctgctggttgtcagtgcacacataagcacgccgttcaagctacatcctc

SEQ ID NO: 365896 - DNA, 55 bp, Artificial
  Synthetic oligonucleotide
cctgctgtatatgaggcttatgcacatgtagactccttactgtgttccttttgta

SEQ ID NO: 365897 - DNA, 58 bp, Artificial
  Synthetic oligonucleotide
cctgctgtcacacccgaatcatacggtagagatacaggtgagaaatctatgcgctctg

SEQ ID NO: 365898 - DNA, 54 bp, Artificial
  Synthetic oligonucleotide
cctgctgtcctagatattactcccacaggtactacagtgcaggttagtagcact

SEQ ID NO: 365899 - DNA, 60 bp, Artificial
  Synthetic oligonucleotide
cctgctgtgatgcctttttctagggcagagattgatcccatggcagtgatgctgtcaaag

SEQ ID NO: 365900 - DNA, 53 bp, Artificial
  Synthetic oligonucleotide
cctgcttacctaatttacgaacagacaaatcaccaccgttaactggttcgtgg

SEQ ID NO: 365901 - DNA, 60 bp, Artificial
  Synthetic oligonucleotide
cctgcttactatcgacttcgagaaggatgcctatcttggttcgcgctctgaattagtatt

SEQ ID NO: 365902 - DNA, 55 bp, Artificial
  Synthetic oligonucleotide
cctgcttactgtgggtcacccttactatccagttactgttaccacccctggtcag

SEQ ID NO: 365903 - DNA, 51 bp, Artificial
  Synthetic oligonucleotide
cctgcttagggatagaaggccgtatggcaatgcgccccaagacttcgggca

SEQ ID NO: 365904 - DNA, 60 bp, Artificial
  Synthetic oligonucleotide
cctgcttcactgaatcaccatgacaccagataatgatccatctcgactgcttatagttag

SEQ ID NO: 365905 - DNA, 57 bp, Artificial
  Synthetic oligonucleotide
cctgcttcgatcattcgagggtgattctgagaaacgttattttcggtcgttcaagcc

SEQ ID NO: 365906 - DNA, 56 bp, Artificial
  Synthetic oligonucleotide
cctgcttctaggtttagggttactgtctctgctactattggcaaggttggccctaa

SEQ ID NO: 365907 - DNA, 60 bp, Artificial
  Synthetic oligonucleotide
cctgcttctcccatgcagttttatgcaaattcgggccaattctgagaaaaactgaggctc

SEQ ID NO: 365908 - DNA, 55 bp, Artificial
  Synthetic oligonucleotide
cctgcttctgtgtcatcgcatccagcagatgtgtatagatcttggtggtaatgcc

SEQ ID NO: 365909 - DNA, 55 bp, Artificial
  Synthetic oligonucleotide
cctgcttgaagcaaagatcaagaattatggagcactggattgtgtgttccaccag

SEQ ID NO: 365910 - DNA, 56 bp, Artificial
  Synthetic oligonucleotide
cctgcttgacatgaaatagatattatatcagccgaacttttttgactagtttaact

SEQ ID NO: 365911 - DNA, 60 bp, Artificial
  Synthetic oligonucleotide
cctgcttgtgtgtacgggcttgctgtggccagtggatacgatttcgaaagagagggatat

SEQ ID NO: 365912 - DNA, 60 bp, Artificial
  Synthetic oligonucleotide
cctgcttgtgtgtatggacttgctgtggccagtggatacgactttgaaagggagggatac

SEQ ID NO: 365913 - DNA, 55 bp, Artificial
  Synthetic oligonucleotide
cctgctttacgggacctccacttcttaaccatgtctgggacgttctcccggtgca

SEQ ID NO: 365914 - DNA, 60 bp, Artificial
  Synthetic oligonucleotide
cctgctttactgtaatgaccgatggaccaagtaatggacaggcctcatacaagatcttca

SEQ ID NO: 365915 - DNA, 59 bp, Artificial
  Synthetic oligonucleotide
cctgctttataagtgtcaatgatagactggtctctttagagtcaacaaaaagggatcta

SEQ ID NO: 365916 - DNA, 60 bp, Artificial
  Synthetic oligonucleotide
cctgctttgaactctcccaacgtggaagcatgtggatacagtgatagagtacaacaaatc

SEQ ID NO: 365917 - DNA, 57 bp, Artificial
  Synthetic oligonucleotide
cctggaaacaggtagtgagcgaggctacgctgtcccgcattagtggtttggatgggg

SEQ ID NO: 365918 - DNA, 60 bp, Artificial
  Synthetic oligonucleotide
cctggaaaggaattactgctgacactagagctttgaggagatttggcttttcattggctg

SEQ ID NO: 365919 - DNA, 55 bp, Artificial
  Synthetic oligonucleotide
cctggaacaaaaattactgtggcttacttaaatgaactttccaaacatagtgctg

SEQ ID NO: 365920 - DNA, 60 bp, Artificial
  Synthetic oligonucleotide
cctggaacaactaaccttgatgatcagttgaaacagagactgaacctggcagagggtgac

SEQ ID NO: 365921 - DNA, 60 bp, Artificial
  Synthetic oligonucleotide
cctggaacactatttccgaatagaagcttgtctaaaatcatccatgctccataaatgaag

SEQ ID NO: 365922 - DNA, 58 bp, Artificial
  Synthetic oligonucleotide
cctggaaccatgtcattttgcgtttcaaagttggatgcagataattgctttaacacct

SEQ ID NO: 365923 - DNA, 50 bp, Artificial
  Synthetic oligonucleotide
cctggaaccgaaaccgccaaagggcgaaggtacggacgaaaagaatctag

SEQ ID NO: 365924 - DNA, 54 bp, Artificial
  Synthetic oligonucleotide
cctggaactggagggttaggagtcgtgtgaaattccgcaaagttggtcgcggtc

SEQ ID NO: 365925 - DNA, 51 bp, Artificial
  Synthetic oligonucleotide
cctggaagaaaccggactacgtcccaccggtggtaagtgggtgcccattac

SEQ ID NO: 365926 - DNA, 52 bp, Artificial
  Synthetic oligonucleotide
cctggaagaatcaatcctagggttcctgcacctgctcggagctcccccagtt

SEQ ID NO: 365927 - DNA, 59 bp, Artificial
  Synthetic oligonucleotide
cctggaagatagtggctattctagcgcctacgatgtcgcacagggcgctttaaactcgt

SEQ ID NO: 365928 - DNA, 57 bp, Artificial
  Synthetic oligonucleotide
cctggaagatgttaggctggagccaatcattgattgactcattacatagcaaatcag

SEQ ID NO: 365929 - DNA, 57 bp, Artificial
  Synthetic oligonucleotide
cctggaagcccaagaatcaccaggctttatctcaattgggcctcggagcccaactct

SEQ ID NO: 365930 - DNA, 57 bp, Artificial
  Synthetic oligonucleotide
cctggaagggtcgctgcttccattgttggacatcatgcatggaaactatactacctt

SEQ ID NO: 365931 - DNA, 54 bp, Artificial
  Synthetic oligonucleotide
cctggaaggtcggccgagaggtgtgccatcggttcgtggtgaagcggcggtgga

SEQ ID NO: 365932 - DNA, 55 bp, Artificial
  Synthetic oligonucleotide
cctggaagtaccatacgtgaacatttgcccaacatcatcctggacacagcatgca

SEQ ID NO: 365933 - DNA, 55 bp, Artificial
  Synthetic oligonucleotide
cctggaatcagtcgtgtggcaggaccacgtttatatagtagagcacatcagcagg

SEQ ID NO: 365934 - DNA, 59 bp, Artificial
  Synthetic oligonucleotide
cctggaatcggtcgttcttactggtttatccgtctgtagtaatgcatgtaaatgcatat

SEQ ID NO: 365935 - DNA, 51 bp, Artificial
  Synthetic oligonucleotide
cctggaattggtcatcgctcgcgcgaaggaggccgcaaatggctaacgacg

SEQ ID NO: 365936 - DNA, 56 bp, Artificial
  Synthetic oligonucleotide
cctggaatttctgacaactttgtagactgggtaactggtcaaatttgggagctgcc

SEQ ID NO: 365937 - DNA, 60 bp, Artificial
  Synthetic oligonucleotide
cctggacaatcgttgtatagcttcttggcagcaaatgcccccgacactttggatggtggc

SEQ ID NO: 365938 - DNA, 52 bp, Artificial
  Synthetic oligonucleotide
cctggacacccatgttcgcatcggtctccgggcaaatacaagaaccccagac

SEQ ID NO: 365939 - DNA, 58 bp, Artificial
  Synthetic oligonucleotide
cctggacacctgcgttcaacacccgcaggcagccgctttttgcacacctccgtaagag

SEQ ID NO: 365940 - DNA, 55 bp, Artificial
  Synthetic oligonucleotide
cctggacacttccgtccttgttcggaatagcgaagcatattaggaactcactggg

SEQ ID NO: 365941 - DNA, 59 bp, Artificial
  Synthetic oligonucleotide
cctggacactttctgatgcactagggaatgaccttcctgggggatactgtcttgaacag

SEQ ID NO: 365942 - DNA, 60 bp, Artificial
  Synthetic oligonucleotide
cctggacagattagcaacagagggctgtattatgaactgcaaggctgcaaacattactat

SEQ ID NO: 365943 - DNA, 55 bp, Artificial
  Synthetic oligonucleotide
cctggacaggagtaactcaggatggagggagcagtgcttgcaaaaggggacctga

SEQ ID NO: 365944 - DNA, 59 bp, Artificial
  Synthetic oligonucleotide
cctggacaggcgcactcatcaccccgtgctccgcggaagaacaaaaactgcccatcaac

SEQ ID NO: 365945 - DNA, 60 bp, Artificial
  Synthetic oligonucleotide
cctggacaggcgcactcgtcaccccgtgtgccgcagaagagcagaaactacccatcaacg

SEQ ID NO: 365946 - DNA, 55 bp, Artificial
  Synthetic oligonucleotide
cctggacagtcgtccttacaatatcgttcagttgtgccagtgacaacgttatgtt

SEQ ID NO: 365947 - DNA, 59 bp, Artificial
  Synthetic oligonucleotide
cctggacagtgaatgatatacagaagttagtaggagtattaaattgggcagctcaaatt

SEQ ID NO: 365948 - DNA, 60 bp, Artificial
  Synthetic oligonucleotide
cctggacatctgcatttaacacccacagacaaccgctattcgctcatctccgtcggagag

SEQ ID NO: 365949 - DNA, 56 bp, Artificial
  Synthetic oligonucleotide
cctggaccaccctcggagtcccggcggcagaaacgaccaagcacgccctcgctctg

SEQ ID NO: 365950 - DNA, 55 bp, Artificial
  Synthetic oligonucleotide
cctggaccagtggccgcagctactacggtggcagcaaccgctctcatgttacgag

SEQ ID NO: 365951 - DNA, 55 bp, Artificial
  Synthetic oligonucleotide
cctggacccacgaagctactaccgaaccacgtgatacctttattgctagtacctg

SEQ ID NO: 365952 - DNA, 58 bp, Artificial
  Synthetic oligonucleotide
cctggaccgtgttcctcagcagttcgtttaattgtcccagagacatcgtaatgttgga

SEQ ID NO: 365953 - DNA, 56 bp, Artificial
  Synthetic oligonucleotide
cctggacctcgccctactatgcgccttggtttatataccagggtcactcaacaacg

SEQ ID NO: 365954 - DNA, 56 bp, Artificial
  Synthetic oligonucleotide
cctggaccttcaggcgaccggacctggctcctggacactttcgagtggacccagga

SEQ ID NO: 365955 - DNA, 50 bp, Artificial
  Synthetic oligonucleotide
cctggacgagctccaaccgctcaacgcacttaacggtgcaattgtacaga

SEQ ID NO: 365956 - DNA, 60 bp, Artificial
  Synthetic oligonucleotide
cctggacgatttctggacctctcgatggttatggtgcgtcaacgggtctcacactggcgc

SEQ ID NO: 365957 - DNA, 54 bp, Artificial
  Synthetic oligonucleotide
cctggacgccggacccgtccgatgtcttggtgtttgtcccgtatgaccaagaac

SEQ ID NO: 365958 - DNA, 60 bp, Artificial
  Synthetic oligonucleotide
cctggacggatttcgagaaccatgatgcatagtgcgcttttaaaagagtcaagcgcaagg

SEQ ID NO: 365959 - DNA, 57 bp, Artificial
  Synthetic oligonucleotide
cctggacgtatttcgagaaccatgatgcatagtgctcttctgaaggaatctagcgct

SEQ ID NO: 365960 - DNA, 60 bp, Artificial
  Synthetic oligonucleotide
cctggactcaaatcttttatacagcccccagccgcaatgtactggccatggactattctg

SEQ ID NO: 365961 - DNA, 55 bp, Artificial
  Synthetic oligonucleotide
cctggactcgtgcccaccggagccagccccttgacacctagaggcgtgctatgat

SEQ ID NO: 365962 - DNA, 55 bp, Artificial
  Synthetic oligonucleotide
cctggactgagacgctcggccccgaggtggccgatctgtgcgagatggccgggta

SEQ ID NO: 365963 - DNA, 55 bp, Artificial
  Synthetic oligonucleotide
cctggactgatacactttcgcagttatttctgacaaaaggatggccaactggatc

SEQ ID NO: 365964 - DNA, 55 bp, Artificial
  Synthetic oligonucleotide
cctggactttcttgctgttttttgtgagctaactaacaggtatttatactacttg

SEQ ID NO: 365965 - DNA, 55 bp, Artificial
  Synthetic oligonucleotide
cctggagaacttggcaccgataactgtgtcagagcctagggcaattcagaggaga

SEQ ID NO: 365966 - DNA, 55 bp, Artificial
  Synthetic oligonucleotide
cctggagaagctatatagtaacatgggaccaagacataccctgtaaaccgctccc

SEQ ID NO: 365967 - DNA, 60 bp, Artificial
  Synthetic oligonucleotide
cctggagacaaagcatccatcgcctcgccagttacaggaagaaaattctccacatgaggc

SEQ ID NO: 365968 - DNA, 52 bp, Artificial
  Synthetic oligonucleotide
cctggagacggtgctaaatttaaagggagaggttatattcaggtaaccgggc

SEQ ID NO: 365969 - DNA, 58 bp, Artificial
  Synthetic oligonucleotide
cctggagagcactcctggccgaaaggtcgagtagcatccagagggaggaaaccactcg

SEQ ID NO: 365970 - DNA, 56 bp, Artificial
  Synthetic oligonucleotide
cctggagatggatgggaccctgacctactgcgctgactactcgcggtgggactcca

SEQ ID NO: 365971 - DNA, 55 bp, Artificial
  Synthetic oligonucleotide
cctggagatgtcctaatgataaacagtaatggcaacttaattgcaccgcggggat

SEQ ID NO: 365972 - DNA, 60 bp, Artificial
  Synthetic oligonucleotide
cctggagatttgggcgtgcccccgcaagactgcaattgttctatctatcccggccacata

SEQ ID NO: 365973 - DNA, 58 bp, Artificial
  Synthetic oligonucleotide
cctggagatttgggcgtgcccccgcgagactgctagccgagtagtgttgggtcgcgaa

SEQ ID NO: 365974 - DNA, 55 bp, Artificial
  Synthetic oligonucleotide
cctggagcagaacagcgagaggttggtcgaagaaatagacgggccggtggtcgaa

SEQ ID NO: 365975 - DNA, 55 bp, Artificial
  Synthetic oligonucleotide
cctggagccaaagtcgtgtctaccaaaggtgaccgcaacaagattcccttctctg

SEQ ID NO: 365976 - DNA, 55 bp, Artificial
  Synthetic oligonucleotide
cctggagcccggctaagcctgactagggttttcatttgggaatccgacatggaga

SEQ ID NO: 365977 - DNA, 60 bp, Artificial
  Synthetic oligonucleotide
cctggagctccagaaccaacaagtagagaacattttgcatggcaatcaggcactaatgca

SEQ ID NO: 365978 - DNA, 54 bp, Artificial
  Synthetic oligonucleotide
cctggagctccagtgcacttgtttgcactgagattcatactcttgggcttgagt

SEQ ID NO: 365979 - DNA, 55 bp, Artificial
  Synthetic oligonucleotide
cctggaggacctcattgaatcagtggctcagaatgctcttcaaatttcccaaccg

SEQ ID NO: 365980 - DNA, 55 bp, Artificial
  Synthetic oligonucleotide
cctggaggtactaccgcctgagttagaacgtcaggtcgaaatcctcattcggagt

SEQ ID NO: 365981 - DNA, 57 bp, Artificial
  Synthetic oligonucleotide
cctggaggttatgctgctattgggggtggtaggcaaagcgtagatataacgcaaaac

SEQ ID NO: 365982 - DNA, 55 bp, Artificial
  Synthetic oligonucleotide
cctggagtaccgtacgagggatattccggataatgcgctcgcggttagcgttctg

SEQ ID NO: 365983 - DNA, 58 bp, Artificial
  Synthetic oligonucleotide
cctggagtacgactggatccccttcgtgaacagagaagaataaacgtgcggcagtgcg

SEQ ID NO: 365984 - DNA, 59 bp, Artificial
  Synthetic oligonucleotide
cctggagtactttccttcgcagatgctgcggactggcaacaactttgaaattacgtaca

SEQ ID NO: 365985 - DNA, 52 bp, Artificial
  Synthetic oligonucleotide
cctggagtcccatttatactaaaaccctctgggggactccaggggcaaaagc

SEQ ID NO: 365986 - DNA, 52 bp, Artificial
  Synthetic oligonucleotide
cctggagttaggtatccaatttacttcgggttcctctttaaactggtgccag

SEQ ID NO: 365987 - DNA, 51 bp, Artificial
  Synthetic oligonucleotide
cctggagttgtggccataatgatacttgtggagttgatattgcggagacga

SEQ ID NO: 365988 - DNA, 60 bp, Artificial
  Synthetic oligonucleotide
cctggagtttgactctgatttgataattgagcgaagagaaggaaacgatgtatgctatcc

SEQ ID NO: 365989 - DNA, 55 bp, Artificial
  Synthetic oligonucleotide
cctggataccagaatgggagtttgttagcacaccactcctagtaaaactgtggta

SEQ ID NO: 365990 - DNA, 60 bp, Artificial
  Synthetic oligonucleotide
cctggataggtgctgtacctattcctatatgggggaacacagcagccatcgatagataag

SEQ ID NO: 365991 - DNA, 60 bp, Artificial
  Synthetic oligonucleotide
cctggatatatcgatctatgtttgcttgtcatacgtagtgatgctttcatttcacttgcc

SEQ ID NO: 365992 - DNA, 55 bp, Artificial
  Synthetic oligonucleotide
cctggatattgatgagccgacaggacagacagcagactggctgagcattgttgtc

SEQ ID NO: 365993 - DNA, 54 bp, Artificial
  Synthetic oligonucleotide
cctggatcatctccggcacttaccccgttgtaagccttatttgcttccgcgaga

SEQ ID NO: 365994 - DNA, 55 bp, Artificial
  Synthetic oligonucleotide
cctggatccattacttcagaggggtcattggtcagtgacatatctgcaagagaat

SEQ ID NO: 365995 - DNA, 55 bp, Artificial
  Synthetic oligonucleotide
cctggatcccagaatgggattttgtctcaacaccacctttgataagactagccta

SEQ ID NO: 365996 - DNA, 55 bp, Artificial
  Synthetic oligonucleotide
cctggatccctaagaggaaccgctccatcctcaacacgagtcaaaggggaatcct

SEQ ID NO: 365997 - DNA, 55 bp, Artificial
  Synthetic oligonucleotide
cctggatcgaatctgccccgctgttagcgagtctaacgccaaacgagtcatctcg

SEQ ID NO: 365998 - DNA, 55 bp, Artificial
  Synthetic oligonucleotide
cctggatcgacaatttcatgtcactaaggttgatggccgcccaatgcagatgggc

SEQ ID NO: 365999 - DNA, 55 bp, Artificial
  Synthetic oligonucleotide
cctggatctagagagactagtctgcgacgacataaaggatattcttccttacctg

SEQ ID NO: 366000 - DNA, 55 bp, Artificial
  Synthetic oligonucleotide
cctggatctgacgcctctgggtgaaagctaccggccccgtgagcttgaacctgaa

SEQ ID NO: 366001 - DNA, 60 bp, Artificial
  Synthetic oligonucleotide
cctggatgaacgcatctggatataccaaagcgtgcggagcgcctccttgtgtcatcggag

SEQ ID NO: 366002 - DNA, 57 bp, Artificial
  Synthetic oligonucleotide
cctggatgaaggaacgccacatatacaaggatacttaagactgaaaacgaagaaaga

SEQ ID NO: 366003 - DNA, 52 bp, Artificial
  Synthetic oligonucleotide
cctggatgaatgacctacggaaagcggtcgatctaggtttgcaggggctgta

SEQ ID NO: 366004 - DNA, 55 bp, Artificial
  Synthetic oligonucleotide
cctggatgagagtgggcaagggaatttacgccccaccaattagaggaactataag

SEQ ID NO: 366005 - DNA, 56 bp, Artificial
  Synthetic oligonucleotide
cctggatggaaattaacatacgtgggctataacggaaaggacacgcgaggtcatta

SEQ ID NO: 366006 - DNA, 55 bp, Artificial
  Synthetic oligonucleotide
cctggatggaagttaacgtatgtaggctataatggaaagaacacacgaggccact

SEQ ID NO: 366007 - DNA, 57 bp, Artificial
  Synthetic oligonucleotide
cctggatgtactactgtccggtaccctattaatccaaagcatatctctaactgtaat

SEQ ID NO: 366008 - DNA, 55 bp, Artificial
  Synthetic oligonucleotide
cctggattagccaaacacattaccggtacgtggcttctgatgagtatacggcggg

SEQ ID NO: 366009 - DNA, 60 bp, Artificial
  Synthetic oligonucleotide
cctggattatggtgagtgtgcttatgtcactgatcctgactcaatattcgattccctcaa

SEQ ID NO: 366010 - DNA, 55 bp, Artificial
  Synthetic oligonucleotide
cctggattatgtttcgacctggaccgagatacaggtctctaccaaagtgcatacg

SEQ ID NO: 366011 - DNA, 55 bp, Artificial
  Synthetic oligonucleotide
cctggattccaaagaggaaccgctccattctcaatactagccaaaggggaattct

SEQ ID NO: 366012 - DNA, 56 bp, Artificial
  Synthetic oligonucleotide
cctggattgacaacgaggacttctcccctaccggcctggcctggcggtctggcgag

SEQ ID NO: 366013 - DNA, 56 bp, Artificial
  Synthetic oligonucleotide
cctggattgcatagcacgattgaagggatccctcctttaatttgaactggtttccc

SEQ ID NO: 366014 - DNA, 55 bp, Artificial
  Synthetic oligonucleotide
cctggcaaaacatggagcaatcaccagtaacaatacaccagctaccaatgcagct

SEQ ID NO: 366015 - DNA, 60 bp, Artificial
  Synthetic oligonucleotide
cctggcaaagaggattgccgcctccctcggggatgagacctcagtcggcatcataccgcg

SEQ ID NO: 366016 - DNA, 55 bp, Artificial
  Synthetic oligonucleotide
cctggcaaatattatgtcaacggtgtcaactaatgccttgacagtagctcaacac

SEQ ID NO: 366017 - DNA, 55 bp, Artificial
  Synthetic oligonucleotide
cctggcaacacaaaggtctatcttgacgatcagagttaacgtcatgcgctcttga

SEQ ID NO: 366018 - DNA, 60 bp, Artificial
  Synthetic oligonucleotide
cctggcaacagaacaagccatctcaagacagctctatcgcatcgaagagcaagcagccag

SEQ ID NO: 366019 - DNA, 60 bp, Artificial
  Synthetic oligonucleotide
cctggcaagttaactcacattgaggctgcgattttggacatgtgcacaaatcttgtgtgt

SEQ ID NO: 366020 - DNA, 60 bp, Artificial
  Synthetic oligonucleotide
cctggcaattaatactgggtgtgtttttggctcatgccaggacattattcatcccgaggc

SEQ ID NO: 366021 - DNA, 57 bp, Artificial
  Synthetic oligonucleotide
cctggcaattgtcacgggagagaggagcccgttctcgggcacttttctctcaaacaa

SEQ ID NO: 366022 - DNA, 55 bp, Artificial
  Synthetic oligonucleotide
cctggcacaaacttcacactaccaaccacacaagtgccagttgagcaacccagag

SEQ ID NO: 366023 - DNA, 55 bp, Artificial
  Synthetic oligonucleotide
cctggcacgcagattacatatgcacgcttggtcatgtcagtacttccgtccgtgc

SEQ ID NO: 366024 - DNA, 55 bp, Artificial
  Synthetic oligonucleotide
cctggcactaaaacacagagcccaagaactgcatccggagttctacaaggactgc

SEQ ID NO: 366025 - DNA, 60 bp, Artificial
  Synthetic oligonucleotide
cctggcaggccaactgatgttggtagagcttctggtgtcatttgagatttcgttatagtt

SEQ ID NO: 366026 - DNA, 56 bp, Artificial
  Synthetic oligonucleotide
cctggcaggttccggacaattgtgtgtggtctcttcccaacccaaattcaggtgcg

SEQ ID NO: 366027 - DNA, 59 bp, Artificial
  Synthetic oligonucleotide
cctggcatagaaggtgatgtgcgagcctggctatctgggtttgcttattaccgggaaaa

SEQ ID NO: 366028 - DNA, 55 bp, Artificial
  Synthetic oligonucleotide
cctggcatcaaacccctgataagcaaaagcctgcaaccagtcctggatcacagtc

SEQ ID NO: 366029 - DNA, 60 bp, Artificial
  Synthetic oligonucleotide
cctggcatctggcagacgttccgacactattggactcatacggagtgtatgctggctatc

SEQ ID NO: 366030 - DNA, 55 bp, Artificial
  Synthetic oligonucleotide
cctggcatgaacttccaatcacccaaatattcgaaatacctgagtctatggatcc

SEQ ID NO: 366031 - DNA, 55 bp, Artificial
  Synthetic oligonucleotide
cctggcattaagtataagggggagaccaaacgacaactggttctgaagtcctcat

SEQ ID NO: 366032 - DNA, 60 bp, Artificial
  Synthetic oligonucleotide
cctggccaaacttatcccggtatctgatcatgtcaggatctccaggtagacgttccactc

SEQ ID NO: 366033 - DNA, 55 bp, Artificial
  Synthetic oligonucleotide
cctggccaagcactcaaaatggcctccaacacaccttaaaccaggatgcagcagg

SEQ ID NO: 366034 - DNA, 55 bp, Artificial
  Synthetic oligonucleotide
cctggccacaaagcaagagttctggctgaggcaatgaaccaagcaggcagtataa

SEQ ID NO: 366035 - DNA, 55 bp, Artificial
  Synthetic oligonucleotide
cctggccagatggaactccttgcgagcccatcttacctccgttcgtcatcgaagg

SEQ ID NO: 366036 - DNA, 58 bp, Artificial
  Synthetic oligonucleotide
cctggcccatatgcggtatctgtgcgccttttactgtcgcccgtttagagagtcggac

SEQ ID NO: 366037 - DNA, 55 bp, Artificial
  Synthetic oligonucleotide
cctggcccgagagttacatccggagtattacaagaactgctgacacagaagggac

SEQ ID NO: 366038 - DNA, 56 bp, Artificial
  Synthetic oligonucleotide
cctggcccggcctcaagtcgctcgtggatgacggcatctatcgacccgagctggcc

SEQ ID NO: 366039 - DNA, 55 bp, Artificial
  Synthetic oligonucleotide
cctggccgactcaacccttacctcgcatcaccgtcggtcctacctacgactcggc

SEQ ID NO: 366040 - DNA, 55 bp, Artificial
  Synthetic oligonucleotide
cctggccgctccactccgtggaattcctagcggattttaagcggagtgccacctc

SEQ ID NO: 366041 - DNA, 56 bp, Artificial
  Synthetic oligonucleotide
cctggcctcaattcaattgggcctgtaagcccaacccttgacattgaattggaccg

SEQ ID NO: 366042 - DNA, 60 bp, Artificial
  Synthetic oligonucleotide
cctggccttatttcaattgggcctctaagcccaagtctcgacatggatgcgcatctgatg

SEQ ID NO: 366043 - DNA, 55 bp, Artificial
  Synthetic oligonucleotide
cctggcgaaaacacatactcaggttctaccttactgactaaagtggataaggagc

SEQ ID NO: 366044 - DNA, 51 bp, Artificial
  Synthetic oligonucleotide
cctggcgaagaaaggtgttggtcacggtcgcgacgtaagccatctggtgcc

SEQ ID NO: 366045 - DNA, 55 bp, Artificial
  Synthetic oligonucleotide
cctggcgaccaggtcacaaggatttaaaacttaacgattgccaattcacagacgg

SEQ ID NO: 366046 - DNA, 58 bp, Artificial
  Synthetic oligonucleotide
cctggcgaggtcaccgccttttgctctgccctatacaggtttaatcgtgaagcccagc

SEQ ID NO: 366047 - DNA, 55 bp, Artificial
  Synthetic oligonucleotide
cctggcgaggttaccgccttctgctccgccctatataggttcaaccgtgaggccc

SEQ ID NO: 366048 - DNA, 53 bp, Artificial
  Synthetic oligonucleotide
cctggcgccccttgtggtgtggggtcccgggcgtttcgtgacgcgcgaaaatc

SEQ ID NO: 366049 - DNA, 60 bp, Artificial
  Synthetic oligonucleotide
cctggcgcgctgtactctcccactgatgtagttatgtccaaaaagttgcagggcgtatac

SEQ ID NO: 366050 - DNA, 53 bp, Artificial
  Synthetic oligonucleotide
cctggcgctccacctgtacggagggtcaccccagcggccgaaaggtagtaccc

SEQ ID NO: 366051 - DNA, 53 bp, Artificial
  Synthetic oligonucleotide
cctggcggatagtgccgggtcccttttttgttcgccggaaattctcgcaatcc

SEQ ID NO: 366052 - DNA, 55 bp, Artificial
  Synthetic oligonucleotide
cctggcggatatgctcatgaattgccatcgcccgggaggggagtcgatcttcatc

SEQ ID NO: 366053 - DNA, 55 bp, Artificial
  Synthetic oligonucleotide
cctggcggcaggaatacatctcttacaagaacatatagtgactttaatggaagca

SEQ ID NO: 366054 - DNA, 60 bp, Artificial
  Synthetic oligonucleotide
cctggcggttcaccatcccttttcccatctgcctgctctaccaagtccacatttcatgcc

SEQ ID NO: 366055 - DNA, 59 bp, Artificial
  Synthetic oligonucleotide
cctggcgtactacaattccacgttagtgatgccagagggctaccaccatcatggttccc

SEQ ID NO: 366056 - DNA, 55 bp, Artificial
  Synthetic oligonucleotide
cctggcgtcactactgctatcgagcaagcagctctagcagcggccaactccgcct

SEQ ID NO: 366057 - DNA, 60 bp, Artificial
  Synthetic oligonucleotide
cctggctacacaatggggtcatttgagcttatacaggcagtgactgaatttgccaggacc

SEQ ID NO: 366058 - DNA, 57 bp, Artificial
  Synthetic oligonucleotide
cctggctacgcaccattggccatcagcgtgactcccacaaaagtccaattggtgccc

SEQ ID NO: 366059 - DNA, 60 bp, Artificial
  Synthetic oligonucleotide
cctggctacgccagtgtgcgcgttctcacgacgagatctgcacctgcggacgatggagga

SEQ ID NO: 366060 - DNA, 55 bp, Artificial
  Synthetic oligonucleotide
cctggctacttagatccctttctcgtctagctgactctgccactcaccggactca

SEQ ID NO: 366061 - DNA, 60 bp, Artificial
  Synthetic oligonucleotide
cctggctagcaagtagtaaccaagcaaaatatgtaagggattgctgcacaatggtacgcc

SEQ ID NO: 366062 - DNA, 55 bp, Artificial
  Synthetic oligonucleotide
cctggctagcctgctgcaatgaaaacttaattataacacttagatacttacaacc

SEQ ID NO: 366063 - DNA, 53 bp, Artificial
  Synthetic oligonucleotide
cctggctagctatgggtacgcatgcgagccctcatatcatgcatcattggaca

SEQ ID NO: 366064 - DNA, 55 bp, Artificial
  Synthetic oligonucleotide
cctggctataagtatgttgggcctggtaacggccttgataaagggccacctgtca

SEQ ID NO: 366065 - DNA, 57 bp, Artificial
  Synthetic oligonucleotide
cctggctattctatgcctgttttgtataagtatttgaatgttccattagagagagtc

SEQ ID NO: 366066 - DNA, 53 bp, Artificial
  Synthetic oligonucleotide
cctggctcaaggcgaacgtgtcggcggacgcccactgggaaccggcaaagggg

SEQ ID NO: 366067 - DNA, 60 bp, Artificial
  Synthetic oligonucleotide
cctggctcactactgtaggaggtacgcaccgctgtatgcggcagaagcaagaagggtgtt

SEQ ID NO: 366068 - DNA, 60 bp, Artificial
  Synthetic oligonucleotide
cctggctcagtgacagtccacgaggcacagggcgctacctacacggagaccactattatt

SEQ ID NO: 366069 - DNA, 58 bp, Artificial
  Synthetic oligonucleotide
cctggctccaaacaaccagctgttctatctgaaaaagatactcgacttcaggttgact

SEQ ID NO: 366070 - DNA, 56 bp, Artificial
  Synthetic oligonucleotide
cctggctccattctctcccagcccaacacagaacaatcacctgccatagttctccc

SEQ ID NO: 366071 - DNA, 55 bp, Artificial
  Synthetic oligonucleotide
cctggctctagacttaaacctttagagcttgggacgaacttggaagatagcacac

SEQ ID NO: 366072 - DNA, 55 bp, Artificial
  Synthetic oligonucleotide
cctggctgatctaggtgacaaggagttatctcctatagacggacaatgcgtatca

SEQ ID NO: 366073 - DNA, 55 bp, Artificial
  Synthetic oligonucleotide
cctggctgcaaatgagaccaactcaaacaggaagtcagcacagttcacggtggca

SEQ ID NO: 366074 - DNA, 55 bp, Artificial
  Synthetic oligonucleotide
cctggctgcccagtagggatttacgaattcttccctccttgcgaggaagtcttcg

SEQ ID NO: 366075 - DNA, 60 bp, Artificial
  Synthetic oligonucleotide
cctggctgcgggcaatagtcgagattttatcgcactcgcggagatgcttgccccttttga

SEQ ID NO: 366076 - DNA, 54 bp, Artificial
  Synthetic oligonucleotide
cctggcttgttacaagcgtcttatgatgcgagcgaagcggtagcaatgttcgtt

SEQ ID NO: 366077 - DNA, 55 bp, Artificial
  Synthetic oligonucleotide
cctggctttatcctaaacattgagttcttcgtgatcgacaatgtctctaggagcg

SEQ ID NO: 366078 - DNA, 55 bp, Artificial
  Synthetic oligonucleotide
cctggctttctttaaggttatcaaggatcttggtcataagttcattgctgtcgtc

SEQ ID NO: 366079 - DNA, 52 bp, Artificial
  Synthetic oligonucleotide
cctgggaaaacaagaacgggtacgaacaaccgagttcgttcttacatcaagc

SEQ ID NO: 366080 - DNA, 55 bp, Artificial
  Synthetic oligonucleotide
cctgggaacaaagaagcgccgatgaggggagaaacagccctcagtcgtcccgtaa

SEQ ID NO: 366081 - DNA, 55 bp, Artificial
  Synthetic oligonucleotide
cctgggaatgctgagatagaggatcttatctttcttgcacgatctgctctcattc

SEQ ID NO: 366082 - DNA, 58 bp, Artificial
  Synthetic oligonucleotide
cctgggacaatggaactggcctgatggggctaaaatagagtacttcctctaagataca

SEQ ID NO: 366083 - DNA, 56 bp, Artificial
  Synthetic oligonucleotide
cctgggacaatgtggactcctaggaaccctaataggacctccccaatgtgatcaat

SEQ ID NO: 366084 - DNA, 55 bp, Artificial
  Synthetic oligonucleotide
cctgggacaccctcttattctagacacctgcaatatagaaggattggtatacggc

SEQ ID NO: 366085 - DNA, 55 bp, Artificial
  Synthetic oligonucleotide
cctgggacagaagaagtacaccaaaacaacgtattggtgggatggactccaatcc

SEQ ID NO: 366086 - DNA, 57 bp, Artificial
  Synthetic oligonucleotide
cctgggaccacaatggctctgtacttccggagaagacgacgcacctggcgaccaagg

SEQ ID NO: 366087 - DNA, 55 bp, Artificial
  Synthetic oligonucleotide
cctgggaccagttgcaacggtgtgatgaaagactggtatagcctcttggtcaggt

SEQ ID NO: 366088 - DNA, 60 bp, Artificial
  Synthetic oligonucleotide
cctgggaccgcactactcgttccggtcatgggacacgcgcagacacacatttagcagagc

SEQ ID NO: 366089 - DNA, 59 bp, Artificial
  Synthetic oligonucleotide
cctgggaccttcgatcttggggggctatacgaagcaattgaggagtgcctgattaatga

SEQ ID NO: 366090 - DNA, 58 bp, Artificial
  Synthetic oligonucleotide
cctgggacgttgactctgtgaacgatcctgttctcagagccgatttcgaccctaacag

SEQ ID NO: 366091 - DNA, 55 bp, Artificial
  Synthetic oligonucleotide
cctgggacgttgattctgtgaacgatccagttctcagagccgacttcaaccccga

SEQ ID NO: 366092 - DNA, 53 bp, Artificial
  Synthetic oligonucleotide
cctgggactttccactggggcgttccaggaggagtggtctgggcgggaccagg

SEQ ID NO: 366093 - DNA, 51 bp, Artificial
  Synthetic oligonucleotide
cctgggactttccactggggcgttccgggaggaggtggggactgggcggga

SEQ ID NO: 366094 - DNA, 60 bp, Artificial
  Synthetic oligonucleotide
cctgggagaaccactgtagatatgcagggccctttggaatgtccagaatcctctttgctc

SEQ ID NO: 366095 - DNA, 55 bp, Artificial
  Synthetic oligonucleotide
cctgggagatggtgtcctgaaaacaacattgttaggtgaattgagtcagtacttt

SEQ ID NO: 366096 - DNA, 55 bp, Artificial
  Synthetic oligonucleotide
cctgggagcatgcaggggagacgtgagagtgacgcctacatttgtgggagcagca

SEQ ID NO: 366097 - DNA, 59 bp, Artificial
  Synthetic oligonucleotide
cctgggatagacaaccaattcaactaagccatgagatgcctgaactgtacttaggtaag

SEQ ID NO: 366098 - DNA, 59 bp, Artificial
  Synthetic oligonucleotide
cctgggatatttcagactcatcaggaaaccatgtccctggtgggtactgtttggagcag

SEQ ID NO: 366099 - DNA, 55 bp, Artificial
  Synthetic oligonucleotide
cctgggatcagcttctttccggtcaccgggtacagccgcatgacgtccgtttggg

SEQ ID NO: 366100 - DNA, 60 bp, Artificial
  Synthetic oligonucleotide
cctgggatgatctgttctgtgatgaatccatttcgtcgccagagcccccctcgtcctcag

SEQ ID NO: 366101 - DNA, 55 bp, Artificial
  Synthetic oligonucleotide
cctgggatgcagatcagaggatttgtgtactttgtcgaaatattggcgaggagca

SEQ ID NO: 366102 - DNA, 59 bp, Artificial
  Synthetic oligonucleotide
cctgggcaattcattgcgtcaacctcccctttggcgctcgatatgaccgaagaggagga

SEQ ID NO: 366103 - DNA, 55 bp, Artificial
  Synthetic oligonucleotide
cctgggcacacaagtgaaaactactgtcgtggcaggttagtagccagacgaccgg

SEQ ID NO: 366104 - DNA, 51 bp, Artificial
  Synthetic oligonucleotide
cctgggcacacctacacatgggcacggacaccaattccccaaacacgttgc

SEQ ID NO: 366105 - DNA, 57 bp, Artificial
  Synthetic oligonucleotide
cctgggcaggacacaagcccaggcgagggggtcaggcgacggaaaacgattatagca

SEQ ID NO: 366106 - DNA, 57 bp, Artificial
  Synthetic oligonucleotide
cctgggcaggagtggttacacaatacatgtacaatgtaatgctagtaagttccatca

SEQ ID NO: 366107 - DNA, 60 bp, Artificial
  Synthetic oligonucleotide
cctgggcatcagtgctaagtgtcactggtgcatatgtctattttacaaactcgttctttg

SEQ ID NO: 366108 - DNA, 55 bp, Artificial
  Synthetic oligonucleotide
cctgggcccagaacatacccacagcaattcaacaggtgagaagccttataggcaa

SEQ ID NO: 366109 - DNA, 55 bp, Artificial
  Synthetic oligonucleotide
cctgggcccttatgccgtacttggggacgaggtcctgtcattactgagcacagtg

SEQ ID NO: 366110 - DNA, 54 bp, Artificial
  Synthetic oligonucleotide
cctgggcgaagtctaagatacaatccggatggttctactccaggggaggaaagg

SEQ ID NO: 366111 - DNA, 55 bp, Artificial
  Synthetic oligonucleotide
cctgggcgataccgggttgtgacactttgcaatatttgtcacagctccttaaggc

SEQ ID NO: 366112 - DNA, 55 bp, Artificial
  Synthetic oligonucleotide
cctgggcgggcttataagactaatataagtagctgcacttccgaatggctgagtt

SEQ ID NO: 366113 - DNA, 52 bp, Artificial
  Synthetic oligonucleotide
cctgggcttcaaataaagtgcaacttcactgtacaaggccgtgggagtttca

SEQ ID NO: 366114 - DNA, 55 bp, Artificial
  Synthetic oligonucleotide
cctggggaacaccatctcaaacaccgttcagtacacggtactgcaggtcgacaga

SEQ ID NO: 366115 - DNA, 55 bp, Artificial
  Synthetic oligonucleotide
cctggggaattagcctacaaactgtgtaatacaactcacatatacaaagatgaga

SEQ ID NO: 366116 - DNA, 51 bp, Artificial
  Synthetic oligonucleotide
cctggggacaagacgcgggagacgaaaatcgttcgcctggctctcagcccc

SEQ ID NO: 366117 - DNA, 54 bp, Artificial
  Synthetic oligonucleotide
cctggggacgtactggtaatcaatagcaatggaaacctaatcgcccctcggggc

SEQ ID NO: 366118 - DNA, 55 bp, Artificial
  Synthetic oligonucleotide
cctggggagaatgcctgaacacttcgcaggcaaaaccagagaggcctttgatacc

SEQ ID NO: 366119 - DNA, 55 bp, Artificial
  Synthetic oligonucleotide
cctggggagcctggtgtggtattggggacaggagctaaagaatagtgctataagt

SEQ ID NO: 366120 - DNA, 56 bp, Artificial
  Synthetic oligonucleotide
cctggggattgtcctggggtaggtacaggttgcactgcctgtggtgtttacctgga

SEQ ID NO: 366121 - DNA, 60 bp, Artificial
  Synthetic oligonucleotide
cctggggatttggggttgctctggaaaactcatttgcaccactgatgtgccttggaatga

SEQ ID NO: 366122 - DNA, 57 bp, Artificial
  Synthetic oligonucleotide
cctggggcaagttgtgaggcttattcagagaacgggatctttaatatcagttcccca

SEQ ID NO: 366123 - DNA, 55 bp, Artificial
  Synthetic oligonucleotide
cctggggccactttaccagagaaccaggataccttccagtggcagtcatcttgca

SEQ ID NO: 366124 - DNA, 60 bp, Artificial
  Synthetic oligonucleotide
cctggggcgccaccaaccagccggccgatcaagtcgatgactcccctctcgctcgcgatc

SEQ ID NO: 366125 - DNA, 54 bp, Artificial
  Synthetic oligonucleotide
cctggggctatatacgcgtttagtttctgacgggaagggtgcaataatccgtag

SEQ ID NO: 366126 - DNA, 57 bp, Artificial
  Synthetic oligonucleotide
cctgggggagcgacctagggtgagagaggaatctctataaatattccgagccgctaa

SEQ ID NO: 366127 - DNA, 60 bp, Artificial
  Synthetic oligonucleotide
cctgggggcaatcagtttctggatgtgctccaatgggtctttacagtgcagaatatgtat

SEQ ID NO: 366128 - DNA, 58 bp, Artificial
  Synthetic oligonucleotide
cctgggggtgtcggatttctggcgtcattacctgacgtgtctggatattttgcagaag

SEQ ID NO: 366129 - DNA, 53 bp, Artificial
  Synthetic oligonucleotide
cctggggtacgcgtaggtggcgcccccactatagttcgccctggggtcatacc

SEQ ID NO: 366130 - DNA, 59 bp, Artificial
  Synthetic oligonucleotide
cctggggtgggtacaggttgcactgcatgtgggatctatctagacaaactgaaatcagt

SEQ ID NO: 366131 - DNA, 53 bp, Artificial
  Synthetic oligonucleotide
cctggggttcaggagtaggttttacgttggtatgtactgtggggcttacagag

SEQ ID NO: 366132 - DNA, 54 bp, Artificial
  Synthetic oligonucleotide
cctgggtaccactcacaagggtgccgtcaaggatgttggttctgacgggcgacg

SEQ ID NO: 366133 - DNA, 54 bp, Artificial
  Synthetic oligonucleotide
cctgggtatacaggtaaccctaccctcgatcgggaacttaaataatatgcgtgc

SEQ ID NO: 366134 - DNA, 55 bp, Artificial
  Synthetic oligonucleotide
cctgggtatatagacctgatcatcgcagtgcaccgcccgagagtcctagtcctgc

SEQ ID NO: 366135 - DNA, 60 bp, Artificial
  Synthetic oligonucleotide
cctgggtcaatcagacgtatttgaacatcagtgtcactaatttggcggctgaacaggaca

SEQ ID NO: 366136 - DNA, 55 bp, Artificial
  Synthetic oligonucleotide
cctgggtccaggattggcgtgcccaatctgtctaggtgcctgtatggatgcagtg

SEQ ID NO: 366137 - DNA, 54 bp, Artificial
  Synthetic oligonucleotide
cctgggtcctgcaagccccaaaggagtccctgcggggtttctggaagaagcact

SEQ ID NO: 366138 - DNA, 58 bp, Artificial
  Synthetic oligonucleotide
cctgggtctaagatggtggttcccaacctattaaggtgcttatacggatgcattgcat

SEQ ID NO: 366139 - DNA, 60 bp, Artificial
  Synthetic oligonucleotide
cctgggtctagaacacttccgcctaactgatgaagatctttatatggatgtaatgcgcta

SEQ ID NO: 366140 - DNA, 55 bp, Artificial
  Synthetic oligonucleotide
cctgggtggaactgtttcctgcgcttcctcagtgcctgcacacgccaaaatcggg

SEQ ID NO: 366141 - DNA, 55 bp, Artificial
  Synthetic oligonucleotide
cctgggttaaagaatgtatcaataagatcaaaggtttccttgaacgtaatagagc

SEQ ID NO: 366142 - DNA, 55 bp, Artificial
  Synthetic oligonucleotide
cctgggttctgaaaactctcaagaaacgcccagtctgagggcgtaagcccgtcca

SEQ ID NO: 366143 - DNA, 54 bp, Artificial
  Synthetic oligonucleotide
cctgggttgcgacgtaaagttgcatacaccgggttacggtacggtgattatgcg

SEQ ID NO: 366144 - DNA, 55 bp, Artificial
  Synthetic oligonucleotide
cctgggttgctgtacggtcggtgtaggctgctggtctgtcgcaaccccactcgta

SEQ ID NO: 366145 - DNA, 55 bp, Artificial
  Synthetic oligonucleotide
cctgggtttgaagccgactggtgatcagttcccattcgtgcagccgcgtcctcgt

SEQ ID NO: 366146 - DNA, 51 bp, Artificial
  Synthetic oligonucleotide
cctgggtttgatacttcctacctgaccccgtctcaggctacccagtttcct

SEQ ID NO: 366147 - DNA, 58 bp, Artificial
  Synthetic oligonucleotide
cctgggttttgcttaatgcatcttggtttaactccttcctcacacatgcactaaaata

SEQ ID NO: 366148 - DNA, 54 bp, Artificial
  Synthetic oligonucleotide
cctggtaagagtgaatttcataagccatcgttctaatcccttctccgtgtgagc

SEQ ID NO: 366149 - DNA, 55 bp, Artificial
  Synthetic oligonucleotide
cctggtaagattaattccactgtattctcccgcgttcgtaggtttaagaccatga

SEQ ID NO: 366150 - DNA, 51 bp, Artificial
  Synthetic oligonucleotide
cctggtaaggaggtatatatcaatgggattgcaaccaaagttagtgattca

SEQ ID NO: 366151 - DNA, 55 bp, Artificial
  Synthetic oligonucleotide
cctggtacaataatatgactttccttctacccgatggatatgcatatcgccgaac

SEQ ID NO: 366152 - DNA, 55 bp, Artificial
  Synthetic oligonucleotide
cctggtacgggagcgaagttggcgcatgtgttggtacaggcgtccatccgcctgt

SEQ ID NO: 366153 - DNA, 60 bp, Artificial
  Synthetic oligonucleotide
cctggtactcgcacttgtggcgatcattccgacaaatgcagacaaaatctgccttgggca

SEQ ID NO: 366154 - DNA, 55 bp, Artificial
  Synthetic oligonucleotide
cctggtacttaccacaccacctcgtatcttttaattcatgacggagaccgtgcag

SEQ ID NO: 366155 - DNA, 56 bp, Artificial
  Synthetic oligonucleotide
cctggtaggattccgataatgacgacgaaagacaatatttccccggacttgactca

SEQ ID NO: 366156 - DNA, 59 bp, Artificial
  Synthetic oligonucleotide
cctggtaggggacaccagatcgaagaatctgttattcgtgcactggtatttgccttcga

SEQ ID NO: 366157 - DNA, 57 bp, Artificial
  Synthetic oligonucleotide
cctggtatagataatagggaatgtttatctatggattataagcagacccagttatgc

SEQ ID NO: 366158 - DNA, 56 bp, Artificial
  Synthetic oligonucleotide
cctggtatataggatggactagacaggaagccacacggttcctccttaaacaatcc

SEQ ID NO: 366159 - DNA, 54 bp, Artificial
  Synthetic oligonucleotide
cctggtatgaaggttatcccttcaatcttaacctaactgttaacactcgcgtcc

SEQ ID NO: 366160 - DNA, 55 bp, Artificial
  Synthetic oligonucleotide
cctggtatgccaatggcagccaagccaatgtcagcaatgggcaggggaatgccag

SEQ ID NO: 366161 - DNA, 55 bp, Artificial
  Synthetic oligonucleotide
cctggtattaatgcgacatatcttccaggcttgtgatttgggtaatcgacttcct

SEQ ID NO: 366162 - DNA, 51 bp, Artificial
  Synthetic oligonucleotide
cctggtatttcgcgctcaacactcgcatgactatcacgaacgtcccgtgag

SEQ ID NO: 366163 - DNA, 60 bp, Artificial
  Synthetic oligonucleotide
cctggtatttgtcatgggctatcgaggtgggcctacatttgtacatgaggtagtgaggat

SEQ ID NO: 366164 - DNA, 56 bp, Artificial
  Synthetic oligonucleotide
cctggtatttgtcatgggctatttaggcgggcctacattcgtaaacgaagtagtga

SEQ ID NO: 366165 - DNA, 60 bp, Artificial
  Synthetic oligonucleotide
cctggtcaaaaggaaatgatggcatggacttagtgagatactttggctgtgtagtatacc

SEQ ID NO: 366166 - DNA, 56 bp, Artificial
  Synthetic oligonucleotide
cctggtcacttggctgctaactgctggcagggaggaaaaaagaaccagggaaactg

SEQ ID NO: 366167 - DNA, 55 bp, Artificial
  Synthetic oligonucleotide
cctggtcataaggcgagagttttggctgaagcaatgagccaagtgaccaatacca

SEQ ID NO: 366168 - DNA, 53 bp, Artificial
  Synthetic oligonucleotide
cctggtccaccatcgtccaaggccccgccgaaagctatgtagaatttgtcaac

SEQ ID NO: 366169 - DNA, 58 bp, Artificial
  Synthetic oligonucleotide
cctggtccactacccatacaggctttggcattatccttgtactattaactacaccata

SEQ ID NO: 366170 - DNA, 55 bp, Artificial
  Synthetic oligonucleotide
cctggtccccactagtcgaaagcatctagccataagatgagtggactaaggacgc

SEQ ID NO: 366171 - DNA, 57 bp, Artificial
  Synthetic oligonucleotide
cctggtccccttcttggctaggctgtgttgcacttttattggaacctgagtagagtg

SEQ ID NO: 366172 - DNA, 55 bp, Artificial
  Synthetic oligonucleotide
cctggtcctaaagcggtgaacgtgacttttaacttaccacatctgaatctaggac

SEQ ID NO: 366173 - DNA, 57 bp, Artificial
  Synthetic oligonucleotide
cctggtcctctttggatcccccactcccatgtccatctctggcctcttggtaatcat

SEQ ID NO: 366174 - DNA, 60 bp, Artificial
  Synthetic oligonucleotide
cctggtcgagtagtagttgcttcgacgggaaagaatggatgcatgtttgcatgacaggga

SEQ ID NO: 366175 - DNA, 55 bp, Artificial
  Synthetic oligonucleotide
cctggtcgattacccgtataggctgtggcactacccctgtactgtcaatttcacc

SEQ ID NO: 366176 - DNA, 55 bp, Artificial
  Synthetic oligonucleotide
cctggtcgcatcccggtgttttgagagtgacatcctggtctcatatcagggcacg

SEQ ID NO: 366177 - DNA, 60 bp, Artificial
  Synthetic oligonucleotide
cctggtcggcagaaccaggtgcagacgccagctgagtatctggctagctatacgccgcgc

SEQ ID NO: 366178 - DNA, 55 bp, Artificial
  Synthetic oligonucleotide
cctggtctggtattgtaactgtatcgctaactggcaagattggtcgcccatcggc

SEQ ID NO: 366179 - DNA, 60 bp, Artificial
  Synthetic oligonucleotide
cctggtgagaggatggatccagcagtaagaatggttgcaggtgttgtaggccatttactc

SEQ ID NO: 366180 - DNA, 55 bp, Artificial
  Synthetic oligonucleotide
cctggtgatagggcggcccctcttggttaccccgacttctctgggcaactggaga

SEQ ID NO: 366181 - DNA, 55 bp, Artificial
  Synthetic oligonucleotide
cctggtgatgcaacttgatcacaccgctcctcacctcaacagtcgaatcaaggac

SEQ ID NO: 366182 - DNA, 60 bp, Artificial
  Synthetic oligonucleotide
cctggtgatgcgagtttcttggactgggccagtgatccatactcgggcaacttgcctgac

SEQ ID NO: 366183 - DNA, 60 bp, Artificial
  Synthetic oligonucleotide
cctggtgcaccagtaccgacagacagggattcattccaatggcagactgctactaaccct

SEQ ID NO: 366184 - DNA, 55 bp, Artificial
  Synthetic oligonucleotide
cctggtgcgtccgctgtcactgctagctgtccaccggagcctagacctttctgtg

SEQ ID NO: 366185 - DNA, 55 bp, Artificial
  Synthetic oligonucleotide
cctggtgctcctgcttgcacagcaactaatcatgagtagagcaaattcatgcaca

SEQ ID NO: 366186 - DNA, 56 bp, Artificial
  Synthetic oligonucleotide
cctggtggattgtgacccaattcgaaataaggagattcaaatgaagattttctacc

SEQ ID NO: 366187 - DNA, 56 bp, Artificial
  Synthetic oligonucleotide
cctggtggtacaggtaaaaccaggtgggcgagagagtatggattggtagacgtcga

SEQ ID NO: 366188 - DNA, 55 bp, Artificial
  Synthetic oligonucleotide
cctggtggtccgcagttactacagcgcgcacatgtttcctattaccgagaaccgc

SEQ ID NO: 366189 - DNA, 55 bp, Artificial
  Synthetic oligonucleotide
cctggtgtcagtatgcggcagtctgtaggtatgaatatggacttctgaagcgtgg

SEQ ID NO: 366190 - DNA, 55 bp, Artificial
  Synthetic oligonucleotide
cctggtgtgacctcccaaggctgtctacccttcctagtcttgacccgcaggacgc

SEQ ID NO: 366191 - DNA, 55 bp, Artificial
  Synthetic oligonucleotide
cctggtgtgatctcccaagagtgtccaccctcccctcattagaccagaaggatgc

SEQ ID NO: 366192 - DNA, 55 bp, Artificial
  Synthetic oligonucleotide
cctggtgttgtactttcggtggatgggccctcagcgcctcatgttcctcgtgttg

SEQ ID NO: 366193 - DNA, 59 bp, Artificial
  Synthetic oligonucleotide
cctggtgtttccagggatgtccatatgcgtcaactggacgctatggaggttgcttacct

SEQ ID NO: 366194 - DNA, 53 bp, Artificial
  Synthetic oligonucleotide
cctggttaatctctctacggtttcctccgcccctcctacccgggtcagacgca

SEQ ID NO: 366195 - DNA, 56 bp, Artificial
  Synthetic oligonucleotide
cctggttacacctacacttcgttggatgtcagaccgacaaaaactgagaagggtca

SEQ ID NO: 366196 - DNA, 55 bp, Artificial
  Synthetic oligonucleotide
cctggttacctccttaggagtgtcctcacaagcacgccatacttcgtcagagcgc

SEQ ID NO: 366197 - DNA, 56 bp, Artificial
  Synthetic oligonucleotide
cctggttactgtctctttatgaggagttgtggcccgttgcccgccaacgtggcgtg

SEQ ID NO: 366198 - DNA, 60 bp, Artificial
  Synthetic oligonucleotide
cctggttcacagtcttccacgtcaggaatgacaagagaacaagcctcagaatacaccagg

SEQ ID NO: 366199 - DNA, 55 bp, Artificial
  Synthetic oligonucleotide
cctggttccagtaccggcaccaaacctacaataatgtctggggtgctaagtgcac

SEQ ID NO: 366200 - DNA, 55 bp, Artificial
  Synthetic oligonucleotide
cctggttccccaagcgcccgaactcctttcgcgcctcttggcgcggtggtgcgtg

SEQ ID NO: 366201 - DNA, 60 bp, Artificial
  Synthetic oligonucleotide
cctggttccgcatggaaggcttatgcctctatcgacctgaccatccctatctttgctgca

SEQ ID NO: 366202 - DNA, 50 bp, Artificial
  Synthetic oligonucleotide
cctggttccttccacgggctacggcgatagcgtccatgtccacacgggac

SEQ ID NO: 366203 - DNA, 56 bp, Artificial
  Synthetic oligonucleotide
cctggttcgtagcgagccagtggggagagcactacaactcccgccatataaacttt

SEQ ID NO: 366204 - DNA, 55 bp, Artificial
  Synthetic oligonucleotide
cctggttctggccccactgataaacttagggttccatgtttgataccacaagagt

SEQ ID NO: 366205 - DNA, 59 bp, Artificial
  Synthetic oligonucleotide
cctggttgaggataccagatcgaagaatctgttattcgtgcacacgaattttccttcga

SEQ ID NO: 366206 - DNA, 58 bp, Artificial
  Synthetic oligonucleotide
cctggttgcaaagtataagatagtagagggcagaccaggcaggaatggaattaccctg

SEQ ID NO: 366207 - DNA, 55 bp, Artificial
  Synthetic oligonucleotide
cctggttgcagtctttggcagcttgtatatttggatggaatatggagaatggaga

SEQ ID NO: 366208 - DNA, 55 bp, Artificial
  Synthetic oligonucleotide
cctggttgcggtaagagtagttgtatccgtagattgattaacactgattctcgct

SEQ ID NO: 366209 - DNA, 60 bp, Artificial
  Synthetic oligonucleotide
cctggttgctggcaaatcaaattggccagtctgtaattcttggtgagagctgcgatgtgc

SEQ ID NO: 366210 - DNA, 55 bp, Artificial
  Synthetic oligonucleotide
cctggttggatgcctggcttttaccgtgttaggactactgtaaactgtgaaattg

SEQ ID NO: 366211 - DNA, 56 bp, Artificial
  Synthetic oligonucleotide
cctggttgggatagatccttttcgcttactccagaacagccaggtatttagtctta

SEQ ID NO: 366212 - DNA, 55 bp, Artificial
  Synthetic oligonucleotide
cctggttgggattgatcctttccgtctgctccaaaacagtcaggtcttcagcctt

SEQ ID NO: 366213 - DNA, 57 bp, Artificial
  Synthetic oligonucleotide
cctggttggggacaccaggtcgaacagtctgcaatttgtgatgcggattttcccttc

SEQ ID NO: 366214 - DNA, 59 bp, Artificial
  Synthetic oligonucleotide
cctggttggggataccagatcgaagaatctcttattcgtgcatctgtatttcccttcga

SEQ ID NO: 366215 - DNA, 52 bp, Artificial
  Synthetic oligonucleotide
cctggttgtaagaatctttatagtggatctggcacggttgcctctcctgcat

SEQ ID NO: 366216 - DNA, 59 bp, Artificial
  Synthetic oligonucleotide
cctggttgtggataccaggtcgaagaatctctgatttgtgcactggtatttcccttcga

SEQ ID NO: 366217 - DNA, 55 bp, Artificial
  Synthetic oligonucleotide
cctggtttgagagaccaggtcgaataggcgttggttcgtgcactggaatttccct

SEQ ID NO: 366218 - DNA, 58 bp, Artificial
  Synthetic oligonucleotide
cctggttttactctgcccaagccagatacacagctttcgtctgcaatcgaacttcctt

SEQ ID NO: 366219 - DNA, 56 bp, Artificial
  Synthetic oligonucleotide
cctgtaaaatgtgacatctgtaactgtgaataccatattcctgttaatgtgaagcc

SEQ ID NO: 366220 - DNA, 60 bp, Artificial
  Synthetic oligonucleotide
cctgtaaaggagatcaagagggagcaatctagtcggctttttatcatccacatatcctcc

SEQ ID NO: 366221 - DNA, 55 bp, Artificial
  Synthetic oligonucleotide
cctgtaacaataaccctatcagagccaagaaatgtccagcagaggcttcctcccg

SEQ ID NO: 366222 - DNA, 55 bp, Artificial
  Synthetic oligonucleotide
cctgtaacacgtgtctatatggcaggcttcattcatttaaagccttaacccgcgt

SEQ ID NO: 366223 - DNA, 59 bp, Artificial
  Synthetic oligonucleotide
cctgtaacgactcatcgtcagtcattctcttgtcgtgaatctccactaccaccgtaccg

SEQ ID NO: 366224 - DNA, 59 bp, Artificial
  Synthetic oligonucleotide
cctgtaacgactcattgtccgtcatcctcttgtcgtgaatctccactaccaccgcccca

SEQ ID NO: 366225 - DNA, 56 bp, Artificial
  Synthetic oligonucleotide
cctgtaagctgacgcccccacattcggccagatctaaatttggctacggggcaaag

SEQ ID NO: 366226 - DNA, 60 bp, Artificial
  Synthetic oligonucleotide
cctgtaagcttcttcctgacacatcagcagttagcctccttggtggccctgcaacaaaca

SEQ ID NO: 366227 - DNA, 60 bp, Artificial
  Synthetic oligonucleotide
cctgtaagtcctgtttgagacccatagaagagatcaccctggactcaaatatggactaca

SEQ ID NO: 366228 - DNA, 55 bp, Artificial
  Synthetic oligonucleotide
cctgtaagtgagggcacaaacctatccacagaggtccctgttattgacacaccgg

SEQ ID NO: 366229 - DNA, 54 bp, Artificial
  Synthetic oligonucleotide
cctgtaatacctattgacacctcttttataaatggaaacccaccatacaaccaa

SEQ ID NO: 366230 - DNA, 60 bp, Artificial
  Synthetic oligonucleotide
cctgtaatagcggactatagaaattggtcaaagccgcagtgtcagattacaggatttgcg

SEQ ID NO: 366231 - DNA, 59 bp, Artificial
  Synthetic oligonucleotide
cctgtaatagtacattctgtaagccaactgtttacatgattgttcctatacatgcatgc

SEQ ID NO: 366232 - DNA, 56 bp, Artificial
  Synthetic oligonucleotide
cctgtacaaggacaacctagcagggagaaacaggtggacgagaagtaactgggaca

SEQ ID NO: 366233 - DNA, 55 bp, Artificial
  Synthetic oligonucleotide
cctgtacaatatccgaaatctccacatcccggaggtctgccttaaatgggagctg

SEQ ID NO: 366234 - DNA, 55 bp, Artificial
  Synthetic oligonucleotide
cctgtacagtcacatacgcgggaagagactttggtggtgaaggtccatccaaagc

SEQ ID NO: 366235 - DNA, 60 bp, Artificial
  Synthetic oligonucleotide
cctgtacattagaaccaatgggacctccaagatcaagatgaaatggggcatggaaatgag

SEQ ID NO: 366236 - DNA, 55 bp, Artificial
  Synthetic oligonucleotide
cctgtaccgtgccacatgatttctcgtttatacaggtacttacggtctctaaaga

SEQ ID NO: 366237 - DNA, 59 bp, Artificial
  Synthetic oligonucleotide
cctgtacctcagaaactcagtgatgacgatatgaggattttaagggatcactttcctcg

SEQ ID NO: 366238 - DNA, 51 bp, Artificial
  Synthetic oligonucleotide
cctgtacctccaagggttttatcccctagagtcacttcagcaatcgtagca

SEQ ID NO: 366239 - DNA, 57 bp, Artificial
  Synthetic oligonucleotide
cctgtacctggcaatctgtctccgaagactgcgaagcgtaggttaattcctggtttg

SEQ ID NO: 366240 - DNA, 60 bp, Artificial
  Synthetic oligonucleotide
cctgtacgctgacacatgcatcgaatattggatcgtgtggtagagtgagtataccgacat

SEQ ID NO: 366241 - DNA, 55 bp, Artificial
  Synthetic oligonucleotide
cctgtacggtgtagggtcggcatttgtctccttcgcagtcaagtgggagtatgtc

SEQ ID NO: 366242 - DNA, 60 bp, Artificial
  Synthetic oligonucleotide
cctgtactatacaaatgacgccagactcagactgcgcaggcagtcggaggaccgcaccca

SEQ ID NO: 366243 - DNA, 55 bp, Artificial
  Synthetic oligonucleotide
cctgtactccattcactaccatgagcctttcggtcagattactgaagctcccgcg

SEQ ID NO: 366244 - DNA, 59 bp, Artificial
  Synthetic oligonucleotide
cctgtagaaagtacatttgtaacatcagatttacaagagttacctgtcaatattgtaga

SEQ ID NO: 366245 - DNA, 55 bp, Artificial
  Synthetic oligonucleotide
cctgtagacccttgatacttagccatttgcaatatagaaggtacataagactgag

SEQ ID NO: 366246 - DNA, 50 bp, Artificial
  Synthetic oligonucleotide
cctgtagacgatgaagaaacagttcacgacctcggatcaaaagactttga

SEQ ID NO: 366247 - DNA, 55 bp, Artificial
  Synthetic oligonucleotide
cctgtagactactcctttgtacaaggaaaaggtccctatgactctttactatcta

SEQ ID NO: 366248 - DNA, 55 bp, Artificial
  Synthetic oligonucleotide
cctgtagagcacgttgtgtttaacccttctagtcgtgaccatatcactcgtgtgc

SEQ ID NO: 366249 - DNA, 55 bp, Artificial
  Synthetic oligonucleotide
cctgtagaggtagagacacacgttagtatcacatcaagccgtctcacacgacgtc

SEQ ID NO: 366250 - DNA, 60 bp, Artificial
  Synthetic oligonucleotide
cctgtagatgcagtagaccctctagggcctgcagtcatacccccagaaagatttcctata

SEQ ID NO: 366251 - DNA, 55 bp, Artificial
  Synthetic oligonucleotide
cctgtagcaacacgtggcatgggacattccccatcaacgcgtacaccacggggcc

SEQ ID NO: 366252 - DNA, 58 bp, Artificial
  Synthetic oligonucleotide
cctgtagctttattttggtataaaggcagtatgaaccctaatgtatatgcatttggtg

SEQ ID NO: 366253 - DNA, 60 bp, Artificial
  Synthetic oligonucleotide
cctgtaggcagtgcatacaagctaatcacagtccgttacagccgtaaagtatgtgttcag

SEQ ID NO: 366254 - DNA, 55 bp, Artificial
  Synthetic oligonucleotide
cctgtagggaggacaagtaaaacaagatgcccttatcctctatagatggtatttt

SEQ ID NO: 366255 - DNA, 55 bp, Artificial
  Synthetic oligonucleotide
cctgtagtatagtttccatggaatggggtctttaagcgagaagaaagacgctgag

SEQ ID NO: 366256 - DNA, 59 bp, Artificial
  Synthetic oligonucleotide
cctgtagtgctcaaaactgagccccactactgacagacacttttgaatcttcgtaataa

SEQ ID NO: 366257 - DNA, 56 bp, Artificial
  Synthetic oligonucleotide
cctgtagtggtaatacacactcatgacaatacaggtgacttttatttacatcctag

SEQ ID NO: 366258 - DNA, 55 bp, Artificial
  Synthetic oligonucleotide
cctgtatacaccaagtacagacgtctgctgccggatattctccgcagaaatgtcg

SEQ ID NO: 366259 - DNA, 58 bp, Artificial
  Synthetic oligonucleotide
cctgtatatgtctgggccccaggaattattatggagggaaaccactctgtctgtgaaa

SEQ ID NO: 366260 - DNA, 55 bp, Artificial
  Synthetic oligonucleotide
cctgtatatgttccgtcagtcgcaacatctgaaacagttcccaaaacatctactt

SEQ ID NO: 366261 - DNA, 59 bp, Artificial
  Synthetic oligonucleotide
cctgtatctggataaagagtgttacaagaaagagtcgctcattctgaacctccgaagta

SEQ ID NO: 366262 - DNA, 60 bp, Artificial
  Synthetic oligonucleotide
cctgtatctttaaccctatcagagtgggcatgtcaatgaacgaagatggtcccttcatct

SEQ ID NO: 366263 - DNA, 60 bp, Artificial
  Synthetic oligonucleotide
cctgtatggatggagttcgttctccatgtccgagtccgcgtctgattggcctgtacctat

SEQ ID NO: 366264 - DNA, 60 bp, Artificial
  Synthetic oligonucleotide
cctgtatggatggagttcgttctccatttctgagtcggcatctgagtggcctgtccctat

SEQ ID NO: 366265 - DNA, 55 bp, Artificial
  Synthetic oligonucleotide
cctgtatggtctgctccgtacctaagcgtcgcaggtacacgtactctgaagcgaa

SEQ ID NO: 366266 - DNA, 54 bp, Artificial
  Synthetic oligonucleotide
cctgtatggttctcgtttaggagtgcctgacacattaggaggggaccctaaatt

SEQ ID NO: 366267 - DNA, 57 bp, Artificial
  Synthetic oligonucleotide
cctgtattaactggaaatgggatggtggtatagctccagataccgaggtaccactgg

SEQ ID NO: 366268 - DNA, 56 bp, Artificial
  Synthetic oligonucleotide
cctgtattatccatacatatttcgtcatccattacatcatacaggctcatacgatg

SEQ ID NO: 366269 - DNA, 55 bp, Artificial
  Synthetic oligonucleotide
cctgtattcaagaatgacatggtcaatcctcaaacatttgcccatgagcttggac

SEQ ID NO: 366270 - DNA, 60 bp, Artificial
  Synthetic oligonucleotide
cctgtattctatgacgcagtggtctatcttcatacagctgcgactgagcctggcgcttat

SEQ ID NO: 366271 - DNA, 55 bp, Artificial
  Synthetic oligonucleotide
cctgtattctgactgggtcagtggtcctgcaggctggaacgataggtacagagtc

SEQ ID NO: 366272 - DNA, 52 bp, Artificial
  Synthetic oligonucleotide
cctgtatttgttaccaacgactatcgggtttctcgatatcttaaaccgagcg

SEQ ID NO: 366273 - DNA, 56 bp, Artificial
  Synthetic oligonucleotide
cctgtattttaaatcgtttaggaggagccattgacttggtcaattggagacaccca

SEQ ID NO: 366274 - DNA, 55 bp, Artificial
  Synthetic oligonucleotide
cctgtcaacctgcagactgtaaataaataaacaactcgaactttaaattgcccga

SEQ ID NO: 366275 - DNA, 55 bp, Artificial
  Synthetic oligonucleotide
cctgtcaacgcttacccagcgcggtctggcaaagatgattggctgtcatgaatcg

SEQ ID NO: 366276 - DNA, 54 bp, Artificial
  Synthetic oligonucleotide
cctgtcaccctgggtgattggggagcagggccagaattcaaccttaacctttct

SEQ ID NO: 366277 - DNA, 60 bp, Artificial
  Synthetic oligonucleotide
cctgtcactccatactgaatcatatgtttgcagcgcagattgtaccataggtgtagacaa

SEQ ID NO: 366278 - DNA, 55 bp, Artificial
  Synthetic oligonucleotide
cctgtcagcccactttccaggtttcgggcagagcctgctctacgggtaccctgtc

SEQ ID NO: 366279 - DNA, 58 bp, Artificial
  Synthetic oligonucleotide
cctgtcagctacgcacaaaaaccgggtaagttcgcagagttctgcgggtggtctatca

SEQ ID NO: 366280 - DNA, 60 bp, Artificial
  Synthetic oligonucleotide
cctgtcagctagcttgacggctacaataggtaatcttgaacggatcgtcagatcttcgtg

SEQ ID NO: 366281 - DNA, 55 bp, Artificial
  Synthetic oligonucleotide
cctgtcatcaagacaccccctctcaagaaggaaatgtctggtaccttcgggggaa

SEQ ID NO: 366282 - DNA, 55 bp, Artificial
  Synthetic oligonucleotide
cctgtcatccctactatagcgacacttatgtcttacgtgcgcaagtctacgtggc

SEQ ID NO: 366283 - DNA, 60 bp, Artificial
  Synthetic oligonucleotide
cctgtcatgttagatggtgaatgcataatggcttttgattatacaaattatgatggtagt

SEQ ID NO: 366284 - DNA, 55 bp, Artificial
  Synthetic oligonucleotide
cctgtcatttcttgacattattgaaaagttagatagctgtggaagaggacttccc

SEQ ID NO: 366285 - DNA, 60 bp, Artificial
  Synthetic oligonucleotide
cctgtccaacaccagggcaactcagaatcagtttgataggtggtacgatggagtcaagaa

SEQ ID NO: 366286 - DNA, 59 bp, Artificial
  Synthetic oligonucleotide
cctgtccacaccacaaaaccacaagccctgggtgctgtagaaataggagcaaccgctga

SEQ ID NO: 366287 - DNA, 55 bp, Artificial
  Synthetic oligonucleotide
cctgtccagatagcggtgcggtaagtattgttttgtttagtggcttggttaatat

SEQ ID NO: 366288 - DNA, 50 bp, Artificial
  Synthetic oligonucleotide
cctgtccccccgcggctcccgtccgaattggggcccaaatgacccccggc

SEQ ID NO: 366289 - DNA, 48 bp, Artificial
  Synthetic oligonucleotide
cctgtccccccgtggttcccggcctagttggggccccacagacccccg

SEQ ID NO: 366290 - DNA, 55 bp, Artificial
  Synthetic oligonucleotide
cctgtcccctagatgaggactttagaaaatacactgctttcaccatccccagtgt

SEQ ID NO: 366291 - DNA, 55 bp, Artificial
  Synthetic oligonucleotide
cctgtcccgttcttgtcatgagatctgcgtacatgaggagatgacgatggttggg

SEQ ID NO: 366292 - DNA, 60 bp, Artificial
  Synthetic oligonucleotide
cctgtccggagccgtgctgcccggatgatgtcttggcctctgtttgctctagctctacgc

SEQ ID NO: 366293 - DNA, 55 bp, Artificial
  Synthetic oligonucleotide
cctgtccggcgtgtgtagagcattcgtgtgtggctcgtcaccctcacgatgctca

SEQ ID NO: 366294 - DNA, 55 bp, Artificial
  Synthetic oligonucleotide
cctgtccgtgtccagccaatgttactctgtaaacgggacatggtccgtttctagc

SEQ ID NO: 366295 - DNA, 55 bp, Artificial
  Synthetic oligonucleotide
cctgtcctactgtcaccctctatgacaatactaatcggtctccatggccgcgcag

SEQ ID NO: 366296 - DNA, 60 bp, Artificial
  Synthetic oligonucleotide
cctgtcctatgtatgcttatgccaacagatggccagccagaggggacaaaggagattgtt

SEQ ID NO: 366297 - DNA, 54 bp, Artificial
  Synthetic oligonucleotide
cctgtcctctgcacggtttgaacgcgccccgtccggacatgttagggtaggtag

SEQ ID NO: 366298 - DNA, 60 bp, Artificial
  Synthetic oligonucleotide
cctgtcctgtgcgacgagggacacgcagtaggaatgctggtgtcagtgctccattcgggt

SEQ ID NO: 366299 - DNA, 55 bp, Artificial
  Synthetic oligonucleotide
cctgtcctttcatcgattggtgtacatccttttgttactggtcaggcagcctcaa

SEQ ID NO: 366300 - DNA, 60 bp, Artificial
  Synthetic oligonucleotide
cctgtcctttgcctcataagctggacagcttcggaggttgtagatgtggcaaatatccca

SEQ ID NO: 366301 - DNA, 53 bp, Artificial
  Synthetic oligonucleotide
cctgtcgaacgggttgttcgggcaaatcgacctgacccgcttgccgtccctgt

SEQ ID NO: 366302 - DNA, 53 bp, Artificial
  Synthetic oligonucleotide
cctgtcgattcacaatcggcagttgtctcagtagccctcttggagaacgcacg

SEQ ID NO: 366303 - DNA, 55 bp, Artificial
  Synthetic oligonucleotide
cctgtcgctggtatatctggcaccatccggccgtatagttcgatcgtttctggaa

SEQ ID NO: 366304 - DNA, 59 bp, Artificial
  Synthetic oligonucleotide
cctgtcgctttgaaagtgaaagctaagaacttgatagtcactgagagtggtgccccacc

SEQ ID NO: 366305 - DNA, 54 bp, Artificial
  Synthetic oligonucleotide
cctgtcggtgatttcgggaaccggagcaggacgccgtccggtctgcgcgtacac

SEQ ID NO: 366306 - DNA, 50 bp, Artificial
  Synthetic oligonucleotide
cctgtcgtcgttgtcctgccgaaattgttgacacagtgagtgccttagtt

SEQ ID NO: 366307 - DNA, 58 bp, Artificial
  Synthetic oligonucleotide
cctgtcgtgatcctcagctttccgccgttgagtacatcaacccgtccgctcttatctt

SEQ ID NO: 366308 - DNA, 55 bp, Artificial
  Synthetic oligonucleotide
cctgtcgtgttttcgacaggtgctggagagcctactcgtgatcaggaattcgccc

SEQ ID NO: 366309 - DNA, 59 bp, Artificial
  Synthetic oligonucleotide
cctgtctactgcttcacgcccagccctgttgtggtaggaaccactgacaggcggggcaa

SEQ ID NO: 366310 - DNA, 56 bp, Artificial
  Synthetic oligonucleotide
cctgtctccgagtttaagaacggaaactagggtactatgtatgcgaaggttgctga

SEQ ID NO: 366311 - DNA, 60 bp, Artificial
  Synthetic oligonucleotide
cctgtctcgatggctctggatacgtctgatgctttagcgtcatgcccttgcctgctacgc

SEQ ID NO: 366312 - DNA, 60 bp, Artificial
  Synthetic oligonucleotide
cctgtctctcaagacttagcagaacatggggctatcactactagaaatacaccacagaac

SEQ ID NO: 366313 - DNA, 55 bp, Artificial
  Synthetic oligonucleotide
cctgtctgaattttactccctgggtgaactgccgtcagcatggggtccagcttgc

SEQ ID NO: 366314 - DNA, 59 bp, Artificial
  Synthetic oligonucleotide
cctgtctgacttcgccccagaaacggccagtacgttatacataatcttacactatgcga

SEQ ID NO: 366315 - DNA, 54 bp, Artificial
  Synthetic oligonucleotide
cctgtctgtcccgtagacgaccggaagcccgtagaggtcacggctaggtttcac

SEQ ID NO: 366316 - DNA, 55 bp, Artificial
  Synthetic oligonucleotide
cctgtctgtgacgccgacggcccaggatcgattgcggaatcgtccagtccgctta

SEQ ID NO: 366317 - DNA, 55 bp, Artificial
  Synthetic oligonucleotide
cctgtctgtgacgtcatagttggtgtacgtgacttgccttgagtacacaactgat

SEQ ID NO: 366318 - DNA, 60 bp, Artificial
  Synthetic oligonucleotide
cctgtcttgatatttaatctctgctgacttgataagtgatataaattgcaccacttacag

SEQ ID NO: 366319 - DNA, 54 bp, Artificial
  Synthetic oligonucleotide
cctgtcttttcggaaaccgaaattccatactcattgttaagccactatccgtta

SEQ ID NO: 366320 - DNA, 55 bp, Artificial
  Synthetic oligonucleotide
cctgtgaaaacgccgctctgggacccctttatcatgcagcacccagatttggcac

SEQ ID NO: 366321 - DNA, 58 bp, Artificial
  Synthetic oligonucleotide
cctgtgaaaattgtagattgcttacttgcattgattcaacttttaattggcaacaccg

SEQ ID NO: 366322 - DNA, 57 bp, Artificial
  Synthetic oligonucleotide
cctgtgaattagatcgtgattatttggacgcccgaggtgtgtcacccgaatccgtta

SEQ ID NO: 366323 - DNA, 55 bp, Artificial
  Synthetic oligonucleotide
cctgtgacaaacattattgggatgccttaaggtttaggtattgtgcaccacctgg

SEQ ID NO: 366324 - DNA, 60 bp, Artificial
  Synthetic oligonucleotide
cctgtgacaaagctatttgttatggtgcagaaagtgtgacattaacaagaggacaaaata

SEQ ID NO: 366325 - DNA, 55 bp, Artificial
  Synthetic oligonucleotide
cctgtgaccaatcattgttaaccagttcctcgttggatcattagctgcttctgct

SEQ ID NO: 366326 - DNA, 55 bp, Artificial
  Synthetic oligonucleotide
cctgtgacttcaacaatgggattacaatccagtacaacctaaccttctctgatgc

SEQ ID NO: 366327 - DNA, 60 bp, Artificial
  Synthetic oligonucleotide
cctgtgagcagcataagaattctagtaactctgtgagacagtataggatgatacattgta

SEQ ID NO: 366328 - DNA, 59 bp, Artificial
  Synthetic oligonucleotide
cctgtgaggaactactgtcttcacgcggaaagcgcctagccatggcgttagtacgagtg

SEQ ID NO: 366329 - DNA, 55 bp, Artificial
  Synthetic oligonucleotide
cctgtgagtatctcatagagtaaacacccaaagtacccccataggccctcctaac

SEQ ID NO: 366330 - DNA, 58 bp, Artificial
  Synthetic oligonucleotide
cctgtgagttggaccgtgattacctggatgccagaggcgtttctcccgagtccgtgaa

SEQ ID NO: 366331 - DNA, 55 bp, Artificial
  Synthetic oligonucleotide
cctgtgatatgcatgggacaccatgctgtttccaatgggacaatggtgaagaccc

SEQ ID NO: 366332 - DNA, 55 bp, Artificial
  Synthetic oligonucleotide
cctgtgatatgctcggaacgtgttagtttgctggatcagcatactcagggtgtcg

SEQ ID NO: 366333 - DNA, 56 bp, Artificial
  Synthetic oligonucleotide
cctgtgatccgcgggacctacaacaatacaactggtagggacgtcttggttatgtg

SEQ ID NO: 366334 - DNA, 55 bp, Artificial
  Synthetic oligonucleotide
cctgtgatcgatccgttccgacatctggaaataatcgtttgccgcatcgcgacag

SEQ ID NO: 366335 - DNA, 60 bp, Artificial
  Synthetic oligonucleotide
cctgtgatgtaactagaattagcacgtgaagagcaataccaacctcatttcgatatgccg

SEQ ID NO: 366336 - DNA, 60 bp, Artificial
  Synthetic oligonucleotide
cctgtgatgtataccaacagtgcaaacagcgatcgcaactataacagacgttcacgtgtc

SEQ ID NO: 366337 - DNA, 55 bp, Artificial
  Synthetic oligonucleotide
cctgtgatgtgggtagacacattgaaagatgagcgtcgacccattgagaaggtta

SEQ ID NO: 366338 - DNA, 53 bp, Artificial
  Synthetic oligonucleotide
cctgtgattaggactgctgctgaaaaaccccggaaacccggattgttggaaaa

SEQ ID NO: 366339 - DNA, 59 bp, Artificial
  Synthetic oligonucleotide
cctgtgcaaccctggtagaattgcctccagcaggcttgggtgcctgtgtcccgtcccca

SEQ ID NO: 366340 - DNA, 57 bp, Artificial
  Synthetic oligonucleotide
cctgtgcacaggtcaatgccagcaagtctgccgtcaagcaagggactagagttcggg

SEQ ID NO: 366341 - DNA, 55 bp, Artificial
  Synthetic oligonucleotide
cctgtgcatcgtaagggctatggacgtaggatacctttgtgaggatactatcact

SEQ ID NO: 366342 - DNA, 55 bp, Artificial
  Synthetic oligonucleotide
cctgtgcatggagtatattatgacccatcaaaagagttagtagcagaaatacaga

SEQ ID NO: 366343 - DNA, 55 bp, Artificial
  Synthetic oligonucleotide
cctgtgcatggagtttactatgatccagaaaaggagttaatagcagaggtacaaa

SEQ ID NO: 366344 - DNA, 55 bp, Artificial
  Synthetic oligonucleotide
cctgtgccaacaatattttgctatctatgcatggcctgcaaatgaatcgtaacgg

SEQ ID NO: 366345 - DNA, 55 bp, Artificial
  Synthetic oligonucleotide
cctgtgccgcgtaccgaacattttcgccgccgcagatgatagtggcacagagcgc

SEQ ID NO: 366346 - DNA, 60 bp, Artificial
  Synthetic oligonucleotide
cctgtgccgctctgagagcttcaaacaggtgaaggaaagggataacatggcgaccatgac

SEQ ID NO: 366347 - DNA, 60 bp, Artificial
  Synthetic oligonucleotide
cctgtgcctgatgtcgactcacgcggcgctattttgcgtcggcagtataatctgtccacg

SEQ ID NO: 366348 - DNA, 57 bp, Artificial
  Synthetic oligonucleotide
cctgtgcgccgacccgggtaagtgcctcgagcaaacaagtctggcgtcccccgcaca

SEQ ID NO: 366349 - DNA, 60 bp, Artificial
  Synthetic oligonucleotide
cctgtgcgtgaatccatggttgtggcagttgatgtgtacgtagtatgagcagccacactc

SEQ ID NO: 366350 - DNA, 55 bp, Artificial
  Synthetic oligonucleotide
cctgtgcgtgaatccattatccgcgcagtttatgtggaggtatatggaacagccg

SEQ ID NO: 366351 - DNA, 55 bp, Artificial
  Synthetic oligonucleotide
cctgtgcgtgaatccgtgatcatggcagttgattgatatataatacggtgcaccc

SEQ ID NO: 366352 - DNA, 60 bp, Artificial
  Synthetic oligonucleotide
cctgtgctgaagagcatctaccgtcgtatgtgctgaactgctgtcacgacttactggtca

SEQ ID NO: 366353 - DNA, 60 bp, Artificial
  Synthetic oligonucleotide
cctgtgctgtgctttgatagaggggggctgtgagggtgacgaagatcgcattatgaatag

SEQ ID NO: 366354 - DNA, 56 bp, Artificial
  Synthetic oligonucleotide
cctgtgcttcccaagtctgctcccagaactctacatagtaagtcatttcaagattg

SEQ ID NO: 366355 - DNA, 58 bp, Artificial
  Synthetic oligonucleotide
cctgtgcttggactactcaaagtgggactccactatgtcaccgtgcgttgttaggttg

SEQ ID NO: 366356 - DNA, 55 bp, Artificial
  Synthetic oligonucleotide
cctgtgcttggtaagacggaacctaaccgaagcaggtcttatattaagttgaagc

SEQ ID NO: 366357 - DNA, 53 bp, Artificial
  Synthetic oligonucleotide
cctgtggactgggtccccactggtcgaacgacatggagcatccacgccagtgg

SEQ ID NO: 366358 - DNA, 60 bp, Artificial
  Synthetic oligonucleotide
cctgtggagccaagatcgtaggtcacgtgaagaacgggtctatgcgtatctcaggttcgc

SEQ ID NO: 366359 - DNA, 55 bp, Artificial
  Synthetic oligonucleotide
cctgtgggatgggttgcctctattccaaccggtggtgccgctaaagttggactcg

SEQ ID NO: 366360 - DNA, 55 bp, Artificial
  Synthetic oligonucleotide
cctgtggggagtgataacctactggggaagggagctacaaactagtgccataagc

SEQ ID NO: 366361 - DNA, 60 bp, Artificial
  Synthetic oligonucleotide
cctgtggggtaacccacaggacgctctaatatggacatggtgcaaagagtctattgagct

SEQ ID NO: 366362 - DNA, 53 bp, Artificial
  Synthetic oligonucleotide
cctgtggggtaacccggaagagaataaccagtaccaggtgcgtacagtacggc

SEQ ID NO: 366363 - DNA, 55 bp, Artificial
  Synthetic oligonucleotide
cctgtggggtctcttcctaggtccggagtctacctccatctggtcgattcgggac

SEQ ID NO: 366364 - DNA, 59 bp, Artificial
  Synthetic oligonucleotide
cctgtgggtgcaattacaaccatagaagatcctgttctggctaagaaagtgcctgaaac

SEQ ID NO: 366365 - DNA, 55 bp, Artificial
  Synthetic oligonucleotide
cctgtggtgcacacagtcaagagtgcaccaggcgaggcattcgggtccctggcaa

SEQ ID NO: 366366 - DNA, 55 bp, Artificial
  Synthetic oligonucleotide
cctgtggtgcagtctgacgacaatcggggtgttcacttcgcgaacgggtcacgga

SEQ ID NO: 366367 - DNA, 54 bp, Artificial
  Synthetic oligonucleotide
cctgtggtggtgacgtttggaacaggcttaattgccgtatctttggtgaaacgg

SEQ ID NO: 366368 - DNA, 55 bp, Artificial
  Synthetic oligonucleotide
cctgtggttggccagggagttatgtgtaactcccacctctgcatctctgaggatg

SEQ ID NO: 366369 - DNA, 51 bp, Artificial
  Synthetic oligonucleotide
cctgtgtaaaactaactcccatgtgtgtgagaatgaaatgtaccaagctaa

SEQ ID NO: 366370 - DNA, 57 bp, Artificial
  Synthetic oligonucleotide
cctgtgtatagactgtttaagattggcatttggccgacttattgtcttaccataggg

SEQ ID NO: 366371 - DNA, 51 bp, Artificial
  Synthetic oligonucleotide
cctgtgtatgctactttgaaatgtaggagttatttctacgatactgcaacg

SEQ ID NO: 366372 - DNA, 56 bp, Artificial
  Synthetic oligonucleotide
cctgtgtcatcaagtagttccctgtcaagtgttaggattacgcgcccaaaatactc

SEQ ID NO: 366373 - DNA, 55 bp, Artificial
  Synthetic oligonucleotide
cctgtgtgagaactgacggttggatgaggaggaggccatatccgacgacgtagga

SEQ ID NO: 366374 - DNA, 55 bp, Artificial
  Synthetic oligonucleotide
cctgtgtgcacaacagcgaacagaagtttgttgacaccattttggcagagaatgg

SEQ ID NO: 366375 - DNA, 55 bp, Artificial
  Synthetic oligonucleotide
cctgtgtgcgctcagagtagcaatcaagttagatggttatataatcagcttgaag

SEQ ID NO: 366376 - DNA, 55 bp, Artificial
  Synthetic oligonucleotide
cctgtgtgcgctctcccaaatagtcagggattcctagcggttactgacaagccac

SEQ ID NO: 366377 - DNA, 57 bp, Artificial
  Synthetic oligonucleotide
cctgtgtgcgtacacgttggaatgggttaaatgcgggtctcagttcgactttcacca

SEQ ID NO: 366378 - DNA, 55 bp, Artificial
  Synthetic oligonucleotide
cctgtgtgcttcgctggagatgacatgtactctcccggggtactgagggtcaagc

SEQ ID NO: 366379 - DNA, 51 bp, Artificial
  Synthetic oligonucleotide
cctgtgtggcgtgactccttggatagtgaagtccttgtggcttggcacgtt

SEQ ID NO: 366380 - DNA, 55 bp, Artificial
  Synthetic oligonucleotide
cctgtgtgggactacatggacgtgtaccttagaaacttgctagatggcaatgtgt

SEQ ID NO: 366381 - DNA, 57 bp, Artificial
  Synthetic oligonucleotide
cctgtgtggggagaccaggtcgaagaatcgcttattcttgcactggtatttcccctc

SEQ ID NO: 366382 - DNA, 57 bp, Artificial
  Synthetic oligonucleotide
cctgtgtgtatgggcttgctgtagcaagtggatacgactttgagagggaaggatatt

SEQ ID NO: 366383 - DNA, 56 bp, Artificial
  Synthetic oligonucleotide
cctgtgtgtttgggacccaaaaatagagtgaaattagtgtgtgtctcccacattcg

SEQ ID NO: 366384 - DNA, 60 bp, Artificial
  Synthetic oligonucleotide
cctgttaaagctcgatgcctccttctgcctaagcccaagcgctttgcacagtggctactt

SEQ ID NO: 366385 - DNA, 55 bp, Artificial
  Synthetic oligonucleotide
cctgttaacaggcctatcgattggaatcagcgcatgcgtggaacctttcaggctc

SEQ ID NO: 366386 - DNA, 59 bp, Artificial
  Synthetic oligonucleotide
cctgttacatccgggtgctttcctataatgcacgacagaacaaaaatcagacagctacc

SEQ ID NO: 366387 - DNA, 55 bp, Artificial
  Synthetic oligonucleotide
cctgttacattcaacaagtgtgtagaaataagcatttgttcattctggacacgcg

SEQ ID NO: 366388 - DNA, 54 bp, Artificial
  Synthetic oligonucleotide
cctgttacatttatgttccttaaacccaggaagctaaactatatgagaagaaac

SEQ ID NO: 366389 - DNA, 59 bp, Artificial
  Synthetic oligonucleotide
cctgttactagcactacaccgcccaccgacccttgtggagaggctgaattatatcctca

SEQ ID NO: 366390 - DNA, 60 bp, Artificial
  Synthetic oligonucleotide
cctgttactcagtacagggttgagcatgatgaaccagttgctagtggtgccccatctgct

SEQ ID NO: 366391 - DNA, 58 bp, Artificial
  Synthetic oligonucleotide
cctgttagcaaacgtaacatccgtcaggcaagagtacgcaataccagttggaccagta

SEQ ID NO: 366392 - DNA, 59 bp, Artificial
  Synthetic oligonucleotide
cctgttatatcaggacgacccatacgcaatggaagcacttaaggtgaagactggtcgta

SEQ ID NO: 366393 - DNA, 55 bp, Artificial
  Synthetic oligonucleotide
cctgttatcacgaataatgtgacaacaagcctcctctcaaatgcaaccgtaagac

SEQ ID NO: 366394 - DNA, 55 bp, Artificial
  Synthetic oligonucleotide
cctgttatcatatccattgacgacggaccacgattttgttccaaccgggcatgag

SEQ ID NO: 366395 - DNA, 60 bp, Artificial
  Synthetic oligonucleotide
cctgttatccccgatacccaaacgtcagatgcgtctgcagagacaactggaagggctcta

SEQ ID NO: 366396 - DNA, 58 bp, Artificial
  Synthetic oligonucleotide
cctgttatgtagacattgatatttactgtatatgtagggacaattggaaaggttctaa

SEQ ID NO: 366397 - DNA, 54 bp, Artificial
  Synthetic oligonucleotide
cctgttattccaccaggattaggttataagttgttaatacccaattataatgta

SEQ ID NO: 366398 - DNA, 55 bp, Artificial
  Synthetic oligonucleotide
cctgttcaccctgtgccacgagacaaacactacctacgcgcactacgagtcactg

SEQ ID NO: 366399 - DNA, 55 bp, Artificial
  Synthetic oligonucleotide
cctgttcataccacagctcactctcatctggtccaaagtactctcgccctcacga

SEQ ID NO: 366400 - DNA, 55 bp, Artificial
  Synthetic oligonucleotide
cctgttcatgttaaagagattacaagggagaatgttgaaactttgacatggcctc

SEQ ID NO: 366401 - DNA, 58 bp, Artificial
  Synthetic oligonucleotide
cctgttcctgagaatcctattattgatgcccctgttaccacaactaataggggtgcta

SEQ ID NO: 366402 - DNA, 60 bp, Artificial
  Synthetic oligonucleotide
cctgttcgatatcaaggaacgcacattccagaacccagatggtagcgtgcgaatcaccaa

SEQ ID NO: 366403 - DNA, 55 bp, Artificial
  Synthetic oligonucleotide
cctgttcgctggaataccgtactaatagtattccctttctatgctaaatcctatt

SEQ ID NO: 366404 - DNA, 55 bp, Artificial
  Synthetic oligonucleotide
cctgttcggggtacagtactgaggtgttcaagggcgtttgtctgccctcgtatag

SEQ ID NO: 366405 - DNA, 55 bp, Artificial
  Synthetic oligonucleotide
cctgttcggtgttgctcctgccgatggagagccagacccaacggacaacctaacg

SEQ ID NO: 366406 - DNA, 54 bp, Artificial
  Synthetic oligonucleotide
cctgttcgtattgattacgttgggttgtgatttggaggcggtacttacgatttg

SEQ ID NO: 366407 - DNA, 55 bp, Artificial
  Synthetic oligonucleotide
cctgttcgtcgtaggttgtgaagtccactcctccgttgaagtagttgtgcctccc

SEQ ID NO: 366408 - DNA, 60 bp, Artificial
  Synthetic oligonucleotide
cctgttctcgggtgcagttgttaattagcatgtatgcatcagggtgtacctggaagatgt

SEQ ID NO: 366409 - DNA, 50 bp, Artificial
  Synthetic oligonucleotide
cctgttcttcccattgtacccttcccaaatttccaacccaagtaacgtta

SEQ ID NO: 366410 - DNA, 56 bp, Artificial
  Synthetic oligonucleotide
cctgttcttctctcgttttctcggactccttcgaacccattagagctgacaacctc

SEQ ID NO: 366411 - DNA, 60 bp, Artificial
  Synthetic oligonucleotide
cctgttgacaagccacaagactttggagaggtgttcaatatgtttgacaacgagcctagc

SEQ ID NO: 366412 - DNA, 58 bp, Artificial
  Synthetic oligonucleotide
cctgttgagaaagtacttgagcagaaaacgagagtgtttactggagctccaattgatt

SEQ ID NO: 366413 - DNA, 56 bp, Artificial
  Synthetic oligonucleotide
cctgttgagaagaccttaatatcaactagaattgaggtgtcctccttcaaacgtac

SEQ ID NO: 366414 - DNA, 55 bp, Artificial
  Synthetic oligonucleotide
cctgttgagatctctgtatgggtgtattgcgttttctaattccgagtccgcatcc

SEQ ID NO: 366415 - DNA, 59 bp, Artificial
  Synthetic oligonucleotide
cctgttgagccggaagcacttgtaaacattaagtgctggcacgaaaagttgtggcctga

SEQ ID NO: 366416 - DNA, 55 bp, Artificial
  Synthetic oligonucleotide
cctgttgcaataccacgtacaccgttcaatagaactgttgggatgactggcaaat

SEQ ID NO: 366417 - DNA, 60 bp, Artificial
  Synthetic oligonucleotide
cctgttgcctgtattctatgacacagtggtctatcttcatacagctacgactgagtcttg

SEQ ID NO: 366418 - DNA, 60 bp, Artificial
  Synthetic oligonucleotide
cctgttgcgtttataggcacctgctgcctatatctaattgacgcatggtcgattttcata

SEQ ID NO: 366419 - DNA, 58 bp, Artificial
  Synthetic oligonucleotide
cctgttgctcgtgtactcagtacggatgaatatgtacagccaacaaatttagtttttc

SEQ ID NO: 366420 - DNA, 55 bp, Artificial
  Synthetic oligonucleotide
cctgttggacgtggcagaggcctgccccacctttctttgtttcgacgatgggaaa

SEQ ID NO: 366421 - DNA, 57 bp, Artificial
  Synthetic oligonucleotide
cctgttgggatggataaggtactacctggatcaggttgcgatgtacttgaacgattt

SEQ ID NO: 366422 - DNA, 55 bp, Artificial
  Synthetic oligonucleotide
cctgttgggcctccttgctatcagcggtcgaaattcttgctgatggacgccctta

SEQ ID NO: 366423 - DNA, 55 bp, Artificial
  Synthetic oligonucleotide
cctgttggtcgatgcctactgctgcctgcatattcaacacttaggcgtaagtggc

SEQ ID NO: 366424 - DNA, 53 bp, Artificial
  Synthetic oligonucleotide
cctgttggtttgggtagatacttactccggggtagtctccgtgtcttgccgac

SEQ ID NO: 366425 - DNA, 51 bp, Artificial
  Synthetic oligonucleotide
cctgttgtaatgcttgggttatttctgtatatgcagtgcatgatgacctta

SEQ ID NO: 366426 - DNA, 55 bp, Artificial
  Synthetic oligonucleotide
cctgttgtcggtactctatgacgcagtggtcgatcttcatgcatcgacgcctgac

SEQ ID NO: 366427 - DNA, 54 bp, Artificial
  Synthetic oligonucleotide
cctgttgtcgtgggcaccaccgacaggcagggcgtacccacctacaactggggg

SEQ ID NO: 366428 - DNA, 60 bp, Artificial
  Synthetic oligonucleotide
cctgttgtgacgtctgcggtagtatgggcgggcatatctgcgtcgtctaatctgaaatat

SEQ ID NO: 366429 - DNA, 56 bp, Artificial
  Synthetic oligonucleotide
cctgttgttagacgcaattacggtaaatgtggtcacataattttaatgattattag

SEQ ID NO: 366430 - DNA, 55 bp, Artificial
  Synthetic oligonucleotide
cctgttgttccaggttaagcaaatattggctgttattactggggttagtgagcac

SEQ ID NO: 366431 - DNA, 57 bp, Artificial
  Synthetic oligonucleotide
cctgttgtttttgctgaagaccctcatctcagaaacagaccagggaagggacacaac

SEQ ID NO: 366432 - DNA, 60 bp, Artificial
  Synthetic oligonucleotide
cctgtttaaacatgtcatcgagcatactgctaagtttgattttgccacgattcacatgac

SEQ ID NO: 366433 - DNA, 55 bp, Artificial
  Synthetic oligonucleotide
cctgtttaataagacacgcagggataatgctaatgaaactatcacactcccatgc

SEQ ID NO: 366434 - DNA, 55 bp, Artificial
  Synthetic oligonucleotide
cctgtttaataatactgggaataatactgagggtaatactatcacactcccatgc

SEQ ID NO: 366435 - DNA, 59 bp, Artificial
  Synthetic oligonucleotide
cctgtttagagtctcagactgacttcgtctgaggtcaaacgtaccgtgcgcgtagataa

SEQ ID NO: 366436 - DNA, 60 bp, Artificial
  Synthetic oligonucleotide
cctgtttaggtgtctgtatggatggagctcgttctccacctctgagtccgcatctgactg

SEQ ID NO: 366437 - DNA, 56 bp, Artificial
  Synthetic oligonucleotide
cctgtttcaagtggtttgcactctcgagaatcttgcacgccgcatgacgcgagcac

SEQ ID NO: 366438 - DNA, 58 bp, Artificial
  Synthetic oligonucleotide
cctgtttcatgcagaccaacctgatagtccccagtgagtcctctgatacttgttcttt

SEQ ID NO: 366439 - DNA, 52 bp, Artificial
  Synthetic oligonucleotide
cctgtttccccggtccacaaggatcgttacccgcccgacccactgcgagaaa

SEQ ID NO: 366440 - DNA, 55 bp, Artificial
  Synthetic oligonucleotide
cctgtttctgaagacgaggcgaggaaactatatattaacagcaacccgtacacac

SEQ ID NO: 366441 - DNA, 57 bp, Artificial
  Synthetic oligonucleotide
cctgtttggaattttgaccgaagtcatcaacgttcaacttagacttgaatgcagtct

SEQ ID NO: 366442 - DNA, 60 bp, Artificial
  Synthetic oligonucleotide
cctgtttggtgcaatagctggtttcatagaaggtggatggccaggtttaatcaatggctg

SEQ ID NO: 366443 - DNA, 56 bp, Artificial
  Synthetic oligonucleotide
cctgtttgtgagccgaaaaacccgaatacggtgtgccttgtgaccttatatgtcac

SEQ ID NO: 366444 - DNA, 60 bp, Artificial
  Synthetic oligonucleotide
cctgtttgtgcgtgatcggatcttcctgatcaatacccacatcttgtcatcaattaagaa

SEQ ID NO: 366445 - DNA, 50 bp, Artificial
  Synthetic oligonucleotide
cctgttttgcgcactaagagtgcagcaggttatgcgggttttggttgtaa

SEQ ID NO: 366446 - DNA, 53 bp, Artificial
  Synthetic oligonucleotide
cctgttttggtttcgtggacccagctagaggttgtcgttttaatctgctaccg

SEQ ID NO: 366447 - DNA, 60 bp, Artificial
  Synthetic oligonucleotide
ccttaaaacagcatttcactgttacggatcatgtgagaaatatgcatatccatggcaaac

SEQ ID NO: 366448 - DNA, 55 bp, Artificial
  Synthetic oligonucleotide
ccttaaaatctcatcccacgtgcgaagcatcgttaatgaatacggtcgtgggtag

SEQ ID NO: 366449 - DNA, 60 bp, Artificial
  Synthetic oligonucleotide
ccttaaagtgctttagatagtggggatcgacgtcatcaatgacgttgtaccaggcatcat

SEQ ID NO: 366450 - DNA, 57 bp, Artificial
  Synthetic oligonucleotide
ccttaaatactagaactctctgggaactctaaaggacaggtgtacagatcgcggcca

SEQ ID NO: 366451 - DNA, 54 bp, Artificial
  Synthetic oligonucleotide
ccttaaatactagaactctctgggggaactccaggggcaaaagcggccatccta

SEQ ID NO: 366452 - DNA, 55 bp, Artificial
  Synthetic oligonucleotide
ccttaaatggtagcgcagcgaaacgaacaaccgaaacttgacgaaggagactgaa

SEQ ID NO: 366453 - DNA, 55 bp, Artificial
  Synthetic oligonucleotide
ccttaacccccggatgggccttgattatgggtttagtgaagcaataactgtagca

SEQ ID NO: 366454 - DNA, 54 bp, Artificial
  Synthetic oligonucleotide
ccttaacctgaagaaatggctttccccaggatcttggaagttgtcctttgtcca

SEQ ID NO: 366455 - DNA, 55 bp, Artificial
  Synthetic oligonucleotide
ccttaacgatgagggctatatcgaattgtataagcaaggtaggacgctatacgca

SEQ ID NO: 366456 - DNA, 60 bp, Artificial
  Synthetic oligonucleotide
ccttaacggagaagtatgtggatgagtagtaatgcaaattgcagttgcattttatcggaa

SEQ ID NO: 366457 - DNA, 55 bp, Artificial
  Synthetic oligonucleotide
ccttaacgggatttgcgctagtggacgaagagctatcctccacccctagggcagg

SEQ ID NO: 366458 - DNA, 58 bp, Artificial
  Synthetic oligonucleotide
ccttaactggtagggtgctctattgcctggactacagcaagtgggattccacacaaaa

SEQ ID NO: 366459 - DNA, 58 bp, Artificial
  Synthetic oligonucleotide
ccttaactgtcttaggttcccctaagacccatgcacccagctctattgcagttgacaa

SEQ ID NO: 366460 - DNA, 58 bp, Artificial
  Synthetic oligonucleotide
ccttaagaaacgaccagtctgaggctgtgaagtcatccagattcggtagactagaaaa

SEQ ID NO: 366461 - DNA, 57 bp, Artificial
  Synthetic oligonucleotide
ccttaagaattataatcctaacgaggctagagcgttcgcaaagccctcagttgatgc

SEQ ID NO: 366462 - DNA, 55 bp, Artificial
  Synthetic oligonucleotide
ccttaagactccttgtaccacatgctattgtaagaagtgttgctatcattgcccc

SEQ ID NO: 366463 - DNA, 55 bp, Artificial
  Synthetic oligonucleotide
ccttaagagcagttattccaccaactacagcacccgtacccactggttatcttat

SEQ ID NO: 366464 - DNA, 60 bp, Artificial
  Synthetic oligonucleotide
ccttaagagctgaagtatattgctctgccattggacaaatcgagcctgcatgcacttgtc

SEQ ID NO: 366465 - DNA, 56 bp, Artificial
  Synthetic oligonucleotide
ccttaagagcttttctccacatacctagaagaatcagacagggcctcgaaagggct

SEQ ID NO: 366466 - DNA, 57 bp, Artificial
  Synthetic oligonucleotide
ccttaagccaattgtatcgaaaggctactcaatgaccagacgtaacaacgtctggag

SEQ ID NO: 366467 - DNA, 51 bp, Artificial
  Synthetic oligonucleotide
ccttaagcgcaagccaggttactttccagagtctacatttatagtaggtaa

SEQ ID NO: 366468 - DNA, 57 bp, Artificial
  Synthetic oligonucleotide
ccttaaggacctcaatgctatgtggtttaaactcaaccacaccatgtggaagaatgg

SEQ ID NO: 366469 - DNA, 51 bp, Artificial
  Synthetic oligonucleotide
ccttaaggattagatctgaactttagagtgcgaattaaacagacagaactg

SEQ ID NO: 366470 - DNA, 60 bp, Artificial
  Synthetic oligonucleotide
ccttaaggattatctgaagtatgtggagaaggcctatgtggatatagaggacggagtgtc

SEQ ID NO: 366471 - DNA, 58 bp, Artificial
  Synthetic oligonucleotide
ccttaagtactttaggtctcacacctgaattatttgcattcaccacatcccttgcaag

SEQ ID NO: 366472 - DNA, 55 bp, Artificial
  Synthetic oligonucleotide
ccttaagtctggtggacagggtcatggctgtggaccaattaacatcatcttcgag

SEQ ID NO: 366473 - DNA, 60 bp, Artificial
  Synthetic oligonucleotide
ccttaagtgctttgggaatactgcagttgcaaaatgcaacataaaccatgatgaggaatt

SEQ ID NO: 366474 - DNA, 59 bp, Artificial
  Synthetic oligonucleotide
ccttaatagaacaaattatagcactaatggtacaaaaacatcagatatacttgcaatgg

SEQ ID NO: 366475 - DNA, 50 bp, Artificial
  Synthetic oligonucleotide
ccttaatagatcagtcaattttcaatcctgaacgtgaacgtttagtttgg

SEQ ID NO: 366476 - DNA, 60 bp, Artificial
  Synthetic oligonucleotide
ccttaatcagagagataagtacgagagaattcataatgaatacttggcacgaacaactac

SEQ ID NO: 366477 - DNA, 55 bp, Artificial
  Synthetic oligonucleotide
ccttaatgatcaacgataattacggatttgttttctataagggaggacagctggc

SEQ ID NO: 366478 - DNA, 60 bp, Artificial
  Synthetic oligonucleotide
ccttaatgtcatgcaatggcaataagattgaagatcttagtatacgtgctcttcagaagc

SEQ ID NO: 366479 - DNA, 55 bp, Artificial
  Synthetic oligonucleotide
ccttaattatatcttgactctcaatacagctaaacatgggttcgcaggtgtctac

SEQ ID NO: 366480 - DNA, 55 bp, Artificial
  Synthetic oligonucleotide
ccttaattctggaagacccggctgattaccgcattgccgggattcattttgctgg

SEQ ID NO: 366481 - DNA, 60 bp, Artificial
  Synthetic oligonucleotide
ccttaattgagagtttgaacttaagcagccacatagttcaatctgaatgcgtgagtttga

SEQ ID NO: 366482 - DNA, 55 bp, Artificial
  Synthetic oligonucleotide
ccttaattgggtagaaaacaagacgggtcaacagcataactatgtgccgtgccat

SEQ ID NO: 366483 - DNA, 55 bp, Artificial
  Synthetic oligonucleotide
ccttacaacactgtgcatgatccttcataccctcaaaggattgttcatgctttgc

SEQ ID NO: 366484 - DNA, 56 bp, Artificial
  Synthetic oligonucleotide
ccttacaacggtcaaacattacgaccacaccccagcgtgtggcgtcagacacccta

SEQ ID NO: 366485 - DNA, 55 bp, Artificial
  Synthetic oligonucleotide
ccttacaatgccaatgatccgtgcgccaatcaaacttacaccttgttagagtcta

SEQ ID NO: 366486 - DNA, 55 bp, Artificial
  Synthetic oligonucleotide
ccttacacagggaattctggagacactccaacaatgcaatgtgacatgctccagc

SEQ ID NO: 366487 - DNA, 54 bp, Artificial
  Synthetic oligonucleotide
ccttacacaggtgctacaaatagaccacaccccaagcggtggcctaaaccattt

SEQ ID NO: 366488 - DNA, 56 bp, Artificial
  Synthetic oligonucleotide
ccttacaccgctccccaccgtgtgcttgcaacagtgtacaacgggaagacaaccta

SEQ ID NO: 366489 - DNA, 55 bp, Artificial
  Synthetic oligonucleotide
ccttacaccggagatcctccttacagccatggaacaggaaccggatacaccatgg

SEQ ID NO: 366490 - DNA, 60 bp, Artificial
  Synthetic oligonucleotide
ccttacacgagaggacatgatcaattattatgcacctcgaatacagtttaagcaaacaca

SEQ ID NO: 366491 - DNA, 55 bp, Artificial
  Synthetic oligonucleotide
ccttacactgccgtaccgaccgtcacttcaatgatggaccatctggctgtcgaag

SEQ ID NO: 366492 - DNA, 55 bp, Artificial
  Synthetic oligonucleotide
ccttacaggcatatactcacctccctggctaacaccaggtagaatatccccggag

SEQ ID NO: 366493 - DNA, 53 bp, Artificial
  Synthetic oligonucleotide
ccttacatagactatcggaaggggctgtccaagctgtatgatcaagttcatct

SEQ ID NO: 366494 - DNA, 55 bp, Artificial
  Synthetic oligonucleotide
ccttacataggggatctagatatattttttcctggggcagaaactatttctagat

SEQ ID NO: 366495 - DNA, 56 bp, Artificial
  Synthetic oligonucleotide
ccttacatcgccctgcccttacgtctcgcaaaggcactgtacgttttagtcgtgta

SEQ ID NO: 366496 - DNA, 56 bp, Artificial
  Synthetic oligonucleotide
ccttaccacaccttcgtagaacgcctcaacgtagcccttgataatggactaccaga

SEQ ID NO: 366497 - DNA, 55 bp, Artificial
  Synthetic oligonucleotide
ccttaccacgtgaaacggggagcatctcatgtcgacgtttacagggtggatgttg

SEQ ID NO: 366498 - DNA, 55 bp, Artificial
  Synthetic oligonucleotide
ccttaccagaagtgctatctaagttagatctaaacaatatctcggcagcttcagt

SEQ ID NO: 366499 - DNA, 55 bp, Artificial
  Synthetic oligonucleotide
ccttaccaggcacccacacgccgcggcccacgttgtcgcggaagcactcgtcact

SEQ ID NO: 366500 - DNA, 55 bp, Artificial
  Synthetic oligonucleotide
ccttaccatctcggacacatttagatcccatactcttgcaaattccgacgaaccc

SEQ ID NO: 366501 - DNA, 53 bp, Artificial
  Synthetic oligonucleotide
ccttacccactactggggagatccccttctatgggagggcgatccccctagag

SEQ ID NO: 366502 - DNA, 52 bp, Artificial
  Synthetic oligonucleotide
ccttacccgacccctttaacccattcatgtcgcataccctcaataaaccgtg

SEQ ID NO: 366503 - DNA, 56 bp, Artificial
  Synthetic oligonucleotide
ccttacccgccgtctgtacgtgtgccgcgtcctctgagctcagggacttaaaccga

SEQ ID NO: 366504 - DNA, 53 bp, Artificial
  Synthetic oligonucleotide
ccttaccctcagtcgggaacctaaataatatgcgtgccacctacctggaaacc

SEQ ID NO: 366505 - DNA, 55 bp, Artificial
  Synthetic oligonucleotide
ccttaccctcatattccgaactctacacacgtgtaaggacattctctactgcgat

SEQ ID NO: 366506 - DNA, 55 bp, Artificial
  Synthetic oligonucleotide
ccttaccggaccctattgatgaatgaattgggtgttccatttcatttgggaacca

SEQ ID NO: 366507 - DNA, 50 bp, Artificial
  Synthetic oligonucleotide
ccttaccggcagcggtgcgtatagcatcgggacccttatagtcagcgcgg

SEQ ID NO: 366508 - DNA, 52 bp, Artificial
  Synthetic oligonucleotide
ccttaccgggaagatacatcggtttctgacaacgcgctacacctgcctgtcg

SEQ ID NO: 366509 - DNA, 60 bp, Artificial
  Synthetic oligonucleotide
ccttaccgtgaccagcctactccggaaattgcatgagtggatcaacagcgattggtctac

SEQ ID NO: 366510 - DNA, 55 bp, Artificial
  Synthetic oligonucleotide
ccttacctctcgcaggggtactgtgcggtatagcaggcttgggcaacgggccacc

SEQ ID NO: 366511 - DNA, 57 bp, Artificial
  Synthetic oligonucleotide
ccttacctgatgttaggaataatttctaccattacaatcaatcaaacgactccacca

SEQ ID NO: 366512 - DNA, 56 bp, Artificial
  Synthetic oligonucleotide
ccttacctggtagcgtaccaagccaccgtgtgcgctagagctcaagccccaccccc

SEQ ID NO: 366513 - DNA, 56 bp, Artificial
  Synthetic oligonucleotide
ccttacctgtatccaggaattttcctaatcttaccgagtcgtatctcgagatttca

SEQ ID NO: 366514 - DNA, 56 bp, Artificial
  Synthetic oligonucleotide
ccttaccttctggtatgtattccagtctgctacttcattacttcgtaaaggtgaac

SEQ ID NO: 366515 - DNA, 53 bp, Artificial
  Synthetic oligonucleotide
ccttacgaacactacaatccccttgacatcccatttattacacccccgtttgc

SEQ ID NO: 366516 - DNA, 59 bp, Artificial
  Synthetic oligonucleotide
ccttacgagatggagtcttttgatacatctgatgtcaacctctttgggccagcccacta

SEQ ID NO: 366517 - DNA, 57 bp, Artificial
  Synthetic oligonucleotide
ccttacgcgtcgggacgatgttaagtacagcagcgatcaccagaaccggtggcgaaa

SEQ ID NO: 366518 - DNA, 52 bp, Artificial
  Synthetic oligonucleotide
ccttacgggaagaggaacttctttacgtttgttggtgacatccaattctcgt

SEQ ID NO: 366519 - DNA, 53 bp, Artificial
  Synthetic oligonucleotide
ccttacggggggcgattgaggtcgagaaagaggggttacaggaggaggcaatc

SEQ ID NO: 366520 - DNA, 60 bp, Artificial
  Synthetic oligonucleotide
ccttacgtacactttgcttatgcagacagtgctgatggacgagatggttttagtcttact

SEQ ID NO: 366521 - DNA, 52 bp, Artificial
  Synthetic oligonucleotide
ccttacgtttacaacctggtagagaagcccgttacaatccctcaatccaaat

SEQ ID NO: 366522 - DNA, 55 bp, Artificial
  Synthetic oligonucleotide
ccttactaactactaactcgggtattattacaagtatatgactaatgtaggacta

SEQ ID NO: 366523 - DNA, 58 bp, Artificial
  Synthetic oligonucleotide
ccttactaagcgcggtcatccctgatacagtacttaaggcacaaccaaagcattacga

SEQ ID NO: 366524 - DNA, 55 bp, Artificial
  Synthetic oligonucleotide
ccttactagctccaccaactattacctctctctctgcaatgaatcggagattcta

SEQ ID NO: 366525 - DNA, 57 bp, Artificial
  Synthetic oligonucleotide
ccttactataaccccagctgacaaatcaagtgaatttaagcaattagattataacaa

SEQ ID NO: 366526 - DNA, 55 bp, Artificial
  Synthetic oligonucleotide
ccttactccaacggtaaccaaatttacgcggacgaagctgccgctgcaaatctgc

SEQ ID NO: 366527 - DNA, 56 bp, Artificial
  Synthetic oligonucleotide
ccttactcttaccttcagacccgctggttaaacctcttggcagcgtgagacaccag

SEQ ID NO: 366528 - DNA, 55 bp, Artificial
  Synthetic oligonucleotide
ccttactgcaattacaccaagttctggtatgtaaatcacacaggtttcaacacac

SEQ ID NO: 366529 - DNA, 57 bp, Artificial
  Synthetic oligonucleotide
ccttactgccgagtggagagtgattactgagcggccggtgtatcgggagtcgtccct

SEQ ID NO: 366530 - DNA, 53 bp, Artificial
  Synthetic oligonucleotide
ccttactgctagatcctaagggccgtccccggggtcgtttgccattcccctga

SEQ ID NO: 366531 - DNA, 55 bp, Artificial
  Synthetic oligonucleotide
ccttactgcttgggacgatatacgcatcctctctccggacgtctcgtcgaagagc

SEQ ID NO: 366532 - DNA, 60 bp, Artificial
  Synthetic oligonucleotide
ccttactggcaaaatctgtattcaacagtctatatgcatctccacaactcgagggatttt

SEQ ID NO: 366533 - DNA, 53 bp, Artificial
  Synthetic oligonucleotide
ccttacttcgatggcaaacgtttgaaggagtttctggctaccctccgtatcac

SEQ ID NO: 366534 - DNA, 56 bp, Artificial
  Synthetic oligonucleotide
ccttactttctggcatattgatttacgagaaaaactatcagtagatttggaccaat

SEQ ID NO: 366535 - DNA, 53 bp, Artificial
  Synthetic oligonucleotide
ccttactttctgggcacgtttgacaaacgctttccgggttttatggcaccgca

SEQ ID NO: 366536 - DNA, 55 bp, Artificial
  Synthetic oligonucleotide
ccttactttgtgagagcgcacgcgctagtcaaactatgcagcctagtccgtgggg

SEQ ID NO: 366537 - DNA, 60 bp, Artificial
  Synthetic oligonucleotide
ccttagaaagcatgaagatgcatataagagagagatgaaaattagatagggaatctatgc

SEQ ID NO: 366538 - DNA, 60 bp, Artificial
  Synthetic oligonucleotide
ccttagaacacagatttagagatatacctgataaggagctagcagtcagcattctagcga

SEQ ID NO: 366539 - DNA, 60 bp, Artificial
  Synthetic oligonucleotide
ccttagaaccattgacagttgatgctgatattataaagttggagtgttacggcaatcctg

SEQ ID NO: 366540 - DNA, 56 bp, Artificial
  Synthetic oligonucleotide
ccttagaagacaagtatagatttatcaattctcttgcgacaagatgtccagataag

SEQ ID NO: 366541 - DNA, 55 bp, Artificial
  Synthetic oligonucleotide
ccttagaagggataggggcattccggcctggcatagtggaagatgcagggcctgc

SEQ ID NO: 366542 - DNA, 60 bp, Artificial
  Synthetic oligonucleotide
ccttagaatctgacgatgacattcaaaggctattgaaggattctctgcgcagaacgaggt

SEQ ID NO: 366543 - DNA, 54 bp, Artificial
  Synthetic oligonucleotide
ccttagaattgttacaacgtatcaatacagcgcttagccgtcctaaaagaggtt

SEQ ID NO: 366544 - DNA, 57 bp, Artificial
  Synthetic oligonucleotide
ccttagacagaaatatcagaccctagataacgaagataacctttgattccgctctaa

SEQ ID NO: 366545 - DNA, 55 bp, Artificial
  Synthetic oligonucleotide
ccttagagcaaggaccagagtcctgagtgactgggtctgagcacctcactcgggg

SEQ ID NO: 366546 - DNA, 55 bp, Artificial
  Synthetic oligonucleotide
ccttagatagtcttctggtagagaaggatccaccatgccagcaaagctggggtgc

SEQ ID NO: 366547 - DNA, 50 bp, Artificial
  Synthetic oligonucleotide
ccttagatcacccgtcccacgacgttaaaagaaggattaagacccttccc

SEQ ID NO: 366548 - DNA, 54 bp, Artificial
  Synthetic oligonucleotide
ccttagatttggctacctcaccgggcttgaagtatgtttcccaaggacttaaga

SEQ ID NO: 366549 - DNA, 60 bp, Artificial
  Synthetic oligonucleotide
ccttagcacacatcctgaagcaaggcattttttccaacccctcatgggtgcatatggcaa

SEQ ID NO: 366550 - DNA, 55 bp, Artificial
  Synthetic oligonucleotide
ccttagcactagtgctggttacccatacaatgcattaggcgtcaagaaaaggcag

SEQ ID NO: 366551 - DNA, 59 bp, Artificial
  Synthetic oligonucleotide
ccttagcaggttgggggccataggggctatgagaatgcgtagtggcctcactgttggcc

SEQ ID NO: 366552 - DNA, 60 bp, Artificial
  Synthetic oligonucleotide
ccttagcatgactgagttgagaaagtctgggggctcctccattccgcacaggtgcgtgat

SEQ ID NO: 366553 - DNA, 55 bp, Artificial
  Synthetic oligonucleotide
ccttagccagcagattgaaggaccgaccgagacaacgtaaggtgctgttctcccc

SEQ ID NO: 366554 - DNA, 56 bp, Artificial
  Synthetic oligonucleotide
ccttagccatccgagtggacgtctgtcctccttcggatgcccaggtcggaccacgg

SEQ ID NO: 366555 - DNA, 56 bp, Artificial
  Synthetic oligonucleotide
ccttagcccgtttctcttggctcagtttactagtgcccttgcttcaatggttagga

SEQ ID NO: 366556 - DNA, 55 bp, Artificial
  Synthetic oligonucleotide
ccttagccctaaattgccggagtagactagtaaatcagctgcccattttggccct

SEQ ID NO: 366557 - DNA, 54 bp, Artificial
  Synthetic oligonucleotide
ccttagccctaccaaaatgaagataggtactccggagatcgatttcttaggggc

SEQ ID NO: 366558 - DNA, 55 bp, Artificial
  Synthetic oligonucleotide
ccttagcctacttcagcgcacttttgctgaatcttaagacgtacgacggttgtcg

SEQ ID NO: 366559 - DNA, 53 bp, Artificial
  Synthetic oligonucleotide
ccttagcgaaccaaagatccaccacagtcttaggacgttttctgaaaggtacc

SEQ ID NO: 366560 - DNA, 52 bp, Artificial
  Synthetic oligonucleotide
ccttagctaggttcatccccactatcgggcctgttcaggccaccacatgtga

SEQ ID NO: 366561 - DNA, 51 bp, Artificial
  Synthetic oligonucleotide
ccttagcttactagcgaagaatatgttcaaaccagaagtcatgcgaaaaca

SEQ ID NO: 366562 - DNA, 55 bp, Artificial
  Synthetic oligonucleotide
ccttagcttccaaaagagaagcaggagaaaactggctctcccttagccatccgag

SEQ ID NO: 366563 - DNA, 55 bp, Artificial
  Synthetic oligonucleotide
ccttaggaaacgtgagtatcatgctagcgatcacgcgggtgatttgtgaggagct

SEQ ID NO: 366564 - DNA, 53 bp, Artificial
  Synthetic oligonucleotide
ccttaggaggatacgaaaacatgtccgggtttaaagcatgcgggataacgtaa

SEQ ID NO: 366565 - DNA, 57 bp, Artificial
  Synthetic oligonucleotide
ccttaggatcgaaggtcggccgaaggccgaccgagcacactgaccttgggccatgcc

SEQ ID NO: 366566 - DNA, 60 bp, Artificial
  Synthetic oligonucleotide
ccttaggcagaatccaacagaggaacaagctgtggatatatgcaaggcagcgatgggctt

SEQ ID NO: 366567 - DNA, 54 bp, Artificial
  Synthetic oligonucleotide
ccttaggcatccctccttcacttgcttccggggaaccgaggacaatccgaaaga

SEQ ID NO: 366568 - DNA, 55 bp, Artificial
  Synthetic oligonucleotide
ccttagggaagatttgctcgccaccttcttgcaggatagcaatgagagggccgcg

SEQ ID NO: 366569 - DNA, 55 bp, Artificial
  Synthetic oligonucleotide
ccttaggtaccgcgagcgagaacataacttatctaagcagtcgaggaggcgatga

SEQ ID NO: 366570 - DNA, 54 bp, Artificial
  Synthetic oligonucleotide
ccttaggttaaccgtgtggccatccggtgagacatcactataggactattggta

SEQ ID NO: 366571 - DNA, 59 bp, Artificial
  Synthetic oligonucleotide
ccttagtaagtatagtgcgcaccctctcggtattgataccgaagcagtagcttgggaga

SEQ ID NO: 366572 - DNA, 59 bp, Artificial
  Synthetic oligonucleotide
ccttagtagcgctcagttacgtgacgttgtatcttctgagctcggtcttcctgtcccaa

SEQ ID NO: 366573 - DNA, 56 bp, Artificial
  Synthetic oligonucleotide
ccttagtaggactagcaaaacgaggggactagcggtagcagtgagttcgttggatg

SEQ ID NO: 366574 - DNA, 58 bp, Artificial
  Synthetic oligonucleotide
ccttagtaggactagcaaattggggggggtagcagcagtggcgagttcattggatggc

SEQ ID NO: 366575 - DNA, 58 bp, Artificial
  Synthetic oligonucleotide
ccttagtaggactagcataatgaggggggtagcaacagtggtgagttcgttggatggc

SEQ ID NO: 366576 - DNA, 55 bp, Artificial
  Synthetic oligonucleotide
ccttagtcaacaccaggctattggcttaataggcacaattctcttgactgctggg

SEQ ID NO: 366577 - DNA, 60 bp, Artificial
  Synthetic oligonucleotide
ccttagtgatgacagttgaaattaggaaacagaatatgagtgaatccatggagttgtggt

SEQ ID NO: 366578 - DNA, 53 bp, Artificial
  Synthetic oligonucleotide
ccttagttgtttgaatttaatcgctactaggattaaaaactctcccgaataca

SEQ ID NO: 366579 - DNA, 60 bp, Artificial
  Synthetic oligonucleotide
ccttatacaggtggaggcggtggctggtatggtggcgcttgtgctgattctagtaaatat

SEQ ID NO: 366580 - DNA, 55 bp, Artificial
  Synthetic oligonucleotide
ccttatacctcctgttcggaccaggattgcagaggaagattgtcggtatcccgcc

SEQ ID NO: 366581 - DNA, 51 bp, Artificial
  Synthetic oligonucleotide
ccttatacgccacgggtccattaagtttcgaaattacgcctcaagggttgg

SEQ ID NO: 366582 - DNA, 60 bp, Artificial
  Synthetic oligonucleotide
ccttatactgcatataagtttatctattaccaaaatggtgacaatatatggcataaagtg

SEQ ID NO: 366583 - DNA, 55 bp, Artificial
  Synthetic oligonucleotide
ccttatagcatggaatggtccatagttgcatcgagattgaagagtcaaggcaacg

SEQ ID NO: 366584 - DNA, 54 bp, Artificial
  Synthetic oligonucleotide
ccttataggtcactgattcggtttccaatagggacagccccagtgttagggaac

SEQ ID NO: 366585 - DNA, 54 bp, Artificial
  Synthetic oligonucleotide
ccttatatcaactgagtttagtattaatgagacattgacactggatgtgacatc

SEQ ID NO: 366586 - DNA, 60 bp, Artificial
  Synthetic oligonucleotide
ccttatatcaatactatgacatgtatcatgagaggccgataatctacatggtaggatcag

SEQ ID NO: 366587 - DNA, 56 bp, Artificial
  Synthetic oligonucleotide
ccttatatgtttagccagggtttatgatttgtgtaacccgaatatcacattcgtta

SEQ ID NO: 366588 - DNA, 55 bp, Artificial
  Synthetic oligonucleotide
ccttatattatggctgcaccgactatgttaactcctcgagatattaatggtaccg

SEQ ID NO: 366589 - DNA, 56 bp, Artificial
  Synthetic oligonucleotide
ccttatcaacgtaggacttgacatcggacgaggatttagctccctggatgttgggg

SEQ ID NO: 366590 - DNA, 55 bp, Artificial
  Synthetic oligonucleotide
ccttatcaatatgtctctaagtaaatcccgaatattaagtccggccattgtaaaa

SEQ ID NO: 366591 - DNA, 59 bp, Artificial
  Synthetic oligonucleotide
ccttatcatgggacagaagccttccaagccaaaggcacctccaaccacatatgagtccc

SEQ ID NO: 366592 - DNA, 60 bp, Artificial
  Synthetic oligonucleotide
ccttatcatggggcagtttctctctttcttaggggaaatcccatcaatcatccatgaagc

SEQ ID NO: 366593 - DNA, 56 bp, Artificial
  Synthetic oligonucleotide
ccttatccttctgcaaagatatgcccttaactgggtattacgataaagctccaagg

SEQ ID NO: 366594 - DNA, 52 bp, Artificial
  Synthetic oligonucleotide
ccttatcgaacaggtgctaggcatgcaccatatcaatgtttgctcaaacttt

SEQ ID NO: 366595 - DNA, 58 bp, Artificial
  Synthetic oligonucleotide
ccttatcgacgtaggacttgacgtcggagctggatttcgctctctgaatgtttgggtg

SEQ ID NO: 366596 - DNA, 54 bp, Artificial
  Synthetic oligonucleotide
ccttatcgaggaagtcttggaaagaggtgtccccaccagggttgcaaaggacta

SEQ ID NO: 366597 - DNA, 55 bp, Artificial
  Synthetic oligonucleotide
ccttatctgagaactgcttcgataagattttaactgttggtgcccggaaaggaat

SEQ ID NO: 366598 - DNA, 59 bp, Artificial
  Synthetic oligonucleotide
ccttatctttatgaaaagacgcgccctgccccgcaatcgacgtggcgcactggtgactg

SEQ ID NO: 366599 - DNA, 55 bp, Artificial
  Synthetic oligonucleotide
ccttatgaacatgtccttgttcgacttggaagagctcatcttggtacgagggtcc

SEQ ID NO: 366600 - DNA, 55 bp, Artificial
  Synthetic oligonucleotide
ccttatgatatcaatcagatgctaaattgtgtaggagaacaccaggcagccatgc

SEQ ID NO: 366601 - DNA, 55 bp, Artificial
  Synthetic oligonucleotide
ccttatgccccttgggtatttgcatgtgctcctgatcggtgccctcccacatgca

SEQ ID NO: 366602 - DNA, 54 bp, Artificial
  Synthetic oligonucleotide
ccttatgctccgtcccgggtgccctctcgtcgttgggattactccaccaaatgg

SEQ ID NO: 366603 - DNA, 55 bp, Artificial
  Synthetic oligonucleotide
ccttatggacacgattacacatttactatacaagggtcatatactccaacggacg

SEQ ID NO: 366604 - DNA, 57 bp, Artificial
  Synthetic oligonucleotide
ccttatggagatggggggctttgatccttgggttggtgataattagtggtgcctcaa

SEQ ID NO: 366605 - DNA, 55 bp, Artificial
  Synthetic oligonucleotide
ccttatggagggacagcttataatccattagccccaaaatcagcttttcccaatg

SEQ ID NO: 366606 - DNA, 55 bp, Artificial
  Synthetic oligonucleotide
ccttatggctttcactgggtctagtcggactttaacacaacagtcctcggcggcg

SEQ ID NO: 366607 - DNA, 58 bp, Artificial
  Synthetic oligonucleotide
ccttatggtaatgagggtaaatgaacatatgcgaagtcactaatcaagaaggattggt

SEQ ID NO: 366608 - DNA, 56 bp, Artificial
  Synthetic oligonucleotide
ccttatggtagtattaagggtctactgattagacataaatgcgataaccctagatg

SEQ ID NO: 366609 - DNA, 57 bp, Artificial
  Synthetic oligonucleotide
ccttatggttgcaaagggttatgtaggtgttatcacacttgataaccaggacctcaa

SEQ ID NO: 366610 - DNA, 53 bp, Artificial
  Synthetic oligonucleotide
ccttatgtgcacatggtacatatgggcgtctgaatgatgtagagattagtcca

SEQ ID NO: 366611 - DNA, 55 bp, Artificial
  Synthetic oligonucleotide
ccttatgtgccttacccccggtccaccgaggtctatgtccgatcaatctttggcc

SEQ ID NO: 366612 - DNA, 55 bp, Artificial
  Synthetic oligonucleotide
ccttatgtggtagaagtctatcatctcagaaacggtctacaggagagacctttgc

SEQ ID NO: 366613 - DNA, 60 bp, Artificial
  Synthetic oligonucleotide
ccttatgtgtctggtgcaatctctcgttaataggaggtaacatggctcttatcagtcaaa

SEQ ID NO: 366614 - DNA, 55 bp, Artificial
  Synthetic oligonucleotide
ccttatgtgtgacccttacttgtaataatcccactaatacttcctgcactaactc

SEQ ID NO: 366615 - DNA, 60 bp, Artificial
  Synthetic oligonucleotide
ccttattaactctgcatagattgaatacatatgaccagagtggaaggcttgttgctaaac

SEQ ID NO: 366616 - DNA, 60 bp, Artificial
  Synthetic oligonucleotide
ccttattaccagatgctgaaagattcagttttccgagagtgatcaattcagctgacggta

SEQ ID NO: 366617 - DNA, 56 bp, Artificial
  Synthetic oligonucleotide
ccttattagaaagcattttccagaaagacaggaattagcataccaaagggacatct

SEQ ID NO: 366618 - DNA, 55 bp, Artificial
  Synthetic oligonucleotide
ccttattagacccatatgatttaactgagcttgagagtattgttaagggatgggg

SEQ ID NO: 366619 - DNA, 59 bp, Artificial
  Synthetic oligonucleotide
ccttattaggacacatagttactcctaggtgtgactatcaagcaggacataataaggta

SEQ ID NO: 366620 - DNA, 58 bp, Artificial
  Synthetic oligonucleotide
ccttattcaatgcttatcatggcgaagtagaagtaccctggctagaaaagggcagaac

SEQ ID NO: 366621 - DNA, 60 bp, Artificial
  Synthetic oligonucleotide
ccttattcaatgtatacactaccgcttatgcgttcttctgctgagagattaattcaagaa

SEQ ID NO: 366622 - DNA, 55 bp, Artificial
  Synthetic oligonucleotide
ccttattcagggttggagagtaagaccaaactcaaggctcctacactacgagcag

SEQ ID NO: 366623 - DNA, 54 bp, Artificial
  Synthetic oligonucleotide
ccttattcatacagtatgtatattgtagtgttcttttcccggagcatactacta

SEQ ID NO: 366624 - DNA, 57 bp, Artificial
  Synthetic oligonucleotide
ccttattcctgtctctagcccgttgaagtcgaatggtattatgatcccgttgtgacc

SEQ ID NO: 366625 - DNA, 55 bp, Artificial
  Synthetic oligonucleotide
ccttattctgctgcatatgctaatatgcacctcttggattctcaaaagccacgct

SEQ ID NO: 366626 - DNA, 55 bp, Artificial
  Synthetic oligonucleotide
ccttattctgctgcttatgcgaatatacacctcttggattcccagaagccccgct

SEQ ID NO: 366627 - DNA, 55 bp, Artificial
  Synthetic oligonucleotide
ccttattgaaacccatgatggagtagtctgtgccatgacaggtagggatgtgggc

SEQ ID NO: 366628 - DNA, 55 bp, Artificial
  Synthetic oligonucleotide
ccttattgcaactatactaaattctggtatgttaaccacactggcttcaatgtcc

SEQ ID NO: 366629 - DNA, 55 bp, Artificial
  Synthetic oligonucleotide
ccttatttaagtctctgagtttatcaagatctgcgtctcctcgtttagacttacg

SEQ ID NO: 366630 - DNA, 55 bp, Artificial
  Synthetic oligonucleotide
ccttatttccgccaaaagcagtttgtcagcatttggacccgagacggtaatgtcg

SEQ ID NO: 366631 - DNA, 55 bp, Artificial
  Synthetic oligonucleotide
ccttatttgcttaaaaggtcctgctaatacattaaaatgctggagatatcgctgc

SEQ ID NO: 366632 - DNA, 55 bp, Artificial
  Synthetic oligonucleotide
ccttatttggtgaaaggggagcagtccaccctcaatcgacgttaaagctcccaca

SEQ ID NO: 366633 - DNA, 55 bp, Artificial
  Synthetic oligonucleotide
ccttcaaaagggattgggaatcacttatgccagaccaaggaagcgagcagctcgc

SEQ ID NO: 366634 - DNA, 54 bp, Artificial
  Synthetic oligonucleotide
ccttcaaaccagaaggtggtgcgtcgtaacgggtaactctgcagcggaaccgac

SEQ ID NO: 366635 - DNA, 54 bp, Artificial
  Synthetic oligonucleotide
ccttcaaagagagtgcaagtttatattcaggggttaaggtattttattatggcc

SEQ ID NO: 366636 - DNA, 55 bp, Artificial
  Synthetic oligonucleotide
ccttcaaatgaatactacatgaacaacaccgaaccactttgtgaggcccagggct

SEQ ID NO: 366637 - DNA, 54 bp, Artificial
  Synthetic oligonucleotide
ccttcaaattcggaacttaaatatggctcgcaaacgaaccactatccggcggga

SEQ ID NO: 366638 - DNA, 54 bp, Artificial
  Synthetic oligonucleotide
ccttcaacagcctgtttggaggagtagggtttttgcctaagatcctagtgggag

SEQ ID NO: 366639 - DNA, 56 bp, Artificial
  Synthetic oligonucleotide
ccttcaaccctcgaggacaatataataccacaccccccggcacttatgcctatcca

SEQ ID NO: 366640 - DNA, 54 bp, Artificial
  Synthetic oligonucleotide
ccttcaactactaccgacgccgctacttctaccgacccagacgttatagaagac

SEQ ID NO: 366641 - DNA, 55 bp, Artificial
  Synthetic oligonucleotide
ccttcaactccgtgacttttgtaacggcagagtcaaaaattccattcgaatctag

SEQ ID NO: 366642 - DNA, 56 bp, Artificial
  Synthetic oligonucleotide
ccttcaagcggactctaaggacggggcattccgtacagcaatcggaactatggtga

SEQ ID NO: 366643 - DNA, 57 bp, Artificial
  Synthetic oligonucleotide
ccttcaagctagtaccagttgacccaggggaagtagaagagaccagcgaaggagaga

SEQ ID NO: 366644 - DNA, 60 bp, Artificial
  Synthetic oligonucleotide
ccttcaagggtataacaggtggattactctcgaagacatcagatctagatcatctctact

SEQ ID NO: 366645 - DNA, 55 bp, Artificial
  Synthetic oligonucleotide
ccttcaatactcaaggctctacactagaaatatcggtgacccggggactactgct

SEQ ID NO: 366646 - DNA, 54 bp, Artificial
  Synthetic oligonucleotide
ccttcaattctaggccattaccggtacttgaaacgtactatagacctttggcaa

SEQ ID NO: 366647 - DNA, 56 bp, Artificial
  Synthetic oligonucleotide
ccttcaattgactcctccactgccccctccctaccctcaaccttcaaccagatgat

SEQ ID NO: 366648 - DNA, 60 bp, Artificial
  Synthetic oligonucleotide
ccttcacaactgaggactacacactagaatatcatggaggactgtacagctcaatatggc

SEQ ID NO: 366649 - DNA, 55 bp, Artificial
  Synthetic oligonucleotide
ccttcacaatgttaggggagattctaaattactatacacactgggctggatcgct

SEQ ID NO: 366650 - DNA, 55 bp, Artificial
  Synthetic oligonucleotide
ccttcacagctgctcccattgatacattactcggagcaaaggtttgtgtagacga

SEQ ID NO: 366651 - DNA, 60 bp, Artificial
  Synthetic oligonucleotide
ccttcacatataacatatccagttcttaatccagttcatgaagtagaagtaccatactat

SEQ ID NO: 366652 - DNA, 51 bp, Artificial
  Synthetic oligonucleotide
ccttcaccacagcacatccaaacttaacgacggcctaggatccactgtgcg

SEQ ID NO: 366653 - DNA, 55 bp, Artificial
  Synthetic oligonucleotide
ccttcaccatcgagactaccacgcttccccaagatgccgtctcccgcactcaacg

SEQ ID NO: 366654 - DNA, 55 bp, Artificial
  Synthetic oligonucleotide
ccttcaccattgagacaaccacgcttccccaggacgctgtctcccgtacccaacg

SEQ ID NO: 366655 - DNA, 52 bp, Artificial
  Synthetic oligonucleotide
ccttcacctccactaagtgaaaacacacaaactttaattactgtaccgtcgg

SEQ ID NO: 366656 - DNA, 60 bp, Artificial
  Synthetic oligonucleotide
ccttcacgagttcatgaccttgatcttaagtctgtctagacgtattgattatgctaacgg

SEQ ID NO: 366657 - DNA, 60 bp, Artificial
  Synthetic oligonucleotide
ccttcactacgagtcacgatcaactcaagaagtgctgtgctggctcaaatgcctagtaat

SEQ ID NO: 366658 - DNA, 58 bp, Artificial
  Synthetic oligonucleotide
ccttcactaggaaacagtaattcggatgcacgccgtaaggaattggcatatgccaaac

SEQ ID NO: 366659 - DNA, 55 bp, Artificial
  Synthetic oligonucleotide
ccttcactagtaaaactgggagtgcaaatatgccttcatgcggcggctagctcaa

SEQ ID NO: 366660 - DNA, 52 bp, Artificial
  Synthetic oligonucleotide
ccttcactcacgacctcttgaacaaagccatgtcaactatccactcagctgt

SEQ ID NO: 366661 - DNA, 55 bp, Artificial
  Synthetic oligonucleotide
ccttcactggagaggaaatggccactaaagcggactacactcttgacgaagagag

SEQ ID NO: 366662 - DNA, 55 bp, Artificial
  Synthetic oligonucleotide
ccttcactgttattaattactataaggatgcagccagtgcatcatcagctgggca

SEQ ID NO: 366663 - DNA, 55 bp, Artificial
  Synthetic oligonucleotide
ccttcagacctgcaggaggaaacatgaaggacaactggagaagtgaactatacaa

SEQ ID NO: 366664 - DNA, 56 bp, Artificial
  Synthetic oligonucleotide
ccttcagagtgctcatgggaatccctgcatgaaagagaaactcgtaatgaagacac

SEQ ID NO: 366665 - DNA, 55 bp, Artificial
  Synthetic oligonucleotide
ccttcagatggggagacaagatgggtaattctagggtgacacgtgacagtttccc

SEQ ID NO: 366666 - DNA, 55 bp, Artificial
  Synthetic oligonucleotide
ccttcagcccagaagtgatacccatgttttcagctttatcagaaggagccacccc

SEQ ID NO: 366667 - DNA, 53 bp, Artificial
  Synthetic oligonucleotide
ccttcagcccgttgaccaaaagcgatttgcttttagtcttccgtctaccaact

SEQ ID NO: 366668 - DNA, 55 bp, Artificial
  Synthetic oligonucleotide
ccttcagctcacatgccttattcactgctgttagagaagcctcaaattacaccta

SEQ ID NO: 366669 - DNA, 55 bp, Artificial
  Synthetic oligonucleotide
ccttcaggattgccatgtgtgccaacaataatgtctttgctattgtattcccttc

SEQ ID NO: 366670 - DNA, 51 bp, Artificial
  Synthetic oligonucleotide
ccttcagggccagttcataggaggaacatatgctgcctcgtagggacaggc

SEQ ID NO: 366671 - DNA, 60 bp, Artificial
  Synthetic oligonucleotide
ccttcagtatattgagggcctgtaacttggatccactattgagtgcctcggcataagcgt

SEQ ID NO: 366672 - DNA, 60 bp, Artificial
  Synthetic oligonucleotide
ccttcagtccgggatctacttgagacagcctcagctctgtatcgggaagccttagagtct

SEQ ID NO: 366673 - DNA, 55 bp, Artificial
  Synthetic oligonucleotide
ccttcagttatttggatcactgccttttactagcggtaatttaaatgtcattccc

SEQ ID NO: 366674 - DNA, 60 bp, Artificial
  Synthetic oligonucleotide
ccttcagttgtgactggactcctagtgatgggagaatcaggttacccacagacaactatc

SEQ ID NO: 366675 - DNA, 52 bp, Artificial
  Synthetic oligonucleotide
ccttcatagaaccgggctttgaacagaccttcggattttacccagccggaaa

SEQ ID NO: 366676 - DNA, 60 bp, Artificial
  Synthetic oligonucleotide
ccttcatattacatgacatcccaactagagatcaccgcgggatggaggttgcggaaccag

SEQ ID NO: 366677 - DNA, 50 bp, Artificial
  Synthetic oligonucleotide
ccttcatcatttgtaacatttgataatcctgcttttgagcctgttgatac

SEQ ID NO: 366678 - DNA, 52 bp, Artificial
  Synthetic oligonucleotide
ccttcatcgcgcaaacttcacagctaattacgctcgggctagtagcgacgaa

SEQ ID NO: 366679 - DNA, 55 bp, Artificial
  Synthetic oligonucleotide
ccttcatgcggcggctagctcaagttatgcgtggtttatattaaagactaagtcc

SEQ ID NO: 366680 - DNA, 51 bp, Artificial
  Synthetic oligonucleotide
ccttcatgttctgtgggacttttatgtcgacaggcaaagtggtcattgcct

SEQ ID NO: 366681 - DNA, 52 bp, Artificial
  Synthetic oligonucleotide
ccttcattaatataaagtgcactggtgattcttattcaaggtctgcatacaa

SEQ ID NO: 366682 - DNA, 55 bp, Artificial
  Synthetic oligonucleotide
ccttcattcttccaatggctttgtggttgcttctcacacagtcataactgtgcgg

SEQ ID NO: 366683 - DNA, 55 bp, Artificial
  Synthetic oligonucleotide
ccttcattgattgctaaacagccaagctcttcacatccccaccaagaagttgggg

SEQ ID NO: 366684 - DNA, 54 bp, Artificial
  Synthetic oligonucleotide
ccttccaaaatgactgaggggggtggctaggaacgcgggggaccagtggagcca

SEQ ID NO: 366685 - DNA, 56 bp, Artificial
  Synthetic oligonucleotide
ccttccaaccatgcgacgtggacaacaaaattgggaatgcccggtgttgtccattc

SEQ ID NO: 366686 - DNA, 55 bp, Artificial
  Synthetic oligonucleotide
ccttccaagtttcgaaaactggctgccatcaacccaaacttcgacgaactcacca

SEQ ID NO: 366687 - DNA, 55 bp, Artificial
  Synthetic oligonucleotide
ccttccactacttttcatcataggcgataatatatcttacgcacatagacagtgg

SEQ ID NO: 366688 - DNA, 55 bp, Artificial
  Synthetic oligonucleotide
ccttccacttcgtggcacccaacaagtacacatgccgttgcgatacggtagtgag

SEQ ID NO: 366689 - DNA, 60 bp, Artificial
  Synthetic oligonucleotide
ccttccagcaaacctgacgtctgcacttctccagataactggtttattctagctgacaaa

SEQ ID NO: 366690 - DNA, 55 bp, Artificial
  Synthetic oligonucleotide
ccttccagcgcatatatcagcgatgtcattatcttacgagatattcagctacgta

SEQ ID NO: 366691 - DNA, 53 bp, Artificial
  Synthetic oligonucleotide
ccttccagggacggggagtctttgagctctcggacgaaagggcaacgaaccca

SEQ ID NO: 366692 - DNA, 58 bp, Artificial
  Synthetic oligonucleotide
ccttccagtatcaggacccaaggatgtgtatgactgtggggattcttgactgtaaaaa

SEQ ID NO: 366693 - DNA, 55 bp, Artificial
  Synthetic oligonucleotide
ccttccatagtcacccttgtggaagaatccagcgttgtggaagccggtgccaccg

SEQ ID NO: 366694 - DNA, 57 bp, Artificial
  Synthetic oligonucleotide
ccttccatcgaaattagctgaaaccactgaaaaaatctacataagcgaattggaggc

SEQ ID NO: 366695 - DNA, 55 bp, Artificial
  Synthetic oligonucleotide
ccttcccatggtgaaaggcaatatgatcctgaacttggatcatttgattgaatac

SEQ ID NO: 366696 - DNA, 53 bp, Artificial
  Synthetic oligonucleotide
ccttccccgaccctgggctccggccccaaaacgtctacaccatatggggctgc

SEQ ID NO: 366697 - DNA, 60 bp, Artificial
  Synthetic oligonucleotide
ccttcccctagcaacagtcggttcgaatctgtggcttggtctgccactgcatgcagcgat

SEQ ID NO: 366698 - DNA, 51 bp, Artificial
  Synthetic oligonucleotide
ccttcccggaaggagatcgcgacagttttgtcgctgttaaatgagctgggg

SEQ ID NO: 366699 - DNA, 55 bp, Artificial
  Synthetic oligonucleotide
ccttcccgtcgctctctccttgagtatttactgtctaacccttcctcttgtccag

SEQ ID NO: 366700 - DNA, 52 bp, Artificial
  Synthetic oligonucleotide
ccttccctcatgctggcccgtgtttaccgcgaattccgaggtaccaacgggg

SEQ ID NO: 366701 - DNA, 52 bp, Artificial
  Synthetic oligonucleotide
ccttccgaaaaatttgtgggtttgcaacaacacctgtttgtgagtaccaagg

SEQ ID NO: 366702 - DNA, 52 bp, Artificial
  Synthetic oligonucleotide
ccttccgatccctccattgtgtcattgctggaagagtccagactaatagagg

SEQ ID NO: 366703 - DNA, 56 bp, Artificial
  Synthetic oligonucleotide
ccttccgattttgttcccactacattcaaagagtgtcctcctcctttatgggctca

SEQ ID NO: 366704 - DNA, 56 bp, Artificial
  Synthetic oligonucleotide
ccttccgcaaagtggtggctgacgaatcgacgaagctaaagtcgttccggttgcaa

SEQ ID NO: 366705 - DNA, 54 bp, Artificial
  Synthetic oligonucleotide
ccttccgcaatcgcaggtccgtatgtatccactaaaaccgaatttaaaggtgac

SEQ ID NO: 366706 - DNA, 56 bp, Artificial
  Synthetic oligonucleotide
ccttccgcatagtcacgaaagtgacgacaacgggggggtggtcaggctctccactc

SEQ ID NO: 366707 - DNA, 55 bp, Artificial
  Synthetic oligonucleotide
ccttccgccattagcgatttgctgcaggcagtcgatagtgaggaggtgagggaat

SEQ ID NO: 366708 - DNA, 54 bp, Artificial
  Synthetic oligonucleotide
ccttccgctactgctctcccggtctagggttcaggtattagtccgaagacttta

SEQ ID NO: 366709 - DNA, 55 bp, Artificial
  Synthetic oligonucleotide
ccttccgcttgagctggatttcccctcgcttcatctctctgtcaatcgtcccatg

SEQ ID NO: 366710 - DNA, 53 bp, Artificial
  Synthetic oligonucleotide
ccttccggactacaaaaatggcggatttcgtgacgtcacggccgccattttaa

SEQ ID NO: 366711 - DNA, 55 bp, Artificial
  Synthetic oligonucleotide
ccttccggcagtctgtacacattcgatgagttatttggtgctaggattcatagcc

SEQ ID NO: 366712 - DNA, 55 bp, Artificial
  Synthetic oligonucleotide
ccttccgggcatcagtcacagcacccctgctccctcaagcgcctgatcttttacc

SEQ ID NO: 366713 - DNA, 53 bp, Artificial
  Synthetic oligonucleotide
ccttccgtggcatttttgtaaataaggccgtgtacccccgattgttctggctc

SEQ ID NO: 366714 - DNA, 53 bp, Artificial
  Synthetic oligonucleotide
ccttccgtgggttgggccagttcaaccggcagacgtgggatggactccgtcgt

SEQ ID NO: 366715 - DNA, 52 bp, Artificial
  Synthetic oligonucleotide
ccttccgttattttcaacaggggtgacgctgaagttcatgagttcggctctc

SEQ ID NO: 366716 - DNA, 59 bp, Artificial
  Synthetic oligonucleotide
ccttcctactgctcagattctgacgctacggcagtggacaaaccaacgcgcccagatgt

SEQ ID NO: 366717 - DNA, 60 bp, Artificial
  Synthetic oligonucleotide
ccttcctattcaacacactggccaatatggcattcactatgtgtagatacgaatggagga

SEQ ID NO: 366718 - DNA, 55 bp, Artificial
  Synthetic oligonucleotide
ccttcctgaccatttccatcattccagtcgaactcacacacaacaccatatgcat

SEQ ID NO: 366719 - DNA, 55 bp, Artificial
  Synthetic oligonucleotide
ccttcctgatgttgtgattgaatcttatctgtattgaaatgatgtcgtggctcgt

SEQ ID NO: 366720 - DNA, 56 bp, Artificial
  Synthetic oligonucleotide
ccttccttcgtcggtgatcctgtctctccttgtcggtgaatccccccctgagaggc

SEQ ID NO: 366721 - DNA, 53 bp, Artificial
  Synthetic oligonucleotide
ccttccttcgtcggtgttcctgcctctccttgtcggtgaaatcccccctggag

SEQ ID NO: 366722 - DNA, 54 bp, Artificial
  Synthetic oligonucleotide
ccttccttcttcggtgagccctcctctcctcgtcggagaatactcccttgttac

SEQ ID NO: 366723 - DNA, 56 bp, Artificial
  Synthetic oligonucleotide
ccttccttcttcggtggtcctgcctctctttgtcggtgaagtctcccctgtgaggc

SEQ ID NO: 366724 - DNA, 55 bp, Artificial
  Synthetic oligonucleotide
ccttcctttacgagcactgcattagatttgtccagtaataaaagtgtggtggtac

SEQ ID NO: 366725 - DNA, 52 bp, Artificial
  Synthetic oligonucleotide
ccttcgaaaaggaaattattcaatgtaacggttgaaacaaaatctacaagtc

SEQ ID NO: 366726 - DNA, 58 bp, Artificial
  Synthetic oligonucleotide
ccttcgaaactgtacatggccagcaagtcacaccattgacaacgacggagtcttggac

SEQ ID NO: 366727 - DNA, 58 bp, Artificial
  Synthetic oligonucleotide
ccttcgaaccaaccgaaagtgagattgtatcaaaagttattccgcagcctgaagatca

SEQ ID NO: 366728 - DNA, 60 bp, Artificial
  Synthetic oligonucleotide
ccttcgaactggataagcacatggagatgaggctgcccatcctcgtgtaattcctcacat

SEQ ID NO: 366729 - DNA, 56 bp, Artificial
  Synthetic oligonucleotide
ccttcgaagaacacagtctatgggaatccagcttgatcagcgcattattgtgcttt

SEQ ID NO: 366730 - DNA, 55 bp, Artificial
  Synthetic oligonucleotide
ccttcgaagcagtttcgcgcataaagtgctaccctatcaggagcccaggattgac

SEQ ID NO: 366731 - DNA, 53 bp, Artificial
  Synthetic oligonucleotide
ccttcgaattgaagaagcacgtggagatgaggctccccattttcatggagctc

SEQ ID NO: 366732 - DNA, 53 bp, Artificial
  Synthetic oligonucleotide
ccttcgaattttaccgtccccttgaagacaacgaacttccagacatccgcttc

SEQ ID NO: 366733 - DNA, 57 bp, Artificial
  Synthetic oligonucleotide
ccttcgacaccccgctttccttacctgccactgcgggaagtgtccctgccagcgcga

SEQ ID NO: 366734 - DNA, 55 bp, Artificial
  Synthetic oligonucleotide
ccttcgacatccaggctggtcatccctacctcgctgatccttctggagctaggcg

SEQ ID NO: 366735 - DNA, 56 bp, Artificial
  Synthetic oligonucleotide
ccttcgagaacgtattattcttcctgttggtaagatttcgtcccttgagatggcag

SEQ ID NO: 366736 - DNA, 58 bp, Artificial
  Synthetic oligonucleotide
ccttcgagagtcaggaggaattgataaggagtcgatgggtttcacctatagtgggata

SEQ ID NO: 366737 - DNA, 56 bp, Artificial
  Synthetic oligonucleotide
ccttcgagccgggtcttgcaccgggttggctcatcctgagaccggggagcttcgac

SEQ ID NO: 366738 - DNA, 55 bp, Artificial
  Synthetic oligonucleotide
ccttcgagttggtgaaccagtctccaagggtcgatcctctgatctggccgaagcg

SEQ ID NO: 366739 - DNA, 60 bp, Artificial
  Synthetic oligonucleotide
ccttcgatcttggggggctatatgaagcaattgaggagtgcctgattaatgatccctggg

SEQ ID NO: 366740 - DNA, 54 bp, Artificial
  Synthetic oligonucleotide
ccttcgattactataattatcggtcttaaaggcccggcaacggcactgacgacg

SEQ ID NO: 366741 - DNA, 54 bp, Artificial
  Synthetic oligonucleotide
ccttcgcaaatcaaagtaacgcctacgttaatgattcggggcatagcttcgccg

SEQ ID NO: 366742 - DNA, 56 bp, Artificial
  Synthetic oligonucleotide
ccttcgcaacattgtcctgcttctagtgaagtttataacgttacttcagacggttc

SEQ ID NO: 366743 - DNA, 55 bp, Artificial
  Synthetic oligonucleotide
ccttcgcaattagcatcaacctgcacatcgctctggatccccatggactttcccc

SEQ ID NO: 366744 - DNA, 51 bp, Artificial
  Synthetic oligonucleotide
ccttcgcgccatgacgaagtctcatcactcgcgagagacagcacgcaacca

SEQ ID NO: 366745 - DNA, 55 bp, Artificial
  Synthetic oligonucleotide
ccttcgctgaattggaggtaaccttgcaaccatactttgataggcgccagttcgc

SEQ ID NO: 366746 - DNA, 58 bp, Artificial
  Synthetic oligonucleotide
ccttcgcttagccaattagctcataatcttagtattgttagagataacaacaacctac

SEQ ID NO: 366747 - DNA, 60 bp, Artificial
  Synthetic oligonucleotide
ccttcggatacatgacattcgcgcactttcagagtacaaataaagtcgcgctcactatgg

SEQ ID NO: 366748 - DNA, 56 bp, Artificial
  Synthetic oligonucleotide
ccttcggatttactctcaaactcaagaagttacgaatagcaaataagcaacaggac

SEQ ID NO: 366749 - DNA, 55 bp, Artificial
  Synthetic oligonucleotide
ccttcggctttagtctgaaacattagtgggatttgattctgacctcttagggaag

SEQ ID NO: 366750 - DNA, 59 bp, Artificial
  Synthetic oligonucleotide
ccttcgggaggaacagcaagctcggtggtaatagaggtgtgagttcctcctcatagagc

SEQ ID NO: 366751 - DNA, 59 bp, Artificial
  Synthetic oligonucleotide
ccttcgggccgagtctatcagactgtccggcattcaaggatggaatactcaaggcctac

SEQ ID NO: 366752 - DNA, 58 bp, Artificial
  Synthetic oligonucleotide
ccttcgggccgtctttatcagagtatccggcattcaaagatggaatactcaaggccta

SEQ ID NO: 366753 - DNA, 51 bp, Artificial
  Synthetic oligonucleotide
ccttcgggtgggcttgagtttcgggtactatttgaaatcccctccacaacc

SEQ ID NO: 366754 - DNA, 51 bp, Artificial
  Synthetic oligonucleotide
ccttcgggtgggcttggatttcgggtacttgtttgaaataccctcacaacc

SEQ ID NO: 366755 - DNA, 50 bp, Artificial
  Synthetic oligonucleotide
ccttcggtacgcccaaggattctgttggcgcattaggatgtaagcgatgt

SEQ ID NO: 366756 - DNA, 50 bp, Artificial
  Synthetic oligonucleotide
ccttcggttggtccaccgactgaacggctcgcaggagggtagctgcgtta

SEQ ID NO: 366757 - DNA, 55 bp, Artificial
  Synthetic oligonucleotide
ccttcggttgtcacacttagtgaaggcacaggtgtttcgggtggtacagacctta

SEQ ID NO: 366758 - DNA, 57 bp, Artificial
  Synthetic oligonucleotide
ccttcgtaatcgagggagagggagtgatcggtggtccgattatgaccgtgattgaat

SEQ ID NO: 366759 - DNA, 52 bp, Artificial
  Synthetic oligonucleotide
ccttcgtacataaattctagcttttactttgtaggtattaaggagagaaaac

SEQ ID NO: 366760 - DNA, 55 bp, Artificial
  Synthetic oligonucleotide
ccttcgtactgtttatgtagtgtggtttaaccaccttagtgtgctttatattata

SEQ ID NO: 366761 - DNA, 51 bp, Artificial
  Synthetic oligonucleotide
ccttcgtaggcgagggtagtggatacaggggtcattgtaggaatcgagctc

SEQ ID NO: 366762 - DNA, 55 bp, Artificial
  Synthetic oligonucleotide
ccttcgtcgatgagtctgtgggacggtgagatgttcaagtggtatatgttcaggg

SEQ ID NO: 366763 - DNA, 52 bp, Artificial
  Synthetic oligonucleotide
ccttcgtctacgtcccgtcagtggtgaatcctggggacgacccgtctcgggg

SEQ ID NO: 366764 - DNA, 55 bp, Artificial
  Synthetic oligonucleotide
ccttcgtctgattgccctcttggctattcggtgttgtaccttgatgggtacctga

SEQ ID NO: 366765 - DNA, 55 bp, Artificial
  Synthetic oligonucleotide
ccttcgtgaataaagttggtgatgatcctataatcttcaagggcgtgctaagagg

SEQ ID NO: 366766 - DNA, 55 bp, Artificial
  Synthetic oligonucleotide
ccttcgtgagttgcgtcctcttgaagttgaggagtttaccatttcctcgggtgat

SEQ ID NO: 366767 - DNA, 55 bp, Artificial
  Synthetic oligonucleotide
ccttcgtgatcactagcactcaggaacagtccaccgttcaaggtcaagatacacc

SEQ ID NO: 366768 - DNA, 56 bp, Artificial
  Synthetic oligonucleotide
ccttcgtgcactggcctcacacccccatggatcacaaccccaccatggatctgctc

SEQ ID NO: 366769 - DNA, 55 bp, Artificial
  Synthetic oligonucleotide
ccttcgtggggtccaagctggtacctgacgtctgcagcggtatccactggtttct

SEQ ID NO: 366770 - DNA, 56 bp, Artificial
  Synthetic oligonucleotide
ccttcgttaacggtgactggacaccaggtatgaccgcgcaagctttggccgttcta

SEQ ID NO: 366771 - DNA, 55 bp, Artificial
  Synthetic oligonucleotide
ccttcgttgcaaggtgtcagagtttcatcatgtgagcttgccgaattggttgagg

SEQ ID NO: 366772 - DNA, 59 bp, Artificial
  Synthetic oligonucleotide
ccttcgttgtttcctcataatccttggacgtggactgtgtctagggctgcctgccatcg

SEQ ID NO: 366773 - DNA, 55 bp, Artificial
  Synthetic oligonucleotide
ccttctaaagggggccttgaatggatcaaatgcgtttggtccacgctactgccgg

SEQ ID NO: 366774 - DNA, 55 bp, Artificial
  Synthetic oligonucleotide
ccttctaaattgaaagagaagggttgctgcgagaggtcttggtggtcgaagatcc

SEQ ID NO: 366775 - DNA, 59 bp, Artificial
  Synthetic oligonucleotide
ccttctaacacactgcctgcgaagccagttgttatgtccaatggctttccaactagccc

SEQ ID NO: 366776 - DNA, 55 bp, Artificial
  Synthetic oligonucleotide
ccttctaacgaaatgtgaggagtatggtagtcaatactatgaggtagatgaatcg

SEQ ID NO: 366777 - DNA, 52 bp, Artificial
  Synthetic oligonucleotide
ccttctaagaaggaaataggggccatgctgtccctgttacaaaaggaagggt

SEQ ID NO: 366778 - DNA, 55 bp, Artificial
  Synthetic oligonucleotide
ccttctaagtggcactctccagattccgttccgtcctaaccaccgatggggagac

SEQ ID NO: 366779 - DNA, 56 bp, Artificial
  Synthetic oligonucleotide
ccttctacaccagtttacactacatatccagacagacgacacgacatcattcaagc

SEQ ID NO: 366780 - DNA, 58 bp, Artificial
  Synthetic oligonucleotide
ccttctaccagtcatacttgagaaggacacaatctatggggattcaactggaccagaa

SEQ ID NO: 366781 - DNA, 51 bp, Artificial
  Synthetic oligonucleotide
ccttctacgagccttacggacagtaaacaccagactacgcacttggcagaa

SEQ ID NO: 366782 - DNA, 55 bp, Artificial
  Synthetic oligonucleotide
ccttctacgccgtccctgtccatatttgggataggctcatgcttttcggcgccac

SEQ ID NO: 366783 - DNA, 60 bp, Artificial
  Synthetic oligonucleotide
ccttctacggaagctacatgcatggatcaacggtgattggtccactccatgtgctggttc

SEQ ID NO: 366784 - DNA, 55 bp, Artificial
  Synthetic oligonucleotide
ccttctactgcattctaccctgacaccggagtaaacatagcatatactcctacaa

SEQ ID NO: 366785 - DNA, 58 bp, Artificial
  Synthetic oligonucleotide
ccttctagaaacatcaaaaggctgtcaacaaatattagtacagctccaaccatcttat

SEQ ID NO: 366786 - DNA, 55 bp, Artificial
  Synthetic oligonucleotide
ccttctagagtacttacctttcgtcactgagtcatggagcccgttgatacttccg

SEQ ID NO: 366787 - DNA, 60 bp, Artificial
  Synthetic oligonucleotide
ccttctaggaaccatagtcaccagcttgacaggcagagacaacaatatagtgactggtga

SEQ ID NO: 366788 - DNA, 60 bp, Artificial
  Synthetic oligonucleotide
ccttctatcctgagttagctagtctagtcccacacgagatcaaatttaggtctagagcac

SEQ ID NO: 366789 - DNA, 59 bp, Artificial
  Synthetic oligonucleotide
ccttctattctaattcacatgtatcgtatgaagcattttgagaaaggggtggagttgtg

SEQ ID NO: 366790 - DNA, 51 bp, Artificial
  Synthetic oligonucleotide
ccttctcaccccaggtccaaatcaagaccctaaacccactaccgaacaact

SEQ ID NO: 366791 - DNA, 52 bp, Artificial
  Synthetic oligonucleotide
ccttctcacgtgtgcagtccacccagagctaatctttgagatcaccaaacat

SEQ ID NO: 366792 - DNA, 55 bp, Artificial
  Synthetic oligonucleotide
ccttctcatgggtctagtatctccctctctattaatccacatgtttagaatgcgg

SEQ ID NO: 366793 - DNA, 59 bp, Artificial
  Synthetic oligonucleotide
ccttctccctcctgactgacttctcgcttccagccagttatcagaataaaacgcaggac

SEQ ID NO: 366794 - DNA, 55 bp, Artificial
  Synthetic oligonucleotide
ccttctccgtctgccgttccagccgtccacggggcgcacctctctttacgcggtc

SEQ ID NO: 366795 - DNA, 58 bp, Artificial
  Synthetic oligonucleotide
ccttctcgatgtaggacttgacgtcggagctggatttagctccctgtatgtttggtcg

SEQ ID NO: 366796 - DNA, 60 bp, Artificial
  Synthetic oligonucleotide
ccttctcgccacgccagcatgagacaacacaggactgcaactgttctatctatcccggcc

SEQ ID NO: 366797 - DNA, 60 bp, Artificial
  Synthetic oligonucleotide
ccttctcgcctcgcctgcacacgacagtacaggactgcaactgttcaatctatcctggcc

SEQ ID NO: 366798 - DNA, 60 bp, Artificial
  Synthetic oligonucleotide
ccttctcgcctcgcctgcatgagatagtgcaggactgcaattgctctatctatcctggcc

SEQ ID NO: 366799 - DNA, 59 bp, Artificial
  Synthetic oligonucleotide
ccttctcggcgggagcaagaccatagcgatggggggagatgctaggagtcggaggagac

SEQ ID NO: 366800 - DNA, 60 bp, Artificial
  Synthetic oligonucleotide
ccttctctcctcgctggcatgagactgtacaggaatgtaattgctcaatttaccccggcc

SEQ ID NO: 366801 - DNA, 57 bp, Artificial
  Synthetic oligonucleotide
ccttctctcgtgaacatactagcacctggggttgtgaagaatggggttgtttagcaa

SEQ ID NO: 366802 - DNA, 60 bp, Artificial
  Synthetic oligonucleotide
ccttctctcttaaaatattgagggccgcagatttggaccctgcattgattgcctcggcat

SEQ ID NO: 366803 - DNA, 53 bp, Artificial
  Synthetic oligonucleotide
ccttctgaacgcgtgttaaccacgaactctacgtttaaagtatttgactcgga

SEQ ID NO: 366804 - DNA, 51 bp, Artificial
  Synthetic oligonucleotide
ccttctgaagtccaacgtgcgagaactatttcagaacgaagtcgaaacttg

SEQ ID NO: 366805 - DNA, 60 bp, Artificial
  Synthetic oligonucleotide
ccttctgacgccgctgcaaaagaacacgacgaagcttacgctgcttatcttcgctctggt

SEQ ID NO: 366806 - DNA, 55 bp, Artificial
  Synthetic oligonucleotide
ccttctgacggaatggattatagaaagtatgttgtagatatgaaagatctctcgc

SEQ ID NO: 366807 - DNA, 55 bp, Artificial
  Synthetic oligonucleotide
ccttctgacttctttccttccgtaagagatctcctagacaccgcctcgagaagcc

SEQ ID NO: 366808 - DNA, 55 bp, Artificial
  Synthetic oligonucleotide
ccttctgatggagatgtgttgttgtcgggaattaaaccgacttcacctggagttc

SEQ ID NO: 366809 - DNA, 55 bp, Artificial
  Synthetic oligonucleotide
ccttctgattctacatggatagggcgtttacctgttgtaggcggtttaatctctg

SEQ ID NO: 366810 - DNA, 60 bp, Artificial
  Synthetic oligonucleotide
ccttctgcagttccgataacgtctgatttattgatcatagatgaatatacacttgctgag

SEQ ID NO: 366811 - DNA, 60 bp, Artificial
  Synthetic oligonucleotide
ccttctgcggctactacgcctcgcgagttggctgcgtccgatctcccatcgccctcttcg

SEQ ID NO: 366812 - DNA, 55 bp, Artificial
  Synthetic oligonucleotide
ccttctgcgggaagtagctgtaatacttaacaccatctcgctcgacgtactcgga

SEQ ID NO: 366813 - DNA, 59 bp, Artificial
  Synthetic oligonucleotide
ccttctggttggcttaaggggcagctggggggcttgctatatggcaatatcggtgtgta

SEQ ID NO: 366814 - DNA, 59 bp, Artificial
  Synthetic oligonucleotide
ccttctgtgcctaagaaaggcctactcctcagactggcggcaggtctagcgttagctcc

SEQ ID NO: 366815 - DNA, 58 bp, Artificial
  Synthetic oligonucleotide
ccttctgttattgttgtggtaatactggttactgtaaggctgcatgtaagaaattcca

SEQ ID NO: 366816 - DNA, 56 bp, Artificial
  Synthetic oligonucleotide
ccttctgttgaaccccagtccttgggcccagaggagttctcggaagcgatacactc

SEQ ID NO: 366817 - DNA, 55 bp, Artificial
  Synthetic oligonucleotide
ccttctgttgccgcaactctgggttttggagcttacatgtccagggcccatggga

SEQ ID NO: 366818 - DNA, 60 bp, Artificial
  Synthetic oligonucleotide
ccttctgttgctgcaacactgggtttcggcgcttacatgtccaaagcccatgggattgat

SEQ ID NO: 366819 - DNA, 60 bp, Artificial
  Synthetic oligonucleotide
ccttcttcacttggtcactatctgatgccgtcgggaatgatacaccaggaggctactgtc

SEQ ID NO: 366820 - DNA, 55 bp, Artificial
  Synthetic oligonucleotide
ccttcttcagctacgtggcagcacgagcttggtggagggctccgcaggcacttac

SEQ ID NO: 366821 - DNA, 55 bp, Artificial
  Synthetic oligonucleotide
ccttcttcggtggtcccgtctctccttgtcggtgaagtctcccgcgcgagtcctc

SEQ ID NO: 366822 - DNA, 55 bp, Artificial
  Synthetic oligonucleotide
ccttctttggtgatgtagttcttgactgcgttggtgtccttggctgcctgaacgt

SEQ ID NO: 366823 - DNA, 55 bp, Artificial
  Synthetic oligonucleotide
ccttctttgttggaacttacagaaagagatttgattgtgttatcaggactacgtt

SEQ ID NO: 366824 - DNA, 58 bp, Artificial
  Synthetic oligonucleotide
ccttgaaaactttagagcctatgtggatggattcgaaccgaacggctgcattgaggga

SEQ ID NO: 366825 - DNA, 60 bp, Artificial
  Synthetic oligonucleotide
ccttgaaaatttgcaggcataccagaagcggatgggagtgcagatgcaacgattcaagtg

SEQ ID NO: 366826 - DNA, 55 bp, Artificial
  Synthetic oligonucleotide
ccttgaaaccaaggatgtcaatgaacgcgacaacgcgctcttcatacgctacccc

SEQ ID NO: 366827 - DNA, 57 bp, Artificial
  Synthetic oligonucleotide
ccttgaaagaggcgtttttagcacgtatggcaacgcctatctttcctcttatggata

SEQ ID NO: 366828 - DNA, 55 bp, Artificial
  Synthetic oligonucleotide
ccttgaaagcattcttctcctggtctttgacagattcatccggcaaggatacccc

SEQ ID NO: 366829 - DNA, 60 bp, Artificial
  Synthetic oligonucleotide
ccttgaaagcgctagtcaagattgtctcagccctagtcatagtggtaagaaatcacgatg

SEQ ID NO: 366830 - DNA, 54 bp, Artificial
  Synthetic oligonucleotide
ccttgaaagttaaattcccaaaatacccttatccctgtgtctgagaagcgcgtg

SEQ ID NO: 366831 - DNA, 60 bp, Artificial
  Synthetic oligonucleotide
ccttgaacacctagctaatgtagattcctctaatgatgttgttatgcaggagataagtga

SEQ ID NO: 366832 - DNA, 59 bp, Artificial
  Synthetic oligonucleotide
ccttgaaccgtaccggaatttaacgccgatgctacagcatcgtcagctgtctgacgacc

SEQ ID NO: 366833 - DNA, 55 bp, Artificial
  Synthetic oligonucleotide
ccttgaactggcacactcctccaccacaggggagtgttttgccttataatacact

SEQ ID NO: 366834 - DNA, 60 bp, Artificial
  Synthetic oligonucleotide
ccttgaactgtcattgacttgtgtgttatatcacgtgacatcatgtgactgcgtacgtga

SEQ ID NO: 366835 - DNA, 58 bp, Artificial
  Synthetic oligonucleotide
ccttgaacttggcaaaatgcgttctgtggtggacatttgtgtcgctaaccctgtaata

SEQ ID NO: 366836 - DNA, 55 bp, Artificial
  Synthetic oligonucleotide
ccttgaagcgatgatggctgagtggtatcaggacgggaaaggcattgttaccggg

SEQ ID NO: 366837 - DNA, 58 bp, Artificial
  Synthetic oligonucleotide
ccttgaataaaggttttgtggtctctcaggttcgtgtaggtctgccagactggactga

SEQ ID NO: 366838 - DNA, 60 bp, Artificial
  Synthetic oligonucleotide
ccttgaatcaccttcgacgatgatactcataggtctctctggccgcgcagcggcactcct

SEQ ID NO: 366839 - DNA, 58 bp, Artificial
  Synthetic oligonucleotide
ccttgaatctgaactgaagtattatagagttggtggtgattggaactttggcaaccga

SEQ ID NO: 366840 - DNA, 59 bp, Artificial
  Synthetic oligonucleotide
ccttgaatgaagataaaccactttcagatctatgcgttaaagaacttgttgctgaattg

SEQ ID NO: 366841 - DNA, 57 bp, Artificial
  Synthetic oligonucleotide
ccttgaatgtagagtctaatggaaacctaatcgccccttggtatgcatacaaattcg

SEQ ID NO: 366842 - DNA, 55 bp, Artificial
  Synthetic oligonucleotide
ccttgacaagtacagcgtcctgaacacaatacttgcccacctgcgcccgtccctc

SEQ ID NO: 366843 - DNA, 55 bp, Artificial
  Synthetic oligonucleotide
ccttgacacaggtgcaacgacatgttgcataaatgaagaagggctaccaaaggcg

SEQ ID NO: 366844 - DNA, 60 bp, Artificial
  Synthetic oligonucleotide
ccttgacagaaatgtggtcctataatgctgaactcttggtagcaatggagaatcagcaca

SEQ ID NO: 366845 - DNA, 60 bp, Artificial
  Synthetic oligonucleotide
ccttgacagagcgtggagttgtgtatcaagtagaggctgctcattacggtatgcgtacca

SEQ ID NO: 366846 - DNA, 58 bp, Artificial
  Synthetic oligonucleotide
ccttgacatgtcaaaactaattttgaaggcagcttgattagaattctgctcagcaggc

SEQ ID NO: 366847 - DNA, 55 bp, Artificial
  Synthetic oligonucleotide
ccttgacattgttgtggatcttatgagtttcctatcccatttcccgtagtccacg

SEQ ID NO: 366848 - DNA, 60 bp, Artificial
  Synthetic oligonucleotide
ccttgaccaacaggatagatcagacaagcagccatccacacctgaacaggcgactccaca

SEQ ID NO: 366849 - DNA, 50 bp, Artificial
  Synthetic oligonucleotide
ccttgacgacccaacagaccctcctctttaatatcttaggagggtgggta

SEQ ID NO: 366850 - DNA, 60 bp, Artificial
  Synthetic oligonucleotide
ccttgacgagacgtcggcgacatgcgaattgacgcttcgagctgaaggtgcattcaacta

SEQ ID NO: 366851 - DNA, 58 bp, Artificial
  Synthetic oligonucleotide
ccttgacggtggttgtccaagcggagagtcctcttctgagggactgtgtccagcggaa

SEQ ID NO: 366852 - DNA, 59 bp, Artificial
  Synthetic oligonucleotide
ccttgacgtcccaaactctaaccacaccacttatgccttgctgaggtcttctcatccca

SEQ ID NO: 366853 - DNA, 57 bp, Artificial
  Synthetic oligonucleotide
ccttgacgttctcatctgctagattgcttaattcatcctgtttcacccttactaact

SEQ ID NO: 366854 - DNA, 54 bp, Artificial
  Synthetic oligonucleotide
ccttgacgttggttgtccaggcggaaagccccctcctaagagattgggtccagc

SEQ ID NO: 366855 - DNA, 54 bp, Artificial
  Synthetic oligonucleotide
ccttgactatatatcatcagtaatatcaaagtgtgtgaatgagtctgaagagtc

SEQ ID NO: 366856 - DNA, 56 bp, Artificial
  Synthetic oligonucleotide
ccttgactcaagcacgaagtcatatcttgtcggaggcttggaagttgacaggtgtg

SEQ ID NO: 366857 - DNA, 57 bp, Artificial
  Synthetic oligonucleotide
ccttgactctgacagtagtgatattgtcccgctgctcgctaatgctgaggcctcgct

SEQ ID NO: 366858 - DNA, 59 bp, Artificial
  Synthetic oligonucleotide
ccttgactggatcaaggatgtcccaggaagagtatacggtcttgacgactacacaggtc

SEQ ID NO: 366859 - DNA, 56 bp, Artificial
  Synthetic oligonucleotide
ccttgactggatttgacttctatttggcccaaattaattggatttaatgtgattgg

SEQ ID NO: 366860 - DNA, 55 bp, Artificial
  Synthetic oligonucleotide
ccttgagaagctactactagagaagctgtaatgagcaacctcaaagaagtacaag

SEQ ID NO: 366861 - DNA, 55 bp, Artificial
  Synthetic oligonucleotide
ccttgagaagctactactgcaaaagctggaatgagcaccctccaagaattgcagg

SEQ ID NO: 366862 - DNA, 54 bp, Artificial
  Synthetic oligonucleotide
ccttgagaccgacggtcgaattgggtcggatatacctccgaccaaccagagttg

SEQ ID NO: 366863 - DNA, 60 bp, Artificial
  Synthetic oligonucleotide
ccttgagacgcacaaccctgaggctgcacagtcgctggataatgcgttgaccaatcgtga

SEQ ID NO: 366864 - DNA, 60 bp, Artificial
  Synthetic oligonucleotide
ccttgagactgctaataagctccgtaagactgtcacatgttatgatctttcatgtaatca

SEQ ID NO: 366865 - DNA, 60 bp, Artificial
  Synthetic oligonucleotide
ccttgagactttggtccagaaaactgattgcaatgcaaatggctttcagggctattatat

SEQ ID NO: 366866 - DNA, 60 bp, Artificial
  Synthetic oligonucleotide
ccttgagatgagagatttctcgcaattaatatgctttataatcgattatatatttgagag

SEQ ID NO: 366867 - DNA, 55 bp, Artificial
  Synthetic oligonucleotide
ccttgagcaagctctcgctgggatgggccaaacttgcgaccttacagctgccgag

SEQ ID NO: 366868 - DNA, 57 bp, Artificial
  Synthetic oligonucleotide
ccttgagccccaacaacattatgatcaattgtgagaaaactccccaagacctttcca

SEQ ID NO: 366869 - DNA, 56 bp, Artificial
  Synthetic oligonucleotide
ccttgaggaatcccacccagggatctttgaaaactcgtgtcttgagacgatggaaa

SEQ ID NO: 366870 - DNA, 57 bp, Artificial
  Synthetic oligonucleotide
ccttgaggaccggccaggaactcacgaggtacatctccggaagtgacgggatggtca

SEQ ID NO: 366871 - DNA, 54 bp, Artificial
  Synthetic oligonucleotide
ccttgaggagggttgccccgagggcacggtgtgttcagtactaataaagaggga

SEQ ID NO: 366872 - DNA, 58 bp, Artificial
  Synthetic oligonucleotide
ccttgagtatgtactctcttaccctgtctaccgatttagcagactggatgttggggtg

SEQ ID NO: 366873 - DNA, 60 bp, Artificial
  Synthetic oligonucleotide
ccttgagtcagtgatccttaccggtttctctgtttggattaatgcatgtaaatgcaaatc

SEQ ID NO: 366874 - DNA, 55 bp, Artificial
  Synthetic oligonucleotide
ccttgagtcctccggcccctgaatgtggctaatcctaaccccgtatccattgcac

SEQ ID NO: 366875 - DNA, 60 bp, Artificial
  Synthetic oligonucleotide
ccttgagtgggatatgcccaattatcgaggtcattcactgactgaagtctggcggggtac

SEQ ID NO: 366876 - DNA, 56 bp, Artificial
  Synthetic oligonucleotide
ccttgagtggggattactctgcggcacccaccccgcaatacaaatcgtgggcccta

SEQ ID NO: 366877 - DNA, 55 bp, Artificial
  Synthetic oligonucleotide
ccttgagttcactaacaattcagacaagcgtaatcgatgacttcggattatccgc

SEQ ID NO: 366878 - DNA, 59 bp, Artificial
  Synthetic oligonucleotide
ccttgagttgctctgcaacacttgttctacccggcatggatataccaggaaccagcggg

SEQ ID NO: 366879 - DNA, 57 bp, Artificial
  Synthetic oligonucleotide
ccttgagtttgatggcattcgagagtgactacactcgggcccagggggaccggttga

SEQ ID NO: 366880 - DNA, 54 bp, Artificial
  Synthetic oligonucleotide
ccttgataatccctttccgtttgaattaaaggagtggcaggagcgtctgtcggg

SEQ ID NO: 366881 - DNA, 60 bp, Artificial
  Synthetic oligonucleotide
ccttgatagacacctggtgtacttgatccctctgctctcatcactttctttctcaacttc

SEQ ID NO: 366882 - DNA, 60 bp, Artificial
  Synthetic oligonucleotide
ccttgatagttgcaagactgagaaggaactctatatggctgtgcttggtgcctacaagtc

SEQ ID NO: 366883 - DNA, 55 bp, Artificial
  Synthetic oligonucleotide
ccttgatattgccacctcaaaccagtggcactgcatatttactatccttcattag

SEQ ID NO: 366884 - DNA, 60 bp, Artificial
  Synthetic oligonucleotide
ccttgatcagtttgctctgggacgaaagtttctgtatcaagctggtatacgtactgctgt

SEQ ID NO: 366885 - DNA, 58 bp, Artificial
  Synthetic oligonucleotide
ccttgatccaatgtatggccagccttccccggacaagcacaacttgtagagaaggttc

SEQ ID NO: 366886 - DNA, 55 bp, Artificial
  Synthetic oligonucleotide
ccttgatcttaagtctgtctagacgtattgattatgctaacggcgcatgtcgttc

SEQ ID NO: 366887 - DNA, 60 bp, Artificial
  Synthetic oligonucleotide
ccttgatcttgttagatacacaggatgcagatttatattttggagacatccacacattga

SEQ ID NO: 366888 - DNA, 55 bp, Artificial
  Synthetic oligonucleotide
ccttgatgatcagttgaaacagagactgaacctggcagagggtgacccggtcatc

SEQ ID NO: 366889 - DNA, 59 bp, Artificial
  Synthetic oligonucleotide
ccttgatgcagatggaatgataaagcttccccagataactcacgagggaacttttatac

SEQ ID NO: 366890 - DNA, 60 bp, Artificial
  Synthetic oligonucleotide
ccttgatgcccaatggtgggcgtgtgattatgtttgtgccatctcgaagggagtgtgagt

SEQ ID NO: 366891 - DNA, 60 bp, Artificial
  Synthetic oligonucleotide
ccttgatggaagggactgtacactgatagacgctctactgggagacccccactgtgatgt

SEQ ID NO: 366892 - DNA, 55 bp, Artificial
  Synthetic oligonucleotide
ccttgatggtagtcattgccatgtactattcctgttgtaagcatgggtggtcaga

SEQ ID NO: 366893 - DNA, 55 bp, Artificial
  Synthetic oligonucleotide
ccttgatggtcaggtgttcgtaggagctatcgcagacggagatgacgagaccgct

SEQ ID NO: 366894 - DNA, 60 bp, Artificial
  Synthetic oligonucleotide
ccttgatgtgaatgctattgacatagaagagccaagtggacaaacagcagattggtatac

SEQ ID NO: 366895 - DNA, 58 bp, Artificial
  Synthetic oligonucleotide
ccttgatgtttctcgccatatgaagtttgctcctactgtcaaaaataacttgtccttg

SEQ ID NO: 366896 - DNA, 58 bp, Artificial
  Synthetic oligonucleotide
ccttgattgcatgacattggccttgccttacatgatcactctcgatggtgacacagtt

SEQ ID NO: 366897 - DNA, 60 bp, Artificial
  Synthetic oligonucleotide
ccttgattgcgagatctacggagcctgctactccatagaaccactggacatacctctaat

SEQ ID NO: 366898 - DNA, 55 bp, Artificial
  Synthetic oligonucleotide
ccttgattgtctccaacatattgccaccatccagcatgcaagctcctgccttcac

SEQ ID NO: 366899 - DNA, 57 bp, Artificial
  Synthetic oligonucleotide
ccttgatttccactaggaatattcgtgtttgcgttggtattgacccactagtgacca

SEQ ID NO: 366900 - DNA, 58 bp, Artificial
  Synthetic oligonucleotide
ccttgcaaaagtctaccgtatgggtcgtcgactgctagtaggtgtggtctgccgaggc

SEQ ID NO: 366901 - DNA, 51 bp, Artificial
  Synthetic oligonucleotide
ccttgcaaaggtcgagatatagtgatcatcagattaccaaaggatttccct

SEQ ID NO: 366902 - DNA, 60 bp, Artificial
  Synthetic oligonucleotide
ccttgcacatcacaatggaattctattgctcattggctcctcacgctttgtgcactctct

SEQ ID NO: 366903 - DNA, 56 bp, Artificial
  Synthetic oligonucleotide
ccttgcacatgagagaatattcaatactacattgttgaagaatgagggtagtgtgg

SEQ ID NO: 366904 - DNA, 60 bp, Artificial
  Synthetic oligonucleotide
ccttgcagaagaccagaagctgaaacgtatgatcacattactaaaggaaagatgtaatcc

SEQ ID NO: 366905 - DNA, 55 bp, Artificial
  Synthetic oligonucleotide
ccttgcagagtaccgatgggaacaacccatccctatctcctcacggggtatgcct

SEQ ID NO: 366906 - DNA, 55 bp, Artificial
  Synthetic oligonucleotide
ccttgcagatgctgctttagtgttcggagaagacgttgatggttggttgcagaga

SEQ ID NO: 366907 - DNA, 59 bp, Artificial
  Synthetic oligonucleotide
ccttgcagctgacgcccttgttagtgcagaatcccttgcccttctagaaacagaaatcg

SEQ ID NO: 366908 - DNA, 57 bp, Artificial
  Synthetic oligonucleotide
ccttgcaggccacattagcgggtctaatgtgtacccagataggaatgaaaccagaaa

SEQ ID NO: 366909 - DNA, 55 bp, Artificial
  Synthetic oligonucleotide
ccttgcatcatatacgttcgtcactagatcgtttgtttcggcctgaagttggtgc

SEQ ID NO: 366910 - DNA, 52 bp, Artificial
  Synthetic oligonucleotide
ccttgccaatgaatctgatgactctgattgctactgcttcgactgtgacgtg

SEQ ID NO: 366911 - DNA, 55 bp, Artificial
  Synthetic oligonucleotide
ccttgccacagctgttaatggggtcctctggacggtctaccatggtgcggggtca

SEQ ID NO: 366912 - DNA, 55 bp, Artificial
  Synthetic oligonucleotide
ccttgccaggatccctcttgtgggttgttatttgaagggagggcatagcttggga

SEQ ID NO: 366913 - DNA, 51 bp, Artificial
  Synthetic oligonucleotide
ccttgcccaagattgttggctctgtttaaaactaggtacccctacccctct

SEQ ID NO: 366914 - DNA, 55 bp, Artificial
  Synthetic oligonucleotide
ccttgcccaagttaccaattcctgagagatatctcaagatgcccatctccgtctc

SEQ ID NO: 366915 - DNA, 53 bp, Artificial
  Synthetic oligonucleotide
ccttgccccaccaagcaacaaacgaacccggaatccatccccggaaagagcaa

SEQ ID NO: 366916 - DNA, 60 bp, Artificial
  Synthetic oligonucleotide
ccttgccccatatcaatcacagaacttatgtgtgagggcacaaccccagtctcaaactgc

SEQ ID NO: 366917 - DNA, 58 bp, Artificial
  Synthetic oligonucleotide
ccttgccctgagcttgagcaggggttactctacatgccacaagagcttacagtgtctg

SEQ ID NO: 366918 - DNA, 56 bp, Artificial
  Synthetic oligonucleotide
ccttgccgttgctccgtctgtgaaccacttcagcctgcccccgtcccctccactcc

SEQ ID NO: 366919 - DNA, 51 bp, Artificial
  Synthetic oligonucleotide
ccttgcctggcgtaaaagtaaatttatctgtgaacttgcaatgttacaagt

SEQ ID NO: 366920 - DNA, 51 bp, Artificial
  Synthetic oligonucleotide
ccttgcgaatttcagggtgaaacttttaaggttgtgacttttgttacttcc

SEQ ID NO: 366921 - DNA, 57 bp, Artificial
  Synthetic oligonucleotide
ccttgcggcgtactagtgacagcaaggtatatctgcctcctacccctgtgtcccggg

SEQ ID NO: 366922 - DNA, 60 bp, Artificial
  Synthetic oligonucleotide
ccttgcgtaacaccatccagtcgtctattgacatctcaggtatggacgcctctatacaac

SEQ ID NO: 366923 - DNA, 56 bp, Artificial
  Synthetic oligonucleotide
ccttgcgtgccccagtgggggtttcctcagaccatctgcccctatagggaagctgg

SEQ ID NO: 366924 - DNA, 55 bp, Artificial
  Synthetic oligonucleotide
ccttgctaacatccgtagcattaaaataatcggcatcgtgttgaaatgcaacctt

SEQ ID NO: 366925 - DNA, 60 bp, Artificial
  Synthetic oligonucleotide
ccttgctaacgcaactgcggcacagcaggatgtgttagaagcaacctatgccatggtaca

SEQ ID NO: 366926 - DNA, 56 bp, Artificial
  Synthetic oligonucleotide
ccttgctcctagtggagtaatggtctcaatagaagaacctggttggtattctttcg

SEQ ID NO: 366927 - DNA, 55 bp, Artificial
  Synthetic oligonucleotide
ccttgctctcgttggttagtatgcaagtcccgctggcgtcccaaatagcaaaccc

SEQ ID NO: 366928 - DNA, 60 bp, Artificial
  Synthetic oligonucleotide
ccttgctgcttctgacattcgcgaggcctccactcgcgtctcctcctccattgatgggtt

SEQ ID NO: 366929 - DNA, 60 bp, Artificial
  Synthetic oligonucleotide
ccttgctggatctatgttcctctatctatgtccttttatagagtggtgatctgtgggttg

SEQ ID NO: 366930 - DNA, 59 bp, Artificial
  Synthetic oligonucleotide
ccttgctggtccaaaatgcgaacccagactgtaagaccattctaagagcattaggacca

SEQ ID NO: 366931 - DNA, 59 bp, Artificial
  Synthetic oligonucleotide
ccttgctggtccaaaatgctaacccagattgcaagaccatcttaagggcattaggacca

SEQ ID NO: 366932 - DNA, 56 bp, Artificial
  Synthetic oligonucleotide
ccttgctggtgctactcaacgtcccccccaaagattactggaagactgttacacaa

SEQ ID NO: 366933 - DNA, 60 bp, Artificial
  Synthetic oligonucleotide
ccttgctgttgtgtcacacatgatgatgggaagcctttctattctgatcttaaaagtcca

SEQ ID NO: 366934 - DNA, 55 bp, Artificial
  Synthetic oligonucleotide
ccttgcttgatagtgtctcaggtctggatggtcgagttacccaagcagagacgag

SEQ ID NO: 366935 - DNA, 60 bp, Artificial
  Synthetic oligonucleotide
ccttggaagcactcatcctgatctgagtaccctgaaacttactagttgaaatatatcacc

SEQ ID NO: 366936 - DNA, 60 bp, Artificial
  Synthetic oligonucleotide
ccttggaattggagttcttcctctctatgaggctcattcgcatgctctctttgcaccacg

SEQ ID NO: 366937 - DNA, 52 bp, Artificial
  Synthetic oligonucleotide
ccttggacacataaggtgggaaactttacgggactgtattcttctacggtac

SEQ ID NO: 366938 - DNA, 52 bp, Artificial
  Synthetic oligonucleotide
ccttggacactggttgttatggtggtgtcgcccctcacggttagcaacactg

SEQ ID NO: 366939 - DNA, 59 bp, Artificial
  Synthetic oligonucleotide
ccttggacggccgccctcttactaccatccagcagtactctaagacattctatgtcctc

SEQ ID NO: 366940 - DNA, 55 bp, Artificial
  Synthetic oligonucleotide
ccttggactcacaaggcgggaaactttactgggctctattcttctactgcacctg

SEQ ID NO: 366941 - DNA, 55 bp, Artificial
  Synthetic oligonucleotide
ccttggactcataaggtgggagactttgcggggctttattcttctatggtaccta

SEQ ID NO: 366942 - DNA, 56 bp, Artificial
  Synthetic oligonucleotide
ccttggagaaagttcgtgccggtaagactcgcatcgtcgatgtcctacccgttgaa

SEQ ID NO: 366943 - DNA, 55 bp, Artificial
  Synthetic oligonucleotide
ccttggagacatctgtgtggtccaagcagcacgggtgacaagactggttgctaag

SEQ ID NO: 366944 - DNA, 60 bp, Artificial
  Synthetic oligonucleotide
ccttggagaccagactggagtgttgcttaagtcacttgctggtgttcctgtggcgcatat

SEQ ID NO: 366945 - DNA, 52 bp, Artificial
  Synthetic oligonucleotide
ccttggagatattgcctaagtctctgtcaacactgacatacttgaagagcat

SEQ ID NO: 366946 - DNA, 53 bp, Artificial
  Synthetic oligonucleotide
ccttggagcgtcctgtatgggtacgagggttcggagtactcctactaccgccc

SEQ ID NO: 366947 - DNA, 55 bp, Artificial
  Synthetic oligonucleotide
ccttggaggaagcaatgacacagagttgaattatgtcagttgtgctctcgaccgg

SEQ ID NO: 366948 - DNA, 53 bp, Artificial
  Synthetic oligonucleotide
ccttggataagatgttaattgttgggggtttgaaacgtatgtccgtggaatgt

SEQ ID NO: 366949 - DNA, 55 bp, Artificial
  Synthetic oligonucleotide
ccttggatcaaacgtttctcaccgcctccgacgcaccgagaacacttatcctgga

SEQ ID NO: 366950 - DNA, 60 bp, Artificial
  Synthetic oligonucleotide
ccttggattgaggcacatgccagaagtctatgtggttcatgttgtacgcctttgacagta

SEQ ID NO: 366951 - DNA, 54 bp, Artificial
  Synthetic oligonucleotide
ccttggcacgagtcctactaagagaatccttgcaccagatccctggttcggtcc

SEQ ID NO: 366952 - DNA, 59 bp, Artificial
  Synthetic oligonucleotide
ccttggccaatcagatgatgcgctgaaagcttaaataaatctcccgcccttataaatac

SEQ ID NO: 366953 - DNA, 55 bp, Artificial
  Synthetic oligonucleotide
ccttggccgcaaaggaagaatccattccaaaaatcccagatggacttctaattcc

SEQ ID NO: 366954 - DNA, 55 bp, Artificial
  Synthetic oligonucleotide
ccttggccgtgatgggagcctcctacggattccaatactcaccgggacagcgggt

SEQ ID NO: 366955 - DNA, 60 bp, Artificial
  Synthetic oligonucleotide
ccttggcgatgtaggacttgacgtcggagctggatttagctccctgaatgttcggatgga

SEQ ID NO: 366956 - DNA, 55 bp, Artificial
  Synthetic oligonucleotide
ccttggcgcaataacgcgcccgacacctgaaagaacgccttgagcaccaatattg

SEQ ID NO: 366957 - DNA, 55 bp, Artificial
  Synthetic oligonucleotide
ccttggcgctctttaaaatcacgcggcaatgactcaatcacagcagtccggcttc

SEQ ID NO: 366958 - DNA, 55 bp, Artificial
  Synthetic oligonucleotide
ccttggcggaatgcagactagaataattaatcgagcgtcatattcagcgttagat

SEQ ID NO: 366959 - DNA, 55 bp, Artificial
  Synthetic oligonucleotide
ccttggctctttacagtcacctataatactgcttaaacagtcacgtttatcagtt

SEQ ID NO: 366960 - DNA, 60 bp, Artificial
  Synthetic oligonucleotide
ccttggctgacacctaggtgcatggttgactatccatacagactctggcactacccctgc

SEQ ID NO: 366961 - DNA, 55 bp, Artificial
  Synthetic oligonucleotide
ccttgggataggagtacagtaaccactcttagatacccgattcccctgtttctgc

SEQ ID NO: 366962 - DNA, 60 bp, Artificial
  Synthetic oligonucleotide
ccttgggatatatgatcaggtcatggtacttccaacacattctgatccaggctctgaaat

SEQ ID NO: 366963 - DNA, 55 bp, Artificial
  Synthetic oligonucleotide
ccttgggcaaaagagatacaccaagaccacatactggtgggatggactacaatcc

SEQ ID NO: 366964 - DNA, 55 bp, Artificial
  Synthetic oligonucleotide
ccttgggcaggtattggatctggtgtaattacaggtgttttattatgggttcttg

SEQ ID NO: 366965 - DNA, 55 bp, Artificial
  Synthetic oligonucleotide
ccttgggctccccataggactatggcttttcatgtgcacctgcatcggagtggag

SEQ ID NO: 366966 - DNA, 52 bp, Artificial
  Synthetic oligonucleotide
ccttgggcttcaggtataattggaacgctatcattgggtagtatagttgcta

SEQ ID NO: 366967 - DNA, 57 bp, Artificial
  Synthetic oligonucleotide
ccttgggctttggtgctactacttgtacttcttgttgttctctctgagcgctttaac

SEQ ID NO: 366968 - DNA, 57 bp, Artificial
  Synthetic oligonucleotide
ccttggggagaggttctagcgtggaagtttgatccaactctagcctacacttatgag

SEQ ID NO: 366969 - DNA, 60 bp, Artificial
  Synthetic oligonucleotide
ccttggggctcaagtctagatgtccacagagataattatggaggcccaatgatctagccc

SEQ ID NO: 366970 - DNA, 57 bp, Artificial
  Synthetic oligonucleotide
ccttggggcttaagtcaagatggccgcaaaggtagttatgacgtggactcagagacc

SEQ ID NO: 366971 - DNA, 58 bp, Artificial
  Synthetic oligonucleotide
ccttgggtcaggggccaatcaggaaggataagcatctattggacaatagtgaagccgg

SEQ ID NO: 366972 - DNA, 56 bp, Artificial
  Synthetic oligonucleotide
ccttgggtcctcatattggcttaactccaaattctcggttgagcataagttttcag

SEQ ID NO: 366973 - DNA, 53 bp, Artificial
  Synthetic oligonucleotide
ccttggtacgcctcaaaccgaaatgaccttgtacaaggaactcgaagataacc

SEQ ID NO: 366974 - DNA, 55 bp, Artificial
  Synthetic oligonucleotide
ccttggtactactccattgcgcgtgaaccaggatccagggtccaatatcagttcc

SEQ ID NO: 366975 - DNA, 55 bp, Artificial
  Synthetic oligonucleotide
ccttggtactgagataatcctgactctcccacaaggtctcaagaaatactacagt

SEQ ID NO: 366976 - DNA, 60 bp, Artificial
  Synthetic oligonucleotide
ccttggtctagccatatcttatatgctgaatctccttttagagaatctagattatcatcg

SEQ ID NO: 366977 - DNA, 57 bp, Artificial
  Synthetic oligonucleotide
ccttggtgatgcaattgggcctttaatttatggtctttgactattggactttgtata

SEQ ID NO: 366978 - DNA, 55 bp, Artificial
  Synthetic oligonucleotide
ccttggtgggagagggaagggctgagaagatcgagctattcaatcagagcgccac

SEQ ID NO: 366979 - DNA, 55 bp, Artificial
  Synthetic oligonucleotide
ccttggttaaacaagcggttatgttcttgagggactcggtccgctgcgctttagc

SEQ ID NO: 366980 - DNA, 56 bp, Artificial
  Synthetic oligonucleotide
ccttggttaacacctaggtgcatggtacactacccatacaggctttggcattaccc

SEQ ID NO: 366981 - DNA, 58 bp, Artificial
  Synthetic oligonucleotide
ccttggttaggcttacgcctacaccgttggagattgtctcacatggatctcctcacgt

SEQ ID NO: 366982 - DNA, 55 bp, Artificial
  Synthetic oligonucleotide
ccttggttattactctgcctcctactcagatccctgtgctatcaagtgcccctac

SEQ ID NO: 366983 - DNA, 54 bp, Artificial
  Synthetic oligonucleotide
ccttggttgacgcaacaacctttacaattaaccattctagttcctcttcaagag

SEQ ID NO: 366984 - DNA, 56 bp, Artificial
  Synthetic oligonucleotide
ccttggttgacgcccaggtgcatggtccactacccgtacaggctttggcactaccc

SEQ ID NO: 366985 - DNA, 60 bp, Artificial
  Synthetic oligonucleotide
ccttggttgtacatggcaaacagtgtgtgcgcatatgaggcaacccatttgcagcctgta

SEQ ID NO: 366986 - DNA, 55 bp, Artificial
  Synthetic oligonucleotide
ccttggttgtcagaaagtcctaatgagactctagataagtcaccattaaacaacc

SEQ ID NO: 366987 - DNA, 51 bp, Artificial
  Synthetic oligonucleotide
ccttggtttattccaggtttggttttagagggactatcttttctgggctta

SEQ ID NO: 366988 - DNA, 57 bp, Artificial
  Synthetic oligonucleotide
ccttgtaaaaatggtttcaggcaagaggtactcattcatagtcacaagacagggtgg

SEQ ID NO: 366989 - DNA, 60 bp, Artificial
  Synthetic oligonucleotide
ccttgtaaacactgacacctctaatgctagcgctccaagcgttagtactgaggtggttga

SEQ ID NO: 366990 - DNA, 55 bp, Artificial
  Synthetic oligonucleotide
ccttgtaaagtccagtcttacgaacagcgccatgacatctcacatgtgggcaagg

SEQ ID NO: 366991 - DNA, 58 bp, Artificial
  Synthetic oligonucleotide
ccttgtaaagttcccatctcgtcagtggcttcattgaacgacctaacgccagtgggca

SEQ ID NO: 366992 - DNA, 55 bp, Artificial
  Synthetic oligonucleotide
ccttgtactatggggtgttcatcacccgtctaacataggggaccaaagggccatc

SEQ ID NO: 366993 - DNA, 55 bp, Artificial
  Synthetic oligonucleotide
ccttgtactttatgctgccccgcttagtcctttactaccgcttcaggatggcacc

SEQ ID NO: 366994 - DNA, 54 bp, Artificial
  Synthetic oligonucleotide
ccttgtaggggacgtccaccaaatcgggtttatagacttccaaggcacaagcgc

SEQ ID NO: 366995 - DNA, 59 bp, Artificial
  Synthetic oligonucleotide
ccttgtatacctcatttccactgctgtggtaactagatggaatctggacgtagccggat

SEQ ID NO: 366996 - DNA, 53 bp, Artificial
  Synthetic oligonucleotide
ccttgtatacgcttcacccgaggcgaaaaacgaggttatcgttatccgcaaag

SEQ ID NO: 366997 - DNA, 57 bp, Artificial
  Synthetic oligonucleotide
ccttgtatttccaagtggcacatactattgtgtctccactcaaggcaggtctctgca

SEQ ID NO: 366998 - DNA, 55 bp, Artificial
  Synthetic oligonucleotide
ccttgtcaaagcggggagcttttcagcgcaatacaagaccagcgctacagggaag

SEQ ID NO: 366999 - DNA, 55 bp, Artificial
  Synthetic oligonucleotide
ccttgtcagcacaactaccgctcacggatgtgataccatcgccagatgccagtgt

SEQ ID NO: 367000 - DNA, 59 bp, Artificial
  Synthetic oligonucleotide
ccttgtcagtagcatgacaaagtaagattattgagtcaaacagtagtaaagtcttcctc

SEQ ID NO: 367001 - DNA, 60 bp, Artificial
  Synthetic oligonucleotide
ccttgtcatttccgcttgtgtgatggaatttatcattatgcctgcatttatagacctaaa

SEQ ID NO: 367002 - DNA, 55 bp, Artificial
  Synthetic oligonucleotide
ccttgtccaaacggctttgaccaccttagcaatgataaccttgacatcactcgtc

SEQ ID NO: 367003 - DNA, 55 bp, Artificial
  Synthetic oligonucleotide
ccttgtccccaggcctgagtccgaagtcagggtctggatgggatccttttggttg

SEQ ID NO: 367004 - DNA, 54 bp, Artificial
  Synthetic oligonucleotide
ccttgtccgctggttcctgggccccgattccccccaagctcttcacgaccagta

SEQ ID NO: 367005 - DNA, 57 bp, Artificial
  Synthetic oligonucleotide
ccttgtcctcatacattagttttcccagtctcacgaggactgaacccaacaggtcca

SEQ ID NO: 367006 - DNA, 55 bp, Artificial
  Synthetic oligonucleotide
ccttgtcgcaagagtgttatactctttgttgctagaatgttattttctcagtgct

SEQ ID NO: 367007 - DNA, 52 bp, Artificial
  Synthetic oligonucleotide
ccttgtcgcgtcatacttgcccgagttgcctagtttgcaggacgtgttcaat

SEQ ID NO: 367008 - DNA, 55 bp, Artificial
  Synthetic oligonucleotide
ccttgtctctccccattggtgaccaagagtacttcccaaagtactacccaactca

SEQ ID NO: 367009 - DNA, 55 bp, Artificial
  Synthetic oligonucleotide
ccttgtctcttactggacttacaacagagcagttttccctcctaagtgctatccc

SEQ ID NO: 367010 - DNA, 57 bp, Artificial
  Synthetic oligonucleotide
ccttgtgaacctctcttagagggtgtggattaatataatctgctaacagttaggtct

SEQ ID NO: 367011 - DNA, 55 bp, Artificial
  Synthetic oligonucleotide
ccttgtgaagtaatacaagaacctcctcccggcatcttcgtatcgtgtttgagga

SEQ ID NO: 367012 - DNA, 56 bp, Artificial
  Synthetic oligonucleotide
ccttgtgagaatcaaccgacttggtcctggcatacctgatcacccactacgactcc

SEQ ID NO: 367013 - DNA, 56 bp, Artificial
  Synthetic oligonucleotide
ccttgtgagaggcaactcccctgtgtttaactacaacaaagcaaccaagaggctta

SEQ ID NO: 367014 - DNA, 55 bp, Artificial
  Synthetic oligonucleotide
ccttgtgcatccgctacaccataaggacacgattctcctatacacacagccccgc

SEQ ID NO: 367015 - DNA, 60 bp, Artificial
  Synthetic oligonucleotide
ccttgtgccgactgactgctctggtttcgactggagcgttgcggaatggatgctacacga

SEQ ID NO: 367016 - DNA, 55 bp, Artificial
  Synthetic oligonucleotide
ccttgtgcgcctgttttatataccccgccccaagcaaacgctagatgtaacgcac

SEQ ID NO: 367017 - DNA, 60 bp, Artificial
  Synthetic oligonucleotide
ccttgtggagacccaacgctctcctgaggttgtgattgaacctgatctggacgtgatata

SEQ ID NO: 367018 - DNA, 55 bp, Artificial
  Synthetic oligonucleotide
ccttgtggctatcatgctagctgacaccggtcttgagattctggacagtacattt

SEQ ID NO: 367019 - DNA, 60 bp, Artificial
  Synthetic oligonucleotide
ccttgtgggactgcatggagcttggaattcttgcgtcgcactaagtttcacttgagtgtc

SEQ ID NO: 367020 - DNA, 50 bp, Artificial
  Synthetic oligonucleotide
ccttgtggtattgtgcctgcaaagagtgtgtgtggcccggtatattgctt

SEQ ID NO: 367021 - DNA, 51 bp, Artificial
  Synthetic oligonucleotide
ccttgtggtcataacagcggataagagagaggcccaaggtagggccatctc

SEQ ID NO: 367022 - DNA, 55 bp, Artificial
  Synthetic oligonucleotide
ccttgtggttttctcatttaaatgctggcggacttagcaccgcccccttatcctg

SEQ ID NO: 367023 - DNA, 60 bp, Artificial
  Synthetic oligonucleotide
ccttgtgtaaccctagtaacaagatgaagattccagaatcccatggaatcagagccagaa

SEQ ID NO: 367024 - DNA, 55 bp, Artificial
  Synthetic oligonucleotide
ccttgtgtccgtgccgaagaacgcttggtctgttttaggcgtcggtgtggctcgt

SEQ ID NO: 367025 - DNA, 60 bp, Artificial
  Synthetic oligonucleotide
ccttgtgtggttgaagaccctcacctttgagccatcaaccatcgctctgatcgcttatat

SEQ ID NO: 367026 - DNA, 52 bp, Artificial
  Synthetic oligonucleotide
ccttgtgtgtgtggtcgtgatgctacacaatatctagtacaacaagagtctt

SEQ ID NO: 367027 - DNA, 57 bp, Artificial
  Synthetic oligonucleotide
ccttgtgtttattatgggtgacgacaatgtcatctttacaccttggactcttcttaa

SEQ ID NO: 367028 - DNA, 54 bp, Artificial
  Synthetic oligonucleotide
ccttgttaaattcctaccccattctaagcttcaaccaatagaacaatggtacaa

SEQ ID NO: 367029 - DNA, 57 bp, Artificial
  Synthetic oligonucleotide
ccttgttaaggctcgccgcgggatctcaacggaggaggtgagctttggtacgtcaga

SEQ ID NO: 367030 - DNA, 56 bp, Artificial
  Synthetic oligonucleotide
ccttgttagctgttctttttggtgttaagaacgaaattctgagttctaatgccaca

SEQ ID NO: 367031 - DNA, 52 bp, Artificial
  Synthetic oligonucleotide
ccttgttatggcttgggaataataccctggatcagatgagagccactacgaa

SEQ ID NO: 367032 - DNA, 55 bp, Artificial
  Synthetic oligonucleotide
ccttgttcaacccggtatagcttctgaacttgtgatccccagcgagcgcctgcat

SEQ ID NO: 367033 - DNA, 55 bp, Artificial
  Synthetic oligonucleotide
ccttgttctccgtgatgcatcgggcaactttgctgctggaactatcactgccaca

SEQ ID NO: 367034 - DNA, 60 bp, Artificial
  Synthetic oligonucleotide
ccttgttctgtgatgacaatgcacgtgctttcacgtataagatcctatctgaggatcagt

SEQ ID NO: 367035 - DNA, 60 bp, Artificial
  Synthetic oligonucleotide
ccttgttgcctgcaaggatggcgcacttaccagtgatggtaggtgtccgcagtatggttg

SEQ ID NO: 367036 - DNA, 56 bp, Artificial
  Synthetic oligonucleotide
ccttgttgttacagagaagactgccaacgatttgttgtcgtgtggtgtcagttcaa

SEQ ID NO: 367037 - DNA, 56 bp, Artificial
  Synthetic oligonucleotide
ccttgtttatcaaagagaacaaggtgaagctggaaatattcatttccagggttata

SEQ ID NO: 367038 - DNA, 59 bp, Artificial
  Synthetic oligonucleotide
ccttgttttttgcagatgtggcggcctagtgacaacaaactatatgtgcctcctcccgc

SEQ ID NO: 367039 - DNA, 54 bp, Artificial
  Synthetic oligonucleotide
cctttaaaacaagtatcggagaccccagcacaatcccatgcccctacggaccag

SEQ ID NO: 367040 - DNA, 54 bp, Artificial
  Synthetic oligonucleotide
cctttaaaagatggacctctgtaaagcttattgaacttgacgtttggtatgctt

SEQ ID NO: 367041 - DNA, 52 bp, Artificial
  Synthetic oligonucleotide
cctttaaatatggatatgtttgtaaaggttttcggtgattcggttagagatt

SEQ ID NO: 367042 - DNA, 55 bp, Artificial
  Synthetic oligonucleotide
cctttaaatgggagtctaacactggaacaagaggacatcatgataagaggattgg

SEQ ID NO: 367043 - DNA, 55 bp, Artificial
  Synthetic oligonucleotide
cctttaacgctcagtatgaggtgatgcagttgtatccgactgtgtctttggcgga

SEQ ID NO: 367044 - DNA, 54 bp, Artificial
  Synthetic oligonucleotide
cctttaactaggcgggcgtgttggttacagtacgaggggacagtacgcattgaa

SEQ ID NO: 367045 - DNA, 58 bp, Artificial
  Synthetic oligonucleotide
cctttaagagactgaaaagcatgactcgtgcacaggaagctcctttagggtagaggaa

SEQ ID NO: 367046 - DNA, 54 bp, Artificial
  Synthetic oligonucleotide
cctttaagtagtgtgtgcccttctgttgtgtgcctttggtaactaaggatccct

SEQ ID NO: 367047 - DNA, 55 bp, Artificial
  Synthetic oligonucleotide
cctttaatggtggcatacatgttggaaagagaactagttcgcaaaaccagattcc

SEQ ID NO: 367048 - DNA, 59 bp, Artificial
  Synthetic oligonucleotide
cctttaatgtgagtgggctttccgtatttcacgttgctttgccagtctctctgagcgcc

SEQ ID NO: 367049 - DNA, 60 bp, Artificial
  Synthetic oligonucleotide
cctttaattggagcaggtatggcgacggctgtcgcgactgggagagcaatcgagggggca

SEQ ID NO: 367050 - DNA, 53 bp, Artificial
  Synthetic oligonucleotide
cctttaatttgaactggcttcccgtactttgtgttggattgccagtccctttg

SEQ ID NO: 367051 - DNA, 53 bp, Artificial
  Synthetic oligonucleotide
cctttacaaagtgtcttaagacgtccataccggttactccttgccggttgcga

SEQ ID NO: 367052 - DNA, 53 bp, Artificial
  Synthetic oligonucleotide
cctttacacaaacatgaagattcagcttttaaaatccgtaagttaatgttaaa

SEQ ID NO: 367053 - DNA, 55 bp, Artificial
  Synthetic oligonucleotide
cctttacactagagaagaatgcacctggattttcaaaccacatgaggtgctcaag

SEQ ID NO: 367054 - DNA, 60 bp, Artificial
  Synthetic oligonucleotide
cctttacatcatcattgcagtctacagtatctatttcatctatccaaaaacacactcttg

SEQ ID NO: 367055 - DNA, 58 bp, Artificial
  Synthetic oligonucleotide
cctttacccgccggggatacccaagatgaagatcgtaggcgtgcattgaaggatgaga

SEQ ID NO: 367056 - DNA, 53 bp, Artificial
  Synthetic oligonucleotide
cctttacgtgggggacctgtgcgggtctgtcttcctcataggccaactggtta

SEQ ID NO: 367057 - DNA, 56 bp, Artificial
  Synthetic oligonucleotide
cctttactgtgaagagtggagcgtatctcgtcgcaatgtcgctctggcacggacac

SEQ ID NO: 367058 - DNA, 58 bp, Artificial
  Synthetic oligonucleotide
cctttactgttgatgtgtattatgatgaggaccaagataattactttccatatactgc

SEQ ID NO: 367059 - DNA, 57 bp, Artificial
  Synthetic oligonucleotide
cctttacttgatgcctaatacttatgcataccctcaaggtcggaaaactattacaca

SEQ ID NO: 367060 - DNA, 60 bp, Artificial
  Synthetic oligonucleotide
cctttagaaatctatgcaatagtggcactggtagtggtgctaatcatagcaatagttgtg

SEQ ID NO: 367061 - DNA, 54 bp, Artificial
  Synthetic oligonucleotide
cctttagactgcaaaagaaacaggggcaaatctcatggtctggactgttcaatc

SEQ ID NO: 367062 - DNA, 56 bp, Artificial
  Synthetic oligonucleotide
cctttagagaatctgagttattttgaggagttggaagatgatggaagagttaaagc

SEQ ID NO: 367063 - DNA, 55 bp, Artificial
  Synthetic oligonucleotide
cctttagatatccacttgggttgtagatatagtcaatcaactggtctgacaagtc

SEQ ID NO: 367064 - DNA, 53 bp, Artificial
  Synthetic oligonucleotide
cctttagcggctacaattatagtgagcccgccggttagcgggacttataaaat

SEQ ID NO: 367065 - DNA, 60 bp, Artificial
  Synthetic oligonucleotide
cctttagctatcgctatacaaggtctaggtgccttccgcactgaaagcattctcgcaaac

SEQ ID NO: 367066 - DNA, 56 bp, Artificial
  Synthetic oligonucleotide
cctttaggaatgttggaatagttgtccctacctatagttctatgctttatagatgg

SEQ ID NO: 367067 - DNA, 59 bp, Artificial
  Synthetic oligonucleotide
cctttaggacaactgggtgctggattctatccagtaaaaggatgggtcagattgtgaca

SEQ ID NO: 367068 - DNA, 55 bp, Artificial
  Synthetic oligonucleotide
cctttaggtctgtaggcccttaccctttagggtcacgacattgtggtcatgccca

SEQ ID NO: 367069 - DNA, 55 bp, Artificial
  Synthetic oligonucleotide
cctttaggtggtgatggttctatgtcaatcatggagttagcaacagctgggatag

SEQ ID NO: 367070 - DNA, 56 bp, Artificial
  Synthetic oligonucleotide
cctttaggtgttggatctactggtcatcccttgtttaataaggttggagacacaga

SEQ ID NO: 367071 - DNA, 58 bp, Artificial
  Synthetic oligonucleotide
cctttagtaggacgagcataatgggggactagtggtagcagtgagctccttggattac

SEQ ID NO: 367072 - DNA, 60 bp, Artificial
  Synthetic oligonucleotide
cctttagtatattgagggcctgagctttggaccctgcgttgattgcctcggcatatgcgt

SEQ ID NO: 367073 - DNA, 57 bp, Artificial
  Synthetic oligonucleotide
cctttagtatgtaagctattcataggaactagaaatgtaactactgtgatacgttta

SEQ ID NO: 367074 - DNA, 60 bp, Artificial
  Synthetic oligonucleotide
cctttataagcaagccatgtgagtacctactttggtctttgaatgcactttcattatgag

SEQ ID NO: 367075 - DNA, 58 bp, Artificial
  Synthetic oligonucleotide
cctttatatactaaaagcctctaggactccataggacacgtgtaaggctctcagcggc

SEQ ID NO: 367076 - DNA, 55 bp, Artificial
  Synthetic oligonucleotide
cctttatcctcgtgagctatggacagtaccggccgagcatatgacggtgcgtctg

SEQ ID NO: 367077 - DNA, 60 bp, Artificial
  Synthetic oligonucleotide
cctttatgaaagcctcctgtgcgatggcttatcacctgagtcgtcgtacgaggaagcata

SEQ ID NO: 367078 - DNA, 58 bp, Artificial
  Synthetic oligonucleotide
cctttatgaagacaacaccgaggccactcagactacctgacggcccaccatgtttcca

SEQ ID NO: 367079 - DNA, 55 bp, Artificial
  Synthetic oligonucleotide
cctttatggctgcaagatggctacccacctcggatcactgaactggagctcgacc

SEQ ID NO: 367080 - DNA, 58 bp, Artificial
  Synthetic oligonucleotide
cctttatgtttgtcacatagatgctcaaacctcttccaagtgagttcctcaaaaactc

SEQ ID NO: 367081 - DNA, 57 bp, Artificial
  Synthetic oligonucleotide
cctttattacgtggcgcgctgtggagtctcgctcgtagttattttaatgaacgacta

SEQ ID NO: 367082 - DNA, 53 bp, Artificial
  Synthetic oligonucleotide
cctttattaggggcacctgaaccgttcgttcctcgctacctcagttcccttgc

SEQ ID NO: 367083 - DNA, 55 bp, Artificial
  Synthetic oligonucleotide
cctttattcaaatgtggccctgtatctaccagattcctacaaatacaccccggcc

SEQ ID NO: 367084 - DNA, 58 bp, Artificial
  Synthetic oligonucleotide
cctttattgattgggtctttgttggtgccaagatcgacctcagtgttgtcccaagctc

SEQ ID NO: 367085 - DNA, 59 bp, Artificial
  Synthetic oligonucleotide
cctttcaaaacatctcgagaatagcaattggagactgccccaagtatgtcaaacagggc

SEQ ID NO: 367086 - DNA, 56 bp, Artificial
  Synthetic oligonucleotide
cctttcaagatctaagtgataacccctgcaaggttgacatgcatactcaagctgta

SEQ ID NO: 367087 - DNA, 59 bp, Artificial
  Synthetic oligonucleotide
cctttcaatatgctgaaacgcgagagaaaccgcgtgtcaacaatacaacagttgacgaa

SEQ ID NO: 367088 - DNA, 55 bp, Artificial
  Synthetic oligonucleotide
cctttcaatcatcattgtatctatgctgtccagtagttcctctctggtaatatcc

SEQ ID NO: 367089 - DNA, 55 bp, Artificial
  Synthetic oligonucleotide
cctttcaatgctgcccttgttcaggtttacagaaaggattacacaatgggcatgc

SEQ ID NO: 367090 - DNA, 60 bp, Artificial
  Synthetic oligonucleotide
cctttcacaaatggtacaatgggcttatgatcataattatacagatgaacctactattgc

SEQ ID NO: 367091 - DNA, 52 bp, Artificial
  Synthetic oligonucleotide
cctttcaccctaagacaggtccccgcgttgacgcccagtaccccgtgtggtc

SEQ ID NO: 367092 - DNA, 60 bp, Artificial
  Synthetic oligonucleotide
cctttcacgccgcacacgaagcagttgaaagcgttgagctcaaacgagattgacgctgac

SEQ ID NO: 367093 - DNA, 55 bp, Artificial
  Synthetic oligonucleotide
cctttcagattcatggaggatctccctagtatgaatgcgcgccagaaaggtccgc

SEQ ID NO: 367094 - DNA, 56 bp, Artificial
  Synthetic oligonucleotide
cctttcagcagggaggtcttatttgtgcaatggttccaggagaccaaggttatggt

SEQ ID NO: 367095 - DNA, 57 bp, Artificial
  Synthetic oligonucleotide
cctttcagctcattttactggctttacaaggctggcgtatctccagaaaccttccca

SEQ ID NO: 367096 - DNA, 55 bp, Artificial
  Synthetic oligonucleotide
cctttcaggtacactgtgtaactacaacggtgagtatgtaccgggcgcggtcgga

SEQ ID NO: 367097 - DNA, 55 bp, Artificial
  Synthetic oligonucleotide
cctttcagtatcgaagtgtcgctaatatgggttgctactgattcgactaggcgcc

SEQ ID NO: 367098 - DNA, 58 bp, Artificial
  Synthetic oligonucleotide
cctttcatagatcagccattccacgttggggctcagcctgcttccctttgcgccgcag

SEQ ID NO: 367099 - DNA, 55 bp, Artificial
  Synthetic oligonucleotide
cctttcatgtggggaggcgcacaatgcttctgtgacagtgagaacacacaactga

SEQ ID NO: 367100 - DNA, 59 bp, Artificial
  Synthetic oligonucleotide
cctttcatttgtcacctttgcaattcagcttttaggcgatgctttatcttctgcaatgg

SEQ ID NO: 367101 - DNA, 58 bp, Artificial
  Synthetic oligonucleotide
cctttccagaacactagtaagcactatattgggaaatgccccaaatacataccatcag

SEQ ID NO: 367102 - DNA, 60 bp, Artificial
  Synthetic oligonucleotide
cctttccatggctgctaggatgtgctgccaactggatcctgcgcgggacgtcctttgttt

SEQ ID NO: 367103 - DNA, 55 bp, Artificial
  Synthetic oligonucleotide
cctttccctttgaggagatgtgtgatgcggtcatgtacctgtccaaacagtacaa

SEQ ID NO: 367104 - DNA, 54 bp, Artificial
  Synthetic oligonucleotide
cctttccgcacccgctgatgtggcaggagcagaccgaccatggacacggcggca

SEQ ID NO: 367105 - DNA, 53 bp, Artificial
  Synthetic oligonucleotide
cctttccgcctaaacagcgaatgttcggctactccggagcaaacggcaaccgg

SEQ ID NO: 367106 - DNA, 59 bp, Artificial
  Synthetic oligonucleotide
cctttcctctcgtgccaacgcgggtacaagggagtctggcggggagacggcatcatgca

SEQ ID NO: 367107 - DNA, 55 bp, Artificial
  Synthetic oligonucleotide
cctttcctgcatggaccggcatgacttgcactgggagctcaaactggagagctca

SEQ ID NO: 367108 - DNA, 60 bp, Artificial
  Synthetic oligonucleotide
cctttcgatccacctacgctgcacgatctgtatgatttagaggtagacgggcctcaggat

SEQ ID NO: 367109 - DNA, 53 bp, Artificial
  Synthetic oligonucleotide
cctttcgtcggtgtgttccgtgtaaaggcgacgctaccgcacaccgtggttac

SEQ ID NO: 367110 - DNA, 55 bp, Artificial
  Synthetic oligonucleotide
cctttctagaattggctccttcaactgcactaaatcctgtactaggcatcctaac

SEQ ID NO: 367111 - DNA, 53 bp, Artificial
  Synthetic oligonucleotide
cctttctcgtgaccgctggctatgccaggtcaacggccccggatgcgtaagag

SEQ ID NO: 367112 - DNA, 60 bp, Artificial
  Synthetic oligonucleotide
cctttctctaaagctgaaattgatccaatggctatgatgttgtccaaatattcattacct

SEQ ID NO: 367113 - DNA, 50 bp, Artificial
  Synthetic oligonucleotide
cctttctgaagagatacttcagggcagacgagcaatacccttttctagtt

SEQ ID NO: 367114 - DNA, 56 bp, Artificial
  Synthetic oligonucleotide
cctttctgggtactatgaggctatccacccgtgtaatatcttctgtgtcttatctg

SEQ ID NO: 367115 - DNA, 51 bp, Artificial
  Synthetic oligonucleotide
cctttcttacgggttgaagtatttgcaaattcggttagttgggtccgtaga

SEQ ID NO: 367116 - DNA, 54 bp, Artificial
  Synthetic oligonucleotide
cctttcttccaaccgactttgataccaaagaagctataattacttcatacgacg

SEQ ID NO: 367117 - DNA, 55 bp, Artificial
  Synthetic oligonucleotide
cctttcttctacagccgcgggtacccacagcgactccttcgcagacaggaggagt

SEQ ID NO: 367118 - DNA, 59 bp, Artificial
  Synthetic oligonucleotide
cctttcttgatacacccaacttttccaattaatgagattcatgaatcgattagatggac

SEQ ID NO: 367119 - DNA, 60 bp, Artificial
  Synthetic oligonucleotide
cctttctttactgctatctggtatgttgacaatgaacattgtttcatggttaacctagca

SEQ ID NO: 367120 - DNA, 53 bp, Artificial
  Synthetic oligonucleotide
cctttgaaactcctgatcctacatacacagaagagcaacagcttctagatccc

SEQ ID NO: 367121 - DNA, 60 bp, Artificial
  Synthetic oligonucleotide
cctttgaaataagcccactcagctacatgaacacacaccctatgctaatgctcctaaaca

SEQ ID NO: 367122 - DNA, 57 bp, Artificial
  Synthetic oligonucleotide
cctttgaaatcaacccaaccgtctgtccttgacatcacctcattgaggaaatctgca

SEQ ID NO: 367123 - DNA, 55 bp, Artificial
  Synthetic oligonucleotide
cctttgaacagagacatgacgtaacacatacggggaaggtcctttgcgtttccga

SEQ ID NO: 367124 - DNA, 50 bp, Artificial
  Synthetic oligonucleotide
cctttgaacttgaagatcttccagacgacatgttggaaatggcatcgaga

SEQ ID NO: 367125 - DNA, 55 bp, Artificial
  Synthetic oligonucleotide
cctttgaagaaataagagcatgataagaattcagctataccggagctctgcaact

SEQ ID NO: 367126 - DNA, 53 bp, Artificial
  Synthetic oligonucleotide
cctttgaagatgtatggcgatctccacttccacgaacaattcactaatgacgt

SEQ ID NO: 367127 - DNA, 55 bp, Artificial
  Synthetic oligonucleotide
cctttgaatgtcccaactattccagattactctggacaaactattgaatgtagct

SEQ ID NO: 367128 - DNA, 55 bp, Artificial
  Synthetic oligonucleotide
cctttgaattgaaatcgaggtgaccactcaagtaattatgggaccccaatgtacg

SEQ ID NO: 367129 - DNA, 55 bp, Artificial
  Synthetic oligonucleotide
cctttgaattggtttatcctcgattcattcacagtgagtttatgacccaccgtgt

SEQ ID NO: 367130 - DNA, 57 bp, Artificial
  Synthetic oligonucleotide
cctttgaatttcgcaaaatgagtcctctggtgaacattagagtcgcaaactttgtaa

SEQ ID NO: 367131 - DNA, 55 bp, Artificial
  Synthetic oligonucleotide
cctttgacaatcctgccgctatgtatactgctgctgacaaactacctgtttggac

SEQ ID NO: 367132 - DNA, 60 bp, Artificial
  Synthetic oligonucleotide
cctttgaccacacactcatgagcatagtctcaagtctacacctcagcatcagagggaact

SEQ ID NO: 367133 - DNA, 55 bp, Artificial
  Synthetic oligonucleotide
cctttgacctgcatgcgccttaccggcgagcccggcacttatgacgacaacacgg

SEQ ID NO: 367134 - DNA, 60 bp, Artificial
  Synthetic oligonucleotide
cctttgactacacgggggcatggagaaatgcctggtggctaatgcaaagacaggcatcag

SEQ ID NO: 367135 - DNA, 60 bp, Artificial
  Synthetic oligonucleotide
cctttgagatgggtgagaaaaacatagacctgcaggctgctcttcgcctccattgctgca

SEQ ID NO: 367136 - DNA, 55 bp, Artificial
  Synthetic oligonucleotide
cctttgagcgaaattctttactcagggactcttggtccgagattgaaaagcgtgc

SEQ ID NO: 367137 - DNA, 55 bp, Artificial
  Synthetic oligonucleotide
cctttgagcgactcagccatgaatgcccctcggtgcttcagtctagtaacccagt

SEQ ID NO: 367138 - DNA, 60 bp, Artificial
  Synthetic oligonucleotide
cctttgatgccaaccactgcagtgacgctatgaacatcatgtttgaggaggtgttccgca

SEQ ID NO: 367139 - DNA, 55 bp, Artificial
  Synthetic oligonucleotide
cctttgatgggagcttatcagaagagtgccttgaacaaggatgcttacgtcaagg

SEQ ID NO: 367140 - DNA, 55 bp, Artificial
  Synthetic oligonucleotide
cctttgatggtggcatacatgctggagagggaactggttcgcaagactagattcc

SEQ ID NO: 367141 - DNA, 59 bp, Artificial
  Synthetic oligonucleotide
cctttgatggttgcatacatgttagagagagaacttgtccgcaaaacgagatttctccc

SEQ ID NO: 367142 - DNA, 55 bp, Artificial
  Synthetic oligonucleotide
cctttgattgtagctttctagacgttgaggtctctacaactagtacttcccgtgt

SEQ ID NO: 367143 - DNA, 54 bp, Artificial
  Synthetic oligonucleotide
cctttgcaagtgtggctaagaagaaggcgcagaaaattcagtttgatcaatttt

SEQ ID NO: 367144 - DNA, 59 bp, Artificial
  Synthetic oligonucleotide
cctttgcaagtgttacacaacaggaacgatcattaatcaggaccctgacaagatcctaa

SEQ ID NO: 367145 - DNA, 51 bp, Artificial
  Synthetic oligonucleotide
cctttgcacattgctgacttcagagaagtccagaccatttagaagactagt

SEQ ID NO: 367146 - DNA, 60 bp, Artificial
  Synthetic oligonucleotide
cctttgcaggaagcacactccccagaagatcaggtgcaactggtgttgcgatcaaaggag

SEQ ID NO: 367147 - DNA, 58 bp, Artificial
  Synthetic oligonucleotide
cctttgccgcctactcgaggcgagcttttacgcgttgggcaattgctcagtgtggacc

SEQ ID NO: 367148 - DNA, 51 bp, Artificial
  Synthetic oligonucleotide
cctttgccgctcgatatctactctggttgcgggatcgtgggttgccccgga

SEQ ID NO: 367149 - DNA, 52 bp, Artificial
  Synthetic oligonucleotide
cctttgccgtgcaggggggtacgggcctagaacccataagtagtacacccac

SEQ ID NO: 367150 - DNA, 55 bp, Artificial
  Synthetic oligonucleotide
cctttgcgtatgcgtcattggcggattgttgtccgcctctagcagatcttccatc

SEQ ID NO: 367151 - DNA, 55 bp, Artificial
  Synthetic oligonucleotide
cctttgcgtccgttgcaactgaaacgcaacgtaggaaatgggaagagaccacgcg

SEQ ID NO: 367152 - DNA, 55 bp, Artificial
  Synthetic oligonucleotide
cctttgctagcaactataaaagacatgggacttaatgaacaataccttaagaagg

SEQ ID NO: 367153 - DNA, 56 bp, Artificial
  Synthetic oligonucleotide
cctttgctctaaacaatgaacgaaccagatgtcacaaacaacttaaaccaggcaaa

SEQ ID NO: 367154 - DNA, 60 bp, Artificial
  Synthetic oligonucleotide
cctttgctctcgcacaaggagcattgctaggaactaaacatagcaatgggaccattaaag

SEQ ID NO: 367155 - DNA, 60 bp, Artificial
  Synthetic oligonucleotide
cctttgctgccgctccaccagaacagagtaggatgcagttttcctcactgactgtgaatg

SEQ ID NO: 367156 - DNA, 57 bp, Artificial
  Synthetic oligonucleotide
cctttgctgcgagatgaggtgtcgttcagagtagggctacacgattacccggtgggg

SEQ ID NO: 367157 - DNA, 55 bp, Artificial
  Synthetic oligonucleotide
cctttgctggattaggttgcagagcttcacaggcaccccatttgccacactctgg

SEQ ID NO: 367158 - DNA, 60 bp, Artificial
  Synthetic oligonucleotide
cctttgcttctccaggcactggcactgaacctatcagtagcactcctgtacctggtgtta

SEQ ID NO: 367159 - DNA, 58 bp, Artificial
  Synthetic oligonucleotide
cctttggactaagatctaagtgcccacacagatagttatgtgggcctaaagacctagc

SEQ ID NO: 367160 - DNA, 56 bp, Artificial
  Synthetic oligonucleotide
cctttggactaaggtctaaatgaccacacagataattatgtggtcccaaagaccta

SEQ ID NO: 367161 - DNA, 54 bp, Artificial
  Synthetic oligonucleotide
cctttggactaccgcttcttcaacccggactttacaacaccagccagactctcc

SEQ ID NO: 367162 - DNA, 60 bp, Artificial
  Synthetic oligonucleotide
cctttggactcagatctagatgaccgcacagataattatgtgggcccaatgaacgagccc

SEQ ID NO: 367163 - DNA, 58 bp, Artificial
  Synthetic oligonucleotide
cctttggactcaggtcaaggtgaccacataaatagttatgtggacccagagacctggc

SEQ ID NO: 367164 - DNA, 53 bp, Artificial
  Synthetic oligonucleotide
cctttggagatagctacatcatcgtcgggacaggagattcacgtctcacctat

SEQ ID NO: 367165 - DNA, 55 bp, Artificial
  Synthetic oligonucleotide
cctttggagtgacgctgtcctggtccgcaaactacccagtggacaacctctttac

SEQ ID NO: 367166 - DNA, 54 bp, Artificial
  Synthetic oligonucleotide
cctttggatcctatgtgtgttttgcttcaccagctagggtcccgtttgttgggg

SEQ ID NO: 367167 - DNA, 60 bp, Artificial
  Synthetic oligonucleotide
cctttggatgctgaatatctggttcagagtgcagccagaaattttgggatggaagtgacc

SEQ ID NO: 367168 - DNA, 55 bp, Artificial
  Synthetic oligonucleotide
cctttggatggcaccatgtggacccttggtataatccggactaatttatggagga

SEQ ID NO: 367169 - DNA, 50 bp, Artificial
  Synthetic oligonucleotide
cctttggcaaaatataagttttggaccgtggaccttaaggaacgcttttc

SEQ ID NO: 367170 - DNA, 55 bp, Artificial
  Synthetic oligonucleotide
cctttggcaacacttccgaagccgctgggaaatatggcgcattcagttacgaatg

SEQ ID NO: 367171 - DNA, 60 bp, Artificial
  Synthetic oligonucleotide
cctttggcaatagtcagtcttgtcaaaagtgaccagatttgcattggttatcatgcaaac

SEQ ID NO: 367172 - DNA, 55 bp, Artificial
  Synthetic oligonucleotide
cctttggcagacactagagctgctcttattgatgatgccacttttacgtgctgga

SEQ ID NO: 367173 - DNA, 53 bp, Artificial
  Synthetic oligonucleotide
cctttggccgactgaacctgacggggagtcataccctcgggagcaacttccca

SEQ ID NO: 367174 - DNA, 58 bp, Artificial
  Synthetic oligonucleotide
cctttgggcccccatgaactccttaaagtgcttgaggaagtgcggatctacgccatca

SEQ ID NO: 367175 - DNA, 60 bp, Artificial
  Synthetic oligonucleotide
cctttgggcttagatccagatgtccacacagataattgtgtgggcctagtgacctagccc

SEQ ID NO: 367176 - DNA, 54 bp, Artificial
  Synthetic oligonucleotide
cctttgggtagataagtgagctaatatggcgtctagtggaaataataccacgga

SEQ ID NO: 367177 - DNA, 55 bp, Artificial
  Synthetic oligonucleotide
cctttgggtggtgtttcaagctagtaccagtagagccagagaaggtagaagaggc

SEQ ID NO: 367178 - DNA, 56 bp, Artificial
  Synthetic oligonucleotide
cctttgggtttagctggactcatctgtttgttttgggacagatcaatgggtggtcc

SEQ ID NO: 367179 - DNA, 54 bp, Artificial
  Synthetic oligonucleotide
cctttggtaaacgagttccctgattcagttcacggtttccggtgtatgctcgcc

SEQ ID NO: 367180 - DNA, 53 bp, Artificial
  Synthetic oligonucleotide
cctttggtaagcttcaaagaagaactgccatcaagtgaaaacccctttacaag

SEQ ID NO: 367181 - DNA, 59 bp, Artificial
  Synthetic oligonucleotide
cctttggtgtgcggaaaggccattcaactgatggacaaaaacaccagaatgagatattc

SEQ ID NO: 367182 - DNA, 55 bp, Artificial
  Synthetic oligonucleotide
cctttgtaagaatgcgggcctctaccacgtcggggttattggcaacagctcttgc

SEQ ID NO: 367183 - DNA, 57 bp, Artificial
  Synthetic oligonucleotide
cctttgtaagaggacatttgggatatgtcaagaaatagtttcttgcgtttattgcaa

SEQ ID NO: 367184 - DNA, 52 bp, Artificial
  Synthetic oligonucleotide
cctttgtatcctagaggtgtaaagaattccaacccagggtcgaaggtaatta

SEQ ID NO: 367185 - DNA, 60 bp, Artificial
  Synthetic oligonucleotide
cctttgtatgcatgtatacaagctaagcaggctttcactttctcgccaacttacaaggcc

SEQ ID NO: 367186 - DNA, 56 bp, Artificial
  Synthetic oligonucleotide
cctttgtattccgaccattgaaactgaatctccgggatctaatacacttgttccta

SEQ ID NO: 367187 - DNA, 53 bp, Artificial
  Synthetic oligonucleotide
cctttgtcagggtgaaattccttacacttccttaaataagcttttctcattaa

SEQ ID NO: 367188 - DNA, 60 bp, Artificial
  Synthetic oligonucleotide
cctttgtctcattaggacataactcttcaatgagcctttgaattctataacctctggagc

SEQ ID NO: 367189 - DNA, 60 bp, Artificial
  Synthetic oligonucleotide
cctttgtgatgttgctgtttcgttgaataattgcgcgtactacacgcaattggacgacgc

SEQ ID NO: 367190 - DNA, 60 bp, Artificial
  Synthetic oligonucleotide
cctttgtgttcacacatcatgaggaacgttgagctagatgagtatgtagacacaccaaat

SEQ ID NO: 367191 - DNA, 58 bp, Artificial
  Synthetic oligonucleotide
cctttgttagatactggtgtaacaaagtttcaaagcagcccagtgaatcatgggtgaa

SEQ ID NO: 367192 - DNA, 59 bp, Artificial
  Synthetic oligonucleotide
cctttgttagtgcatgtccagactttaaattgagactaatgaaagatacccagacaata

SEQ ID NO: 367193 - DNA, 55 bp, Artificial
  Synthetic oligonucleotide
cctttgttgtcccaatacttctaaaggccctatatatgcttacaacaagagggag

SEQ ID NO: 367194 - DNA, 55 bp, Artificial
  Synthetic oligonucleotide
cctttgtttgtcagagacgcgctagtaccacgtattaaacgtaggctcacgtcca

SEQ ID NO: 367195 - DNA, 54 bp, Artificial
  Synthetic oligonucleotide
ccttttaaattacgccatagtaattttggttatagatggcagcctatgaccccg

SEQ ID NO: 367196 - DNA, 54 bp, Artificial
  Synthetic oligonucleotide
ccttttaaccacagacagagttttggtcaacacttgggaaaccgatgaggccaa

SEQ ID NO: 367197 - DNA, 58 bp, Artificial
  Synthetic oligonucleotide
ccttttaacgatgcacccaacaaaatgatcctgtggtgggaggaatgcatcatgacta

SEQ ID NO: 367198 - DNA, 50 bp, Artificial
  Synthetic oligonucleotide
ccttttaacgctaactttatagaaacgtttgtatgtttttgtttaagcta

SEQ ID NO: 367199 - DNA, 55 bp, Artificial
  Synthetic oligonucleotide
ccttttaaggtgtatgtagaacactgcctatcacggactgcgaagcagcttcgtg

SEQ ID NO: 367200 - DNA, 60 bp, Artificial
  Synthetic oligonucleotide
ccttttacacaatgtgggtatcctgccttaatgcctttgtatgcatgtatccaagctaag

SEQ ID NO: 367201 - DNA, 54 bp, Artificial
  Synthetic oligonucleotide
ccttttactttgccaaatctgcctgttaataatctttcacattcccgggttgtg

SEQ ID NO: 367202 - DNA, 58 bp, Artificial
  Synthetic oligonucleotide
ccttttagaaacatcaggaggttgtcaacaaataatgaaccaattgcaaccagctctc

SEQ ID NO: 367203 - DNA, 58 bp, Artificial
  Synthetic oligonucleotide
ccttttagactctgcttctgaagacttcagtaatagcagactgctgctaagcacaggg

SEQ ID NO: 367204 - DNA, 54 bp, Artificial
  Synthetic oligonucleotide
ccttttagagattatgtggaccggttctataaagtcctaagagctgaacaagcg

SEQ ID NO: 367205 - DNA, 50 bp, Artificial
  Synthetic oligonucleotide
ccttttagctttaattcgaattccgacaactttgggaccaccaaaaggcg

SEQ ID NO: 367206 - DNA, 59 bp, Artificial
  Synthetic oligonucleotide
ccttttatatagcatgggggctagcacacctagcgatcttgtaggcataccgactagga

SEQ ID NO: 367207 - DNA, 54 bp, Artificial
  Synthetic oligonucleotide
ccttttatgtatttcggtataccatgaatttcccaatcggtgtagtgaaaaaga

SEQ ID NO: 367208 - DNA, 53 bp, Artificial
  Synthetic oligonucleotide
ccttttattccttcctctaggtcgttgaagccgaagggggctatgattccttg

SEQ ID NO: 367209 - DNA, 60 bp, Artificial
  Synthetic oligonucleotide
ccttttcacgtgaacagtattcaaagagagcgagcttgttcagctctctcagagctaggg

SEQ ID NO: 367210 - DNA, 55 bp, Artificial
  Synthetic oligonucleotide
ccttttcaggtgcctttcactcggttggtccaaaacgatgttatcaccaatgtcc

SEQ ID NO: 367211 - DNA, 50 bp, Artificial
  Synthetic oligonucleotide
ccttttcatcatgagggactctaaagcagtgtatgtagttccctgtggaa

SEQ ID NO: 367212 - DNA, 55 bp, Artificial
  Synthetic oligonucleotide
ccttttccattactttcagaatgccagtagtctccattacactctattgctaagt

SEQ ID NO: 367213 - DNA, 55 bp, Artificial
  Synthetic oligonucleotide
ccttttcctggaccagttctggttcgggtatcaagttctctactggtggtgctgc

SEQ ID NO: 367214 - DNA, 55 bp, Artificial
  Synthetic oligonucleotide
ccttttcgggaactggtggctttgaggtcacttcctcagccacaaccacccctgc

SEQ ID NO: 367215 - DNA, 55 bp, Artificial
  Synthetic oligonucleotide
ccttttcgtcgtatatgagggagatcgtgtgcgatgtttagatggagatgtcccc

SEQ ID NO: 367216 - DNA, 59 bp, Artificial
  Synthetic oligonucleotide
ccttttctaagtatagcttctgcatattacatgttttatgatgggtatgatggagattc

SEQ ID NO: 367217 - DNA, 60 bp, Artificial
  Synthetic oligonucleotide
ccttttctagagaggtaacctgtcccgttcttgtcatgagatctgcgtacatgagtagat

SEQ ID NO: 367218 - DNA, 57 bp, Artificial
  Synthetic oligonucleotide
ccttttctcacttgggactcttgttgtggatgtggagagaaaggtgtgttttgaaca

SEQ ID NO: 367219 - DNA, 55 bp, Artificial
  Synthetic oligonucleotide
ccttttctgattattccgaggatgttccccagccagggattatcttcctcgagtt

SEQ ID NO: 367220 - DNA, 60 bp, Artificial
  Synthetic oligonucleotide
ccttttctgcgcatgagccattaagttcacttctatataccatgtcaacagttccaagtc

SEQ ID NO: 367221 - DNA, 57 bp, Artificial
  Synthetic oligonucleotide
ccttttgaaagagcaaccgttatggcagccttcagcgggaacaatgaaggacggaca

SEQ ID NO: 367222 - DNA, 55 bp, Artificial
  Synthetic oligonucleotide
ccttttgaatctcggactgtcgcttctcatatcactggtatcgcccaagtggctg

SEQ ID NO: 367223 - DNA, 56 bp, Artificial
  Synthetic oligonucleotide
ccttttgaccctctaactttagacgggggaagactgcgaatgcagctagctcctaa

SEQ ID NO: 367224 - DNA, 59 bp, Artificial
  Synthetic oligonucleotide
ccttttgacgatggaatttttgtgatgtctccttactatgcactcaatcctaagaaatc

SEQ ID NO: 367225 - DNA, 60 bp, Artificial
  Synthetic oligonucleotide
ccttttgacttctggcgtggagtgatgagcctgacacccctgttggtgtgtgtggcggcc

SEQ ID NO: 367226 - DNA, 55 bp, Artificial
  Synthetic oligonucleotide
ccttttgatggatatgtgtagcactcgatatgggctaactaatggggacctttgg

SEQ ID NO: 367227 - DNA, 55 bp, Artificial
  Synthetic oligonucleotide
ccttttgatgtaccccttcatgtaggcacgaactacattaaaaggcacctccacc

SEQ ID NO: 367228 - DNA, 60 bp, Artificial
  Synthetic oligonucleotide
ccttttgcggagatattcggacatgagaagggagcatgttctactctaagagttagagat

SEQ ID NO: 367229 - DNA, 57 bp, Artificial
  Synthetic oligonucleotide
ccttttgggtatacttccacgagagatcgcggacctacattggccgtgtgtctcgtg

SEQ ID NO: 367230 - DNA, 56 bp, Artificial
  Synthetic oligonucleotide
ccttttggtactcctcaggattttggtcaagtttttaacatgtatgataatgagcc

SEQ ID NO: 367231 - DNA, 50 bp, Artificial
  Synthetic oligonucleotide
ccttttgtaggtttgaatagttttattgaccctaaattgttaaaacgtga

SEQ ID NO: 367232 - DNA, 55 bp, Artificial
  Synthetic oligonucleotide
ccttttgttagcttcttcccagcagtaggagatggatttgatcacttgacaccgg

SEQ ID NO: 367233 - DNA, 56 bp, Artificial
  Synthetic oligonucleotide
cctttttacaacagccttccagtcttataacatatgacaatcctgtatatgagggt

SEQ ID NO: 367234 - DNA, 55 bp, Artificial
  Synthetic oligonucleotide
cctttttatactaggaagcatcttgtttgtagtctcttgcctagtaaagggtcta

SEQ ID NO: 367235 - DNA, 52 bp, Artificial
  Synthetic oligonucleotide
cctttttcaacaggcgtcgtcttcaaaagaccccgactggaaacccagtaca

SEQ ID NO: 367236 - DNA, 58 bp, Artificial
  Synthetic oligonucleotide
cctttttctcgtgtcagcgaggctacagggggacctggagaggcgatgggatttgcaa

SEQ ID NO: 367237 - DNA, 57 bp, Artificial
  Synthetic oligonucleotide
cctttttgaaatactgatgatgttcgtctttactcctggtgttgcgaagttggcagg

SEQ ID NO: 367238 - DNA, 55 bp, Artificial
  Synthetic oligonucleotide
cctttttgttcggacaaccacgttgttgtggcgttgactagacacgttgactctc

SEQ ID NO: 367239 - DNA, 53 bp, Artificial
  Synthetic oligonucleotide
cgaaaaaaacacacttaggtttgtgtgtcgcgagggggaacccggagcacgca

SEQ ID NO: 367240 - DNA, 48 bp, Artificial
  Synthetic oligonucleotide
cgaaaaacaaggccccaaaaaactacaaagggccccagaagaccaagg

SEQ ID NO: 367241 - DNA, 59 bp, Artificial
  Synthetic oligonucleotide
cgaaaaacctaaatatcttccagatctgtatgattataaggagaaccgattcattgaga

SEQ ID NO: 367242 - DNA, 55 bp, Artificial
  Synthetic oligonucleotide
cgaaaaactaggttcctaccagtatcaggcgggacaagtagtgtatacattgagg

SEQ ID NO: 367243 - DNA, 55 bp, Artificial
  Synthetic oligonucleotide
cgaaaaactctcagttcctattaggagaagagatttcgaggaagggacgcttctg

SEQ ID NO: 367244 - DNA, 55 bp, Artificial
  Synthetic oligonucleotide
cgaaaaagaggaagtttgccatttgcgttttggagaccgtcgcgagcagaactcc

SEQ ID NO: 367245 - DNA, 54 bp, Artificial
  Synthetic oligonucleotide
cgaaaacaatttcctaataagacaatagtctttaagcagccaccctcaggaggg

SEQ ID NO: 367246 - DNA, 55 bp, Artificial
  Synthetic oligonucleotide
cgaaaacacgcgcgttcggaatcgtaactcgaacagcagcatcatgcatcaaatc

SEQ ID NO: 367247 - DNA, 55 bp, Artificial
  Synthetic oligonucleotide
cgaaaacactcacgtgagttatgcttgttggcaagaagaggagtctccgacgacg

SEQ ID NO: 367248 - DNA, 50 bp, Artificial
  Synthetic oligonucleotide
cgaaaacagcattgcttgttgatttaacgccgcacaatccccttaaagtc

SEQ ID NO: 367249 - DNA, 55 bp, Artificial
  Synthetic oligonucleotide
cgaaaacgaattatctgtccaacccttgaaaatcggcgctcctggacgatcttcg

SEQ ID NO: 367250 - DNA, 55 bp, Artificial
  Synthetic oligonucleotide
cgaaaacgaattgggttcagtggatgattgatgacgcaatggatgtccaacctct

SEQ ID NO: 367251 - DNA, 58 bp, Artificial
  Synthetic oligonucleotide
cgaaaacgctagaaatcttaaataaatctggaattgcggctattgagattcaatctct

SEQ ID NO: 367252 - DNA, 55 bp, Artificial
  Synthetic oligonucleotide
cgaaaacggtacatataaaaggcagcttattctgtgtggacatatccatggagcc

SEQ ID NO: 367253 - DNA, 58 bp, Artificial
  Synthetic oligonucleotide
cgaaaacggtcacattccaggatttagatgttgtacttcagacgcaagttgacgcttg

SEQ ID NO: 367254 - DNA, 55 bp, Artificial
  Synthetic oligonucleotide
cgaaaacgtactgtctaatgcgtattctaacgccgtaaacacgtactgcgattcg

SEQ ID NO: 367255 - DNA, 55 bp, Artificial
  Synthetic oligonucleotide
cgaaaacgtctacatcttgaatagtgacaataccattttcaggcacctcaacaat

SEQ ID NO: 367256 - DNA, 53 bp, Artificial
  Synthetic oligonucleotide
cgaaaacgttgtactccaatatattggggtacaattggggactcataaattac

SEQ ID NO: 367257 - DNA, 56 bp, Artificial
  Synthetic oligonucleotide
cgaaaactgcctgtaaatagacctattgattggaaagtatgtcaaagaattgtggg

SEQ ID NO: 367258 - DNA, 56 bp, Artificial
  Synthetic oligonucleotide
cgaaaagacgtattcccctgataccctaggatttgatctcattcgtgatcttaccg

SEQ ID NO: 367259 - DNA, 60 bp, Artificial
  Synthetic oligonucleotide
cgaaaagagacatgatgtcacgcacacggggggcgttctatgcatatctgacgtcacacg

SEQ ID NO: 367260 - DNA, 55 bp, Artificial
  Synthetic oligonucleotide
cgaaaagcctagtaccaccaatgattgtctcaagtgttacgttcagcacaacccc

SEQ ID NO: 367261 - DNA, 60 bp, Artificial
  Synthetic oligonucleotide
cgaaaagctgctgttccgacttatacctactggctcagagaattggatccacgcggtggc

SEQ ID NO: 367262 - DNA, 53 bp, Artificial
  Synthetic oligonucleotide
cgaaaaggtagagggaacgaggctagatcagtggacgataaaccaatcttttg

SEQ ID NO: 367263 - DNA, 55 bp, Artificial
  Synthetic oligonucleotide
cgaaaagtcaactcaagcgaggtggattaactaagaatgttctcacaagtggact

SEQ ID NO: 367264 - DNA, 57 bp, Artificial
  Synthetic oligonucleotide
cgaaaatacatcccagagaaggaagatgattacccagattgtaatttggctttagta

SEQ ID NO: 367265 - DNA, 60 bp, Artificial
  Synthetic oligonucleotide
cgaaaatactcaagggcacgctgtgctgcggccaatcgagataatgatagagactgatac

SEQ ID NO: 367266 - DNA, 60 bp, Artificial
  Synthetic oligonucleotide
cgaaaatataactcaatggaacctgagtgacaacggcactaatggtatccagcatgctat

SEQ ID NO: 367267 - DNA, 57 bp, Artificial
  Synthetic oligonucleotide
cgaaaatataatggcggagccatgtcatcgaaggattatttgggtctacggcccaaa

SEQ ID NO: 367268 - DNA, 55 bp, Artificial
  Synthetic oligonucleotide
cgaaaatccagcgcataaaagtcaactagtgtggatggcatgccactctgctgca

SEQ ID NO: 367269 - DNA, 56 bp, Artificial
  Synthetic oligonucleotide
cgaaaatccaggaagttcccctcagcgttgcccatatgggcacgcccggactacaa

SEQ ID NO: 367270 - DNA, 55 bp, Artificial
  Synthetic oligonucleotide
cgaaaatccgcaacaatgcgtgcagtgaagcgcatgataactacacacttggagc

SEQ ID NO: 367271 - DNA, 57 bp, Artificial
  Synthetic oligonucleotide
cgaaaatccttcattaaggaatgttacaattatcgtattgctgaattgtttgcgccg

SEQ ID NO: 367272 - DNA, 53 bp, Artificial
  Synthetic oligonucleotide
cgaaaatgcatagtgtttaccgttccacttaaatcgaaacggaatatttctgg

SEQ ID NO: 367273 - DNA, 55 bp, Artificial
  Synthetic oligonucleotide
cgaaaatgccatggggactgttagcctagccacccatcagagctcagcttggccc

SEQ ID NO: 367274 - DNA, 58 bp, Artificial
  Synthetic oligonucleotide
cgaaaatgcgggaatagggactctaaatacttgtcatggcggacgcagtctagtgtta

SEQ ID NO: 367275 - DNA, 56 bp, Artificial
  Synthetic oligonucleotide
cgaaaatgctctaccgtttgatttacgggtatgagccggagtgtggaaatcttgac

SEQ ID NO: 367276 - DNA, 51 bp, Artificial
  Synthetic oligonucleotide
cgaaaatggagacactagccaggcgactagatatgtgccaggaacagttgt

SEQ ID NO: 367277 - DNA, 55 bp, Artificial
  Synthetic oligonucleotide
cgaaaatggcgagctatacaaactacatgatcactttcttaaacacggtgcaacg

SEQ ID NO: 367278 - DNA, 59 bp, Artificial
  Synthetic oligonucleotide
cgaaaatggtgtcactcttgacatagatgttgtagtggacttcggtttgaaagtagtgc

SEQ ID NO: 367279 - DNA, 53 bp, Artificial
  Synthetic oligonucleotide
cgaaaattacgtctggacaacgtagtgaccccttgggttaagactgagttctg

SEQ ID NO: 367280 - DNA, 55 bp, Artificial
  Synthetic oligonucleotide
cgaaaattcttgcgtgagctatgcctgctggcaggaagaagagtcgcccacgact

SEQ ID NO: 367281 - DNA, 55 bp, Artificial
  Synthetic oligonucleotide
cgaaacaaaagaagagcgtaggttgcgaagaaatatcagagcgcaaatggcaatc

SEQ ID NO: 367282 - DNA, 59 bp, Artificial
  Synthetic oligonucleotide
cgaaacaagattagatcttggaacatacgttcctgaatcatttggtacaggggatgtca

SEQ ID NO: 367283 - DNA, 55 bp, Artificial
  Synthetic oligonucleotide
cgaaacaagtgccttctactcgaggggtgttatacgcactaaaaagagagggcaa

SEQ ID NO: 367284 - DNA, 60 bp, Artificial
  Synthetic oligonucleotide
cgaaacaatcacgttcatgtgcaaggagaaagctggtacacttatggccatggacggaac

SEQ ID NO: 367285 - DNA, 55 bp, Artificial
  Synthetic oligonucleotide
cgaaacaatgtacattgaaagtaatgtaggctctttcggggttagcgacctatac

SEQ ID NO: 367286 - DNA, 55 bp, Artificial
  Synthetic oligonucleotide
cgaaacaattgactgacgctattgcaacaatacagcaaccagctactaaaccaga

SEQ ID NO: 367287 - DNA, 56 bp, Artificial
  Synthetic oligonucleotide
cgaaacaattgcctatttatagagctaatggagaaagagagcttcgtaatagatgg

SEQ ID NO: 367288 - DNA, 55 bp, Artificial
  Synthetic oligonucleotide
cgaaacacacgtcgagtgcacaaaaggttccggtgcgaccaactccggcattgcc

SEQ ID NO: 367289 - DNA, 53 bp, Artificial
  Synthetic oligonucleotide
cgaaacacatccagacaaggtctaccagttatgctcaccccaggttcaggaca

SEQ ID NO: 367290 - DNA, 54 bp, Artificial
  Synthetic oligonucleotide
cgaaacaccaatctgggtccccgaccgattcatccgaccttttactgagcggaa

SEQ ID NO: 367291 - DNA, 57 bp, Artificial
  Synthetic oligonucleotide
cgaaacaccgatttgacataattgaaggaagagaccgaacaatggcctggacagtgg

SEQ ID NO: 367292 - DNA, 50 bp, Artificial
  Synthetic oligonucleotide
cgaaacacgatctcccaaatgtcacagccgagatcaacagagactttggg

SEQ ID NO: 367293 - DNA, 60 bp, Artificial
  Synthetic oligonucleotide
cgaaacagaatagaaaatttgatagcgcaatgtaggctgtaactgtctgctggaggatgt

SEQ ID NO: 367294 - DNA, 57 bp, Artificial
  Synthetic oligonucleotide
cgaaacagtggaagaacccaaactaatacaatcaagcctagctacgatgaagtatta

SEQ ID NO: 367295 - DNA, 51 bp, Artificial
  Synthetic oligonucleotide
cgaaacagtggtggacagaaatcctttacttggacttaaggggaaaggtgg

SEQ ID NO: 367296 - DNA, 55 bp, Artificial
  Synthetic oligonucleotide
cgaaacagttgtacaaagattatccagtaattatagatgtcggacaacggaaggg

SEQ ID NO: 367297 - DNA, 50 bp, Artificial
  Synthetic oligonucleotide
cgaaacatagtttcgttgacaggtccccttttccctctagaggaggctcc

SEQ ID NO: 367298 - DNA, 60 bp, Artificial
  Synthetic oligonucleotide
cgaaacatgatatttcgcatgtcggcaaggtcatatgtgtcactgatgtgacacgcggca

SEQ ID NO: 367299 - DNA, 60 bp, Artificial
  Synthetic oligonucleotide
cgaaaccaacagtggatactacgtccaccacagacggacatcactccaatgcaaccaaga

SEQ ID NO: 367300 - DNA, 55 bp, Artificial
  Synthetic oligonucleotide
cgaaaccaagtcgtcgattcgctacaaactaacatagttaagctgaccgacaaat

SEQ ID NO: 367301 - DNA, 55 bp, Artificial
  Synthetic oligonucleotide
cgaaaccagctgtgctggacaccatcgaccggtctggcgctaccttcgtcgaggt

SEQ ID NO: 367302 - DNA, 55 bp, Artificial
  Synthetic oligonucleotide
cgaaaccatattagagacaggatacgtgtgtagcaaatttcactcagacactccc

SEQ ID NO: 367303 - DNA, 55 bp, Artificial
  Synthetic oligonucleotide
cgaaaccatggctaggaaatcattcaccgtatttgccattggtgcttgagtagcg

SEQ ID NO: 367304 - DNA, 52 bp, Artificial
  Synthetic oligonucleotide
cgaaacccaaaggttggtgtgggcctgtacaggcttggaaattggtagggga

SEQ ID NO: 367305 - DNA, 55 bp, Artificial
  Synthetic oligonucleotide
cgaaaccccgctcctgctccctgcatctgcgggaggtgtccctaccaacctgaaa

SEQ ID NO: 367306 - DNA, 53 bp, Artificial
  Synthetic oligonucleotide
cgaaaccctaaaagtttacaagcgtttaacaatttatgcgtaagagtgcgcaa

SEQ ID NO: 367307 - DNA, 55 bp, Artificial
  Synthetic oligonucleotide
cgaaaccgacccaggctggggtatccatggcccctattgctcaggggactatggt

SEQ ID NO: 367308 - DNA, 52 bp, Artificial
  Synthetic oligonucleotide
cgaaaccgcctgacgctggatttaaacgaaaccacgcgccgtttgcgcgctg

SEQ ID NO: 367309 - DNA, 58 bp, Artificial
  Synthetic oligonucleotide
cgaaaccgcgtacttgctgcgagcgtacctggatgatcgggacgagatgttcccccga

SEQ ID NO: 367310 - DNA, 60 bp, Artificial
  Synthetic oligonucleotide
cgaaaccgtcagccgttgctcgcctgttgaagtcgcaattgaataatatagaatcttcgc

SEQ ID NO: 367311 - DNA, 53 bp, Artificial
  Synthetic oligonucleotide
cgaaaccgttttgggagtggcattcttgtaataagaagggtgtacaccgattg

SEQ ID NO: 367312 - DNA, 56 bp, Artificial
  Synthetic oligonucleotide
cgaaacctgagagctttcacggaggctatgaccaggtattcagccccccccggtga

SEQ ID NO: 367313 - DNA, 54 bp, Artificial
  Synthetic oligonucleotide
cgaaacgaatgattctacaacagttgaaccagtactggatggaccataccaacc

SEQ ID NO: 367314 - DNA, 51 bp, Artificial
  Synthetic oligonucleotide
cgaaacgacaactttatacaacgacgctaagcaaacgacgatcgacgacca

SEQ ID NO: 367315 - DNA, 60 bp, Artificial
  Synthetic oligonucleotide
cgaaacgagatgtgccaaatatgaagtacaatttggaacagctacgtcatgcagtcgggc

SEQ ID NO: 367316 - DNA, 51 bp, Artificial
  Synthetic oligonucleotide
cgaaacgaggcacagcacaaattatggaggtgacagctaggtggttatggg

SEQ ID NO: 367317 - DNA, 60 bp, Artificial
  Synthetic oligonucleotide
cgaaacgagtcgcgacgcagatattcgctttgtcgcagcaaatgtagactgcgtggacac

SEQ ID NO: 367318 - DNA, 53 bp, Artificial
  Synthetic oligonucleotide
cgaaacgcgggtttgttggtcgtgttactttcgaacgtggagcaaccacttca

SEQ ID NO: 367319 - DNA, 55 bp, Artificial
  Synthetic oligonucleotide
cgaaacggcatcataaagctatgtttgcaatatccgacacagagaaactaagtga

SEQ ID NO: 367320 - DNA, 53 bp, Artificial
  Synthetic oligonucleotide
cgaaacggttaccaattgccttgaacaggtaatggaccagccaaaaccctgga

SEQ ID NO: 367321 - DNA, 57 bp, Artificial
  Synthetic oligonucleotide
cgaaacgtgcctcaatgttaccaatctagcatcgggactaaccggagtgagactaat

SEQ ID NO: 367322 - DNA, 52 bp, Artificial
  Synthetic oligonucleotide
cgaaacgtgctataatcaagctttgggcaaagtgaatgttttatcccctaac

SEQ ID NO: 367323 - DNA, 57 bp, Artificial
  Synthetic oligonucleotide
cgaaacgttatctataattcttcctaacaacaatgtctggcaatgctattgaagtta

SEQ ID NO: 367324 - DNA, 55 bp, Artificial
  Synthetic oligonucleotide
cgaaacgtttagcattccaccgattccagaagcattccctgacatttcaacactg

SEQ ID NO: 367325 - DNA, 60 bp, Artificial
  Synthetic oligonucleotide
cgaaactaacaaattcgctgcaatatgcactcacttggaagtatgcttcatgtattcaga

SEQ ID NO: 367326 - DNA, 55 bp, Artificial
  Synthetic oligonucleotide
cgaaactagacaaatcaacgcaaatttcacagcagacaatgccagatattatagc

SEQ ID NO: 367327 - DNA, 54 bp, Artificial
  Synthetic oligonucleotide
cgaaactataagaattaccctaaaagatggtcattactcattgacagaaaaacg

SEQ ID NO: 367328 - DNA, 60 bp, Artificial
  Synthetic oligonucleotide
cgaaactatactggaaactggatatatatgcagcaaattccattcggacacacccaggcc

SEQ ID NO: 367329 - DNA, 56 bp, Artificial
  Synthetic oligonucleotide
cgaaactatatccatatacgttattaggggtagacgcgcatgctttaattattaaa

SEQ ID NO: 367330 - DNA, 60 bp, Artificial
  Synthetic oligonucleotide
cgaaactcaaaggcgactgttccatacagtctgaatatccggcgctgcaaacgattgtgt

SEQ ID NO: 367331 - DNA, 60 bp, Artificial
  Synthetic oligonucleotide
cgaaactcagcggatcgggatatttttacaatcgccatagattacagtgaatatgataca

SEQ ID NO: 367332 - DNA, 55 bp, Artificial
  Synthetic oligonucleotide
cgaaactcagtcgctgcgcatcctagatgcccctgcaaaggagttgtcactcagc

SEQ ID NO: 367333 - DNA, 60 bp, Artificial
  Synthetic oligonucleotide
cgaaactccacgcacgaaatgtactggatatccaatggtacaggcaacatcgtctcttca

SEQ ID NO: 367334 - DNA, 60 bp, Artificial
  Synthetic oligonucleotide
cgaaactctcctataacagaatccttgtacatgatttgcaacagattttgtatatcttcc

SEQ ID NO: 367335 - DNA, 55 bp, Artificial
  Synthetic oligonucleotide
cgaaactctgttgacgttaaattacatccgatgcagcgtatagatatggtcatca

SEQ ID NO: 367336 - DNA, 57 bp, Artificial
  Synthetic oligonucleotide
cgaaactgtgattgtggcttgccctagagttatattggtccaaaacaaccctgtcgc

SEQ ID NO: 367337 - DNA, 55 bp, Artificial
  Synthetic oligonucleotide
cgaaacttacgggataggagtttggcacgatatgctttcgacttctacgaagtca

SEQ ID NO: 367338 - DNA, 57 bp, Artificial
  Synthetic oligonucleotide
cgaaacttctcgtgaagctgctaaaggtaacgacatgatttacactcgtcgtgccct

SEQ ID NO: 367339 - DNA, 55 bp, Artificial
  Synthetic oligonucleotide
cgaaacttgagcctagcgttttccatcacgtatttgagggaaacaaggaaccagc

SEQ ID NO: 367340 - DNA, 58 bp, Artificial
  Synthetic oligonucleotide
cgaaacttggagagacttcggccttgaagagcggtaatgtgccctctgcgcctgggac

SEQ ID NO: 367341 - DNA, 55 bp, Artificial
  Synthetic oligonucleotide
cgaaactttagaccagatgagttaattccctctctgttccatgcgcctctccata

SEQ ID NO: 367342 - DNA, 53 bp, Artificial
  Synthetic oligonucleotide
cgaaagaaatggggtaccctattataaatgccccatccaagactaaacttgaa

SEQ ID NO: 367343 - DNA, 55 bp, Artificial
  Synthetic oligonucleotide
cgaaagaacatctactttctacctgactggctcagtgagcatgtgattcagcgac

SEQ ID NO: 367344 - DNA, 54 bp, Artificial
  Synthetic oligonucleotide
cgaaagaagcccttcgtggctgttggaaaaaacactctggtgagccgggcaccc

SEQ ID NO: 367345 - DNA, 57 bp, Artificial
  Synthetic oligonucleotide
cgaaagaaggctcgcaatgggactgccgtgggtacgtctcgacacacaatttccgtc

SEQ ID NO: 367346 - DNA, 53 bp, Artificial
  Synthetic oligonucleotide
cgaaagaagggtcggtccctctgaacaggggtccgaacaaatccgcacctctg

SEQ ID NO: 367347 - DNA, 56 bp, Artificial
  Synthetic oligonucleotide
cgaaagacggccaatgcgggagtccaatggtgagcacgaaagacgggaaaatactc

SEQ ID NO: 367348 - DNA, 55 bp, Artificial
  Synthetic oligonucleotide
cgaaagagacgcaccaagggtcgcagctttaaaaaaaactagtactgactcagtg

SEQ ID NO: 367349 - DNA, 53 bp, Artificial
  Synthetic oligonucleotide
cgaaagagacgttataggggtcgccgctttaaaaagaaactagtactgactca

SEQ ID NO: 367350 - DNA, 55 bp, Artificial
  Synthetic oligonucleotide
cgaaagaggaattagtcaatgggtggaagcagcggagataatggcgcaagcgaac

SEQ ID NO: 367351 - DNA, 59 bp, Artificial
  Synthetic oligonucleotide
cgaaagaggatcataaacgtgacatctgtttgcggtcaccgctacaccctttgcgctcc

SEQ ID NO: 367352 - DNA, 55 bp, Artificial
  Synthetic oligonucleotide
cgaaagagttgacgtggtgggaatgtgaccttttcccgcgcgatcccaccgacta

SEQ ID NO: 367353 - DNA, 57 bp, Artificial
  Synthetic oligonucleotide
cgaaagattggtgatcgatctctcatcaaagacacggcggtgcttaaacatgcatat

SEQ ID NO: 367354 - DNA, 51 bp, Artificial
  Synthetic oligonucleotide
cgaaagcaaaccttttagtggtagtgtgtacgagcatcacattcgtaagcg

SEQ ID NO: 367355 - DNA, 50 bp, Artificial
  Synthetic oligonucleotide
cgaaagcaagagtatgaagcttcgtacacaaataccggcagaaatgctaa

SEQ ID NO: 367356 - DNA, 58 bp, Artificial
  Synthetic oligonucleotide
cgaaagcaatatatattccacataggctatgtggaacttaagaattacacccctctcc

SEQ ID NO: 367357 - DNA, 53 bp, Artificial
  Synthetic oligonucleotide
cgaaagcagggttgcccgtgttgtggacacgttaggtggtttggaatcagggg

SEQ ID NO: 367358 - DNA, 54 bp, Artificial
  Synthetic oligonucleotide
cgaaagcattgaatagacgcttccaactcgatttgaacatcgaagtacaacagg

SEQ ID NO: 367359 - DNA, 55 bp, Artificial
  Synthetic oligonucleotide
cgaaagcatttcttgcaagtaccaatcaggcacggctggtcaaggactgctgtac

SEQ ID NO: 367360 - DNA, 58 bp, Artificial
  Synthetic oligonucleotide
cgaaagccataaggtactttgcgccaggtgtttcataagaaataatgcagagtcactt

SEQ ID NO: 367361 - DNA, 55 bp, Artificial
  Synthetic oligonucleotide
cgaaagcccaggatgtacaggatgtataggagcccagatgttccaaggggctgtg

SEQ ID NO: 367362 - DNA, 57 bp, Artificial
  Synthetic oligonucleotide
cgaaagcgaaagtaaaaccagagaagttctctcgacgcaggactcggcttgctgagg

SEQ ID NO: 367363 - DNA, 51 bp, Artificial
  Synthetic oligonucleotide
cgaaagcgggaaaagcaccgtacatagcagagtgcgctcttaaacgactat

SEQ ID NO: 367364 - DNA, 58 bp, Artificial
  Synthetic oligonucleotide
cgaaagctggtgtttctgcgactacaagccacgttgcgactgggactgcgcccccgga

SEQ ID NO: 367365 - DNA, 56 bp, Artificial
  Synthetic oligonucleotide
cgaaaggaaacaagatttttccggtgttatggtgattgacataacccgatgtgctg

SEQ ID NO: 367366 - DNA, 54 bp, Artificial
  Synthetic oligonucleotide
cgaaaggagaaaaagctaatgtgttgatagggcaaggggacgtagtgttggtaa

SEQ ID NO: 367367 - DNA, 52 bp, Artificial
  Synthetic oligonucleotide
cgaaaggatgtctgaaagtggggaacaaatgccttgatccccataaaggagt

SEQ ID NO: 367368 - DNA, 55 bp, Artificial
  Synthetic oligonucleotide
cgaaaggccaggatccaatcttaaggggataagcgatgagcgacgaaagtcgtga

SEQ ID NO: 367369 - DNA, 50 bp, Artificial
  Synthetic oligonucleotide
cgaaaggcgaaatcttaaatgatttcagcgcgctttggtttccgaagcgc

SEQ ID NO: 367370 - DNA, 54 bp, Artificial
  Synthetic oligonucleotide
cgaaaggcgtcggcgataatgttgttgtctactgctaaggccatgcttcctctt

SEQ ID NO: 367371 - DNA, 55 bp, Artificial
  Synthetic oligonucleotide
cgaaaggctgctctagcagaattttcaccgcaaccattcgttttcttagacccca

SEQ ID NO: 367372 - DNA, 56 bp, Artificial
  Synthetic oligonucleotide
cgaaaggtacaaaatttgatcctaaagaaggatgtagtgattggtttgtgctagaa

SEQ ID NO: 367373 - DNA, 49 bp, Artificial
  Synthetic oligonucleotide
cgaaaggtccgaatccgatggaccgaaaagggtttaagaaagaccaacc

SEQ ID NO: 367374 - DNA, 51 bp, Artificial
  Synthetic oligonucleotide
cgaaagtaaacatgtttcggatttcttcgttgtagaaaacaaaactgtccc

SEQ ID NO: 367375 - DNA, 60 bp, Artificial
  Synthetic oligonucleotide
cgaaagtaagagcatgaagttacggacacaaataccagcagaaatgctcgcagacattga

SEQ ID NO: 367376 - DNA, 60 bp, Artificial
  Synthetic oligonucleotide
cgaaagtagacagtgatataagtccaaggttagcagctattacattagaaggagagacgc

SEQ ID NO: 367377 - DNA, 51 bp, Artificial
  Synthetic oligonucleotide
cgaaagtagtcctgtttaacccgcatacccccgcattcgttcccgcccgta

SEQ ID NO: 367378 - DNA, 55 bp, Artificial
  Synthetic oligonucleotide
cgaaagtatattagtccatatgtaagtcctatacagtgtttacaggagtctgtgg

SEQ ID NO: 367379 - DNA, 59 bp, Artificial
  Synthetic oligonucleotide
cgaaagtatgctactgaacgtatgtcgacgcagtctaaacctgtggcgttgcaggttcc

SEQ ID NO: 367380 - DNA, 55 bp, Artificial
  Synthetic oligonucleotide
cgaaagtatgggagtcccaaacagaaagtagaggtcgatctaagccctaggctta

SEQ ID NO: 367381 - DNA, 58 bp, Artificial
  Synthetic oligonucleotide
cgaaagtattgatataatttggagttgcaatacttgtatacagttacgtaatcgaaca

SEQ ID NO: 367382 - DNA, 55 bp, Artificial
  Synthetic oligonucleotide
cgaaagtcggcccgcactaccatggcccaaagaatgttagacgagaagaccaggg

SEQ ID NO: 367383 - DNA, 58 bp, Artificial
  Synthetic oligonucleotide
cgaaagtgagtggggccagacttcgccataaggcctttatcttcttgccattggccag

SEQ ID NO: 367384 - DNA, 57 bp, Artificial
  Synthetic oligonucleotide
cgaaagtgtcctttgtggactacgttcaaggatcctgatcagggtaactgcggtgga

SEQ ID NO: 367385 - DNA, 54 bp, Artificial
  Synthetic oligonucleotide
cgaaagtgtttgcgcctagacggatctactagtcgccatagagacagagagggg

SEQ ID NO: 367386 - DNA, 55 bp, Artificial
  Synthetic oligonucleotide
cgaaagttaaacttctcggattgactgttgaccaatctacagttggtgcaagcgg

SEQ ID NO: 367387 - DNA, 55 bp, Artificial
  Synthetic oligonucleotide
cgaaagttagctatacgctaagcactgatccaactgcactccccagaacagtagc

SEQ ID NO: 367388 - DNA, 55 bp, Artificial
  Synthetic oligonucleotide
cgaaagttatcaccaacgcgacaccggtgaccaagctgcgtcaaggcgagatcgt

SEQ ID NO: 367389 - DNA, 55 bp, Artificial
  Synthetic oligonucleotide
cgaaagttcagcggacaactcgcttaactgctcaagtcactcgcaatgttgtggg

SEQ ID NO: 367390 - DNA, 59 bp, Artificial
  Synthetic oligonucleotide
cgaaagtttgcacccagtccttatttcagccccgtgtgtgaacaagccagcatagaaca

SEQ ID NO: 367391 - DNA, 55 bp, Artificial
  Synthetic oligonucleotide
cgaaagtttgctcccagtccgtatttcagtcctgtgtgtatgcaacccagcatag

SEQ ID NO: 367392 - DNA, 55 bp, Artificial
  Synthetic oligonucleotide
cgaaataagctgtcgtcaagccgacgtacatccgagtcgctcgagagctccacgg

SEQ ID NO: 367393 - DNA, 55 bp, Artificial
  Synthetic oligonucleotide
cgaaataatcaatcagtttgcgatatacataaagcacgtgcaagctcctgtgctg

SEQ ID NO: 367394 - DNA, 60 bp, Artificial
  Synthetic oligonucleotide
cgaaataattcgcatcctgcgggttcgtcattatgacagggcgaatgcgcgttacgcgga

SEQ ID NO: 367395 - DNA, 54 bp, Artificial
  Synthetic oligonucleotide
cgaaatacgaagttgaaagaagggcggagccgcgtatgagtttcaaaatggagg

SEQ ID NO: 367396 - DNA, 53 bp, Artificial
  Synthetic oligonucleotide
cgaaatacgacgttagagagttacgacaaaaaatcagagaggaacgcgaaaaa

SEQ ID NO: 367397 - DNA, 60 bp, Artificial
  Synthetic oligonucleotide
cgaaatacgagctaatggactcaccggtaacgctctagatatcagacgtgcaggtttgtg

SEQ ID NO: 367398 - DNA, 58 bp, Artificial
  Synthetic oligonucleotide
cgaaatagaacccatgggtttaaaccggcaagggatttgctcactatgtgtgcagaga

SEQ ID NO: 367399 - DNA, 60 bp, Artificial
  Synthetic oligonucleotide
cgaaatagctggtaggttttcattaatatctctagtaccaactaatgatgactatcagac

SEQ ID NO: 367400 - DNA, 52 bp, Artificial
  Synthetic oligonucleotide
cgaaatataatcaaagccccgcacgtagcatcttcttcgacgaccgtcaatc

SEQ ID NO: 367401 - DNA, 52 bp, Artificial
  Synthetic oligonucleotide
cgaaatatatacaaaccccattcgcgccgaaaactgtgctgtagggtcaatt

SEQ ID NO: 367402 - DNA, 53 bp, Artificial
  Synthetic oligonucleotide
cgaaatcaaaccggacactaaggtgttccgtgttcttattggtttcgtcgcca

SEQ ID NO: 367403 - DNA, 59 bp, Artificial
  Synthetic oligonucleotide
cgaaatcaggttaagatacgccgcagggttgacataaacccgggccatgcagatctcag

SEQ ID NO: 367404 - DNA, 59 bp, Artificial
  Synthetic oligonucleotide
cgaaatccaaggagctacatataaagatgtcaaattagtgagatctaaagtatatgccg

SEQ ID NO: 367405 - DNA, 55 bp, Artificial
  Synthetic oligonucleotide
cgaaatccgaattctcaaccacgaacaagcagacaacactcttttgaccacactg

SEQ ID NO: 367406 - DNA, 60 bp, Artificial
  Synthetic oligonucleotide
cgaaatccgcgctgagcagacacagcgcacccgcaccacagtgaggcgataaatgacgac

SEQ ID NO: 367407 - DNA, 53 bp, Artificial
  Synthetic oligonucleotide
cgaaatcgcacgatatctcaagaaccggactgagaacatccaaaagggctcgc

SEQ ID NO: 367408 - DNA, 55 bp, Artificial
  Synthetic oligonucleotide
cgaaatctaaccataatggatcttcatcctgggtcaggaaagacgcggaaatatc

SEQ ID NO: 367409 - DNA, 58 bp, Artificial
  Synthetic oligonucleotide
cgaaatctgctcctttctacattctcgaaaatgcaaaccatgaggtgttacgtactgg

SEQ ID NO: 367410 - DNA, 55 bp, Artificial
  Synthetic oligonucleotide
cgaaatgagcaacatggtcctttcagcagtcattcagcagtgtaaaactttaggc

SEQ ID NO: 367411 - DNA, 59 bp, Artificial
  Synthetic oligonucleotide
cgaaatgagccctctcctgcactccacgaccgaactcgcaatccttccctgtaccttca

SEQ ID NO: 367412 - DNA, 57 bp, Artificial
  Synthetic oligonucleotide
cgaaatgatccaaactatattttgaatatggatgttaatttgccacctactgccagg

SEQ ID NO: 367413 - DNA, 55 bp, Artificial
  Synthetic oligonucleotide
cgaaatggcacttgtcaaaccagcggtcgatactctagaattacaagtagacacc

SEQ ID NO: 367414 - DNA, 60 bp, Artificial
  Synthetic oligonucleotide
cgaaatgtatcttatttattgtacagacacaaaacgctactatgtatctaatggagtctc

SEQ ID NO: 367415 - DNA, 60 bp, Artificial
  Synthetic oligonucleotide
cgaaatgttcagaggcagtgctagcgccgaatttcaacataagcgcacgttaacatcaga

SEQ ID NO: 367416 - DNA, 57 bp, Artificial
  Synthetic oligonucleotide
cgaaattaacgtagacggaccttcacatataacataccccgtaatcaatcctgtgca

SEQ ID NO: 367417 - DNA, 52 bp, Artificial
  Synthetic oligonucleotide
cgaaattagcatgagcgccgagttcttagaaggaatcccaaccttagtcccc

SEQ ID NO: 367418 - DNA, 58 bp, Artificial
  Synthetic oligonucleotide
cgaaattagtccgtgatgaacaaattgggaggattggagatcattattatacaacaaa

SEQ ID NO: 367419 - DNA, 59 bp, Artificial
  Synthetic oligonucleotide
cgaaattatatataacgaccgatgaagatcacatccagaagccttttagtctacgtcga

SEQ ID NO: 367420 - DNA, 56 bp, Artificial
  Synthetic oligonucleotide
cgaaattattccggacgtaagtctgacgaaaccttatgaagccgtcatatcaggta

SEQ ID NO: 367421 - DNA, 54 bp, Artificial
  Synthetic oligonucleotide
cgaaattcagtcattcaagaaaggattttcaaacttactacctaaattgttgcg

SEQ ID NO: 367422 - DNA, 60 bp, Artificial
  Synthetic oligonucleotide
cgaaattccatatacgctactgaatagatacttgcttgcgatacgaactgatgtcaagat

SEQ ID NO: 367423 - DNA, 58 bp, Artificial
  Synthetic oligonucleotide
cgaaattgaattcatatgcaccggtttatttagaaaaacgtcgtgcgcaaatatcagc

SEQ ID NO: 367424 - DNA, 60 bp, Artificial
  Synthetic oligonucleotide
cgaaattgctcattcgctgtgccacttccatgtcgcaggacggatccaacgcgttctgtc

SEQ ID NO: 367425 - DNA, 60 bp, Artificial
  Synthetic oligonucleotide
cgaaattgctgcaaacgcaacgatgtctgccgacaagcaaattccgatgatccgaaagcc

SEQ ID NO: 367426 - DNA, 55 bp, Artificial
  Synthetic oligonucleotide
cgaaattgtaagaaattaggtccaagagaaaatgtagctgtaatacaagttggtg

SEQ ID NO: 367427 - DNA, 55 bp, Artificial
  Synthetic oligonucleotide
cgaaattgtatgggaagtagaaagatacgtaacaaagaactggcgtcctgaaaga

SEQ ID NO: 367428 - DNA, 50 bp, Artificial
  Synthetic oligonucleotide
cgaaattgtgggcgaataagaaaagcaacattgtgatttttaattatgct

SEQ ID NO: 367429 - DNA, 55 bp, Artificial
  Synthetic oligonucleotide
cgaaattgttcctagagaaacgcaagttaagtcggataatgagcttgtgacacta

SEQ ID NO: 367430 - DNA, 55 bp, Artificial
  Synthetic oligonucleotide
cgaaatttctccaaacacaaagagaccctacatgtactgtaccggaagatacgtc

SEQ ID NO: 367431 - DNA, 60 bp, Artificial
  Synthetic oligonucleotide
cgaaatttgtacactgaaatcgtgtacacaccaattgcaacaccagatggatctgtaatc

SEQ ID NO: 367432 - DNA, 58 bp, Artificial
  Synthetic oligonucleotide
cgaaattttgatacgatcagactacgattccaattagttagaccaccaaatatgacgc

SEQ ID NO: 367433 - DNA, 58 bp, Artificial
  Synthetic oligonucleotide
cgaacaaaatccaaatcgccatgacggggcagtggtagactctattccagcattgccg

SEQ ID NO: 367434 - DNA, 55 bp, Artificial
  Synthetic oligonucleotide
cgaacaaacattcccaggatctgctcaaaagggaaaaggacaatcgaccttggcc

SEQ ID NO: 367435 - DNA, 60 bp, Artificial
  Synthetic oligonucleotide
cgaacaaactagctatgaggctattagcgtttttaacaaatgctgtggttgcctatgcag

SEQ ID NO: 367436 - DNA, 56 bp, Artificial
  Synthetic oligonucleotide
cgaacaaagcggtagtcgttggctctttgatagattacacggcaatttgaaaggtg

SEQ ID NO: 367437 - DNA, 59 bp, Artificial
  Synthetic oligonucleotide
cgaacaaagggcactgtaccaaaatgtgggaacatatgtttccataggcacatcaacat

SEQ ID NO: 367438 - DNA, 52 bp, Artificial
  Synthetic oligonucleotide
cgaacaaataaaaaagacgaatgaggttatgggatggaaacaacttacggaa

SEQ ID NO: 367439 - DNA, 56 bp, Artificial
  Synthetic oligonucleotide
cgaacaaatagaagatatattcggagaactactaaaggaacacggaaactatgata

SEQ ID NO: 367440 - DNA, 55 bp, Artificial
  Synthetic oligonucleotide
cgaacaaatctccaaaagcgcctgcctacactgcgaatccgtctccgttccaacc

SEQ ID NO: 367441 - DNA, 55 bp, Artificial
  Synthetic oligonucleotide
cgaacaacaaaatagtagttcaactagcagcggtgatagtgagtttgattctacg

SEQ ID NO: 367442 - DNA, 56 bp, Artificial
  Synthetic oligonucleotide
cgaacaacaaagaaggcttgcaaactactaatagtaatgtggaccccacctcgcaa

SEQ ID NO: 367443 - DNA, 55 bp, Artificial
  Synthetic oligonucleotide
cgaacaaccctcgtctaacgtctcaaaacatcatcaggttcaaaaccaagcgtac

SEQ ID NO: 367444 - DNA, 60 bp, Artificial
  Synthetic oligonucleotide
cgaacaacggcgcgaaacattcaccgcactctttgcaagtgtctggtcatggttgtgagc

SEQ ID NO: 367445 - DNA, 55 bp, Artificial
  Synthetic oligonucleotide
cgaacaagaagaccctaccacaccacccgagaactgtcaagagttgcgggcccaa

SEQ ID NO: 367446 - DNA, 55 bp, Artificial
  Synthetic oligonucleotide
cgaacaagcagacgaattttaaaccgtgtttacaaacaagcaatctataattcgc

SEQ ID NO: 367447 - DNA, 60 bp, Artificial
  Synthetic oligonucleotide
cgaacaagtttgcggcaatatgcacccatttggaagtctgcttcatgtattcagatttcc

SEQ ID NO: 367448 - DNA, 60 bp, Artificial
  Synthetic oligonucleotide
cgaacaatgccaaaacaataatagtacatcttaatgaatctgtagagattgtgtgtataa

SEQ ID NO: 367449 - DNA, 55 bp, Artificial
  Synthetic oligonucleotide
cgaacaatgtggtcaacaggaagctcagtacaccaactgggtctcgaccaagcac

SEQ ID NO: 367450 - DNA, 50 bp, Artificial
  Synthetic oligonucleotide
cgaacaatttctcaggtaatcacgcgacgttcaagccagaccaatatgtc

SEQ ID NO: 367451 - DNA, 60 bp, Artificial
  Synthetic oligonucleotide
cgaacacaaatacccgcagaaatgctagcaagcatcgacctgaagtatttcaacgaatca

SEQ ID NO: 367452 - DNA, 60 bp, Artificial
  Synthetic oligonucleotide
cgaacacaagagtctgaatgcgtgtgtcaggatgagttttgttacactctagttacagac

SEQ ID NO: 367453 - DNA, 54 bp, Artificial
  Synthetic oligonucleotide
cgaacacaatagcacttcgactcgtgaagagacgatcgtgaattgcgtggaagt

SEQ ID NO: 367454 - DNA, 60 bp, Artificial
  Synthetic oligonucleotide
cgaacacacagggaaagagattgttgatctaatgtgtcatgcaacgttcacaatgcgttt

SEQ ID NO: 367455 - DNA, 60 bp, Artificial
  Synthetic oligonucleotide
cgaacacagtcaatggggattcaactggaccagaagatcatcatcctgtatatgttgtct

SEQ ID NO: 367456 - DNA, 50 bp, Artificial
  Synthetic oligonucleotide
cgaacacatcctggcacaaacttcacactaccaaccacacaagtgccagt

SEQ ID NO: 367457 - DNA, 58 bp, Artificial
  Synthetic oligonucleotide
cgaacacattggttccaatgtgggggagagttcttctactgtaatgtatctaagctct

SEQ ID NO: 367458 - DNA, 55 bp, Artificial
  Synthetic oligonucleotide
cgaacaccagtgagagctagggaagcgcacatacaaatgaaggccgcagcattga

SEQ ID NO: 367459 - DNA, 53 bp, Artificial
  Synthetic oligonucleotide
cgaacaccctctcttgggtgagaaaactgccggtttcggatggccccaagtcg

SEQ ID NO: 367460 - DNA, 51 bp, Artificial
  Synthetic oligonucleotide
cgaacacctcatcgtcgtaaaactaaccaagcctattgtgagatgatgggt

SEQ ID NO: 367461 - DNA, 55 bp, Artificial
  Synthetic oligonucleotide
cgaacaccttaaagtttcctgcggcccaaaatctgtacagttccatgcctgcttc

SEQ ID NO: 367462 - DNA, 55 bp, Artificial
  Synthetic oligonucleotide
cgaacacgaattcaaactctggcgacttgggtccaatttacgataggttgacggc

SEQ ID NO: 367463 - DNA, 51 bp, Artificial
  Synthetic oligonucleotide
cgaacacggaatgcaagaatcgagtgtatctagactgatgacgggaagtcc

SEQ ID NO: 367464 - DNA, 55 bp, Artificial
  Synthetic oligonucleotide
cgaacacgtcagcgaacagtacgttaaaggcatcgtttgtaactactgcggagcg

SEQ ID NO: 367465 - DNA, 55 bp, Artificial
  Synthetic oligonucleotide
cgaacactacacgccgtgcactcagccgggctgaaaatcgggtatatgcacccta

SEQ ID NO: 367466 - DNA, 55 bp, Artificial
  Synthetic oligonucleotide
cgaacactgaacaaaaggaatgagctcatagatgagtacgatttagaactttcag

SEQ ID NO: 367467 - DNA, 54 bp, Artificial
  Synthetic oligonucleotide
cgaacactgagctttctacaaggaaccttccgctgggaacttcccagggagccg

SEQ ID NO: 367468 - DNA, 57 bp, Artificial
  Synthetic oligonucleotide
cgaacagaagcgcgtattacgagtaagccaaattgcaacgatgtgggttgggggcga

SEQ ID NO: 367469 - DNA, 55 bp, Artificial
  Synthetic oligonucleotide
cgaacagacgattcagttggagtacctggtttctaggtatcgcactttatctatt

SEQ ID NO: 367470 - DNA, 55 bp, Artificial
  Synthetic oligonucleotide
cgaacagatggtcaatgcaagactgccaaaagatgagaaaatcagggtcacaaag

SEQ ID NO: 367471 - DNA, 60 bp, Artificial
  Synthetic oligonucleotide
cgaacagattcatatggtatgggtgcgagccggacttctattcttcatacccacctcgac

SEQ ID NO: 367472 - DNA, 59 bp, Artificial
  Synthetic oligonucleotide
cgaacagcgtcatgttctggttggtcagagaccgtagaccgtatggaactcctatggac

SEQ ID NO: 367473 - DNA, 60 bp, Artificial
  Synthetic oligonucleotide
cgaacagcgtcatgttttggctggttagagatcgtagaccatatggcacgcctatggact

SEQ ID NO: 367474 - DNA, 58 bp, Artificial
  Synthetic oligonucleotide
cgaacagctctaattacattgtttatccctacaagtccaatttgatcaagatacattt

SEQ ID NO: 367475 - DNA, 57 bp, Artificial
  Synthetic oligonucleotide
cgaacagggacatttgagttcactagctttttctatcgctatgggttcgtagccaac

SEQ ID NO: 367476 - DNA, 60 bp, Artificial
  Synthetic oligonucleotide
cgaacagggcggcaatgtatgtagtggcggcagtacagaggctatagacaatgggggcac

SEQ ID NO: 367477 - DNA, 60 bp, Artificial
  Synthetic oligonucleotide
cgaacaggttcggctgtctaataaccctgcagttgtcatgggttatctattagatgaatc

SEQ ID NO: 367478 - DNA, 55 bp, Artificial
  Synthetic oligonucleotide
cgaacagtagctgccccatagaggtgatactgaagacccatacatcctatagtgt

SEQ ID NO: 367479 - DNA, 54 bp, Artificial
  Synthetic oligonucleotide
cgaacagtccggccccagtatactcgaacgcttctctggacctcaaccgggaag

SEQ ID NO: 367480 - DNA, 55 bp, Artificial
  Synthetic oligonucleotide
cgaacagtccgtttcgtctacttcttccgtactcacgcaagacgtccaaacattg

SEQ ID NO: 367481 - DNA, 50 bp, Artificial
  Synthetic oligonucleotide
cgaacagtgtcaaaacgcgacaattgttaaacgtgattatgtagggacgc

SEQ ID NO: 367482 - DNA, 60 bp, Artificial
  Synthetic oligonucleotide
cgaacagtgttatgttctggttggtcagagatcgtcgaccctatggcacgcctatggact

SEQ ID NO: 367483 - DNA, 54 bp, Artificial
  Synthetic oligonucleotide
cgaacagtgttatgttttggttggtcagggaccgtaggccttatggtattccta

SEQ ID NO: 367484 - DNA, 60 bp, Artificial
  Synthetic oligonucleotide
cgaacagttcttgcacgctcaacaacacccaccactctagcgcgtgcaggagagagaacc

SEQ ID NO: 367485 - DNA, 55 bp, Artificial
  Synthetic oligonucleotide
cgaacagttggagttggaggggtcacccttcttctcgaatggtgaaattgggcga

SEQ ID NO: 367486 - DNA, 55 bp, Artificial
  Synthetic oligonucleotide
cgaacagtttctactgacgctgagggatctttgagaatttacctggctgatctgg

SEQ ID NO: 367487 - DNA, 55 bp, Artificial
  Synthetic oligonucleotide
cgaacatatagagtgatggatgacgataccgcattcgagactggaattgatggca

SEQ ID NO: 367488 - DNA, 57 bp, Artificial
  Synthetic oligonucleotide
cgaacatattgtgcagcttagacgtgcactgactacagctactataactttgttacc

SEQ ID NO: 367489 - DNA, 60 bp, Artificial
  Synthetic oligonucleotide
cgaacatcaccttatccagatctcacttctggatcactaccatgattaagcaaaagcaac

SEQ ID NO: 367490 - DNA, 55 bp, Artificial
  Synthetic oligonucleotide
cgaacatcatgctacggtaggcctaacgctaagaattgaatctgcggtgtgtgaa

SEQ ID NO: 367491 - DNA, 55 bp, Artificial
  Synthetic oligonucleotide
cgaacatcccaccactcagcgcgtggccagagcacataacgatgatccggccagt

SEQ ID NO: 367492 - DNA, 57 bp, Artificial
  Synthetic oligonucleotide
cgaacatcgtggaaagagggtatcctgaagggaaaggagtaattgaatctggtctca

SEQ ID NO: 367493 - DNA, 58 bp, Artificial
  Synthetic oligonucleotide
cgaacatggaagggaacgtcagagtgacctccgcaacgtcgttcgtgagagcgtattc

SEQ ID NO: 367494 - DNA, 60 bp, Artificial
  Synthetic oligonucleotide
cgaacattaaggatttcagaaacactatacaattgcttgcggttatgtccaatgatccag

SEQ ID NO: 367495 - DNA, 60 bp, Artificial
  Synthetic oligonucleotide
cgaacattcacagtcagagaaaaggatcagatcatacaaaatagtattcctgctgtcatt

SEQ ID NO: 367496 - DNA, 55 bp, Artificial
  Synthetic oligonucleotide
cgaacattcgttccttgaccgtgcgtaccggcatcgacacctaaggtgtggcgcc

SEQ ID NO: 367497 - DNA, 53 bp, Artificial
  Synthetic oligonucleotide
cgaacattctcgcgatccgtgccgacaagatggcgcgtgctataaagaatgag

SEQ ID NO: 367498 - DNA, 56 bp, Artificial
  Synthetic oligonucleotide
cgaaccaaagcttggggaagaagttgtcattgtatgtttcactaggattaatggga

SEQ ID NO: 367499 - DNA, 55 bp, Artificial
  Synthetic oligonucleotide
cgaaccaacgcgaccactagcagaaaatgttttcaaacagctatctagcgatcca

SEQ ID NO: 367500 - DNA, 55 bp, Artificial
  Synthetic oligonucleotide
cgaaccaagcaggaacataggagactggtagtacgagatgtacgcgttaccaacc

SEQ ID NO: 367501 - DNA, 55 bp, Artificial
  Synthetic oligonucleotide
cgaaccaatggtgaagcatgcgaatccctcattacgtcagataatgaaacacttt

SEQ ID NO: 367502 - DNA, 55 bp, Artificial
  Synthetic oligonucleotide
cgaaccaccagctcgtttagtggtaaaaataccagacctcgccatagatttcgag

SEQ ID NO: 367503 - DNA, 55 bp, Artificial
  Synthetic oligonucleotide
cgaaccactgctacgagtccaacgtgaccgtaggcaagttcatacgccacgctcc

SEQ ID NO: 367504 - DNA, 55 bp, Artificial
  Synthetic oligonucleotide
cgaaccagactttacgagccaaccatgagagagctctaccaggaatcgattcacc

SEQ ID NO: 367505 - DNA, 54 bp, Artificial
  Synthetic oligonucleotide
cgaaccagatgtcacaaacaacttaaaccaggcaaacgtaacaagaagtctacc

SEQ ID NO: 367506 - DNA, 55 bp, Artificial
  Synthetic oligonucleotide
cgaaccagtctgtgtgttaatacatggttcaccaggctcagggaagtcactgacc

SEQ ID NO: 367507 - DNA, 60 bp, Artificial
  Synthetic oligonucleotide
cgaaccagtgcttacagcccagctcgcctcattgttccaactgacggcgcagccaggttt

SEQ ID NO: 367508 - DNA, 55 bp, Artificial
  Synthetic oligonucleotide
cgaaccatatgagcatatcgcggcgatcacatcagataagattctcggagtcagc

SEQ ID NO: 367509 - DNA, 51 bp, Artificial
  Synthetic oligonucleotide
cgaaccatattaatcggtggttccgagaatatttgagcctagtgattgcgc

SEQ ID NO: 367510 - DNA, 58 bp, Artificial
  Synthetic oligonucleotide
cgaaccatgagggaatacaagcaggtgtggataggttctataggacctgcaaactggt

SEQ ID NO: 367511 - DNA, 59 bp, Artificial
  Synthetic oligonucleotide
cgaaccattccagtctcttgtccctaaggcagccagaagtcaatacagtggattcgtaa

SEQ ID NO: 367512 - DNA, 55 bp, Artificial
  Synthetic oligonucleotide
cgaacccaccaattgtggagcaaaacatgatgcagtccagaagagcacagtgtgg

SEQ ID NO: 367513 - DNA, 60 bp, Artificial
  Synthetic oligonucleotide
cgaacccagtactgcaacaatcaagcaggaccttagagatcgtctgcaggtgttacacaa

SEQ ID NO: 367514 - DNA, 60 bp, Artificial
  Synthetic oligonucleotide
cgaacccagttacactcaatatcgcctctgatgacaccgtcaaggcaatcacatcagact

SEQ ID NO: 367515 - DNA, 55 bp, Artificial
  Synthetic oligonucleotide
cgaacccatctgtaatctcaaactcatgaaattggctaaagtgtatagaccactc

SEQ ID NO: 367516 - DNA, 51 bp, Artificial
  Synthetic oligonucleotide
cgaaccccattttgtggtacccggacaacagcggaaaggccatcctcgggg

SEQ ID NO: 367517 - DNA, 57 bp, Artificial
  Synthetic oligonucleotide
cgaacccctccagcaccagaaggggcggtagcagaaggggtgggagcagtgtctcga

SEQ ID NO: 367518 - DNA, 55 bp, Artificial
  Synthetic oligonucleotide
cgaacccgacactacgacttggaaggacggtatgtgaccactacaccaatgaggc

SEQ ID NO: 367519 - DNA, 55 bp, Artificial
  Synthetic oligonucleotide
cgaacccgataggtgtgaaagacagtgatggaaaatctagatcaaacatcttggc

SEQ ID NO: 367520 - DNA, 52 bp, Artificial
  Synthetic oligonucleotide
cgaacccgattggagcgaataattgtcaaacctacactcgtgagattagaaa

SEQ ID NO: 367521 - DNA, 54 bp, Artificial
  Synthetic oligonucleotide
cgaaccctcacacggaccccgccctacaaggtacatactgcaggaaccaggtac

SEQ ID NO: 367522 - DNA, 55 bp, Artificial
  Synthetic oligonucleotide
cgaaccctcggttgcattcctcgtgtccgatccgtgatggtctaccctgctgcgt

SEQ ID NO: 367523 - DNA, 53 bp, Artificial
  Synthetic oligonucleotide
cgaacccttaaggtgtcgtaacgtctcgtgacgccgggttcagttcaaacatc

SEQ ID NO: 367524 - DNA, 54 bp, Artificial
  Synthetic oligonucleotide
cgaaccgacccactacacttttggggcttataaatttattcagaaggccgctca

SEQ ID NO: 367525 - DNA, 56 bp, Artificial
  Synthetic oligonucleotide
cgaaccgctacctgcaaggcttgctagtttattccttaacgcatcgtgtattttag

SEQ ID NO: 367526 - DNA, 58 bp, Artificial
  Synthetic oligonucleotide
cgaaccggaatgtggcaacttagaagttctgacgaattatcttgcggcttgtttctca

SEQ ID NO: 367527 - DNA, 55 bp, Artificial
  Synthetic oligonucleotide
cgaaccggtctccgcctagcaacacgacgtctgaaccgcgccatagcaacagagc

SEQ ID NO: 367528 - DNA, 55 bp, Artificial
  Synthetic oligonucleotide
cgaaccgtgctaggaggagcggtggtgtatccggagggtcctcctccttcgtatg

SEQ ID NO: 367529 - DNA, 57 bp, Artificial
  Synthetic oligonucleotide
cgaaccgttcttttttgaacacgtacaagcatacctgcccggcattctcagaactga

SEQ ID NO: 367530 - DNA, 55 bp, Artificial
  Synthetic oligonucleotide
cgaacctagaaacaattgtacgacaagcggataacactcgtatcgcgcgagtttc

SEQ ID NO: 367531 - DNA, 55 bp, Artificial
  Synthetic oligonucleotide
cgaacctagcacattgggttttgaatacgtccgtgatctcatctccgttctgagg

SEQ ID NO: 367532 - DNA, 55 bp, Artificial
  Synthetic oligonucleotide
cgaacctatttgctcgggttgagtgcaaacgcggtcattgcgataaatgactctg

SEQ ID NO: 367533 - DNA, 60 bp, Artificial
  Synthetic oligonucleotide
cgaacctcatgtacagcatgagttagcagaccaatttacctttgaggtgccagctgcgaa

SEQ ID NO: 367534 - DNA, 54 bp, Artificial
  Synthetic oligonucleotide
cgaacctcgacggtttagaagctgtggacggtacgcaggaggcgaccgtaccga

SEQ ID NO: 367535 - DNA, 58 bp, Artificial
  Synthetic oligonucleotide
cgaacctcttttagccctccgcttcaagaaggagcgcggtctgtatgccaccttctgc

SEQ ID NO: 367536 - DNA, 59 bp, Artificial
  Synthetic oligonucleotide
cgaacctgaattgaggtcactttcaagctggatacagaatgagttcaacaaggcatgcg

SEQ ID NO: 367537 - DNA, 58 bp, Artificial
  Synthetic oligonucleotide
cgaacctgttgcgttaatcgggacttgttgcctatattctatgacgcaatggtctatt

SEQ ID NO: 367538 - DNA, 55 bp, Artificial
  Synthetic oligonucleotide
cgaaccttcttccatttccgatgaattccgtgttacgaccatcccaattgttcca

SEQ ID NO: 367539 - DNA, 59 bp, Artificial
  Synthetic oligonucleotide
cgaaccttgacattgatgctgacctcaacggttttctctcccacttgccgtagtccaca

SEQ ID NO: 367540 - DNA, 56 bp, Artificial
  Synthetic oligonucleotide
cgaacctttaatcctattgccaggcaatagccctgagacagggaggggggactctc

SEQ ID NO: 367541 - DNA, 55 bp, Artificial
  Synthetic oligonucleotide
cgaacgaaaatagtttagacacgcgcgagaaacattattttcggtagatgacgta

SEQ ID NO: 367542 - DNA, 57 bp, Artificial
  Synthetic oligonucleotide
cgaacgaaataagagatgaacattaatgggaagcatatagagttttattatgccccg

SEQ ID NO: 367543 - DNA, 60 bp, Artificial
  Synthetic oligonucleotide
cgaacgaattaacgatgcagtggccatcattacggctgctaatagattaaacttatacca

SEQ ID NO: 367544 - DNA, 55 bp, Artificial
  Synthetic oligonucleotide
cgaacgaattctttcatagacgactgatcgttctcggtattcgttggatccatgg

SEQ ID NO: 367545 - DNA, 55 bp, Artificial
  Synthetic oligonucleotide
cgaacgacacatcgccggccagcgtgccgcccttgctcttgtcgagcgggtcgag

SEQ ID NO: 367546 - DNA, 55 bp, Artificial
  Synthetic oligonucleotide
cgaacgagacattgagcttgaactatgcggagagatgtgtggaacgataacacag

SEQ ID NO: 367547 - DNA, 56 bp, Artificial
  Synthetic oligonucleotide
cgaacgagcacttctgtttccccggtgaagttgcatagactgttaccacggttgaa

SEQ ID NO: 367548 - DNA, 60 bp, Artificial
  Synthetic oligonucleotide
cgaacgaggcccatgtaattagatgccgtcaccgtcgtactatcagccacaacgccacgc

SEQ ID NO: 367549 - DNA, 52 bp, Artificial
  Synthetic oligonucleotide
cgaacgaggggctgctcgccggatctggcgtctgcggtgccatctttgccaa

SEQ ID NO: 367550 - DNA, 51 bp, Artificial
  Synthetic oligonucleotide
cgaacgagggggacggtccttgaactcccagggggtcccatggagccgtgg

SEQ ID NO: 367551 - DNA, 52 bp, Artificial
  Synthetic oligonucleotide
cgaacgagtacaacgagaaaattacataattggtttttgtgggtcgcgaggg

SEQ ID NO: 367552 - DNA, 55 bp, Artificial
  Synthetic oligonucleotide
cgaacgagtgctctccaagacaagtctgacccacttcgtgatggcacagggagac

SEQ ID NO: 367553 - DNA, 57 bp, Artificial
  Synthetic oligonucleotide
cgaacgatcaaaaaggattcacgctcaggttatgagactttcagagtcgttggtggt

SEQ ID NO: 367554 - DNA, 53 bp, Artificial
  Synthetic oligonucleotide
cgaacgatcccgctatcccatcatcttgagtcgcgccgagtaggtagtaacgc

SEQ ID NO: 367555 - DNA, 60 bp, Artificial
  Synthetic oligonucleotide
cgaacgatgtctaaaactgaaagaatggggatggaactgtatgtcaagtatgatggagac

SEQ ID NO: 367556 - DNA, 54 bp, Artificial
  Synthetic oligonucleotide
cgaacgcaacgtgtacaatacgtaactgtaaaaaactaggacctagagagaatg

SEQ ID NO: 367557 - DNA, 54 bp, Artificial
  Synthetic oligonucleotide
cgaacgccatattcaagctcacgtaccaaaataaagtggttaaagttcaacgac

SEQ ID NO: 367558 - DNA, 55 bp, Artificial
  Synthetic oligonucleotide
cgaacgccgacacgcgcataaagctcacgccagttgcacttcgccagggtggctt

SEQ ID NO: 367559 - DNA, 59 bp, Artificial
  Synthetic oligonucleotide
cgaacgcgggttcagtcctaagagggcatatcggtgtctgccccacgtgaggagttgca

SEQ ID NO: 367560 - DNA, 55 bp, Artificial
  Synthetic oligonucleotide
cgaacgctatggaatggaaaaagacgtgtgtttaagactacgttagacaaatatc

SEQ ID NO: 367561 - DNA, 59 bp, Artificial
  Synthetic oligonucleotide
cgaacgctttatcaattaattatgtacagctcacgtcgaccgcgtctccacgtcctcag

SEQ ID NO: 367562 - DNA, 51 bp, Artificial
  Synthetic oligonucleotide
cgaacggaagcggtacaaaatgtgccctaaaggccttttaataaccgtctc

SEQ ID NO: 367563 - DNA, 55 bp, Artificial
  Synthetic oligonucleotide
cgaacggccctgaactgcaatgcgagcctcaacactggttggttagcggggctcc

SEQ ID NO: 367564 - DNA, 56 bp, Artificial
  Synthetic oligonucleotide
cgaacggccttgtaggcactgatgagtgacgcccccgacagctcgttaccgtgcag

SEQ ID NO: 367565 - DNA, 56 bp, Artificial
  Synthetic oligonucleotide
cgaacgggagatcttcacggaagaccggggccacaccaactgcgtacagacgcaaa

SEQ ID NO: 367566 - DNA, 55 bp, Artificial
  Synthetic oligonucleotide
cgaacgggtgatgctaatacttatctgggtaacactttagtaaccctcatatgtt

SEQ ID NO: 367567 - DNA, 49 bp, Artificial
  Synthetic oligonucleotide
cgaacgggttcgtttagttttgacccgatcgaactggttcgtttagtaa

SEQ ID NO: 367568 - DNA, 55 bp, Artificial
  Synthetic oligonucleotide
cgaacggtaggcatcgttcgatgtacgccaacgagcggtcgtcaacagctgcggc

SEQ ID NO: 367569 - DNA, 53 bp, Artificial
  Synthetic oligonucleotide
cgaacggtctatctaagaagccgtccccttgggaccaacttctaaaagatatc

SEQ ID NO: 367570 - DNA, 58 bp, Artificial
  Synthetic oligonucleotide
cgaacggtgcgacatggtaactggatacacttaaccctggggcaagtagatgctagga

SEQ ID NO: 367571 - DNA, 57 bp, Artificial
  Synthetic oligonucleotide
cgaacggtggaagtggacccagatgacgttaacaaaagcacattacagagcagacgg

SEQ ID NO: 367572 - DNA, 54 bp, Artificial
  Synthetic oligonucleotide
cgaacgtagggtcttccgagtgaagaacgctgcgggagagttagtagtacctcc

SEQ ID NO: 367573 - DNA, 55 bp, Artificial
  Synthetic oligonucleotide
cgaacgtcagggcatttggaccatttgatgcaacaacttgccaagggttagagcc

SEQ ID NO: 367574 - DNA, 55 bp, Artificial
  Synthetic oligonucleotide
cgaacgtcctaattttagtgctgccttagcctcataccctaaacggttagcagcc

SEQ ID NO: 367575 - DNA, 60 bp, Artificial
  Synthetic oligonucleotide
cgaacgtctagtcaaccgaactcatctattcagcaatcgtcttgcgacgcttgccaaaca

SEQ ID NO: 367576 - DNA, 60 bp, Artificial
  Synthetic oligonucleotide
cgaacgtctcttgccatgaagatgaccattcgcaatcaccgtgctcgttcggcgatcacc

SEQ ID NO: 367577 - DNA, 55 bp, Artificial
  Synthetic oligonucleotide
cgaacgtggcatcccggaggttcgctattctgttgtctagcgtgtctcggtttct

SEQ ID NO: 367578 - DNA, 60 bp, Artificial
  Synthetic oligonucleotide
cgaacgtgtagtagatatggtagttccattatatgatgtgtgtaatgaaacttctggtgt

SEQ ID NO: 367579 - DNA, 57 bp, Artificial
  Synthetic oligonucleotide
cgaacgttatttcgaacacgagaatgctttctatactatggactcggatccacgtgt

SEQ ID NO: 367580 - DNA, 60 bp, Artificial
  Synthetic oligonucleotide
cgaacgttgctgggatggattctcctcctatagatcctctttcacgtggcgagatcacgc

SEQ ID NO: 367581 - DNA, 56 bp, Artificial
  Synthetic oligonucleotide
cgaacgttgtatcgtacaatttttgcaaactctccccggttgtacaattgcatcat

SEQ ID NO: 367582 - DNA, 53 bp, Artificial
  Synthetic oligonucleotide
cgaacgtttccaaccggtaagacaacggatgtttccatgatgaaggcccaacg

SEQ ID NO: 367583 - DNA, 55 bp, Artificial
  Synthetic oligonucleotide
cgaacgtttgtactatgcacttggtgacgcttacgaagctggagttgagcagaga

SEQ ID NO: 367584 - DNA, 55 bp, Artificial
  Synthetic oligonucleotide
cgaactaaggttgtcgccgacggagcatatgcccccgcaaaatccaacaggaccc

SEQ ID NO: 367585 - DNA, 60 bp, Artificial
  Synthetic oligonucleotide
cgaactaatcgctggcggcgctgctcttgcatggctcggcaaggatggcttgatcctagt

SEQ ID NO: 367586 - DNA, 53 bp, Artificial
  Synthetic oligonucleotide
cgaactaccaaactccaatagcttcatctagtactgtaagaatggatttagag

SEQ ID NO: 367587 - DNA, 60 bp, Artificial
  Synthetic oligonucleotide
cgaactaggtgatttgagagatgtatttccttctggagttgatgaaatggcgataggata

SEQ ID NO: 367588 - DNA, 60 bp, Artificial
  Synthetic oligonucleotide
cgaactatgccagcgtgtggggcgctgacgattcaagatgtgtgttggagccattatccc

SEQ ID NO: 367589 - DNA, 55 bp, Artificial
  Synthetic oligonucleotide
cgaactattctagaggttaagtatatacctcaaccccaccaggaatctggtcgtg

SEQ ID NO: 367590 - DNA, 53 bp, Artificial
  Synthetic oligonucleotide
cgaactcagacccaacggaaccaaactcgttcacactgtaaacgaactaccac

SEQ ID NO: 367591 - DNA, 59 bp, Artificial
  Synthetic oligonucleotide
cgaactcagagaatggaacatgttacccaggagatttcatcgactatgaagaactgagg

SEQ ID NO: 367592 - DNA, 55 bp, Artificial
  Synthetic oligonucleotide
cgaactccaagctgaaatcaaccagacacttgaagacccggattacgtgtactcc

SEQ ID NO: 367593 - DNA, 55 bp, Artificial
  Synthetic oligonucleotide
cgaactccactgcgtttgagagatgcacaagtggcgagctcttttacgagcacgc

SEQ ID NO: 367594 - DNA, 55 bp, Artificial
  Synthetic oligonucleotide
cgaactccagctggctcacatgttggaggcgaagaagcggagacgaaggtctcac

SEQ ID NO: 367595 - DNA, 59 bp, Artificial
  Synthetic oligonucleotide
cgaactccttacgaagttaccagacggctgggtttattgcgatgcagatggatcacaat

SEQ ID NO: 367596 - DNA, 60 bp, Artificial
  Synthetic oligonucleotide
cgaactcgagcaatcaatctgaaacaatggaatggactgacttaccgctcgtacgcgata

SEQ ID NO: 367597 - DNA, 60 bp, Artificial
  Synthetic oligonucleotide
cgaactcgtagtgctctcaatgctgcttacattgaaagttatggttacgaagatcttatg

SEQ ID NO: 367598 - DNA, 55 bp, Artificial
  Synthetic oligonucleotide
cgaactgaagcgttaccggtcgaagatatacgcggttagcaattaggtcgggata

SEQ ID NO: 367599 - DNA, 55 bp, Artificial
  Synthetic oligonucleotide
cgaactgaggttcttactcgacccttacacacctaatcctcacaacgacaatcac

SEQ ID NO: 367600 - DNA, 60 bp, Artificial
  Synthetic oligonucleotide
cgaactgagtgcagagttgaagcatgttcccttagggatgcaagttatggctgacttcgt

SEQ ID NO: 367601 - DNA, 57 bp, Artificial
  Synthetic oligonucleotide
cgaactgcacctagccaagaaatcacggaaaattgatgtaactaagggcttggccaa

SEQ ID NO: 367602 - DNA, 55 bp, Artificial
  Synthetic oligonucleotide
cgaactgcgtaacttgcacccatatgatcgcagtatggttctcacgtccgcatgg

SEQ ID NO: 367603 - DNA, 55 bp, Artificial
  Synthetic oligonucleotide
cgaactggacatgaccaaatacaccatggctctgaagcggtatggtcttctcccg

SEQ ID NO: 367604 - DNA, 55 bp, Artificial
  Synthetic oligonucleotide
cgaactgggtgcgatcgctcaccactgcctggaagtctacaggtcgatgggaaag

SEQ ID NO: 367605 - DNA, 55 bp, Artificial
  Synthetic oligonucleotide
cgaactggtcagaggtgttcccgtacggcgcaggcaactcgcggtttgcgttggt

SEQ ID NO: 367606 - DNA, 54 bp, Artificial
  Synthetic oligonucleotide
cgaactgtcccaagatggtgtacggacgcctccgaatgtcatggaacacacttt

SEQ ID NO: 367607 - DNA, 52 bp, Artificial
  Synthetic oligonucleotide
cgaacttaattaagttcaactattgttgataacttaaggatagtacgtttcg

SEQ ID NO: 367608 - DNA, 55 bp, Artificial
  Synthetic oligonucleotide
cgaacttaattatgaatatagcgacgtgcttaccaacaggagaatatgtatcccc

SEQ ID NO: 367609 - DNA, 58 bp, Artificial
  Synthetic oligonucleotide
cgaacttacaaggtctctgtcagaggcctttcgtggaaatctgtgcgggctgcacaga

SEQ ID NO: 367610 - DNA, 60 bp, Artificial
  Synthetic oligonucleotide
cgaacttaggattgaatataggactacatctgaaaccgagctgcaattgctcacactcac

SEQ ID NO: 367611 - DNA, 60 bp, Artificial
  Synthetic oligonucleotide
cgaacttatacagcgtcattatgacgcaggcagatcatgtgtacaactacatgactcagc

SEQ ID NO: 367612 - DNA, 55 bp, Artificial
  Synthetic oligonucleotide
cgaacttatatacggagattgtttacacgccaatcgcgactccagatggaaccat

SEQ ID NO: 367613 - DNA, 55 bp, Artificial
  Synthetic oligonucleotide
cgaacttatcgtgctcagttaaagttacaagataatcttggtaccaatagattgg

SEQ ID NO: 367614 - DNA, 60 bp, Artificial
  Synthetic oligonucleotide
cgaacttcctgatataagcacatctcaaaacagtgcttacgactcgcaatgttttcggct

SEQ ID NO: 367615 - DNA, 56 bp, Artificial
  Synthetic oligonucleotide
cgaacttctatctcaaagggtgcaataagtggtgggataactaccaaggccaggaa

SEQ ID NO: 367616 - DNA, 60 bp, Artificial
  Synthetic oligonucleotide
cgaacttctctcagaatgggcgatatggctacaatacattaaacaacatggggcaactat

SEQ ID NO: 367617 - DNA, 55 bp, Artificial
  Synthetic oligonucleotide
cgaacttctgacgcccagatacaagcaaattcgttgtaagtattgtcagcgtaag

SEQ ID NO: 367618 - DNA, 57 bp, Artificial
  Synthetic oligonucleotide
cgaacttgagtaccgtgcctggcgatttagcgacgatacgtagtaggttagatcacc

SEQ ID NO: 367619 - DNA, 58 bp, Artificial
  Synthetic oligonucleotide
cgaactttatttacggcgcatgtctgatgttgtttcaagccctcattccccccagcgc

SEQ ID NO: 367620 - DNA, 60 bp, Artificial
  Synthetic oligonucleotide
cgaagaaaaacatgcacgtgatggatgacatgtacaatggaaaatacaatcctgaattag

SEQ ID NO: 367621 - DNA, 56 bp, Artificial
  Synthetic oligonucleotide
cgaagaaacctaatttgaggttgcgtattcaatacgctaccgagtatctattaata

SEQ ID NO: 367622 - DNA, 53 bp, Artificial
  Synthetic oligonucleotide
cgaagaaagacattttgaaacatatgaactttctaaaacgtgttgaaagactt

SEQ ID NO: 367623 - DNA, 54 bp, Artificial
  Synthetic oligonucleotide
cgaagaaatacgagccaggaaccctagggttcgagttgtgctccgatttaatcc

SEQ ID NO: 367624 - DNA, 56 bp, Artificial
  Synthetic oligonucleotide
cgaagaaattacttatcagagtggtaacacaattcaagctaaaacagccttaactg

SEQ ID NO: 367625 - DNA, 50 bp, Artificial
  Synthetic oligonucleotide
cgaagaacacagtcaagatacacgttgttttcggaccggcttagtattct

SEQ ID NO: 367626 - DNA, 55 bp, Artificial
  Synthetic oligonucleotide
cgaagaacatctcgtagcttgcccaccttttagcaagaatttgttctccacaaag

SEQ ID NO: 367627 - DNA, 55 bp, Artificial
  Synthetic oligonucleotide
cgaagaacctttcatcatgggtgtagacaggcttgacgctctgagctaaggcatg

SEQ ID NO: 367628 - DNA, 60 bp, Artificial
  Synthetic oligonucleotide
cgaagaactcctcaagacgatcaggctcatcaagatcctatatcagagcagtaagtagtg

SEQ ID NO: 367629 - DNA, 60 bp, Artificial
  Synthetic oligonucleotide
cgaagaagaaagtctcttgcgtgcaagtcagactgaacccatcgccaaaattcgattcaa

SEQ ID NO: 367630 - DNA, 60 bp, Artificial
  Synthetic oligonucleotide
cgaagaagaatctctatgcgatgtatatgcctggtgttaggttgggacatgctcttttta

SEQ ID NO: 367631 - DNA, 55 bp, Artificial
  Synthetic oligonucleotide
cgaagaagagaatcaacgaatgaaggatcaacagtctaagtctagtggctaaaat

SEQ ID NO: 367632 - DNA, 55 bp, Artificial
  Synthetic oligonucleotide
cgaagaagagcatcagttatggagaaaggatccaaagattggggcgagttggacg

SEQ ID NO: 367633 - DNA, 60 bp, Artificial
  Synthetic oligonucleotide
cgaagaagatgaacatgtatccctctatattttatctaagaattcagctgtgctgaaagt

SEQ ID NO: 367634 - DNA, 55 bp, Artificial
  Synthetic oligonucleotide
cgaagaagcctttagcgcagctaaagaaggtcggatggatgatatccccgctgat

SEQ ID NO: 367635 - DNA, 55 bp, Artificial
  Synthetic oligonucleotide
cgaagaagttaagctttgttctgcgttttaatggcggactggtttcacagtgcgc

SEQ ID NO: 367636 - DNA, 55 bp, Artificial
  Synthetic oligonucleotide
cgaagaatcacacgaacaacgtgttattctggttagttagagatagacgacccgg

SEQ ID NO: 367637 - DNA, 55 bp, Artificial
  Synthetic oligonucleotide
cgaagaatcactgaggcagatccttcgaagatcaggaggaattggtaaggagtca

SEQ ID NO: 367638 - DNA, 53 bp, Artificial
  Synthetic oligonucleotide
cgaagaattcgtgttttttggactacactaagagtgtcggaggggagtggtta

SEQ ID NO: 367639 - DNA, 60 bp, Artificial
  Synthetic oligonucleotide
cgaagacaacgtgttgggagcactatgtgaacagatagggtttggattgagattgtacga

SEQ ID NO: 367640 - DNA, 60 bp, Artificial
  Synthetic oligonucleotide
cgaagacagccagtgaccctgacctcttgtctaatcgatgttaacaaccagtggaccata

SEQ ID NO: 367641 - DNA, 55 bp, Artificial
  Synthetic oligonucleotide
cgaagacagcggtacagggcgccgtggatgtgcaaatccacctgggccgtctcaa

SEQ ID NO: 367642 - DNA, 56 bp, Artificial
  Synthetic oligonucleotide
cgaagaccgaataattacatattattgggacagagccgagtttctgcgtaaatacc

SEQ ID NO: 367643 - DNA, 58 bp, Artificial
  Synthetic oligonucleotide
cgaagacctagaatggaaatgtgccgtcgagtgatggaagcggtcggaacgtgcggct

SEQ ID NO: 367644 - DNA, 51 bp, Artificial
  Synthetic oligonucleotide
cgaagaccttaacaccgcgtttcgttaggaatacggtgggtggtgtgttaa

SEQ ID NO: 367645 - DNA, 55 bp, Artificial
  Synthetic oligonucleotide
cgaagaccttattcgtgcagccagcagtgtggctgatgttaccactggtatcctt

SEQ ID NO: 367646 - DNA, 56 bp, Artificial
  Synthetic oligonucleotide
cgaagaccttcgtaaaatcccctgacggagctgtatattacctcgaattgaatgat

SEQ ID NO: 367647 - DNA, 55 bp, Artificial
  Synthetic oligonucleotide
cgaagacgacagacaaagacaggcaccagcaagaagagcagcccatgctgagaaa

SEQ ID NO: 367648 - DNA, 55 bp, Artificial
  Synthetic oligonucleotide
cgaagacgctccattctacacgtatggtgacgacggcgtgtatgccatgactccg

SEQ ID NO: 367649 - DNA, 55 bp, Artificial
  Synthetic oligonucleotide
cgaagacggactctcgttcgaatagttcaccgaacgttggctcttgatgttcgac

SEQ ID NO: 367650 - DNA, 60 bp, Artificial
  Synthetic oligonucleotide
cgaagactacgtagatcttgtaaggtgcatgcgcaatagaggtgaacacgaagaatatac

SEQ ID NO: 367651 - DNA, 55 bp, Artificial
  Synthetic oligonucleotide
cgaagagaaggaaccgatatatgctatcccggtagattcacaaacgaagaatcac

SEQ ID NO: 367652 - DNA, 54 bp, Artificial
  Synthetic oligonucleotide
cgaagagagacgtcttccgacacgctatccgacgaggtgtgtcgcgtctcacaa

SEQ ID NO: 367653 - DNA, 52 bp, Artificial
  Synthetic oligonucleotide
cgaagagatatacttacggtgtaaatccgtaagggtgacgtaaaccaaatta

SEQ ID NO: 367654 - DNA, 55 bp, Artificial
  Synthetic oligonucleotide
cgaagagcaaatcaggcaggcgttacaagagctgacaaggacaacgtgaggacgg

SEQ ID NO: 367655 - DNA, 55 bp, Artificial
  Synthetic oligonucleotide
cgaagagcacgaaacgctcagcaactatcaggttatcggaccgatgcgacagttt

SEQ ID NO: 367656 - DNA, 53 bp, Artificial
  Synthetic oligonucleotide
cgaagagccacgagcggatttattctaccttacgaataggtgcaattatgata

SEQ ID NO: 367657 - DNA, 54 bp, Artificial
  Synthetic oligonucleotide
cgaagagcccgaaacttatttttgtgaaataccagaattaacaaatcaatatag

SEQ ID NO: 367658 - DNA, 59 bp, Artificial
  Synthetic oligonucleotide
cgaagagcctactgagctaaatgagagtcctccggcccctgaatgcggctaatcccaac

SEQ ID NO: 367659 - DNA, 55 bp, Artificial
  Synthetic oligonucleotide
cgaagagcgcagtgctgacaacgagtgcctgtacctaaccgagatgcacggtgtt

SEQ ID NO: 367660 - DNA, 55 bp, Artificial
  Synthetic oligonucleotide
cgaagagcggactcgtctatggtatcacttctcttgacagattgtctctctttgc

SEQ ID NO: 367661 - DNA, 53 bp, Artificial
  Synthetic oligonucleotide
cgaagagctaatagtgacgtggttaaagttaaacttccacgtttcgataagaa

SEQ ID NO: 367662 - DNA, 51 bp, Artificial
  Synthetic oligonucleotide
cgaagagctcctcctcaagacagtcagactcatcaagcttctctatcaaag

SEQ ID NO: 367663 - DNA, 58 bp, Artificial
  Synthetic oligonucleotide
cgaagaggaaaagtatgtccactacgaacggccagcgatcgaggagggagatacgatc

SEQ ID NO: 367664 - DNA, 54 bp, Artificial
  Synthetic oligonucleotide
cgaagaggaacacccctgtaggctcgcattaaaatactcgccccactcttaccg

SEQ ID NO: 367665 - DNA, 55 bp, Artificial
  Synthetic oligonucleotide
cgaagaggacgcgccggaaggatcagctcccgagaggggtaagacggtaaagagc

SEQ ID NO: 367666 - DNA, 55 bp, Artificial
  Synthetic oligonucleotide
cgaagagggtcttcacgatatggaagaatacttaagcacaatagtgcctccaata

SEQ ID NO: 367667 - DNA, 58 bp, Artificial
  Synthetic oligonucleotide
cgaagagtcaattgagctagttagtagtcctccggcccctgaatgcggctaatcctaa

SEQ ID NO: 367668 - DNA, 57 bp, Artificial
  Synthetic oligonucleotide
cgaagagtgttaactacagctacaataactcttttaccagatgcagaaagatttagt

SEQ ID NO: 367669 - DNA, 55 bp, Artificial
  Synthetic oligonucleotide
cgaagagttgttaccatatagctattggattggccatccggtgtgcaacagagca

SEQ ID NO: 367670 - DNA, 55 bp, Artificial
  Synthetic oligonucleotide
cgaagatagttcgcgaccgcgtacaattgatttggccttgacgcgctagccactg

SEQ ID NO: 367671 - DNA, 55 bp, Artificial
  Synthetic oligonucleotide
cgaagatcaagtttgctttgcaaaatgatcgcgacatgatcccagggattttgga

SEQ ID NO: 367672 - DNA, 51 bp, Artificial
  Synthetic oligonucleotide
cgaagatccgtgagttagaagatgaacagcgtagtgagttaattcggttga

SEQ ID NO: 367673 - DNA, 55 bp, Artificial
  Synthetic oligonucleotide
cgaagatcttatatttctggctcgatctgcactcatactgagaggatctgtagcc

SEQ ID NO: 367674 - DNA, 55 bp, Artificial
  Synthetic oligonucleotide
cgaagatgcccagggcaatagaggagtttaaagagggtggcatgagtataagcac

SEQ ID NO: 367675 - DNA, 60 bp, Artificial
  Synthetic oligonucleotide
cgaagatgttgttccccagattgaggacttcgatttgataattgtttcatacattgcact

SEQ ID NO: 367676 - DNA, 53 bp, Artificial
  Synthetic oligonucleotide
cgaagattacagaaacgtctaataggggtggtactactgaacctacacccgtc

SEQ ID NO: 367677 - DNA, 58 bp, Artificial
  Synthetic oligonucleotide
cgaagattactcgttcactgacttgtacataaaggatatgtttagctggaccacgaaa

SEQ ID NO: 367678 - DNA, 55 bp, Artificial
  Synthetic oligonucleotide
cgaagattgaagggaacgtcaaagttacctctgaagcgtcgtttgtcagagcgta

SEQ ID NO: 367679 - DNA, 55 bp, Artificial
  Synthetic oligonucleotide
cgaagattgcgacacgcattcaattgtaattcgatttccaaaacgtaaaccttac

SEQ ID NO: 367680 - DNA, 50 bp, Artificial
  Synthetic oligonucleotide
cgaagattggatcagttgtgtcatccatagaatggtacttaagatcaatg

SEQ ID NO: 367681 - DNA, 56 bp, Artificial
  Synthetic oligonucleotide
cgaagatttaccttataatctactattacggcaagttcatcgcactcagaaaggga

SEQ ID NO: 367682 - DNA, 53 bp, Artificial
  Synthetic oligonucleotide
cgaagatttcctgtaaaccgaaggggcgtattatccgcatcccttcgaattac

SEQ ID NO: 367683 - DNA, 60 bp, Artificial
  Synthetic oligonucleotide
cgaagcaacaatggtagattggctcagattggcactattatgtgaacgacccaccacatt

SEQ ID NO: 367684 - DNA, 55 bp, Artificial
  Synthetic oligonucleotide
cgaagcaacagaaaccgaccttgttaagaaagctattccgacgcctgaaactcac

SEQ ID NO: 367685 - DNA, 60 bp, Artificial
  Synthetic oligonucleotide
cgaagcaaccagttagcgccagtcggagataatactcaccagctgccacacggaggccaa

SEQ ID NO: 367686 - DNA, 55 bp, Artificial
  Synthetic oligonucleotide
cgaagcaaggctttcagcaactgttacccgtatgatgtgccggagtatacctccc

SEQ ID NO: 367687 - DNA, 53 bp, Artificial
  Synthetic oligonucleotide
cgaagcacacaggtgacgccagcaatttaatccgagctgtgttaaatgtgtcg

SEQ ID NO: 367688 - DNA, 60 bp, Artificial
  Synthetic oligonucleotide
cgaagcactagatgagcgtaacgacgccagacgctaaccgcgagatcccttgtgccagtg

SEQ ID NO: 367689 - DNA, 55 bp, Artificial
  Synthetic oligonucleotide
cgaagcagattgcctccacgaaaaatacggtggattaaacaaaagcaagccttac

SEQ ID NO: 367690 - DNA, 55 bp, Artificial
  Synthetic oligonucleotide
cgaagcagctgcctgggaaaagttcctagcggctgaagagggatgtagacttacc

SEQ ID NO: 367691 - DNA, 55 bp, Artificial
  Synthetic oligonucleotide
cgaagcaggggcagaggccgaactaaggtctcttcgattgcaggcacagcggtgg

SEQ ID NO: 367692 - DNA, 52 bp, Artificial
  Synthetic oligonucleotide
cgaagcaggtcctatattaagcttaaacgtttatcgtttaagggaaccgtga

SEQ ID NO: 367693 - DNA, 58 bp, Artificial
  Synthetic oligonucleotide
cgaagcatataaaatggcgctctgcggtaaatataaaccgaggcgtgccacacggaac

SEQ ID NO: 367694 - DNA, 59 bp, Artificial
  Synthetic oligonucleotide
cgaagcatggtcagggcatactggtaactgggttcagattcttcaatacaaagataaac

SEQ ID NO: 367695 - DNA, 55 bp, Artificial
  Synthetic oligonucleotide
cgaagcattagataatttaggtcaaacgtggtcaccaatatggactccagatatg

SEQ ID NO: 367696 - DNA, 55 bp, Artificial
  Synthetic oligonucleotide
cgaagcattatacagcacacctgccggacgggacccacgggcattggagtcagcg

SEQ ID NO: 367697 - DNA, 55 bp, Artificial
  Synthetic oligonucleotide
cgaagcattttgagataaacgaggggtatgtcgaatcctggatacaatatctgcg

SEQ ID NO: 367698 - DNA, 55 bp, Artificial
  Synthetic oligonucleotide
cgaagccatggaatttgtaggccacacacagatgccagtgcgtgttgtggttacc

SEQ ID NO: 367699 - DNA, 60 bp, Artificial
  Synthetic oligonucleotide
cgaagccatggcgtctcaaggcaccaaacggtcatatgaacaaatggagactagtgggga

SEQ ID NO: 367700 - DNA, 59 bp, Artificial
  Synthetic oligonucleotide
cgaagccctaaatgtagctttaatcgcagtaagtatcattgcgattatgaaggggctca

SEQ ID NO: 367701 - DNA, 60 bp, Artificial
  Synthetic oligonucleotide
cgaagccctcgaggtccagcacgacccgagcaccggggaaatgatcatgcccatcacaga

SEQ ID NO: 367702 - DNA, 60 bp, Artificial
  Synthetic oligonucleotide
cgaagcgaccaggagatataataatctcaacacccgtatccaaggtgcggaggaggctga

SEQ ID NO: 367703 - DNA, 55 bp, Artificial
  Synthetic oligonucleotide
cgaagcgactgtgtcacaaagattctcaacaagcttaagggactagtcgccactg

SEQ ID NO: 367704 - DNA, 56 bp, Artificial
  Synthetic oligonucleotide
cgaagcgactttacacctgagaatcctaatacattaaattactatcattacgcggg

SEQ ID NO: 367705 - DNA, 56 bp, Artificial
  Synthetic oligonucleotide
cgaagcgaggagaaagtcaaagagagcaacggggctagcaggtgggtgtttctccc

SEQ ID NO: 367706 - DNA, 53 bp, Artificial
  Synthetic oligonucleotide
cgaagcgatggggggggtcactaggaacataggggacccgtggatccgtggga

SEQ ID NO: 367707 - DNA, 59 bp, Artificial
  Synthetic oligonucleotide
cgaagcgcaaggaacgcacgggttctcaaaatcatttacagagcatggcgttattatcg

SEQ ID NO: 367708 - DNA, 59 bp, Artificial
  Synthetic oligonucleotide
cgaagcgcctaagcgtgttgtagtcggcattccattcacctggggattgtgtaatgctt

SEQ ID NO: 367709 - DNA, 60 bp, Artificial
  Synthetic oligonucleotide
cgaagcgcgcgaagcgagaccacgcctaccagctgcgtcagcagtcaggtgacccttttg

SEQ ID NO: 367710 - DNA, 55 bp, Artificial
  Synthetic oligonucleotide
cgaagcggcttcaacttccgctatgagacctattggcggagtgccacccagttgg

SEQ ID NO: 367711 - DNA, 59 bp, Artificial
  Synthetic oligonucleotide
cgaagcggtcaacatggttcaacttcataaggcactcaagcaaatggttggtgcgaagt

SEQ ID NO: 367712 - DNA, 55 bp, Artificial
  Synthetic oligonucleotide
cgaagcggttttacgacacgcatttgatgcacccacgttgtatgttaaagcattg

SEQ ID NO: 367713 - DNA, 56 bp, Artificial
  Synthetic oligonucleotide
cgaagcgtcgtcacttacagggctacctacagtgcaaggggaaccgaacccttgca

SEQ ID NO: 367714 - DNA, 56 bp, Artificial
  Synthetic oligonucleotide
cgaagcgttgacggaattcgcggagtacatccccgaagacgcttccaggtgggtca

SEQ ID NO: 367715 - DNA, 53 bp, Artificial
  Synthetic oligonucleotide
cgaagcgttttccgtgggctaaagtggttggtttagtatactcacccctgaca

SEQ ID NO: 367716 - DNA, 60 bp, Artificial
  Synthetic oligonucleotide
cgaagctactgctgctgaagcagtgcccgctcaatgattgagtcccccgtgtccgtacga

SEQ ID NO: 367717 - DNA, 60 bp, Artificial
  Synthetic oligonucleotide
cgaagctagcctctgatggagtagcctgggctgtcaagctcagatctggtgggggttgga

SEQ ID NO: 367718 - DNA, 60 bp, Artificial
  Synthetic oligonucleotide
cgaagctagggctagacggagacaagcggaagagtctgtagatgacctcagaagagaata

SEQ ID NO: 367719 - DNA, 54 bp, Artificial
  Synthetic oligonucleotide
cgaagctcgacgcaaggaagccactcgacagtacggcgttaaagctgcacgagt

SEQ ID NO: 367720 - DNA, 60 bp, Artificial
  Synthetic oligonucleotide
cgaagctcgatgaaggccgctaccgcctcatcatgagcgtttccctcgtggatcaactgg

SEQ ID NO: 367721 - DNA, 60 bp, Artificial
  Synthetic oligonucleotide
cgaagctgcgaaagatggatccctggagttgctgtacagcatgcgagatagcatgcagaa

SEQ ID NO: 367722 - DNA, 55 bp, Artificial
  Synthetic oligonucleotide
cgaagcttatatgcctagacccctagaccagggtgacactagaccagcaactcta

SEQ ID NO: 367723 - DNA, 57 bp, Artificial
  Synthetic oligonucleotide
cgaagcttcactagtggcaccggtaatcgtgcacggtaatgcggaagtgggtcgtgc

SEQ ID NO: 367724 - DNA, 55 bp, Artificial
  Synthetic oligonucleotide
cgaagcttcctcgggatattaaattacgcaaggagttatataccacaaatgggga

SEQ ID NO: 367725 - DNA, 55 bp, Artificial
  Synthetic oligonucleotide
cgaagcttgacgctacggttttcgcccaaatagttaagctgagaaaagttgatac

SEQ ID NO: 367726 - DNA, 54 bp, Artificial
  Synthetic oligonucleotide
cgaagcttgggaaaactctcaatgttcctctgcccccgaaccctagtagggcca

SEQ ID NO: 367727 - DNA, 54 bp, Artificial
  Synthetic oligonucleotide
cgaagctttgttacggggagaggacgcgacttgtctcggactccttcggcttta

SEQ ID NO: 367728 - DNA, 60 bp, Artificial
  Synthetic oligonucleotide
cgaaggacacagtccatgggaattcaactggaccaacgcattatcgtgcttttcatggtg

SEQ ID NO: 367729 - DNA, 55 bp, Artificial
  Synthetic oligonucleotide
cgaaggacaggggtggcgactccttgcgcctattacggcctactcccaacaaaca

SEQ ID NO: 367730 - DNA, 53 bp, Artificial
  Synthetic oligonucleotide
cgaaggacgcaaccgccggatacgtactgttgtcgacgggcacaccttcgtta

SEQ ID NO: 367731 - DNA, 55 bp, Artificial
  Synthetic oligonucleotide
cgaaggacgtccgtactcttaccactgatgtgcccgccggtaacgcttggatccg

SEQ ID NO: 367732 - DNA, 57 bp, Artificial
  Synthetic oligonucleotide
cgaaggagaggacaactgtttactacaccctataagccagcatgggatggaggatac

SEQ ID NO: 367733 - DNA, 56 bp, Artificial
  Synthetic oligonucleotide
cgaaggagatggttctggacgcagttacaaatactgccgctgtcgctcgtacactt

SEQ ID NO: 367734 - DNA, 58 bp, Artificial
  Synthetic oligonucleotide
cgaaggagtggctaaattggatgatccacgattcaatggatgtgcaacccttaaaaat

SEQ ID NO: 367735 - DNA, 55 bp, Artificial
  Synthetic oligonucleotide
cgaaggatatgcgtgtaagatagtgagtggatggcttcttggcgcgtccattcca

SEQ ID NO: 367736 - DNA, 58 bp, Artificial
  Synthetic oligonucleotide
cgaaggatcttatttcttcggagacaatgcagaggagtatgacaattaaagaaaaata

SEQ ID NO: 367737 - DNA, 59 bp, Artificial
  Synthetic oligonucleotide
cgaaggatgcatattgtactgtaatggagcctagcaaccttgttttgtctaaactcaaa

SEQ ID NO: 367738 - DNA, 55 bp, Artificial
  Synthetic oligonucleotide
cgaaggcaacttgcaataagaagagtggaacaaggatgcttaaagcatagtgtaa

SEQ ID NO: 367739 - DNA, 55 bp, Artificial
  Synthetic oligonucleotide
cgaaggcagatggtggtaattatttgaagcctgttttaactacgggcagtgggtc

SEQ ID NO: 367740 - DNA, 55 bp, Artificial
  Synthetic oligonucleotide
cgaaggcaggctgatccaaaacagcataacaatagagagaatggtcctctccgca

SEQ ID NO: 367741 - DNA, 55 bp, Artificial
  Synthetic oligonucleotide
cgaaggcaggtccgaatgagttgatggagagtctcccagggaaaccagtgctaac

SEQ ID NO: 367742 - DNA, 52 bp, Artificial
  Synthetic oligonucleotide
cgaaggccctcactaacttcctcaaagcaacaggcgccaacggttcgcgtct

SEQ ID NO: 367743 - DNA, 55 bp, Artificial
  Synthetic oligonucleotide
cgaaggcgatgaatagctggaagacaaacttcagtacatggacattagaagtcga

SEQ ID NO: 367744 - DNA, 59 bp, Artificial
  Synthetic oligonucleotide
cgaaggcggaaagtattatgaacatgcccctatagaattaatatacgcttgtagatcag

SEQ ID NO: 367745 - DNA, 54 bp, Artificial
  Synthetic oligonucleotide
cgaaggcggtggactttgtacccgtcgagtccatggaaactaccatgcggtccc

SEQ ID NO: 367746 - DNA, 55 bp, Artificial
  Synthetic oligonucleotide
cgaaggcggtggatttcgtacccgttgagtccatggagactactatgcggtcgcc

SEQ ID NO: 367747 - DNA, 60 bp, Artificial
  Synthetic oligonucleotide
cgaaggctcctgcacgtgtaccttcagcctaagagtaggtacagaaatatgtgacaactg

SEQ ID NO: 367748 - DNA, 55 bp, Artificial
  Synthetic oligonucleotide
cgaaggctctgacttaccaaaatgttttatcctttgtcgagtctattcgggctcg

SEQ ID NO: 367749 - DNA, 60 bp, Artificial
  Synthetic oligonucleotide
cgaagggaaggggaaagttgaatgtgatatatcatcagattatgttgcgccaggaataga

SEQ ID NO: 367750 - DNA, 57 bp, Artificial
  Synthetic oligonucleotide
cgaagggaattgatcaaaaaatgagagttcttaatgcgtgctttagtgttaagagag

SEQ ID NO: 367751 - DNA, 55 bp, Artificial
  Synthetic oligonucleotide
cgaagggacacagtttgtattgatgcattcttgaactgtcgtcttaacgagctcg

SEQ ID NO: 367752 - DNA, 55 bp, Artificial
  Synthetic oligonucleotide
cgaagggagagatcgtactatggcctggacagtagtgaacagtatttgcaacacc

SEQ ID NO: 367753 - DNA, 57 bp, Artificial
  Synthetic oligonucleotide
cgaagggcagagacaatcttctaatctacctagtccggaaattaaatgatccaagta

SEQ ID NO: 367754 - DNA, 55 bp, Artificial
  Synthetic oligonucleotide
cgaagggcttccaaggtaaccagaacagccagtgtccgttcatcgtccaggggaa

SEQ ID NO: 367755 - DNA, 55 bp, Artificial
  Synthetic oligonucleotide
cgaaggggctatcttagcgagaaagctctcaaacgcctgcaagaaaaacctcttg

SEQ ID NO: 367756 - DNA, 54 bp, Artificial
  Synthetic oligonucleotide
cgaaggggttcgagctcgatgggtacacaaaatcctcgccaaggaatttaggga

SEQ ID NO: 367757 - DNA, 57 bp, Artificial
  Synthetic oligonucleotide
cgaagggtgacctttgtcgcaaatgataagaaaccaagcgacagtatcgcgagggtc

SEQ ID NO: 367758 - DNA, 56 bp, Artificial
  Synthetic oligonucleotide
cgaagggtgctactggatggtgtgggttagccgtcccgtgtgtgacgccagccttt

SEQ ID NO: 367759 - DNA, 54 bp, Artificial
  Synthetic oligonucleotide
cgaagggtggaattcgtaattttgctctgtcggcttttcaaggttgtctgggga

SEQ ID NO: 367760 - DNA, 55 bp, Artificial
  Synthetic oligonucleotide
cgaagggttgatcttatctttaaactttactgatcctatcactataaatcaaacc

SEQ ID NO: 367761 - DNA, 60 bp, Artificial
  Synthetic oligonucleotide
cgaaggtacatggttttataatcaatttgcatgtcatgtctatgtcatgccacataacat

SEQ ID NO: 367762 - DNA, 54 bp, Artificial
  Synthetic oligonucleotide
cgaaggtagaaattccacgcctattcaatgtgactatacccggcgttgtttcgg

SEQ ID NO: 367763 - DNA, 55 bp, Artificial
  Synthetic oligonucleotide
cgaaggtagcatagccgctctcttcaggttcgggatcggagtcctctagggtctc

SEQ ID NO: 367764 - DNA, 59 bp, Artificial
  Synthetic oligonucleotide
cgaaggtcattcatcaaacccgatgagtcgagcacctcggatactactttccgcagtcc

SEQ ID NO: 367765 - DNA, 52 bp, Artificial
  Synthetic oligonucleotide
cgaaggtcccgagtgaggcttatcccggggatcggcctccgtttcccccatg

SEQ ID NO: 367766 - DNA, 60 bp, Artificial
  Synthetic oligonucleotide
cgaaggtcctgggaatactggtatgatgaaatggggatgtcagtcagctacactaaatac

SEQ ID NO: 367767 - DNA, 55 bp, Artificial
  Synthetic oligonucleotide
cgaaggtctacataaaccatccattcatgtacatgattaaagataacaccggacg

SEQ ID NO: 367768 - DNA, 55 bp, Artificial
  Synthetic oligonucleotide
cgaaggtctgacgtaatcaaagttgcggaggtcgtcaatagctcccattgccgtc

SEQ ID NO: 367769 - DNA, 60 bp, Artificial
  Synthetic oligonucleotide
cgaaggtcttgctgctcaaaccgatatgacttttgagcaggccaggaatgcttatcttgg

SEQ ID NO: 367770 - DNA, 52 bp, Artificial
  Synthetic oligonucleotide
cgaaggtgatgtatgagtccattccttctcatcttcgtggagttgaaattga

SEQ ID NO: 367771 - DNA, 55 bp, Artificial
  Synthetic oligonucleotide
cgaaggtgatgtcactagcaaatccgcataaccattctgtgcagagcatttagct

SEQ ID NO: 367772 - DNA, 55 bp, Artificial
  Synthetic oligonucleotide
cgaaggtgcgttgaatacacaatcgggcgaatagcgtccgtgtatgagagcgacg

SEQ ID NO: 367773 - DNA, 57 bp, Artificial
  Synthetic oligonucleotide
cgaaggtgtatttatagcgaggagctgttctaaggcgtcttctttggttactgaaca

SEQ ID NO: 367774 - DNA, 57 bp, Artificial
  Synthetic oligonucleotide
cgaaggttcaaatgctgccactacaaggttttggtccaaccgagatatctgggacga

SEQ ID NO: 367775 - DNA, 59 bp, Artificial
  Synthetic oligonucleotide
cgaaggttgcattataggatccggtggtgctgccgtctatgctcgggtctaccgtgggc

SEQ ID NO: 367776 - DNA, 55 bp, Artificial
  Synthetic oligonucleotide
cgaaggttttacgcatggttgattggacaagccccatactcagggttggcagaaa

SEQ ID NO: 367777 - DNA, 55 bp, Artificial
  Synthetic oligonucleotide
cgaagtaacgttgcctaaacttaaagctacaactcttatcagctatgatgtagcg

SEQ ID NO: 367778 - DNA, 55 bp, Artificial
  Synthetic oligonucleotide
cgaagtaccacagacgtggaatacgccgttggcggagggggaggtgccgacggca

SEQ ID NO: 367779 - DNA, 59 bp, Artificial
  Synthetic oligonucleotide
cgaagtacggaaatagcattcttgtatatgtcgctagctacaacgacgtcgattcttta

SEQ ID NO: 367780 - DNA, 57 bp, Artificial
  Synthetic oligonucleotide
cgaagtagaacgcagtctccagaaagagttggggatttcgcgtgagggagtggccga

SEQ ID NO: 367781 - DNA, 55 bp, Artificial
  Synthetic oligonucleotide
cgaagtagccagttggctgctacgagacgagacgtcgcctattcctgataagttc

SEQ ID NO: 367782 - DNA, 51 bp, Artificial
  Synthetic oligonucleotide
cgaagtagggcaatcacccaatgtgtaccaagcaaggtttgaagcagtggc

SEQ ID NO: 367783 - DNA, 54 bp, Artificial
  Synthetic oligonucleotide
cgaagtataaaacgctttacccctggtggttggcgcctaggggcggactctgca

SEQ ID NO: 367784 - DNA, 59 bp, Artificial
  Synthetic oligonucleotide
cgaagtatattaagcagctcgtgaggtatttggtagaatacctgaccagaagacgtgta

SEQ ID NO: 367785 - DNA, 60 bp, Artificial
  Synthetic oligonucleotide
cgaagtatgagatgaggctttcgtgcggccatagcactggacgtggagctgcatacagtg

SEQ ID NO: 367786 - DNA, 55 bp, Artificial
  Synthetic oligonucleotide
cgaagtatggtcatataatgcagaattcctcgtggcagtggagaatcaacacact

SEQ ID NO: 367787 - DNA, 56 bp, Artificial
  Synthetic oligonucleotide
cgaagtatttcttcgttgtcttacccgtcatgcggttcgtcaagcatggaaagtgg

SEQ ID NO: 367788 - DNA, 54 bp, Artificial
  Synthetic oligonucleotide
cgaagtcaagcacgaaggtaaggtaacaggttacgcgtgcctggtgggggacaa

SEQ ID NO: 367789 - DNA, 60 bp, Artificial
  Synthetic oligonucleotide
cgaagtcatggataaagattcacagagtctgctatactctgactcttcaaaaagtgaatt

SEQ ID NO: 367790 - DNA, 55 bp, Artificial
  Synthetic oligonucleotide
cgaagtcattcgtattgtagaaccttcctatgtaggcagtaacaacgagtacaga

SEQ ID NO: 367791 - DNA, 56 bp, Artificial
  Synthetic oligonucleotide
cgaagtcctcaatctggggaacaacatcttcgggtaaagcagtagtagatagttat

SEQ ID NO: 367792 - DNA, 58 bp, Artificial
  Synthetic oligonucleotide
cgaagtcgccggggagaatggaccaaactcctcacgtcgatctcttatcgacgctgaa

SEQ ID NO: 367793 - DNA, 55 bp, Artificial
  Synthetic oligonucleotide
cgaagtcgtgtgtaggtaagggtatttatagaagcgcgtgtactatatacgcgcc

SEQ ID NO: 367794 - DNA, 52 bp, Artificial
  Synthetic oligonucleotide
cgaagtgagaaccgcaggagaaaggtttgaacagagtgttaaaccgaaaacc

SEQ ID NO: 367795 - DNA, 57 bp, Artificial
  Synthetic oligonucleotide
cgaagtgcccagataatgtcccacccaaaacaagggaagacccatatggcctctata

SEQ ID NO: 367796 - DNA, 60 bp, Artificial
  Synthetic oligonucleotide
cgaagtgcgattgagacatgtaagatcacacagagtgtttcaaatcattgaatttctgca

SEQ ID NO: 367797 - DNA, 54 bp, Artificial
  Synthetic oligonucleotide
cgaagtgcttacgggcaaccttcaaacattgaaaatacgagtacacgaggggta

SEQ ID NO: 367798 - DNA, 55 bp, Artificial
  Synthetic oligonucleotide
cgaagtgcttgacccaccaggacttgtaaccttactatccttagtgactgcacgc

SEQ ID NO: 367799 - DNA, 55 bp, Artificial
  Synthetic oligonucleotide
cgaagtggaggtaataggaatttgaaccagtcgcgatgtaaggttgatgtctgct

SEQ ID NO: 367800 - DNA, 55 bp, Artificial
  Synthetic oligonucleotide
cgaagtgggacctggttctatacacgtggtgggtctgcttaatgttagctaccag

SEQ ID NO: 367801 - DNA, 55 bp, Artificial
  Synthetic oligonucleotide
cgaagtggggcaacacaaatgtatctcatcaaggaaagaataagcgtagccgaca

SEQ ID NO: 367802 - DNA, 57 bp, Artificial
  Synthetic oligonucleotide
cgaagtggggccaatgctgatgagcagtatgtggtgtatgcatcactggctgatgcg

SEQ ID NO: 367803 - DNA, 57 bp, Artificial
  Synthetic oligonucleotide
cgaagtgggggaaacaccaaccaacaaagagcatctgcggggcaagtcagtgttcaa

SEQ ID NO: 367804 - DNA, 57 bp, Artificial
  Synthetic oligonucleotide
cgaagtgggtgcttatctaaaggactatagggctctggtgctcgactgcttacgggg

SEQ ID NO: 367805 - DNA, 53 bp, Artificial
  Synthetic oligonucleotide
cgaagtggtggcatcttacacacagatgtcctgccgatgtctgtgagctgatt

SEQ ID NO: 367806 - DNA, 56 bp, Artificial
  Synthetic oligonucleotide
cgaagtgtacccacagcattatacttttataagcatgctatgttaacagagagttc

SEQ ID NO: 367807 - DNA, 55 bp, Artificial
  Synthetic oligonucleotide
cgaagtgtcaactccgtccggaacaagtgcgaatcgtcttaaccgtaccacgtga

SEQ ID NO: 367808 - DNA, 55 bp, Artificial
  Synthetic oligonucleotide
cgaagtgtggggggaccgggctgtggctatgcaggggggcgcaacttctaaggaa

SEQ ID NO: 367809 - DNA, 56 bp, Artificial
  Synthetic oligonucleotide
cgaagttagcctgggaggatatagagttggcgggtgaccgtgacactactttctcc

SEQ ID NO: 367810 - DNA, 49 bp, Artificial
  Synthetic oligonucleotide
cgaagttaggttaacccacactataggggaggggacctgaaaagttacc

SEQ ID NO: 367811 - DNA, 60 bp, Artificial
  Synthetic oligonucleotide
cgaagttatggtttcgaaacatgcaattatgtcactgatgagaacgacatattcgaagct

SEQ ID NO: 367812 - DNA, 55 bp, Artificial
  Synthetic oligonucleotide
cgaagttctaggagcgcatttaagatattggccaatgctttcactcatccaaaag

SEQ ID NO: 367813 - DNA, 60 bp, Artificial
  Synthetic oligonucleotide
cgaagttctcaatcagaagatgcagaaatccttcgtccgacgcggcaaccaagtacgcgc

SEQ ID NO: 367814 - DNA, 55 bp, Artificial
  Synthetic oligonucleotide
cgaagttctcgaaacgaatcttggaataagtagttaggattcacacctaaacgca

SEQ ID NO: 367815 - DNA, 57 bp, Artificial
  Synthetic oligonucleotide
cgaagttggaaaggtgcaaatgcagtctattagacatggtgactttcttaacgttaa

SEQ ID NO: 367816 - DNA, 56 bp, Artificial
  Synthetic oligonucleotide
cgaagtttacttctcctaatcctttcgaagtcataaccacagccgatatatcggaa

SEQ ID NO: 367817 - DNA, 55 bp, Artificial
  Synthetic oligonucleotide
cgaagtttagcgactggtgggatcggcaaatccaaatgggacacacacttcccca

SEQ ID NO: 367818 - DNA, 53 bp, Artificial
  Synthetic oligonucleotide
cgaagtttatctttaaaacgacagcgcttcgttatatgatgctagcgaaagtt

SEQ ID NO: 367819 - DNA, 55 bp, Artificial
  Synthetic oligonucleotide
cgaataaaccctagaattgaaatctagatgtccactcagatagttatgtgggcct

SEQ ID NO: 367820 - DNA, 55 bp, Artificial
  Synthetic oligonucleotide
cgaataaactttatgcggtaatgaaaagtggtggaagagtgtatacgtatgaagg

SEQ ID NO: 367821 - DNA, 54 bp, Artificial
  Synthetic oligonucleotide
cgaataaatcgaaaattcagtacgataaaaattgacagcgagaaagggttgacg

SEQ ID NO: 367822 - DNA, 59 bp, Artificial
  Synthetic oligonucleotide
cgaataacaattctaatagccagtgcaatgtacgtcggcgccaacatttgtggaatttc

SEQ ID NO: 367823 - DNA, 55 bp, Artificial
  Synthetic oligonucleotide
cgaataactttaaaactattacgtcgtgtcatttagaggatttgcgtgaattcta

SEQ ID NO: 367824 - DNA, 60 bp, Artificial
  Synthetic oligonucleotide
cgaataagacgagacatgtgatcacatacacaggaatcggcgattctaatccagggggtt

SEQ ID NO: 367825 - DNA, 60 bp, Artificial
  Synthetic oligonucleotide
cgaataagagacaagtcagagttatggttcatgtccacacgaggtatcaaatgcgaaggc

SEQ ID NO: 367826 - DNA, 59 bp, Artificial
  Synthetic oligonucleotide
cgaataagaggatgttgctatcaagtttttatatacaggtgcggcattaacaaggcgaa

SEQ ID NO: 367827 - DNA, 55 bp, Artificial
  Synthetic oligonucleotide
cgaataagcagagctgagacagcagcagagggagtaggagcagcgtctcaagact

SEQ ID NO: 367828 - DNA, 57 bp, Artificial
  Synthetic oligonucleotide
cgaataagttttggaaaatagacactcataaggttatcgatgccgaaacttctatca

SEQ ID NO: 367829 - DNA, 55 bp, Artificial
  Synthetic oligonucleotide
cgaataattaggtagaacaacaaaggaggtggttgaattacgatcgtatcaagat

SEQ ID NO: 367830 - DNA, 59 bp, Artificial
  Synthetic oligonucleotide
cgaataattgtataagctacgatcctagagacttaagttatagcagcttgaccacccac

SEQ ID NO: 367831 - DNA, 51 bp, Artificial
  Synthetic oligonucleotide
cgaatacagacatcatcacagtacggtttagacccctccgggaacgttaag

SEQ ID NO: 367832 - DNA, 56 bp, Artificial
  Synthetic oligonucleotide
cgaatacatatttaataccaactacgtcttgtgtggagaactagttgtttaactca

SEQ ID NO: 367833 - DNA, 57 bp, Artificial
  Synthetic oligonucleotide
cgaatacattaaactgcctacatcacactcaagatcttatagaaagatagaagcgac

SEQ ID NO: 367834 - DNA, 52 bp, Artificial
  Synthetic oligonucleotide
cgaatacctagaatacgaccctacttttgtttgggacgtgaaggaatgtacc

SEQ ID NO: 367835 - DNA, 52 bp, Artificial
  Synthetic oligonucleotide
cgaatacgagtttgtagttttagaacacgacttgtccacggtgcacgtcgtt

SEQ ID NO: 367836 - DNA, 60 bp, Artificial
  Synthetic oligonucleotide
cgaatactacgccgttagcagagaagtcgaattccggtgaggaatcaatgcgcttggtca

SEQ ID NO: 367837 - DNA, 55 bp, Artificial
  Synthetic oligonucleotide
cgaatactggcaatgtatatctaccaccgtcacgtcctgttccaaaagtactgcc

SEQ ID NO: 367838 - DNA, 55 bp, Artificial
  Synthetic oligonucleotide
cgaatagactaacgacagcaaatgcttcatcagttcgagccattacagttctgac

SEQ ID NO: 367839 - DNA, 55 bp, Artificial
  Synthetic oligonucleotide
cgaatagataagggtgagcctgtagttgaaatggaagataggcaaaaggcgatgc

SEQ ID NO: 367840 - DNA, 58 bp, Artificial
  Synthetic oligonucleotide
cgaatagatatttgcaacgcttggataaccgtttgagggcctatgaaatggccttgaa

SEQ ID NO: 367841 - DNA, 55 bp, Artificial
  Synthetic oligonucleotide
cgaatagcatgtcagatgcggcttcttcaattagcaggtccacatccataagatc

SEQ ID NO: 367842 - DNA, 60 bp, Artificial
  Synthetic oligonucleotide
cgaataggcgttggttcgtgcactggaatttgccttcgaattgcagaagcacatggagat

SEQ ID NO: 367843 - DNA, 51 bp, Artificial
  Synthetic oligonucleotide
cgaataggttaaggttcaaagaaatggttacgcaaaccgaaggactgaact

SEQ ID NO: 367844 - DNA, 60 bp, Artificial
  Synthetic oligonucleotide
cgaatagtcataacaagaccgacgaggatgctaagctatcgacacagcggattcacgaag

SEQ ID NO: 367845 - DNA, 60 bp, Artificial
  Synthetic oligonucleotide
cgaatagtgtcctcaatgccgcctacatatgttatgctgtcggaatacctgccttcaaac

SEQ ID NO: 367846 - DNA, 53 bp, Artificial
  Synthetic oligonucleotide
cgaatataagcaagaacgcccttttagtttactattgttggatgtctgatacc

SEQ ID NO: 367847 - DNA, 58 bp, Artificial
  Synthetic oligonucleotide
cgaatataagtaataatgatcgaatgcaggaaaaggacgatgaaaaacgagaatcgaa

SEQ ID NO: 367848 - DNA, 57 bp, Artificial
  Synthetic oligonucleotide
cgaatatactgaacaaatcgataccaccgcccctcgagttcgcactcctactgttcc

SEQ ID NO: 367849 - DNA, 60 bp, Artificial
  Synthetic oligonucleotide
cgaatatgatgcctgcacaattcctaatgattgtggatctctggtggttgctaaggtcgg

SEQ ID NO: 367850 - DNA, 55 bp, Artificial
  Synthetic oligonucleotide
cgaatatgttgttgagggatgttggtgaaatcccgaacttcaacgtacgttggga

SEQ ID NO: 367851 - DNA, 53 bp, Artificial
  Synthetic oligonucleotide
cgaatattaatcgcggattttacagttgagttttaacagcgctgacaggatga

SEQ ID NO: 367852 - DNA, 55 bp, Artificial
  Synthetic oligonucleotide
cgaatattagtaacgagtctcagttaactgacgtattggatgatgcactaacgag

SEQ ID NO: 367853 - DNA, 55 bp, Artificial
  Synthetic oligonucleotide
cgaatattgggcttgtgagtcagtcccaagcgaaacgtttgcccatcccattgag

SEQ ID NO: 367854 - DNA, 55 bp, Artificial
  Synthetic oligonucleotide
cgaatatttgtggtcagttgaaattcctcccgagaaaccaccaggcccttccaca

SEQ ID NO: 367855 - DNA, 55 bp, Artificial
  Synthetic oligonucleotide
cgaatattttggggtcagtggtgttcctagatcttgaacaggaggcaaacacagc

SEQ ID NO: 367856 - DNA, 55 bp, Artificial
  Synthetic oligonucleotide
cgaatcaaaagcgaaaatctgttaccatacctttggatgttgacgaggcatggga

SEQ ID NO: 367857 - DNA, 51 bp, Artificial
  Synthetic oligonucleotide
cgaatcaacatctatgtctagaggcgtgcgagactataaccctatatccag

SEQ ID NO: 367858 - DNA, 55 bp, Artificial
  Synthetic oligonucleotide
cgaatcaactgtatccactgccttggccgaacttgccaccaaaagtttcggcagc

SEQ ID NO: 367859 - DNA, 59 bp, Artificial
  Synthetic oligonucleotide
cgaatcaccctcaattacaatactaatcggtctatctggccgcgcagcggaactccgac

SEQ ID NO: 367860 - DNA, 60 bp, Artificial
  Synthetic oligonucleotide
cgaatcacgaaattatatctctggaactatgtacaaaatcgggatcatgacaagaagctg

SEQ ID NO: 367861 - DNA, 55 bp, Artificial
  Synthetic oligonucleotide
cgaatcacgagacggacgatccattgagtggttctaccacgaggatgcagcgagt

SEQ ID NO: 367862 - DNA, 58 bp, Artificial
  Synthetic oligonucleotide
cgaatcagctgacctaataaagagaatatctactactcatcacatattcaaggatcag

SEQ ID NO: 367863 - DNA, 55 bp, Artificial
  Synthetic oligonucleotide
cgaatcatggcaccaacataccctgaggccactcagtatgaaggacgtgctcaag

SEQ ID NO: 367864 - DNA, 57 bp, Artificial
  Synthetic oligonucleotide
cgaatcattcgaaatggataggaataagcatcgttaactaaccacaccaggcaaaaa

SEQ ID NO: 367865 - DNA, 55 bp, Artificial
  Synthetic oligonucleotide
cgaatccagactgtaggaccattctaaaagcattaggaccaggggctacattaga

SEQ ID NO: 367866 - DNA, 54 bp, Artificial
  Synthetic oligonucleotide
cgaatccagttcgggcaatctcgtggaatatattagctcccgagatatggtttc

SEQ ID NO: 367867 - DNA, 60 bp, Artificial
  Synthetic oligonucleotide
cgaatcccacctttctcttctgggttgctagcaatctctacaaccacacgaagcgccatg

SEQ ID NO: 367868 - DNA, 55 bp, Artificial
  Synthetic oligonucleotide
cgaatccgaaagtatcccgggtgtagcactggtaagtgtaactgccaactccaaa

SEQ ID NO: 367869 - DNA, 55 bp, Artificial
  Synthetic oligonucleotide
cgaatccgagagtaggagggctggatatagctggcttcacggttggcgtttctgt

SEQ ID NO: 367870 - DNA, 60 bp, Artificial
  Synthetic oligonucleotide
cgaatccgtatccgtgtctacgcggtgcattgatagcggcggagtgtgaattaggtgatg

SEQ ID NO: 367871 - DNA, 59 bp, Artificial
  Synthetic oligonucleotide
cgaatcctcctttttagggtttgatcttgaattagaatatgtgcattatgaggatttga

SEQ ID NO: 367872 - DNA, 59 bp, Artificial
  Synthetic oligonucleotide
cgaatcctggtttatgtcgtgagattaattataaacagcgatttgcctggtgtcttctg

SEQ ID NO: 367873 - DNA, 59 bp, Artificial
  Synthetic oligonucleotide
cgaatcgacccactcctccaaagcgtgcagttgtgcgtgctcaatcgaacccgaataag

SEQ ID NO: 367874 - DNA, 51 bp, Artificial
  Synthetic oligonucleotide
cgaatcgattcgttcccgagtggtcgtaaacggtgtctcagttcgtagtga

SEQ ID NO: 367875 - DNA, 60 bp, Artificial
  Synthetic oligonucleotide
cgaatcggagcactatgaaccacaggtacttcgcaatggttgcgtaattgaatccgtagc

SEQ ID NO: 367876 - DNA, 59 bp, Artificial
  Synthetic oligonucleotide
cgaatcgtgcgatccccgcatcatccaaccacggactccaagattcgtaacgagattcg

SEQ ID NO: 367877 - DNA, 60 bp, Artificial
  Synthetic oligonucleotide
cgaatctaaatacggtacgaaagttgatgtttacagagatgaggttccagcacagatcat

SEQ ID NO: 367878 - DNA, 53 bp, Artificial
  Synthetic oligonucleotide
cgaatctatgaagaacaagcatcgcaactccaaaagaacaccaagtccactcc

SEQ ID NO: 367879 - DNA, 60 bp, Artificial
  Synthetic oligonucleotide
cgaatctcgacttgacctccaaatgcgacaatctacttgtgtacgtggcaagttataatg

SEQ ID NO: 367880 - DNA, 59 bp, Artificial
  Synthetic oligonucleotide
cgaatctgaaatcggtaggcaccgacttcagtgacgcacgatctggcaaatcgttaaat

SEQ ID NO: 367881 - DNA, 51 bp, Artificial
  Synthetic oligonucleotide
cgaatctgcatgaactacatggagtctaactcgttcagaccaactctacat

SEQ ID NO: 367882 - DNA, 60 bp, Artificial
  Synthetic oligonucleotide
cgaatctgcatggtggggtccaacttccaaactaagagcataacgagtgtagtctctgag

SEQ ID NO: 367883 - DNA, 55 bp, Artificial
  Synthetic oligonucleotide
cgaatctgcctaagatactgcaactgcatcatggacgaaataaccttaggacacc

SEQ ID NO: 367884 - DNA, 55 bp, Artificial
  Synthetic oligonucleotide
cgaatcttccggaggcacggaatcgggatcggagaggctttacagctaggcgtca

SEQ ID NO: 367885 - DNA, 58 bp, Artificial
  Synthetic oligonucleotide
cgaatcttctgcaatgccggccagagaacccctactttcacatagggggcagtattac

SEQ ID NO: 367886 - DNA, 55 bp, Artificial
  Synthetic oligonucleotide
cgaatcttgtctgggacgacactccttgccatctgggctcatgtggcactctacc

SEQ ID NO: 367887 - DNA, 58 bp, Artificial
  Synthetic oligonucleotide
cgaatgaaactctgttagcgaatgtgaccgcagtgcgtcaagaatatgctataccagt

SEQ ID NO: 367888 - DNA, 55 bp, Artificial
  Synthetic oligonucleotide
cgaatgaacaaaacactactacagctcctacaagttcagatctggaggttcttgg

SEQ ID NO: 367889 - DNA, 55 bp, Artificial
  Synthetic oligonucleotide
cgaatgaactccatgagttcgaatggttggatagggatcgtggaggactataggg

SEQ ID NO: 367890 - DNA, 55 bp, Artificial
  Synthetic oligonucleotide
cgaatgacatagcgatagttaatgactacacatcggcttacatgcagggtaacgc

SEQ ID NO: 367891 - DNA, 59 bp, Artificial
  Synthetic oligonucleotide
cgaatgagattgcgagaatgagcggagagacagggacgtggggaccagaccgccaaccg

SEQ ID NO: 367892 - DNA, 55 bp, Artificial
  Synthetic oligonucleotide
cgaatgataaaacggggaatcaatgaccggaatttctggagaggcgaaaatggac

SEQ ID NO: 367893 - DNA, 60 bp, Artificial
  Synthetic oligonucleotide
cgaatgatccgaatgccggttactctcatgaccttaaggattatctgaagtatgtggaaa

SEQ ID NO: 367894 - DNA, 53 bp, Artificial
  Synthetic oligonucleotide
cgaatgatctaaggactgagcttcacatccgtcgttgagcgccgacatgtgct

SEQ ID NO: 367895 - DNA, 51 bp, Artificial
  Synthetic oligonucleotide
cgaatgatgcgcgtaaactggaaaaaatggtggcaagtattctatactgta

SEQ ID NO: 367896 - DNA, 55 bp, Artificial
  Synthetic oligonucleotide
cgaatgatgctgctagatgtatgatcgatagagcctcgaagatagctgaagcaat

SEQ ID NO: 367897 - DNA, 58 bp, Artificial
  Synthetic oligonucleotide
cgaatgccactcaacagaccccaccacagttttgggcatagggacagtcttggaccag

SEQ ID NO: 367898 - DNA, 53 bp, Artificial
  Synthetic oligonucleotide
cgaatgccctgtcgaggaaggggttcttaaaggaccaaccgagaggttggcaa

SEQ ID NO: 367899 - DNA, 60 bp, Artificial
  Synthetic oligonucleotide
cgaatgcgagagatatatttgatcgcttatctcaacttatcgagaaaggaaaagcaatac

SEQ ID NO: 367900 - DNA, 57 bp, Artificial
  Synthetic oligonucleotide
cgaatgcgatttcccgtatcatggctggcttcgtcccccacgaaggcgacaacttta

SEQ ID NO: 367901 - DNA, 60 bp, Artificial
  Synthetic oligonucleotide
cgaatgctaagttgatcgaatttgcaagacgatactctgatgaaacaggcgaagctcaca

SEQ ID NO: 367902 - DNA, 55 bp, Artificial
  Synthetic oligonucleotide
cgaatgctagttgccgcaggaaaagattctgaggcagcgtacttccgcagcatgc

SEQ ID NO: 367903 - DNA, 55 bp, Artificial
  Synthetic oligonucleotide
cgaatgctatgacgtcatcgcgtcgggtaaattcggattcgttcggctccagaaa

SEQ ID NO: 367904 - DNA, 52 bp, Artificial
  Synthetic oligonucleotide
cgaatgctcctgacgccggaacgtccgcgcttgcgcgcgtccgaacctcact

SEQ ID NO: 367905 - DNA, 57 bp, Artificial
  Synthetic oligonucleotide
cgaatgctgtattatgtacggtctcgaaacaattcgaggttccaaccaaatactaga

SEQ ID NO: 367906 - DNA, 55 bp, Artificial
  Synthetic oligonucleotide
cgaatgcttaggccgactgtgcggattctaagctttccgtaacttggtcttaccc

SEQ ID NO: 367907 - DNA, 50 bp, Artificial
  Synthetic oligonucleotide
cgaatgcttggccatgtgtcacatgtcgcacgaacaggcgcttgctcgca

SEQ ID NO: 367908 - DNA, 60 bp, Artificial
  Synthetic oligonucleotide
cgaatggaaattcgcaccatatctttgcccggtcgtggttaccgatgagcaacaatgatg

SEQ ID NO: 367909 - DNA, 55 bp, Artificial
  Synthetic oligonucleotide
cgaatggactccaaggttaggcgcgttgttgcgagtggattcggtgagcgagcaa

SEQ ID NO: 367910 - DNA, 55 bp, Artificial
  Synthetic oligonucleotide
cgaatggatgaccactgatgatatgcttcgggtttggaatgacgtgtgggtgcac

SEQ ID NO: 367911 - DNA, 55 bp, Artificial
  Synthetic oligonucleotide
cgaatggctgagtttactgcgtcagccggactggtgacaggacgtgcgaacggag

SEQ ID NO: 367912 - DNA, 57 bp, Artificial
  Synthetic oligonucleotide
cgaatgggctggggtatcactctcgatttatgaacagggtggcccgaactccttcgc

SEQ ID NO: 367913 - DNA, 57 bp, Artificial
  Synthetic oligonucleotide
cgaatgggttctgacgagaatcagaatgacccgcaggcagtgatacgttgcggaact

SEQ ID NO: 367914 - DNA, 55 bp, Artificial
  Synthetic oligonucleotide
cgaatggtctaacagctaatgaatcaggaaggttgatagatttcctcaaagatgt

SEQ ID NO: 367915 - DNA, 55 bp, Artificial
  Synthetic oligonucleotide
cgaatggtttaaagtccacctaccccaatgcgaaatggaaggtgtgcgcgctaga

SEQ ID NO: 367916 - DNA, 60 bp, Artificial
  Synthetic oligonucleotide
cgaatgtaatgaagaagtttaagagatcgaaattagctagctcagtgtccacactaacag

SEQ ID NO: 367917 - DNA, 60 bp, Artificial
  Synthetic oligonucleotide
cgaatgtatgacacagtggtacaatcatttactaatgccaataacgttacaatccctatc

SEQ ID NO: 367918 - DNA, 55 bp, Artificial
  Synthetic oligonucleotide
cgaatgtcactcagtggacgccacctcgattctgggcatagggaccgtcttggac

SEQ ID NO: 367919 - DNA, 57 bp, Artificial
  Synthetic oligonucleotide
cgaatgtcataatttacgagtcgcattaacaccgagatatgattacactggaacagt

SEQ ID NO: 367920 - DNA, 55 bp, Artificial
  Synthetic oligonucleotide
cgaatgtgacgcaattcgtgcagcattatggagattatcggaacattgtttcaca

SEQ ID NO: 367921 - DNA, 55 bp, Artificial
  Synthetic oligonucleotide
cgaatgtgacggctaacgatcatcccttggtattcttctcacccagtgcgctccg

SEQ ID NO: 367922 - DNA, 53 bp, Artificial
  Synthetic oligonucleotide
cgaatgtggcgaacacttacaccgtccgaaacataccaatgtttaactttacc

SEQ ID NO: 367923 - DNA, 59 bp, Artificial
  Synthetic oligonucleotide
cgaatgttaactggccaaattgtggagactgagactaatgatcttgcggaacgttttga

SEQ ID NO: 367924 - DNA, 52 bp, Artificial
  Synthetic oligonucleotide
cgaatgttccccttatttaaagggttatacagtaggatcctacggcacttcg

SEQ ID NO: 367925 - DNA, 55 bp, Artificial
  Synthetic oligonucleotide
cgaatgttttcgtggagttcaatgcaaggtagtattgcaccagcaatggtggacg

SEQ ID NO: 367926 - DNA, 53 bp, Artificial
  Synthetic oligonucleotide
cgaattaaacccggttacacccataataacagatcttttcgaagtccaattca

SEQ ID NO: 367927 - DNA, 57 bp, Artificial
  Synthetic oligonucleotide
cgaattaataaggaaacgctttggaggcatgttgaccaagtgagaggacccgattga

SEQ ID NO: 367928 - DNA, 60 bp, Artificial
  Synthetic oligonucleotide
cgaattaatcaaaattgagtggaatatagagagattgctaatatgattattgttcctatg

SEQ ID NO: 367929 - DNA, 57 bp, Artificial
  Synthetic oligonucleotide
cgaattaattttctttcccatcttccgtagcccacatgtgagaaatccacatctttc

SEQ ID NO: 367930 - DNA, 54 bp, Artificial
  Synthetic oligonucleotide
cgaattacactcgcatcgaaaatactctcgacacaatcataaatggcgatttca

SEQ ID NO: 367931 - DNA, 59 bp, Artificial
  Synthetic oligonucleotide
cgaattacagccatcttcagttgacagaatgcagcagtgactattgtgctggttatgct

SEQ ID NO: 367932 - DNA, 56 bp, Artificial
  Synthetic oligonucleotide
cgaattactctgtccaattatccgatccccgtctttccacgtgtctatccaccgtg

SEQ ID NO: 367933 - DNA, 51 bp, Artificial
  Synthetic oligonucleotide
cgaattagacccagggtacttcaagggtattttaccagggactgatccgaa

SEQ ID NO: 367934 - DNA, 51 bp, Artificial
  Synthetic oligonucleotide
cgaattagccattccaagtcactacgtgagagaagatcgtattctatcata

SEQ ID NO: 367935 - DNA, 55 bp, Artificial
  Synthetic oligonucleotide
cgaattaggttatagcggttattttatgtcgccgcattggtgttccgatcttagt

SEQ ID NO: 367936 - DNA, 59 bp, Artificial
  Synthetic oligonucleotide
cgaattagttactcactactatcatcggtatcccctaacgacatctataggagtgtcca

SEQ ID NO: 367937 - DNA, 59 bp, Artificial
  Synthetic oligonucleotide
cgaattatatgtcacttatatctggcatgtggctattgactgttataccaaatgacatg

SEQ ID NO: 367938 - DNA, 55 bp, Artificial
  Synthetic oligonucleotide
cgaattatctgctgtcgtggaagcaagtattagaagagctgcaggacattgagag

SEQ ID NO: 367939 - DNA, 59 bp, Artificial
  Synthetic oligonucleotide
cgaattcagaggtggttctacgaaagtggaccacagcgtgtccgaacatatatgaaagc

SEQ ID NO: 367940 - DNA, 55 bp, Artificial
  Synthetic oligonucleotide
cgaattcagcggctcgagttactcttgaaccagttaaatggagttagaggaatcg

SEQ ID NO: 367941 - DNA, 55 bp, Artificial
  Synthetic oligonucleotide
cgaattccaaacaaatgggggatccaattccagatttgaaaggcaaggctacgac

SEQ ID NO: 367942 - DNA, 60 bp, Artificial
  Synthetic oligonucleotide
cgaattccaaaccatggtgataggcacctagagacatcaaccacttgataacccatacca

SEQ ID NO: 367943 - DNA, 55 bp, Artificial
  Synthetic oligonucleotide
cgaattccaacacggacgcgcctcaaaagagccttcaagttggtgcctcagcagt

SEQ ID NO: 367944 - DNA, 54 bp, Artificial
  Synthetic oligonucleotide
cgaattccttgctggccccaaccccgaagtccgaatagccaaattctgcgaccc

SEQ ID NO: 367945 - DNA, 55 bp, Artificial
  Synthetic oligonucleotide
cgaattcgattaaaattatgtatgcgcatcgtgcaaactcgttgattgggcgtgc

SEQ ID NO: 367946 - DNA, 57 bp, Artificial
  Synthetic oligonucleotide
cgaattcgcgttggaaaaacacctctcacttgccgctcttcacacccatcaatttaa

SEQ ID NO: 367947 - DNA, 55 bp, Artificial
  Synthetic oligonucleotide
cgaattcgctgcgtcagcctacggattagcagaggattaagggattatgtaaacg

SEQ ID NO: 367948 - DNA, 50 bp, Artificial
  Synthetic oligonucleotide
cgaattcgggaaagcaaaagggagccgagccatatggtacatgtggctgg

SEQ ID NO: 367949 - DNA, 60 bp, Artificial
  Synthetic oligonucleotide
cgaattcggtgtctacattaactgactcactgtcagatgcagcgtcgtctgtatcaagga

SEQ ID NO: 367950 - DNA, 52 bp, Artificial
  Synthetic oligonucleotide
cgaattctaatttgggttccaaaaacttttcgaaacattttatctgatcagt

SEQ ID NO: 367951 - DNA, 57 bp, Artificial
  Synthetic oligonucleotide
cgaattctcgaacacgcctgattctttggtgttgattaatccaacatacacgatgac

SEQ ID NO: 367952 - DNA, 58 bp, Artificial
  Synthetic oligonucleotide
cgaattctcgtttcgcggagatttcatccatatggggggagaccgtggattgccagtc

SEQ ID NO: 367953 - DNA, 55 bp, Artificial
  Synthetic oligonucleotide
cgaattgaacctgtatgcctcctgattcatgggacagccggtacaggcaaatccc

SEQ ID NO: 367954 - DNA, 59 bp, Artificial
  Synthetic oligonucleotide
cgaattgacgcacgaattgacttcgagtctggaaggattaagaaagaagagtttgctga

SEQ ID NO: 367955 - DNA, 55 bp, Artificial
  Synthetic oligonucleotide
cgaattgagccgatggtcgtcgcgcaaaccgtacatgtggtacacgacgaacggt

SEQ ID NO: 367956 - DNA, 56 bp, Artificial
  Synthetic oligonucleotide
cgaattgattattcggtataaagaacattgtatagcacacttcatttgacgatgga

SEQ ID NO: 367957 - DNA, 55 bp, Artificial
  Synthetic oligonucleotide
cgaattgcaatggaaaggcataatgttaggtgcacttatgagtcaaaccacccag

SEQ ID NO: 367958 - DNA, 59 bp, Artificial
  Synthetic oligonucleotide
cgaattgcccggatgctcaacgcgtccgggcaatttcgtgtgttgacatgtcaacacgg

SEQ ID NO: 367959 - DNA, 59 bp, Artificial
  Synthetic oligonucleotide
cgaattggactaacgtttcaaatgatgtatcgaatgtgactaattcgttgaatgatatt

SEQ ID NO: 367960 - DNA, 58 bp, Artificial
  Synthetic oligonucleotide
cgaattggagttcttcgttcagtaatccgtcgttaatggtgaaagagtctgtgcaaga

SEQ ID NO: 367961 - DNA, 55 bp, Artificial
  Synthetic oligonucleotide
cgaattgggacgtcgattgaagttcaatgagaagaaattcatgcatgcaattgac

SEQ ID NO: 367962 - DNA, 58 bp, Artificial
  Synthetic oligonucleotide
cgaattgggtcggacatccctccgaccaatcagagttggccgccatgtaagcggaaca

SEQ ID NO: 367963 - DNA, 55 bp, Artificial
  Synthetic oligonucleotide
cgaattgtaagcgcgtcacctcttgggagtcatcggcggataacgcactgaatgg

SEQ ID NO: 367964 - DNA, 59 bp, Artificial
  Synthetic oligonucleotide
cgaattgtcataccaactactgcttgactctttgggcgacagaaccaggtactttagca

SEQ ID NO: 367965 - DNA, 57 bp, Artificial
  Synthetic oligonucleotide
cgaattgtgtggacccgaagcagagccccagatcgtgtgcgctctttagtgtattcc

SEQ ID NO: 367966 - DNA, 55 bp, Artificial
  Synthetic oligonucleotide
cgaattgttgccatccttgaatgggataaagcgaagctacccgagcacagattag

SEQ ID NO: 367967 - DNA, 53 bp, Artificial
  Synthetic oligonucleotide
cgaatttacgacacgcgcggcggtgtgtacccctgggagggtagaaaccacta

SEQ ID NO: 367968 - DNA, 60 bp, Artificial
  Synthetic oligonucleotide
cgaatttagcaaacgctatatcagatttaacgaatagtatgtcagacgcagcatcctcaa

SEQ ID NO: 367969 - DNA, 60 bp, Artificial
  Synthetic oligonucleotide
cgaatttatcagaatgattattctccacctatcttgatgcatgtcccctctcagttggtt

SEQ ID NO: 367970 - DNA, 55 bp, Artificial
  Synthetic oligonucleotide
cgaatttcagattggttgaaacaacttgggctggccttttcacctatccaccgct

SEQ ID NO: 367971 - DNA, 59 bp, Artificial
  Synthetic oligonucleotide
cgaatttccattttacgtgcccaatggtatagtactggaagattcatatgcgttcatta

SEQ ID NO: 367972 - DNA, 60 bp, Artificial
  Synthetic oligonucleotide
cgaatttcccaggtatatacgccactctctgctcgatccgcagtgatgtattcccctgtg

SEQ ID NO: 367973 - DNA, 59 bp, Artificial
  Synthetic oligonucleotide
cgaatttcgtattcttgcgaagatacatggcatactgagattaaagaatgacgttaacg

SEQ ID NO: 367974 - DNA, 57 bp, Artificial
  Synthetic oligonucleotide
cgaatttctctcagtccataacaaaaaggacaatcgtaaatatttttgaggcttgca

SEQ ID NO: 367975 - DNA, 55 bp, Artificial
  Synthetic oligonucleotide
cgaatttcttttggagatagccgtctccggatttcttctcctctgtgaagacgat

SEQ ID NO: 367976 - DNA, 57 bp, Artificial
  Synthetic oligonucleotide
cgaatttgaaacggcgtgttgactataactctccgcaaggttcatttagcaacacaa

SEQ ID NO: 367977 - DNA, 60 bp, Artificial
  Synthetic oligonucleotide
cgaatttgcaatcatacccacgctagtggatgccgttcttgcaagaagtgccatccgaat

SEQ ID NO: 367978 - DNA, 55 bp, Artificial
  Synthetic oligonucleotide
cgaatttgtatagcagctgatccgaagaacacgaaacagcatcctaactcactgg

SEQ ID NO: 367979 - DNA, 51 bp, Artificial
  Synthetic oligonucleotide
cgaattttatggccggacgtgctttaaagtttaaattccctcccgtgtctc

SEQ ID NO: 367980 - DNA, 60 bp, Artificial
  Synthetic oligonucleotide
cgaattttatgttagtggcatatgcgtaaatatggtcatggacaccaggagagctctcct

SEQ ID NO: 367981 - DNA, 55 bp, Artificial
  Synthetic oligonucleotide
cgaattttgaatgctccaggagtgtctgatgcggagaagagagttttgacgcatg

SEQ ID NO: 367982 - DNA, 60 bp, Artificial
  Synthetic oligonucleotide
cgaattttgggatgaatttgtccatctgcctgcaccaacaaaagccccatctatgaggag

SEQ ID NO: 367983 - DNA, 51 bp, Artificial
  Synthetic oligonucleotide
cgacaaaacttggcccggtattagaagtaggtttcacgataatgatgctta

SEQ ID NO: 367984 - DNA, 59 bp, Artificial
  Synthetic oligonucleotide
cgacaaaagaagtgctaacagccataaagaaacgtaatgctgatgttcccgaattatca

SEQ ID NO: 367985 - DNA, 55 bp, Artificial
  Synthetic oligonucleotide
cgacaaacaatccgacatctcatctactcgatagatggtcaaacctcgccagtag

SEQ ID NO: 367986 - DNA, 55 bp, Artificial
  Synthetic oligonucleotide
cgacaaacacgaagacgtgctgttcgcgcgagacgtgtacgctcgagattacata

SEQ ID NO: 367987 - DNA, 60 bp, Artificial
  Synthetic oligonucleotide
cgacaaacactgtgattaagattgcactgactagaaggcccctcggtatcaaaaggctga

SEQ ID NO: 367988 - DNA, 57 bp, Artificial
  Synthetic oligonucleotide
cgacaaacaggtattcgtccatctgggagcctttgtattcggacttgttgcacactt

SEQ ID NO: 367989 - DNA, 55 bp, Artificial
  Synthetic oligonucleotide
cgacaaacagtacagtgctccgcatatgtctaccctacttatcccgcaagatacc

SEQ ID NO: 367990 - DNA, 55 bp, Artificial
  Synthetic oligonucleotide
cgacaaactcatcaaccagacttgaatcagaccgctgatgtgaactagcaagttc

SEQ ID NO: 367991 - DNA, 55 bp, Artificial
  Synthetic oligonucleotide
cgacaaagaggaaatcaggagaatctggcaccaagcgaataatggggaggacgca

SEQ ID NO: 367992 - DNA, 60 bp, Artificial
  Synthetic oligonucleotide
cgacaaagaggagattaggaggatttggcgtcaagcaaataatggagacgacgcaactgc

SEQ ID NO: 367993 - DNA, 55 bp, Artificial
  Synthetic oligonucleotide
cgacaaatgatctcatagactttatagacatcaccaatccagaggtcatagtcgc

SEQ ID NO: 367994 - DNA, 58 bp, Artificial
  Synthetic oligonucleotide
cgacaaatgctcgatgcaggggattatattcgcattgggtgctctttacggcctttag

SEQ ID NO: 367995 - DNA, 55 bp, Artificial
  Synthetic oligonucleotide
cgacaaatgttacggttaattccggaccatttgcacagacgggatacgcgccagt

SEQ ID NO: 367996 - DNA, 60 bp, Artificial
  Synthetic oligonucleotide
cgacaacaagcacagtgtctgaagctagtttgatcactcgaaaggatgattcacacttct

SEQ ID NO: 367997 - DNA, 60 bp, Artificial
  Synthetic oligonucleotide
cgacaacagtgactgaatctgggagtgtcaccattagattggttgacttgataagcgctt

SEQ ID NO: 367998 - DNA, 60 bp, Artificial
  Synthetic oligonucleotide
cgacaacatcaggaatggacacgttattaatcaattaatggaggccttaatgcaattgtc

SEQ ID NO: 367999 - DNA, 56 bp, Artificial
  Synthetic oligonucleotide
cgacaacatgaccgacatacgatcaaacttgaaactggcgtataaaacgtccgcgt

SEQ ID NO: 368000 - DNA, 58 bp, Artificial
  Synthetic oligonucleotide
cgacaacccgcgtcaccggggggagtgccgctcatgccacgtatggactcgccagact

SEQ ID NO: 368001 - DNA, 51 bp, Artificial
  Synthetic oligonucleotide
cgacaaccctagtgttttattggatcagctagtgcagcagttgaccatttg

SEQ ID NO: 368002 - DNA, 55 bp, Artificial
  Synthetic oligonucleotide
cgacaaccgtcgtttcgtctattcacaatattccggacatgagggacaacggatc

SEQ ID NO: 368003 - DNA, 55 bp, Artificial
  Synthetic oligonucleotide
cgacaaccttcatgcactcccacacggaggccggtacgtcgacggaaccaagtcc

SEQ ID NO: 368004 - DNA, 60 bp, Artificial
  Synthetic oligonucleotide
cgacaacgagagctactacgagcagaaagcaagcgagctattgacatcgcacggtatcag

SEQ ID NO: 368005 - DNA, 55 bp, Artificial
  Synthetic oligonucleotide
cgacaacggctttccgtacttctacatgactctaggcggggttgcggctatggcg

SEQ ID NO: 368006 - DNA, 58 bp, Artificial
  Synthetic oligonucleotide
cgacaacgttagagcatagattcaaggagataccggataaggaattggctgtaagcgt

SEQ ID NO: 368007 - DNA, 55 bp, Artificial
  Synthetic oligonucleotide
cgacaactaattctcatttggggcacaagtttaggcatgtacctctgatgatggc

SEQ ID NO: 368008 - DNA, 59 bp, Artificial
  Synthetic oligonucleotide
cgacaactacactcaatgtatagaaggttccccagagtttgattggattcttggatgga

SEQ ID NO: 368009 - DNA, 55 bp, Artificial
  Synthetic oligonucleotide
cgacaactcaactcactcatgagacaggtgcttggaggccatggagagagtacac

SEQ ID NO: 368010 - DNA, 60 bp, Artificial
  Synthetic oligonucleotide
cgacaactggcagattacgctgacagggcaagagaggcgggattagcatgtgaggcgcag

SEQ ID NO: 368011 - DNA, 57 bp, Artificial
  Synthetic oligonucleotide
cgacaactgttggttgaacaccatcctccagttgttcaggtatgttgatgaaccttt

SEQ ID NO: 368012 - DNA, 54 bp, Artificial
  Synthetic oligonucleotide
cgacaacttcgcccaagtcttgtccaacactaaagtcggtcactccggtgccgg

SEQ ID NO: 368013 - DNA, 50 bp, Artificial
  Synthetic oligonucleotide
cgacaacttgatttcaaagatagttttcggtcctggacaaaattatgcta

SEQ ID NO: 368014 - DNA, 55 bp, Artificial
  Synthetic oligonucleotide
cgacaagaagatgtgtacaggagtattccacgtgctgtatgattgggctgacttc

SEQ ID NO: 368015 - DNA, 55 bp, Artificial
  Synthetic oligonucleotide
cgacaagcatgtaatggagtttatggcaacataagcaagaacgccatattagttt

SEQ ID NO: 368016 - DNA, 55 bp, Artificial
  Synthetic oligonucleotide
cgacaagcggatagtcattcaatgagtggagcttttgctaatgcattagtcccag

SEQ ID NO: 368017 - DNA, 55 bp, Artificial
  Synthetic oligonucleotide
cgacaaggagtgatgtgcattgtctattatgaagcgatgtggtcatccaacatgt

SEQ ID NO: 368018 - DNA, 60 bp, Artificial
  Synthetic oligonucleotide
cgacaaggcagatccacggaggagctgatatttggaatagaagctgtggataggagtaac

SEQ ID NO: 368019 - DNA, 55 bp, Artificial
  Synthetic oligonucleotide
cgacaaggtacttggtcaaaacggaatcgtggatcttgagaaaccctgggtatgc

SEQ ID NO: 368020 - DNA, 55 bp, Artificial
  Synthetic oligonucleotide
cgacaaggtccgactacagcttagggataatgcaaaggagctgggtaacggttgt

SEQ ID NO: 368021 - DNA, 52 bp, Artificial
  Synthetic oligonucleotide
cgacaaggtccgactatcctttagggataatgcaaaggaactgggtaacggt

SEQ ID NO: 368022 - DNA, 50 bp, Artificial
  Synthetic oligonucleotide
cgacaaggttagactgcagcttagggataatgcaaaggagctgggtaatg

SEQ ID NO: 368023 - DNA, 55 bp, Artificial
  Synthetic oligonucleotide
cgacaagtaacgaccccaaactagtggacttcggaagacttatcgtaatgcacta

SEQ ID NO: 368024 - DNA, 55 bp, Artificial
  Synthetic oligonucleotide
cgacaagtacagtatattcgacgtaaccagacgtgtatccacgacacgtaataag

SEQ ID NO: 368025 - DNA, 55 bp, Artificial
  Synthetic oligonucleotide
cgacaagtataacgctgttgaaagaaaattggtgaagtatgcgaaaggcaaacca

SEQ ID NO: 368026 - DNA, 50 bp, Artificial
  Synthetic oligonucleotide
cgacaagttaacccacgaaatacgaaagttttatgcgtgggtgatcgaac

SEQ ID NO: 368027 - DNA, 55 bp, Artificial
  Synthetic oligonucleotide
cgacaagttacacttacatgctatcagatggtattcacgtagccaatgtgagtgg

SEQ ID NO: 368028 - DNA, 60 bp, Artificial
  Synthetic oligonucleotide
cgacaagttcgttccgcgtgcaagccgacatgatttctactggatttgcaccgcagagaa

SEQ ID NO: 368029 - DNA, 60 bp, Artificial
  Synthetic oligonucleotide
cgacaatacacatccccggagaagtcagtagcatacttgagttgtgtcaagtggaaacta

SEQ ID NO: 368030 - DNA, 55 bp, Artificial
  Synthetic oligonucleotide
cgacaataggtttgtttaagttgtgagcagttactaattcccaattcacccattc

SEQ ID NO: 368031 - DNA, 59 bp, Artificial
  Synthetic oligonucleotide
cgacaatatgagcgtagcagaacgcacggacttgtttgtaaatgacagaagcacatacg

SEQ ID NO: 368032 - DNA, 60 bp, Artificial
  Synthetic oligonucleotide
cgacaatatggcgtatgaacatagacagtgggcggtgcctttgctcttctacgcagataa

SEQ ID NO: 368033 - DNA, 60 bp, Artificial
  Synthetic oligonucleotide
cgacaatcagctgtcagatacgagtctgtgccgtctctacccggagtgtgcggcggctgc

SEQ ID NO: 368034 - DNA, 55 bp, Artificial
  Synthetic oligonucleotide
cgacaatgattgatacgttaccatcactattccccgaatggcccgtcgtcagtgc

SEQ ID NO: 368035 - DNA, 55 bp, Artificial
  Synthetic oligonucleotide
cgacaatggcgaaaaacggcaattactcttataagaggtgggtcttcactattaa

SEQ ID NO: 368036 - DNA, 54 bp, Artificial
  Synthetic oligonucleotide
cgacaatggggcttttaccgggatctttagaatgatgacatcgttttacaccgg

SEQ ID NO: 368037 - DNA, 60 bp, Artificial
  Synthetic oligonucleotide
cgacaatgtaatgggaatgatcggaatattacccgacatgaccccaagtactgagatgtc

SEQ ID NO: 368038 - DNA, 55 bp, Artificial
  Synthetic oligonucleotide
cgacaatgtaatggggatgattggagtattaccagacatgactccaagcacagag

SEQ ID NO: 368039 - DNA, 60 bp, Artificial
  Synthetic oligonucleotide
cgacaattatggcataacgcgatctcaagcgttagacttaatcagatctgatcccagagt

SEQ ID NO: 368040 - DNA, 55 bp, Artificial
  Synthetic oligonucleotide
cgacaattgttggttgaacgccatcctccaactgttcaggtacgttgacgaaccc

SEQ ID NO: 368041 - DNA, 60 bp, Artificial
  Synthetic oligonucleotide
cgacacaaaatctactttacatcgctagatcgacacaaaatctactttacatcgctagat

SEQ ID NO: 368042 - DNA, 51 bp, Artificial
  Synthetic oligonucleotide
cgacacaagagtcgctggggaggggaagaaatttgttgatgacatgtcaga

SEQ ID NO: 368043 - DNA, 55 bp, Artificial
  Synthetic oligonucleotide
cgacacaaggtgccagacccctcatggggccttgaacagtagcctccctttccag

SEQ ID NO: 368044 - DNA, 60 bp, Artificial
  Synthetic oligonucleotide
cgacacaatcacactcccatgcagaagaagacaaattgtaaataggtggcaggaagtagg

SEQ ID NO: 368045 - DNA, 55 bp, Artificial
  Synthetic oligonucleotide
cgacacaatcctggagcgaaacgtcactgtgactcatgccaaggacattcttgag

SEQ ID NO: 368046 - DNA, 57 bp, Artificial
  Synthetic oligonucleotide
cgacacaatcgccgctggcctcaccaccctcggagttcccgcggactcccttatctc

SEQ ID NO: 368047 - DNA, 55 bp, Artificial
  Synthetic oligonucleotide
cgacacaatctttcctggcgacctgtgttaacggcgtatgttggaccgtctacca

SEQ ID NO: 368048 - DNA, 57 bp, Artificial
  Synthetic oligonucleotide
cgacacagacttcaactattagtagacggctacgactaaaagaaatggctacgcaaa

SEQ ID NO: 368049 - DNA, 55 bp, Artificial
  Synthetic oligonucleotide
cgacacagcaaataatagagtgcaggtggcagatcgttttggcatgcgcacgggt

SEQ ID NO: 368050 - DNA, 60 bp, Artificial
  Synthetic oligonucleotide
cgacacatacttgcttcaggtgctcgagtactcgccagtacaagccgcagaattccaaga

SEQ ID NO: 368051 - DNA, 60 bp, Artificial
  Synthetic oligonucleotide
cgacacatctaacaactcatgatggtgagagattcgtgacaggacctccaacgatgtggg

SEQ ID NO: 368052 - DNA, 55 bp, Artificial
  Synthetic oligonucleotide
cgacacattgttcgtgagaacccaaggggaactcgtaagctggcaatagggaacc

SEQ ID NO: 368053 - DNA, 55 bp, Artificial
  Synthetic oligonucleotide
cgacaccacgtggccgctgagggtatatattctcgagtgagcgaaccaggagctc

SEQ ID NO: 368054 - DNA, 56 bp, Artificial
  Synthetic oligonucleotide
cgacaccatggcccaccttcatgaggcgcgggcgcacaacggcgacctaaccgccc

SEQ ID NO: 368055 - DNA, 55 bp, Artificial
  Synthetic oligonucleotide
cgacacccaaagcgttgcaatactggttagcgttgatggtcgaaggtcttaatcg

SEQ ID NO: 368056 - DNA, 59 bp, Artificial
  Synthetic oligonucleotide
cgacacccaatttgcacaggtaaataaacatatcaatcactgaaattacaatcgcaaac

SEQ ID NO: 368057 - DNA, 59 bp, Artificial
  Synthetic oligonucleotide
cgacacccccgtgatgagccgtgctgctgtccccactgtcctcgtcaccaacaaaagaa

SEQ ID NO: 368058 - DNA, 55 bp, Artificial
  Synthetic oligonucleotide
cgacaccctactcgccgtccacaacaactcactcgccaatcttaggagaggcctc

SEQ ID NO: 368059 - DNA, 55 bp, Artificial
  Synthetic oligonucleotide
cgacaccctggtcctgtcaagttctctctactgcatgaatcgaccctcaaacctg

SEQ ID NO: 368060 - DNA, 53 bp, Artificial
  Synthetic oligonucleotide
cgacaccgattgatatcttatcgagccacctacttagaacgataagcccgact

SEQ ID NO: 368061 - DNA, 55 bp, Artificial
  Synthetic oligonucleotide
cgacaccgcgcacaatgcctacacgaggcggcgttgtcggatacgtgcggaatgt

SEQ ID NO: 368062 - DNA, 58 bp, Artificial
  Synthetic oligonucleotide
cgacaccgctgaggtgcgcccgggacagtctcaagagggtacggccgatatggctaac

SEQ ID NO: 368063 - DNA, 55 bp, Artificial
  Synthetic oligonucleotide
cgacaccgcttgccaaaatttgtcacaggcatcttcttgcaaacgtttaatgcaa

SEQ ID NO: 368064 - DNA, 55 bp, Artificial
  Synthetic oligonucleotide
cgacaccgtatttagagggagatgtgctatcgagtgattcaggaccgctgctttc

SEQ ID NO: 368065 - DNA, 59 bp, Artificial
  Synthetic oligonucleotide
cgacacctacacaggaaatgaggtgtgtatcatcgatgagttcgactcatctgataagg

SEQ ID NO: 368066 - DNA, 50 bp, Artificial
  Synthetic oligonucleotide
cgacacctaggccgattgaagacgctgactacattcatccttttgacaac

SEQ ID NO: 368067 - DNA, 55 bp, Artificial
  Synthetic oligonucleotide
cgacacctgaacagggaacaatggttggtggagtcattgctgagcccaacgccca

SEQ ID NO: 368068 - DNA, 54 bp, Artificial
  Synthetic oligonucleotide
cgacacctgaacgttcaggacaagttcactatcaatgggttcaggaagagcgtg

SEQ ID NO: 368069 - DNA, 55 bp, Artificial
  Synthetic oligonucleotide
cgacacctgatgttgtccatattggtaaggtgatgtgtatttctgatgttacgcg

SEQ ID NO: 368070 - DNA, 58 bp, Artificial
  Synthetic oligonucleotide
cgacaccttccccagccccatcgcgccctttttctgtcctccgagctaatgatgtgct

SEQ ID NO: 368071 - DNA, 59 bp, Artificial
  Synthetic oligonucleotide
cgacacgagctagcatacttactcatttaggtgtaatgctcaacggtgttagtaagtta

SEQ ID NO: 368072 - DNA, 55 bp, Artificial
  Synthetic oligonucleotide
cgacacgaggataaactatacgatgcccgaattcgtatcggatacattgcgaggc

SEQ ID NO: 368073 - DNA, 55 bp, Artificial
  Synthetic oligonucleotide
cgacacgaggtcaggcgccacttcgctgccaagatgttggttgatttctaatggg

SEQ ID NO: 368074 - DNA, 60 bp, Artificial
  Synthetic oligonucleotide
cgacacgagtacaacataatggagtgatggtagatgcggaaataaagtattgcaggggga

SEQ ID NO: 368075 - DNA, 55 bp, Artificial
  Synthetic oligonucleotide
cgacacgataaattactacaatgagacttttgtcaatgtcacaaacgtgcagaac

SEQ ID NO: 368076 - DNA, 55 bp, Artificial
  Synthetic oligonucleotide
cgacacgccccccctactcccggctccaacgtatagcgacacccagtctgcttcc

SEQ ID NO: 368077 - DNA, 57 bp, Artificial
  Synthetic oligonucleotide
cgacacgcgcgcggtgtgtacccctgggagggtagaaaacctctacgctacgcagca

SEQ ID NO: 368078 - DNA, 55 bp, Artificial
  Synthetic oligonucleotide
cgacacgcgtcgagtgtagcgaacgtgaacgttggtcgtatgttcgtgcaccagt

SEQ ID NO: 368079 - DNA, 60 bp, Artificial
  Synthetic oligonucleotide
cgacacgctcctggaaaatggggtcccagtcaccagctccattgatctgatcgagacaaa

SEQ ID NO: 368080 - DNA, 55 bp, Artificial
  Synthetic oligonucleotide
cgacacgctgtcagacgacatgcgtgaaacattccactttgtggatggcggagtg

SEQ ID NO: 368081 - DNA, 57 bp, Artificial
  Synthetic oligonucleotide
cgacacgtctcatggtgggtttaatattacgtcctctgcaagtggcccgtcctctac

SEQ ID NO: 368082 - DNA, 58 bp, Artificial
  Synthetic oligonucleotide
cgacacgtggtctaactcacatgatgatctggcattccaatttgaatgatgcaacata

SEQ ID NO: 368083 - DNA, 54 bp, Artificial
  Synthetic oligonucleotide
cgacactaacattttctaatgttaggacgcaggtgtgtttggcccctggcagag

SEQ ID NO: 368084 - DNA, 55 bp, Artificial
  Synthetic oligonucleotide
cgacactaacttacttgagggttctatttcttatagtgaactccgtcctgacacc

SEQ ID NO: 368085 - DNA, 55 bp, Artificial
  Synthetic oligonucleotide
cgacactcgcagatgtttattcagttttgagacctgagtttgcgatccatggcgt

SEQ ID NO: 368086 - DNA, 55 bp, Artificial
  Synthetic oligonucleotide
cgacactctcgcgtgcggtccaagaccatgatggttcactcgtccagcctcgtgg

SEQ ID NO: 368087 - DNA, 55 bp, Artificial
  Synthetic oligonucleotide
cgacactggactgacatcactgactttgtaattcggccgtttgtcttccaagcaa

SEQ ID NO: 368088 - DNA, 55 bp, Artificial
  Synthetic oligonucleotide
cgacactgtgtcgtactaaggccactcagcagccttcatggttctcacccgcggc

SEQ ID NO: 368089 - DNA, 58 bp, Artificial
  Synthetic oligonucleotide
cgacactgttacgatcccacttctgttggagtggtagtagcccgttgtgagacaacgc

SEQ ID NO: 368090 - DNA, 60 bp, Artificial
  Synthetic oligonucleotide
cgacacttatctagaatccatgttgaaagtgatttctcatgtgacttttgatgacgactt

SEQ ID NO: 368091 - DNA, 60 bp, Artificial
  Synthetic oligonucleotide
cgacacttgtgttgtcccaagatctcccgagtatttgtgaccttgatccaatgtatggcc

SEQ ID NO: 368092 - DNA, 55 bp, Artificial
  Synthetic oligonucleotide
cgacactttggagtttcgtgatgtcttgccatatagcattataatccggcttcct

SEQ ID NO: 368093 - DNA, 60 bp, Artificial
  Synthetic oligonucleotide
cgacacttttgtattattgaaagatgatcttgggattgagaagcctgatgttataagatg

SEQ ID NO: 368094 - DNA, 60 bp, Artificial
  Synthetic oligonucleotide
cgacagaacaacacgctcatcgagctagttgttgggataagtgcgaagctagataacgct

SEQ ID NO: 368095 - DNA, 55 bp, Artificial
  Synthetic oligonucleotide
cgacagaacaggttgacacaataatggaaaagaacgttactgtcacacacgccca

SEQ ID NO: 368096 - DNA, 55 bp, Artificial
  Synthetic oligonucleotide
cgacagaagaatactcagctgaggtatctagactcaaacaaacactgacagcccg

SEQ ID NO: 368097 - DNA, 50 bp, Artificial
  Synthetic oligonucleotide
cgacagaagctcaagtttaaggatgctcgaattgcaaagctcggaaggga

SEQ ID NO: 368098 - DNA, 56 bp, Artificial
  Synthetic oligonucleotide
cgacagaattgatttcgtcggccggaggccagctgttttactcacgccccgtcgtc

SEQ ID NO: 368099 - DNA, 55 bp, Artificial
  Synthetic oligonucleotide
cgacagagacagcgcttgagattcagggaggcgcgtgacaacaaacacgcgtacg

SEQ ID NO: 368100 - DNA, 55 bp, Artificial
  Synthetic oligonucleotide
cgacagagaggtacatgccacgttatggcctccagagaaacttaactgactatgg

SEQ ID NO: 368101 - DNA, 51 bp, Artificial
  Synthetic oligonucleotide
cgacagaggaccaggtagtaggggaacgcaaaggggacccaggcacggggg

SEQ ID NO: 368102 - DNA, 60 bp, Artificial
  Synthetic oligonucleotide
cgacagaggagagcaaggaatggagccagtaaatcctagactagagccctggaagcatcc

SEQ ID NO: 368103 - DNA, 60 bp, Artificial
  Synthetic oligonucleotide
cgacagaggcaggtcaacgcgcatagtgaatggattcttagctctgttctgggacgatct

SEQ ID NO: 368104 - DNA, 60 bp, Artificial
  Synthetic oligonucleotide
cgacagagtatacatcgaaaatgacccgacttattgtatgtctgcagtgactcgattcag

SEQ ID NO: 368105 - DNA, 55 bp, Artificial
  Synthetic oligonucleotide
cgacagatccaccaaagagttaatttggtccagtctctgcgatgccctgatgggg

SEQ ID NO: 368106 - DNA, 55 bp, Artificial
  Synthetic oligonucleotide
cgacagatccatgcagaaacaaatcaaaatcagcagccgaagcacatcacacagt

SEQ ID NO: 368107 - DNA, 53 bp, Artificial
  Synthetic oligonucleotide
cgacagcacgggactacaccggggccaccaaatacatggtgcaatacggctta

SEQ ID NO: 368108 - DNA, 55 bp, Artificial
  Synthetic oligonucleotide
cgacagcataaacaggaactagctgacactgcacaagagggaaactagctgacac

SEQ ID NO: 368109 - DNA, 55 bp, Artificial
  Synthetic oligonucleotide
cgacagcattaacagcactgggacaatagatggcaacatgcatggggaaataaaa

SEQ ID NO: 368110 - DNA, 55 bp, Artificial
  Synthetic oligonucleotide
cgacagccagttgtcaagcgtaatgataacaaacgacgaccatttcaaactgcga

SEQ ID NO: 368111 - DNA, 59 bp, Artificial
  Synthetic oligonucleotide
cgacagccccgggatcagccgtgccgctgcccccactgtcctcgtcacaaacagaaggc

SEQ ID NO: 368112 - DNA, 55 bp, Artificial
  Synthetic oligonucleotide
cgacagccgagaatgccctgctagtagccttgtttggctacgtagggtaccaggc

SEQ ID NO: 368113 - DNA, 60 bp, Artificial
  Synthetic oligonucleotide
cgacagcgaggtgactataccacatctacacttgtacagacaatggctcaggtatccgat

SEQ ID NO: 368114 - DNA, 60 bp, Artificial
  Synthetic oligonucleotide
cgacagcgctttccgttcttgcgatcctttctctttggacctcgcaagccatgatgctga

SEQ ID NO: 368115 - DNA, 50 bp, Artificial
  Synthetic oligonucleotide
cgacagctcagatgcggaatccagtacatgttccagcaattaacaaaaac

SEQ ID NO: 368116 - DNA, 60 bp, Artificial
  Synthetic oligonucleotide
cgacagctcctgcgttgcactccacactcacgttgtgcgtgcgcgggacccgatggactg

SEQ ID NO: 368117 - DNA, 51 bp, Artificial
  Synthetic oligonucleotide
cgacagctctctatcgccatacctaattaattcgatactcaatgtaaggtt

SEQ ID NO: 368118 - DNA, 55 bp, Artificial
  Synthetic oligonucleotide
cgacagctttgtagcccagtcataaggcagagccttctgcaccatggagaggtac

SEQ ID NO: 368119 - DNA, 53 bp, Artificial
  Synthetic oligonucleotide
cgacaggaaccaaattcgtgacacctataacacgtcctgctccagcaaaaacc

SEQ ID NO: 368120 - DNA, 55 bp, Artificial
  Synthetic oligonucleotide
cgacaggaaccttggtcgtattgtacggttcgacagcgtcgtagcaggcgaccag

SEQ ID NO: 368121 - DNA, 54 bp, Artificial
  Synthetic oligonucleotide
cgacaggacctaagctactctcccggttggtcgagggaaccaagagcccctaca

SEQ ID NO: 368122 - DNA, 55 bp, Artificial
  Synthetic oligonucleotide
cgacaggatcatttggtggcccctcaatgtcaatccatgttgtgtcactggtagg

SEQ ID NO: 368123 - DNA, 54 bp, Artificial
  Synthetic oligonucleotide
cgacaggatctttactgtcggtgcccggaagggtatatccacggagtgtttcgc

SEQ ID NO: 368124 - DNA, 52 bp, Artificial
  Synthetic oligonucleotide
cgacaggcatgtctggtggggcggggatgtacttaacgcctgcaacgttagc

SEQ ID NO: 368125 - DNA, 51 bp, Artificial
  Synthetic oligonucleotide
cgacaggcgagatgggatcgcgggattaaaataccgcctcgggagcaccta

SEQ ID NO: 368126 - DNA, 55 bp, Artificial
  Synthetic oligonucleotide
cgacaggcggcatctaagtagttgcgtacagaaactttataatcgtacatgaatc

SEQ ID NO: 368127 - DNA, 60 bp, Artificial
  Synthetic oligonucleotide
cgacaggctaaggtgcgatataaatcagccgtcctcgccttgctttgaacatggagggcg

SEQ ID NO: 368128 - DNA, 55 bp, Artificial
  Synthetic oligonucleotide
cgacaggctcattgatcagcgtttccctaatgggacgacgaagacggttggcccg

SEQ ID NO: 368129 - DNA, 54 bp, Artificial
  Synthetic oligonucleotide
cgacaggggagggctaccgcgaagacgatttaacgttagatatagcaaaacgga

SEQ ID NO: 368130 - DNA, 55 bp, Artificial
  Synthetic oligonucleotide
cgacagggtgtgatgggtgatgtggtaactcatgctgttacaggcaagggtgcca

SEQ ID NO: 368131 - DNA, 60 bp, Artificial
  Synthetic oligonucleotide
cgacagtacaaacctaatgtcgatgcgcaaagtgctattcagagtatttgcacgatgctt

SEQ ID NO: 368132 - DNA, 60 bp, Artificial
  Synthetic oligonucleotide
cgacagtcagtagcggggctgacacggaggacgtcgtgtgctgctcaatgtcttattcct

SEQ ID NO: 368133 - DNA, 58 bp, Artificial
  Synthetic oligonucleotide
cgacagtccctgcgttgcactccacacttacgttgtacgcacgcgggacccgatggac

SEQ ID NO: 368134 - DNA, 55 bp, Artificial
  Synthetic oligonucleotide
cgacagtccctgtgtcgtactccgcacttacgttgtgcgtacgcggggcccgacg

SEQ ID NO: 368135 - DNA, 60 bp, Artificial
  Synthetic oligonucleotide
cgacagtcctcaccaaatccttgatggagaaaactgcacactaatagatgctctattggg

SEQ ID NO: 368136 - DNA, 55 bp, Artificial
  Synthetic oligonucleotide
cgacagtgacattgcatttcaagcaaaatgagtgcagcatccctgcgaacaacca

SEQ ID NO: 368137 - DNA, 55 bp, Artificial
  Synthetic oligonucleotide
cgacagtgacccgaggaccggggcgcagaggataagccgcgactaagtaaggtag

SEQ ID NO: 368138 - DNA, 57 bp, Artificial
  Synthetic oligonucleotide
cgacagtggtcaaacattgttttcgtagaggagttaagaaattgatcgcttcaatta

SEQ ID NO: 368139 - DNA, 52 bp, Artificial
  Synthetic oligonucleotide
cgacagtgttcaatcactacgatgtgcctattgggcttagaacgttaacgga

SEQ ID NO: 368140 - DNA, 55 bp, Artificial
  Synthetic oligonucleotide
cgacagttagagcagaccctcaatacaagcgtacactcgatcggatcttaccacg

SEQ ID NO: 368141 - DNA, 60 bp, Artificial
  Synthetic oligonucleotide
cgacagttccacagacacgagagactacgcactacagctgtggggcgatcggcaggcaat

SEQ ID NO: 368142 - DNA, 55 bp, Artificial
  Synthetic oligonucleotide
cgacagttcgagatttatgttttatacaaggaaaacgcctacacagatcgaagaa

SEQ ID NO: 368143 - DNA, 60 bp, Artificial
  Synthetic oligonucleotide
cgacataacagagaggcatatactaaaacaagagacctcgtcatacaacttagaggtatc

SEQ ID NO: 368144 - DNA, 55 bp, Artificial
  Synthetic oligonucleotide
cgacataagaaactctccaacgcacagcacagcctggaaacatgcccttcggttg

SEQ ID NO: 368145 - DNA, 57 bp, Artificial
  Synthetic oligonucleotide
cgacatacccgttatttctgttcaggcgtctcacagctaagatctggaaaataaaag

SEQ ID NO: 368146 - DNA, 51 bp, Artificial
  Synthetic oligonucleotide
cgacataccgccacatgcgtgcccatcacccgtacaaaaaatcgaagagac

SEQ ID NO: 368147 - DNA, 60 bp, Artificial
  Synthetic oligonucleotide
cgacatacgacttgacatcggagctcgatttagctccctgaatgttcggatggaaatgtg

SEQ ID NO: 368148 - DNA, 55 bp, Artificial
  Synthetic oligonucleotide
cgacatacgatcaaacttgaaactggcgtataaaacgtccgcgttaggacacgtg

SEQ ID NO: 368149 - DNA, 55 bp, Artificial
  Synthetic oligonucleotide
cgacatactacttatgctgcgaaagattctgaacgagaacgactatctcaccctc

SEQ ID NO: 368150 - DNA, 55 bp, Artificial
  Synthetic oligonucleotide
cgacatactcgtgctggtccacttcagacacataactcagtgtgtcgggtaacgg

SEQ ID NO: 368151 - DNA, 51 bp, Artificial
  Synthetic oligonucleotide
cgacatagaccctaaacttcgagggcaagttgtgtcttttcactattcaac

SEQ ID NO: 368152 - DNA, 59 bp, Artificial
  Synthetic oligonucleotide
cgacatagataaattctctaaactagcttctcaatctcccgttatatctgcaatagttg

SEQ ID NO: 368153 - DNA, 58 bp, Artificial
  Synthetic oligonucleotide
cgacatagccttgggtccgattatttcgcttaggagtaaatattgatccgccaatgta

SEQ ID NO: 368154 - DNA, 55 bp, Artificial
  Synthetic oligonucleotide
cgacatattaaaacaactcgtatgcttggaggtttccaaggtaaatttggagcaa

SEQ ID NO: 368155 - DNA, 60 bp, Artificial
  Synthetic oligonucleotide
cgacatcaaatcacttaacgtccaacactctagccactaacatacacaaaggactacaga

SEQ ID NO: 368156 - DNA, 60 bp, Artificial
  Synthetic oligonucleotide
cgacatcactgccaatagcgagattatcgaatcgtgtgttcagagacaaattatttaaga

SEQ ID NO: 368157 - DNA, 50 bp, Artificial
  Synthetic oligonucleotide
cgacatcactttcgcactaaacgcaccagatgactttctcgtcgtgaatg

SEQ ID NO: 368158 - DNA, 59 bp, Artificial
  Synthetic oligonucleotide
cgacatcatacgaattgcagtctaattcgtgtgaagactccaaataaaacgttgtacga

SEQ ID NO: 368159 - DNA, 55 bp, Artificial
  Synthetic oligonucleotide
cgacatccacactctcgagaaagaggcgcctatcgccatcgcttccctcaagggt

SEQ ID NO: 368160 - DNA, 57 bp, Artificial
  Synthetic oligonucleotide
cgacatcccattggggatatcggccgcgaaaaaccgtacactatccgctctgcggga

SEQ ID NO: 368161 - DNA, 60 bp, Artificial
  Synthetic oligonucleotide
cgacatccgctgtgatggctggcgtgccgctaactgaggtggcccggaagttccccacga

SEQ ID NO: 368162 - DNA, 60 bp, Artificial
  Synthetic oligonucleotide
cgacatcctatgcgaagctcttggacgtatatttcgaaggtgaattggatggagcagcct

SEQ ID NO: 368163 - DNA, 55 bp, Artificial
  Synthetic oligonucleotide
cgacatccttctcggaaaattgcttagacaggatcttcaccgccggagctctgaa

SEQ ID NO: 368164 - DNA, 55 bp, Artificial
  Synthetic oligonucleotide
cgacatcgaaggaacgacgacgttttctaataggcgttacaattgttggtccgca

SEQ ID NO: 368165 - DNA, 58 bp, Artificial
  Synthetic oligonucleotide
cgacatcggtggtaactttgctgcgcacctttttaagggacgcgactatgttcactgc

SEQ ID NO: 368166 - DNA, 58 bp, Artificial
  Synthetic oligonucleotide
cgacatcgtcgcaggatcaatccgtggtccggcccgagtgtccgttgacgactgggac

SEQ ID NO: 368167 - DNA, 58 bp, Artificial
  Synthetic oligonucleotide
cgacatctccgttcggtcattacttggcaaccagtacaaacgcctgagagacgtagtc

SEQ ID NO: 368168 - DNA, 57 bp, Artificial
  Synthetic oligonucleotide
cgacatctccgttcggtcattacttggcagccaatacaaacgcctgaaagacgcggt

SEQ ID NO: 368169 - DNA, 51 bp, Artificial
  Synthetic oligonucleotide
cgacatcttaccgtatcctaaagtggaatgtgtaactatggggcatactca

SEQ ID NO: 368170 - DNA, 58 bp, Artificial
  Synthetic oligonucleotide
cgacatcttatgcgaaactctttgacgtatacttcgaaggtgagttagacggcgcacc

SEQ ID NO: 368171 - DNA, 51 bp, Artificial
  Synthetic oligonucleotide
cgacatcttcgctaagctaaggcaggtgatcgagacgcaggagttaatccg

SEQ ID NO: 368172 - DNA, 58 bp, Artificial
  Synthetic oligonucleotide
cgacatgattaggagaaggaacaaaatcctaaacagagacggcagtgaagacgttcca

SEQ ID NO: 368173 - DNA, 55 bp, Artificial
  Synthetic oligonucleotide
cgacatgccttgccctaggcctaacaccgttcctatccccacgacgtatcgaacg

SEQ ID NO: 368174 - DNA, 59 bp, Artificial
  Synthetic oligonucleotide
cgacatgcgttccgtagtcaagttcatcgatgacaatttgtcagattccagtctttgcc

SEQ ID NO: 368175 - DNA, 58 bp, Artificial
  Synthetic oligonucleotide
cgacatgcgtttcgtggatctttaattcaaaatgcctaagcgggatgccccatggcgt

SEQ ID NO: 368176 - DNA, 55 bp, Artificial
  Synthetic oligonucleotide
cgacatgctccgtcaagatttcggataccacgtctcgatcgaaaccgaccactag

SEQ ID NO: 368177 - DNA, 55 bp, Artificial
  Synthetic oligonucleotide
cgacatgctcgcaggtcatcccgtggtgtcaatcaccggcagagcgtgcgcatac

SEQ ID NO: 368178 - DNA, 55 bp, Artificial
  Synthetic oligonucleotide
cgacatgtcttttgaggaagtgttggaacactgtcaaggtctaatgacgagtcgc

SEQ ID NO: 368179 - DNA, 55 bp, Artificial
  Synthetic oligonucleotide
cgacatgttgtgtcaggacaaggcgtgtggtggcggagcgtcgagcggaatcgtc

SEQ ID NO: 368180 - DNA, 60 bp, Artificial
  Synthetic oligonucleotide
cgacattcagaaacctcgatggtcctctctggagcacattcagatcgacgtaatgttgac

SEQ ID NO: 368181 - DNA, 55 bp, Artificial
  Synthetic oligonucleotide
cgacattcgatgcctacctacgattagacgaaagtgaacgagataaggggacgtt

SEQ ID NO: 368182 - DNA, 55 bp, Artificial
  Synthetic oligonucleotide
cgacattcgtcccgctttaagaggacaggcgctttcgcggcaacaggcacagtcc

SEQ ID NO: 368183 - DNA, 54 bp, Artificial
  Synthetic oligonucleotide
cgacattcgtgtcgtctaccctgtacataaccttccaaggattggggtccctgg

SEQ ID NO: 368184 - DNA, 60 bp, Artificial
  Synthetic oligonucleotide
cgacattgaaggactatatgaagcaattgaggagtgcctgattaatgatccctgggtttt

SEQ ID NO: 368185 - DNA, 60 bp, Artificial
  Synthetic oligonucleotide
cgacattgaaggggaacgtcagagtgacttccgcagcgtcgtttgtgagagcgtactcta

SEQ ID NO: 368186 - DNA, 55 bp, Artificial
  Synthetic oligonucleotide
cgacattgcagacgccatgttcgaatgcgggatgacatggagcgacatatcaggt

SEQ ID NO: 368187 - DNA, 55 bp, Artificial
  Synthetic oligonucleotide
cgacattggctgggctaagacacaggcgtatttggtcactgatagcaagacaccc

SEQ ID NO: 368188 - DNA, 55 bp, Artificial
  Synthetic oligonucleotide
cgacatttagtttgggcaggaaaggagctggacagattcggcctctcagaccagc

SEQ ID NO: 368189 - DNA, 60 bp, Artificial
  Synthetic oligonucleotide
cgacatttgcaagcgcattgggctgaaagcacatctacttaacaatggggatgattgtgt

SEQ ID NO: 368190 - DNA, 55 bp, Artificial
  Synthetic oligonucleotide
cgaccaaagcgatacgcattgtagtcattggttccctgctgaccttgttgagtca

SEQ ID NO: 368191 - DNA, 60 bp, Artificial
  Synthetic oligonucleotide
cgaccaaagtctaatcattgcggcgaggaacattgtcagaagggcaacagtctctgcgga

SEQ ID NO: 368192 - DNA, 59 bp, Artificial
  Synthetic oligonucleotide
cgaccaaattgggttagagatgctcagcgctggggatggagagttgcttccgcgtcccg

SEQ ID NO: 368193 - DNA, 52 bp, Artificial
  Synthetic oligonucleotide
cgaccaacccccaccccaatgaggtcaccccaggaatggcgggaccccactc

SEQ ID NO: 368194 - DNA, 51 bp, Artificial
  Synthetic oligonucleotide
cgaccaacgtatgcgagcggttgggttacagtctccgtttaaaccgagtcc

SEQ ID NO: 368195 - DNA, 51 bp, Artificial
  Synthetic oligonucleotide
cgaccaactcgttgatgccatcatcagaaggttggaccgggcctcaggcat

SEQ ID NO: 368196 - DNA, 60 bp, Artificial
  Synthetic oligonucleotide
cgaccaagaaaaactgggaatgctcggcttgatggccaagtatgaacagtccatggtagc

SEQ ID NO: 368197 - DNA, 55 bp, Artificial
  Synthetic oligonucleotide
cgaccaagcgcaatgtagtgagtctgatagccaggaagggtgtgaagagagcttg

SEQ ID NO: 368198 - DNA, 60 bp, Artificial
  Synthetic oligonucleotide
cgaccaagcgggcgtcaattgcgcgggaacgagttcgctacatctattgttcagcatccc

SEQ ID NO: 368199 - DNA, 49 bp, Artificial
  Synthetic oligonucleotide
cgaccaaggttaccgttaaacccgtcgaacttttagataacgtagatgt

SEQ ID NO: 368200 - DNA, 58 bp, Artificial
  Synthetic oligonucleotide
cgaccaagtagctgaaccaggagcgtaaggctaccaatcttacgcagaataacgcttg

SEQ ID NO: 368201 - DNA, 58 bp, Artificial
  Synthetic oligonucleotide
cgaccaatcgtcaaagtccccttttacatgtcggaagcaactcagaattcgctgactc

SEQ ID NO: 368202 - DNA, 60 bp, Artificial
  Synthetic oligonucleotide
cgaccaattccgaaaatactgagaggcacactgcaagggacgtaaatcagaatatgcata

SEQ ID NO: 368203 - DNA, 59 bp, Artificial
  Synthetic oligonucleotide
cgaccacacaggattggtacgggatagcatggccaaacttagggaaagattgagtcaga

SEQ ID NO: 368204 - DNA, 60 bp, Artificial
  Synthetic oligonucleotide
cgaccacagagacctaatgtcgcccgacgtgcgagactcatatgccctaacaggagacga

SEQ ID NO: 368205 - DNA, 60 bp, Artificial
  Synthetic oligonucleotide
cgaccacagtacacccgcacgctcctctggacctcgacgggaaaggagcagcgcctcaca

SEQ ID NO: 368206 - DNA, 55 bp, Artificial
  Synthetic oligonucleotide
cgaccacataagcgttaacatgagaccagctattgaccctcttggtgataattac

SEQ ID NO: 368207 - DNA, 54 bp, Artificial
  Synthetic oligonucleotide
cgaccaccaccggaaccaccctgaatgccgggactgccaccaccaactttacca

SEQ ID NO: 368208 - DNA, 54 bp, Artificial
  Synthetic oligonucleotide
cgaccaccactgatttggtggcgttaccggagatggaaaactccggtatagaaa

SEQ ID NO: 368209 - DNA, 53 bp, Artificial
  Synthetic oligonucleotide
cgaccacggaaaagtagaaaccaacggacaacttgcgcccggtgtccatatcg

SEQ ID NO: 368210 - DNA, 60 bp, Artificial
  Synthetic oligonucleotide
cgaccacgtacattgcatcagctctgtgaagttgtgaatcaaccattgctggagctgcaa

SEQ ID NO: 368211 - DNA, 55 bp, Artificial
  Synthetic oligonucleotide
cgaccactaaggccgcgaatccgcaaccccgccgacgtgctaacaatcgtcggcg

SEQ ID NO: 368212 - DNA, 56 bp, Artificial
  Synthetic oligonucleotide
cgaccactaccaactgcagctgatttcgaggggagggacacatcggagaacactga

SEQ ID NO: 368213 - DNA, 58 bp, Artificial
  Synthetic oligonucleotide
cgaccactgtcgttaccgctatgtggaagtagcaatgagtagtcttcggtgattcctt

SEQ ID NO: 368214 - DNA, 55 bp, Artificial
  Synthetic oligonucleotide
cgaccacttggcggtgggagatccaagtacgcacgtcgtagacgtgctattagta

SEQ ID NO: 368215 - DNA, 56 bp, Artificial
  Synthetic oligonucleotide
cgaccagcaccggcgctaccgtgaacaacgattggacctgcaaatttacccccgca

SEQ ID NO: 368216 - DNA, 55 bp, Artificial
  Synthetic oligonucleotide
cgaccagcgcaggagcaaccaatgcacgtgaacgaatccgacctgactaagcgcg

SEQ ID NO: 368217 - DNA, 55 bp, Artificial
  Synthetic oligonucleotide
cgaccagctagacctcgccagatacaggggctgtaaactaaggttctacagaagc

SEQ ID NO: 368218 - DNA, 60 bp, Artificial
  Synthetic oligonucleotide
cgaccagggaattgacatgttgacacgatccctgattaagattttcaagactaagagtgc

SEQ ID NO: 368219 - DNA, 55 bp, Artificial
  Synthetic oligonucleotide
cgaccagtatatataggcgcgtggctggtagggttttagtatataggtaccacac

SEQ ID NO: 368220 - DNA, 53 bp, Artificial
  Synthetic oligonucleotide
cgaccagtggttacgtgacttttatgttccgtacggtaacgaaatgcttcaac

SEQ ID NO: 368221 - DNA, 60 bp, Artificial
  Synthetic oligonucleotide
cgaccagttatacatatatgttatcagatggaatctacgtagcaaatgttagtggagtat

SEQ ID NO: 368222 - DNA, 60 bp, Artificial
  Synthetic oligonucleotide
cgaccatcatggcagcatttacaggaaacactgaaggcagaacgtctgacatgaggactg

SEQ ID NO: 368223 - DNA, 55 bp, Artificial
  Synthetic oligonucleotide
cgaccatccacagtggtaattcctgtactcccatctaccttagtaacttctacta

SEQ ID NO: 368224 - DNA, 54 bp, Artificial
  Synthetic oligonucleotide
cgaccatcgcgctgtacgctagttttttcctcctgttgtaaagtgcgcgtttcc

SEQ ID NO: 368225 - DNA, 54 bp, Artificial
  Synthetic oligonucleotide
cgaccatgaggggtatttttttcatggcgtgtcttgttgataagaaacctttcg

SEQ ID NO: 368226 - DNA, 55 bp, Artificial
  Synthetic oligonucleotide
cgaccattgaaactgaatctccgggatctaatacacttgttcctagtctgttaag

SEQ ID NO: 368227 - DNA, 60 bp, Artificial
  Synthetic oligonucleotide
cgaccattgtgctgactgagtgtgccgctaacgctaagtcagcgaatgatctgaggcagt

SEQ ID NO: 368228 - DNA, 58 bp, Artificial
  Synthetic oligonucleotide
cgacccaagcaaagctatcaaggttaaacccatgaagtatagcccaatggatcgcgaa

SEQ ID NO: 368229 - DNA, 53 bp, Artificial
  Synthetic oligonucleotide
cgacccacgtgcctaatcaccgtgaccgggcactccgtttccgtagagggttg

SEQ ID NO: 368230 - DNA, 55 bp, Artificial
  Synthetic oligonucleotide
cgacccactacttgagcaagggatctcaagttccgatgaaaacgacaactaattc

SEQ ID NO: 368231 - DNA, 55 bp, Artificial
  Synthetic oligonucleotide
cgacccactgccgtggacacttgttacccattcgatgtgccagattatcagagtc

SEQ ID NO: 368232 - DNA, 56 bp, Artificial
  Synthetic oligonucleotide
cgacccagctccacgggtgatacaaccgagggatcctcggtataatgtggaggttg

SEQ ID NO: 368233 - DNA, 55 bp, Artificial
  Synthetic oligonucleotide
cgacccatactaaccgattctcagaccacggtgctcgcactatgttcaaattgca

SEQ ID NO: 368234 - DNA, 55 bp, Artificial
  Synthetic oligonucleotide
cgacccatctgctgggacccatcgaagctggaatttagagtgcgcgggaacactc

SEQ ID NO: 368235 - DNA, 57 bp, Artificial
  Synthetic oligonucleotide
cgaccccacagccattggccccgtcaccaccttttcatccactctctcccgatcctg

SEQ ID NO: 368236 - DNA, 51 bp, Artificial
  Synthetic oligonucleotide
cgaccccaccttctccatagagaccacaacagtgcctcaagatgcggtatc

SEQ ID NO: 368237 - DNA, 60 bp, Artificial
  Synthetic oligonucleotide
cgaccccagagggtactttcaatcccaacactcttcgtatgaatgtgctacagatgtgtc

SEQ ID NO: 368238 - DNA, 57 bp, Artificial
  Synthetic oligonucleotide
cgacccccaactcatagctaaacatggtttatccacggaccacttcgccgtgctagc

SEQ ID NO: 368239 - DNA, 54 bp, Artificial
  Synthetic oligonucleotide
cgacccccgaccctgctactagggattggttctaccctgctgccactggtattg

SEQ ID NO: 368240 - DNA, 55 bp, Artificial
  Synthetic oligonucleotide
cgaccccgacaacacaataccgtccaagagtgcaactgttccatctacagcggac

SEQ ID NO: 368241 - DNA, 55 bp, Artificial
  Synthetic oligonucleotide
cgaccccgatgttcgaactcaaatcgacagcgcgcaaagaatatgggacagccat

SEQ ID NO: 368242 - DNA, 55 bp, Artificial
  Synthetic oligonucleotide
cgaccccgctcagagccagttaccactaaacgatcggtgaaacgtaaacgatcta

SEQ ID NO: 368243 - DNA, 60 bp, Artificial
  Synthetic oligonucleotide
cgacccctacattatcactaagatcgataatgcttggcactgcaacatcaaagcttctga

SEQ ID NO: 368244 - DNA, 55 bp, Artificial
  Synthetic oligonucleotide
cgaccccttccaaggagctacacaccgtagacctcacttcattgccaccaccagc

SEQ ID NO: 368245 - DNA, 60 bp, Artificial
  Synthetic oligonucleotide
cgacccgaacctcgatccgaatgatcctgcttctctcagattgatgacgacagctgattt

SEQ ID NO: 368246 - DNA, 60 bp, Artificial
  Synthetic oligonucleotide
cgacccgagcacaattatcacgcaggcggcgccagtactatcagataagaataattggat

SEQ ID NO: 368247 - DNA, 54 bp, Artificial
  Synthetic oligonucleotide
cgacccgcgagctccgcaatagctggcggcgccgcggttttgctgcttttacac

SEQ ID NO: 368248 - DNA, 60 bp, Artificial
  Synthetic oligonucleotide
cgacccgcgagtgcttgacatggtcatgccaacctcacttgagccagatctctgcgaaga

SEQ ID NO: 368249 - DNA, 54 bp, Artificial
  Synthetic oligonucleotide
cgacccgcgcggacaaggaggagggacccctggagcgtcgtcagacgttgcagg

SEQ ID NO: 368250 - DNA, 60 bp, Artificial
  Synthetic oligonucleotide
cgacccgtctatgccgttgacgaattattcctcgatcttgaatgtatgctcgcttttcca

SEQ ID NO: 368251 - DNA, 55 bp, Artificial
  Synthetic oligonucleotide
cgacccgtggcacccgtgcttgtacagtacaacgggacgactcaagtgtggcacg

SEQ ID NO: 368252 - DNA, 50 bp, Artificial
  Synthetic oligonucleotide
cgaccctacttttgtttgggacgtgaaggaatgtaccctacttgaaaccc

SEQ ID NO: 368253 - DNA, 59 bp, Artificial
  Synthetic oligonucleotide
cgaccctcacagggaccatcgcagtgagatttatcccggtcctgcctgggaacctatca

SEQ ID NO: 368254 - DNA, 53 bp, Artificial
  Synthetic oligonucleotide
cgaccctcccgtcaaggtcgtctatgaagagccgggtaactaccccggtgctc

SEQ ID NO: 368255 - DNA, 55 bp, Artificial
  Synthetic oligonucleotide
cgaccctgagttatttaggcagcattgcaccagttcaatggaaagagtgtttgga

SEQ ID NO: 368256 - DNA, 55 bp, Artificial
  Synthetic oligonucleotide
cgaccctggagcaccatggaagatctggatgctccgcatgacgtgtctggccgtt

SEQ ID NO: 368257 - DNA, 54 bp, Artificial
  Synthetic oligonucleotide
cgaccctgttaccttttccaacactgggggcatcacactgaaattgggtggtgg

SEQ ID NO: 368258 - DNA, 55 bp, Artificial
  Synthetic oligonucleotide
cgacccttatctgtggtcctgccgctatgatccacccagtaaaggatcaataccc

SEQ ID NO: 368259 - DNA, 56 bp, Artificial
  Synthetic oligonucleotide
cgacccttgtgggtccaatcacccacaatgtacctggaggctcgacctattctccc

SEQ ID NO: 368260 - DNA, 54 bp, Artificial
  Synthetic oligonucleotide
cgaccctttcaaccctccgagtgatccgactgactgtgacctaaccaaggtccc

SEQ ID NO: 368261 - DNA, 60 bp, Artificial
  Synthetic oligonucleotide
cgaccgaaacacctatatgtgtcaatgccgactgcccaatcgactatgaaggcagaggag

SEQ ID NO: 368262 - DNA, 56 bp, Artificial
  Synthetic oligonucleotide
cgaccgaaacgtgtgggtggtgtcctcttccaggttgctctaagtcgctgttacaa

SEQ ID NO: 368263 - DNA, 60 bp, Artificial
  Synthetic oligonucleotide
cgaccgaccatctcacatctacactcattgcggcaagactccgtcccaactcaacgactg

SEQ ID NO: 368264 - DNA, 55 bp, Artificial
  Synthetic oligonucleotide
cgaccgacgcacctcgtaccagaagtcccgccagaactgcctcataggaccctca

SEQ ID NO: 368265 - DNA, 55 bp, Artificial
  Synthetic oligonucleotide
cgaccgagcccatactgtttttcctattctacttgggccttctataacaatacta

SEQ ID NO: 368266 - DNA, 55 bp, Artificial
  Synthetic oligonucleotide
cgaccgatccatgggtgctctcaacatcaatcgtggttatcttgaacctatgtat

SEQ ID NO: 368267 - DNA, 55 bp, Artificial
  Synthetic oligonucleotide
cgaccgcaagacttagagccacactcaggcgaaatgatctacatggaaaaccgac

SEQ ID NO: 368268 - DNA, 55 bp, Artificial
  Synthetic oligonucleotide
cgaccgcaagctcctagactacaaagagtggtctccgcccagggttcaggtagag

SEQ ID NO: 368269 - DNA, 54 bp, Artificial
  Synthetic oligonucleotide
cgaccgccactatcaaaaacgatcttcgtgatcgttaccaagtcttacgtaagt

SEQ ID NO: 368270 - DNA, 51 bp, Artificial
  Synthetic oligonucleotide
cgaccgcctaagtcgtgacggcatccgcttcgctcgcactgacgatgaatg

SEQ ID NO: 368271 - DNA, 57 bp, Artificial
  Synthetic oligonucleotide
cgaccgcgtttgaaccatcacgttccgctggcatatcgtggaccatttcgtcccgaa

SEQ ID NO: 368272 - DNA, 55 bp, Artificial
  Synthetic oligonucleotide
cgaccgctcatcttgcgttttaaatcggggacaatcaaagtctctgatatccgat

SEQ ID NO: 368273 - DNA, 60 bp, Artificial
  Synthetic oligonucleotide
cgaccgctcatggatgtgacactatagcaaggtgccagtgcacaacgggagtgtactttt

SEQ ID NO: 368274 - DNA, 59 bp, Artificial
  Synthetic oligonucleotide
cgaccgctcttaatagagggagctgcgtctttaagccctggaatgatgatgggtatgtt

SEQ ID NO: 368275 - DNA, 58 bp, Artificial
  Synthetic oligonucleotide
cgaccgctgagatgtggtcgcgtttaaggcacgtgcgctccaagtcgaacgtgtttga

SEQ ID NO: 368276 - DNA, 60 bp, Artificial
  Synthetic oligonucleotide
cgaccggaatagagtggttcctcgagtgtgatgaagactgcattcttgattgcccactgc

SEQ ID NO: 368277 - DNA, 55 bp, Artificial
  Synthetic oligonucleotide
cgaccggaatagagtggttcctcgatggtgacgaagattgcattctttaatgccc

SEQ ID NO: 368278 - DNA, 58 bp, Artificial
  Synthetic oligonucleotide
cgaccggagttggtcccgacaaaatggtggcacgttactcatagatgcccagccgatg

SEQ ID NO: 368279 - DNA, 52 bp, Artificial
  Synthetic oligonucleotide
cgaccggattacaaccccccactgctagagtcttggaaggccccggactacg

SEQ ID NO: 368280 - DNA, 55 bp, Artificial
  Synthetic oligonucleotide
cgaccggctctcggcatatttgctgtcgttttggaacgggggacactcaaaactc

SEQ ID NO: 368281 - DNA, 58 bp, Artificial
  Synthetic oligonucleotide
cgaccgggaaatctactcagaaagcaccggacactccaactgcatccaaactgagaac

SEQ ID NO: 368282 - DNA, 59 bp, Artificial
  Synthetic oligonucleotide
cgaccgggaatgggtgtgaggaggtgaccatgagatggagcgctacctgttcgccggaa

SEQ ID NO: 368283 - DNA, 55 bp, Artificial
  Synthetic oligonucleotide
cgaccgggttaacgctatcgaacgggataaggcgctggcatgggtggcgaagaac

SEQ ID NO: 368284 - DNA, 57 bp, Artificial
  Synthetic oligonucleotide
cgaccggtgatgaactttatggtgggacaaaagttaatctgaatgaggctttcatac

SEQ ID NO: 368285 - DNA, 54 bp, Artificial
  Synthetic oligonucleotide
cgaccgtaattctacaagggagtacacagtttggttaaggctcctgagtctttg

SEQ ID NO: 368286 - DNA, 60 bp, Artificial
  Synthetic oligonucleotide
cgaccgtgctgttgcatcgatactcagcccggcgagtgacacctccgacgacgccgttac

SEQ ID NO: 368287 - DNA, 55 bp, Artificial
  Synthetic oligonucleotide
cgaccgtgggaggcctcaccatccgtccatattttgactgaagtattaaaaggtg

SEQ ID NO: 368288 - DNA, 60 bp, Artificial
  Synthetic oligonucleotide
cgaccgtgtctggattgctaccgaccgttcacgcgctcgccgtgctatcgaggcttgcgt

SEQ ID NO: 368289 - DNA, 51 bp, Artificial
  Synthetic oligonucleotide
cgaccgttggttggggattacgtcaactttcatgatgtatttactcttata

SEQ ID NO: 368290 - DNA, 55 bp, Artificial
  Synthetic oligonucleotide
cgaccgtttcgttgagctttctcttgcgtgagcgaattaagctagcgcttaggga

SEQ ID NO: 368291 - DNA, 60 bp, Artificial
  Synthetic oligonucleotide
cgacctaatcatattaactggggatcctatgcagagtgcctaccatgaaactaacaggga

SEQ ID NO: 368292 - DNA, 54 bp, Artificial
  Synthetic oligonucleotide
cgacctacaatttgactgtgggggacacagggtcagggctaattgtctttttcc

SEQ ID NO: 368293 - DNA, 60 bp, Artificial
  Synthetic oligonucleotide
cgacctacctatggacaatgctctatccatagccttatggacaattaaccacctgaatgt

SEQ ID NO: 368294 - DNA, 55 bp, Artificial
  Synthetic oligonucleotide
cgacctacgatgttatttacccgaaatcacatttccgaccgagatggtaatctca

SEQ ID NO: 368295 - DNA, 54 bp, Artificial
  Synthetic oligonucleotide
cgacctagagttggattcaattactcgggtggtaggcacaaacgaaattaagac

SEQ ID NO: 368296 - DNA, 55 bp, Artificial
  Synthetic oligonucleotide
cgacctagccatctgtgaaggagcttgggagaaggactttggagaagtactatac

SEQ ID NO: 368297 - DNA, 55 bp, Artificial
  Synthetic oligonucleotide
cgacctagctctatggccgggtcgtctctcgatcttacggtagtcaagtccgaag

SEQ ID NO: 368298 - DNA, 60 bp, Artificial
  Synthetic oligonucleotide
cgacctagtcccaccagaaactctctacgaggcagctcttctcagcttcgtacatggcgt

SEQ ID NO: 368299 - DNA, 60 bp, Artificial
  Synthetic oligonucleotide
cgacctatcgaccaaccatatgaggtcaacggtcattatgcgatggcacctagactattc

SEQ ID NO: 368300 - DNA, 58 bp, Artificial
  Synthetic oligonucleotide
cgacctcaggagagcctcgcggtcgagatcaagacatggatagatccaaccggacccg

SEQ ID NO: 368301 - DNA, 55 bp, Artificial
  Synthetic oligonucleotide
cgacctcatcgtcaaatgcttgtccgcataccctcacgtaaagtggctggtcatg

SEQ ID NO: 368302 - DNA, 55 bp, Artificial
  Synthetic oligonucleotide
cgacctccattaacggtgtcatgtggactgtttatcatggggccggttcaaggac

SEQ ID NO: 368303 - DNA, 55 bp, Artificial
  Synthetic oligonucleotide
cgacctcctatcggcgaaagggcttgcttgcgtttaggctggcgagatttaccct

SEQ ID NO: 368304 - DNA, 55 bp, Artificial
  Synthetic oligonucleotide
cgacctctcatacacaggggacaataccgcatggtatgcccgagccttgtccagg

SEQ ID NO: 368305 - DNA, 55 bp, Artificial
  Synthetic oligonucleotide
cgacctctgcaatcggtaaccccttgaaccatcaacccaatctttcaaatctgtc

SEQ ID NO: 368306 - DNA, 55 bp, Artificial
  Synthetic oligonucleotide
cgacctctggccttgttatgctttgtattcatgggtcacctgtgaattcttatac

SEQ ID NO: 368307 - DNA, 60 bp, Artificial
  Synthetic oligonucleotide
cgacctcttcatacgacttgaatctatgatcacgtttccactccacgtcatggcccgcaa

SEQ ID NO: 368308 - DNA, 54 bp, Artificial
  Synthetic oligonucleotide
cgacctgagagatcgattccaagtgttaaggaaatttacggcaacggttacagg

SEQ ID NO: 368309 - DNA, 58 bp, Artificial
  Synthetic oligonucleotide
cgacctgcagatatagggattttcactcccgccttcagggcacgtcgacgtctgaact

SEQ ID NO: 368310 - DNA, 59 bp, Artificial
  Synthetic oligonucleotide
cgacctgcatacagaaaacccaggttctacagaatgtacagaagccctgatgtccctaa

SEQ ID NO: 368311 - DNA, 55 bp, Artificial
  Synthetic oligonucleotide
cgacctgcatgaccctacatacacatggtggaacaaagtttcagtagatctgcag

SEQ ID NO: 368312 - DNA, 60 bp, Artificial
  Synthetic oligonucleotide
cgacctgccccagctatgtaccatacgccggtgatttaacactggctgataccagaaaga

SEQ ID NO: 368313 - DNA, 55 bp, Artificial
  Synthetic oligonucleotide
cgacctgcctacatctcactctcacagtgtggggtattacatactgattgcaggt

SEQ ID NO: 368314 - DNA, 54 bp, Artificial
  Synthetic oligonucleotide
cgacctgctctaggcatattgaatgtcgtattgcaattggggggcactcaaagt

SEQ ID NO: 368315 - DNA, 60 bp, Artificial
  Synthetic oligonucleotide
cgacctgctcttggcatattggctgtcgttttggatcaggggacacacaaagtctatggc

SEQ ID NO: 368316 - DNA, 60 bp, Artificial
  Synthetic oligonucleotide
cgacctgctgcacatgtcaacgccctggaacaacttggtgcacttcaatgttcttctgtt

SEQ ID NO: 368317 - DNA, 54 bp, Artificial
  Synthetic oligonucleotide
cgacctgcttgaatactggtttaagtgtatacggaatacccagatcatccagta

SEQ ID NO: 368318 - DNA, 52 bp, Artificial
  Synthetic oligonucleotide
cgacctggaactatcagacattgaataagcagttatacatggtcacaattta

SEQ ID NO: 368319 - DNA, 60 bp, Artificial
  Synthetic oligonucleotide
cgacctgtctacgcaatggacgacctcttcatacgacttgaatctatgatcacgtttcca

SEQ ID NO: 368320 - DNA, 59 bp, Artificial
  Synthetic oligonucleotide
cgacctgtgatttattggaactaaatgcttcgcaaaagaaacgtgtcatgtccatggaa

SEQ ID NO: 368321 - DNA, 59 bp, Artificial
  Synthetic oligonucleotide
cgaccttaccgaatatgcttccgccgattttcccaccaaatgatagagacagcatctta

SEQ ID NO: 368322 - DNA, 53 bp, Artificial
  Synthetic oligonucleotide
cgaccttattagagtcaatttactattgagacatctccaccataatgggagct

SEQ ID NO: 368323 - DNA, 55 bp, Artificial
  Synthetic oligonucleotide
cgaccttccggagaagcatgaacgcgaaattttcaacaaagcgcatggcttctcc

SEQ ID NO: 368324 - DNA, 57 bp, Artificial
  Synthetic oligonucleotide
cgaccttcgaaggtctgtgcggatccccgcttgtcacggacgatccttccggagtca

SEQ ID NO: 368325 - DNA, 59 bp, Artificial
  Synthetic oligonucleotide
cgaccttgaccaccgtgatagttcgggatgtagtgtcgagctgctacgtggagaccggc

SEQ ID NO: 368326 - DNA, 58 bp, Artificial
  Synthetic oligonucleotide
cgaccttgagctcccttgtgcccaatgtcaagacgggttctaatttgttcctgcacga

SEQ ID NO: 368327 - DNA, 60 bp, Artificial
  Synthetic oligonucleotide
cgaccttggaagatttgtgcataatagagacagggctgtcaagctagcaaaatcaatggc

SEQ ID NO: 368328 - DNA, 60 bp, Artificial
  Synthetic oligonucleotide
cgaccttggaccagcaacagctcagatggctcttcagctatttatcaaggactacagata

SEQ ID NO: 368329 - DNA, 59 bp, Artificial
  Synthetic oligonucleotide
cgaccttgtcgttatctgcgagagcgcgggaacccaagaggatgcggcgagcctacgag

SEQ ID NO: 368330 - DNA, 55 bp, Artificial
  Synthetic oligonucleotide
cgaccttttagaaggcgggaagatggatattgtcgattatatggaagaaaacaat

SEQ ID NO: 368331 - DNA, 53 bp, Artificial
  Synthetic oligonucleotide
cgacgaaacgattacgtgaatgaaaaacgtaacacacgtgcgtttaattcaaa

SEQ ID NO: 368332 - DNA, 55 bp, Artificial
  Synthetic oligonucleotide
cgacgaaagcttcaatttccctagtatcttacagaagtgaaccccattcacgacg

SEQ ID NO: 368333 - DNA, 59 bp, Artificial
  Synthetic oligonucleotide
cgacgaacagccatacgctccagagccgacataatccctgtgccacgtcctttacggac

SEQ ID NO: 368334 - DNA, 56 bp, Artificial
  Synthetic oligonucleotide
cgacgaagaaacaagcgaaggatacggataaaaccaaagcacaagttacatattca

SEQ ID NO: 368335 - DNA, 58 bp, Artificial
  Synthetic oligonucleotide
cgacgaaggaggtccttacagctatcaagaaacgtaatgctgacgttccagagctagg

SEQ ID NO: 368336 - DNA, 52 bp, Artificial
  Synthetic oligonucleotide
cgacgaaggcacattcgaggtatggtataacgatggcagtctcgctaacgac

SEQ ID NO: 368337 - DNA, 57 bp, Artificial
  Synthetic oligonucleotide
cgacgaaggtcatacattgggagtacgaattaatttcgccgacgtactcagtgagta

SEQ ID NO: 368338 - DNA, 57 bp, Artificial
  Synthetic oligonucleotide
cgacgaagtacgaacatccacaaggtagatcaactctccgtcgtctggttgccctct

SEQ ID NO: 368339 - DNA, 55 bp, Artificial
  Synthetic oligonucleotide
cgacgaatattcaaaggtgatcctgtcaatcctcataatgaaatcaaggtacagg

SEQ ID NO: 368340 - DNA, 56 bp, Artificial
  Synthetic oligonucleotide
cgacgaatctaaagactattatgaaaatgcatacttaatctcaaatttaacttcac

SEQ ID NO: 368341 - DNA, 55 bp, Artificial
  Synthetic oligonucleotide
cgacgaatggctccgagacatgttacaggacctcaattcagaggcccagtgccac

SEQ ID NO: 368342 - DNA, 57 bp, Artificial
  Synthetic oligonucleotide
cgacgacaaaataaatagactgacattcgtttcctttactccgatgatcgatcggaa

SEQ ID NO: 368343 - DNA, 54 bp, Artificial
  Synthetic oligonucleotide
cgacgacatacagggggggatcaagttcttcccgtcattcaagaactggttggg

SEQ ID NO: 368344 - DNA, 55 bp, Artificial
  Synthetic oligonucleotide
cgacgaccagattgaatacctccagaacctcaaatctcttgccctaacactgggg

SEQ ID NO: 368345 - DNA, 56 bp, Artificial
  Synthetic oligonucleotide
cgacgacccgaagcttgtcaactttggccgtatcgtgctctgcacttacggctttg

SEQ ID NO: 368346 - DNA, 50 bp, Artificial
  Synthetic oligonucleotide
cgacgacgttttggtaggtttgacgaagtcaaagaaaagtagggactaaa

SEQ ID NO: 368347 - DNA, 60 bp, Artificial
  Synthetic oligonucleotide
cgacgactgagtggaccgcaccaggcgcggttccggttgctctgcgtgattccgatcgcc

SEQ ID NO: 368348 - DNA, 55 bp, Artificial
  Synthetic oligonucleotide
cgacgactggaccgtttgccattttaactggttcaacgccgactgcacaacagtt

SEQ ID NO: 368349 - DNA, 55 bp, Artificial
  Synthetic oligonucleotide
cgacgactgggccttttgcaatattgaccggatcaacgccaaccgcacagcagct

SEQ ID NO: 368350 - DNA, 55 bp, Artificial
  Synthetic oligonucleotide
cgacgacttcaactcacagcactcaaacgtagcgatgaagattctcatcgaggag

SEQ ID NO: 368351 - DNA, 50 bp, Artificial
  Synthetic oligonucleotide
cgacgactttcggaacggttccacaaacgataaccccacctctattaaac

SEQ ID NO: 368352 - DNA, 51 bp, Artificial
  Synthetic oligonucleotide
cgacgagaaaagagatgctagaaccgcaagactgctattgggctgtccaaa

SEQ ID NO: 368353 - DNA, 55 bp, Artificial
  Synthetic oligonucleotide
cgacgagaaaaggtgtaagtgcgtagtgcagcacctgcctctgtgggcggctctg

SEQ ID NO: 368354 - DNA, 60 bp, Artificial
  Synthetic oligonucleotide
cgacgagaatactcagtgacgtcatataccgattcaacagtaagttgaagatgagtggag

SEQ ID NO: 368355 - DNA, 55 bp, Artificial
  Synthetic oligonucleotide
cgacgagatgctgacaaaacttctcaacgtatgatctgcttgaccgcagatccgc

SEQ ID NO: 368356 - DNA, 55 bp, Artificial
  Synthetic oligonucleotide
cgacgagatgttggcaaacccccctggggatctcgaggctttagtcacgcgttcc

SEQ ID NO: 368357 - DNA, 51 bp, Artificial
  Synthetic oligonucleotide
cgacgagcgcgagtataaaatacatgtgcaggagcctgacgtaacatcgat

SEQ ID NO: 368358 - DNA, 60 bp, Artificial
  Synthetic oligonucleotide
cgacgaggaacttctcaccgccgtgaggatcatcaaaatcctataccagagcagtgagta

SEQ ID NO: 368359 - DNA, 55 bp, Artificial
  Synthetic oligonucleotide
cgacgaggcgtgggcaatcgagatggctccgacccatggttcctaccttggtatc

SEQ ID NO: 368360 - DNA, 55 bp, Artificial
  Synthetic oligonucleotide
cgacgaggttcctgtcgattcacaatcggcagttgtctcagtagccctcttggag

SEQ ID NO: 368361 - DNA, 50 bp, Artificial
  Synthetic oligonucleotide
cgacgagtggactcccactagggcgtctgagaagcgccaatggatgcgtg

SEQ ID NO: 368362 - DNA, 55 bp, Artificial
  Synthetic oligonucleotide
cgacgataatcacctcccttattacatacagagatcgattcatcacgtggttcgg

SEQ ID NO: 368363 - DNA, 60 bp, Artificial
  Synthetic oligonucleotide
cgacgatactgaatctgagttaaatgtttatagatcatgtaaaggtattgtctatagcgg

SEQ ID NO: 368364 - DNA, 55 bp, Artificial
  Synthetic oligonucleotide
cgacgatagagaagtgctgatgtggaagtttgacagtgccctagcgcgaagacac

SEQ ID NO: 368365 - DNA, 60 bp, Artificial
  Synthetic oligonucleotide
cgacgatagagctctaagcagtagggctagcgattacactcttcaccactctgtgcgtga

SEQ ID NO: 368366 - DNA, 55 bp, Artificial
  Synthetic oligonucleotide
cgacgatattctctggcggcgtacaaagtagcgtggtctcgactaagcagatcct

SEQ ID NO: 368367 - DNA, 55 bp, Artificial
  Synthetic oligonucleotide
cgacgatgattgcttccctcggtcgtaacgatctcgaacgtgccagatatttggg

SEQ ID NO: 368368 - DNA, 55 bp, Artificial
  Synthetic oligonucleotide
cgacgatgcatactgcaaccgtttacaaacaaatacacatttacaagcagtgtag

SEQ ID NO: 368369 - DNA, 60 bp, Artificial
  Synthetic oligonucleotide
cgacgatgcgaatcagcactgctatacaagctggagaagatttaagaacagtgactaatg

SEQ ID NO: 368370 - DNA, 60 bp, Artificial
  Synthetic oligonucleotide
cgacgatgcgaattagtactgctatacagaccggagaggatttaagaacgatgacagatg

SEQ ID NO: 368371 - DNA, 60 bp, Artificial
  Synthetic oligonucleotide
cgacgattgatgttgagtatagagaacccgcaccctacgtacatgctcagcgttatatac

SEQ ID NO: 368372 - DNA, 54 bp, Artificial
  Synthetic oligonucleotide
cgacgatttaatacacgtagcaatttgtttaaccgttcaaccgctgtgaaacga

SEQ ID NO: 368373 - DNA, 56 bp, Artificial
  Synthetic oligonucleotide
cgacgcaagggaagaggaggggcaaatcctgtatttagaccaacaggcgggactga

SEQ ID NO: 368374 - DNA, 54 bp, Artificial
  Synthetic oligonucleotide
cgacgcaccgcttgacatcccgtaaaacttaattcggcgaaatgttcttacgag

SEQ ID NO: 368375 - DNA, 55 bp, Artificial
  Synthetic oligonucleotide
cgacgcacggactgctctacaccgtcctcaacacgggacccgtgacttgggagaa

SEQ ID NO: 368376 - DNA, 56 bp, Artificial
  Synthetic oligonucleotide
cgacgcacttcaaagagtaaccgcgtggttgtggtccaaaccactggccaaccaca

SEQ ID NO: 368377 - DNA, 55 bp, Artificial
  Synthetic oligonucleotide
cgacgcaggaataggtctcccatataaacttcttcgcaaagacactcaccgtcag

SEQ ID NO: 368378 - DNA, 50 bp, Artificial
  Synthetic oligonucleotide
cgacgcaggccgatatccctagtggcacgaaagcactacgggacctccga

SEQ ID NO: 368379 - DNA, 55 bp, Artificial
  Synthetic oligonucleotide
cgacgcatacctagatatggtggacggcgctacttgctgcctagataccgccagt

SEQ ID NO: 368380 - DNA, 60 bp, Artificial
  Synthetic oligonucleotide
cgacgccaccgtccttgtgccttcaagagtagagcaggccaagcttatagacctcaacag

SEQ ID NO: 368381 - DNA, 60 bp, Artificial
  Synthetic oligonucleotide
cgacgccatcgtagccatctttgctttgattggtggtggttggatgctatgggattattt

SEQ ID NO: 368382 - DNA, 59 bp, Artificial
  Synthetic oligonucleotide
cgacgccattatgaagcacataatggagaagccggatcctattaacgtgttccaaaaca

SEQ ID NO: 368383 - DNA, 53 bp, Artificial
  Synthetic oligonucleotide
cgacgccattcattccatgtgactagcgcccatgcgacccgtcgtgtggttgt

SEQ ID NO: 368384 - DNA, 60 bp, Artificial
  Synthetic oligonucleotide
cgacgccgaacgcatcagagagctattacttgactataaacaatgataacagcaacgttt

SEQ ID NO: 368385 - DNA, 60 bp, Artificial
  Synthetic oligonucleotide
cgacgccgttgctaatctcccctccaatgcactggcctcactagtgagtcgagtcgttcc

SEQ ID NO: 368386 - DNA, 55 bp, Artificial
  Synthetic oligonucleotide
cgacgccttataatgttcgtatttggcatgctcctactatgacagaggttaacca

SEQ ID NO: 368387 - DNA, 55 bp, Artificial
  Synthetic oligonucleotide
cgacgcgactggtgaaatctacgaactgttggaatttgacatacatgggaacagc

SEQ ID NO: 368388 - DNA, 55 bp, Artificial
  Synthetic oligonucleotide
cgacgcgagacccaggagcccctattactagggacgctctgccacagcgcatatc

SEQ ID NO: 368389 - DNA, 54 bp, Artificial
  Synthetic oligonucleotide
cgacgcggcccccactggctctgctgttaccccgaaggacatcttcgggtaccc

SEQ ID NO: 368390 - DNA, 60 bp, Artificial
  Synthetic oligonucleotide
cgacgcgggcgcgccactgggtagcgctgggctctgctgccttgctggctggcttgatct

SEQ ID NO: 368391 - DNA, 54 bp, Artificial
  Synthetic oligonucleotide
cgacgcgtaatacgatacctaatggattctgctctgttgatggcgtgccgtacc

SEQ ID NO: 368392 - DNA, 60 bp, Artificial
  Synthetic oligonucleotide
cgacgcgtctagatttgatcaacactgttccgttgaagcgttgcaatatgagcatagctt

SEQ ID NO: 368393 - DNA, 53 bp, Artificial
  Synthetic oligonucleotide
cgacgctcgggttggcagttcggagcgatccccgtccctggaaaagtaaccga

SEQ ID NO: 368394 - DNA, 58 bp, Artificial
  Synthetic oligonucleotide
cgacgctgctaggtaagtttaaagacttatttgggctgtcatatatggagctggtacg

SEQ ID NO: 368395 - DNA, 55 bp, Artificial
  Synthetic oligonucleotide
cgacgctggtgacgagagtacggagcacttcgaccgggcagaagagataacgatc

SEQ ID NO: 368396 - DNA, 58 bp, Artificial
  Synthetic oligonucleotide
cgacgctggtgtgttacgaactcactcctttatcatcggcttgcactaattcccgtcg

SEQ ID NO: 368397 - DNA, 59 bp, Artificial
  Synthetic oligonucleotide
cgacgctgtggcaccaccgttagccataaacgagtctggtggggtgagactgctaagac

SEQ ID NO: 368398 - DNA, 60 bp, Artificial
  Synthetic oligonucleotide
cgacgcttaacaattcaacactacccaatgagttgttaattgaatcacttggctatatgc

SEQ ID NO: 368399 - DNA, 53 bp, Artificial
  Synthetic oligonucleotide
cgacgcttacttcaccctcaagtacgtgtttccgcttaacactccgaggggct

SEQ ID NO: 368400 - DNA, 52 bp, Artificial
  Synthetic oligonucleotide
cgacgcttcgtttgttcgtcaacggggtcgaaaggttggttgccacggacaa

SEQ ID NO: 368401 - DNA, 60 bp, Artificial
  Synthetic oligonucleotide
cgacgcttgacgatgggagtgcaactgaatcgacagtctacgcaccaactaagagacatc

SEQ ID NO: 368402 - DNA, 60 bp, Artificial
  Synthetic oligonucleotide
cgacgctttatcgcagctcgctgcaagcgcaacaggtgctctcagccctcacgctggtcc

SEQ ID NO: 368403 - DNA, 60 bp, Artificial
  Synthetic oligonucleotide
cgacgcttttgacaaatccaatggaccagctgagctgatggacgactcttgggtcgaatc

SEQ ID NO: 368404 - DNA, 55 bp, Artificial
  Synthetic oligonucleotide
cgacggaacaggtgcaaaatatcctacagttgatgctgtaaaattagctttaact

SEQ ID NO: 368405 - DNA, 51 bp, Artificial
  Synthetic oligonucleotide
cgacggaacttttatggaagtttttgttgatgaaataggtttgtacccacc

SEQ ID NO: 368406 - DNA, 55 bp, Artificial
  Synthetic oligonucleotide
cgacggacactcgatgcgacacagttgctcgagagcttcttcttttgagagagag

SEQ ID NO: 368407 - DNA, 55 bp, Artificial
  Synthetic oligonucleotide
cgacggacggattcccatgtgcgttaatcacctgggttgggtgtatatacgcgtg

SEQ ID NO: 368408 - DNA, 55 bp, Artificial
  Synthetic oligonucleotide
cgacggacgggtgctgtcctttatcgctagtgttccaatgtgtgatggagagctg

SEQ ID NO: 368409 - DNA, 55 bp, Artificial
  Synthetic oligonucleotide
cgacggactggcaaactgtacgatgtcacatttgttggactcgaaggtccaacac

SEQ ID NO: 368410 - DNA, 56 bp, Artificial
  Synthetic oligonucleotide
cgacggagacacaaaccccggttgaacaggacccagtccgcatgaatgcactcctt

SEQ ID NO: 368411 - DNA, 52 bp, Artificial
  Synthetic oligonucleotide
cgacggagagggctacaacgttgctcaatgcaacatgaccaaagactggttc

SEQ ID NO: 368412 - DNA, 55 bp, Artificial
  Synthetic oligonucleotide
cgacggagccattgcagctctcctgattgttgtgtactaccacttgatggctctg

SEQ ID NO: 368413 - DNA, 58 bp, Artificial
  Synthetic oligonucleotide
cgacggagctccttttatgaaattatcttcgatctgccctctaagaaagagaggatct

SEQ ID NO: 368414 - DNA, 60 bp, Artificial
  Synthetic oligonucleotide
cgacggaggttgaggctgagggatggcagactgggagctccaaactctatagtatacctg

SEQ ID NO: 368415 - DNA, 55 bp, Artificial
  Synthetic oligonucleotide
cgacggatactgaatggatgaagtgggcgatagaggatagaatggacgtgcaacc

SEQ ID NO: 368416 - DNA, 49 bp, Artificial
  Synthetic oligonucleotide
cgacggataggggggtgtccccggaagggggggtgccctatgcgtaccc

SEQ ID NO: 368417 - DNA, 57 bp, Artificial
  Synthetic oligonucleotide
cgacggatcttccattaaatccccagatcccactaaaactcattcttcaggcatggg

SEQ ID NO: 368418 - DNA, 52 bp, Artificial
  Synthetic oligonucleotide
cgacggcactggaaagagggtctactaccttacccgtgatcccacaaccccc

SEQ ID NO: 368419 - DNA, 60 bp, Artificial
  Synthetic oligonucleotide
cgacggcaggcggaagagattatacgcaatatagggttgaggaaagagcgattgtatgga

SEQ ID NO: 368420 - DNA, 55 bp, Artificial
  Synthetic oligonucleotide
cgacggcccaaacaccccagaatgccccgatgaccaaagagcatggaacatctgg

SEQ ID NO: 368421 - DNA, 55 bp, Artificial
  Synthetic oligonucleotide
cgacggcgactttcacttgattgatgatcccggtgttccatggaaagtctggctc

SEQ ID NO: 368422 - DNA, 57 bp, Artificial
  Synthetic oligonucleotide
cgacggctacgagcaacccccactgtgttcggattgtgggttgatagggtatcaatg

SEQ ID NO: 368423 - DNA, 58 bp, Artificial
  Synthetic oligonucleotide
cgacggctctgccgcgggtgcaaagcgcttcctctagttttacaacgacccatctgaa

SEQ ID NO: 368424 - DNA, 56 bp, Artificial
  Synthetic oligonucleotide
cgacgggaaaattaggtgcgtgactgccgcacatgtccttacgggtaattcggcta

SEQ ID NO: 368425 - DNA, 51 bp, Artificial
  Synthetic oligonucleotide
cgacgggaaaccgtacgtcgttacgcggacagacgacacccgacttttggc

SEQ ID NO: 368426 - DNA, 55 bp, Artificial
  Synthetic oligonucleotide
cgacgggatggagtcgatttggtttcaattgcatagcagaagagccagtgtacga

SEQ ID NO: 368427 - DNA, 51 bp, Artificial
  Synthetic oligonucleotide
cgacgggccaggttcgttcgcgtacgacaataaggcattaccaccgcgacg

SEQ ID NO: 368428 - DNA, 55 bp, Artificial
  Synthetic oligonucleotide
cgacgggctttgtgccttgtcaatcctctggatgatcgccagcactcgcgcaggc

SEQ ID NO: 368429 - DNA, 56 bp, Artificial
  Synthetic oligonucleotide
cgacggggcggtaatgtgtaccagcgctgtagagaggtccgtaggggcagaagtgg

SEQ ID NO: 368430 - DNA, 54 bp, Artificial
  Synthetic oligonucleotide
cgacgggggagattacttcgagtgtggcgtgtgtcacaacaaaccgtatttagg

SEQ ID NO: 368431 - DNA, 53 bp, Artificial
  Synthetic oligonucleotide
cgacggggtcgttcgttcgacccttgagaaattgctcccttatgaaccacctg

SEQ ID NO: 368432 - DNA, 54 bp, Artificial
  Synthetic oligonucleotide
cgacggggttgggttgagcagccttcgtcgtgtttcgcctcgttcaacggacca

SEQ ID NO: 368433 - DNA, 56 bp, Artificial
  Synthetic oligonucleotide
cgacgggtgagcgattaaccagatcttcctgtactttaccggccattatttctata

SEQ ID NO: 368434 - DNA, 55 bp, Artificial
  Synthetic oligonucleotide
cgacgggttcgcatttatctgtggaagagacggtgtgagaatatgttccgggacc

SEQ ID NO: 368435 - DNA, 55 bp, Artificial
  Synthetic oligonucleotide
cgacggtaagatgggtaacatcacctcgaccgctgcgaagcaggacgagagcccc

SEQ ID NO: 368436 - DNA, 52 bp, Artificial
  Synthetic oligonucleotide
cgacggtactattgaacattactttggatcggcatacgtcaagagaggtgca

SEQ ID NO: 368437 - DNA, 59 bp, Artificial
  Synthetic oligonucleotide
cgacggttagtagtgaggccggcacggaggacgtcgtgtgctgctcaatgtcttacacc

SEQ ID NO: 368438 - DNA, 56 bp, Artificial
  Synthetic oligonucleotide
cgacggttgagggaaacaacagagtgacttctgttttttcattggacagctgaaat

SEQ ID NO: 368439 - DNA, 52 bp, Artificial
  Synthetic oligonucleotide
cgacgtaaatgcaagttcgcatgtaattaatacggaagcaccgttaaacagt

SEQ ID NO: 368440 - DNA, 55 bp, Artificial
  Synthetic oligonucleotide
cgacgtaacatcaggcaggtgcaaaccgaccaagggcacttcaccatgcttgggg

SEQ ID NO: 368441 - DNA, 58 bp, Artificial
  Synthetic oligonucleotide
cgacgtacaacggagaattgacataattaatcagttaatgcaaccttccagaatacaa

SEQ ID NO: 368442 - DNA, 58 bp, Artificial
  Synthetic oligonucleotide
cgacgtaggacttgacgtcggagctggatttagctccctgtatgttcggatggaaatg

SEQ ID NO: 368443 - DNA, 54 bp, Artificial
  Synthetic oligonucleotide
cgacgtatcacatatgtacatatccgtatatattccgataggttcgatagatac

SEQ ID NO: 368444 - DNA, 55 bp, Artificial
  Synthetic oligonucleotide
cgacgtcagtctcgaccatgtggctatcatcctcgtcagaatttcggtttactac

SEQ ID NO: 368445 - DNA, 55 bp, Artificial
  Synthetic oligonucleotide
cgacgtcatcaatgacgttataccaagcgttattagaataaacctttggacttaa

SEQ ID NO: 368446 - DNA, 56 bp, Artificial
  Synthetic oligonucleotide
cgacgtcccctggtgagccggccccctcagagacaggttccgcctcctctatgccc

SEQ ID NO: 368447 - DNA, 55 bp, Artificial
  Synthetic oligonucleotide
cgacgtcgagcaccaacgcattcccacatctggggtgctcccagtttgaatccgt

SEQ ID NO: 368448 - DNA, 60 bp, Artificial
  Synthetic oligonucleotide
cgacgtcgatttaggcggcagatacagcgagtcagtcacatcctcctacgagtggggtaa

SEQ ID NO: 368449 - DNA, 55 bp, Artificial
  Synthetic oligonucleotide
cgacgtcgtatcgcaatccggggctggagctcgctctcgacagtcggtccgcccc

SEQ ID NO: 368450 - DNA, 60 bp, Artificial
  Synthetic oligonucleotide
cgacgtcgtctcggaagtatcccagacagtgcggaatcactgagccctctgagcccgaca

SEQ ID NO: 368451 - DNA, 56 bp, Artificial
  Synthetic oligonucleotide
cgacgtctccacaggccaacgaaccggacccacccccaaagacgcgatcattcaga

SEQ ID NO: 368452 - DNA, 55 bp, Artificial
  Synthetic oligonucleotide
cgacgtctcctgtccctggccttagcagcagtaagaatcctgcaagaaagcagtg

SEQ ID NO: 368453 - DNA, 55 bp, Artificial
  Synthetic oligonucleotide
cgacgtctcgtgccactcgcattattaccacctatcggtcgtctcttttgcctcg

SEQ ID NO: 368454 - DNA, 55 bp, Artificial
  Synthetic oligonucleotide
cgacgtctgtagtgcagaacttcaacatacaaggtgatggcaatcacttcgcacc

SEQ ID NO: 368455 - DNA, 55 bp, Artificial
  Synthetic oligonucleotide
cgacgtgaaaatgcgcgacttaaacttatacgatcaggctcatgtgaaagatacc

SEQ ID NO: 368456 - DNA, 52 bp, Artificial
  Synthetic oligonucleotide
cgacgtgaacattaccaaaatagatacgagagttttcactcaatttactgtg

SEQ ID NO: 368457 - DNA, 55 bp, Artificial
  Synthetic oligonucleotide
cgacgtgaccacagaccggtcccagcgtttgacgctgcggtttatccctgtggac

SEQ ID NO: 368458 - DNA, 55 bp, Artificial
  Synthetic oligonucleotide
cgacgtgagagaaacgtatgcgcgaatgaatgctaaagttaaagctttagtgtct

SEQ ID NO: 368459 - DNA, 59 bp, Artificial
  Synthetic oligonucleotide
cgacgtgatttgcgaagtgagcggaggaccagatttagagtttgcaggaccgacctgcc

SEQ ID NO: 368460 - DNA, 60 bp, Artificial
  Synthetic oligonucleotide
cgacgtgcaaggtaagatcgaggagatcccgttacatcaagtctcactgcacacttcaag

SEQ ID NO: 368461 - DNA, 59 bp, Artificial
  Synthetic oligonucleotide
cgacgtgctatgccgcgcctaggcacgttatctagccgtcacctctagtgctgtccaag

SEQ ID NO: 368462 - DNA, 52 bp, Artificial
  Synthetic oligonucleotide
cgacgtggaaaaattcaataaactgataacagattcaccagtactgtccgct

SEQ ID NO: 368463 - DNA, 56 bp, Artificial
  Synthetic oligonucleotide
cgacgtggaaggaagagaaagcttgacccagcagagcccgacggcgtacgcttcgg

SEQ ID NO: 368464 - DNA, 54 bp, Artificial
  Synthetic oligonucleotide
cgacgtggagaggcccggttttgaccactggtaccacaatagtgacgggggcca

SEQ ID NO: 368465 - DNA, 55 bp, Artificial
  Synthetic oligonucleotide
cgacgtggtacaaggcatcaatgctatagaaccttgggctcagaatccaggatgt

SEQ ID NO: 368466 - DNA, 55 bp, Artificial
  Synthetic oligonucleotide
cgacgtgtatggatgcagaaaacgcagttgacggaggcaaccggagatgcagagc

SEQ ID NO: 368467 - DNA, 50 bp, Artificial
  Synthetic oligonucleotide
cgacgtgtcggcccttggatactccgacgtcgcctgcccaatctgcttcg

SEQ ID NO: 368468 - DNA, 52 bp, Artificial
  Synthetic oligonucleotide
cgacgtgttagccacccaacttttcatggatctaaactttttgaacttaaag

SEQ ID NO: 368469 - DNA, 59 bp, Artificial
  Synthetic oligonucleotide
cgacgttaaagaacactctctagtctttgagagcatttgtgacacattcaaatccgttc

SEQ ID NO: 368470 - DNA, 52 bp, Artificial
  Synthetic oligonucleotide
cgacgttaaaggattgtaaccaaacgcttcttgccgtcttttccgacgctaa

SEQ ID NO: 368471 - DNA, 55 bp, Artificial
  Synthetic oligonucleotide
cgacgttacacccaattgggaaagtgaaagctgcttgtgcagcttgttcatagct

SEQ ID NO: 368472 - DNA, 55 bp, Artificial
  Synthetic oligonucleotide
cgacgttagggaacaagctaacagtgaacgttgggatggaggatgcggaagtacc

SEQ ID NO: 368473 - DNA, 50 bp, Artificial
  Synthetic oligonucleotide
cgacgttccaccgatgatctgcgggctccctttccaccgggaccggtatt

SEQ ID NO: 368474 - DNA, 55 bp, Artificial
  Synthetic oligonucleotide
cgacgttctgctcaatatcgaggggtattttgcaggtttgtgcgcgtactcggcc

SEQ ID NO: 368475 - DNA, 55 bp, Artificial
  Synthetic oligonucleotide
cgacgttctggtatttgttccgtacgatcaagagccgctcaacggggattggaaa

SEQ ID NO: 368476 - DNA, 55 bp, Artificial
  Synthetic oligonucleotide
cgacgttgcatggcgttagcggacatggagcgaaaccaggggccataggatggca

SEQ ID NO: 368477 - DNA, 60 bp, Artificial
  Synthetic oligonucleotide
cgacgtttcgagagttccagatgaccagatgtatagacttagagacagattgaggttact

SEQ ID NO: 368478 - DNA, 55 bp, Artificial
  Synthetic oligonucleotide
cgacgtttggaataggagacacagtaaccacaataatagggctttcaatggcagg

SEQ ID NO: 368479 - DNA, 60 bp, Artificial
  Synthetic oligonucleotide
cgacgtttggctgatttatggggcatatgtagggatgtgtgtcaccttcaccctaagatg

SEQ ID NO: 368480 - DNA, 55 bp, Artificial
  Synthetic oligonucleotide
cgactaactttagtcgattaatgctaacgcaatgactaactgaagctagaagaag

SEQ ID NO: 368481 - DNA, 53 bp, Artificial
  Synthetic oligonucleotide
cgactaagactcaagacgttaccgttaatccaggaccgttcgcgcaaacaaat

SEQ ID NO: 368482 - DNA, 55 bp, Artificial
  Synthetic oligonucleotide
cgactacaaatcgttctttacgatcgactggtctggttttgatcaacgcctcccc

SEQ ID NO: 368483 - DNA, 58 bp, Artificial
  Synthetic oligonucleotide
cgactacaccagtgggtaagctcggagtgcaccaccccatgctccgattgctggctaa

SEQ ID NO: 368484 - DNA, 55 bp, Artificial
  Synthetic oligonucleotide
cgactacactttatggaggagtgggacgtgggagcgcaaatgctacagaacctgt

SEQ ID NO: 368485 - DNA, 60 bp, Artificial
  Synthetic oligonucleotide
cgactacatttgggtaagtcgcaacctctcattgtctgtttggtgaacatagtgctcact

SEQ ID NO: 368486 - DNA, 55 bp, Artificial
  Synthetic oligonucleotide
cgactacctcacaagatgctgcctataagacactgaagagtctggtctgtacaga

SEQ ID NO: 368487 - DNA, 60 bp, Artificial
  Synthetic oligonucleotide
cgactacctcggcccaccggatggctccgtcaaatatctaggcgtgggcacagtgctgaa

SEQ ID NO: 368488 - DNA, 55 bp, Artificial
  Synthetic oligonucleotide
cgactacgaccccgagagacttcatagagatcgtgttaaaattcatgtgcgagac

SEQ ID NO: 368489 - DNA, 55 bp, Artificial
  Synthetic oligonucleotide
cgactacgattgtagatacaactagcgcaactaattcaatagcgacacagaccgc

SEQ ID NO: 368490 - DNA, 60 bp, Artificial
  Synthetic oligonucleotide
cgactacggtgcatataaaagagctgatcagcacagatttgaaggagactgatggagcct

SEQ ID NO: 368491 - DNA, 60 bp, Artificial
  Synthetic oligonucleotide
cgactacgtctgcactttccaccattaatattgcatcagctgaacaaacgctgaatgcgt

SEQ ID NO: 368492 - DNA, 59 bp, Artificial
  Synthetic oligonucleotide
cgactactatggtcgctcatcacgctcctctcaagcgctactctccgcctgccgaaggg

SEQ ID NO: 368493 - DNA, 60 bp, Artificial
  Synthetic oligonucleotide
cgactactatggtcgctcatcacgcttcacccgctcatgaaacccggcaggctacgaagc

SEQ ID NO: 368494 - DNA, 55 bp, Artificial
  Synthetic oligonucleotide
cgactagaggagccgccataatgagtggtgaagggaaactaacaccgtactgggg

SEQ ID NO: 368495 - DNA, 55 bp, Artificial
  Synthetic oligonucleotide
cgactagagtttgtcgagaatgttgacttagacagggttttacaatcacaccctg

SEQ ID NO: 368496 - DNA, 58 bp, Artificial
  Synthetic oligonucleotide
cgactagcaaactacctactcttcataacgggtatgcaacaaaccagtgactatcagt

SEQ ID NO: 368497 - DNA, 60 bp, Artificial
  Synthetic oligonucleotide
cgactagctgcggcaataccctcacatgctacttgaaagccactgcggcctgtcgagctg

SEQ ID NO: 368498 - DNA, 55 bp, Artificial
  Synthetic oligonucleotide
cgactaggtaacagagcatctattagaaccaggagtggggctactgtaggagctc

SEQ ID NO: 368499 - DNA, 60 bp, Artificial
  Synthetic oligonucleotide
cgactatacagcttgtgtgccgtctgtagccttaccagctcgttagagactgacttacag

SEQ ID NO: 368500 - DNA, 55 bp, Artificial
  Synthetic oligonucleotide
cgactatccaacttgacaggacattgctatcggacattagtgctgtcaccgcccc

SEQ ID NO: 368501 - DNA, 50 bp, Artificial
  Synthetic oligonucleotide
cgactatcgaaagcacgatgattagtcactagcaaacgctggtggataat

SEQ ID NO: 368502 - DNA, 55 bp, Artificial
  Synthetic oligonucleotide
cgactatgagcagagagggaagccataaagatatagagaagtacggcgtggacag

SEQ ID NO: 368503 - DNA, 59 bp, Artificial
  Synthetic oligonucleotide
cgactatgcggccttttggaagtgcatcgccagttgggcatataacgggctcgtccaaa

SEQ ID NO: 368504 - DNA, 60 bp, Artificial
  Synthetic oligonucleotide
cgactatgtgttccacacatcgcagagccaacaactacggggacgcaaagcagccttcct

SEQ ID NO: 368505 - DNA, 52 bp, Artificial
  Synthetic oligonucleotide
cgactattaacaagtgatccggtggaggtagcgttaagcggtggcactccac

SEQ ID NO: 368506 - DNA, 55 bp, Artificial
  Synthetic oligonucleotide
cgactattccagaacgagcgacagaacatagcgcaggatatgacatttcagcaag

SEQ ID NO: 368507 - DNA, 55 bp, Artificial
  Synthetic oligonucleotide
cgactattcccattatcacactccccgcaatcggtccccaatgtgttgttgctgg

SEQ ID NO: 368508 - DNA, 56 bp, Artificial
  Synthetic oligonucleotide
cgactattcgtggacaattcccaaccgcggttattgagattcgtagcgcggaccac

SEQ ID NO: 368509 - DNA, 55 bp, Artificial
  Synthetic oligonucleotide
cgactattctggtcagttcacccacaacatgaacttagccccagctgttgctccc

SEQ ID NO: 368510 - DNA, 55 bp, Artificial
  Synthetic oligonucleotide
cgactattggaaattgacctgtgttccgcagttcgatcaagggttgcattgacag

SEQ ID NO: 368511 - DNA, 55 bp, Artificial
  Synthetic oligonucleotide
cgactcaacttgcgactactgcgttcacgaacgcgattttcgctgcaccgccggc

SEQ ID NO: 368512 - DNA, 59 bp, Artificial
  Synthetic oligonucleotide
cgactcaagattcgagaacggatccccatgacgctggaagggcgtctcggaatgaggga

SEQ ID NO: 368513 - DNA, 50 bp, Artificial
  Synthetic oligonucleotide
cgactcaatagtagcaggcgtagagttagggagcaattatagtccaaaga

SEQ ID NO: 368514 - DNA, 55 bp, Artificial
  Synthetic oligonucleotide
cgactcaccgaagtagaaactgacataagcaattggctgaatgtaaaaggttgga

SEQ ID NO: 368515 - DNA, 60 bp, Artificial
  Synthetic oligonucleotide
cgactcactcgcgtaggctctgttaaccgcgttacgatggtagtgctgcgtgaggtatgg

SEQ ID NO: 368516 - DNA, 60 bp, Artificial
  Synthetic oligonucleotide
cgactcagctgctagaaataaagtcaacttctacgctagattattatggaacgaagcaac

SEQ ID NO: 368517 - DNA, 55 bp, Artificial
  Synthetic oligonucleotide
cgactcatccgacttgatacccaactttatgatgagagacccatcacacgcgttc

SEQ ID NO: 368518 - DNA, 60 bp, Artificial
  Synthetic oligonucleotide
cgactcattgaattcgattgagcttgagaaatcgagtctccggggtctagagaggactcc

SEQ ID NO: 368519 - DNA, 59 bp, Artificial
  Synthetic oligonucleotide
cgactcattgaattggactgggtctgagagatcgagtcaccggggtctagggatgactc

SEQ ID NO: 368520 - DNA, 55 bp, Artificial
  Synthetic oligonucleotide
cgactccatcatgccgcattcggagacggtaactctagtgggcgactgtctatct

SEQ ID NO: 368521 - DNA, 56 bp, Artificial
  Synthetic oligonucleotide
cgactcccattattatttctcagcttgcaaaacagaaccaggaacggttaacagag

SEQ ID NO: 368522 - DNA, 60 bp, Artificial
  Synthetic oligonucleotide
cgactcccccctcactccgtctaaccggacgaggggagccagctatggcatcatcagtga

SEQ ID NO: 368523 - DNA, 55 bp, Artificial
  Synthetic oligonucleotide
cgactccgatcgtcatcactacccaccggtacgtgtactcaactttcctgacgat

SEQ ID NO: 368524 - DNA, 60 bp, Artificial
  Synthetic oligonucleotide
cgactcctcctggagccacagatccctttccccagagcaacagcccaatagaagacatcg

SEQ ID NO: 368525 - DNA, 60 bp, Artificial
  Synthetic oligonucleotide
cgactcctgtggtctcacctagaagccatgacaacacgatcggaaatgaataaggaactc

SEQ ID NO: 368526 - DNA, 60 bp, Artificial
  Synthetic oligonucleotide
cgactccttcgcagacaggaggagtgccgtggactcgcgtcggcgaggtagctattttga

SEQ ID NO: 368527 - DNA, 55 bp, Artificial
  Synthetic oligonucleotide
cgactcgaaacaagtcgatcgtccggcttccgaagatgcggccatggccaacgcg

SEQ ID NO: 368528 - DNA, 55 bp, Artificial
  Synthetic oligonucleotide
cgactcgaagtcgtcagaattggcgcacacggctcagatgaattccctacccgtg

SEQ ID NO: 368529 - DNA, 51 bp, Artificial
  Synthetic oligonucleotide
cgactcgaatgaagaagacgggtttacgttagtaatgttgaaaaacccact

SEQ ID NO: 368530 - DNA, 59 bp, Artificial
  Synthetic oligonucleotide
cgactcgatatagttaaaggcattaggaggatcagccaatttagaattcatctatttaa

SEQ ID NO: 368531 - DNA, 55 bp, Artificial
  Synthetic oligonucleotide
cgactcgatcgggttaccgttgagacgtgcgaccaccccagaaatcgctgtatcg

SEQ ID NO: 368532 - DNA, 60 bp, Artificial
  Synthetic oligonucleotide
cgactcgcagtacgccagactacctgacgtctatctacatgaagtgatcggaggaggcca

SEQ ID NO: 368533 - DNA, 55 bp, Artificial
  Synthetic oligonucleotide
cgactcgggaaaactcattgcaaacacagtaaacaaggccattgcccctctcagt

SEQ ID NO: 368534 - DNA, 55 bp, Artificial
  Synthetic oligonucleotide
cgactcgtgcctaagcatacggaccaccaccctagagggcacaaccgtggaagtc

SEQ ID NO: 368535 - DNA, 53 bp, Artificial
  Synthetic oligonucleotide
cgactctatcgagagtcaagtttgatgcggacctattgattcattacgtcttt

SEQ ID NO: 368536 - DNA, 55 bp, Artificial
  Synthetic oligonucleotide
cgactctatcttcagtcatgttcatgaaaccatcaaagtttcgcaaacttgcgag

SEQ ID NO: 368537 - DNA, 60 bp, Artificial
  Synthetic oligonucleotide
cgactctcccgggtctagaatgggcgtgtttaatctatgtagctctctgtatggatgcaa

SEQ ID NO: 368538 - DNA, 60 bp, Artificial
  Synthetic oligonucleotide
cgactctctccctctatgacaatactgatgggtctccatggccgcgcaccggcatgcctt

SEQ ID NO: 368539 - DNA, 57 bp, Artificial
  Synthetic oligonucleotide
cgactctgagttggacgagtcgctgcttagtgacacacccggtcttcgtggtaacgg

SEQ ID NO: 368540 - DNA, 55 bp, Artificial
  Synthetic oligonucleotide
cgactctgatattgagttatcgaaccgagggaagtcattcagacctaggaaccct

SEQ ID NO: 368541 - DNA, 58 bp, Artificial
  Synthetic oligonucleotide
cgactctgcgttttaaatcggggacaatcaaagtctctgatatccgatatatcgggga

SEQ ID NO: 368542 - DNA, 55 bp, Artificial
  Synthetic oligonucleotide
cgactctggggtagggatccctcagattcttgtggcagaagagccttgggctaag

SEQ ID NO: 368543 - DNA, 55 bp, Artificial
  Synthetic oligonucleotide
cgactctggtgttcatagctgtgccaggacgacccaatggattaaacaacccgct

SEQ ID NO: 368544 - DNA, 55 bp, Artificial
  Synthetic oligonucleotide
cgactctgtgtgtctgcagatggagtcaccctgccattattctcagccgtggccc

SEQ ID NO: 368545 - DNA, 56 bp, Artificial
  Synthetic oligonucleotide
cgactctttgcggctgaaactattaaagctagggaggagagtgttaagtcctctta

SEQ ID NO: 368546 - DNA, 58 bp, Artificial
  Synthetic oligonucleotide
cgactgaaagaacagaagcggaatcaacgatggtaaaggagtatagacaaaagattga

SEQ ID NO: 368547 - DNA, 57 bp, Artificial
  Synthetic oligonucleotide
cgactgaacccctccggtcttcagagctctacaggtggacgtggcggtgacggaggc

SEQ ID NO: 368548 - DNA, 55 bp, Artificial
  Synthetic oligonucleotide
cgactgaacttttagcaccccatgcgaaggtctcgaaacgtgaagcattgtgagg

SEQ ID NO: 368549 - DNA, 55 bp, Artificial
  Synthetic oligonucleotide
cgactgaattcatcatgcgtgagggccttgcagcatataccctgaccccgcgccc

SEQ ID NO: 368550 - DNA, 55 bp, Artificial
  Synthetic oligonucleotide
cgactgaatttattatgcgtgaggggctcgcagcatacactttgactccgcgccc

SEQ ID NO: 368551 - DNA, 60 bp, Artificial
  Synthetic oligonucleotide
cgactgacatctcggaaatgggagccaaccttgacgtgagccgcgtcatagatggaagga

SEQ ID NO: 368552 - DNA, 59 bp, Artificial
  Synthetic oligonucleotide
cgactgacccgcattggttcagttaaccgcgtgacgatggttgtattgcgtgaggtgtg

SEQ ID NO: 368553 - DNA, 55 bp, Artificial
  Synthetic oligonucleotide
cgactgactacccactaacccagctccctatttaaaggcagtccttacactgacg

SEQ ID NO: 368554 - DNA, 60 bp, Artificial
  Synthetic oligonucleotide
cgactgactcctcctctgactccatccacgccaccatcctggaagccgacaagggaatgc

SEQ ID NO: 368555 - DNA, 55 bp, Artificial
  Synthetic oligonucleotide
cgactgagataactgaccccgactggacgaacacactgtcacaactcttcctgac

SEQ ID NO: 368556 - DNA, 55 bp, Artificial
  Synthetic oligonucleotide
cgactgaggcttccaattacgcccagtaccgggttgtccgggctacaatccgcta

SEQ ID NO: 368557 - DNA, 59 bp, Artificial
  Synthetic oligonucleotide
cgactgagggaaattgataggtgccaactttatggaaggacgatatgcgttagcgataa

SEQ ID NO: 368558 - DNA, 60 bp, Artificial
  Synthetic oligonucleotide
cgactgagtcttgccgttagttgagccgccgctgacggaaactgcaggattatctcagtt

SEQ ID NO: 368559 - DNA, 55 bp, Artificial
  Synthetic oligonucleotide
cgactgataacggtggtacttggatgtatgggaaaccatccagatatgggcacag

SEQ ID NO: 368560 - DNA, 54 bp, Artificial
  Synthetic oligonucleotide
cgactgatcgaggtcttcagcaaggtgtgtgtcatcttgccacatgttggatgt

SEQ ID NO: 368561 - DNA, 60 bp, Artificial
  Synthetic oligonucleotide
cgactgatgagtaagtatggtcgttacatcatcgcaattgctctgttcgtcggaggcgca

SEQ ID NO: 368562 - DNA, 55 bp, Artificial
  Synthetic oligonucleotide
cgactgattatatcggaaacgttgatagaattccgacggatggaacgcttgcggt

SEQ ID NO: 368563 - DNA, 60 bp, Artificial
  Synthetic oligonucleotide
cgactgcaaccatatgtggaacatgtaagtctgaacatatagcaattggtgatcatgtta

SEQ ID NO: 368564 - DNA, 56 bp, Artificial
  Synthetic oligonucleotide
cgactgcaacggtgaagaatgatcttagggaccggtatcaggtgttacgtaaattc

SEQ ID NO: 368565 - DNA, 55 bp, Artificial
  Synthetic oligonucleotide
cgactgcataagcactacttggagctgggttgacacaacgagcacatgcaggcta

SEQ ID NO: 368566 - DNA, 60 bp, Artificial
  Synthetic oligonucleotide
cgactgcataggttcgcgcccccttgcaagcctttgctacgagacgaggtgtcattcgta

SEQ ID NO: 368567 - DNA, 55 bp, Artificial
  Synthetic oligonucleotide
cgactgcatgattaataacatcgaactcgcttatatactacactatcgccccact

SEQ ID NO: 368568 - DNA, 60 bp, Artificial
  Synthetic oligonucleotide
cgactgcatggtgtggtcaggtactcgatgctgttaagcctacacgagacattcgtatat

SEQ ID NO: 368569 - DNA, 55 bp, Artificial
  Synthetic oligonucleotide
cgactgcgattaaggttgttcaggtcgcatggggaatcctgtcagcgctgttctc

SEQ ID NO: 368570 - DNA, 55 bp, Artificial
  Synthetic oligonucleotide
cgactgcgtagtgcagtgtcagactgagaaaggtggtctaaatacgaccttgccg

SEQ ID NO: 368571 - DNA, 60 bp, Artificial
  Synthetic oligonucleotide
cgactggcgtcgcctattactccgaccagcagcctcggcagattttgctgcctgtgggca

SEQ ID NO: 368572 - DNA, 60 bp, Artificial
  Synthetic oligonucleotide
cgactgggaaacggaggcccagctagcagggatattcaagcgtcctatgcgcttctatcc

SEQ ID NO: 368573 - DNA, 60 bp, Artificial
  Synthetic oligonucleotide
cgactgggatctgtatgtgtcgcgactttgagagtccgactcagaaggcaacccaacatg

SEQ ID NO: 368574 - DNA, 60 bp, Artificial
  Synthetic oligonucleotide
cgactgggcacttacaggtatgtctcgtcaggcgagagaccgtctgggatgttcgacagc

SEQ ID NO: 368575 - DNA, 57 bp, Artificial
  Synthetic oligonucleotide
cgactgggctagtgacccctactctgctaacctggtctgcgtccagagcataacaag

SEQ ID NO: 368576 - DNA, 58 bp, Artificial
  Synthetic oligonucleotide
cgactgggtcaggattggcaatgactggcacaggaggggcggttaccttaacgacata

SEQ ID NO: 368577 - DNA, 55 bp, Artificial
  Synthetic oligonucleotide
cgactggtagaagtaaaattgaccagagtatctcaccacttacgggagcggactt

SEQ ID NO: 368578 - DNA, 60 bp, Artificial
  Synthetic oligonucleotide
cgactggtctgacaccgctgagtacctcaaactgtatgctctcatgggttgccgcatccc

SEQ ID NO: 368579 - DNA, 55 bp, Artificial
  Synthetic oligonucleotide
cgactggtgcgtttccagtttgataatcctgcgtttgatgaggaagttacacaga

SEQ ID NO: 368580 - DNA, 52 bp, Artificial
  Synthetic oligonucleotide
cgactggtggggcctcttacacccttgctgtggctcaagtaactgtgtggac

SEQ ID NO: 368581 - DNA, 54 bp, Artificial
  Synthetic oligonucleotide
cgactggtgtgtacttttgtgcctcaaggaacaaacactatcccgttagtttcg

SEQ ID NO: 368582 - DNA, 55 bp, Artificial
  Synthetic oligonucleotide
cgactggtgttatccgtaaattccagacattgtgtgagaaagcaccgtaaaactt

SEQ ID NO: 368583 - DNA, 54 bp, Artificial
  Synthetic oligonucleotide
cgactggttcaagttcctggagtccatcggctacaagccgccgctggatgaggt

SEQ ID NO: 368584 - DNA, 55 bp, Artificial
  Synthetic oligonucleotide
cgactgtcacggtgcctcagcagcagttttgccagcagaacccgaatgcggtggt

SEQ ID NO: 368585 - DNA, 56 bp, Artificial
  Synthetic oligonucleotide
cgactgtcccgcgtcaccgatgctacgacttcaccggagcgtcagctggagtcttg

SEQ ID NO: 368586 - DNA, 60 bp, Artificial
  Synthetic oligonucleotide
cgactgtcgcaggctaagtaccatgacaattccattttgtcatggggcgagcgtgttatc

SEQ ID NO: 368587 - DNA, 60 bp, Artificial
  Synthetic oligonucleotide
cgactgtggccgtaagatcacaattgcagttgttattcgatgcactttctggaggttctg

SEQ ID NO: 368588 - DNA, 60 bp, Artificial
  Synthetic oligonucleotide
cgactgtggtggcattctaagatgtgatcatggagtcattggtctagtgaccatgggagg

SEQ ID NO: 368589 - DNA, 55 bp, Artificial
  Synthetic oligonucleotide
cgactgtggttgtaggatcgaacatcgcgaatacgaatgtttctctgggggttgg

SEQ ID NO: 368590 - DNA, 55 bp, Artificial
  Synthetic oligonucleotide
cgactgtgttgcagatggcgggttcagctcttgtcatacaccgagccgtcaagcg

SEQ ID NO: 368591 - DNA, 60 bp, Artificial
  Synthetic oligonucleotide
cgactgttaatcgttcgtgctcattgggtgaagcatttgtatgggcctggacaactctag

SEQ ID NO: 368592 - DNA, 60 bp, Artificial
  Synthetic oligonucleotide
cgactgttagcatgatattaggtctagcaaacctggtgttgtgctttcggtggatgggcc

SEQ ID NO: 368593 - DNA, 60 bp, Artificial
  Synthetic oligonucleotide
cgactgttcagaatattctcaacgttgcagagggcggtaaactcctgatggctgagactc

SEQ ID NO: 368594 - DNA, 53 bp, Artificial
  Synthetic oligonucleotide
cgactgtttaagtggtctagtaatgtcacaaacgacacaatcacaatcccatg

SEQ ID NO: 368595 - DNA, 55 bp, Artificial
  Synthetic oligonucleotide
cgactgtttaataatacttgcataggaaataaaaccatgggggggtgtaatggca

SEQ ID NO: 368596 - DNA, 55 bp, Artificial
  Synthetic oligonucleotide
cgactgtttaatagtacttacccaataaatggaaccatggaggggtataatggca

SEQ ID NO: 368597 - DNA, 52 bp, Artificial
  Synthetic oligonucleotide
cgacttaacagtaaccgctccgaccctcaacgaaagggacggccaaggctac

SEQ ID NO: 368598 - DNA, 53 bp, Artificial
  Synthetic oligonucleotide
cgacttaacggggcccaccggcttgaccacaaggtggtttgcgtacagtgaaa

SEQ ID NO: 368599 - DNA, 55 bp, Artificial
  Synthetic oligonucleotide
cgacttaacgttaaagactcgcataatatctacaagtccgttcgctcgtcttccc

SEQ ID NO: 368600 - DNA, 55 bp, Artificial
  Synthetic oligonucleotide
cgacttaagagatgcgtctgacttatcccttttaaatggcccaacgtacatctga

SEQ ID NO: 368601 - DNA, 56 bp, Artificial
  Synthetic oligonucleotide
cgacttacgggataggtatcaagtaatgaggaagtttcatgctacggttgttggag

SEQ ID NO: 368602 - DNA, 60 bp, Artificial
  Synthetic oligonucleotide
cgacttactggacccatcgataatatactctgacaaaagtcattcaatgaataggtcaga

SEQ ID NO: 368603 - DNA, 54 bp, Artificial
  Synthetic oligonucleotide
cgacttacttaaagtgagccgtgcccgcttctgtatgcagacccttcctattct

SEQ ID NO: 368604 - DNA, 51 bp, Artificial
  Synthetic oligonucleotide
cgacttagtataattcactgtccaggacatcaaaaaggaaacagtgctgag

SEQ ID NO: 368605 - DNA, 55 bp, Artificial
  Synthetic oligonucleotide
cgacttagttcactatgaggatttaacggctcattggcatgcattgggagcggct

SEQ ID NO: 368606 - DNA, 51 bp, Artificial
  Synthetic oligonucleotide
cgacttatgatataaggcattcactaccgtccggtcgttccgatcgaaggg

SEQ ID NO: 368607 - DNA, 60 bp, Artificial
  Synthetic oligonucleotide
cgacttatgggggcctactaaggtggtgcaaatcacaggtaagaccagcaagtatgcaca

SEQ ID NO: 368608 - DNA, 58 bp, Artificial
  Synthetic oligonucleotide
cgacttattggattaccaccacatatacctccaaatgatccaattcgagtgccaaatc

SEQ ID NO: 368609 - DNA, 50 bp, Artificial
  Synthetic oligonucleotide
cgacttcaagaagaggctcgggatccgccattaattttattaaaaggtca

SEQ ID NO: 368610 - DNA, 56 bp, Artificial
  Synthetic oligonucleotide
cgacttcacttggatgatggaaaatcgtccgaccttggtaagatgtccaaggcggg

SEQ ID NO: 368611 - DNA, 55 bp, Artificial
  Synthetic oligonucleotide
cgacttcagttgaaaacactaaagattgcctgggcataagattctctggagggac

SEQ ID NO: 368612 - DNA, 55 bp, Artificial
  Synthetic oligonucleotide
cgacttcatgatagactacaaaccgtagaaactagcactttacccaacatcacgc

SEQ ID NO: 368613 - DNA, 60 bp, Artificial
  Synthetic oligonucleotide
cgacttccaccaatagcctgcccgacacaaagctgagcggaccagcccactccaaggaga

SEQ ID NO: 368614 - DNA, 54 bp, Artificial
  Synthetic oligonucleotide
cgacttcctaacccatttgcgacctgacactttactcgggacactggtgtaccc

SEQ ID NO: 368615 - DNA, 60 bp, Artificial
  Synthetic oligonucleotide
cgacttcctacccttatcttcatatgggttgtctggctatatgcgttatacctcatggaa

SEQ ID NO: 368616 - DNA, 57 bp, Artificial
  Synthetic oligonucleotide
cgacttcctcgataagttgtggtcctgtaactgtaatatgttgacggcactttccgc

SEQ ID NO: 368617 - DNA, 60 bp, Artificial
  Synthetic oligonucleotide
cgacttcgaatatttgttgctgccacagaatttggagttcgttgctttcagcaattgcta

SEQ ID NO: 368618 - DNA, 55 bp, Artificial
  Synthetic oligonucleotide
cgacttctacaaggccatacctctcagtcagatgtcacagcaagaagtcgagtcg

SEQ ID NO: 368619 - DNA, 58 bp, Artificial
  Synthetic oligonucleotide
cgacttctacggatggatcaaatacgacgaaatgctgaaaataatggaccgctaccca

SEQ ID NO: 368620 - DNA, 55 bp, Artificial
  Synthetic oligonucleotide
cgacttctccaagtccgtgcaaattcccaaagagcaaccaagttttctcaagcct

SEQ ID NO: 368621 - DNA, 60 bp, Artificial
  Synthetic oligonucleotide
cgacttctgccgacactttgagacaggcggataaggtccggagagctctcatggctaacg

SEQ ID NO: 368622 - DNA, 55 bp, Artificial
  Synthetic oligonucleotide
cgacttcttttctacgcctttcgggaatcgtggtctagcaacgaatcgtactcaa

SEQ ID NO: 368623 - DNA, 55 bp, Artificial
  Synthetic oligonucleotide
cgacttgaaaattccaaagagtgcataattggtacgtaccgagctgctgcgaagg

SEQ ID NO: 368624 - DNA, 55 bp, Artificial
  Synthetic oligonucleotide
cgacttgaaacgactgagagacctaaaccaggcagttaacaatcttgttgagctg

SEQ ID NO: 368625 - DNA, 57 bp, Artificial
  Synthetic oligonucleotide
cgacttgagaaagacaccgggtcatctaatacggtattacatcttcacgtcgaaaca

SEQ ID NO: 368626 - DNA, 60 bp, Artificial
  Synthetic oligonucleotide
cgacttgcaaaagatggtcatgggcaacacaaagcctgttgagctcatcctcgacgggaa

SEQ ID NO: 368627 - DNA, 60 bp, Artificial
  Synthetic oligonucleotide
cgacttgcaacaaccaagcgaagtgcaccctgaaaatcaggtgcgaccagaatcatcaac

SEQ ID NO: 368628 - DNA, 53 bp, Artificial
  Synthetic oligonucleotide
cgacttgcagcttgaggcatggggtgaacgatcccatggctgtataatcgcct

SEQ ID NO: 368629 - DNA, 54 bp, Artificial
  Synthetic oligonucleotide
cgacttggaatattgctggctaaatctaacagctcatcacccattaagaatggt

SEQ ID NO: 368630 - DNA, 55 bp, Artificial
  Synthetic oligonucleotide
cgacttggacattgtggtgactagcgcctcagacttggaacgattaccgaaagcc

SEQ ID NO: 368631 - DNA, 55 bp, Artificial
  Synthetic oligonucleotide
cgacttgggagcgatgaagttgaccgagaagctagacttgcaggggacccctggc

SEQ ID NO: 368632 - DNA, 52 bp, Artificial
  Synthetic oligonucleotide
cgacttgtaaccctgcgacctttgtattcgccagggttccggttactcccaa

SEQ ID NO: 368633 - DNA, 55 bp, Artificial
  Synthetic oligonucleotide
cgacttgtcaaacacccaaaggtgctataaacaccagcctcccatttcagaatat

SEQ ID NO: 368634 - DNA, 58 bp, Artificial
  Synthetic oligonucleotide
cgacttgttaactggtgcagaagagaaccacttcattgacaccctaagcaactactca

SEQ ID NO: 368635 - DNA, 53 bp, Artificial
  Synthetic oligonucleotide
cgactttaaggtctacggatggggctataactgacacgttcccctccgattaa

SEQ ID NO: 368636 - DNA, 58 bp, Artificial
  Synthetic oligonucleotide
cgactttaatcgaaaacacatatgtcaacaatactactgtcatcaataaggaaacagg

SEQ ID NO: 368637 - DNA, 55 bp, Artificial
  Synthetic oligonucleotide
cgactttaatcttcttgaaagtgccagcgcaaaatgctataagcacaacattccc

SEQ ID NO: 368638 - DNA, 55 bp, Artificial
  Synthetic oligonucleotide
cgactttactgttcttgaaagttcctgcgcaaaatgcaataagtactacgttccc

SEQ ID NO: 368639 - DNA, 56 bp, Artificial
  Synthetic oligonucleotide
cgactttcatgactcaaacgtcaagaacctttacgacaaggtccgactacagctta

SEQ ID NO: 368640 - DNA, 60 bp, Artificial
  Synthetic oligonucleotide
cgactttccgctctcagtgcatggttttcgatgtatgcttgcaattaagtatttgcacgc

SEQ ID NO: 368641 - DNA, 54 bp, Artificial
  Synthetic oligonucleotide
cgactttcgtctgctcatgtcatcgcctgtgcctctctgatctgcgaacgcgct

SEQ ID NO: 368642 - DNA, 55 bp, Artificial
  Synthetic oligonucleotide
cgactttctgctggtggacacatttgggtaacaagagaaccctatgtgtcatgtg

SEQ ID NO: 368643 - DNA, 60 bp, Artificial
  Synthetic oligonucleotide
cgactttgcaaaactgacactgccaaagtcaccacatgatatagactttggacatcacag

SEQ ID NO: 368644 - DNA, 55 bp, Artificial
  Synthetic oligonucleotide
cgactttgcttttcctgaaagtgccagcacaaaatgctataagcacaacgttccc

SEQ ID NO: 368645 - DNA, 55 bp, Artificial
  Synthetic oligonucleotide
cgactttgggctacttggaactactctactaaacttggatgctaattacgttgaa

SEQ ID NO: 368646 - DNA, 55 bp, Artificial
  Synthetic oligonucleotide
cgactttggttgtgacggattacaattattgttaatacactcctggaccgttgtc

SEQ ID NO: 368647 - DNA, 59 bp, Artificial
  Synthetic oligonucleotide
cgactttgtcaaagatggtaattcctatgaagcaggaataggaatagcggtttcatata

SEQ ID NO: 368648 - DNA, 55 bp, Artificial
  Synthetic oligonucleotide
cgactttgtcggaaagaaacgtctatcaaaattggcgcaaatgatgacgccggac

SEQ ID NO: 368649 - DNA, 59 bp, Artificial
  Synthetic oligonucleotide
cgacttttaggcagtttgcgcgttactttgctccactcatctggaacgcaagaatctcc

SEQ ID NO: 368650 - DNA, 55 bp, Artificial
  Synthetic oligonucleotide
cgacttttcgggttggacggtggcgtcagtacacaagaggagaacacagagaggc

SEQ ID NO: 368651 - DNA, 60 bp, Artificial
  Synthetic oligonucleotide
cgacttttgccaccgccgatattcgttgcaaatatctcgcgacgggtgatgagaaagcag

SEQ ID NO: 368652 - DNA, 55 bp, Artificial
  Synthetic oligonucleotide
cgacttttgtcgaaaagtgttcatgtactactacgcccgagtaaatgtcccgata

SEQ ID NO: 368653 - DNA, 58 bp, Artificial
  Synthetic oligonucleotide
cgagaaaaaagctggggacggtcagtcatcggaatgacagttccccatcctctagaga

SEQ ID NO: 368654 - DNA, 55 bp, Artificial
  Synthetic oligonucleotide
cgagaaaaggtttacagaagcaaaggcaggccagactttagcctgcttcccgcac

SEQ ID NO: 368655 - DNA, 53 bp, Artificial
  Synthetic oligonucleotide
cgagaaaatggccctgtacgacgtgataaaaaaactcccccaggccgtgatgg

SEQ ID NO: 368656 - DNA, 55 bp, Artificial
  Synthetic oligonucleotide
cgagaaaatggctaacaacaagccatcacgggtaagatggctaacgttctctgac

SEQ ID NO: 368657 - DNA, 55 bp, Artificial
  Synthetic oligonucleotide
cgagaaacccagtagcactatgaaagttgcgaggcgtttcgctcaacacttcccc

SEQ ID NO: 368658 - DNA, 55 bp, Artificial
  Synthetic oligonucleotide
cgagaaacctgctctcgccgtggtactgccgcctacccacttcttggctcaggta

SEQ ID NO: 368659 - DNA, 60 bp, Artificial
  Synthetic oligonucleotide
cgagaaactaaggcaatgcgtgaatctcgtaaacagcttgagcctagcagctacgagcgg

SEQ ID NO: 368660 - DNA, 55 bp, Artificial
  Synthetic oligonucleotide
cgagaaactattgggatactgcttacggtacgtttgagggattggcttattcaaa

SEQ ID NO: 368661 - DNA, 56 bp, Artificial
  Synthetic oligonucleotide
cgagaaacttagtaacaccatgaaggttgcgtagcgtttcgctccacacaacccca

SEQ ID NO: 368662 - DNA, 54 bp, Artificial
  Synthetic oligonucleotide
cgagaaagaggtggatctccctttgccatccgaggggactacgtcctccttacg

SEQ ID NO: 368663 - DNA, 60 bp, Artificial
  Synthetic oligonucleotide
cgagaaagccatgcgagttcagctggataaagatcgagctgagaaattgaaactcgacaa

SEQ ID NO: 368664 - DNA, 59 bp, Artificial
  Synthetic oligonucleotide
cgagaaagctgcattcccgcacgtcaacaagctaaacgcaatattaatcaaaggggcca

SEQ ID NO: 368665 - DNA, 60 bp, Artificial
  Synthetic oligonucleotide
cgagaaagttaagatacctttctatgtgcatggcatacctgacaaattatttgagatgtt

SEQ ID NO: 368666 - DNA, 59 bp, Artificial
  Synthetic oligonucleotide
cgagaaataacattccatggggccaaagaggtggcactaagctactcaactggtgcact

SEQ ID NO: 368667 - DNA, 58 bp, Artificial
  Synthetic oligonucleotide
cgagaaataacgagttagagaaagagatcgtgtcctatgaacatgctttggcggtaaa

SEQ ID NO: 368668 - DNA, 55 bp, Artificial
  Synthetic oligonucleotide
cgagaaatatgaaccttggagcgtcctgtatgggtacgagggttcggagtactcc

SEQ ID NO: 368669 - DNA, 55 bp, Artificial
  Synthetic oligonucleotide
cgagaaatctggaaacagattgaacgagttcgagctgaaaaggcatttactacgg

SEQ ID NO: 368670 - DNA, 57 bp, Artificial
  Synthetic oligonucleotide
cgagaaatgtgttagcgaggtaaagagatttatcttgaactatatcttcctgttgag

SEQ ID NO: 368671 - DNA, 55 bp, Artificial
  Synthetic oligonucleotide
cgagaaattaagtccggacctacatgaaggtatggagcatcaaacatatgtgcat

SEQ ID NO: 368672 - DNA, 55 bp, Artificial
  Synthetic oligonucleotide
cgagaacaaccactattacatcaactagtaatacagacgctcaacatttgagcgg

SEQ ID NO: 368673 - DNA, 59 bp, Artificial
  Synthetic oligonucleotide
cgagaacagatatcattaactgaaaacatgactcaggtagtaagtattggcggccgtaa

SEQ ID NO: 368674 - DNA, 55 bp, Artificial
  Synthetic oligonucleotide
cgagaaccatactgaaaacgcattattgttgtatatggcatgtacacatgcttct

SEQ ID NO: 368675 - DNA, 60 bp, Artificial
  Synthetic oligonucleotide
cgagaaccgcagctattgttgagaccgtcgcgcgaatgtttcctgattttcgctctgagg

SEQ ID NO: 368676 - DNA, 55 bp, Artificial
  Synthetic oligonucleotide
cgagaacgcagactatgaggtccgtgggatcaacggcttcagcttggactagcac

SEQ ID NO: 368677 - DNA, 52 bp, Artificial
  Synthetic oligonucleotide
cgagaacgcctacggcacatacccatgcgacctccgaaatctcaggcctgga

SEQ ID NO: 368678 - DNA, 60 bp, Artificial
  Synthetic oligonucleotide
cgagaacggctacgaacattggcagttgatctgctgtacacgcaagaaatgccgtgcgag

SEQ ID NO: 368679 - DNA, 54 bp, Artificial
  Synthetic oligonucleotide
cgagaacgtgtacaattggaacattaaggtgggactgggaacgtttgtaggagc

SEQ ID NO: 368680 - DNA, 54 bp, Artificial
  Synthetic oligonucleotide
cgagaacgtttgactttcccgggcaacaataaagtgataagataagaccgtgag

SEQ ID NO: 368681 - DNA, 51 bp, Artificial
  Synthetic oligonucleotide
cgagaactacaacgattggtcaacccgatctctcctcgagactttcccaca

SEQ ID NO: 368682 - DNA, 55 bp, Artificial
  Synthetic oligonucleotide
cgagaactcatgaataatttgaagggttgtggttatattgtcaaaaggtcggtcg

SEQ ID NO: 368683 - DNA, 56 bp, Artificial
  Synthetic oligonucleotide
cgagaacttcaacagttgttatcctggcaattaacaaactttggagttgcgttcgc

SEQ ID NO: 368684 - DNA, 58 bp, Artificial
  Synthetic oligonucleotide
cgagaagaatgcgatattactagaacatcttaagccagttggagaatatgagataatg

SEQ ID NO: 368685 - DNA, 55 bp, Artificial
  Synthetic oligonucleotide
cgagaagacaaatgaaaagtttcatcagattgaaaaggaattttccgaagtggaa

SEQ ID NO: 368686 - DNA, 60 bp, Artificial
  Synthetic oligonucleotide
cgagaagacatattgtgtcacgggtcagttaatagaagggctatgtttcattccaacaca

SEQ ID NO: 368687 - DNA, 57 bp, Artificial
  Synthetic oligonucleotide
cgagaagactctcggatggggcgtcctgaaatggctgtccgaatacgtcaacacccc

SEQ ID NO: 368688 - DNA, 55 bp, Artificial
  Synthetic oligonucleotide
cgagaagataagaccactcctaatagatggcacagcttcattgagcccaggaatg

SEQ ID NO: 368689 - DNA, 60 bp, Artificial
  Synthetic oligonucleotide
cgagaagatttgcaccggagtaccaactcacttagcaacagactacgagctcaaggagat

SEQ ID NO: 368690 - DNA, 55 bp, Artificial
  Synthetic oligonucleotide
cgagaagcatgccaacgataacttcgctcaagctcttaaggctgtcggggatgcc

SEQ ID NO: 368691 - DNA, 55 bp, Artificial
  Synthetic oligonucleotide
cgagaagcctagtaatgctcaagatgtggtttgactggtcgctccgctgttcccc

SEQ ID NO: 368692 - DNA, 60 bp, Artificial
  Synthetic oligonucleotide
cgagaagcctagtatcaccttggaatcttcgacgcgttgcgctcagcactctaccccgag

SEQ ID NO: 368693 - DNA, 55 bp, Artificial
  Synthetic oligonucleotide
cgagaagctcaccctgtgcgagaacgagtatcggtgtaagagcgccgacatctcc

SEQ ID NO: 368694 - DNA, 50 bp, Artificial
  Synthetic oligonucleotide
cgagaaggattatacttactacccttatttcctatctgtgtgctacatcg

SEQ ID NO: 368695 - DNA, 60 bp, Artificial
  Synthetic oligonucleotide
cgagaaggctgcctggagtatctgaacccgcgaagtatgaggcgtacgtagtgtgcggac

SEQ ID NO: 368696 - DNA, 59 bp, Artificial
  Synthetic oligonucleotide
cgagaagggaacatttctaaacctgaccaagcccctgtgtgaagtaagctcatggcata

SEQ ID NO: 368697 - DNA, 60 bp, Artificial
  Synthetic oligonucleotide
cgagaaggtcagtcaaaattaccctatagtgcagaatcttcaagggcaaatggtacatca

SEQ ID NO: 368698 - DNA, 53 bp, Artificial
  Synthetic oligonucleotide
cgagaagtactcttcccttcgcaggggacggtaaccattcactgccccacggg

SEQ ID NO: 368699 - DNA, 60 bp, Artificial
  Synthetic oligonucleotide
cgagaagtgaaggcagccttccactctgtacagccagattggaatgtgacagaagccaac

SEQ ID NO: 368700 - DNA, 54 bp, Artificial
  Synthetic oligonucleotide
cgagaagtgctagccctaggttcacaagaagggacattgcaagtggctctagcg

SEQ ID NO: 368701 - DNA, 58 bp, Artificial
  Synthetic oligonucleotide
cgagaagttctttccagtgctttaactttaggtattgcggtgcgacgtcatcaatgac

SEQ ID NO: 368702 - DNA, 58 bp, Artificial
  Synthetic oligonucleotide
cgagaagttgagaggcagatcaacacttgcccttatactggatacaaaggaggaattt

SEQ ID NO: 368703 - DNA, 57 bp, Artificial
  Synthetic oligonucleotide
cgagaataccagagatggtttcatttctaggtcgatcctacaaaggaggtctcaacg

SEQ ID NO: 368704 - DNA, 55 bp, Artificial
  Synthetic oligonucleotide
cgagaatactgctgtcagttatgcttgctggcaggaagaggagtctcccacgacc

SEQ ID NO: 368705 - DNA, 60 bp, Artificial
  Synthetic oligonucleotide
cgagaatagtgcccagggcaagaactgtgagatagacagtgcaccagtacaatgcaggca

SEQ ID NO: 368706 - DNA, 55 bp, Artificial
  Synthetic oligonucleotide
cgagaatataaaccagacacgagacgactaaacctggagcccagacgccgattga

SEQ ID NO: 368707 - DNA, 60 bp, Artificial
  Synthetic oligonucleotide
cgagaatcaatcacaccgttgtgtgagcaatcaatcccatatagggcttcaagcgcttgg

SEQ ID NO: 368708 - DNA, 60 bp, Artificial
  Synthetic oligonucleotide
cgagaatcacatgagtgccatgcagcttataacctccaatatccacacccaggttgtgag

SEQ ID NO: 368709 - DNA, 56 bp, Artificial
  Synthetic oligonucleotide
cgagaatgaaagcgaggagtacttttctgagaatggttacctttttatgccaagca

SEQ ID NO: 368710 - DNA, 55 bp, Artificial
  Synthetic oligonucleotide
cgagaatgagcggagagacagggacgtggggaccagaccgccaaccgttcggtta

SEQ ID NO: 368711 - DNA, 59 bp, Artificial
  Synthetic oligonucleotide
cgagaatgatgttgtttccgggtgaccagctttacgtcgactgtctccgtacagcggca

SEQ ID NO: 368712 - DNA, 60 bp, Artificial
  Synthetic oligonucleotide
cgagaatgtaatcccacagatctctcagggttctgaaggacttaggctcagtcagtccct

SEQ ID NO: 368713 - DNA, 55 bp, Artificial
  Synthetic oligonucleotide
cgagaatgtcatgattacgtagttcgtatagtcaaattattgactcaacctcctc

SEQ ID NO: 368714 - DNA, 51 bp, Artificial
  Synthetic oligonucleotide
cgagaattcaatgtttaataaggtggcggtattgatttgcgaagcattgaa

SEQ ID NO: 368715 - DNA, 53 bp, Artificial
  Synthetic oligonucleotide
cgagacaatcccaacacctagtggatacgctgtcagtgtggtcacttgtggta

SEQ ID NO: 368716 - DNA, 55 bp, Artificial
  Synthetic oligonucleotide
cgagacaattaaattaaacgtatgagaatcgataacatatgaatttatgtacttg

SEQ ID NO: 368717 - DNA, 55 bp, Artificial
  Synthetic oligonucleotide
cgagacacacaagtcggttgcactattacacagtagtgcctgactatgttgtgtc

SEQ ID NO: 368718 - DNA, 60 bp, Artificial
  Synthetic oligonucleotide
cgagacacctggaccaccgacacccaaccgatctgatgccacgcgcgcctaaggtctgcc

SEQ ID NO: 368719 - DNA, 55 bp, Artificial
  Synthetic oligonucleotide
cgagacactctcggagccataacaatgttcggatttgtgtttgcaactccgctta

SEQ ID NO: 368720 - DNA, 60 bp, Artificial
  Synthetic oligonucleotide
cgagacactggcgagaagcatctgtgagaaacttgaacaatcagggctcccagtcggggg

SEQ ID NO: 368721 - DNA, 52 bp, Artificial
  Synthetic oligonucleotide
cgagacagacatggtattcgggggtttagacaagtgtccattgtacggggta

SEQ ID NO: 368722 - DNA, 55 bp, Artificial
  Synthetic oligonucleotide
cgagacagactttagcttccgttgcatcaggaccaaaacacacccagagcgtgcc

SEQ ID NO: 368723 - DNA, 60 bp, Artificial
  Synthetic oligonucleotide
cgagacagcaacaggaatcatgtttgagctcagccggtgtgtgatgacattagcttatgc

SEQ ID NO: 368724 - DNA, 51 bp, Artificial
  Synthetic oligonucleotide
cgagacaggacaaacatcggtagttaaacaacctagaccaagatacttaaa

SEQ ID NO: 368725 - DNA, 53 bp, Artificial
  Synthetic oligonucleotide
cgagacatacccattcgtcttgtcccccggattacgcgaaccgaccttcattt

SEQ ID NO: 368726 - DNA, 60 bp, Artificial
  Synthetic oligonucleotide
cgagacatgattacctgcgaggcggttcagacactggtgaccctagtggcacaaatttca

SEQ ID NO: 368727 - DNA, 60 bp, Artificial
  Synthetic oligonucleotide
cgagacatgcctcgttcgcgcctttctgcgctgatgaagaacatgtcgtatgagcagctg

SEQ ID NO: 368728 - DNA, 60 bp, Artificial
  Synthetic oligonucleotide
cgagacatgggcggacctgggcaaccgatggagtacatgcgtccaccatcggtcgcccac

SEQ ID NO: 368729 - DNA, 58 bp, Artificial
  Synthetic oligonucleotide
cgagacattcgttttctcaaaagacaatctcgcgggaagttccagcggagcaatcacg

SEQ ID NO: 368730 - DNA, 53 bp, Artificial
  Synthetic oligonucleotide
cgagaccaacgaggaaatgtgctattgtcccctgaagaagtcagtgaaacgca

SEQ ID NO: 368731 - DNA, 55 bp, Artificial
  Synthetic oligonucleotide
cgagaccacatacttgtcaaatcaagacaatgataactggataaagcagtggcgg

SEQ ID NO: 368732 - DNA, 54 bp, Artificial
  Synthetic oligonucleotide
cgagaccctggtaaattgccagaaaacatagcacaggtaagaaatttagtatgt

SEQ ID NO: 368733 - DNA, 51 bp, Artificial
  Synthetic oligonucleotide
cgagaccggtgggattaaggatacgttggttatgccaaacgtttatgatgc

SEQ ID NO: 368734 - DNA, 57 bp, Artificial
  Synthetic oligonucleotide
cgagacctgtatcgaagtgggacctggttctatacacgtggtgggtctgcttaatgt

SEQ ID NO: 368735 - DNA, 55 bp, Artificial
  Synthetic oligonucleotide
cgagaccttctcgacaccgccaatgctatgtttcgggaggccttagagtctcctg

SEQ ID NO: 368736 - DNA, 55 bp, Artificial
  Synthetic oligonucleotide
cgagacgaacgagaagttcgagagttactcgttgtgacgaggcacacagtgtgag

SEQ ID NO: 368737 - DNA, 52 bp, Artificial
  Synthetic oligonucleotide
cgagacgaccccgggcccagtcaccgaggtcccgagtccctcggccgaagtc

SEQ ID NO: 368738 - DNA, 55 bp, Artificial
  Synthetic oligonucleotide
cgagacgattagcattgaaaaccctggcttttcgaacatgactcaagccgctcgt

SEQ ID NO: 368739 - DNA, 55 bp, Artificial
  Synthetic oligonucleotide
cgagacgccctagcgccacgctcagaacacgcgatccccatcgactgtagtcttg

SEQ ID NO: 368740 - DNA, 55 bp, Artificial
  Synthetic oligonucleotide
cgagacgctcctccgtttagtcgacatcactggtactgaagaatcatctgcgata

SEQ ID NO: 368741 - DNA, 55 bp, Artificial
  Synthetic oligonucleotide
cgagacggagagttggttacagcgcatacaacatgttctgtcaatggtgtttatg

SEQ ID NO: 368742 - DNA, 55 bp, Artificial
  Synthetic oligonucleotide
cgagacggatgaactagtacttcatgtcgacatcgagcaccaacgcattcccaca

SEQ ID NO: 368743 - DNA, 55 bp, Artificial
  Synthetic oligonucleotide
cgagacggcgctgactatgcatcttaacaattgctgtgtaggtacgccgccaagg

SEQ ID NO: 368744 - DNA, 60 bp, Artificial
  Synthetic oligonucleotide
cgagacggcgtacaagaggctgctatcctcatggatgataagttaccctcagcgggtcgt

SEQ ID NO: 368745 - DNA, 55 bp, Artificial
  Synthetic oligonucleotide
cgagacggtacgtgagcacgtagcaaacagccacaccacgaatctccgcgacgac

SEQ ID NO: 368746 - DNA, 51 bp, Artificial
  Synthetic oligonucleotide
cgagacgtcaatacgattcgcttgcgagtgcatttgtcgtgtctgatgtcg

SEQ ID NO: 368747 - DNA, 59 bp, Artificial
  Synthetic oligonucleotide
cgagacgtctcgagttcgtgatgtgtgtgggggtgtagtcccacatgcacccttgttcg

SEQ ID NO: 368748 - DNA, 57 bp, Artificial
  Synthetic oligonucleotide
cgagacgttaatcagaactgattagactgctatacactgaggttacccttccgaagt

SEQ ID NO: 368749 - DNA, 55 bp, Artificial
  Synthetic oligonucleotide
cgagactaatgtcaccaacgatgaggacatgaggccgtactgctggcactaccct

SEQ ID NO: 368750 - DNA, 55 bp, Artificial
  Synthetic oligonucleotide
cgagactatatgtcttacctgtcctatttataccgattttatcgaggaggtcggc

SEQ ID NO: 368751 - DNA, 60 bp, Artificial
  Synthetic oligonucleotide
cgagactcattgaggcttcgagcttgaatgattccgtagcaatgaggcagacattcggta

SEQ ID NO: 368752 - DNA, 53 bp, Artificial
  Synthetic oligonucleotide
cgagactcgtcgggcttggtcatgcgaatgaggtagtcgtagaggcgagtgcg

SEQ ID NO: 368753 - DNA, 60 bp, Artificial
  Synthetic oligonucleotide
cgagactctataaagtcatggcggagaaacatattgagaacccaagagtcagaatgccaa

SEQ ID NO: 368754 - DNA, 55 bp, Artificial
  Synthetic oligonucleotide
cgagactctccttgacaacgtgcgagtgcttcaacagatacatgcgaaactcgag

SEQ ID NO: 368755 - DNA, 60 bp, Artificial
  Synthetic oligonucleotide
cgagactgcacccattgccttgttctcacgcggattgttcatcacgcgtcggcatgtgac

SEQ ID NO: 368756 - DNA, 53 bp, Artificial
  Synthetic oligonucleotide
cgagactggttcaaggaaggattaagtaatttaggcaaacaggtaataccgcg

SEQ ID NO: 368757 - DNA, 55 bp, Artificial
  Synthetic oligonucleotide
cgagacttgaccggtatcacaaacattcgattagattatgaatctttaatggccg

SEQ ID NO: 368758 - DNA, 57 bp, Artificial
  Synthetic oligonucleotide
cgagactttcactctacaaaacggcatcgcaacaatttcttctggtccaattggtaa

SEQ ID NO: 368759 - DNA, 56 bp, Artificial
  Synthetic oligonucleotide
cgagagaaaacgtgcactgtacgacaaccccctgtggagcggcttgaacggcttcc

SEQ ID NO: 368760 - DNA, 59 bp, Artificial
  Synthetic oligonucleotide
cgagagaaaagtggctctcccttagccatccgagtggacgtgcgtcctccttcggatgc

SEQ ID NO: 368761 - DNA, 55 bp, Artificial
  Synthetic oligonucleotide
cgagagaaaggcgtttccgcgagcagggcccctccgcagtttgattactgtgggg

SEQ ID NO: 368762 - DNA, 52 bp, Artificial
  Synthetic oligonucleotide
cgagagaagggagaccaaccagagaagggcccatccgtcctgacatacgtct

SEQ ID NO: 368763 - DNA, 55 bp, Artificial
  Synthetic oligonucleotide
cgagagacactggcgttcgttgacccgaaacatctttattcgcggcgtagagggg

SEQ ID NO: 368764 - DNA, 55 bp, Artificial
  Synthetic oligonucleotide
cgagagactcttgcgggcgcgtggggagacttatggaaaactcttaggagaggta

SEQ ID NO: 368765 - DNA, 60 bp, Artificial
  Synthetic oligonucleotide
cgagagactgcttttcaacacaggattggttaaacccaaagacattcaaagatgcaatga

SEQ ID NO: 368766 - DNA, 55 bp, Artificial
  Synthetic oligonucleotide
cgagagagaaacgttataagacgtgttagacacggatacgtcttatacgttgtaa

SEQ ID NO: 368767 - DNA, 55 bp, Artificial
  Synthetic oligonucleotide
cgagagagagatagtctcgccgcaatgagagcagtcgcgatagatcacgtacgac

SEQ ID NO: 368768 - DNA, 60 bp, Artificial
  Synthetic oligonucleotide
cgagagagtaatctctttaaaggactgtcaactgatagaaagatggatgaagtttctcaa

SEQ ID NO: 368769 - DNA, 55 bp, Artificial
  Synthetic oligonucleotide
cgagagagtgtgatttatctgtgttctggggagggcgatcttaggggagatcctg

SEQ ID NO: 368770 - DNA, 55 bp, Artificial
  Synthetic oligonucleotide
cgagagatctggaaacagattcgacgaaatcaagttgaaaacacgtcttcgacac

SEQ ID NO: 368771 - DNA, 55 bp, Artificial
  Synthetic oligonucleotide
cgagagatgtgcggtcatagaaagaagggtcaggagagtcgcgaaattaagagcg

SEQ ID NO: 368772 - DNA, 51 bp, Artificial
  Synthetic oligonucleotide
cgagagattagtgcatggattcttgacacttatctgggtggacctaaggag

SEQ ID NO: 368773 - DNA, 59 bp, Artificial
  Synthetic oligonucleotide
cgagagcaagccgtctgagtatgtggaccaagtggcgcgtaagctagacaggggctgct

SEQ ID NO: 368774 - DNA, 55 bp, Artificial
  Synthetic oligonucleotide
cgagagcaatcgggggacactcaaagtctgtagcaatcgggggaaaggggggcaa

SEQ ID NO: 368775 - DNA, 60 bp, Artificial
  Synthetic oligonucleotide
cgagagcatacggaaatgatgccgctcaactgaataaatcctatggtatgctaccagcaa

SEQ ID NO: 368776 - DNA, 50 bp, Artificial
  Synthetic oligonucleotide
cgagagcctcatggcattagttcttactaccaggataatggtcaacacta

SEQ ID NO: 368777 - DNA, 55 bp, Artificial
  Synthetic oligonucleotide
cgagagcgacggcacggccgcattgagcgctttgcgcagactgttcgccttattc

SEQ ID NO: 368778 - DNA, 50 bp, Artificial
  Synthetic oligonucleotide
cgagagcgtcaatattaagaggcggaaaattagatgcatgggaaagaact

SEQ ID NO: 368779 - DNA, 57 bp, Artificial
  Synthetic oligonucleotide
cgagagcgtcaatattaagcgggggagaattggatagatgggagaaaattcggctaa

SEQ ID NO: 368780 - DNA, 54 bp, Artificial
  Synthetic oligonucleotide
cgagagcgtcagtattaagtgggggaaaattagatgcatgggaaaaaattcggt

SEQ ID NO: 368781 - DNA, 55 bp, Artificial
  Synthetic oligonucleotide
cgagagctcactgggagagggcgagaggatctgacgaagataatgctaagtactg

SEQ ID NO: 368782 - DNA, 59 bp, Artificial
  Synthetic oligonucleotide
cgagagctgcatccggagtttttcaaagactgctgacatcgagttttctacaagggact

SEQ ID NO: 368783 - DNA, 57 bp, Artificial
  Synthetic oligonucleotide
cgagaggaatgaattacgagacgactatgtttaataaagtggcaatcttaatctgtg

SEQ ID NO: 368784 - DNA, 60 bp, Artificial
  Synthetic oligonucleotide
cgagaggagatgtgcagcagatatttcaaggtcgtaatgatcctatgatgatatatctag

SEQ ID NO: 368785 - DNA, 50 bp, Artificial
  Synthetic oligonucleotide
cgagaggctagcacgcatgattgcatctaacaagaaccccgctccaattt

SEQ ID NO: 368786 - DNA, 55 bp, Artificial
  Synthetic oligonucleotide
cgagagggattgccagatttcagtttgtaccgagttatgagatcattgacttcct

SEQ ID NO: 368787 - DNA, 60 bp, Artificial
  Synthetic oligonucleotide
cgagagggccgatcgtgaccacgatcgctccattgggaacgatctctggcgggtctacac

SEQ ID NO: 368788 - DNA, 55 bp, Artificial
  Synthetic oligonucleotide
cgagagggctataaaactcttgagtcgccaaatgacgccttctctggacgttgcg

SEQ ID NO: 368789 - DNA, 55 bp, Artificial
  Synthetic oligonucleotide
cgagaggggaagatgcccaattctccggttcttgcaccagtcccgtggggggtca

SEQ ID NO: 368790 - DNA, 55 bp, Artificial
  Synthetic oligonucleotide
cgagaggggacgagtgaggcttatcccggggaactcgacttatcgtccccacata

SEQ ID NO: 368791 - DNA, 58 bp, Artificial
  Synthetic oligonucleotide
cgagaggggacgagtgaggcttatcccggggaactcggctaatcgtcttcacatagca

SEQ ID NO: 368792 - DNA, 52 bp, Artificial
  Synthetic oligonucleotide
cgagaggggatggatcgcaaaggtgcggggaattcggataagttatctccta

SEQ ID NO: 368793 - DNA, 55 bp, Artificial
  Synthetic oligonucleotide
cgagaggtactacgacaatcttaaggtaagtgcccaactccagagtgtgaaggtg

SEQ ID NO: 368794 - DNA, 56 bp, Artificial
  Synthetic oligonucleotide
cgagaggtcatgtttttgttataagggaaccatttgtttcttgctcgccaacagag

SEQ ID NO: 368795 - DNA, 60 bp, Artificial
  Synthetic oligonucleotide
cgagaggtggcgtctatgcgccactttcctgcgagcctaccaggcaggaactagaagcta

SEQ ID NO: 368796 - DNA, 58 bp, Artificial
  Synthetic oligonucleotide
cgagagtaccgctccagatttccaaagtatgcgagcactccggtccaaaggttgagag

SEQ ID NO: 368797 - DNA, 55 bp, Artificial
  Synthetic oligonucleotide
cgagagtatttccaaccgatgctgggccagtatcaaaagagcaaactcaatcgag

SEQ ID NO: 368798 - DNA, 55 bp, Artificial
  Synthetic oligonucleotide
cgagagtctctgcttgcctatggatgatggttatggtagctcaggttgaggcagc

SEQ ID NO: 368799 - DNA, 60 bp, Artificial
  Synthetic oligonucleotide
cgagagtctcttgcctgcgttggctgttcgcacaaattgtcgaggattggtgctccgagc

SEQ ID NO: 368800 - DNA, 55 bp, Artificial
  Synthetic oligonucleotide
cgagagtggaaacggaggaacccatgggtccggagccttctgaaagagtcgctcg

SEQ ID NO: 368801 - DNA, 57 bp, Artificial
  Synthetic oligonucleotide
cgagagtggcgtcaagaccaattcactatggacggcacacgcaacctaggaggtgcc

SEQ ID NO: 368802 - DNA, 55 bp, Artificial
  Synthetic oligonucleotide
cgagagttataatcaacggcgtgactgcaagagccgagtggaatgtggacaaggc

SEQ ID NO: 368803 - DNA, 60 bp, Artificial
  Synthetic oligonucleotide
cgagagttcagaacccccccagcatctcagatccataaatgaatgcggggctctgaatca

SEQ ID NO: 368804 - DNA, 55 bp, Artificial
  Synthetic oligonucleotide
cgagagtttagacagctgcgctgcgatgtctagtaattacgcgttagaccggtca

SEQ ID NO: 368805 - DNA, 60 bp, Artificial
  Synthetic oligonucleotide
cgagataattgatccgaagaaaggctacgctcaatatgagacgaggatagtgccaaacgg

SEQ ID NO: 368806 - DNA, 55 bp, Artificial
  Synthetic oligonucleotide
cgagatacacataagtctttatcctggcgagagatggcgacgtttggaagtgctg

SEQ ID NO: 368807 - DNA, 55 bp, Artificial
  Synthetic oligonucleotide
cgagatacatgaatatcgctgttccagacgacgggcgttcagcaaaagacttcgt

SEQ ID NO: 368808 - DNA, 55 bp, Artificial
  Synthetic oligonucleotide
cgagatacgactatcagtcgacggaccagaatgagttaccggcaggagcacgtgc

SEQ ID NO: 368809 - DNA, 59 bp, Artificial
  Synthetic oligonucleotide
cgagataggagaccatatggtacccctatggatttcgggcaggtgttcaacatgtatga

SEQ ID NO: 368810 - DNA, 59 bp, Artificial
  Synthetic oligonucleotide
cgagatataacgataagatttaagttcgcaaatgcaattgtgaagtctggtggattggg

SEQ ID NO: 368811 - DNA, 56 bp, Artificial
  Synthetic oligonucleotide
cgagatatatggacgataataacttagttcacggaaatatcgctatgattggtgtg

SEQ ID NO: 368812 - DNA, 60 bp, Artificial
  Synthetic oligonucleotide
cgagatatgatgcgatggattggtctaccttcaatgcagaactcgatgaagttagttttg

SEQ ID NO: 368813 - DNA, 55 bp, Artificial
  Synthetic oligonucleotide
cgagatatgtaatagatggatacgtagcaggtatgaccctggagaaattaaggcc

SEQ ID NO: 368814 - DNA, 57 bp, Artificial
  Synthetic oligonucleotide
cgagatattccccaaagcaagctcttggcccaaccatgaaacaaacagaggtgtaac

SEQ ID NO: 368815 - DNA, 58 bp, Artificial
  Synthetic oligonucleotide
cgagatattccccaagacaagttcgtggcccaatcatgaaacaaacagaggtgtgacg

SEQ ID NO: 368816 - DNA, 55 bp, Artificial
  Synthetic oligonucleotide
cgagatattgacagaaaacagagctacgctggaccgcctcaaaactcttgacggg

SEQ ID NO: 368817 - DNA, 55 bp, Artificial
  Synthetic oligonucleotide
cgagatattggtagtaaacacagagatagagtatgattcggtgtatcacgacagg

SEQ ID NO: 368818 - DNA, 52 bp, Artificial
  Synthetic oligonucleotide
cgagatcgagtccggatcgtgctttgccgtctcttgttaggaccggtggccg

SEQ ID NO: 368819 - DNA, 55 bp, Artificial
  Synthetic oligonucleotide
cgagatcgagtttcttcacgagctctggcctcacctcagtggtggtcagatcgtg

SEQ ID NO: 368820 - DNA, 56 bp, Artificial
  Synthetic oligonucleotide
cgagatcgtacgggtagaaggtgtgaacctcgagtgcgagaccgaggctcaaaccc

SEQ ID NO: 368821 - DNA, 55 bp, Artificial
  Synthetic oligonucleotide
cgagatcgtttccaagtgctgcacaggtttcatgcgaaggttacaggtggtcagt

SEQ ID NO: 368822 - DNA, 55 bp, Artificial
  Synthetic oligonucleotide
cgagatctagtagattaggcgttcgaacagagtaacttactccttccggcacgtc

SEQ ID NO: 368823 - DNA, 55 bp, Artificial
  Synthetic oligonucleotide
cgagatctgataaataacctttgacttttactctccctgatgcacgtccccttag

SEQ ID NO: 368824 - DNA, 59 bp, Artificial
  Synthetic oligonucleotide
cgagatcttctaaacaccgcctcagctctctatcgggaagccctaaagtctcctgggca

SEQ ID NO: 368825 - DNA, 60 bp, Artificial
  Synthetic oligonucleotide
cgagatcttctcgacaccgcctcagctctatatcgggaggccttagagtctccggaacat

SEQ ID NO: 368826 - DNA, 56 bp, Artificial
  Synthetic oligonucleotide
cgagatgaaccgtaatcattatgggaatgcctacgtgtggtgccaatatagcggcc

SEQ ID NO: 368827 - DNA, 55 bp, Artificial
  Synthetic oligonucleotide
cgagatgatacgagatgcgacttcttctccggggtgaatttcctcacggctacct

SEQ ID NO: 368828 - DNA, 55 bp, Artificial
  Synthetic oligonucleotide
cgagatgcacgattcacgccatgggcacactaactgcatccaaactgaagacctc

SEQ ID NO: 368829 - DNA, 60 bp, Artificial
  Synthetic oligonucleotide
cgagatgccatgtggacgagggcatgcccacggcacatcttaacccatgcgggggctgca

SEQ ID NO: 368830 - DNA, 55 bp, Artificial
  Synthetic oligonucleotide
cgagatgccgtccacagaggatctggtaaacttgctcccagccattctatcgccg

SEQ ID NO: 368831 - DNA, 60 bp, Artificial
  Synthetic oligonucleotide
cgagatgctagagacatgaaaggccgcatggaagtttacgcggatgagggaactatagtt

SEQ ID NO: 368832 - DNA, 58 bp, Artificial
  Synthetic oligonucleotide
cgagatgcttagacggagactgcgggcggagctgctagaggtcggtttcctaaaccag

SEQ ID NO: 368833 - DNA, 51 bp, Artificial
  Synthetic oligonucleotide
cgagatggacgtgagcgggatgtaacgaagagagggtttcaatggccacgt

SEQ ID NO: 368834 - DNA, 59 bp, Artificial
  Synthetic oligonucleotide
cgagatgggaaccccacggaagcagggtctagcttggcagattgtagggccaatgtgtg

SEQ ID NO: 368835 - DNA, 54 bp, Artificial
  Synthetic oligonucleotide
cgagatgggaacctcgttaaaagtccctcggctgatacacccagtcgaccggac

SEQ ID NO: 368836 - DNA, 54 bp, Artificial
  Synthetic oligonucleotide
cgagatgggggtccaaacccttgccacaggagtgtttgggcctctacctccagg

SEQ ID NO: 368837 - DNA, 55 bp, Artificial
  Synthetic oligonucleotide
cgagatgtgaaagattgcgggtacgattgtgccctggcaattgatgtgcaaggga

SEQ ID NO: 368838 - DNA, 60 bp, Artificial
  Synthetic oligonucleotide
cgagatgttaagaatgctagtcgctgcaggaaaggatacggaggcagccttctttaggaa

SEQ ID NO: 368839 - DNA, 55 bp, Artificial
  Synthetic oligonucleotide
cgagatgttgtgggacacagtttgcaaatacaagaatgatgctggattcggctca

SEQ ID NO: 368840 - DNA, 55 bp, Artificial
  Synthetic oligonucleotide
cgagattaacagattatggggaggaacaaaatatttgtcctcatgcgggcggcgc

SEQ ID NO: 368841 - DNA, 55 bp, Artificial
  Synthetic oligonucleotide
cgagattacgtccattgctgtatgcctaatcttgacattcgcgatgtggctcgtc

SEQ ID NO: 368842 - DNA, 56 bp, Artificial
  Synthetic oligonucleotide
cgagattcgagcagggtgtgtatattccatctgcacactcatgtaaatccaggtaa

SEQ ID NO: 368843 - DNA, 56 bp, Artificial
  Synthetic oligonucleotide
cgagattcgatataattaaagacgtttgggggtgttactaattgagaatccatggc

SEQ ID NO: 368844 - DNA, 55 bp, Artificial
  Synthetic oligonucleotide
cgagattcgatgtttcgtcaatccaactaacggatttacgctcagcagtgcgccg

SEQ ID NO: 368845 - DNA, 60 bp, Artificial
  Synthetic oligonucleotide
cgagattgatgtaatttgctcgttgaaaaagcgaaactagagactagtcagatagaacaa

SEQ ID NO: 368846 - DNA, 59 bp, Artificial
  Synthetic oligonucleotide
cgagattgcacaactgaatagaataaggacggagtggctagcggctacgtacgataggg

SEQ ID NO: 368847 - DNA, 55 bp, Artificial
  Synthetic oligonucleotide
cgagattggccaatgatcccaataaagttggcttcacaaagagtgcgctgttcca

SEQ ID NO: 368848 - DNA, 55 bp, Artificial
  Synthetic oligonucleotide
cgagattggttctagctagtagtaattttctggctgctaaccccgagtcaggagt

SEQ ID NO: 368849 - DNA, 60 bp, Artificial
  Synthetic oligonucleotide
cgagattgtatgacacccctatgtgatcagtctataccgtatagggcctcaagtacttgg

SEQ ID NO: 368850 - DNA, 60 bp, Artificial
  Synthetic oligonucleotide
cgagattgttcaagaggttggggcaattgatcagcagcgagatgtagcggcagcagggat

SEQ ID NO: 368851 - DNA, 55 bp, Artificial
  Synthetic oligonucleotide
cgagatttaggatgcatgattagtcttctcttcgacccctgacgaccccggcgga

SEQ ID NO: 368852 - DNA, 57 bp, Artificial
  Synthetic oligonucleotide
cgagatttgtcgcgagatttatcttgagattcattacgagacttattccgagattta

SEQ ID NO: 368853 - DNA, 55 bp, Artificial
  Synthetic oligonucleotide
cgagattttcgacccatttcgtcgtatcggaataatagtcccagaacatagtacc

SEQ ID NO: 368854 - DNA, 55 bp, Artificial
  Synthetic oligonucleotide
cgagcaaaacccagaaagttctcatagccggcttgctgctcttagtggctcctgc

SEQ ID NO: 368855 - DNA, 55 bp, Artificial
  Synthetic oligonucleotide
cgagcaaaagtcaagagatttgaaggctcggtacaattgtttgcaagcgtgcgcc

SEQ ID NO: 368856 - DNA, 56 bp, Artificial
  Synthetic oligonucleotide
cgagcaaataataggaagcatatatactttagcaggaggtgttgtgctttattcag

SEQ ID NO: 368857 - DNA, 59 bp, Artificial
  Synthetic oligonucleotide
cgagcaacagatacaattgctaaaacgaaagtatttcagttcacaagaggttttgcagc

SEQ ID NO: 368858 - DNA, 55 bp, Artificial
  Synthetic oligonucleotide
cgagcaaccatcagaacacgctctggagcacaggttggcactcaagttcactttt

SEQ ID NO: 368859 - DNA, 55 bp, Artificial
  Synthetic oligonucleotide
cgagcaacgagagagcggcttgatttggctagaattctgtttattcagacggtgt

SEQ ID NO: 368860 - DNA, 58 bp, Artificial
  Synthetic oligonucleotide
cgagcaagacgtttgatgtgggtacttaaattcaaattatgccgctctatccgctggg

SEQ ID NO: 368861 - DNA, 60 bp, Artificial
  Synthetic oligonucleotide
cgagcaagatcagaacgcgagaatgaaacagcaaacagaaaccagagctgcccaagttgg

SEQ ID NO: 368862 - DNA, 57 bp, Artificial
  Synthetic oligonucleotide
cgagcaagatcgaaagaatagatcggactctatgaaagggaagaacgtcggggattc

SEQ ID NO: 368863 - DNA, 55 bp, Artificial
  Synthetic oligonucleotide
cgagcaagcgtacaaggtggtcaggtatgaggcgttgaggctggtgggtggttgg

SEQ ID NO: 368864 - DNA, 53 bp, Artificial
  Synthetic oligonucleotide
cgagcaaggggttctagtgcagctcgactagaaccctgtaatggcacggacat

SEQ ID NO: 368865 - DNA, 60 bp, Artificial
  Synthetic oligonucleotide
cgagcaatattcggatctgactatcttcaccacccgtcttacagcagcgcgtgagttaca

SEQ ID NO: 368866 - DNA, 51 bp, Artificial
  Synthetic oligonucleotide
cgagcaatattctctgcagggtgattatgcgaatgtcaagaatctaattgg

SEQ ID NO: 368867 - DNA, 55 bp, Artificial
  Synthetic oligonucleotide
cgagcaatcaccatcccatggcgactgacaatagcgacgctaagactgagcaatc

SEQ ID NO: 368868 - DNA, 55 bp, Artificial
  Synthetic oligonucleotide
cgagcaatcttaaataccagatcatgctcgatagtgtacaaggtcgtgctcctgg

SEQ ID NO: 368869 - DNA, 55 bp, Artificial
  Synthetic oligonucleotide
cgagcaattcctgagcgttacgaccttaagacagtttgttgatacacacgtccgc

SEQ ID NO: 368870 - DNA, 55 bp, Artificial
  Synthetic oligonucleotide
cgagcaatttcctgggattcatgtacttcaggacactcgaagacgcagcacacca

SEQ ID NO: 368871 - DNA, 55 bp, Artificial
  Synthetic oligonucleotide
cgagcacattgtacccttagtagagcaaaatggaataacactttaggacagatag

SEQ ID NO: 368872 - DNA, 50 bp, Artificial
  Synthetic oligonucleotide
cgagcaccagggtcccagcaccaaatggatgtaaccgggttaaaggttgt

SEQ ID NO: 368873 - DNA, 59 bp, Artificial
  Synthetic oligonucleotide
cgagcaccgatctaggtatcggccattttttaagagtcttcgagattggactgataaga

SEQ ID NO: 368874 - DNA, 57 bp, Artificial
  Synthetic oligonucleotide
cgagcaccgatgcaaataaagtgtccacctctgctactaacaagcaatgtggatccg

SEQ ID NO: 368875 - DNA, 58 bp, Artificial
  Synthetic oligonucleotide
cgagcacgaccgcaacacccaattcctagtgtgactacaaccactagtgaacgaaaca

SEQ ID NO: 368876 - DNA, 55 bp, Artificial
  Synthetic oligonucleotide
cgagcacggagtcccgactcgtcctggagtcaaaaggccacgattggcccaacga

SEQ ID NO: 368877 - DNA, 55 bp, Artificial
  Synthetic oligonucleotide
cgagcacggcgacggatcaagcgcggacttaaaggggttgcggcatgagcggtta

SEQ ID NO: 368878 - DNA, 55 bp, Artificial
  Synthetic oligonucleotide
cgagcactaagatcatcgcacacgctaaacaggttggtgtatatccggatctgtc

SEQ ID NO: 368879 - DNA, 55 bp, Artificial
  Synthetic oligonucleotide
cgagcactagaacatgcacacccagaactgcgaactcgaaaagaagtccgagcgt

SEQ ID NO: 368880 - DNA, 60 bp, Artificial
  Synthetic oligonucleotide
cgagcagacttattctacctcacgaataggtgcaattatgatatgtggcgcgaacagaag

SEQ ID NO: 368881 - DNA, 55 bp, Artificial
  Synthetic oligonucleotide
cgagcagagacatgatatctcacatacaggtaaggtcatgtgtatatccgacgtg

SEQ ID NO: 368882 - DNA, 55 bp, Artificial
  Synthetic oligonucleotide
cgagcagaggatacgagtgatactgtagaattcattagagcgaggagtcgagagg

SEQ ID NO: 368883 - DNA, 55 bp, Artificial
  Synthetic oligonucleotide
cgagcagaggcatgacatagcccacactgggaaggtcatttgtatttccgatgtg

SEQ ID NO: 368884 - DNA, 60 bp, Artificial
  Synthetic oligonucleotide
cgagcagcagaacaacaaataaactttgtgtgtcagcgtgttgacatggatattgttgtg

SEQ ID NO: 368885 - DNA, 55 bp, Artificial
  Synthetic oligonucleotide
cgagcaggaagcagacaatatgatcacagaaatgctgagaaaggactacataaag

SEQ ID NO: 368886 - DNA, 55 bp, Artificial
  Synthetic oligonucleotide
cgagcaggacccctacctcccgctatatgcggggacagcgacctggatcgttctt

SEQ ID NO: 368887 - DNA, 55 bp, Artificial
  Synthetic oligonucleotide
cgagcaggacgcagcgtcgccggagacggaagtggcaaagcgcgaactgtagcgt

SEQ ID NO: 368888 - DNA, 60 bp, Artificial
  Synthetic oligonucleotide
cgagcagggaagtggatatgctgcagacaaagagtccacccagaaagcaatcgatgggat

SEQ ID NO: 368889 - DNA, 55 bp, Artificial
  Synthetic oligonucleotide
cgagcaggttcagaaacaggtgcgcaaatcgaactagaaaacaaagtcatgacac

SEQ ID NO: 368890 - DNA, 55 bp, Artificial
  Synthetic oligonucleotide
cgagcagtcatgctcaaacaaaccctcaataggtcaaagagtcgatattgtagac

SEQ ID NO: 368891 - DNA, 59 bp, Artificial
  Synthetic oligonucleotide
cgagcagtccaggatgatatgcagaaggcgactcgttcatgcactaaacaatggttaag

SEQ ID NO: 368892 - DNA, 60 bp, Artificial
  Synthetic oligonucleotide
cgagcagttcggacgttgcgagttactgacccttcaggctatgtccgcacccaatcatcc

SEQ ID NO: 368893 - DNA, 59 bp, Artificial
  Synthetic oligonucleotide
cgagcagttgaagacggaatgcgaactggcgcacctgaaaccacgatacaccatgttgt

SEQ ID NO: 368894 - DNA, 57 bp, Artificial
  Synthetic oligonucleotide
cgagcataattcgtcgttaagtttgaacacgtgagttgtttgtattcgaatgtctaa

SEQ ID NO: 368895 - DNA, 51 bp, Artificial
  Synthetic oligonucleotide
cgagcatatttgcagccgcgctagtgcataggttggagattcgggtgctgg

SEQ ID NO: 368896 - DNA, 55 bp, Artificial
  Synthetic oligonucleotide
cgagcatcaaatccctgttcattatcgttttcgtattcagccggctcaatgacca

SEQ ID NO: 368897 - DNA, 60 bp, Artificial
  Synthetic oligonucleotide
cgagcatcacgcaacagttggcttaactctaagaatcgattcagcaatttgtgaatcagt

SEQ ID NO: 368898 - DNA, 52 bp, Artificial
  Synthetic oligonucleotide
cgagcatctccgtgacgccccgcatagtcgcctgaaatccttggatagggga

SEQ ID NO: 368899 - DNA, 55 bp, Artificial
  Synthetic oligonucleotide
cgagcatctgccaatcacatggcaggtcgccgaaacaattggtcattattccgac

SEQ ID NO: 368900 - DNA, 60 bp, Artificial
  Synthetic oligonucleotide
cgagcatcttacagaaatgaactccattcactacgttcgtgttctcaactctgtactcaa

SEQ ID NO: 368901 - DNA, 60 bp, Artificial
  Synthetic oligonucleotide
cgagcatgaaagagttcctaccgagagctcattgggaggtggcgagaggatccgatgaag

SEQ ID NO: 368902 - DNA, 60 bp, Artificial
  Synthetic oligonucleotide
cgagcatgatcaatgatgtaaatacaagagttaacgctataggagccgctgttcatacgg

SEQ ID NO: 368903 - DNA, 60 bp, Artificial
  Synthetic oligonucleotide
cgagcatgatgcaaatgtgaacaatctatacaacaaagtgaagaggacactgggttccaa

SEQ ID NO: 368904 - DNA, 51 bp, Artificial
  Synthetic oligonucleotide
cgagcatgctggccccccccccggaacgggttgagtccgacgtttccccag

SEQ ID NO: 368905 - DNA, 55 bp, Artificial
  Synthetic oligonucleotide
cgagcattatccaaagagcaggaagggtcagccatagcgaacaaagtggctgcgc

SEQ ID NO: 368906 - DNA, 55 bp, Artificial
  Synthetic oligonucleotide
cgagcattcggtgagtctgacatatcagagagtgatcaatttaacgttgcaatag

SEQ ID NO: 368907 - DNA, 55 bp, Artificial
  Synthetic oligonucleotide
cgagcattgaccggaggtcaaggttaatggtcaacaatattctggcttgcggagc

SEQ ID NO: 368908 - DNA, 54 bp, Artificial
  Synthetic oligonucleotide
cgagcattggctttagtacacatgcagcttttagaagtgagtttacctttggcc

SEQ ID NO: 368909 - DNA, 60 bp, Artificial
  Synthetic oligonucleotide
cgagcattgtagcagcctggtcaatcgtaaccctaccctggttcagaggcctcttggaga

SEQ ID NO: 368910 - DNA, 55 bp, Artificial
  Synthetic oligonucleotide
cgagcattgtgggaagaggggaccctccgtgcgcaccacgactgacagtgggaaa

SEQ ID NO: 368911 - DNA, 51 bp, Artificial
  Synthetic oligonucleotide
cgagccaactttgggatatagtcatcggttttcattgctgaaacactattt

SEQ ID NO: 368912 - DNA, 57 bp, Artificial
  Synthetic oligonucleotide
cgagccaagaaagacctgggcgacatactgtgggagaactaccgaaaagccatgaaa

SEQ ID NO: 368913 - DNA, 59 bp, Artificial
  Synthetic oligonucleotide
cgagccaattgaagtgggcacttggtgagaacatggcaccagaaaaggtagactttgag

SEQ ID NO: 368914 - DNA, 60 bp, Artificial
  Synthetic oligonucleotide
cgagccactgttgcatcttcaacttataaccccaagcactatttgcacattccgaactac

SEQ ID NO: 368915 - DNA, 56 bp, Artificial
  Synthetic oligonucleotide
cgagccagaagcccacccacgcgctacccgagcccggtacgctccctagaatctta

SEQ ID NO: 368916 - DNA, 55 bp, Artificial
  Synthetic oligonucleotide
cgagccagagccggacgtggcagtgctaacatccatgctgacagacccatcacac

SEQ ID NO: 368917 - DNA, 59 bp, Artificial
  Synthetic oligonucleotide
cgagccagatgttgacctcggaagcggaacccgcaacatcggaattgaaagtgagacac

SEQ ID NO: 368918 - DNA, 60 bp, Artificial
  Synthetic oligonucleotide
cgagccagtcagctactattgcggcaagtacgtgagtcatatgtcaaagcgcgtaagcgc

SEQ ID NO: 368919 - DNA, 55 bp, Artificial
  Synthetic oligonucleotide
cgagccatatcgtttgcaaattcacgataggtgaacttcattacaccgcctgcat

SEQ ID NO: 368920 - DNA, 54 bp, Artificial
  Synthetic oligonucleotide
cgagccattctgtttacgcccttgtggggcgtctccgttaattagttcgtccag

SEQ ID NO: 368921 - DNA, 53 bp, Artificial
  Synthetic oligonucleotide
cgagccattggcatgctctaggttcagcgcaggaggcgagtggtcggaccctg

SEQ ID NO: 368922 - DNA, 55 bp, Artificial
  Synthetic oligonucleotide
cgagccattggttcgtttgttcctagtttgccaacttccggtactagagatacga

SEQ ID NO: 368923 - DNA, 57 bp, Artificial
  Synthetic oligonucleotide
cgagcccaacaaacgcgacatcccaacttgtcaaatgtgttggaccctcgagcccaa

SEQ ID NO: 368924 - DNA, 60 bp, Artificial
  Synthetic oligonucleotide
cgagcccagcacagctactgtgaagaacgatttgcgtgatcgttatcaagtcttgcgaaa

SEQ ID NO: 368925 - DNA, 60 bp, Artificial
  Synthetic oligonucleotide
cgagcccagcactgccacggttaagaacgatcttcgcgatcgttttcaagttatgcataa

SEQ ID NO: 368926 - DNA, 55 bp, Artificial
  Synthetic oligonucleotide
cgagccctacgccgccccagacgctatccttgcggccatccggctcgtctatcct

SEQ ID NO: 368927 - DNA, 54 bp, Artificial
  Synthetic oligonucleotide
cgagccctatcagaaatatacatgcttcacactcctaagtcctaacaatttggg

SEQ ID NO: 368928 - DNA, 53 bp, Artificial
  Synthetic oligonucleotide
cgagcccttgtggtagggggaaatcgagggaatctcaaccgacctccacaacg

SEQ ID NO: 368929 - DNA, 60 bp, Artificial
  Synthetic oligonucleotide
cgagccgaatggctacattgagggcaagctctcccaaatgtctagagaggtaaatgctag

SEQ ID NO: 368930 - DNA, 57 bp, Artificial
  Synthetic oligonucleotide
cgagccgagtagttagttcgaaaggccaggatccaatcttaaggggataagcgatga

SEQ ID NO: 368931 - DNA, 55 bp, Artificial
  Synthetic oligonucleotide
cgagccgcaggacttcgcgtggaccccgtacgtcaccggacacatcaaggcgttt

SEQ ID NO: 368932 - DNA, 55 bp, Artificial
  Synthetic oligonucleotide
cgagccgcatggagctcacgcgcacaactctgctcgactagagtctgtttgttta

SEQ ID NO: 368933 - DNA, 60 bp, Artificial
  Synthetic oligonucleotide
cgagccggacgtagctgtactaacgtctatgctcacagacccatcacacatcaccgcaga

SEQ ID NO: 368934 - DNA, 55 bp, Artificial
  Synthetic oligonucleotide
cgagccgtttatgacaagatggctagtgaaatgcaactacgtgctagacgcccaa

SEQ ID NO: 368935 - DNA, 54 bp, Artificial
  Synthetic oligonucleotide
cgagcctacacctcagtatcagagggaactccaactataaggcagtatcctgcg

SEQ ID NO: 368936 - DNA, 59 bp, Artificial
  Synthetic oligonucleotide
cgagcctatatggaagagcgtgccaggtatttgacttaaggactgttagtaactgaaga

SEQ ID NO: 368937 - DNA, 60 bp, Artificial
  Synthetic oligonucleotide
cgagcctcaggaatgtttgacagtgtagtgctctgcgagtgctacgatgcaggggccgca

SEQ ID NO: 368938 - DNA, 56 bp, Artificial
  Synthetic oligonucleotide
cgagcctcccgaacatcgaggagtcccgagcgcctctaaattggagtcctccgacc

SEQ ID NO: 368939 - DNA, 56 bp, Artificial
  Synthetic oligonucleotide
cgagcctcttgacctaactacgtcgtctgggtacccatggaatcggggagccactc

SEQ ID NO: 368940 - DNA, 55 bp, Artificial
  Synthetic oligonucleotide
cgagcctgataggctaaacaaaatcatgcaagatgacctgaaccgttatgcatcc

SEQ ID NO: 368941 - DNA, 60 bp, Artificial
  Synthetic oligonucleotide
cgagcctgtgcagtccttggcgatccgtcattcttcaggaacatggtttggcttacaaag

SEQ ID NO: 368942 - DNA, 57 bp, Artificial
  Synthetic oligonucleotide
cgagccttccggctcgtacgatgtcaagcggttgcgttgtccgttgtcaagcggctt

SEQ ID NO: 368943 - DNA, 60 bp, Artificial
  Synthetic oligonucleotide
cgagcgaagaactggatacggacctgctgttgcagagaaagggtggggtcacattgtgcc

SEQ ID NO: 368944 - DNA, 55 bp, Artificial
  Synthetic oligonucleotide
cgagcgacaatggaacatcattgtcaaaagggcttgaaccaaggattgcagcgct

SEQ ID NO: 368945 - DNA, 55 bp, Artificial
  Synthetic oligonucleotide
cgagcgacctaaatcgaaagtagcacttctgctgcctgcagcgaggcttggcccg

SEQ ID NO: 368946 - DNA, 56 bp, Artificial
  Synthetic oligonucleotide
cgagcgacctgtcgatgagcttaacggaagggaaaatgtatggtataacaattcgt

SEQ ID NO: 368947 - DNA, 60 bp, Artificial
  Synthetic oligonucleotide
cgagcgacgtgtcagagtgtacagagcctacggagatcgtgccgattgcatctcctacct

SEQ ID NO: 368948 - DNA, 57 bp, Artificial
  Synthetic oligonucleotide
cgagcgagacatgttatacacgaccgagttcaagatacctgtaaggggggacagtag

SEQ ID NO: 368949 - DNA, 58 bp, Artificial
  Synthetic oligonucleotide
cgagcgagagttaccaggttggaacgcagagatggatacagctgcgtaggggtacgaa

SEQ ID NO: 368950 - DNA, 60 bp, Artificial
  Synthetic oligonucleotide
cgagcgaggactgcagcgtagacgctttgtccagaatgctcttaatgggaatggagatcc

SEQ ID NO: 368951 - DNA, 55 bp, Artificial
  Synthetic oligonucleotide
cgagcgatcaaaatttatcggtatgtatgacagacatctttcggctctgcgcgac

SEQ ID NO: 368952 - DNA, 55 bp, Artificial
  Synthetic oligonucleotide
cgagcgatcacatttcccacaacttctaccgttgccatgccagtcttagcactcc

SEQ ID NO: 368953 - DNA, 60 bp, Artificial
  Synthetic oligonucleotide
cgagcgcacactgtctttgcagtatcgcgtcgattgcatgaatctcgacatgcccgtcga

SEQ ID NO: 368954 - DNA, 55 bp, Artificial
  Synthetic oligonucleotide
cgagcgcatgtgtcctctcacgcgcgaaatacactcgcaaatgttgatcgtaacg

SEQ ID NO: 368955 - DNA, 53 bp, Artificial
  Synthetic oligonucleotide
cgagcgccgtattcttggttcgtaaaaatgtggggtgttggtgcggacccgat

SEQ ID NO: 368956 - DNA, 50 bp, Artificial
  Synthetic oligonucleotide
cgagcgccgtgcagtcaaagggtgcctcttgccgaccccaagcgatgtta

SEQ ID NO: 368957 - DNA, 55 bp, Artificial
  Synthetic oligonucleotide
cgagcgctacacggagtattgccgaggctcaaggggcctatcgggcaagcgaagc

SEQ ID NO: 368958 - DNA, 56 bp, Artificial
  Synthetic oligonucleotide
cgagcgctctgaacatcgtttcgcgtgcgttaggataccgcgtgccactagccaaa

SEQ ID NO: 368959 - DNA, 52 bp, Artificial
  Synthetic oligonucleotide
cgagcggagatgcagagaatgactatgtctgaatggattcataagcagtgta

SEQ ID NO: 368960 - DNA, 60 bp, Artificial
  Synthetic oligonucleotide
cgagcggctacagtgcgtcacatcagcggtggatatttgctcgatcttccgcgtccggag

SEQ ID NO: 368961 - DNA, 55 bp, Artificial
  Synthetic oligonucleotide
cgagcggtgaaaatttctgcgattgcgcaggtcagataggcaaaacgagtagccc

SEQ ID NO: 368962 - DNA, 55 bp, Artificial
  Synthetic oligonucleotide
cgagcggttatcgagctatacaagcttttcggtctgaatgatttgatcgcccttc

SEQ ID NO: 368963 - DNA, 60 bp, Artificial
  Synthetic oligonucleotide
cgagcgtatgacgatagaaaagcgatgaaaagcgcacgaggtgtcgaatttatgacgaat

SEQ ID NO: 368964 - DNA, 55 bp, Artificial
  Synthetic oligonucleotide
cgagcgtcgcctccttaggcgtgtcctaggaaaacaacaactcgatgtagagttg

SEQ ID NO: 368965 - DNA, 55 bp, Artificial
  Synthetic oligonucleotide
cgagcgtcggggagggagggccaccagacgatccctctccagaggatcctcaaaa

SEQ ID NO: 368966 - DNA, 55 bp, Artificial
  Synthetic oligonucleotide
cgagcgtctgacgaggctttatcaactctccgacctctttgctctctttgaggcc

SEQ ID NO: 368967 - DNA, 55 bp, Artificial
  Synthetic oligonucleotide
cgagcgtgatgtggcagacttagaacgattaccagatccatttcaagacattcaa

SEQ ID NO: 368968 - DNA, 55 bp, Artificial
  Synthetic oligonucleotide
cgagcgtgtgcagcaaagaatttgaacatggatgaggacactttcaaagagttcc

SEQ ID NO: 368969 - DNA, 60 bp, Artificial
  Synthetic oligonucleotide
cgagctaacaatgctctgggagttattcaaaatgcgtctgcttttaagaggagggctgat

SEQ ID NO: 368970 - DNA, 55 bp, Artificial
  Synthetic oligonucleotide
cgagctaataaggtacggagcagtcctcatgtgtgtgcctacgagagttctggca

SEQ ID NO: 368971 - DNA, 57 bp, Artificial
  Synthetic oligonucleotide
cgagctaattgccattgttcaacagcgtaccgccgttgaccttcatttaagtattcc

SEQ ID NO: 368972 - DNA, 55 bp, Artificial
  Synthetic oligonucleotide
cgagctacagggtccgtcctcctcagacgagaagtccgcggctccggggctaaaa

SEQ ID NO: 368973 - DNA, 60 bp, Artificial
  Synthetic oligonucleotide
cgagctacggcaaaagatcaaaaatgaacgagagtctgcgccacggctacaggttcagaa

SEQ ID NO: 368974 - DNA, 57 bp, Artificial
  Synthetic oligonucleotide
cgagctataaagtcgctcacagagcggctttatatcgggggtcccctaactaattca

SEQ ID NO: 368975 - DNA, 60 bp, Artificial
  Synthetic oligonucleotide
cgagctatatgttttggggattcggagcagattgctttttcctcgcgagatgcctcattt

SEQ ID NO: 368976 - DNA, 59 bp, Artificial
  Synthetic oligonucleotide
cgagctatgtgacgtggaactaatcatctttaattcaaaatgcctaagcgggatgcccc

SEQ ID NO: 368977 - DNA, 60 bp, Artificial
  Synthetic oligonucleotide
cgagctatttggcgctaggatccacagtcatggtaacttggcaatagttccatctctgaa

SEQ ID NO: 368978 - DNA, 55 bp, Artificial
  Synthetic oligonucleotide
cgagctcacgcccgccgagacctcggtcagactgcgggcttacctaaatacacca

SEQ ID NO: 368979 - DNA, 57 bp, Artificial
  Synthetic oligonucleotide
cgagctcagcccgctactgctgtccaccacgcagtggcaggtccttccgtgctccta

SEQ ID NO: 368980 - DNA, 55 bp, Artificial
  Synthetic oligonucleotide
cgagctcaggcaaagacttcgaagacgcagccatcgcaactatgacgcgaaccat

SEQ ID NO: 368981 - DNA, 55 bp, Artificial
  Synthetic oligonucleotide
cgagctcagttatctgtaaatcgtatcgtaacttcaaatgcggccgatacaagta

SEQ ID NO: 368982 - DNA, 55 bp, Artificial
  Synthetic oligonucleotide
cgagctcatcaaacatcaatacggcgatttgttttcgctgcgagagcgactttta

SEQ ID NO: 368983 - DNA, 60 bp, Artificial
  Synthetic oligonucleotide
cgagctcatcccacggctcagggattacctgtgtatatcacacctggatctggacagttc

SEQ ID NO: 368984 - DNA, 60 bp, Artificial
  Synthetic oligonucleotide
cgagctcatttagaagcaagccatagtaaacctcgtcaggctcgagcgtattgtactaaa

SEQ ID NO: 368985 - DNA, 55 bp, Artificial
  Synthetic oligonucleotide
cgagctccccatcatatgtcgtcactactcgaaatgatctaccacctttataccc

SEQ ID NO: 368986 - DNA, 55 bp, Artificial
  Synthetic oligonucleotide
cgagctcgagttccgcaatctgacacctggcaatacgaatacgcgcgtctcccgc

SEQ ID NO: 368987 - DNA, 58 bp, Artificial
  Synthetic oligonucleotide
cgagctcgagtttcgcaacttgacacctggtaatacgaatacgcgtgtctctcgttat

SEQ ID NO: 368988 - DNA, 55 bp, Artificial
  Synthetic oligonucleotide
cgagctcggcgcaagaaggagcagggtggttccgatcggagcgttacggtaacga

SEQ ID NO: 368989 - DNA, 55 bp, Artificial
  Synthetic oligonucleotide
cgagctcggctcctacacactcactggttacgtaagtaatcagcctggctatacg

SEQ ID NO: 368990 - DNA, 52 bp, Artificial
  Synthetic oligonucleotide
cgagctcggttttcagaaacatctgcaggaacaatacgagtcagcagattag

SEQ ID NO: 368991 - DNA, 57 bp, Artificial
  Synthetic oligonucleotide
cgagctctcggacgaaaaggcaacgaacccgatcgtgccttcctttgacatgagtaa

SEQ ID NO: 368992 - DNA, 55 bp, Artificial
  Synthetic oligonucleotide
cgagctctgtacggagttaatccgtatattcaggatcaggcaatatgacagggcg

SEQ ID NO: 368993 - DNA, 55 bp, Artificial
  Synthetic oligonucleotide
cgagctgaccttactaaaacttaaccgtaatgagaaattcagggatatcagaggt

SEQ ID NO: 368994 - DNA, 55 bp, Artificial
  Synthetic oligonucleotide
cgagctgagatacaagcctcagcgcaagggctatcgcaaaggtatgataacgagc

SEQ ID NO: 368995 - DNA, 58 bp, Artificial
  Synthetic oligonucleotide
cgagctgagttcggatgtgataaagagcatccaacatgccgagacccagccagcacac

SEQ ID NO: 368996 - DNA, 54 bp, Artificial
  Synthetic oligonucleotide
cgagctgcaatgctggatgttctgaggagggggtgctacaatatccagtaggag

SEQ ID NO: 368997 - DNA, 57 bp, Artificial
  Synthetic oligonucleotide
cgagctgccgaccccttaccgactttgaccagggctggggccctatcagttatgcca

SEQ ID NO: 368998 - DNA, 51 bp, Artificial
  Synthetic oligonucleotide
cgagctgcttgggagacagctcgccatacccctgtcaattcgtggttgggc

SEQ ID NO: 368999 - DNA, 60 bp, Artificial
  Synthetic oligonucleotide
cgagctggaatagttatgtaccgggtagagcgactggcggtagcgtcagaggcggcagct

SEQ ID NO: 369000 - DNA, 52 bp, Artificial
  Synthetic oligonucleotide
cgagctggggtggccaatagagcaacgattcttcttccaagggcggatgagc

SEQ ID NO: 369001 - DNA, 60 bp, Artificial
  Synthetic oligonucleotide
cgagctggtatgagtaagttagtggcggacaatattatcgctagcgtgattaaatcgaat

SEQ ID NO: 369002 - DNA, 60 bp, Artificial
  Synthetic oligonucleotide
cgagctgtatatgcgtgctacagatactgttagtttgggaaccactctttcagagcatgc

SEQ ID NO: 369003 - DNA, 60 bp, Artificial
  Synthetic oligonucleotide
cgagctgtggtgcgatgaggagctacctcccgaggaggcggagcccgacagacgtgcacc

SEQ ID NO: 369004 - DNA, 58 bp, Artificial
  Synthetic oligonucleotide
cgagcttaagtatacgcataacgataagctggataacgttaggctgaacaactactta

SEQ ID NO: 369005 - DNA, 60 bp, Artificial
  Synthetic oligonucleotide
cgagcttatcgagtatggtgacccggatcagactgggcgtgacttgaagggccataatga

SEQ ID NO: 369006 - DNA, 57 bp, Artificial
  Synthetic oligonucleotide
cgagcttcactcttgggattttagaatgttattgtcgttaggctacttcactaggag

SEQ ID NO: 369007 - DNA, 60 bp, Artificial
  Synthetic oligonucleotide
cgagcttggagtggggcgttatggtatatgactattctgaacttgagcacgacccgctaa

SEQ ID NO: 369008 - DNA, 59 bp, Artificial
  Synthetic oligonucleotide
cgagcttgggtgagcttgttctgaagaccaagtctttgcttagcactggtctggggacc

SEQ ID NO: 369009 - DNA, 54 bp, Artificial
  Synthetic oligonucleotide
cgagctttagtcaaatcaaatgttaatgttggacactgctcatcacaagaaaag

SEQ ID NO: 369010 - DNA, 59 bp, Artificial
  Synthetic oligonucleotide
cgagcttttagctccctgaatgtttggatggaaatgtgctgaccttgttggggatacca

SEQ ID NO: 369011 - DNA, 60 bp, Artificial
  Synthetic oligonucleotide
cgaggaaaacgtttgtggagctcatgagaagaggagatctacctgtctggctatcttaca

SEQ ID NO: 369012 - DNA, 55 bp, Artificial
  Synthetic oligonucleotide
cgaggaaaagtaatggaggtcgatgttgcatcgtatcggaaacgtccaggacgct

SEQ ID NO: 369013 - DNA, 51 bp, Artificial
  Synthetic oligonucleotide
cgaggaaataattattccggtcaaccattttaaaaacgacctaataataga

SEQ ID NO: 369014 - DNA, 60 bp, Artificial
  Synthetic oligonucleotide
cgaggaaatagtgtgtttggttcctctccaatctccatcatgactagcggctttgcgttg

SEQ ID NO: 369015 - DNA, 59 bp, Artificial
  Synthetic oligonucleotide
cgaggaaatctttataggaccccccctctcctggattgcacagcacgattgatgggata

SEQ ID NO: 369016 - DNA, 55 bp, Artificial
  Synthetic oligonucleotide
cgaggaacacactatagccatgataactgaagaaattgatgagtggctaatcctc

SEQ ID NO: 369017 - DNA, 60 bp, Artificial
  Synthetic oligonucleotide
cgaggaacacgttgtcactcagttcattgctcccggaggcaccatcatccttgaatcctg

SEQ ID NO: 369018 - DNA, 55 bp, Artificial
  Synthetic oligonucleotide
cgaggaacattgattcccggccgttgaactttgtgcaaatgtacaagtgggagga

SEQ ID NO: 369019 - DNA, 56 bp, Artificial
  Synthetic oligonucleotide
cgaggaacccccaagcaagcgcgggattactgcactaaggaggatacccgcttcga

SEQ ID NO: 369020 - DNA, 55 bp, Artificial
  Synthetic oligonucleotide
cgaggaaccccggttcgaaaccggcaggatccgctatgagcacaagtgaggcgct

SEQ ID NO: 369021 - DNA, 55 bp, Artificial
  Synthetic oligonucleotide
cgaggaactgaactcacacatcgcgtaggaaggcgattctgtgtgaaatccgtct

SEQ ID NO: 369022 - DNA, 60 bp, Artificial
  Synthetic oligonucleotide
cgaggaagccggactcacacatcgtgtagggaagcgattttgtgtgaaatctgtctatct

SEQ ID NO: 369023 - DNA, 58 bp, Artificial
  Synthetic oligonucleotide
cgaggaaggttagatagattgattttgatatcaagtgggaattacacattcggtaata

SEQ ID NO: 369024 - DNA, 58 bp, Artificial
  Synthetic oligonucleotide
cgaggaatatgtagaggatctccgggtactgacgctagattgttggtgtttccaattc

SEQ ID NO: 369025 - DNA, 55 bp, Artificial
  Synthetic oligonucleotide
cgaggaatggtcaagacaggagcaaacctatcacagagactggatcaatgaccag

SEQ ID NO: 369026 - DNA, 55 bp, Artificial
  Synthetic oligonucleotide
cgaggaattacgggtcatcgcgctgcctactcttgtacagaatggtaagcacgtg

SEQ ID NO: 369027 - DNA, 59 bp, Artificial
  Synthetic oligonucleotide
cgaggacagcgatgaacacgttgaagtgagaatcgaaaccttcaactgtcaacgtcgac

SEQ ID NO: 369028 - DNA, 57 bp, Artificial
  Synthetic oligonucleotide
cgaggacattgggcgcttgcaattacgccgagcgtgggtgaactatgaggactctgg

SEQ ID NO: 369029 - DNA, 55 bp, Artificial
  Synthetic oligonucleotide
cgaggaccctgggttcttttacatggttcccacatagaacatctattccagaggg

SEQ ID NO: 369030 - DNA, 53 bp, Artificial
  Synthetic oligonucleotide
cgaggaccgccgtttacacgttggttgttttgcgctgtgaactttcgaatttc

SEQ ID NO: 369031 - DNA, 60 bp, Artificial
  Synthetic oligonucleotide
cgaggacgaacagatgtaccagaagtgctgcaatctattcgagaaattcttccctagtag

SEQ ID NO: 369032 - DNA, 57 bp, Artificial
  Synthetic oligonucleotide
cgaggacgccgttaagtggaccgctaaggattatgcagaccaagcccagagcttccg

SEQ ID NO: 369033 - DNA, 60 bp, Artificial
  Synthetic oligonucleotide
cgaggactatctaatggaagaagtctgttacgacgactccatcctagacctcctgcatcc

SEQ ID NO: 369034 - DNA, 55 bp, Artificial
  Synthetic oligonucleotide
cgaggactcagcgcagctctattctggtttaaaagtagtttgtcacccgctacac

SEQ ID NO: 369035 - DNA, 55 bp, Artificial
  Synthetic oligonucleotide
cgaggacttaattgaattgcgtgagttgagcagtctcgttgaatacacgccgagc

SEQ ID NO: 369036 - DNA, 55 bp, Artificial
  Synthetic oligonucleotide
cgaggagaaggtattgacgctttgcaagaagttggacgatatgaacatttatttg

SEQ ID NO: 369037 - DNA, 60 bp, Artificial
  Synthetic oligonucleotide
cgaggagacatctgggcccaggtccagtatcatgcgtacctggcagacgagactcatggc

SEQ ID NO: 369038 - DNA, 60 bp, Artificial
  Synthetic oligonucleotide
cgaggagagcgctgcaacttggaggacagggatagatcagagctcagtccgctgttgtta

SEQ ID NO: 369039 - DNA, 55 bp, Artificial
  Synthetic oligonucleotide
cgaggagagctgatggatggttctacagacatcattatgaaagcagacacccaaa

SEQ ID NO: 369040 - DNA, 55 bp, Artificial
  Synthetic oligonucleotide
cgaggagatcccgttacatcaagtctcactgcacacttcaaggccctgtcacatc

SEQ ID NO: 369041 - DNA, 60 bp, Artificial
  Synthetic oligonucleotide
cgaggagattcggaggtggcgagataaagacgctgaccacaagtataagcccagatcaat

SEQ ID NO: 369042 - DNA, 59 bp, Artificial
  Synthetic oligonucleotide
cgaggagcaacgtatacgattaacgctgcaggtgagtttgaatttagtgggcggaatga

SEQ ID NO: 369043 - DNA, 57 bp, Artificial
  Synthetic oligonucleotide
cgaggagccagtctaccatctcgaacgagtagacttttgccagacccgtcccgtgta

SEQ ID NO: 369044 - DNA, 55 bp, Artificial
  Synthetic oligonucleotide
cgaggagctgaatgctcgttccagacgtcccaaggttcatttctccaaggcagtg

SEQ ID NO: 369045 - DNA, 55 bp, Artificial
  Synthetic oligonucleotide
cgaggagcttaagggagctagggaatttattaggcctaaatccttatgagatacc

SEQ ID NO: 369046 - DNA, 53 bp, Artificial
  Synthetic oligonucleotide
cgaggaggagacgcctcggaaggtggtcggaataaatcgaactgaccagtcct

SEQ ID NO: 369047 - DNA, 59 bp, Artificial
  Synthetic oligonucleotide
cgaggaggagagaattcgcacatacgtaaggaaaaggactattatggagcgagaatctg

SEQ ID NO: 369048 - DNA, 55 bp, Artificial
  Synthetic oligonucleotide
cgaggaggagtacactctttgggactcaatcacgcagtttgagcttgctggtggc

SEQ ID NO: 369049 - DNA, 56 bp, Artificial
  Synthetic oligonucleotide
cgaggaggatgggagctttgctattgaaatacgctccccctaccaccgaactccac

SEQ ID NO: 369050 - DNA, 60 bp, Artificial
  Synthetic oligonucleotide
cgaggaggctaccgtcagtatctccgggtcgtatattgtcactggcagccagctgcaacc

SEQ ID NO: 369051 - DNA, 60 bp, Artificial
  Synthetic oligonucleotide
cgaggagtgaacgcatggctcacagccagtgagtatgcacgactcggtgcaaacgttgaa

SEQ ID NO: 369052 - DNA, 55 bp, Artificial
  Synthetic oligonucleotide
cgaggagtgctcctgttatcctgatgatggcgaaatcacgtgtgtgtgcagagat

SEQ ID NO: 369053 - DNA, 55 bp, Artificial
  Synthetic oligonucleotide
cgaggagtgctcttttgacggagggaaagaatgggacgtgatatcatcagcggct

SEQ ID NO: 369054 - DNA, 59 bp, Artificial
  Synthetic oligonucleotide
cgaggagtgttggtggaggactacgtctgatatgcgagcggacgtaagaatcacgggga

SEQ ID NO: 369055 - DNA, 58 bp, Artificial
  Synthetic oligonucleotide
cgaggatataacaggtggattaccctcgaggacatcaaatctagatcatctctactgg

SEQ ID NO: 369056 - DNA, 60 bp, Artificial
  Synthetic oligonucleotide
cgaggatcaagcagactgaaggttgcaccctcaggcaatactgtgcgtactatgcgaagc

SEQ ID NO: 369057 - DNA, 55 bp, Artificial
  Synthetic oligonucleotide
cgaggatcagatctctaccgcgagagggcagtgggtgacttccccatgaaggtgg

SEQ ID NO: 369058 - DNA, 58 bp, Artificial
  Synthetic oligonucleotide
cgaggatccgtgcttacgtgaaatcgctaagtatggtgggtattctacctactcgtca

SEQ ID NO: 369059 - DNA, 55 bp, Artificial
  Synthetic oligonucleotide
cgaggatgaaacaatggtgtcagccgatttcttgagttatgggaagacgcctatt

SEQ ID NO: 369060 - DNA, 55 bp, Artificial
  Synthetic oligonucleotide
cgaggatgacgtctgacgagctggatcctgcagtggagtttcttgatgtaagaga

SEQ ID NO: 369061 - DNA, 55 bp, Artificial
  Synthetic oligonucleotide
cgaggatgagactcgtagcaatgctttacactcctcttagatctaatggttctgg

SEQ ID NO: 369062 - DNA, 55 bp, Artificial
  Synthetic oligonucleotide
cgaggattgtggtgagatggcaacgattatcacacaaactcttttcccgtgtagg

SEQ ID NO: 369063 - DNA, 60 bp, Artificial
  Synthetic oligonucleotide
cgaggatttgattgatctgtgtgttcatgatgtcaaacgtgtgttgaatactcctggtgt

SEQ ID NO: 369064 - DNA, 58 bp, Artificial
  Synthetic oligonucleotide
cgaggattttgcacattactcgtagccgtgtttctgaccctcgttatgagcgtcgctt

SEQ ID NO: 369065 - DNA, 55 bp, Artificial
  Synthetic oligonucleotide
cgaggcaaatgtgctgacaatcaagtagagactaaatcgtgtagtaacacacagg

SEQ ID NO: 369066 - DNA, 55 bp, Artificial
  Synthetic oligonucleotide
cgaggcaacacgaccctgttacactgcgacacgccaggcaacgatctagtcaatc

SEQ ID NO: 369067 - DNA, 55 bp, Artificial
  Synthetic oligonucleotide
cgaggcaatattctacaccacgggaggtgacgaattcttccggacggcaaatccc

SEQ ID NO: 369068 - DNA, 50 bp, Artificial
  Synthetic oligonucleotide
cgaggcaatgatagataaggtgcgcatctaccagggtatgactgtcatca

SEQ ID NO: 369069 - DNA, 56 bp, Artificial
  Synthetic oligonucleotide
cgaggcaattgtgcaggccctaaaacgaaagtacatagctagcccgttgtccgccg

SEQ ID NO: 369070 - DNA, 56 bp, Artificial
  Synthetic oligonucleotide
cgaggcaatttggcccggccgtaataataaaatgtgtgcgttggaacagataagcc

SEQ ID NO: 369071 - DNA, 55 bp, Artificial
  Synthetic oligonucleotide
cgaggcacagggcgctacctacacggagaccactattattgccacggcagacgcc

SEQ ID NO: 369072 - DNA, 60 bp, Artificial
  Synthetic oligonucleotide
cgaggcacctccattatgagtgccttgagtggggattactctgcggcacccaccccgcaa

SEQ ID NO: 369073 - DNA, 55 bp, Artificial
  Synthetic oligonucleotide
cgaggcactgagaccattgctgttcagcgctttggtgatatcactcatcttgtgt

SEQ ID NO: 369074 - DNA, 55 bp, Artificial
  Synthetic oligonucleotide
cgaggcagacgcttgggtgggttacagtaaacatgaggtttcttccctacctata

SEQ ID NO: 369075 - DNA, 55 bp, Artificial
  Synthetic oligonucleotide
cgaggcagatcctcaccgcctagatgtccggagaaaagagaaggcgcgatcgcgc

SEQ ID NO: 369076 - DNA, 57 bp, Artificial
  Synthetic oligonucleotide
cgaggcagccctctatggccggttcaccatcaagtcggatgtctggtccttcggcat

SEQ ID NO: 369077 - DNA, 60 bp, Artificial
  Synthetic oligonucleotide
cgaggcatatgacgtggggtgtgcatggtatgagttgacaccacctgagactaccgtcag

SEQ ID NO: 369078 - DNA, 57 bp, Artificial
  Synthetic oligonucleotide
cgaggcatattgaattggggacactcaaaactctgaggaatgggggactctggggac

SEQ ID NO: 369079 - DNA, 55 bp, Artificial
  Synthetic oligonucleotide
cgaggcatattggtgtccctctaaactctacggaattggtgtctttggtgtccca

SEQ ID NO: 369080 - DNA, 55 bp, Artificial
  Synthetic oligonucleotide
cgaggcatctagcctgaatgactcagtagccatgagaatggcatttggcaacctc

SEQ ID NO: 369081 - DNA, 56 bp, Artificial
  Synthetic oligonucleotide
cgaggcatggaacacactcagggagaagggtggtggaacaataggttggggattgg

SEQ ID NO: 369082 - DNA, 59 bp, Artificial
  Synthetic oligonucleotide
cgaggccacaggggtgccctacaagagtttcgacagagtggcgaaaattcatgtgtgtg

SEQ ID NO: 369083 - DNA, 55 bp, Artificial
  Synthetic oligonucleotide
cgaggccacccaactggcgaccctgaggaagctatgcattgaggggaaaattacc

SEQ ID NO: 369084 - DNA, 55 bp, Artificial
  Synthetic oligonucleotide
cgaggccatgaacacttaccgagacgcctttgagggctacacatcgtttgcggcc

SEQ ID NO: 369085 - DNA, 59 bp, Artificial
  Synthetic oligonucleotide
cgaggcccggtgagccgtgaacatgtggagtggtgcagggagtttgtcaaaggcaagta

SEQ ID NO: 369086 - DNA, 55 bp, Artificial
  Synthetic oligonucleotide
cgaggcctaccggactctcaaacgggagcttgcacaaacacgccacacaaacccc

SEQ ID NO: 369087 - DNA, 54 bp, Artificial
  Synthetic oligonucleotide
cgaggcctgtgtggtcgacattggtgtgggtatttaaatggagccacagctggt

SEQ ID NO: 369088 - DNA, 60 bp, Artificial
  Synthetic oligonucleotide
cgaggcgaagcaaaacatttatatattggtctgaactgctgcctataaataataggcagg

SEQ ID NO: 369089 - DNA, 55 bp, Artificial
  Synthetic oligonucleotide
cgaggcgaagtcctcactgctgaccaaggtcgggccgtgctatgtcgttgtccag

SEQ ID NO: 369090 - DNA, 60 bp, Artificial
  Synthetic oligonucleotide
cgaggcgactacattgtggactgtgtgactggattataccagtcagacattggagtcggt

SEQ ID NO: 369091 - DNA, 58 bp, Artificial
  Synthetic oligonucleotide
cgaggcgattatcccaccgtggctgttcgccgagtgccgtacccttcgctgccgcgag

SEQ ID NO: 369092 - DNA, 51 bp, Artificial
  Synthetic oligonucleotide
cgaggcggaaaagagccctctggagaccagcggcgctagtgctgttggctt

SEQ ID NO: 369093 - DNA, 57 bp, Artificial
  Synthetic oligonucleotide
cgaggcggtgatggctcgcccttgtctgtccctgggtcgtagcccgcgtctgtcggg

SEQ ID NO: 369094 - DNA, 55 bp, Artificial
  Synthetic oligonucleotide
cgaggcggtgtagtaggagatgcaatacctgatggtgcagttcaacaggatcaca

SEQ ID NO: 369095 - DNA, 55 bp, Artificial
  Synthetic oligonucleotide
cgaggcggttgaatcgggtctcgttacagtacactttcgatccgacgtgtttcgc

SEQ ID NO: 369096 - DNA, 55 bp, Artificial
  Synthetic oligonucleotide
cgaggcgtacaaggaatttcttaacctatcgattggtagcacctatacatcaccg

SEQ ID NO: 369097 - DNA, 57 bp, Artificial
  Synthetic oligonucleotide
cgaggcgttaatatccagagtcactactacattaagcgtttgtccaccgtaataatc

SEQ ID NO: 369098 - DNA, 55 bp, Artificial
  Synthetic oligonucleotide
cgaggctactacgtgcagaccaactgctacgagcgcggtaaacgtgacggcattc

SEQ ID NO: 369099 - DNA, 60 bp, Artificial
  Synthetic oligonucleotide
cgaggctactcacgagagacgagcctatgtatgacaccctatgcgctgttcgaactaagc

SEQ ID NO: 369100 - DNA, 55 bp, Artificial
  Synthetic oligonucleotide
cgaggctagtaaggtaaagtgatatgccctggacgcatgtatcgtcctgtttgtg

SEQ ID NO: 369101 - DNA, 60 bp, Artificial
  Synthetic oligonucleotide
cgaggctagtagtggcgagcctcactgggtgcctgaggccaccgcaccacgcgtccgcaa

SEQ ID NO: 369102 - DNA, 60 bp, Artificial
  Synthetic oligonucleotide
cgaggctattactataatacatcaacaacacggtaagccttgtgattgtgcgggaggata

SEQ ID NO: 369103 - DNA, 55 bp, Artificial
  Synthetic oligonucleotide
cgaggctccaccaagcatttggtcacgaatagtcaactttggttcagggtggggt

SEQ ID NO: 369104 - DNA, 59 bp, Artificial
  Synthetic oligonucleotide
cgaggctcttagaagatccgactaccctgaatatcagaggaggggcaagtcccaccatc

SEQ ID NO: 369105 - DNA, 60 bp, Artificial
  Synthetic oligonucleotide
cgaggctggagccacacaagtgggaaaagtactgcgttctagagataggagacatgctcc

SEQ ID NO: 369106 - DNA, 55 bp, Artificial
  Synthetic oligonucleotide
cgaggcttacgacatagtgagccgtgcgagctataagaggactaggatatgggtt

SEQ ID NO: 369107 - DNA, 55 bp, Artificial
  Synthetic oligonucleotide
cgaggcttccagtctcaacgactcagtggcaatgaggcagacattcgggaaccta

SEQ ID NO: 369108 - DNA, 53 bp, Artificial
  Synthetic oligonucleotide
cgaggcttggagaaaccttaaggttagattaacacgaacgtgttagagttcat

SEQ ID NO: 369109 - DNA, 55 bp, Artificial
  Synthetic oligonucleotide
cgaggctttaacggagtgcgtttatcgtattacttggggctctaactctcgtgtc

SEQ ID NO: 369110 - DNA, 55 bp, Artificial
  Synthetic oligonucleotide
cgagggaacgtgcttttgtcacctgaggaagtaagtgaaacacaagggacggaga

SEQ ID NO: 369111 - DNA, 55 bp, Artificial
  Synthetic oligonucleotide
cgagggacgaggatttagacaagcttatagtgagttcatgaacgcggcttggtct

SEQ ID NO: 369112 - DNA, 60 bp, Artificial
  Synthetic oligonucleotide
cgagggacgtgctaacaggtaggaaaatacattgctgtctgtcatggggaatgagtcagg

SEQ ID NO: 369113 - DNA, 60 bp, Artificial
  Synthetic oligonucleotide
cgagggagaacgtagcagtcatacaggtaggcggcgcaaatattttagacatcacagctg

SEQ ID NO: 369114 - DNA, 51 bp, Artificial
  Synthetic oligonucleotide
cgagggagcaattaactgttcatcaaatattacagggttgctattaacaag

SEQ ID NO: 369115 - DNA, 58 bp, Artificial
  Synthetic oligonucleotide
cgagggaggcagactgtgaaggaaaataaggggacaagaatcaggttcaaagatgata

SEQ ID NO: 369116 - DNA, 60 bp, Artificial
  Synthetic oligonucleotide
cgagggaggctcaggggaggaaagtgattcatcgcagaagagatcctcccaggtgccatc

SEQ ID NO: 369117 - DNA, 55 bp, Artificial
  Synthetic oligonucleotide
cgagggatcggcgattttgagttgcttcaacgtctgtttgtgatgtggctgcggg

SEQ ID NO: 369118 - DNA, 54 bp, Artificial
  Synthetic oligonucleotide
cgagggcactcaaatgagcgcacgtatcagcaagacccaagcgtcccgtaacaa

SEQ ID NO: 369119 - DNA, 55 bp, Artificial
  Synthetic oligonucleotide
cgagggccaaatcatgactcttaactgcggcttagcgcaaccgttacctcgggtc

SEQ ID NO: 369120 - DNA, 55 bp, Artificial
  Synthetic oligonucleotide
cgagggccagcaacatgggagctttaagtactcaaggaaggataggaactacgta

SEQ ID NO: 369121 - DNA, 60 bp, Artificial
  Synthetic oligonucleotide
cgagggcccagatgatagaactatcatatgggtgtacggctctcaaggcaatgaagggaa

SEQ ID NO: 369122 - DNA, 54 bp, Artificial
  Synthetic oligonucleotide
cgagggctagtctgatccctgatgccacacacctaggaccacagttctgcaaga

SEQ ID NO: 369123 - DNA, 56 bp, Artificial
  Synthetic oligonucleotide
cgagggcttctctttccgaccagaactaaggtcgatgataataccgtcttgttata

SEQ ID NO: 369124 - DNA, 51 bp, Artificial
  Synthetic oligonucleotide
cgaggggaaccgaaacttcggggacgcctgaagtaaggtaagagagacacc

SEQ ID NO: 369125 - DNA, 55 bp, Artificial
  Synthetic oligonucleotide
cgaggggactagcggtagcagtgagttcgttggatggccgaacccctgagtacag

SEQ ID NO: 369126 - DNA, 55 bp, Artificial
  Synthetic oligonucleotide
cgaggggatggtccacgactccattaaggaggaactccgacccctcattcaacag

SEQ ID NO: 369127 - DNA, 55 bp, Artificial
  Synthetic oligonucleotide
cgaggggatggtgttatgcacactcgctgccactgtggggctgagatcaccggac

SEQ ID NO: 369128 - DNA, 57 bp, Artificial
  Synthetic oligonucleotide
cgaggggatggttgaggtctcatcctcaaaacaaacgttaagactggctgttgaaga

SEQ ID NO: 369129 - DNA, 53 bp, Artificial
  Synthetic oligonucleotide
cgaggggcccggcgcccaggtttggagagcactccgggccgaagggttgagta

SEQ ID NO: 369130 - DNA, 57 bp, Artificial
  Synthetic oligonucleotide
cgagggggctttcatcttacagggaatagccactaaagattataggggcgcagagat

SEQ ID NO: 369131 - DNA, 50 bp, Artificial
  Synthetic oligonucleotide
cgaggggtaaatgctgttacgcgtacattacattcttcaatgcaacttcc

SEQ ID NO: 369132 - DNA, 60 bp, Artificial
  Synthetic oligonucleotide
cgaggggtgttatacacacttaagagagagggcaacacgcaagtgcataagcatgaggag

SEQ ID NO: 369133 - DNA, 53 bp, Artificial
  Synthetic oligonucleotide
cgagggtaagacctcccaattaaagacgatacgccatagaataactaccgggc

SEQ ID NO: 369134 - DNA, 55 bp, Artificial
  Synthetic oligonucleotide
cgagggtaagatcttcgatgctaggtcaaagcttacagagacgactgcacttaga

SEQ ID NO: 369135 - DNA, 60 bp, Artificial
  Synthetic oligonucleotide
cgagggtaataagactcataggtacacaggagaaggtatatggagaggttcattcgatga

SEQ ID NO: 369136 - DNA, 58 bp, Artificial
  Synthetic oligonucleotide
cgagggtacggaggatctcaagaagtattacacttcataagatccaacggcttggtga

SEQ ID NO: 369137 - DNA, 53 bp, Artificial
  Synthetic oligonucleotide
cgagggtagacctgttaatcctttagtacacaataccatagaagccccttggg

SEQ ID NO: 369138 - DNA, 59 bp, Artificial
  Synthetic oligonucleotide
cgagggtagcgagattgttaccgttccgcataattcggaaaaatgcctgcacatagcta

SEQ ID NO: 369139 - DNA, 54 bp, Artificial
  Synthetic oligonucleotide
cgagggtcaccataaatgccgactgtgataaaaggggggcttctgtgaggagca

SEQ ID NO: 369140 - DNA, 56 bp, Artificial
  Synthetic oligonucleotide
cgagggtcccgagtgaggcttatcccggggatcggcctccgctcctccatggtgga

SEQ ID NO: 369141 - DNA, 55 bp, Artificial
  Synthetic oligonucleotide
cgagggtctttccgtaacaccaattgttgacatgcgacgcaaccaagggtaccac

SEQ ID NO: 369142 - DNA, 55 bp, Artificial
  Synthetic oligonucleotide
cgagggtggctctaatagatgatgccacgtatgcatgttggaagtactttgacac

SEQ ID NO: 369143 - DNA, 55 bp, Artificial
  Synthetic oligonucleotide
cgagggtgtaaatcgtgactcgttagatatggccgagggtataaatcgagactcg

SEQ ID NO: 369144 - DNA, 60 bp, Artificial
  Synthetic oligonucleotide
cgagggtgtgttgatggcttgaatttgggaaagtgcttcctgtttagtgagtgagcactg

SEQ ID NO: 369145 - DNA, 53 bp, Artificial
  Synthetic oligonucleotide
cgagggttgaaggaaacagcagggtaacgtcggtgaggtcgttggatagttgg

SEQ ID NO: 369146 - DNA, 56 bp, Artificial
  Synthetic oligonucleotide
cgagggttttggaagaaacactctggtgagcccggcactcttctatggaacactgt

SEQ ID NO: 369147 - DNA, 56 bp, Artificial
  Synthetic oligonucleotide
cgaggtaaactacacccgtgacgctcagcgtaacgtagccaatattctgaggtaca

SEQ ID NO: 369148 - DNA, 55 bp, Artificial
  Synthetic oligonucleotide
cgaggtaagaaatccgcagaatccgacaactacggaaacattagatgcaactcgt

SEQ ID NO: 369149 - DNA, 60 bp, Artificial
  Synthetic oligonucleotide
cgaggtaatactggagcgaccagtgccgcaattgcagcccttatctaatagtcttggagt

SEQ ID NO: 369150 - DNA, 56 bp, Artificial
  Synthetic oligonucleotide
cgaggtaatggaattactcatcgtgttgggaaacgtttctgtgtcaagtccgtata

SEQ ID NO: 369151 - DNA, 60 bp, Artificial
  Synthetic oligonucleotide
cgaggtacctgtagggcccactgacgaggacgcacatcatgctgagggtgacacagagga

SEQ ID NO: 369152 - DNA, 60 bp, Artificial
  Synthetic oligonucleotide
cgaggtacgagcatgtttggttcgtcaccagttcacatcatgactagtggatatgcacta

SEQ ID NO: 369153 - DNA, 54 bp, Artificial
  Synthetic oligonucleotide
cgaggtataggctgtacccactgccaaaagcctttaaccgttatccgccaacca

SEQ ID NO: 369154 - DNA, 55 bp, Artificial
  Synthetic oligonucleotide
cgaggtatgttaagcaagaaagtctgctactggcaactgggatgaagaacgttcc

SEQ ID NO: 369155 - DNA, 56 bp, Artificial
  Synthetic oligonucleotide
cgaggtattacatttaactcagggaacctgctgggaacagatgtatacccctggcg

SEQ ID NO: 369156 - DNA, 55 bp, Artificial
  Synthetic oligonucleotide
cgaggtcaactctttggttgcgcttgtgcggaaagttaagtcgtttggagttaga

SEQ ID NO: 369157 - DNA, 55 bp, Artificial
  Synthetic oligonucleotide
cgaggtcatcgaaacggcggctgaggaggtaccaatctttggcgctggccaggca

SEQ ID NO: 369158 - DNA, 59 bp, Artificial
  Synthetic oligonucleotide
cgaggtcatttgtctacggggataccctgcctggtacatatgtcgctttatctggcggc

SEQ ID NO: 369159 - DNA, 55 bp, Artificial
  Synthetic oligonucleotide
cgaggtcccaagatatgtcatacattaggagacgattcactagtaggtgatgacg

SEQ ID NO: 369160 - DNA, 60 bp, Artificial
  Synthetic oligonucleotide
cgaggtccttgatgcaatatagggccatccgtctcctgagagacagatcttgtataggat

SEQ ID NO: 369161 - DNA, 58 bp, Artificial
  Synthetic oligonucleotide
cgaggtcgatccaccgaggagctgatctttggtcctggtgagaggccccccgtcgctc

SEQ ID NO: 369162 - DNA, 55 bp, Artificial
  Synthetic oligonucleotide
cgaggtcgattaggacgatttcctggtgccgcggtgtgatggcctaccgtcgtcg

SEQ ID NO: 369163 - DNA, 55 bp, Artificial
  Synthetic oligonucleotide
cgaggtcgtatcactggaacaacaaccgttgggcctgttgtcactctcccaccac

SEQ ID NO: 369164 - DNA, 55 bp, Artificial
  Synthetic oligonucleotide
cgaggtctattagggcttacacggatgaggctgtgcgcacactgttggggcagtc

SEQ ID NO: 369165 - DNA, 55 bp, Artificial
  Synthetic oligonucleotide
cgaggtctgatgcaaagaagagggcggaggaattcggtaaacccacgaaacacac

SEQ ID NO: 369166 - DNA, 56 bp, Artificial
  Synthetic oligonucleotide
cgaggtctggcctcctgggttcgttgatccgaccaccctcgatcgcaatcgcaccc

SEQ ID NO: 369167 - DNA, 55 bp, Artificial
  Synthetic oligonucleotide
cgaggtcttgacgcctcaatggtatgataagtatagtgaaataccacggtcagtc

SEQ ID NO: 369168 - DNA, 55 bp, Artificial
  Synthetic oligonucleotide
cgaggtcttggcctacgacatagtggtgtatgataaacagcagggccaacgcgtg

SEQ ID NO: 369169 - DNA, 55 bp, Artificial
  Synthetic oligonucleotide
cgaggtcttgtactaggtgtgcacaaaccaccagctgccattagcctcgctaggg

SEQ ID NO: 369170 - DNA, 55 bp, Artificial
  Synthetic oligonucleotide
cgaggtgaattcaaataacttcattccaaaggtgcaactctaacgggtggatttg

SEQ ID NO: 369171 - DNA, 55 bp, Artificial
  Synthetic oligonucleotide
cgaggtgacccagagtagagccatccaccttcttgagtcattccgagagggcttc

SEQ ID NO: 369172 - DNA, 55 bp, Artificial
  Synthetic oligonucleotide
cgaggtgagtctcatgctagcagggtatccatccaaatgcgggatgctgcgagca

SEQ ID NO: 369173 - DNA, 59 bp, Artificial
  Synthetic oligonucleotide
cgaggtgcaaggtgagacctatactgaggtgtcgttagtgcgtctcacgccaacacccc

SEQ ID NO: 369174 - DNA, 55 bp, Artificial
  Synthetic oligonucleotide
cgaggtgccatacttagatacgtctttgagttcttggattaggtacggctgtcgg

SEQ ID NO: 369175 - DNA, 59 bp, Artificial
  Synthetic oligonucleotide
cgaggtggaagccttagagccgggcgccagtatagtattagactatgtcgaggaggagc

SEQ ID NO: 369176 - DNA, 55 bp, Artificial
  Synthetic oligonucleotide
cgaggtggacatgttacggcagaggttcaactcgcaagagttggtgcgacgcgcc

SEQ ID NO: 369177 - DNA, 60 bp, Artificial
  Synthetic oligonucleotide
cgaggtggcattcatggacgattacggctgtaaggatatcgtaatagacgagattgggct

SEQ ID NO: 369178 - DNA, 52 bp, Artificial
  Synthetic oligonucleotide
cgaggtggccgcggaggtcccgactggaatcccccgtgtgccacctgggggt

SEQ ID NO: 369179 - DNA, 55 bp, Artificial
  Synthetic oligonucleotide
cgaggtggctcaccaagaacgtcatgtatctcctccccgccaagctcagactggc

SEQ ID NO: 369180 - DNA, 55 bp, Artificial
  Synthetic oligonucleotide
cgaggtgggcgctagaaggagagccccgtaccagagcattaagggcactggaggt

SEQ ID NO: 369181 - DNA, 55 bp, Artificial
  Synthetic oligonucleotide
cgaggtggtaaatttgctggatggaaccctacattcatgatagtacaacaaggtg

SEQ ID NO: 369182 - DNA, 60 bp, Artificial
  Synthetic oligonucleotide
cgaggtgtagagtttatgacgaatgctaaatggatgaagtgggcgatcgacgatagaatg

SEQ ID NO: 369183 - DNA, 55 bp, Artificial
  Synthetic oligonucleotide
cgaggtgtaggaatgatgccaagacctagtggaggtgtgtaccaacatatttctc

SEQ ID NO: 369184 - DNA, 52 bp, Artificial
  Synthetic oligonucleotide
cgaggtgtcattggtgtttaaggttaaagagttcgcccccgacgcgcctttg

SEQ ID NO: 369185 - DNA, 55 bp, Artificial
  Synthetic oligonucleotide
cgaggtgtggggattgagtgttgaaacaggcttagacatagacggtgggagcagc

SEQ ID NO: 369186 - DNA, 54 bp, Artificial
  Synthetic oligonucleotide
cgaggtgtggtttgaacacggaaatacttaattttcccgcgctctttgacagga

SEQ ID NO: 369187 - DNA, 55 bp, Artificial
  Synthetic oligonucleotide
cgaggtgttgccgccgctccgcgaccagatgcgcggcttgttccaggccatcgag

SEQ ID NO: 369188 - DNA, 52 bp, Artificial
  Synthetic oligonucleotide
cgaggtgtttcgctccacacaaccccagtgtagatcgggccgatgagtcacc

SEQ ID NO: 369189 - DNA, 58 bp, Artificial
  Synthetic oligonucleotide
cgaggttacaatgtgtcatctatagtcactatgacgtcccagggaatgtacgggggaa

SEQ ID NO: 369190 - DNA, 50 bp, Artificial
  Synthetic oligonucleotide
cgaggttagattccagcggtgaaaagggtaccatagcatatgagaaagca

SEQ ID NO: 369191 - DNA, 55 bp, Artificial
  Synthetic oligonucleotide
cgaggttgcaatagacctcgtcccgactgtggtcgggaacttattcgacctcctc

SEQ ID NO: 369192 - DNA, 56 bp, Artificial
  Synthetic oligonucleotide
cgaggtttgacattccttctagcggctgtcatacttgaggcatggcaatcgggaac

SEQ ID NO: 369193 - DNA, 59 bp, Artificial
  Synthetic oligonucleotide
cgaggtttgtatctttgcacaatgtttcacaatgtgcgaggatttcaaaacaacaaagc

SEQ ID NO: 369194 - DNA, 59 bp, Artificial
  Synthetic oligonucleotide
cgaggttttgagtatcaagtcacggacacattttcgccaggtaatatctttacacatca

SEQ ID NO: 369195 - DNA, 53 bp, Artificial
  Synthetic oligonucleotide
cgagtaaaacttaatggccgatttctatgttattgtcagacagagggctagcc

SEQ ID NO: 369196 - DNA, 54 bp, Artificial
  Synthetic oligonucleotide
cgagtaaacaggtcagcgcttgggattccaagtacaccgtccgaagtagtcgct

SEQ ID NO: 369197 - DNA, 55 bp, Artificial
  Synthetic oligonucleotide
cgagtaacgcatcgcaacgtccggtcggcactgtgccttgtgtgcattggtctag

SEQ ID NO: 369198 - DNA, 53 bp, Artificial
  Synthetic oligonucleotide
cgagtaacggctgatgagagtcgcaacggctaacgtggtgatagtgaacgaat

SEQ ID NO: 369199 - DNA, 57 bp, Artificial
  Synthetic oligonucleotide
cgagtaactcagtcttaagtggtaggaaactagatgcattcgaatcagtcaggttac

SEQ ID NO: 369200 - DNA, 60 bp, Artificial
  Synthetic oligonucleotide
cgagtaagatccaatgggaatctaatcgctccatggtatggacacatcctttcaggagag

SEQ ID NO: 369201 - DNA, 54 bp, Artificial
  Synthetic oligonucleotide
cgagtaagggagctggcgcgtggttgtggggtccaactggtcctttatgccacc

SEQ ID NO: 369202 - DNA, 55 bp, Artificial
  Synthetic oligonucleotide
cgagtaatggagaaacttggttaggacatttaagacctaacatctcagtggcgac

SEQ ID NO: 369203 - DNA, 60 bp, Artificial
  Synthetic oligonucleotide
cgagtacaatcatcacacaggcggcaccagtactatcagataagaataattggattgcgc

SEQ ID NO: 369204 - DNA, 60 bp, Artificial
  Synthetic oligonucleotide
cgagtacacgcggacgtcaacatggacggcagagcaccgaagatcgatggagtgttttca

SEQ ID NO: 369205 - DNA, 55 bp, Artificial
  Synthetic oligonucleotide
cgagtacactcgattattgaagtctaggtgtccactgaggtaattatgtgggcct

SEQ ID NO: 369206 - DNA, 55 bp, Artificial
  Synthetic oligonucleotide
cgagtacactctgttgaccgaagtgcctccggtatttgcattgttcggtgacccc

SEQ ID NO: 369207 - DNA, 50 bp, Artificial
  Synthetic oligonucleotide
cgagtacatgctgatgttgccatggatggtttaccccctaagattgaagg

SEQ ID NO: 369208 - DNA, 60 bp, Artificial
  Synthetic oligonucleotide
cgagtaccagacgaccaaatgtataggttgagagacagacttagattattgccagttgaa

SEQ ID NO: 369209 - DNA, 57 bp, Artificial
  Synthetic oligonucleotide
cgagtacctcctatctcaatgaagcacagaacgctcgcacctggccgagaacgttgt

SEQ ID NO: 369210 - DNA, 55 bp, Artificial
  Synthetic oligonucleotide
cgagtaccttgctcgtaagttcgtagtggtcactcttattggtcaagaccgtaag

SEQ ID NO: 369211 - DNA, 55 bp, Artificial
  Synthetic oligonucleotide
cgagtacctttctggagaatactccactggatttaactgcttgttttctgacccc

SEQ ID NO: 369212 - DNA, 60 bp, Artificial
  Synthetic oligonucleotide
cgagtacgaggatggctggactcctatgcgtagactaaccctcgcgcatagtgggctctc

SEQ ID NO: 369213 - DNA, 55 bp, Artificial
  Synthetic oligonucleotide
cgagtacgatatagacgtctccatcccttggttgttcgttttgcgcgagatctgg

SEQ ID NO: 369214 - DNA, 50 bp, Artificial
  Synthetic oligonucleotide
cgagtacgatgagacgcgtatcaagaggctcaacccactagagacgtttg

SEQ ID NO: 369215 - DNA, 55 bp, Artificial
  Synthetic oligonucleotide
cgagtacgctgaatttctatgcaatctcagggccaattgccccaagtggagaaac

SEQ ID NO: 369216 - DNA, 55 bp, Artificial
  Synthetic oligonucleotide
cgagtacggaacgggaatctacgcagttgatggaaacggcagaaagacgccttgg

SEQ ID NO: 369217 - DNA, 56 bp, Artificial
  Synthetic oligonucleotide
cgagtacggggttctagtggagctcgactagaaccctgcaacggtacaagccctga

SEQ ID NO: 369218 - DNA, 58 bp, Artificial
  Synthetic oligonucleotide
cgagtactgatggaagattcttcgcttataaagtagagacatttgaggaagtgccgtt

SEQ ID NO: 369219 - DNA, 58 bp, Artificial
  Synthetic oligonucleotide
cgagtactgcacctgcaagtactgggatcgccctcccagaaccaaccacctagacacc

SEQ ID NO: 369220 - DNA, 55 bp, Artificial
  Synthetic oligonucleotide
cgagtacttaacaatgcaactgtttcacttcttccttatgcaccacgacttatgc

SEQ ID NO: 369221 - DNA, 57 bp, Artificial
  Synthetic oligonucleotide
cgagtagaagaagtcaactgtaaagtatacagtttgggagttagattgccatttgta

SEQ ID NO: 369222 - DNA, 55 bp, Artificial
  Synthetic oligonucleotide
cgagtagagacgacaagcgtgttgaatacggctataaatatagctgggctgtagt

SEQ ID NO: 369223 - DNA, 55 bp, Artificial
  Synthetic oligonucleotide
cgagtagatgcagccgcaactgggcttttaagggcagaggtgccagtctgtgtca

SEQ ID NO: 369224 - DNA, 55 bp, Artificial
  Synthetic oligonucleotide
cgagtaggggtgctagtcaacaatccaaaaggcatgaagatttcacaaaattttg

SEQ ID NO: 369225 - DNA, 55 bp, Artificial
  Synthetic oligonucleotide
cgagtagtactcaaccgaaacgacgttctcatcaatttacttggtgacagtgacc

SEQ ID NO: 369226 - DNA, 60 bp, Artificial
  Synthetic oligonucleotide
cgagtatacagtataaagatgtagctggtccacagcccgcagatagagataacgccgtta

SEQ ID NO: 369227 - DNA, 60 bp, Artificial
  Synthetic oligonucleotide
cgagtatcagcacgtagcgcaggagaggttcaattgtatggagttagctctggttaccca

SEQ ID NO: 369228 - DNA, 60 bp, Artificial
  Synthetic oligonucleotide
cgagtatctacctcaatcgctatactttgaggtctcaggggccgagcagcggcattgaca

SEQ ID NO: 369229 - DNA, 58 bp, Artificial
  Synthetic oligonucleotide
cgagtatctagagcagtagccaacaccggccggagaatagtaaagtaacgactcaaga

SEQ ID NO: 369230 - DNA, 55 bp, Artificial
  Synthetic oligonucleotide
cgagtatgcattgatagctgacacagatgcaaatgcagctgcctttcttgctagc

SEQ ID NO: 369231 - DNA, 55 bp, Artificial
  Synthetic oligonucleotide
cgagtatgctacgaataaaggcagtgttgctgattcgtataatcatcttgcatcc

SEQ ID NO: 369232 - DNA, 55 bp, Artificial
  Synthetic oligonucleotide
cgagtatgctccacagcaaattgacatctcaaatactcgagcaactcaatcacag

SEQ ID NO: 369233 - DNA, 55 bp, Artificial
  Synthetic oligonucleotide
cgagtattacactacgacaaagatctctcagggtgagatagacgttccggtcgtc

SEQ ID NO: 369234 - DNA, 59 bp, Artificial
  Synthetic oligonucleotide
cgagtatttcgcacaaattggaggatcgacaagaccagatgcaagggagttaggtggta

SEQ ID NO: 369235 - DNA, 55 bp, Artificial
  Synthetic oligonucleotide
cgagtcaaaattatctcggtatggtctgcaatggtttgagacttcacgtttaccc

SEQ ID NO: 369236 - DNA, 60 bp, Artificial
  Synthetic oligonucleotide
cgagtcaactaaagtgggctcttggtgagaacatggcaccagagaaagtagactttgaca

SEQ ID NO: 369237 - DNA, 60 bp, Artificial
  Synthetic oligonucleotide
cgagtcaccttcgtgtaaccttgtgtcgtgcatctctataaccacatgcccagttgcatt

SEQ ID NO: 369238 - DNA, 57 bp, Artificial
  Synthetic oligonucleotide
cgagtcacgggctatctttttcgcctcctcttagtgtcgctgacgacgtagtgtcgt

SEQ ID NO: 369239 - DNA, 60 bp, Artificial
  Synthetic oligonucleotide
cgagtcacgtgtggctgatagacttgcggaatatatttcagctgagaggttacgttttga

SEQ ID NO: 369240 - DNA, 54 bp, Artificial
  Synthetic oligonucleotide
cgagtcactacaagggtaagtttggtcttgaagcgattgaggtcgtccgaaact

SEQ ID NO: 369241 - DNA, 55 bp, Artificial
  Synthetic oligonucleotide
cgagtcagagtaacaggagcccgggtagagctgcgcctaaaaggagagttctaga

SEQ ID NO: 369242 - DNA, 60 bp, Artificial
  Synthetic oligonucleotide
cgagtcaggatggcaagatagtgaagcaatactgtcaccaggcgattactcaagtgaatg

SEQ ID NO: 369243 - DNA, 60 bp, Artificial
  Synthetic oligonucleotide
cgagtcatgaaggcgagggaataccgctgtatgatgcaatcaaatgcatgaagacctttt

SEQ ID NO: 369244 - DNA, 60 bp, Artificial
  Synthetic oligonucleotide
cgagtccaacgagtccattctcaatgcaaatttctgatttctagtactcgagtggcgatg

SEQ ID NO: 369245 - DNA, 51 bp, Artificial
  Synthetic oligonucleotide
cgagtccacgggcacaaaaacctcgtcaaaattgaacaaaaacgggactga

SEQ ID NO: 369246 - DNA, 60 bp, Artificial
  Synthetic oligonucleotide
cgagtccagacttcgaaaatcagaaagcatttgtgaatccccagctgagttctcaggttg

SEQ ID NO: 369247 - DNA, 55 bp, Artificial
  Synthetic oligonucleotide
cgagtccatggatatgaatctatcgttagcagtcgaatggaaacagtgaatgact

SEQ ID NO: 369248 - DNA, 55 bp, Artificial
  Synthetic oligonucleotide
cgagtccattcgttggacccgcaacccacaacagactaatgaacatgtggactcg

SEQ ID NO: 369249 - DNA, 51 bp, Artificial
  Synthetic oligonucleotide
cgagtccgtggtgtggatgagtggggtcaggtcggaccttggagtcagacg

SEQ ID NO: 369250 - DNA, 60 bp, Artificial
  Synthetic oligonucleotide
cgagtcctttttagaccctaggatgtatgcctgtgctgattgttatgcatctatgtacgt

SEQ ID NO: 369251 - DNA, 51 bp, Artificial
  Synthetic oligonucleotide
cgagtcgaaaacattcgatgttcctctatgctccatagacctttccggctt

SEQ ID NO: 369252 - DNA, 58 bp, Artificial
  Synthetic oligonucleotide
cgagtcgaagcaacggtgatagataagtgttcgagaatcgaaaatggaggctatttaa

SEQ ID NO: 369253 - DNA, 57 bp, Artificial
  Synthetic oligonucleotide
cgagtcgactggaaacgcgtcactagttctatccctagtggcgcggatcccaacgtc

SEQ ID NO: 369254 - DNA, 58 bp, Artificial
  Synthetic oligonucleotide
cgagtcgccatgcctctaaccaagggctcctcggtcggtggtgaatatcgtagccaac

SEQ ID NO: 369255 - DNA, 59 bp, Artificial
  Synthetic oligonucleotide
cgagtcgcgttcgatattctgcgacagaatattcgttgggattcgttccgaggtgagaa

SEQ ID NO: 369256 - DNA, 55 bp, Artificial
  Synthetic oligonucleotide
cgagtcgctctaattctgactgtttgagtgtcatccatcagggccctgctaagct

SEQ ID NO: 369257 - DNA, 56 bp, Artificial
  Synthetic oligonucleotide
cgagtcgcttacgcgacgcccgcccgcatttgacaaagagcaacccgccgcaaatt

SEQ ID NO: 369258 - DNA, 59 bp, Artificial
  Synthetic oligonucleotide
cgagtcggtaggaagagtccaatcactgacgagatgttcctttcttactatgatggtcc

SEQ ID NO: 369259 - DNA, 56 bp, Artificial
  Synthetic oligonucleotide
cgagtcgtactgctttgctctagaccgcgagcgcgcacgctcgtgcaatcccagca

SEQ ID NO: 369260 - DNA, 55 bp, Artificial
  Synthetic oligonucleotide
cgagtcgtagccttgaacctacgctgaatgacgtagttgaaccggaagaggctac

SEQ ID NO: 369261 - DNA, 59 bp, Artificial
  Synthetic oligonucleotide
cgagtcgtcaccttttagtactccgatccagggcgtgttggcagttcagcaactagaca

SEQ ID NO: 369262 - DNA, 59 bp, Artificial
  Synthetic oligonucleotide
cgagtctaacgccaaacgagtcatctcgcgtgttagcatggtatattccttcctcgtac

SEQ ID NO: 369263 - DNA, 55 bp, Artificial
  Synthetic oligonucleotide
cgagtctacacctcagtatcagagggaattccaactacaaagcagtgtcttgtga

SEQ ID NO: 369264 - DNA, 53 bp, Artificial
  Synthetic oligonucleotide
cgagtctccgtgacattaaagttacgagtgagctatgcacaaaccccttgatc

SEQ ID NO: 369265 - DNA, 51 bp, Artificial
  Synthetic oligonucleotide
cgagtctcgaagcgacaatacactagttcgaacactagttcttctagctcg

SEQ ID NO: 369266 - DNA, 57 bp, Artificial
  Synthetic oligonucleotide
cgagtctcggaccgaaagatgtatgttccgcacgacaaaagcgttcgaatgcagggt

SEQ ID NO: 369267 - DNA, 54 bp, Artificial
  Synthetic oligonucleotide
cgagtctgaagatgaagaacagatcatgaagcgtggttttaagttcaactggga

SEQ ID NO: 369268 - DNA, 60 bp, Artificial
  Synthetic oligonucleotide
cgagtctgatattcaacgattcgacaagtaaggttaatttagatgtgtctccaggtgcgc

SEQ ID NO: 369269 - DNA, 53 bp, Artificial
  Synthetic oligonucleotide
cgagtctgcgcttttggccgcccaggagggatttgacctacacactccgccgc

SEQ ID NO: 369270 - DNA, 60 bp, Artificial
  Synthetic oligonucleotide
cgagtctgtacaatcttgcgctcaatgtcactattaatgtggaggtagacccgaggagtc

SEQ ID NO: 369271 - DNA, 52 bp, Artificial
  Synthetic oligonucleotide
cgagtctgtaggatggtctgcaacggcctgtcatgacgggaaagaatggatg

SEQ ID NO: 369272 - DNA, 60 bp, Artificial
  Synthetic oligonucleotide
cgagtctgtggtgcagtggagatctgtgccgtactcgtacgtgggcaagccgctcacagt

SEQ ID NO: 369273 - DNA, 55 bp, Artificial
  Synthetic oligonucleotide
cgagtcttccacagcatatgtacagggcaaggctcagaagataccagtgcctttt

SEQ ID NO: 369274 - DNA, 60 bp, Artificial
  Synthetic oligonucleotide
cgagtctttaaagcgaggtgatagtgggttgatactgaatgctagagcactgagaggtaa

SEQ ID NO: 369275 - DNA, 50 bp, Artificial
  Synthetic oligonucleotide
cgagtgaaacattacggctcttcgcacactattaggtctataagattggt

SEQ ID NO: 369276 - DNA, 55 bp, Artificial
  Synthetic oligonucleotide
cgagtgaacggagcccaacggttaaatgtcttggaataaatagtgttccgctgaa

SEQ ID NO: 369277 - DNA, 55 bp, Artificial
  Synthetic oligonucleotide
cgagtgaagtgaaacctgctctcaacgggtggtacacgttagataccttgcctgc

SEQ ID NO: 369278 - DNA, 59 bp, Artificial
  Synthetic oligonucleotide
cgagtgacacgtgtgtatacgtagtagtccaaagttaagtctcgaaatcatcaagacac

SEQ ID NO: 369279 - DNA, 60 bp, Artificial
  Synthetic oligonucleotide
cgagtgaccaaattgaagtgactaatgctactgagctggttcagagttcctcaacaggta

SEQ ID NO: 369280 - DNA, 52 bp, Artificial
  Synthetic oligonucleotide
cgagtgacgcgatcctccaactggtgagggacaacctcgacgacgaacgaaa

SEQ ID NO: 369281 - DNA, 55 bp, Artificial
  Synthetic oligonucleotide
cgagtgaggacttcacgcacaaggtgcatgctgtcttaggcacttttggtgtggg

SEQ ID NO: 369282 - DNA, 59 bp, Artificial
  Synthetic oligonucleotide
cgagtgatagcataagtatgcttctacagaaggagaacttgggccctttattggcaccc

SEQ ID NO: 369283 - DNA, 55 bp, Artificial
  Synthetic oligonucleotide
cgagtgattacgtctttcgagcggaggtaagtgagtgatgtggattactatgact

SEQ ID NO: 369284 - DNA, 55 bp, Artificial
  Synthetic oligonucleotide
cgagtgcatcaacgaatgggcgcgcggcagcgatccgaagatccaggtgctggtt

SEQ ID NO: 369285 - DNA, 50 bp, Artificial
  Synthetic oligonucleotide
cgagtgccgcacctgctcccgagcagtgtacgagagacgatgtgtcacgg

SEQ ID NO: 369286 - DNA, 55 bp, Artificial
  Synthetic oligonucleotide
cgagtgcctggggtcaggttttgttattcgaatgagcggacctcaaatgcttctc

SEQ ID NO: 369287 - DNA, 59 bp, Artificial
  Synthetic oligonucleotide
cgagtgcgacatcgtccgaatccccggcctgtatctaaccgacacagcacccatccgta

SEQ ID NO: 369288 - DNA, 55 bp, Artificial
  Synthetic oligonucleotide
cgagtgcgccttgcattagcgcgacggtagaccatccgcttgcgacggtagatgg

SEQ ID NO: 369289 - DNA, 55 bp, Artificial
  Synthetic oligonucleotide
cgagtgcgtacgtcgcatgtactcgcgtcaggactagaaccgctatcgaactatc

SEQ ID NO: 369290 - DNA, 56 bp, Artificial
  Synthetic oligonucleotide
cgagtgcgtcgcgtgagaaacatgaccgtgttgacgggggcacgcggtaaccgacg

SEQ ID NO: 369291 - DNA, 59 bp, Artificial
  Synthetic oligonucleotide
cgagtgctagcattatagaagtggagctagtttgggttgaccttcttgtatgaaaatac

SEQ ID NO: 369292 - DNA, 55 bp, Artificial
  Synthetic oligonucleotide
cgagtgctatcccagcagtgtacttcacatcgcgtcaaattcatttgccattgga

SEQ ID NO: 369293 - DNA, 60 bp, Artificial
  Synthetic oligonucleotide
cgagtgctcaaagaccaacatcacctgtaggaggtatgctgagatataatagtgaactcg

SEQ ID NO: 369294 - DNA, 60 bp, Artificial
  Synthetic oligonucleotide
cgagtgcttttaccaatctattggatgcacccttattaaccacgttcatgacagcaaaga

SEQ ID NO: 369295 - DNA, 55 bp, Artificial
  Synthetic oligonucleotide
cgagtggaaacgttgtcgtgatgacgttgtgtactttgctgaacgatattgtgct

SEQ ID NO: 369296 - DNA, 55 bp, Artificial
  Synthetic oligonucleotide
cgagtggacaaactaacgcaaggccggcaaactttcgattggactctgaatagga

SEQ ID NO: 369297 - DNA, 55 bp, Artificial
  Synthetic oligonucleotide
cgagtggacattgttcgtaatgaaacttacaaagtcaacgacatctacgctacga

SEQ ID NO: 369298 - DNA, 54 bp, Artificial
  Synthetic oligonucleotide
cgagtggactataccgttatgacgaaggcccaaatcgacacgtcatgggcgcaa

SEQ ID NO: 369299 - DNA, 60 bp, Artificial
  Synthetic oligonucleotide
cgagtggagtggccacgatgtcacagagattccaaatagacgcatgtttgacattaagca

SEQ ID NO: 369300 - DNA, 55 bp, Artificial
  Synthetic oligonucleotide
cgagtggatccatcttagactaatggacactacgatgtttgtaggagaccctttc

SEQ ID NO: 369301 - DNA, 52 bp, Artificial
  Synthetic oligonucleotide
cgagtggcgctgcgtttggtgattgtgactggtttctcttttaatgttcaac

SEQ ID NO: 369302 - DNA, 53 bp, Artificial
  Synthetic oligonucleotide
cgagtggcgggtggtggttggtcgtggaagacacaaaccaagcggtttatccc

SEQ ID NO: 369303 - DNA, 55 bp, Artificial
  Synthetic oligonucleotide
cgagtggcgtatgatgtcttcaaccaccccgttatccagagtgaagtctgttatg

SEQ ID NO: 369304 - DNA, 60 bp, Artificial
  Synthetic oligonucleotide
cgagtgggacaccttgagacaggacttgcaggattacgcgttgaccatgacaatctcact

SEQ ID NO: 369305 - DNA, 56 bp, Artificial
  Synthetic oligonucleotide
cgagtgggaccaacgacgtggacagtttactgaatcagctctcagacgtatgttac

SEQ ID NO: 369306 - DNA, 50 bp, Artificial
  Synthetic oligonucleotide
cgagtgggacttaattgttcggcatttgcaccagtgcaatgatcgagttg

SEQ ID NO: 369307 - DNA, 55 bp, Artificial
  Synthetic oligonucleotide
cgagtgggctatctcctggcagctatgatgacccaaaaggacatggtaataatcc

SEQ ID NO: 369308 - DNA, 53 bp, Artificial
  Synthetic oligonucleotide
cgagtggggactaatacctaattggcagaactacacaaagggaccggggataa

SEQ ID NO: 369309 - DNA, 55 bp, Artificial
  Synthetic oligonucleotide
cgagtggggttctctaggtccgactcagcgtgctaaccggaatccgcagacgtgg

SEQ ID NO: 369310 - DNA, 60 bp, Artificial
  Synthetic oligonucleotide
cgagtgggtattctttcagagctgtgcaaggcagtagaatcaaggtatgaaaccgtagga

SEQ ID NO: 369311 - DNA, 57 bp, Artificial
  Synthetic oligonucleotide
cgagtgggtcatagaggggtacttggacatcaaactcacaccccagatcttcaccgg

SEQ ID NO: 369312 - DNA, 55 bp, Artificial
  Synthetic oligonucleotide
cgagtgggttgggagtgagaacgcagtggaagaatgtaacggacggaggagttgg

SEQ ID NO: 369313 - DNA, 51 bp, Artificial
  Synthetic oligonucleotide
cgagtgtaagcgtatagcaaacgtgatagatgctcaccagtcctcgatacg

SEQ ID NO: 369314 - DNA, 60 bp, Artificial
  Synthetic oligonucleotide
cgagtgtacggcgacgatgctgtaacgtgttgtacttcgcaatgctctgtccaagtgaac

SEQ ID NO: 369315 - DNA, 55 bp, Artificial
  Synthetic oligonucleotide
cgagtgtaggagtcacctacgggtactccactggagaggatcacgtttccggacc

SEQ ID NO: 369316 - DNA, 59 bp, Artificial
  Synthetic oligonucleotide
cgagtgtagtctctacaatcctggagtaccgtacgagggatattccggataatgcgctc

SEQ ID NO: 369317 - DNA, 58 bp, Artificial
  Synthetic oligonucleotide
cgagtgtagtttctacaatcctagagtaccgtacgagagatattccagataacgcgct

SEQ ID NO: 369318 - DNA, 60 bp, Artificial
  Synthetic oligonucleotide
cgagtgtatgattgtgatgattacccattcttggcacgcgatccgagatttaagcatcga

SEQ ID NO: 369319 - DNA, 55 bp, Artificial
  Synthetic oligonucleotide
cgagtgtattccatgacgtcagattccatctatcgtatccgcttattactgcaac

SEQ ID NO: 369320 - DNA, 55 bp, Artificial
  Synthetic oligonucleotide
cgagtgtattgtaagcatctactgcaatacctttggatactgcatccactacaga

SEQ ID NO: 369321 - DNA, 60 bp, Artificial
  Synthetic oligonucleotide
cgagtgtcactgctgtggtcactgatggctaccttaagatggcaggcatgcatttcggtg

SEQ ID NO: 369322 - DNA, 59 bp, Artificial
  Synthetic oligonucleotide
cgagtgtctcttctctccccctccgggctttcctcgcatcggactggctcattctcgga

SEQ ID NO: 369323 - DNA, 56 bp, Artificial
  Synthetic oligonucleotide
cgagtgtctcttctctccccctccgggttttcctcgaatcggactggctcatcttc

SEQ ID NO: 369324 - DNA, 55 bp, Artificial
  Synthetic oligonucleotide
cgagtgtctggaagaacatgcgaaaatcactgatggaatggtttggctacgcaga

SEQ ID NO: 369325 - DNA, 55 bp, Artificial
  Synthetic oligonucleotide
cgagtgtgcatgggttagctccactggcattgtgaagaagggacttgaatggttc

SEQ ID NO: 369326 - DNA, 60 bp, Artificial
  Synthetic oligonucleotide
cgagtgtgttttgcgaccactgtaaagtattcgctacctatatgcgagatctgagcgttt

SEQ ID NO: 369327 - DNA, 57 bp, Artificial
  Synthetic oligonucleotide
cgagtgttaacagttgtgcaaataccaatctacatttaattgtatctaaaccggatg

SEQ ID NO: 369328 - DNA, 60 bp, Artificial
  Synthetic oligonucleotide
cgagtgttccctctttcgcgcacgctccgtcttatcaacggtctatcgatctgcgcagta

SEQ ID NO: 369329 - DNA, 55 bp, Artificial
  Synthetic oligonucleotide
cgagtgttccggggccctgatgttcccaggggatgtgaaggcccatgtaaggtcc

SEQ ID NO: 369330 - DNA, 57 bp, Artificial
  Synthetic oligonucleotide
cgagtgttgaattcattcaggagctctatggtgtattttccgaaccggtttcattta

SEQ ID NO: 369331 - DNA, 56 bp, Artificial
  Synthetic oligonucleotide
cgagtgttgaggacacttataggtttattacgtcctctgccacccgctgtccggac

SEQ ID NO: 369332 - DNA, 53 bp, Artificial
  Synthetic oligonucleotide
cgagtgttgctagatcccagtctttggacacgtcatcgtttttgagtccgcct

SEQ ID NO: 369333 - DNA, 55 bp, Artificial
  Synthetic oligonucleotide
cgagtgttgtatacgagacgcacgatgccatcctgcacactccggggtgtgtccc

SEQ ID NO: 369334 - DNA, 54 bp, Artificial
  Synthetic oligonucleotide
cgagtgttgttgccttccgccggtattgatacgtctttgtttgctcctcccagt

SEQ ID NO: 369335 - DNA, 53 bp, Artificial
  Synthetic oligonucleotide
cgagttaaagtgcatttttctataccgggttcagattgggcttataccttaaa

SEQ ID NO: 369336 - DNA, 55 bp, Artificial
  Synthetic oligonucleotide
cgagttaaatgcaaaatcggagaactaagagacttggttaaccccattgtgagtg

SEQ ID NO: 369337 - DNA, 55 bp, Artificial
  Synthetic oligonucleotide
cgagttaacgagataacggttaactcactcacgcactcggagtaagagaacgagt

SEQ ID NO: 369338 - DNA, 51 bp, Artificial
  Synthetic oligonucleotide
cgagttaatacaaagagttggtcgtatagggcgggataaaccaggaacgtt

SEQ ID NO: 369339 - DNA, 59 bp, Artificial
  Synthetic oligonucleotide
cgagttaccaggttggacccgataacggcgaacatcacctcatggcaccgcaaggagca

SEQ ID NO: 369340 - DNA, 56 bp, Artificial
  Synthetic oligonucleotide
cgagttacgaactcttcattgcgaaggtagccactcttaagctcttcgaagttaac

SEQ ID NO: 369341 - DNA, 51 bp, Artificial
  Synthetic oligonucleotide
cgagttactaaggtaaccaaagcttatgcttacggaaaaccaggttttatc

SEQ ID NO: 369342 - DNA, 55 bp, Artificial
  Synthetic oligonucleotide
cgagttatagtcagcagaatgttcgttttaacattagaagtagagcacctttcga

SEQ ID NO: 369343 - DNA, 55 bp, Artificial
  Synthetic oligonucleotide
cgagttatatccgttgagaaagacacgatgatgatcgacgttgatggtggaacgg

SEQ ID NO: 369344 - DNA, 56 bp, Artificial
  Synthetic oligonucleotide
cgagttatgacggcgtcgaatataacagtaactacgtatgggtatgcactccacta

SEQ ID NO: 369345 - DNA, 54 bp, Artificial
  Synthetic oligonucleotide
cgagttcaagaagcatggaagctgtgcctctcgttcgagtattattggagacga

SEQ ID NO: 369346 - DNA, 55 bp, Artificial
  Synthetic oligonucleotide
cgagttcattttggggtgcttgatgaacaattacatcgtaataggggctacagag

SEQ ID NO: 369347 - DNA, 59 bp, Artificial
  Synthetic oligonucleotide
cgagttcgatggacttatgtattctatactgaaaaatgatgattcgaaaaaatcaatcg

SEQ ID NO: 369348 - DNA, 59 bp, Artificial
  Synthetic oligonucleotide
cgagttcgtcagtatgacagggcgaatgcgcgttacgcggagatttcatccgtatgggg

SEQ ID NO: 369349 - DNA, 55 bp, Artificial
  Synthetic oligonucleotide
cgagttctgcaacctccaacctttaaaccttgggagtcactacacagcagtgcgt

SEQ ID NO: 369350 - DNA, 55 bp, Artificial
  Synthetic oligonucleotide
cgagttctggacccaatactgccgtttctacgtaaacgccactcaccgcaatgtt

SEQ ID NO: 369351 - DNA, 60 bp, Artificial
  Synthetic oligonucleotide
cgagttctgtacacgctgctcaagtgcagggcacaaccttgagagctactatgatgggta

SEQ ID NO: 369352 - DNA, 57 bp, Artificial
  Synthetic oligonucleotide
cgagttcttcaaaatagaaccccattagaaccaactgtgaatcctctaaatgcatag

SEQ ID NO: 369353 - DNA, 58 bp, Artificial
  Synthetic oligonucleotide
cgagttgaaacattcgaagaaatacctttcgatgtgcaaaaattcgcagacttagtca

SEQ ID NO: 369354 - DNA, 60 bp, Artificial
  Synthetic oligonucleotide
cgagttgacgcttcaagcaggtggacacctcctcaacccataataagagatccattcaat

SEQ ID NO: 369355 - DNA, 60 bp, Artificial
  Synthetic oligonucleotide
cgagttgagcgacatggctcactctgacacgccgatcttgtgtctctcgttgtcccccgc

SEQ ID NO: 369356 - DNA, 55 bp, Artificial
  Synthetic oligonucleotide
cgagttgagcgttcgacacgatagtgtaattgtagttgagtacggcggcctttaa

SEQ ID NO: 369357 - DNA, 55 bp, Artificial
  Synthetic oligonucleotide
cgagttgatagtcccatcctcattcggccttatcgccaatcgtatcgggtggtac

SEQ ID NO: 369358 - DNA, 60 bp, Artificial
  Synthetic oligonucleotide
cgagttgcaaatgcatatcttaagaggtccactgcattttcaaaggcgcgcgatcttagg

SEQ ID NO: 369359 - DNA, 60 bp, Artificial
  Synthetic oligonucleotide
cgagttgcacgcctacgcatgaatcatactactagcatcatagtgtgctcgtcttttcca

SEQ ID NO: 369360 - DNA, 55 bp, Artificial
  Synthetic oligonucleotide
cgagttgcctctgtggattagggctggaggcagcacggatagtctgatggccaaa

SEQ ID NO: 369361 - DNA, 55 bp, Artificial
  Synthetic oligonucleotide
cgagttggatatggttaagtacaccatggctttgaggcggtacggtctcctcccg

SEQ ID NO: 369362 - DNA, 59 bp, Artificial
  Synthetic oligonucleotide
cgagttggctgagccctttcggatccctgctgcacagtctgcaacagcgaaaggcgagt

SEQ ID NO: 369363 - DNA, 55 bp, Artificial
  Synthetic oligonucleotide
cgagttggtattggaactacctcaccgagggtaagtctcgatattgcaaatacag

SEQ ID NO: 369364 - DNA, 51 bp, Artificial
  Synthetic oligonucleotide
cgagttggtgagggttgagtttcactcaagcattcggatgcttgactcggc

SEQ ID NO: 369365 - DNA, 52 bp, Artificial
  Synthetic oligonucleotide
cgagttgtatgtgtagccaatgtactaaacaatgtagacactgcatcaaaga

SEQ ID NO: 369366 - DNA, 60 bp, Artificial
  Synthetic oligonucleotide
cgagttgttgtgattactggtgggcttgaggatggaacatatggctcattcgcatttgac

SEQ ID NO: 369367 - DNA, 54 bp, Artificial
  Synthetic oligonucleotide
cgagtttactaattatcaccaagaaattgtcgtaggcatcgaaatagaaggacg

SEQ ID NO: 369368 - DNA, 50 bp, Artificial
  Synthetic oligonucleotide
cgagtttagctcgatccaacccggggagcaggggcccaacgtccacgctg

SEQ ID NO: 369369 - DNA, 55 bp, Artificial
  Synthetic oligonucleotide
cgagtttatggactgttttgagcacgccgaaagaactccaagtcgccactgggcg

SEQ ID NO: 369370 - DNA, 55 bp, Artificial
  Synthetic oligonucleotide
cgagtttccaatactgataggaatggcccaattttctatatgccactgagaccag

SEQ ID NO: 369371 - DNA, 60 bp, Artificial
  Synthetic oligonucleotide
cgagtttccagacaaagcattgaaggtggctcgcctagagcggattgtttcagtagtcca

SEQ ID NO: 369372 - DNA, 57 bp, Artificial
  Synthetic oligonucleotide
cgagtttccatatgaaaaatgtgctacaagttcgggtgtgtagtgccccgtgaatgg

SEQ ID NO: 369373 - DNA, 56 bp, Artificial
  Synthetic oligonucleotide
cgagtttctcgacagccaattcaaggccgaacacttgaagattcctggccccatcg

SEQ ID NO: 369374 - DNA, 55 bp, Artificial
  Synthetic oligonucleotide
cgagtttcttcatgcttgatgtcgtgttgatatcagatggcctatcgatgtcatc

SEQ ID NO: 369375 - DNA, 58 bp, Artificial
  Synthetic oligonucleotide
cgagtttgcacagaacgctgtcgttacttccagcatcggcattcaagtatctggagag

SEQ ID NO: 369376 - DNA, 55 bp, Artificial
  Synthetic oligonucleotide
cgagtttgggtattctgtcgcgatcgaaggggactatgtaattattgggtcacac

SEQ ID NO: 369377 - DNA, 60 bp, Artificial
  Synthetic oligonucleotide
cgagtttttatggtctatgacattgagctgatagaacccgtttcaccagccatgcaagag

SEQ ID NO: 369378 - DNA, 53 bp, Artificial
  Synthetic oligonucleotide
cgataaaaccatcatggagagtacaacgctctcaaaaccctttaaaaatcagg

SEQ ID NO: 369379 - DNA, 55 bp, Artificial
  Synthetic oligonucleotide
cgataaaagtgacacccgggttgtgctgcgcctagttaacacgagcacaggtccc

SEQ ID NO: 369380 - DNA, 54 bp, Artificial
  Synthetic oligonucleotide
cgataaaatatcgccagcaaaaatagggacatctaatgatttaaaagatggaga

SEQ ID NO: 369381 - DNA, 55 bp, Artificial
  Synthetic oligonucleotide
cgataaaccgattattacgtaagtatcctcacatgcacccaagctacatcggagg

SEQ ID NO: 369382 - DNA, 58 bp, Artificial
  Synthetic oligonucleotide
cgataaagacactatagccttttcgcgtataatgatcatataacttgattgtagcgtc

SEQ ID NO: 369383 - DNA, 60 bp, Artificial
  Synthetic oligonucleotide
cgataaagtgtgtgagtggtttaatcagcactcgataacacggcttatggctgtcaccgg

SEQ ID NO: 369384 - DNA, 52 bp, Artificial
  Synthetic oligonucleotide
cgataaagttaacattctctctcctcttttaggacctaatacattttcccgg

SEQ ID NO: 369385 - DNA, 54 bp, Artificial
  Synthetic oligonucleotide
cgataaataccacagtaattggaaacagctaagggaggagtttaatctccccac

SEQ ID NO: 369386 - DNA, 55 bp, Artificial
  Synthetic oligonucleotide
cgataaatagtcaccgatgtggaaatatggtttacattgagacacgcgtttatcg

SEQ ID NO: 369387 - DNA, 52 bp, Artificial
  Synthetic oligonucleotide
cgataaatcctaggttggtggagaatacggtttcgttgttgaagtggctgct

SEQ ID NO: 369388 - DNA, 59 bp, Artificial
  Synthetic oligonucleotide
cgataaatctcaaactgatttccatcaagcggtggaaatggcgatttgggagcgattgg

SEQ ID NO: 369389 - DNA, 60 bp, Artificial
  Synthetic oligonucleotide
cgataaatctcgtgaaggtactggttgaattgggagctgatctcaatgcaaaacatggac

SEQ ID NO: 369390 - DNA, 55 bp, Artificial
  Synthetic oligonucleotide
cgataacacactcatggttattatcacaatgcactatgctctaagacgtgcaggg

SEQ ID NO: 369391 - DNA, 58 bp, Artificial
  Synthetic oligonucleotide
cgataacagggtaggtgattatatcaaacttgtaaatatatcatttacaggtacagtg

SEQ ID NO: 369392 - DNA, 60 bp, Artificial
  Synthetic oligonucleotide
cgataaccaccgcatgagtcgtgcaactcgtgttggagatgtattcgttagtgacgttga

SEQ ID NO: 369393 - DNA, 60 bp, Artificial
  Synthetic oligonucleotide
cgataaccatacagagaacgccttgttattgtatatggcatgtactcatgccagtaaccc

SEQ ID NO: 369394 - DNA, 51 bp, Artificial
  Synthetic oligonucleotide
cgataacccccgtctcttacaaccactgacttatgcatatgctgtaggtga

SEQ ID NO: 369395 - DNA, 54 bp, Artificial
  Synthetic oligonucleotide
cgataacccgacaaatggtcttcggttccgactgtcgatgtaccgaagtcttcg

SEQ ID NO: 369396 - DNA, 60 bp, Artificial
  Synthetic oligonucleotide
cgataaccttctcccgcctcttccatcccactgaatgatcgcgcagctgcaattaatcta

SEQ ID NO: 369397 - DNA, 55 bp, Artificial
  Synthetic oligonucleotide
cgataacgcaatggtcgattttcatacagctccgactaagtctggcagcgtactg

SEQ ID NO: 369398 - DNA, 55 bp, Artificial
  Synthetic oligonucleotide
cgataacgcatagtgtttttccctccacttaaatcgaagggttgtgtcttggatc

SEQ ID NO: 369399 - DNA, 59 bp, Artificial
  Synthetic oligonucleotide
cgataacggtcaggctatgccgtctacttatcgtattcgaagagatatgaacgagaggt

SEQ ID NO: 369400 - DNA, 59 bp, Artificial
  Synthetic oligonucleotide
cgataactatggaataactaaacaacaggcatataatttattacgatctgatccgcgag

SEQ ID NO: 369401 - DNA, 55 bp, Artificial
  Synthetic oligonucleotide
cgataactcgtcttataccaactcacggtaatataccggtgatcatagattacgg

SEQ ID NO: 369402 - DNA, 60 bp, Artificial
  Synthetic oligonucleotide
cgataagaaggattgtgcatgacattccaccgtgttggaatgagactcagggagacaagc

SEQ ID NO: 369403 - DNA, 57 bp, Artificial
  Synthetic oligonucleotide
cgataagacaacactattacgatgggtgcccaagtctcgtcccaaaaagttggcgca

SEQ ID NO: 369404 - DNA, 58 bp, Artificial
  Synthetic oligonucleotide
cgataagacgtcaatcagttttcaagcgtaatgacaacaagcatcgaacgtttccaac

SEQ ID NO: 369405 - DNA, 60 bp, Artificial
  Synthetic oligonucleotide
cgataagatagtcagccgcagtacgtatagaatgaatacccggtagtgcatatcttactt

SEQ ID NO: 369406 - DNA, 55 bp, Artificial
  Synthetic oligonucleotide
cgataagatcatcccagaagtcgccgtcaaataatggtagagcttcaattccagg

SEQ ID NO: 369407 - DNA, 58 bp, Artificial
  Synthetic oligonucleotide
cgataagcgaagagcagacgcttatcgcaactaaggcctaccctgagttccaaatcac

SEQ ID NO: 369408 - DNA, 60 bp, Artificial
  Synthetic oligonucleotide
cgataagcggcaagagagacggagaaccatgctgcgaagcgtatatctggtatttataga

SEQ ID NO: 369409 - DNA, 58 bp, Artificial
  Synthetic oligonucleotide
cgataagcttgtattggcgaatatgttctcggtaggaattaagcgattatgtaacact

SEQ ID NO: 369410 - DNA, 58 bp, Artificial
  Synthetic oligonucleotide
cgataaggggagaaatcaaggaaggcgccttctctggctttcgcagatggaagattat

SEQ ID NO: 369411 - DNA, 54 bp, Artificial
  Synthetic oligonucleotide
cgataaggtcagaatgcaattaagagacaatgctaaggaaatagggaacggatg

SEQ ID NO: 369412 - DNA, 55 bp, Artificial
  Synthetic oligonucleotide
cgataaggtccgacaccagctgagggacaatgcaaaggaattaggcaacggatgc

SEQ ID NO: 369413 - DNA, 51 bp, Artificial
  Synthetic oligonucleotide
cgataaggtcgcgaatgtttttagcctggcttgctctgacgggacggaggg

SEQ ID NO: 369414 - DNA, 56 bp, Artificial
  Synthetic oligonucleotide
cgataaggttcgactgcagcttaaggataatgcaagggaactgggtaatggttgtt

SEQ ID NO: 369415 - DNA, 58 bp, Artificial
  Synthetic oligonucleotide
cgataagtccactgagcaattctctgttgcgccaccacaacatggtgtacgccacgac

SEQ ID NO: 369416 - DNA, 59 bp, Artificial
  Synthetic oligonucleotide
cgataagtggagtgctggtacccttgcttacatgaccctgcgtgcggagttaggaaaga

SEQ ID NO: 369417 - DNA, 57 bp, Artificial
  Synthetic oligonucleotide
cgataagttcggtgttcttattaacatagttaagtttgaacacgcttacgcattgca

SEQ ID NO: 369418 - DNA, 55 bp, Artificial
  Synthetic oligonucleotide
cgataatagttgtagtccttgagtcagtcaccatcattcttgatgagcgtgactt

SEQ ID NO: 369419 - DNA, 55 bp, Artificial
  Synthetic oligonucleotide
cgataatgaacaagatgcacagcacgcctacccagggtcagtcaccacagacacc

SEQ ID NO: 369420 - DNA, 59 bp, Artificial
  Synthetic oligonucleotide
cgataatgaagtcgaatgcacccatcgatacttgcatttccgattgcatcactccaaat

SEQ ID NO: 369421 - DNA, 59 bp, Artificial
  Synthetic oligonucleotide
cgataatgaatgtcgctctaaatataattagaaagtcgaatggtgaggtttggccagta

SEQ ID NO: 369422 - DNA, 57 bp, Artificial
  Synthetic oligonucleotide
cgataatgatttctatgttaactggttggatacacacatatccgtggttaaaaactc

SEQ ID NO: 369423 - DNA, 53 bp, Artificial
  Synthetic oligonucleotide
cgataatgcacgtcgagcgctccaatgtgtccgtattgtacgaacatttccag

SEQ ID NO: 369424 - DNA, 56 bp, Artificial
  Synthetic oligonucleotide
cgataatgctcctattgacgatttgtgggctaaacgaatctatgtagaagaagtga

SEQ ID NO: 369425 - DNA, 55 bp, Artificial
  Synthetic oligonucleotide
cgataatggtttcgctgatgaatttggtgattcgtacactgatctaatgcgtaac

SEQ ID NO: 369426 - DNA, 60 bp, Artificial
  Synthetic oligonucleotide
cgataatgttaggtcatttctgccaggattcccagacttcagcttatacttgcttatcag

SEQ ID NO: 369427 - DNA, 55 bp, Artificial
  Synthetic oligonucleotide
cgataatgtttcagagctgttccgagcatgcttatctaatctagggcgtgaagga

SEQ ID NO: 369428 - DNA, 55 bp, Artificial
  Synthetic oligonucleotide
cgatacaaataggtcagagctcagatattgggcctaattgccctgatgatggaaa

SEQ ID NO: 369429 - DNA, 55 bp, Artificial
  Synthetic oligonucleotide
cgatacaaatattgcctgctggtttgggtagatacttactccggggcggtctctg

SEQ ID NO: 369430 - DNA, 55 bp, Artificial
  Synthetic oligonucleotide
cgatacaagtcatacacatcgggttgccacttgcttcgcaggccagttccgtagc

SEQ ID NO: 369431 - DNA, 60 bp, Artificial
  Synthetic oligonucleotide
cgatacaatgacacatgtccagatgagcaagattaccagatccgaatggctaagtcttcg

SEQ ID NO: 369432 - DNA, 55 bp, Artificial
  Synthetic oligonucleotide
cgatacagacctacgtgccgacatcctgcgaaccggactggtaacacttcttcga

SEQ ID NO: 369433 - DNA, 56 bp, Artificial
  Synthetic oligonucleotide
cgatacagaggagcctgctactcaaactgagccgacaaaaacgccaactccatctt

SEQ ID NO: 369434 - DNA, 60 bp, Artificial
  Synthetic oligonucleotide
cgatacagaggattgagcaaacctgagctagctcttaatcttgttgcattagagagaagc

SEQ ID NO: 369435 - DNA, 51 bp, Artificial
  Synthetic oligonucleotide
cgatacaggcagctggttgtcagttatgaatgttctcaaataccaggggat

SEQ ID NO: 369436 - DNA, 53 bp, Artificial
  Synthetic oligonucleotide
cgatacagggttataatagaacggacgcgagctagctcggattcagtctcgtt

SEQ ID NO: 369437 - DNA, 58 bp, Artificial
  Synthetic oligonucleotide
cgatacatcggtgcctctatgaggtcctcaataattacattccaaaaatacccttatc

SEQ ID NO: 369438 - DNA, 60 bp, Artificial
  Synthetic oligonucleotide
cgatacatgatagatctcaataccgtgctttagtgagttggcctttatcatcaccaccca

SEQ ID NO: 369439 - DNA, 55 bp, Artificial
  Synthetic oligonucleotide
cgatacattaccggccatgttcagtgatctgcccattctcgagcaggctgcggtc

SEQ ID NO: 369440 - DNA, 51 bp, Artificial
  Synthetic oligonucleotide
cgataccaactacccaggaccctttggggggggtatgactacagacaaatt

SEQ ID NO: 369441 - DNA, 55 bp, Artificial
  Synthetic oligonucleotide
cgataccaagtggatgggagaccacgtcattacaaagtcaaccagaacttgggtg

SEQ ID NO: 369442 - DNA, 55 bp, Artificial
  Synthetic oligonucleotide
cgataccaccccttagctttgcctaaggcccgtggtaaagaaaagatcgatgctc

SEQ ID NO: 369443 - DNA, 55 bp, Artificial
  Synthetic oligonucleotide
cgataccaccgcccctcgagttcgcactcctactgttccggtccctgcccaatct

SEQ ID NO: 369444 - DNA, 60 bp, Artificial
  Synthetic oligonucleotide
cgataccagcaatggacgagatttaggatgcatgattagtcttctcttcgacccctgacg

SEQ ID NO: 369445 - DNA, 56 bp, Artificial
  Synthetic oligonucleotide
cgataccaggacggcacaaagagtataacttactgtggtcctaagcagtccttccc

SEQ ID NO: 369446 - DNA, 58 bp, Artificial
  Synthetic oligonucleotide
cgatacccaaacgtcagatgcgtctgtagggacaactggaagggctctaataggccag

SEQ ID NO: 369447 - DNA, 60 bp, Artificial
  Synthetic oligonucleotide
cgatacccaaatttgcacatggtggaccccagtgcctagacatgcactatccaggaagct

SEQ ID NO: 369448 - DNA, 55 bp, Artificial
  Synthetic oligonucleotide
cgataccccgatggttcctgtatttaatagacagccacagagtatctataattgg

SEQ ID NO: 369449 - DNA, 55 bp, Artificial
  Synthetic oligonucleotide
cgataccgactgagaaatgcgacctactggatttccaatccaacgcgggaatccg

SEQ ID NO: 369450 - DNA, 55 bp, Artificial
  Synthetic oligonucleotide
cgataccgataaagtcgctaggtcatacgcactcgatgctaaatatgcttacgat

SEQ ID NO: 369451 - DNA, 54 bp, Artificial
  Synthetic oligonucleotide
cgataccgggaaggggtcaaccactagcgaagatgtactttcttccgactacag

SEQ ID NO: 369452 - DNA, 55 bp, Artificial
  Synthetic oligonucleotide
cgatacctagaatggagaccgacaatctactaaaatatcttatatctcagaacac

SEQ ID NO: 369453 - DNA, 53 bp, Artificial
  Synthetic oligonucleotide
cgatacgaaacgtgggtttcttggagccactacctgtgatgcaaggtagggta

SEQ ID NO: 369454 - DNA, 60 bp, Artificial
  Synthetic oligonucleotide
cgatacgaaatgagccgtttcgactctaccgcacaaccaggcagccgtgtcatctgtcaa

SEQ ID NO: 369455 - DNA, 60 bp, Artificial
  Synthetic oligonucleotide
cgatacgattcggtcattattccagttaatgcgtccaccaaatatgacgccagctgttaa

SEQ ID NO: 369456 - DNA, 53 bp, Artificial
  Synthetic oligonucleotide
cgatacggttaccttgttgtttgcattcctaaccagacgaaggtgggtaacga

SEQ ID NO: 369457 - DNA, 55 bp, Artificial
  Synthetic oligonucleotide
cgatacgtcaggttccatgtagtaccagtcagtatgatacgaaccagaacgagtt

SEQ ID NO: 369458 - DNA, 57 bp, Artificial
  Synthetic oligonucleotide
cgatactaaatgggttgccggagtgagaggtagacctgcgactagtctacgtcgtag

SEQ ID NO: 369459 - DNA, 56 bp, Artificial
  Synthetic oligonucleotide
cgatactaggcgcgataaaacatggagttaaaatcttagggacggaggttgatatc

SEQ ID NO: 369460 - DNA, 60 bp, Artificial
  Synthetic oligonucleotide
cgatactagtgcaggctacaaccacgatgtctccatacttcgtgcgtggatccgtacgac

SEQ ID NO: 369461 - DNA, 55 bp, Artificial
  Synthetic oligonucleotide
cgatactcgtgcagagtttagcgcaaacaggacaccggtagctagctccagatcc

SEQ ID NO: 369462 - DNA, 60 bp, Artificial
  Synthetic oligonucleotide
cgatactgaggagatcgccatgaggtgttataacgataagaagacctggcaagatcaatt

SEQ ID NO: 369463 - DNA, 60 bp, Artificial
  Synthetic oligonucleotide
cgatactggatttgacgtatgatgtcatgcgcggagcgaatgacttatttgataacatgc

SEQ ID NO: 369464 - DNA, 60 bp, Artificial
  Synthetic oligonucleotide
cgatacttgatagtatccagttttacggtgagaaccatgtgtcacgtccatactcgatgg

SEQ ID NO: 369465 - DNA, 54 bp, Artificial
  Synthetic oligonucleotide
cgatacttgcgggggattacaaatcccagattccccgtccgagagaccaactaa

SEQ ID NO: 369466 - DNA, 55 bp, Artificial
  Synthetic oligonucleotide
cgatagaaagaaacgccaattatatccaccacatttaggggtgaaccctctcaac

SEQ ID NO: 369467 - DNA, 55 bp, Artificial
  Synthetic oligonucleotide
cgatagaaagatcgtccgtaagacaaaatctaggagttatttctgttaaggtatc

SEQ ID NO: 369468 - DNA, 60 bp, Artificial
  Synthetic oligonucleotide
cgatagaacttgcactggtagataggttccaacggaacatcaatcacaggaatctgacct

SEQ ID NO: 369469 - DNA, 60 bp, Artificial
  Synthetic oligonucleotide
cgatagaatggtatttacgttcaatggagttgtctgatgatgtgaaagtagatattgagc

SEQ ID NO: 369470 - DNA, 60 bp, Artificial
  Synthetic oligonucleotide
cgatagaccgctgattcctcaagctgaaatggcacggatgttatatcttgacattccggg

SEQ ID NO: 369471 - DNA, 60 bp, Artificial
  Synthetic oligonucleotide
cgatagacgaggtgaatgacggggcgtatagtagatcaaaatgggataagactactgcaa

SEQ ID NO: 369472 - DNA, 55 bp, Artificial
  Synthetic oligonucleotide
cgatagagaatcgagagaaaggtggctctcccttagccatccgagtggacgtctg

SEQ ID NO: 369473 - DNA, 50 bp, Artificial
  Synthetic oligonucleotide
cgatagaggggcgccgccggtagtacagttgcgtcggttgtctgctgaag

SEQ ID NO: 369474 - DNA, 50 bp, Artificial
  Synthetic oligonucleotide
cgatagagggttggttaggggttaccccataggacaacagaccggccccc

SEQ ID NO: 369475 - DNA, 54 bp, Artificial
  Synthetic oligonucleotide
cgatagatggggagccaaccactccaggccaataggccatcctgtttttttttt

SEQ ID NO: 369476 - DNA, 50 bp, Artificial
  Synthetic oligonucleotide
cgatagattgtgctatgtatgtctgtaatggcaatcctcattgtactagg

SEQ ID NO: 369477 - DNA, 59 bp, Artificial
  Synthetic oligonucleotide
cgatagcacgagaacgttttatccctcgtagattcatgtcagacgagtaggtctctaaa

SEQ ID NO: 369478 - DNA, 55 bp, Artificial
  Synthetic oligonucleotide
cgatagccgtatctgaaagtacccacaattttgaagtgttcagtggacttgaagg

SEQ ID NO: 369479 - DNA, 60 bp, Artificial
  Synthetic oligonucleotide
cgatagcgacaatgttaagtacgatgtgaatgaatacgaaagtgaggttgatagtcatga

SEQ ID NO: 369480 - DNA, 51 bp, Artificial
  Synthetic oligonucleotide
cgatagcgggaatggctcttacttcaagggtgctaactctctaaatagttc

SEQ ID NO: 369481 - DNA, 55 bp, Artificial
  Synthetic oligonucleotide
cgatagcttcatgtctcctaaagttaggtcagtcttcagcttctacgctggactg

SEQ ID NO: 369482 - DNA, 57 bp, Artificial
  Synthetic oligonucleotide
cgataggaagtcaacgaaggacgcgcaaggcattaaatttatgacgaatgccggttg

SEQ ID NO: 369483 - DNA, 60 bp, Artificial
  Synthetic oligonucleotide
cgataggatatgtttgtggcaatcctgctgttaaacatgtgctatcttggaatactacgg

SEQ ID NO: 369484 - DNA, 59 bp, Artificial
  Synthetic oligonucleotide
cgatagtaagatgacctctcataggatccacgaaaaccaatatgggcctgacttcgtat

SEQ ID NO: 369485 - DNA, 55 bp, Artificial
  Synthetic oligonucleotide
cgatagtaagctgcgacgggtacgtcgttaagagaattgctatcagtccaggcct

SEQ ID NO: 369486 - DNA, 60 bp, Artificial
  Synthetic oligonucleotide
cgatagtaatcgggcgatgagtccagcgacgatatcggcgaaatggggagagatacgttc

SEQ ID NO: 369487 - DNA, 52 bp, Artificial
  Synthetic oligonucleotide
cgatagtacccctacctaagatgacgtataggggtgtcccgtggtaatttaa

SEQ ID NO: 369488 - DNA, 55 bp, Artificial
  Synthetic oligonucleotide
cgatagtatatttgagcggcgcgaccaattgcgtgaggttggagaggcgcgaatg

SEQ ID NO: 369489 - DNA, 54 bp, Artificial
  Synthetic oligonucleotide
cgatagtcgttgccaaacgtgcccggcaacaacttcacggtgtacgtgttgggt

SEQ ID NO: 369490 - DNA, 60 bp, Artificial
  Synthetic oligonucleotide
cgatagtgccgatcctgaaggaccagccgctaggaccagaagtcgccgtgcccgcagtcc

SEQ ID NO: 369491 - DNA, 59 bp, Artificial
  Synthetic oligonucleotide
cgatagtgcggtgcagaaggactttactttgcgaaggaacctcagtggtccgagataca

SEQ ID NO: 369492 - DNA, 55 bp, Artificial
  Synthetic oligonucleotide
cgatagttttagagtaggtaggatagtggctgcgaagtggggtaagtttcgtgac

SEQ ID NO: 369493 - DNA, 54 bp, Artificial
  Synthetic oligonucleotide
cgatataaagacgagagcatcctgctccaccttgagcctaacattcccgtatag

SEQ ID NO: 369494 - DNA, 60 bp, Artificial
  Synthetic oligonucleotide
cgatataacacacggaacagcgggtctaatcgtgcatctgttggtaagaggaatgatggt

SEQ ID NO: 369495 - DNA, 55 bp, Artificial
  Synthetic oligonucleotide
cgatataagtgccggtataatatcaggcacacagactcgaagtgacaatcccctg

SEQ ID NO: 369496 - DNA, 60 bp, Artificial
  Synthetic oligonucleotide
cgatataatattctgaaatcgcaagatttagttcctgatcccttctccatgctagagtac

SEQ ID NO: 369497 - DNA, 55 bp, Artificial
  Synthetic oligonucleotide
cgatatacggattaatagcgtgtcttatattcgtgacttcatccatcgctagtcc

SEQ ID NO: 369498 - DNA, 55 bp, Artificial
  Synthetic oligonucleotide
cgatatagaaggttaccgtacattctacagggtatgcaccagcgtcttctgcggg

SEQ ID NO: 369499 - DNA, 55 bp, Artificial
  Synthetic oligonucleotide
cgatatagccacttcacctccttccatcaatcgctactacgcggtaggtgcggga

SEQ ID NO: 369500 - DNA, 50 bp, Artificial
  Synthetic oligonucleotide
cgatatagtcatttccacacccgcttccaaggtgcgtcggcgtctgaact

SEQ ID NO: 369501 - DNA, 56 bp, Artificial
  Synthetic oligonucleotide
cgatatattcatttccactcccgcctcgaaggttcgtcgaaaactgaacttcgaca

SEQ ID NO: 369502 - DNA, 51 bp, Artificial
  Synthetic oligonucleotide
cgatatattcggcgagccccgagtcgtttaagaggtttcttgattcctcgt

SEQ ID NO: 369503 - DNA, 55 bp, Artificial
  Synthetic oligonucleotide
cgatatcacagagggtaagtaaagttgactaccagttggaccttgtcctaaaaca

SEQ ID NO: 369504 - DNA, 53 bp, Artificial
  Synthetic oligonucleotide
cgatatcccttatagcatcaagcccgaaattctgtcacatatcaatcacagtc

SEQ ID NO: 369505 - DNA, 60 bp, Artificial
  Synthetic oligonucleotide
cgatatcgaaatttgcacatggtggaccccagtgactagatatgcaatatctagtaagct

SEQ ID NO: 369506 - DNA, 50 bp, Artificial
  Synthetic oligonucleotide
cgatatcgacacgatcaccaatgcgtggggacgttggaaaacggctcaat

SEQ ID NO: 369507 - DNA, 60 bp, Artificial
  Synthetic oligonucleotide
cgatatcgattgatatcccccacgccgcctttattagaccatccgatgcgccatttatct

SEQ ID NO: 369508 - DNA, 59 bp, Artificial
  Synthetic oligonucleotide
cgatatctcaattgacagtgtgcccacaccagtggattaacttgaggactaataattgt

SEQ ID NO: 369509 - DNA, 60 bp, Artificial
  Synthetic oligonucleotide
cgatatctcacgctatgacaacatcacgcttcgccacgttcgacattgagagcgagaccg

SEQ ID NO: 369510 - DNA, 55 bp, Artificial
  Synthetic oligonucleotide
cgatatctgtggagtcaaaggaatcagattctcaactggagaatggtggggtatt

SEQ ID NO: 369511 - DNA, 59 bp, Artificial
  Synthetic oligonucleotide
cgatatctttaattcgaaatgcctaagcgagatgccccatggcgattaatggcggggac

SEQ ID NO: 369512 - DNA, 60 bp, Artificial
  Synthetic oligonucleotide
cgatatgaattcgatgggttgggcgcaaattcacaaatgcatgatttaaattcacacata

SEQ ID NO: 369513 - DNA, 55 bp, Artificial
  Synthetic oligonucleotide
cgatatgactacttctctctgaatcgtgaaacgggagattcgatatataagtggg

SEQ ID NO: 369514 - DNA, 60 bp, Artificial
  Synthetic oligonucleotide
cgatatgcccacattattggcacatggctcaacactggttcttacacgtttgagcggggt

SEQ ID NO: 369515 - DNA, 52 bp, Artificial
  Synthetic oligonucleotide
cgatatgccgtatgtcccaataaaccgcacggtttccctagggaagtaaccg

SEQ ID NO: 369516 - DNA, 60 bp, Artificial
  Synthetic oligonucleotide
cgatatgcgatgggcgtgtctacgcaagtcctacacgggcattagcgagcttcgtggcgg

SEQ ID NO: 369517 - DNA, 60 bp, Artificial
  Synthetic oligonucleotide
cgatatgcgattagttgaccgagacagctttacagagcgattcgggttagaaacgatcaa

SEQ ID NO: 369518 - DNA, 60 bp, Artificial
  Synthetic oligonucleotide
cgatatgctgccgcgtctgcggggagaaacagtatccgttattccatgctgcccccgttg

SEQ ID NO: 369519 - DNA, 55 bp, Artificial
  Synthetic oligonucleotide
cgatatggcattgcaagtgaggtaccccatgacatgaaccttctcagattgacat

SEQ ID NO: 369520 - DNA, 54 bp, Artificial
  Synthetic oligonucleotide
cgatatggccaacgggaaatacacaccgggtgtgataccaccggtaaacgtaga

SEQ ID NO: 369521 - DNA, 53 bp, Artificial
  Synthetic oligonucleotide
cgatatggttaagtctaaaggtgtttgtgctactggggattgttatgtctcca

SEQ ID NO: 369522 - DNA, 60 bp, Artificial
  Synthetic oligonucleotide
cgatatgtggtatgctggatgttcaccatcaacaatcccgcctcactaccagtgatgcgg

SEQ ID NO: 369523 - DNA, 60 bp, Artificial
  Synthetic oligonucleotide
cgatattaatgatgttagtgcatgccggttgattgattatcctttaggtgacgcattacc

SEQ ID NO: 369524 - DNA, 60 bp, Artificial
  Synthetic oligonucleotide
cgatattactaactggatatcccgcctggtttacagacgcatatctagaatctccaacta

SEQ ID NO: 369525 - DNA, 57 bp, Artificial
  Synthetic oligonucleotide
cgatattactcgtgggaataattattactcgtggtaagtgattttggcgagctataa

SEQ ID NO: 369526 - DNA, 60 bp, Artificial
  Synthetic oligonucleotide
cgatattcacacagatgcaacgatagcagaaactatcgagatcgatgcgcataataatga

SEQ ID NO: 369527 - DNA, 60 bp, Artificial
  Synthetic oligonucleotide
cgatattgatgtcacttgtcaggctggtaatgaatattggctacatgcgggcaggatcga

SEQ ID NO: 369528 - DNA, 55 bp, Artificial
  Synthetic oligonucleotide
cgatattgtgactaccttcgatacggagaatcggattgataggttccctgaagcg

SEQ ID NO: 369529 - DNA, 55 bp, Artificial
  Synthetic oligonucleotide
cgatatttcctctactactagcactgtagcccttggagacaatccttttgcccat

SEQ ID NO: 369530 - DNA, 55 bp, Artificial
  Synthetic oligonucleotide
cgatcaaacgagatgatggtaaacgtcgtcatgtctattctaacaagtccaatga

SEQ ID NO: 369531 - DNA, 56 bp, Artificial
  Synthetic oligonucleotide
cgatcaaagaatttattacccatacacattaacaaatcgtcaattattctttataa

SEQ ID NO: 369532 - DNA, 60 bp, Artificial
  Synthetic oligonucleotide
cgatcaaatatgttgtgtcgtccgcgttctatacatacactccactgaattatatcacta

SEQ ID NO: 369533 - DNA, 55 bp, Artificial
  Synthetic oligonucleotide
cgatcaacactgttccgtggaagcactgcaatatgaacatagcttctacagggcc

SEQ ID NO: 369534 - DNA, 56 bp, Artificial
  Synthetic oligonucleotide
cgatcaacccaggtccattcgcacaaactggttacgctccagtgaattggggtcct

SEQ ID NO: 369535 - DNA, 53 bp, Artificial
  Synthetic oligonucleotide
cgatcaagggttgggtttgccagacgcgttcttacggcaggacgggaaaggtg

SEQ ID NO: 369536 - DNA, 60 bp, Artificial
  Synthetic oligonucleotide
cgatcaagtctttcggtacaccatgctccggccatttggtgtaatgaaacaatgtgacga

SEQ ID NO: 369537 - DNA, 51 bp, Artificial
  Synthetic oligonucleotide
cgatcaataacataacaaatgttgttcttcgagatccggagaaacatttca

SEQ ID NO: 369538 - DNA, 60 bp, Artificial
  Synthetic oligonucleotide
cgatcaatacagtcctcattctttcatggccaatcgtatgagtaattcagcaacgcgatt

SEQ ID NO: 369539 - DNA, 55 bp, Artificial
  Synthetic oligonucleotide
cgatcaataccaagcaaacccggaatggggctttctacggatgcccaagtgacgg

SEQ ID NO: 369540 - DNA, 60 bp, Artificial
  Synthetic oligonucleotide
cgatcaatagcaggcttagcgcaccagctaagtcttgatcaagcacttctgttaccccgg

SEQ ID NO: 369541 - DNA, 60 bp, Artificial
  Synthetic oligonucleotide
cgatcaataggatcatcagcatccgcttggacggaagtgtcaaattcgatcgcagatgtt

SEQ ID NO: 369542 - DNA, 57 bp, Artificial
  Synthetic oligonucleotide
cgatcaatcctgagttcaacgcacccgtgggatatactggctccccggcgcttgagt

SEQ ID NO: 369543 - DNA, 55 bp, Artificial
  Synthetic oligonucleotide
cgatcacaaaggaccgataacggtcttagaattctacttaagaactatcctagcc

SEQ ID NO: 369544 - DNA, 57 bp, Artificial
  Synthetic oligonucleotide
cgatcacaatgtgccatcgcgcgtaagtccaagggaatacagatcttcccaggagtc

SEQ ID NO: 369545 - DNA, 56 bp, Artificial
  Synthetic oligonucleotide
cgatcacactcaacctcccgttggctgggatacccgccaatgcgacggtccgggcc

SEQ ID NO: 369546 - DNA, 55 bp, Artificial
  Synthetic oligonucleotide
cgatcaccaatgtatgtactcctatcttggagagatgagcgagaattgtgatgag

SEQ ID NO: 369547 - DNA, 58 bp, Artificial
  Synthetic oligonucleotide
cgatcaccaccgttgcaaaacattgtgtgcgacgtggggtacgaaagttgatagctac

SEQ ID NO: 369548 - DNA, 51 bp, Artificial
  Synthetic oligonucleotide
cgatcacccaattgaggtagtattaagggacatgaacaataaagatgcacg

SEQ ID NO: 369549 - DNA, 52 bp, Artificial
  Synthetic oligonucleotide
cgatcacgcaatgttagcgtgcgtgcttatctacactccaggaactttaatg

SEQ ID NO: 369550 - DNA, 56 bp, Artificial
  Synthetic oligonucleotide
cgatcacggggccagtgcccggaatgggtgtgttcgcaaactccatgcacgtatct

SEQ ID NO: 369551 - DNA, 55 bp, Artificial
  Synthetic oligonucleotide
cgatcactagcaaccaacaatcttgagcaaagggttcctcagatgcttcccaaca

SEQ ID NO: 369552 - DNA, 51 bp, Artificial
  Synthetic oligonucleotide
cgatcactcacctataagttattagatcatattcccttttctactcctgtt

SEQ ID NO: 369553 - DNA, 57 bp, Artificial
  Synthetic oligonucleotide
cgatcactcggataagtcatccggagaacgcggattggatcggcatccaaggtcgta

SEQ ID NO: 369554 - DNA, 55 bp, Artificial
  Synthetic oligonucleotide
cgatcactcgtctacacaataccgcagtatactgtttggcggttcaattggatcg

SEQ ID NO: 369555 - DNA, 56 bp, Artificial
  Synthetic oligonucleotide
cgatcactctgacgtctcggattgtgacggttcggggattctacgcggcactgcgt

SEQ ID NO: 369556 - DNA, 60 bp, Artificial
  Synthetic oligonucleotide
cgatcactggctccatggatacagcatatgcaaattcatcacagcaagaaccatttttga

SEQ ID NO: 369557 - DNA, 55 bp, Artificial
  Synthetic oligonucleotide
cgatcacttggacttagtgcttccttcgctaccttcaagaccttaagggttgacg

SEQ ID NO: 369558 - DNA, 57 bp, Artificial
  Synthetic oligonucleotide
cgatcagaaaacctgacgggcaactatgggaacgcccaacagaatcgatcctaggcg

SEQ ID NO: 369559 - DNA, 60 bp, Artificial
  Synthetic oligonucleotide
cgatcagaaaatgagagtgcttaatgcttgttttagtgtcaagagaatacctgggaaatc

SEQ ID NO: 369560 - DNA, 55 bp, Artificial
  Synthetic oligonucleotide
cgatcagaactggtaattagcagataccgctattcacgtcgacacatacgtggtg

SEQ ID NO: 369561 - DNA, 58 bp, Artificial
  Synthetic oligonucleotide
cgatcagcaaaagccgcccaaacaatcgtttgcttccaacattcggtattgataagat

SEQ ID NO: 369562 - DNA, 60 bp, Artificial
  Synthetic oligonucleotide
cgatcaggaccaggtttgagaggtgcattccgccacatatgtggtgttcgaggatagttt

SEQ ID NO: 369563 - DNA, 60 bp, Artificial
  Synthetic oligonucleotide
cgatcaggctcatgtgaaagatacctctgtccaagagtaatgttgtatgcttcgatatta

SEQ ID NO: 369564 - DNA, 52 bp, Artificial
  Synthetic oligonucleotide
cgatcaggtggaccagagacccgaagaacactcaagaccatgtatactcttt

SEQ ID NO: 369565 - DNA, 57 bp, Artificial
  Synthetic oligonucleotide
cgatcaggtggtatcccccactagtctggtcgatgaggctaggaattccccacgggc

SEQ ID NO: 369566 - DNA, 55 bp, Artificial
  Synthetic oligonucleotide
cgatcagtccccgtttgtcaatcggcggacccagccactttggcttaagggtctg

SEQ ID NO: 369567 - DNA, 55 bp, Artificial
  Synthetic oligonucleotide
cgatcagttcttgtttgaatcgacgtttagtgttaactggatccctaatccagcg

SEQ ID NO: 369568 - DNA, 60 bp, Artificial
  Synthetic oligonucleotide
cgatcatatagactgcaagatagaggtgacggcaacaaaggaggcatatctgaggaaatc

SEQ ID NO: 369569 - DNA, 53 bp, Artificial
  Synthetic oligonucleotide
cgatcatatcgaatattgccagatgatgccgtaatggacattcatactgaagg

SEQ ID NO: 369570 - DNA, 55 bp, Artificial
  Synthetic oligonucleotide
cgatcatcgtctatttctgtgtgccgtttgcgcgttctgaattgtatataagtca

SEQ ID NO: 369571 - DNA, 56 bp, Artificial
  Synthetic oligonucleotide
cgatcatgaatcatgtaatggtgtatatgcgaacataagcaagaacgctctcttag

SEQ ID NO: 369572 - DNA, 58 bp, Artificial
  Synthetic oligonucleotide
cgatcatgacgaacataactccaacgatggctgaattgcttgatgctgcgttgagcga

SEQ ID NO: 369573 - DNA, 60 bp, Artificial
  Synthetic oligonucleotide
cgatcatggggattatatatacttcctactccccgagcacctacaggagtactctatcaa

SEQ ID NO: 369574 - DNA, 56 bp, Artificial
  Synthetic oligonucleotide
cgatcattatcataggttaggtctagaggtctagatagattagctttaggttagtc

SEQ ID NO: 369575 - DNA, 55 bp, Artificial
  Synthetic oligonucleotide
cgatcattccttgatggtatatacaggggaataaggaaaagttgttccttacaac

SEQ ID NO: 369576 - DNA, 55 bp, Artificial
  Synthetic oligonucleotide
cgatcattttaacttttcttatgatggtgctgaatcaaagtacgcgtggtgtgca

SEQ ID NO: 369577 - DNA, 55 bp, Artificial
  Synthetic oligonucleotide
cgatccaaagaaaggttacacccagtacgagacaagagtggtaccaaatggttca

SEQ ID NO: 369578 - DNA, 60 bp, Artificial
  Synthetic oligonucleotide
cgatccaaatctttttggcattcgcgggcagcataaccaaatcaagcgtgaggttgagag

SEQ ID NO: 369579 - DNA, 55 bp, Artificial
  Synthetic oligonucleotide
cgatccaaatgcactcttgaagcacagatttgaaataatcgaaggaagagatcgg

SEQ ID NO: 369580 - DNA, 55 bp, Artificial
  Synthetic oligonucleotide
cgatccaatcataggtcattgtcccatgacgtggtgttccataaagataaggata

SEQ ID NO: 369581 - DNA, 59 bp, Artificial
  Synthetic oligonucleotide
cgatccacaactgtattgggattataatttggtattaatgaaatatgacgctacactgc

SEQ ID NO: 369582 - DNA, 58 bp, Artificial
  Synthetic oligonucleotide
cgatccactcaagcattcaaagttatacgaagaatatggcctatatctacgtcctcac

SEQ ID NO: 369583 - DNA, 54 bp, Artificial
  Synthetic oligonucleotide
cgatccagactactagaccggttggtcaggttaattggaaacccggatgtaagc

SEQ ID NO: 369584 - DNA, 55 bp, Artificial
  Synthetic oligonucleotide
cgatccatacacgctagtgctcggattagtctccccgacagttctcatacacatg

SEQ ID NO: 369585 - DNA, 55 bp, Artificial
  Synthetic oligonucleotide
cgatccatcatacgcatacgaacgtattgtacacgttgatttatatgccgctgaa

SEQ ID NO: 369586 - DNA, 59 bp, Artificial
  Synthetic oligonucleotide
cgatccatcttgaatacaagtcaaagaggagtacttgaggatgaacaaatgtaccaaag

SEQ ID NO: 369587 - DNA, 54 bp, Artificial
  Synthetic oligonucleotide
cgatcccaacacaaaattccggaagagtataaaagagtaggtagcttcgacacg

SEQ ID NO: 369588 - DNA, 59 bp, Artificial
  Synthetic oligonucleotide
cgatcccaccaacccgggacaatacagtcacagctcagttcgttaacaatccgctcaga

SEQ ID NO: 369589 - DNA, 53 bp, Artificial
  Synthetic oligonucleotide
cgatcccggttcctccgactacgcctggcgaacctttgtgttcgtttcattcg

SEQ ID NO: 369590 - DNA, 55 bp, Artificial
  Synthetic oligonucleotide
cgatccctacaccaggtgcgtcatcatctctgattgttcattgggatggaaggct

SEQ ID NO: 369591 - DNA, 60 bp, Artificial
  Synthetic oligonucleotide
cgatccctccttccgccgaacaattgtagccacactgcatcgtgtatgacacggttggaa

SEQ ID NO: 369592 - DNA, 55 bp, Artificial
  Synthetic oligonucleotide
cgatccgaaaaagcaaatcccagaaaccttgtttcactcttgggactacagacga

SEQ ID NO: 369593 - DNA, 60 bp, Artificial
  Synthetic oligonucleotide
cgatccgaatgatggctgatgttaataccatctctaatgacgcactagcgctggagatca

SEQ ID NO: 369594 - DNA, 54 bp, Artificial
  Synthetic oligonucleotide
cgatccgaggggccggacttccgagtcttggagagcactccgggccgaagggaa

SEQ ID NO: 369595 - DNA, 56 bp, Artificial
  Synthetic oligonucleotide
cgatccgcgcaagggtacgacaacggctttccgtacttctacatgactctaggcgg

SEQ ID NO: 369596 - DNA, 55 bp, Artificial
  Synthetic oligonucleotide
cgatccggttatcgttagctctatccagcacttgtgaagattcaacgctctccgg

SEQ ID NO: 369597 - DNA, 52 bp, Artificial
  Synthetic oligonucleotide
cgatccgtcgcccactgggttgcggaagttccttacttgttacaacttttct

SEQ ID NO: 369598 - DNA, 50 bp, Artificial
  Synthetic oligonucleotide
cgatccgtgcgagtaccatgtgcgagtgcaccttgagacctacggtggcc

SEQ ID NO: 369599 - DNA, 59 bp, Artificial
  Synthetic oligonucleotide
cgatccgttctctatggacgcatacttggacccgcaagatccatccttcggggatcttg

SEQ ID NO: 369600 - DNA, 54 bp, Artificial
  Synthetic oligonucleotide
cgatcctaaagtgtgtggataagaagttcaatggaacaggaacatgtaacaatg

SEQ ID NO: 369601 - DNA, 55 bp, Artificial
  Synthetic oligonucleotide
cgatcctacaggtttaaggatgacctgggaggacccgactcttgggacggagatc

SEQ ID NO: 369602 - DNA, 51 bp, Artificial
  Synthetic oligonucleotide
cgatcctactagggatattgggggtgttggtgggggacctacggttatttc

SEQ ID NO: 369603 - DNA, 55 bp, Artificial
  Synthetic oligonucleotide
cgatcctagagacttaagttatagcagcttgaccacccactacaaacagatgttc

SEQ ID NO: 369604 - DNA, 55 bp, Artificial
  Synthetic oligonucleotide
cgatcctatacaaccatcttttaacggaggcggtttgcattggctcaggaacgtg

SEQ ID NO: 369605 - DNA, 58 bp, Artificial
  Synthetic oligonucleotide
cgatcctatatacagggataaatgaaggatcatatttgggtggggatgtttttgcttc

SEQ ID NO: 369606 - DNA, 58 bp, Artificial
  Synthetic oligonucleotide
cgatcctatccacgtacaaggtaaacgcgtggaatctttgggtccatcgccgactgca

SEQ ID NO: 369607 - DNA, 55 bp, Artificial
  Synthetic oligonucleotide
cgatcctatttgcttaggtgtctgctcgatatgtgctacgttaacgtcttggtgt

SEQ ID NO: 369608 - DNA, 55 bp, Artificial
  Synthetic oligonucleotide
cgatcctatttgtgatactgactttcctgggtccaatgcgtctgggttgagccgg

SEQ ID NO: 369609 - DNA, 56 bp, Artificial
  Synthetic oligonucleotide
cgatcctccgtggttatcccaaactctaacttcgtcggtcgcatatggtcggatta

SEQ ID NO: 369610 - DNA, 55 bp, Artificial
  Synthetic oligonucleotide
cgatcctgaggaccctggacaagagactaacgtggctatgtctttcatttggcag

SEQ ID NO: 369611 - DNA, 59 bp, Artificial
  Synthetic oligonucleotide
cgatcctgtgttgccagtgaattattctcggatagtttacttggatcgaggtactggta

SEQ ID NO: 369612 - DNA, 60 bp, Artificial
  Synthetic oligonucleotide
cgatcctgttcctgagctagtcaaagagtcatctaggtcttatttacagcccgtactcag

SEQ ID NO: 369613 - DNA, 53 bp, Artificial
  Synthetic oligonucleotide
cgatccttatcggaaatcgtaatagtattgggttcaccggttcctaacacgcc

SEQ ID NO: 369614 - DNA, 59 bp, Artificial
  Synthetic oligonucleotide
cgatcctttatttaggcattcaatgtgcataaaaacatgtgcggttatcctgttattcg

SEQ ID NO: 369615 - DNA, 60 bp, Artificial
  Synthetic oligonucleotide
cgatcgaacatattgcaagtatgaggagaaactacttcacagcagaagtgtcccattgca

SEQ ID NO: 369616 - DNA, 59 bp, Artificial
  Synthetic oligonucleotide
cgatcgaagctattcatgcagcttcttcttttaagaggagagcggaagaaaagaataac

SEQ ID NO: 369617 - DNA, 55 bp, Artificial
  Synthetic oligonucleotide
cgatcgacgccgcaatatgtgtttcgtgccgtgcggtcatgtgattgcgtgtgaa

SEQ ID NO: 369618 - DNA, 60 bp, Artificial
  Synthetic oligonucleotide
cgatcgagaggtatcatactgagcctcattctgtgtcttgcactgaagtctttcaggcat

SEQ ID NO: 369619 - DNA, 55 bp, Artificial
  Synthetic oligonucleotide
cgatcgagcgcagcggatggcaccgttccacgagcgatcggaagcgaatctgagt

SEQ ID NO: 369620 - DNA, 55 bp, Artificial
  Synthetic oligonucleotide
cgatcgattcctttgtataagcctcctatttggtatcttgacgttgctttcaagt

SEQ ID NO: 369621 - DNA, 52 bp, Artificial
  Synthetic oligonucleotide
cgatcgcacctactgtccgtgcaacttgtgcagtccgcaccggatgccccaa

SEQ ID NO: 369622 - DNA, 58 bp, Artificial
  Synthetic oligonucleotide
cgatcgcatcctcgttgtacccacggcacgtgtatacgttggctgttttcccagcgct

SEQ ID NO: 369623 - DNA, 60 bp, Artificial
  Synthetic oligonucleotide
cgatcgcccgctaaaatggcgattccaatcttgatttctgacacgcaagtgtctttggac

SEQ ID NO: 369624 - DNA, 55 bp, Artificial
  Synthetic oligonucleotide
cgatcgcgaccctccctagtacggccaagagcattttgttcggagattccataca

SEQ ID NO: 369625 - DNA, 51 bp, Artificial
  Synthetic oligonucleotide
cgatcgcgtttccgtacgtcactcgaggcaacggcttgcacgtcgattcga

SEQ ID NO: 369626 - DNA, 60 bp, Artificial
  Synthetic oligonucleotide
cgatcgcttattttacaatgatcaaagaccgctactaatttatcatctacgatattcatt

SEQ ID NO: 369627 - DNA, 55 bp, Artificial
  Synthetic oligonucleotide
cgatcgctttagggatcacctccatcaggaacgggttgtcgcctcgccctttgag

SEQ ID NO: 369628 - DNA, 60 bp, Artificial
  Synthetic oligonucleotide
cgatcggagagccagcggacgatcgcacaatcctctggatatgcggacgagacggaggag

SEQ ID NO: 369629 - DNA, 55 bp, Artificial
  Synthetic oligonucleotide
cgatcggagtttatctgcaacgtatcgagcacaaccggggtgaccccgactttcc

SEQ ID NO: 369630 - DNA, 53 bp, Artificial
  Synthetic oligonucleotide
cgatcggatcctcgccccgaagtaccgttcgacccttaccaggctggtatccg

SEQ ID NO: 369631 - DNA, 54 bp, Artificial
  Synthetic oligonucleotide
cgatcggttacggggcatcactttgacgagaagatcggaaacgttcggttatac

SEQ ID NO: 369632 - DNA, 55 bp, Artificial
  Synthetic oligonucleotide
cgatcggttatgatgcggacatgttgactagagctttcttgaagcgccgttggca

SEQ ID NO: 369633 - DNA, 54 bp, Artificial
  Synthetic oligonucleotide
cgatcgtacgatgttaaggatataagctattttgaaacggggtattacattacg

SEQ ID NO: 369634 - DNA, 55 bp, Artificial
  Synthetic oligonucleotide
cgatcgtgagtaccactcaattgactaagtctctaaacgttgacgcttcgctggg

SEQ ID NO: 369635 - DNA, 55 bp, Artificial
  Synthetic oligonucleotide
cgatcgtgcccacattgtttttccggtacgactatcaccctcgattacaatacta

SEQ ID NO: 369636 - DNA, 60 bp, Artificial
  Synthetic oligonucleotide
cgatctaaaacaatatgatagtgatgagccaaagtctagatctctggcaagttggatcca

SEQ ID NO: 369637 - DNA, 56 bp, Artificial
  Synthetic oligonucleotide
cgatctaaatacaaattaactaagtgcataaacctagctaaataagtcgacccaga

SEQ ID NO: 369638 - DNA, 55 bp, Artificial
  Synthetic oligonucleotide
cgatctaagacagtatgacagtgatgaaccggaacctagatcgttagcaagctgg

SEQ ID NO: 369639 - DNA, 60 bp, Artificial
  Synthetic oligonucleotide
cgatctaatggcctctgggacgcatccgttacctccctcagcaatcatgagtgggggcag

SEQ ID NO: 369640 - DNA, 55 bp, Artificial
  Synthetic oligonucleotide
cgatctagaaagcttcaccttctctagcacagatcaggtacttgccggggctgcc

SEQ ID NO: 369641 - DNA, 55 bp, Artificial
  Synthetic oligonucleotide
cgatctagatgcatcacctggtgataaagtcgttcattggaggtatgagttgatc

SEQ ID NO: 369642 - DNA, 57 bp, Artificial
  Synthetic oligonucleotide
cgatctagccatcataaatctatgtggggcgaatgatttaaacagtaacgcgctacc

SEQ ID NO: 369643 - DNA, 55 bp, Artificial
  Synthetic oligonucleotide
cgatctatcaagagatgcactcggacacttacaagcggccattcgcgtgtacaac

SEQ ID NO: 369644 - DNA, 57 bp, Artificial
  Synthetic oligonucleotide
cgatctcaaagccaactcaaccgggatcctcaaattcggaccgaacctatctcagta

SEQ ID NO: 369645 - DNA, 52 bp, Artificial
  Synthetic oligonucleotide
cgatctcagggatcgttatcaggtgctgcatccgtttgtgtatacggttacc

SEQ ID NO: 369646 - DNA, 58 bp, Artificial
  Synthetic oligonucleotide
cgatctcatgcgtaccaatggccacggttctaaatataaacggagcgttggtggacgc

SEQ ID NO: 369647 - DNA, 52 bp, Artificial
  Synthetic oligonucleotide
cgatctcattgcgccggatagaaacacaagtgcagcacaaatcgacgcgaat

SEQ ID NO: 369648 - DNA, 55 bp, Artificial
  Synthetic oligonucleotide
cgatctcgcagcgcgcagggtactaggataccaatctcacggccgcagaatccac

SEQ ID NO: 369649 - DNA, 55 bp, Artificial
  Synthetic oligonucleotide
cgatctcgcgttattgttaacgggtgtaatgttcgatcagaatgggacgtcgaaa

SEQ ID NO: 369650 - DNA, 57 bp, Artificial
  Synthetic oligonucleotide
cgatctcgctaaattttacctccaaccatcgagctcgcccaaccaaatcgtcactaa

SEQ ID NO: 369651 - DNA, 60 bp, Artificial
  Synthetic oligonucleotide
cgatctctagttggggtcctgatgggtcagacaatgtctgtttgagcaatgaatcgccac

SEQ ID NO: 369652 - DNA, 60 bp, Artificial
  Synthetic oligonucleotide
cgatctcttgtagatctgttctctaaacgaactttaaaatctgtgtagctgtcgctcggc

SEQ ID NO: 369653 - DNA, 55 bp, Artificial
  Synthetic oligonucleotide
cgatctgaaagtagtgagatgtacgcatacgaggccgcagctccaagtgtggccg

SEQ ID NO: 369654 - DNA, 60 bp, Artificial
  Synthetic oligonucleotide
cgatctgactgcttggactcaagtgtgcctcatcggggtgagtcgctcattatatacggc

SEQ ID NO: 369655 - DNA, 55 bp, Artificial
  Synthetic oligonucleotide
cgatctgattacaaacctgatgttcgtgcaaatctgtacttccaacgccaattcc

SEQ ID NO: 369656 - DNA, 55 bp, Artificial
  Synthetic oligonucleotide
cgatctgcaaagcgaaatgaagcattacagagttggcggagcgccaacacagcgc

SEQ ID NO: 369657 - DNA, 55 bp, Artificial
  Synthetic oligonucleotide
cgatctgcagctatttcgagatgtgtcataaaaggaccagaagcccctacttggc

SEQ ID NO: 369658 - DNA, 55 bp, Artificial
  Synthetic oligonucleotide
cgatctgcaggtgttaatggtgagcttattttaaccataccactcaacatgagta

SEQ ID NO: 369659 - DNA, 60 bp, Artificial
  Synthetic oligonucleotide
cgatctgcgtcgcaggcgctcgctgagggacagttcctgtaaggggacgttccgcctgac

SEQ ID NO: 369660 - DNA, 57 bp, Artificial
  Synthetic oligonucleotide
cgatctggaatatgatagtaagggcaatttagtaaagaaacagctgttaagtaaaga

SEQ ID NO: 369661 - DNA, 59 bp, Artificial
  Synthetic oligonucleotide
cgatctggaattctccccattcgagagtgtctccgtccttgtcgatataggacttgacg

SEQ ID NO: 369662 - DNA, 60 bp, Artificial
  Synthetic oligonucleotide
cgatctggagatactgtacacagccatatcgagagcaatcccaggattggtcagtaattt

SEQ ID NO: 369663 - DNA, 55 bp, Artificial
  Synthetic oligonucleotide
cgatctggctgcgttgatgttagctaaatgtcatgcattgaagaaatccgaaggt

SEQ ID NO: 369664 - DNA, 60 bp, Artificial
  Synthetic oligonucleotide
cgatctggggatactgtacacagtcatatcgagagcaatcccaggactggtcggcaactt

SEQ ID NO: 369665 - DNA, 60 bp, Artificial
  Synthetic oligonucleotide
cgatctgtatggggacatcggaattgaagtactgcagccgactaacgaccacgtacatgt

SEQ ID NO: 369666 - DNA, 55 bp, Artificial
  Synthetic oligonucleotide
cgatctgtggttacttgtcatacgcagtgatgctttcatttcacttgctggtgat

SEQ ID NO: 369667 - DNA, 60 bp, Artificial
  Synthetic oligonucleotide
cgatctgttctggagcaaaatacccgtaatgctagatggacatctaatagcctttgacta

SEQ ID NO: 369668 - DNA, 60 bp, Artificial
  Synthetic oligonucleotide
cgatcttaaacaacatcactacaacaatactagattttatgcgatagtgtgtgcttcaaa

SEQ ID NO: 369669 - DNA, 56 bp, Artificial
  Synthetic oligonucleotide
cgatcttaaacgatggatatacttacactcacccggtaaagttgccattgaaggtg

SEQ ID NO: 369670 - DNA, 60 bp, Artificial
  Synthetic oligonucleotide
cgatcttacaataacttcgatcagtatcaatgtttgcgtctcactcagcgatctgactca

SEQ ID NO: 369671 - DNA, 55 bp, Artificial
  Synthetic oligonucleotide
cgatcttactcatctaatcccgtatttaagcgtttacacggagcgaaacgaagtg

SEQ ID NO: 369672 - DNA, 55 bp, Artificial
  Synthetic oligonucleotide
cgatcttagagatcgttatcaagtgatccgtcgttttacttcaactgtcactgga

SEQ ID NO: 369673 - DNA, 54 bp, Artificial
  Synthetic oligonucleotide
cgatcttaggtgcgcttaaatttggggttaaggttctcggtgacaaaattgatg

SEQ ID NO: 369674 - DNA, 55 bp, Artificial
  Synthetic oligonucleotide
cgatcttcagtggtaagtgtaatatatgttggcccaacggcggtagcatttctac

SEQ ID NO: 369675 - DNA, 60 bp, Artificial
  Synthetic oligonucleotide
cgatcttgagttagaatatgtcttttatgaggatctgacacgccattggcatgcactggg

SEQ ID NO: 369676 - DNA, 58 bp, Artificial
  Synthetic oligonucleotide
cgatcttgcaacgcccacagtgccaccctttccgtcattgtatgaaatccgaaaactc

SEQ ID NO: 369677 - DNA, 57 bp, Artificial
  Synthetic oligonucleotide
cgatcttgcacagacagcatgagggaacaacagcccttgtggtgttcagagataatc

SEQ ID NO: 369678 - DNA, 57 bp, Artificial
  Synthetic oligonucleotide
cgatcttgcccacatggttttaccagttctagaatcaccttcaatcacaatacttat

SEQ ID NO: 369679 - DNA, 55 bp, Artificial
  Synthetic oligonucleotide
cgatcttttcgtttccttgctccgtcgtagttgtattctatgtccaatcggttcc

SEQ ID NO: 369680 - DNA, 60 bp, Artificial
  Synthetic oligonucleotide
cgatcttttgtggagagtgagcgccttattagttcagatctttcagctccaaccatttct

SEQ ID NO: 369681 - DNA, 55 bp, Artificial
  Synthetic oligonucleotide
cgatgaaacgaattaagaacttagttaattaacaagtgcctttgagccagatggg

SEQ ID NO: 369682 - DNA, 57 bp, Artificial
  Synthetic oligonucleotide
cgatgaaagacgggcggttgttgaaagtacgagacacaagagtttccacacgaatga

SEQ ID NO: 369683 - DNA, 55 bp, Artificial
  Synthetic oligonucleotide
cgatgaaataggggaagatgtcgccccaatcgagcatattgcaagcatgagaagg

SEQ ID NO: 369684 - DNA, 55 bp, Artificial
  Synthetic oligonucleotide
cgatgaaatctttccaaaccaccaccacgtggatgataagtttttccaagagtgg

SEQ ID NO: 369685 - DNA, 56 bp, Artificial
  Synthetic oligonucleotide
cgatgaaattcttactattgttgataagttggattgggatttcactaacttcgtac

SEQ ID NO: 369686 - DNA, 60 bp, Artificial
  Synthetic oligonucleotide
cgatgaacagttcccatttttgattcaccctactatgccaatgagggagatccatgagtc

SEQ ID NO: 369687 - DNA, 53 bp, Artificial
  Synthetic oligonucleotide
cgatgaacatgtttgtgaggttcggctgatggctaagcgcaagaccgcacctg

SEQ ID NO: 369688 - DNA, 55 bp, Artificial
  Synthetic oligonucleotide
cgatgaaccagacgattggtactcagaaggggtcaatgacggtgtcacacacaag

SEQ ID NO: 369689 - DNA, 55 bp, Artificial
  Synthetic oligonucleotide
cgatgaacccacctttcaaacgtagacttatgattgacttaacggttattctctc

SEQ ID NO: 369690 - DNA, 55 bp, Artificial
  Synthetic oligonucleotide
cgatgaacccgccgcaacgtttcaaagctcaccgggactcgaaagactggtggga

SEQ ID NO: 369691 - DNA, 58 bp, Artificial
  Synthetic oligonucleotide
cgatgaactgtaaataatccgtgatgcagtgttgccctaatcccttaagccttcccga

SEQ ID NO: 369692 - DNA, 55 bp, Artificial
  Synthetic oligonucleotide
cgatgaaggtgttattcatgtgcaatctcaatttgttactccagaagctgtccgc

SEQ ID NO: 369693 - DNA, 58 bp, Artificial
  Synthetic oligonucleotide
cgatgaagtcgtggaaaggcttagggctgctaaagaggataggcgcagggaacatttg

SEQ ID NO: 369694 - DNA, 58 bp, Artificial
  Synthetic oligonucleotide
cgatgaagttagtttatgacacggacctacaaatgcactgtttacgtggaccactgaa

SEQ ID NO: 369695 - DNA, 60 bp, Artificial
  Synthetic oligonucleotide
cgatgaatgaacatatagtgcctcatacttataatacccgagtgtctttgctcacggatt

SEQ ID NO: 369696 - DNA, 59 bp, Artificial
  Synthetic oligonucleotide
cgatgaattataaaccagcgagaaacgatgggatcgttgtacctagattacttgatata

SEQ ID NO: 369697 - DNA, 55 bp, Artificial
  Synthetic oligonucleotide
cgatgaatttaatgctagggaccgcaggcctaaagtcaatttttccaaagtagta

SEQ ID NO: 369698 - DNA, 55 bp, Artificial
  Synthetic oligonucleotide
cgatgacacagtgtggtggtctaaggacctgttatcctctgccgaggttgatcgc

SEQ ID NO: 369699 - DNA, 54 bp, Artificial
  Synthetic oligonucleotide
cgatgacagtgaggcagggccccgggggattcaggacaaaggatccgactctca

SEQ ID NO: 369700 - DNA, 54 bp, Artificial
  Synthetic oligonucleotide
cgatgacctggtttctcgaaggagcaagggagttgttttattacggtgtttcta

SEQ ID NO: 369701 - DNA, 59 bp, Artificial
  Synthetic oligonucleotide
cgatgacgggcaacaggataagaaatgcatcactccgacctaagacaggcgcagtttcc

SEQ ID NO: 369702 - DNA, 59 bp, Artificial
  Synthetic oligonucleotide
cgatgacggtcgtcttaaaaatcagttgagcacacagggacttttaatgacgcatgaaa

SEQ ID NO: 369703 - DNA, 59 bp, Artificial
  Synthetic oligonucleotide
cgatgactatgagttcaacctcactcacacatttactaaacaaattatctaacctaatc

SEQ ID NO: 369704 - DNA, 60 bp, Artificial
  Synthetic oligonucleotide
cgatgacttgatggtgggctctgagctcacctacttggccaaggatgatgtctttggtcc

SEQ ID NO: 369705 - DNA, 55 bp, Artificial
  Synthetic oligonucleotide
cgatgagaaaacattacccagtcagtttctcgaagcccagcctgatctatgtaga

SEQ ID NO: 369706 - DNA, 55 bp, Artificial
  Synthetic oligonucleotide
cgatgagatggtactcactgtttactccaacatcagtgcaatcagataatggacc

SEQ ID NO: 369707 - DNA, 55 bp, Artificial
  Synthetic oligonucleotide
cgatgagattctcaacacaaccatctgcctggctaatgggatggtcatcaagaag

SEQ ID NO: 369708 - DNA, 55 bp, Artificial
  Synthetic oligonucleotide
cgatgagattggagaagatgtggctccaattgaacacattgcaagcatgagaagg

SEQ ID NO: 369709 - DNA, 59 bp, Artificial
  Synthetic oligonucleotide
cgatgagatttttgggctagcaatccttgatttcaccataagagaagactgtgggttag

SEQ ID NO: 369710 - DNA, 55 bp, Artificial
  Synthetic oligonucleotide
cgatgagcgtgggatcagttatccgactgatgattacgcgatccaggccgggcac

SEQ ID NO: 369711 - DNA, 58 bp, Artificial
  Synthetic oligonucleotide
cgatgaggaaggatgtaatgtcattcgttcacgttttcttacgcatgaagttttcgac

SEQ ID NO: 369712 - DNA, 59 bp, Artificial
  Synthetic oligonucleotide
cgatgaggagttacgtaagaaatataatagcgttgaattatatcagacgaagggatcaa

SEQ ID NO: 369713 - DNA, 60 bp, Artificial
  Synthetic oligonucleotide
cgatgaggatcgtcggtcccaggacctgcaggaatatgtggagtgggactttccccatca

SEQ ID NO: 369714 - DNA, 60 bp, Artificial
  Synthetic oligonucleotide
cgatgaggcacgagaatactttcagccgatgctagggcagtatcagaagagcaaactcaa

SEQ ID NO: 369715 - DNA, 60 bp, Artificial
  Synthetic oligonucleotide
cgatgagggtctaaggacattgtactccactgctcaggtgatggccgaacacggtacgat

SEQ ID NO: 369716 - DNA, 60 bp, Artificial
  Synthetic oligonucleotide
cgatgaggttgagcgattattaatttgggatgtgagtgcagatgggctgaaggggacaat

SEQ ID NO: 369717 - DNA, 59 bp, Artificial
  Synthetic oligonucleotide
cgatgagtacaatagttaaaagtggagttggagctatgaaggttgcgatgagtacttta

SEQ ID NO: 369718 - DNA, 55 bp, Artificial
  Synthetic oligonucleotide
cgatgagtataaggagttactacaatcctactttggccgtaacatacctatatgg

SEQ ID NO: 369719 - DNA, 55 bp, Artificial
  Synthetic oligonucleotide
cgatgagtatctcgagtgttaccagaaggagggagcccgggtgcgcagttggccc

SEQ ID NO: 369720 - DNA, 59 bp, Artificial
  Synthetic oligonucleotide
cgatgagtatctcggtgcatttcgtataatttgtggtgataatgtttttcaccttcacc

SEQ ID NO: 369721 - DNA, 55 bp, Artificial
  Synthetic oligonucleotide
cgatgagtccagacttgagtccaattccaagaatatcacgcaaaatcggatcctc

SEQ ID NO: 369722 - DNA, 55 bp, Artificial
  Synthetic oligonucleotide
cgatgagtcgaatgaaacaatagacttcgaattagtcaccggtgaaaccgcacca

SEQ ID NO: 369723 - DNA, 55 bp, Artificial
  Synthetic oligonucleotide
cgatgagttttaggggtgcctactagaacatcgtggctacaacacggccgtccac

SEQ ID NO: 369724 - DNA, 60 bp, Artificial
  Synthetic oligonucleotide
cgatgataactcccattgtactggcatacatgcttgagagggaattggttgccaggagaa

SEQ ID NO: 369725 - DNA, 55 bp, Artificial
  Synthetic oligonucleotide
cgatgataatagcagaattaacatgcgcgagggagacccaatctagttcgttcgc

SEQ ID NO: 369726 - DNA, 60 bp, Artificial
  Synthetic oligonucleotide
cgatgataccgcttcatgtagcaagtccagtatgtcaccacggcatagcttaccgagtgg

SEQ ID NO: 369727 - DNA, 55 bp, Artificial
  Synthetic oligonucleotide
cgatgatcaggagcaagcttgatgtacctagaacaccgtggtcacgtttcgatgt

SEQ ID NO: 369728 - DNA, 52 bp, Artificial
  Synthetic oligonucleotide
cgatgatcgaccggccacctcaaaccacccgtacggtcagtgccccaataac

SEQ ID NO: 369729 - DNA, 55 bp, Artificial
  Synthetic oligonucleotide
cgatgatctaatcaatgacacgattcgaaagaacgctgctaggtccgaaacagcc

SEQ ID NO: 369730 - DNA, 55 bp, Artificial
  Synthetic oligonucleotide
cgatgatctgcgggctccctttccaccgggaccggtatttgtggtcgtcatggag

SEQ ID NO: 369731 - DNA, 55 bp, Artificial
  Synthetic oligonucleotide
cgatgatctgcttcggatcactgaccgttatccgttacgtgttgagtttaaaggt

SEQ ID NO: 369732 - DNA, 55 bp, Artificial
  Synthetic oligonucleotide
cgatgatgcatagcgcactacttaaggagtcgaaagcacgttccctcttagcagc

SEQ ID NO: 369733 - DNA, 60 bp, Artificial
  Synthetic oligonucleotide
cgatgatggaactgattggttcctttatgtttctcaacaaatccaagcaggtcatttgca

SEQ ID NO: 369734 - DNA, 55 bp, Artificial
  Synthetic oligonucleotide
cgatgatggttcctctgtgactggtatcgagacgattagcattgaaaaccctggc

SEQ ID NO: 369735 - DNA, 60 bp, Artificial
  Synthetic oligonucleotide
cgatgatgttcgatggtgcgatgatgtttgacgaccagggtgtaatacctgaacttaatt

SEQ ID NO: 369736 - DNA, 55 bp, Artificial
  Synthetic oligonucleotide
cgatgattacgcgttgcccagatctactgtcatgctcaatggatcttaccgtgat

SEQ ID NO: 369737 - DNA, 57 bp, Artificial
  Synthetic oligonucleotide
cgatgattcatttctatacgaagaggaccttactaccgatcaacgaaaagactacga

SEQ ID NO: 369738 - DNA, 57 bp, Artificial
  Synthetic oligonucleotide
cgatgcaaactgggtctccagttatgattgattactacgtaccgttagccgtcactt

SEQ ID NO: 369739 - DNA, 60 bp, Artificial
  Synthetic oligonucleotide
cgatgcaaagaatgatatcggtcacatgggtagggtcatatgtctgtctgatgttacaag

SEQ ID NO: 369740 - DNA, 55 bp, Artificial
  Synthetic oligonucleotide
cgatgcaatatctcagctgatggtcgcaatgcaacaaaagcggtgcaatctcact

SEQ ID NO: 369741 - DNA, 55 bp, Artificial
  Synthetic oligonucleotide
cgatgcaatcgggtgaacgtgtcgaaatatccgactaccattacattggcttcgc

SEQ ID NO: 369742 - DNA, 55 bp, Artificial
  Synthetic oligonucleotide
cgatgcacccggtagcattctttacacagttcaacactccccgcagaacaacccc

SEQ ID NO: 369743 - DNA, 60 bp, Artificial
  Synthetic oligonucleotide
cgatgcaccctgtttagggtatgaccataagtattctacacttatggagtatttgcatta

SEQ ID NO: 369744 - DNA, 60 bp, Artificial
  Synthetic oligonucleotide
cgatgcacgcagggtcgggcaataacgctgacgtgagtctagggataggacgcgagttca

SEQ ID NO: 369745 - DNA, 55 bp, Artificial
  Synthetic oligonucleotide
cgatgcacgtttggcatggttgtcgtctctaggtatcttgaacccactaggtata

SEQ ID NO: 369746 - DNA, 60 bp, Artificial
  Synthetic oligonucleotide
cgatgcactatgatatatcctacgctaccttgaagagtaacgcacagcggatagtttatg

SEQ ID NO: 369747 - DNA, 58 bp, Artificial
  Synthetic oligonucleotide
cgatgcactcttcctcattaacctccactgcccccgcttcacgtaccgacgtgaagcg

SEQ ID NO: 369748 - DNA, 55 bp, Artificial
  Synthetic oligonucleotide
cgatgcagattggtcaaaggtggcagtatcaaatgagtcgatggtttattccgac

SEQ ID NO: 369749 - DNA, 55 bp, Artificial
  Synthetic oligonucleotide
cgatgcagcatctcgatttctcggtgtcagccagatcggatgtacctatagtatt

SEQ ID NO: 369750 - DNA, 55 bp, Artificial
  Synthetic oligonucleotide
cgatgcagtggccatcattacggctgctaatagattaaacttataccagaagaaa

SEQ ID NO: 369751 - DNA, 58 bp, Artificial
  Synthetic oligonucleotide
cgatgcatagatgaaacgcatcacgatccaggggataaagacctatggtgaatggtga

SEQ ID NO: 369752 - DNA, 60 bp, Artificial
  Synthetic oligonucleotide
cgatgcatccaggttcgatcaacactgttccgtggaagcactgcaatatgaacatagctt

SEQ ID NO: 369753 - DNA, 52 bp, Artificial
  Synthetic oligonucleotide
cgatgcatgatgccgatacaacttccggtgcactgaccatgactctgcccaa

SEQ ID NO: 369754 - DNA, 55 bp, Artificial
  Synthetic oligonucleotide
cgatgcattatgatataacgtacgacactttgaagtcgaatgcacagaggatcgt

SEQ ID NO: 369755 - DNA, 55 bp, Artificial
  Synthetic oligonucleotide
cgatgccagagggttatataccgcgtcccggaaaagaccaaactcttgaagcgta

SEQ ID NO: 369756 - DNA, 57 bp, Artificial
  Synthetic oligonucleotide
cgatgccagctggaactgtttttcaaccaggatttccatgggaacacacattatcca

SEQ ID NO: 369757 - DNA, 55 bp, Artificial
  Synthetic oligonucleotide
cgatgccagtcagagcactatggccgctggccctttcagtctcacctatgccgcc

SEQ ID NO: 369758 - DNA, 57 bp, Artificial
  Synthetic oligonucleotide
cgatgccatttgtgtcagacccctcgttcccgaagctacgtccaataaagtgaccca

SEQ ID NO: 369759 - DNA, 55 bp, Artificial
  Synthetic oligonucleotide
cgatgcccaatgtcagtatttaccaatctaattcagagaggagccactactgtat

SEQ ID NO: 369760 - DNA, 60 bp, Artificial
  Synthetic oligonucleotide
cgatgcccatgtcccagtaggaccgttgcacaaaggcaaccaggtctgacacaacatcat

SEQ ID NO: 369761 - DNA, 54 bp, Artificial
  Synthetic oligonucleotide
cgatgccctggcgtgcccaggaccacagcgttgactgcctgacccgaagcgagg

SEQ ID NO: 369762 - DNA, 55 bp, Artificial
  Synthetic oligonucleotide
cgatgccgacgcatgggtgggttatagtaaacacgaagtttcctcacttcccatg

SEQ ID NO: 369763 - DNA, 56 bp, Artificial
  Synthetic oligonucleotide
cgatgccgccgttaacgtggttcgccgacaggtggatctcagtccggccaagccct

SEQ ID NO: 369764 - DNA, 55 bp, Artificial
  Synthetic oligonucleotide
cgatgccgcgtcagcgtataacttcaatgacacgacaagcctgttcaacttcggg

SEQ ID NO: 369765 - DNA, 60 bp, Artificial
  Synthetic oligonucleotide
cgatgccgcttgcaattggactcgaggagagcgttgcaacttggaggacagggatagatc

SEQ ID NO: 369766 - DNA, 55 bp, Artificial
  Synthetic oligonucleotide
cgatgcctaagcaattgtcatattgctcgcggacttcacggtcgcacgaggcgga

SEQ ID NO: 369767 - DNA, 55 bp, Artificial
  Synthetic oligonucleotide
cgatgcctacgtattcgaccctcacggtcgggaagacgtgcctcaggcgttcgta

SEQ ID NO: 369768 - DNA, 55 bp, Artificial
  Synthetic oligonucleotide
cgatgcgaggctattggctgcggggtactcatcgtacttgctaacccagactaca

SEQ ID NO: 369769 - DNA, 55 bp, Artificial
  Synthetic oligonucleotide
cgatgcgaggtttcaataaagccgtgctgtggaccaatgtcataacgtcgcaacg

SEQ ID NO: 369770 - DNA, 55 bp, Artificial
  Synthetic oligonucleotide
cgatgcgcaaagtgctattcagagtatttgcacgatgctttcttcagctactaac

SEQ ID NO: 369771 - DNA, 50 bp, Artificial
  Synthetic oligonucleotide
cgatgcgcgccccattgttctggatgagcgtcgggacggcagtgagacct

SEQ ID NO: 369772 - DNA, 58 bp, Artificial
  Synthetic oligonucleotide
cgatgcgcgcgtaggctctccttttacggttttactgtccaattatgaggacacgagc

SEQ ID NO: 369773 - DNA, 55 bp, Artificial
  Synthetic oligonucleotide
cgatgcgtgtatactgttgggctacatcgtcgggtagactttgttcctcggacca

SEQ ID NO: 369774 - DNA, 60 bp, Artificial
  Synthetic oligonucleotide
cgatgcgttcactctcacgattgaccaaccgtactcgcaaaacactatgttcggtatcgc

SEQ ID NO: 369775 - DNA, 60 bp, Artificial
  Synthetic oligonucleotide
cgatgcgttgcgctcaacactcaaccccagagtgtagcttaggctgatgagtctgggcac

SEQ ID NO: 369776 - DNA, 55 bp, Artificial
  Synthetic oligonucleotide
cgatgcgtttgacgacatgtctttatacattgggtgttctataacggcgtagggg

SEQ ID NO: 369777 - DNA, 60 bp, Artificial
  Synthetic oligonucleotide
cgatgctaaccactgcagtgacgccatgaacatcatgtttgaggaggtgttccgcacgga

SEQ ID NO: 369778 - DNA, 55 bp, Artificial
  Synthetic oligonucleotide
cgatgctacagcgacattatataccttgtgaacgtgtgtttggtattctccttgg

SEQ ID NO: 369779 - DNA, 51 bp, Artificial
  Synthetic oligonucleotide
cgatgctcggagaagataagcaatgtcgagtaatattgtgtcgaatatcta

SEQ ID NO: 369780 - DNA, 60 bp, Artificial
  Synthetic oligonucleotide
cgatgctgccccagtgggcatacatgcacatcgccggacaggatgcttcggagtacctga

SEQ ID NO: 369781 - DNA, 58 bp, Artificial
  Synthetic oligonucleotide
cgatggaaatcagaccagtgacgtccagactcaagactttaaaacggctgttcagccc

SEQ ID NO: 369782 - DNA, 55 bp, Artificial
  Synthetic oligonucleotide
cgatggaaattggggcgacatcaccaataaccccagaggatgtgattgagactcg

SEQ ID NO: 369783 - DNA, 55 bp, Artificial
  Synthetic oligonucleotide
cgatggaatttattgctgtgttcgcagagattctagtcacattttctgtcccact

SEQ ID NO: 369784 - DNA, 52 bp, Artificial
  Synthetic oligonucleotide
cgatggaattttcgagaactactttacgttccggggtgtttgtgcctacttc

SEQ ID NO: 369785 - DNA, 53 bp, Artificial
  Synthetic oligonucleotide
cgatggaccatttcaggaccggaaaaactgtcgatatactacaatccgacgcg

SEQ ID NO: 369786 - DNA, 60 bp, Artificial
  Synthetic oligonucleotide
cgatggactaaagacgcacgcaacacccaagaccacgtgcgctccctgtgtctgttggca

SEQ ID NO: 369787 - DNA, 56 bp, Artificial
  Synthetic oligonucleotide
cgatggactacttcaactctcgtacgagccagtggggaaagccggtcgttcaacaa

SEQ ID NO: 369788 - DNA, 60 bp, Artificial
  Synthetic oligonucleotide
cgatggactgcgcaacgtgtctaggaaactaaccatgcacaccgtcccagtatgtattct

SEQ ID NO: 369789 - DNA, 57 bp, Artificial
  Synthetic oligonucleotide
cgatggagacggacgggcgtatcgggagcgatatccctcggtcgacggattcttggc

SEQ ID NO: 369790 - DNA, 60 bp, Artificial
  Synthetic oligonucleotide
cgatggaggagtcactggttccaggaggctagtggacttgtcacacaggagacccagacg

SEQ ID NO: 369791 - DNA, 54 bp, Artificial
  Synthetic oligonucleotide
cgatggaggggccaatggctccatttcgactagagtattctactctacagtttg

SEQ ID NO: 369792 - DNA, 55 bp, Artificial
  Synthetic oligonucleotide
cgatggaggtcatgtgggcgtacgaacgagactacccgatcgcgctctggccgat

SEQ ID NO: 369793 - DNA, 54 bp, Artificial
  Synthetic oligonucleotide
cgatggaggtgtggtacgattttgatctgtttggtcgagttgggggttttggaa

SEQ ID NO: 369794 - DNA, 55 bp, Artificial
  Synthetic oligonucleotide
cgatggagtgggcaatgcctcgggagattggcattgcgattccacgtggatgggg

SEQ ID NO: 369795 - DNA, 58 bp, Artificial
  Synthetic oligonucleotide
cgatggatatgccgggtttatggatggtttcgatgttaacaatgccactggacccgtc

SEQ ID NO: 369796 - DNA, 55 bp, Artificial
  Synthetic oligonucleotide
cgatggattttggacaggtgttcaacatgtatgataatgagccaagtacagcgac

SEQ ID NO: 369797 - DNA, 60 bp, Artificial
  Synthetic oligonucleotide
cgatggcaagtccgcactaggcactactcttcaacatgggttcgagctttatgttcccac

SEQ ID NO: 369798 - DNA, 52 bp, Artificial
  Synthetic oligonucleotide
cgatggcactggaaagagggtctattaccttacccgtgaccctacaaccccc

SEQ ID NO: 369799 - DNA, 60 bp, Artificial
  Synthetic oligonucleotide
cgatggcagaccatgctgaggaattcctctctcgaggtactcgactcaatgatctgtttc

SEQ ID NO: 369800 - DNA, 57 bp, Artificial
  Synthetic oligonucleotide
cgatggcagtacaacaagtttgcagtaatcactcacggtaaaggtcactacagagtt

SEQ ID NO: 369801 - DNA, 58 bp, Artificial
  Synthetic oligonucleotide
cgatggccccgctcggttgtggggtgacattcattccatacacgaattggcggggagc

SEQ ID NO: 369802 - DNA, 60 bp, Artificial
  Synthetic oligonucleotide
cgatggccgacgcggcatgtcgcaaattcgcagcgcgttgcgtggtccggtcaacgtatc

SEQ ID NO: 369803 - DNA, 57 bp, Artificial
  Synthetic oligonucleotide
cgatggcggatatgaagttttacacacaggttgagttaacacccccccatctgttga

SEQ ID NO: 369804 - DNA, 51 bp, Artificial
  Synthetic oligonucleotide
cgatggcgttaacataggtattctggtcaatattaactgcagttgtggtat

SEQ ID NO: 369805 - DNA, 55 bp, Artificial
  Synthetic oligonucleotide
cgatggctatgataaagtgagtcatgatgaagggacatatggaactagtgtaacc

SEQ ID NO: 369806 - DNA, 60 bp, Artificial
  Synthetic oligonucleotide
cgatgggaaagcatggctgcatgtctgtattactgggcacgatagaaatgcaaccgctag

SEQ ID NO: 369807 - DNA, 55 bp, Artificial
  Synthetic oligonucleotide
cgatgggatatgaagatctgtgtacataggtggatctggaacaagccgccatctt

SEQ ID NO: 369808 - DNA, 59 bp, Artificial
  Synthetic oligonucleotide
cgatgggctacttagtacaatacggtggtggatggggcagcggacagataactctagag

SEQ ID NO: 369809 - DNA, 55 bp, Artificial
  Synthetic oligonucleotide
cgatggggaccaggtccggaatgagagggcacttggattcaaccggggactgacc

SEQ ID NO: 369810 - DNA, 56 bp, Artificial
  Synthetic oligonucleotide
cgatgggggaccaaacctgtacaatatccgaaatctccacatcccggaggtctgcc

SEQ ID NO: 369811 - DNA, 52 bp, Artificial
  Synthetic oligonucleotide
cgatggggtcaatcgtaagagctgctctatcagtacagttccggggggttgt

SEQ ID NO: 369812 - DNA, 60 bp, Artificial
  Synthetic oligonucleotide
cgatgggtgctccttcaaaactctaagtcaatgggtgaatgggtgcataatatatagtgt

SEQ ID NO: 369813 - DNA, 60 bp, Artificial
  Synthetic oligonucleotide
cgatgggtttgcagcctataccttgacgccccgacctattatccatgctgttgctcccga

SEQ ID NO: 369814 - DNA, 55 bp, Artificial
  Synthetic oligonucleotide
cgatggtaatttcttagtgaaacaggatgtagtggcaatgactgattggtcaggg

SEQ ID NO: 369815 - DNA, 60 bp, Artificial
  Synthetic oligonucleotide
cgatggtactgtttataaacctgtggatgttaaaattgaacatgcatatggaacttatga

SEQ ID NO: 369816 - DNA, 55 bp, Artificial
  Synthetic oligonucleotide
cgatggtagaaggtccatcagttaaatggttgattgatcaccagtacctagcgcc

SEQ ID NO: 369817 - DNA, 55 bp, Artificial
  Synthetic oligonucleotide
cgatggtcccgagtcacttgtgtgacaaatgaccaattaccaacgtgtgcaaatc

SEQ ID NO: 369818 - DNA, 55 bp, Artificial
  Synthetic oligonucleotide
cgatggtgcaacgtaaacgaattggatgacttgcctttatgcactgaacagactg

SEQ ID NO: 369819 - DNA, 55 bp, Artificial
  Synthetic oligonucleotide
cgatggttacgagaggagatcgactttcctgggacaacttcctacaggattttaa

SEQ ID NO: 369820 - DNA, 59 bp, Artificial
  Synthetic oligonucleotide
cgatggttaggtaaaaggatatctcagtttgatattggtcagtataaaaatatgctgaa

SEQ ID NO: 369821 - DNA, 51 bp, Artificial
  Synthetic oligonucleotide
cgatggttgcatactgctgaagctagccaagagggacgagccaagaaccct

SEQ ID NO: 369822 - DNA, 56 bp, Artificial
  Synthetic oligonucleotide
cgatggtttaattatcttagcacattatctagactttgctaacccatttccttgcc

SEQ ID NO: 369823 - DNA, 51 bp, Artificial
  Synthetic oligonucleotide
cgatgtaaaatctaacgtaaacaacgttcgaaacgttgacgacgacacgat

SEQ ID NO: 369824 - DNA, 55 bp, Artificial
  Synthetic oligonucleotide
cgatgtaaatcctcgttgctggacacgatagcggacgcgctcaattcggtcaagc

SEQ ID NO: 369825 - DNA, 60 bp, Artificial
  Synthetic oligonucleotide
cgatgtaagctatgagatagagtgcttactacaaagaacgctaatactgtggcgaaatgg

SEQ ID NO: 369826 - DNA, 59 bp, Artificial
  Synthetic oligonucleotide
cgatgtaagtgacgggcgtgtggggtgtgattaggtgagagagtatgtgtcgttagacc

SEQ ID NO: 369827 - DNA, 55 bp, Artificial
  Synthetic oligonucleotide
cgatgtaatatttcagctgatggccgtaatgcaacgaaggcggtacaatcccact

SEQ ID NO: 369828 - DNA, 59 bp, Artificial
  Synthetic oligonucleotide
cgatgtacgggtcaggagtgagtagtataactgaggggaccatggtatgtataggcgct

SEQ ID NO: 369829 - DNA, 55 bp, Artificial
  Synthetic oligonucleotide
cgatgtacttccgagcagcggtaagggtggtgcataatgccacctgcgcagtgca

SEQ ID NO: 369830 - DNA, 59 bp, Artificial
  Synthetic oligonucleotide
cgatgtaggacttaacatcagagctggacttagctccctggaagtttggatggaattgg

SEQ ID NO: 369831 - DNA, 55 bp, Artificial
  Synthetic oligonucleotide
cgatgtagttaagcctgaactccactgattcctaatattcggacaatattgttgc

SEQ ID NO: 369832 - DNA, 55 bp, Artificial
  Synthetic oligonucleotide
cgatgtataggttcacgtacatatcaaattgaggacgacgggtcgaaatcaacta

SEQ ID NO: 369833 - DNA, 60 bp, Artificial
  Synthetic oligonucleotide
cgatgtatgcaacaggagccataataggagatataagacaagcacattgtaacattagtg

SEQ ID NO: 369834 - DNA, 52 bp, Artificial
  Synthetic oligonucleotide
cgatgtatgcttgcaattaagtatttgcacgctgtccaagagggttaccccc

SEQ ID NO: 369835 - DNA, 53 bp, Artificial
  Synthetic oligonucleotide
cgatgtatggatggggagaactatcagcagaacatcgagatcaggatttgaaa

SEQ ID NO: 369836 - DNA, 60 bp, Artificial
  Synthetic oligonucleotide
cgatgtatggttaggtaggacagtgtcaactagtggtagatcgggctttgaaatcatcaa

SEQ ID NO: 369837 - DNA, 60 bp, Artificial
  Synthetic oligonucleotide
cgatgtatgtgagctcatacgcggggcctatcctaaaatccagaccacgagtcgtgtgct

SEQ ID NO: 369838 - DNA, 55 bp, Artificial
  Synthetic oligonucleotide
cgatgtcaagcagtactcagatttaaagtttgagacatgggatccgttagacaca

SEQ ID NO: 369839 - DNA, 60 bp, Artificial
  Synthetic oligonucleotide
cgatgtcaccgaagggtgtcaccgattcggctctctcaaacttgctcatgcaatcggtga

SEQ ID NO: 369840 - DNA, 55 bp, Artificial
  Synthetic oligonucleotide
cgatgtccatcttgagaaaattcctggcgttcccgtttccccatggcatgtgggg

SEQ ID NO: 369841 - DNA, 54 bp, Artificial
  Synthetic oligonucleotide
cgatgtccgtccatccctcccccccgagggtcgcccaggaatggcgggacctca

SEQ ID NO: 369842 - DNA, 55 bp, Artificial
  Synthetic oligonucleotide
cgatgtcgacgtacgagtcccggtggtacccgaacttggcgcgtgagaccttcag

SEQ ID NO: 369843 - DNA, 60 bp, Artificial
  Synthetic oligonucleotide
cgatgtcggctatgtattcaggggtggaagattatgatttcagtgacttcagggggcata

SEQ ID NO: 369844 - DNA, 55 bp, Artificial
  Synthetic oligonucleotide
cgatgtcgttaaccgtgaattctttactctggatctctattctgggtgctcggaa

SEQ ID NO: 369845 - DNA, 60 bp, Artificial
  Synthetic oligonucleotide
cgatgtcgttcactttgaagacttaaccagccattggcacgcattagggttagcgcaaga

SEQ ID NO: 369846 - DNA, 55 bp, Artificial
  Synthetic oligonucleotide
cgatgtcgttggtgcctacatcccaactaaagaaatgggtggaggtagcggactc

SEQ ID NO: 369847 - DNA, 60 bp, Artificial
  Synthetic oligonucleotide
cgatgtctacaaggcgctagacgaaatacctttctccgatgacgcgatgcttcccatccc

SEQ ID NO: 369848 - DNA, 60 bp, Artificial
  Synthetic oligonucleotide
cgatgtctgtcagcgaggctgcctccctcgctttggaggatttctgtgagcttgctcttg

SEQ ID NO: 369849 - DNA, 60 bp, Artificial
  Synthetic oligonucleotide
cgatgtcttctacagaccatcagaagtgagtgacaccctgctctgtgacatcggagagtc

SEQ ID NO: 369850 - DNA, 55 bp, Artificial
  Synthetic oligonucleotide
cgatgtcttgcaccaatttaccaaagtcagttcaacgcatccaacaacattgcaa

SEQ ID NO: 369851 - DNA, 55 bp, Artificial
  Synthetic oligonucleotide
cgatgtgatggtatttgatggagcgtatattgtatcaggtatttccgttggatac

SEQ ID NO: 369852 - DNA, 53 bp, Artificial
  Synthetic oligonucleotide
cgatgtgccagattatcagagtctacgaagtatcttagcaaacaatgggaaat

SEQ ID NO: 369853 - DNA, 60 bp, Artificial
  Synthetic oligonucleotide
cgatgtggcctcagaatcaggatcttcacatgatgactatgtggtcgctcactgataagg

SEQ ID NO: 369854 - DNA, 55 bp, Artificial
  Synthetic oligonucleotide
cgatgtggctccagtagggactggaggtaaatatatatccacaaactttgacgca

SEQ ID NO: 369855 - DNA, 54 bp, Artificial
  Synthetic oligonucleotide
cgatgttatagagaatgcgacgttgttgtcgatattatcatattcgtatgataa

SEQ ID NO: 369856 - DNA, 55 bp, Artificial
  Synthetic oligonucleotide
cgatgttatctcgaatccgatacagcaacgtcagtgatccaacttctgcaagctc

SEQ ID NO: 369857 - DNA, 55 bp, Artificial
  Synthetic oligonucleotide
cgatgttattcaaggggttgcaggctgttgagtcatatatggagaggtactcagc

SEQ ID NO: 369858 - DNA, 55 bp, Artificial
  Synthetic oligonucleotide
cgatgttccaaacgggggaaatttttccgagatgctgagtacctgacctcctcca

SEQ ID NO: 369859 - DNA, 54 bp, Artificial
  Synthetic oligonucleotide
cgatgttctctggcattaaaagtaccatcgacgcagctaaatctatagctacta

SEQ ID NO: 369860 - DNA, 55 bp, Artificial
  Synthetic oligonucleotide
cgatgttctgaagggaaagagaggcgggaaaccactctatctacgggcccgcatg

SEQ ID NO: 369861 - DNA, 55 bp, Artificial
  Synthetic oligonucleotide
cgatgttctgtgggaaatttcttgtgaaagtgcaggataggtacgagttcgttcc

SEQ ID NO: 369862 - DNA, 55 bp, Artificial
  Synthetic oligonucleotide
cgatgttcttatccgtggcttcgaatcgtggcgtcaaacccatcccttgtgctgc

SEQ ID NO: 369863 - DNA, 53 bp, Artificial
  Synthetic oligonucleotide
cgatgttgccacaaatttcccaggttgggttaggtttattgtgttttgtacac

SEQ ID NO: 369864 - DNA, 60 bp, Artificial
  Synthetic oligonucleotide
cgatgttgtgtgcagtaaattcgcgcatcatttgattgcaataacccgtggtgatctgat

SEQ ID NO: 369865 - DNA, 59 bp, Artificial
  Synthetic oligonucleotide
cgatgttgttgatggtgtaaaccataaacttgatgtgactacaaatacctgtacaatta

SEQ ID NO: 369866 - DNA, 51 bp, Artificial
  Synthetic oligonucleotide
cgattaaacaattctcaaatggtccgtacctagttaaaaatactattaaat

SEQ ID NO: 369867 - DNA, 60 bp, Artificial
  Synthetic oligonucleotide
cgattaaatacacagtgcatcgatcctgtaacaacgggtcaacactacttctcgagacgc

SEQ ID NO: 369868 - DNA, 58 bp, Artificial
  Synthetic oligonucleotide
cgattaaatccttgggattaggtgcgttggatttgtcttgctgtgacgaatccaacga

SEQ ID NO: 369869 - DNA, 60 bp, Artificial
  Synthetic oligonucleotide
cgattaacacgtcaatagcaatgggtaaatacgttcacaatacagcttgccaatggcagc

SEQ ID NO: 369870 - DNA, 60 bp, Artificial
  Synthetic oligonucleotide
cgattaacatcttgccatttgatggtcaatcgattactgaattagcattaaaagttgtag

SEQ ID NO: 369871 - DNA, 57 bp, Artificial
  Synthetic oligonucleotide
cgattaaccgccacgttcgccacactgtcaaactcagtccatttaccgcgtgaattc

SEQ ID NO: 369872 - DNA, 52 bp, Artificial
  Synthetic oligonucleotide
cgattaacctaagcggtaggggaattcccgtgattcctatagtagccggagg

SEQ ID NO: 369873 - DNA, 52 bp, Artificial
  Synthetic oligonucleotide
cgattaacttgtctgctggttcaccagcaaaccttaagttgatggctctcgc

SEQ ID NO: 369874 - DNA, 51 bp, Artificial
  Synthetic oligonucleotide
cgattaagacattgctatttgtggttactttaaaggttcgcttcacgctcg

SEQ ID NO: 369875 - DNA, 60 bp, Artificial
  Synthetic oligonucleotide
cgattaataacacgtatagctcgcagatgcacgctcggaggatgatacggtcgaagactg

SEQ ID NO: 369876 - DNA, 60 bp, Artificial
  Synthetic oligonucleotide
cgattaatgctaatgtaatttggaatgttccaagatgccatatagcaaatctaatcacaa

SEQ ID NO: 369877 - DNA, 55 bp, Artificial
  Synthetic oligonucleotide
cgattaattgatggcgagttttgtaattggttgctgctgtgcctggggactcccg

SEQ ID NO: 369878 - DNA, 51 bp, Artificial
  Synthetic oligonucleotide
cgattacagcagagacgcacctaaaatgtcgtcacttctgagtgttggagt

SEQ ID NO: 369879 - DNA, 58 bp, Artificial
  Synthetic oligonucleotide
cgattacattacctccctgttcatattaacatctcactatttaattagctgaaccgac

SEQ ID NO: 369880 - DNA, 55 bp, Artificial
  Synthetic oligonucleotide
cgattaccgacactcgtagggagatgacgactatgccgaccacagagcatggatc

SEQ ID NO: 369881 - DNA, 50 bp, Artificial
  Synthetic oligonucleotide
cgattacgatgaggcacaaaacaaattcactgaaagccttctgcaactac

SEQ ID NO: 369882 - DNA, 55 bp, Artificial
  Synthetic oligonucleotide
cgattacggctgtaaggatatcgtaatagacgagattgggctcctgccacccggt

SEQ ID NO: 369883 - DNA, 55 bp, Artificial
  Synthetic oligonucleotide
cgattactcgaaactgccaccaggttacattgaagcgctagttagcttctccacc

SEQ ID NO: 369884 - DNA, 58 bp, Artificial
  Synthetic oligonucleotide
cgattactgatcgcatggcgtactcgcagccatcgtaggtcgaccacgcaagccggga

SEQ ID NO: 369885 - DNA, 55 bp, Artificial
  Synthetic oligonucleotide
cgattacttcaatacccagaagcgtctatcaaaagaccatttaattcaaccgatg

SEQ ID NO: 369886 - DNA, 60 bp, Artificial
  Synthetic oligonucleotide
cgattagacaatctctggcagtccgcattttcttggttagcgagcttaagagaggccgca

SEQ ID NO: 369887 - DNA, 55 bp, Artificial
  Synthetic oligonucleotide
cgattagcaataatcgtatgactatgggcttgaatgacggattaacattgtcggg

SEQ ID NO: 369888 - DNA, 60 bp, Artificial
  Synthetic oligonucleotide
cgattaggaatctggccgctgagctgaacaggcttaacattgatgctgtacacacggggc

SEQ ID NO: 369889 - DNA, 55 bp, Artificial
  Synthetic oligonucleotide
cgattagtatgggcatgtgtaggccttgaaataggtagagggcagccattaggcg

SEQ ID NO: 369890 - DNA, 55 bp, Artificial
  Synthetic oligonucleotide
cgattagtcaccctcgtatactcagaagatgcatcaatttggatgtaatagcccc

SEQ ID NO: 369891 - DNA, 59 bp, Artificial
  Synthetic oligonucleotide
cgattagtccaatttgttaaagacaggatatcagtggtccaggctctagttttgactca

SEQ ID NO: 369892 - DNA, 58 bp, Artificial
  Synthetic oligonucleotide
cgattagttaatggtcttattggacctaatggtgttcgtgcaattgctaagtatattg

SEQ ID NO: 369893 - DNA, 58 bp, Artificial
  Synthetic oligonucleotide
cgattatagaccagacctataacgagttatttaaggacatggagctagtcaatggagt

SEQ ID NO: 369894 - DNA, 59 bp, Artificial
  Synthetic oligonucleotide
cgattatatacaggattaaaagactgttgaatatgattctggtatatctgatatgaatt

SEQ ID NO: 369895 - DNA, 55 bp, Artificial
  Synthetic oligonucleotide
cgattatatattgacgtgaatgcgtcactcggacaatgcccacaaatggtatcgc

SEQ ID NO: 369896 - DNA, 55 bp, Artificial
  Synthetic oligonucleotide
cgattatattaacgtgaatgtatcactcggacaatgtccacaaatggtatcgctg

SEQ ID NO: 369897 - DNA, 59 bp, Artificial
  Synthetic oligonucleotide
cgattatcaaccgaatgaactccatgagttcgaatggttggatagggatcgtggaggac

SEQ ID NO: 369898 - DNA, 59 bp, Artificial
  Synthetic oligonucleotide
cgattatcggttgaagaaccaccattctccattgtacgaacaagaatatcaggattata

SEQ ID NO: 369899 - DNA, 50 bp, Artificial
  Synthetic oligonucleotide
cgattatctgtaggtttgcgactaatcactaacccacgtattgctagacg

SEQ ID NO: 369900 - DNA, 55 bp, Artificial
  Synthetic oligonucleotide
cgattatctgtctagacttgttaatcagagcgtgcctcatcctaatgcgaagctc

SEQ ID NO: 369901 - DNA, 60 bp, Artificial
  Synthetic oligonucleotide
cgattatgagaataacatagtttatttacatgattattcatattatactaacaatgaaat

SEQ ID NO: 369902 - DNA, 57 bp, Artificial
  Synthetic oligonucleotide
cgattatgcgacatggcgctatcagagccgagatagcgacggggcaatgcctagaca

SEQ ID NO: 369903 - DNA, 54 bp, Artificial
  Synthetic oligonucleotide
cgattattaaggtcaagtgttaaacgtaaatatcgtaaggtatgttgactttgc

SEQ ID NO: 369904 - DNA, 57 bp, Artificial
  Synthetic oligonucleotide
cgattattaccgcaggatgcgggttgggaacccctacaggaggagtcgcgcgatata

SEQ ID NO: 369905 - DNA, 55 bp, Artificial
  Synthetic oligonucleotide
cgattattgccacggcagacgctcgtgggctgatccagtcatctagagcccacgc

SEQ ID NO: 369906 - DNA, 55 bp, Artificial
  Synthetic oligonucleotide
cgattattgctctcgtccgcgcccgttatgcgaacgggtcgcctgtttcaacggg

SEQ ID NO: 369907 - DNA, 55 bp, Artificial
  Synthetic oligonucleotide
cgattatttgcgaggcttaagtttgtgtcaaagattgggatgcgagtggcgcagt

SEQ ID NO: 369908 - DNA, 60 bp, Artificial
  Synthetic oligonucleotide
cgattcaaacatctgatgaggccaaatggtgccctcctgatcagttagtgaatatacatg

SEQ ID NO: 369909 - DNA, 55 bp, Artificial
  Synthetic oligonucleotide
cgattcaccatcattgttcgtctcttgcaggatagaatggaatgattcatcgatg

SEQ ID NO: 369910 - DNA, 60 bp, Artificial
  Synthetic oligonucleotide
cgattcactgcagcttccatggggcattcgatgggcctcatataagtatgcagagaggat

SEQ ID NO: 369911 - DNA, 55 bp, Artificial
  Synthetic oligonucleotide
cgattcagacaatggctggatcaagtagcaaacagacgaactctacgctgcgtcg

SEQ ID NO: 369912 - DNA, 58 bp, Artificial
  Synthetic oligonucleotide
cgattcagctgagaactgaaactgctgcaaccttgttgcccagtcgaatgggaaggat

SEQ ID NO: 369913 - DNA, 60 bp, Artificial
  Synthetic oligonucleotide
cgattcaggacaattgtttgtgggctctttcctgcacaaataatgcatagaaacatcata

SEQ ID NO: 369914 - DNA, 55 bp, Artificial
  Synthetic oligonucleotide
cgattcaggttgagatgacagggaacgtcaactatgtgtatgattctgagacggc

SEQ ID NO: 369915 - DNA, 60 bp, Artificial
  Synthetic oligonucleotide
cgattcaggttggatagaacttgatgaaataggagaagatgtagccccaatcgagcacat

SEQ ID NO: 369916 - DNA, 59 bp, Artificial
  Synthetic oligonucleotide
cgattcagtgctgaacgcatttatagacgttgagctagtcctacttaactcgggtagcg

SEQ ID NO: 369917 - DNA, 55 bp, Artificial
  Synthetic oligonucleotide
cgattcatacgagacaatggagagtaaagttcttcaaacgctaggagtcaatggg

SEQ ID NO: 369918 - DNA, 60 bp, Artificial
  Synthetic oligonucleotide
cgattcatatatagggatgattctacgacaacagacatcaaacacatgcgctgaattgtt

SEQ ID NO: 369919 - DNA, 58 bp, Artificial
  Synthetic oligonucleotide
cgattcatgaggcacaaggtggtacctatgaaaatgtgattttggtccgtttgcaacg

SEQ ID NO: 369920 - DNA, 55 bp, Artificial
  Synthetic oligonucleotide
cgattcatggcataagacgggtggaagcgctttagtatcttcacgtcctcagaca

SEQ ID NO: 369921 - DNA, 55 bp, Artificial
  Synthetic oligonucleotide
cgattcattagaagtaagtcatactagatcgataaatcaatgccggtcactctca

SEQ ID NO: 369922 - DNA, 59 bp, Artificial
  Synthetic oligonucleotide
cgattccaagttcttcgtagatttcaagctactgtaacgggaggtcagtatgcaagcaa

SEQ ID NO: 369923 - DNA, 55 bp, Artificial
  Synthetic oligonucleotide
cgattccaatcttgatttctgacacgcaagtgtctttggacacaatgcgttcggc

SEQ ID NO: 369924 - DNA, 55 bp, Artificial
  Synthetic oligonucleotide
cgattccaattgcatatcaggtatcacatcgaatccggatcttccaactataggt

SEQ ID NO: 369925 - DNA, 60 bp, Artificial
  Synthetic oligonucleotide
cgattccagaggttgagagagcctggtgtgctcccttggccgatgtggcttacatgttgt

SEQ ID NO: 369926 - DNA, 55 bp, Artificial
  Synthetic oligonucleotide
cgattccagtaacaacacagtctgcacaacttgtggtgatggcacttttacagcg

SEQ ID NO: 369927 - DNA, 59 bp, Artificial
  Synthetic oligonucleotide
cgattccagtcggaccagtttttccaccaggaatgaattggacagatctgatcactaat

SEQ ID NO: 369928 - DNA, 60 bp, Artificial
  Synthetic oligonucleotide
cgattcccaaaatgccggatgtgagcaccggtagcgtggacactaactctatgataacag

SEQ ID NO: 369929 - DNA, 57 bp, Artificial
  Synthetic oligonucleotide
cgattcccgagccgattcctgcgaacaaggtactgccggattggtacaagcaactcg

SEQ ID NO: 369930 - DNA, 55 bp, Artificial
  Synthetic oligonucleotide
cgattcccttggtcgttcgcaataatttctacgcggtcgttttgccagacgccga

SEQ ID NO: 369931 - DNA, 60 bp, Artificial
  Synthetic oligonucleotide
cgattccgttcaaatcacaacggaaacttcgatgcgtgatgcgaccaatgccatttatgg

SEQ ID NO: 369932 - DNA, 58 bp, Artificial
  Synthetic oligonucleotide
cgattcgaatggccagactgccaagtttggagatcttcggcccgaaaggttgagtagc

SEQ ID NO: 369933 - DNA, 60 bp, Artificial
  Synthetic oligonucleotide
cgattcgaattgactacgaccatgcgaagctgggccgtatgggattctgccacgcggtct

SEQ ID NO: 369934 - DNA, 59 bp, Artificial
  Synthetic oligonucleotide
cgattcgatacaacatggaccattatatgcagtatttttaccgttaaacatagttgcaa

SEQ ID NO: 369935 - DNA, 51 bp, Artificial
  Synthetic oligonucleotide
cgattcgcctaagacggtcaggatgagcgaatacctgaacaggttaaattc

SEQ ID NO: 369936 - DNA, 55 bp, Artificial
  Synthetic oligonucleotide
cgattcgcctttgaggctgcaccaggaactatagcacaatccctagaatggcatg

SEQ ID NO: 369937 - DNA, 55 bp, Artificial
  Synthetic oligonucleotide
cgattcggagtttctaggtgatacgttaatgatgaattttctactatgggtggtt

SEQ ID NO: 369938 - DNA, 55 bp, Artificial
  Synthetic oligonucleotide
cgattcgggtaagtactctattgcgtcgaaggatgcaaacacattcgtacttacg

SEQ ID NO: 369939 - DNA, 58 bp, Artificial
  Synthetic oligonucleotide
cgattctacgacagagcccaaaacaagactggatccagggttgtatccatggttgaaa

SEQ ID NO: 369940 - DNA, 60 bp, Artificial
  Synthetic oligonucleotide
cgattctactctaaagtgcgtcttcttggcctcactgtcgatcactcaactgtaggtgca

SEQ ID NO: 369941 - DNA, 52 bp, Artificial
  Synthetic oligonucleotide
cgattctaggggaattttaacatctatcctaatacatcctacaccttgcaca

SEQ ID NO: 369942 - DNA, 55 bp, Artificial
  Synthetic oligonucleotide
cgattctctcacaggaacttcagttaccaatggttcgtgtcctgctaaaacaact

SEQ ID NO: 369943 - DNA, 55 bp, Artificial
  Synthetic oligonucleotide
cgattctcttcgcattacggcctattataatgccggttgtgactgcgttcgctac

SEQ ID NO: 369944 - DNA, 55 bp, Artificial
  Synthetic oligonucleotide
cgattctgtcgtagcagtgactatgtctggatctatctgcttgggtggtgttgtg

SEQ ID NO: 369945 - DNA, 55 bp, Artificial
  Synthetic oligonucleotide
cgattcttctaaccctgctgtgcccgaccatagcacttcagaggatgtggatacc

SEQ ID NO: 369946 - DNA, 57 bp, Artificial
  Synthetic oligonucleotide
cgattgaagcgttagaaccatggatacgggccttaactgcgataacagaaggtgtct

SEQ ID NO: 369947 - DNA, 55 bp, Artificial
  Synthetic oligonucleotide
cgattgacagaccactgtctatcgattacaacctgggagttggtgacgttgaccg

SEQ ID NO: 369948 - DNA, 55 bp, Artificial
  Synthetic oligonucleotide
cgattgaccaaccgtactcgcaaaacactatgttcggtatcgcccaccaggcgac

SEQ ID NO: 369949 - DNA, 60 bp, Artificial
  Synthetic oligonucleotide
cgattgaccgattcctatggtactgcgcgaagcccatgtctcacctggatcaatagtgat

SEQ ID NO: 369950 - DNA, 55 bp, Artificial
  Synthetic oligonucleotide
cgattgagagttccaccccatacgtacaggcctttgcaggcgcagtaggggcaac

SEQ ID NO: 369951 - DNA, 60 bp, Artificial
  Synthetic oligonucleotide
cgattgagcacattgcaagcatgagaaggaattatttcacagcagaggtgtctcattgca

SEQ ID NO: 369952 - DNA, 60 bp, Artificial
  Synthetic oligonucleotide
cgattgagctagttagtactcctccggcccctgaatgcggctaatcctaactgcggagca

SEQ ID NO: 369953 - DNA, 60 bp, Artificial
  Synthetic oligonucleotide
cgattgagggccttccggtcatcaaattgcgacacgcgcggcagtatcaacacggaggtg

SEQ ID NO: 369954 - DNA, 60 bp, Artificial
  Synthetic oligonucleotide
cgattgatctctccttccagcaagcctgacgtctgcactactccagataactggtttgtc

SEQ ID NO: 369955 - DNA, 60 bp, Artificial
  Synthetic oligonucleotide
cgattgatgctagtgttgaaagagaggaagcgtataagagcgcttttgcgtattatgcaa

SEQ ID NO: 369956 - DNA, 60 bp, Artificial
  Synthetic oligonucleotide
cgattgatggaccactacccgaggataatgagccaagtggatatgcacaaacagactgtg

SEQ ID NO: 369957 - DNA, 55 bp, Artificial
  Synthetic oligonucleotide
cgattgattgtgtcagaactggcaacaatacaagaacaagtgtacgtataggacc

SEQ ID NO: 369958 - DNA, 60 bp, Artificial
  Synthetic oligonucleotide
cgattgcaaccggatactgcgccattgtatcaagtaaatataggaacattcggctccgtc

SEQ ID NO: 369959 - DNA, 55 bp, Artificial
  Synthetic oligonucleotide
cgattgcaacgtttctggctatttccgcgatcgcacaaaacactggttcaagtca

SEQ ID NO: 369960 - DNA, 55 bp, Artificial
  Synthetic oligonucleotide
cgattgccaacgtacacgttttgatgagcaaggacgcatcatctatccggagaac

SEQ ID NO: 369961 - DNA, 55 bp, Artificial
  Synthetic oligonucleotide
cgattgcgtctgtgggacaggaatacagtggactgtagcatttcacgttgaattg

SEQ ID NO: 369962 - DNA, 55 bp, Artificial
  Synthetic oligonucleotide
cgattgcgttcttagcgtttgtgcaaaattatacagacataacattttcagcgtc

SEQ ID NO: 369963 - DNA, 58 bp, Artificial
  Synthetic oligonucleotide
cgattgcgttctttgggccccaattattgaagccgaatcacctgggtctaagatggca

SEQ ID NO: 369964 - DNA, 60 bp, Artificial
  Synthetic oligonucleotide
cgattggaagtctctagctatgtatgtaccgactggtgagattccatcagttagtgacat

SEQ ID NO: 369965 - DNA, 55 bp, Artificial
  Synthetic oligonucleotide
cgattggaatgttaaagtcggcttaggcacgtttactggcgctaatcgcgactgc

SEQ ID NO: 369966 - DNA, 55 bp, Artificial
  Synthetic oligonucleotide
cgattggagatgaaacatctgtgacttcaccaggcgcgttacgtcgaatgacgtc

SEQ ID NO: 369967 - DNA, 51 bp, Artificial
  Synthetic oligonucleotide
cgattggatatgtgcaatatttggcgttaatgaaacattagcagaggcgtt

SEQ ID NO: 369968 - DNA, 52 bp, Artificial
  Synthetic oligonucleotide
cgattggcctcccttcctaacccgtccacctccttataataaagccactcct

SEQ ID NO: 369969 - DNA, 60 bp, Artificial
  Synthetic oligonucleotide
cgattggcgaagcattcagcctcggatggcaactcaaggcgcggtgcgcgtacggcaacc

SEQ ID NO: 369970 - DNA, 60 bp, Artificial
  Synthetic oligonucleotide
cgattgggagacagagcagcagctcgcatgctggatgcggcgccccatgcgcttctatcc

SEQ ID NO: 369971 - DNA, 56 bp, Artificial
  Synthetic oligonucleotide
cgattgggatcagtgtccctttgttgatctgccaccccgtctccaactgcttccac

SEQ ID NO: 369972 - DNA, 55 bp, Artificial
  Synthetic oligonucleotide
cgattgggtgagaacaaagacgtaatagtcacaagagagccttacgttagttgcg

SEQ ID NO: 369973 - DNA, 53 bp, Artificial
  Synthetic oligonucleotide
cgattgggtttacaacttactcttacgagaattcgtaggaagattagaaagac

SEQ ID NO: 369974 - DNA, 54 bp, Artificial
  Synthetic oligonucleotide
cgattggtctaagcgctccgctaagaagaagccggcgggtaccccttcacgccg

SEQ ID NO: 369975 - DNA, 55 bp, Artificial
  Synthetic oligonucleotide
cgattggtgcatttgctcgtgtaggccctcctactttactggagttgtaccagcg

SEQ ID NO: 369976 - DNA, 57 bp, Artificial
  Synthetic oligonucleotide
cgattggttgacgaggacgcacggactaatgaaaccgagcgcgctttaagtgacgag

SEQ ID NO: 369977 - DNA, 57 bp, Artificial
  Synthetic oligonucleotide
cgattgtatgggataccagtgttagacgaggttgagtggaaatacgtgtttgacggc

SEQ ID NO: 369978 - DNA, 55 bp, Artificial
  Synthetic oligonucleotide
cgattgtattttcgagaagcgtgtacaaatacgtggagttggagaggctaggcgc

SEQ ID NO: 369979 - DNA, 55 bp, Artificial
  Synthetic oligonucleotide
cgattgtcaagaaattcaaagggaataatagtggtcaaccttcaacagttgtcga

SEQ ID NO: 369980 - DNA, 55 bp, Artificial
  Synthetic oligonucleotide
cgattgtcagtgcagggacagatccaaattgattattcagcctgttcggatcagc

SEQ ID NO: 369981 - DNA, 55 bp, Artificial
  Synthetic oligonucleotide
cgattgtctagacgcctttccccgtacaggtctgaggcaagacctcgtcctagac

SEQ ID NO: 369982 - DNA, 55 bp, Artificial
  Synthetic oligonucleotide
cgattgtgagtcggctcgtcaagcctgcaagagtcctctcggctaacgccgccga

SEQ ID NO: 369983 - DNA, 55 bp, Artificial
  Synthetic oligonucleotide
cgattgtgcccttctcaacggcatggctgttgaaatgaagagaatgcaacaggat

SEQ ID NO: 369984 - DNA, 51 bp, Artificial
  Synthetic oligonucleotide
cgattgtggcagcgcactccagctttgaggcgacgtgcgactgaaccggac

SEQ ID NO: 369985 - DNA, 60 bp, Artificial
  Synthetic oligonucleotide
cgattgtgggtgtgcttacgagtatcattccaagaccgagagtgaagcttgcctttgccc

SEQ ID NO: 369986 - DNA, 55 bp, Artificial
  Synthetic oligonucleotide
cgattgttctagcagaatcacgagattcaggtaattatacaaccacgaaacaaca

SEQ ID NO: 369987 - DNA, 55 bp, Artificial
  Synthetic oligonucleotide
cgattgttggtggagcagtacatgtcgtacaacgaaaatgacgacacgagccaca

SEQ ID NO: 369988 - DNA, 56 bp, Artificial
  Synthetic oligonucleotide
cgatttaaatgacgtgcctgggttggcgcacccgagtttgacaaatactggagctt

SEQ ID NO: 369989 - DNA, 60 bp, Artificial
  Synthetic oligonucleotide
cgatttaacgatatcaatgctattcaggcttcgtggaaagtgcccgatacacaagtgagg

SEQ ID NO: 369990 - DNA, 53 bp, Artificial
  Synthetic oligonucleotide
cgatttaagagttgtctgctttacggacagggggaaccgctccatacggttta

SEQ ID NO: 369991 - DNA, 55 bp, Artificial
  Synthetic oligonucleotide
cgatttaagcgatgtattagctttatacaatcatgattacgccaatgtgctaggc

SEQ ID NO: 369992 - DNA, 59 bp, Artificial
  Synthetic oligonucleotide
cgatttaatcatctgtatgaaatctttacggtcctcagtcccaccaatgaaatctgaat

SEQ ID NO: 369993 - DNA, 55 bp, Artificial
  Synthetic oligonucleotide
cgatttaatcgtgggaacgaaaaagatgcccgtattcgaatgtgtaactgctggt

SEQ ID NO: 369994 - DNA, 55 bp, Artificial
  Synthetic oligonucleotide
cgatttacccatccaataacaacgtgtaccaagtggagatactcgaggcaccacc

SEQ ID NO: 369995 - DNA, 52 bp, Artificial
  Synthetic oligonucleotide
cgatttacgaaatcgggggaagccaccccccgagagtagtaactgagtgatt

SEQ ID NO: 369996 - DNA, 55 bp, Artificial
  Synthetic oligonucleotide
cgatttacgaacataactcaaaatatggcaaggcagctagatatcgcactggccg

SEQ ID NO: 369997 - DNA, 58 bp, Artificial
  Synthetic oligonucleotide
cgatttagaatcacgcactccccctgccctcttataggagtgctaaatgggctgggcc

SEQ ID NO: 369998 - DNA, 60 bp, Artificial
  Synthetic oligonucleotide
cgatttagcgccctgaatgttcggatggaaatgtgatgatcgggatggggaaatgagatc

SEQ ID NO: 369999 - DNA, 52 bp, Artificial
  Synthetic oligonucleotide
cgatttagtattctgtgggcgcttacgtgcgttaaggcacctgattttgcgg

SEQ ID NO: 370000 - DNA, 57 bp, Artificial
  Synthetic oligonucleotide
cgatttagtgaattggaaaactgttcgcctacccctctctacgctccgagacactga

SEQ ID NO: 370001 - DNA, 55 bp, Artificial
  Synthetic oligonucleotide
cgatttataacaagcgtatttggactgagcgattactttcaatggactagtgacg

SEQ ID NO: 370002 - DNA, 55 bp, Artificial
  Synthetic oligonucleotide
cgatttatatttaaatgtacagcagctgatcgagcggtgttcgatagaatggtat

SEQ ID NO: 370003 - DNA, 55 bp, Artificial
  Synthetic oligonucleotide
cgatttatgagcttatcgagcgccatgccgcaagcaagtgggagctttgatcgta

SEQ ID NO: 370004 - DNA, 50 bp, Artificial
  Synthetic oligonucleotide
cgatttatgatagtgcgaaaaattcagactcaacggtaactccagaaatt

SEQ ID NO: 370005 - DNA, 54 bp, Artificial
  Synthetic oligonucleotide
cgatttcaacaatcagttttatgcagcacacttgaaaggtccatggacggttgg

SEQ ID NO: 370006 - DNA, 60 bp, Artificial
  Synthetic oligonucleotide
cgatttcaatgagtttaggctcgtaggataagtgttgactagaacatgtctctcgtgtta

SEQ ID NO: 370007 - DNA, 55 bp, Artificial
  Synthetic oligonucleotide
cgatttcagagaactcaataagaggactcaagacttctgggaggtccaattagga

SEQ ID NO: 370008 - DNA, 60 bp, Artificial
  Synthetic oligonucleotide
cgatttcagagcatctatgcatatgctaacatccaatttaactttcactgtatattccga

SEQ ID NO: 370009 - DNA, 60 bp, Artificial
  Synthetic oligonucleotide
cgatttcagctcaacaagattgttgacagcttgattcagatccctaagacgctttaggtc

SEQ ID NO: 370010 - DNA, 57 bp, Artificial
  Synthetic oligonucleotide
cgatttcaggcaactgttactggtggccagtatgcgagcaaggagcaagcaatagtt

SEQ ID NO: 370011 - DNA, 58 bp, Artificial
  Synthetic oligonucleotide
cgatttccactcattcgtgctgcctagaataggcagtaacacattggagatcgggctg

SEQ ID NO: 370012 - DNA, 55 bp, Artificial
  Synthetic oligonucleotide
cgatttccgtcaattatctacatcatgaaaccactcttacgatcgcacgaaacac

SEQ ID NO: 370013 - DNA, 55 bp, Artificial
  Synthetic oligonucleotide
cgatttccgtttttcgattaatttgtggtatctgtacatgttggcctgttattta

SEQ ID NO: 370014 - DNA, 55 bp, Artificial
  Synthetic oligonucleotide
cgatttctagatgattctacggaattagtctttcaaatatctcggcggcattcga

SEQ ID NO: 370015 - DNA, 57 bp, Artificial
  Synthetic oligonucleotide
cgatttcttcgacggagtggagaatccggcggccatgcagccaccaggagggttggt

SEQ ID NO: 370016 - DNA, 60 bp, Artificial
  Synthetic oligonucleotide
cgatttctttagctgcgccgtctttagcagctgcccacactgtcctataagttgctctcc

SEQ ID NO: 370017 - DNA, 55 bp, Artificial
  Synthetic oligonucleotide
cgatttgaaacttttgtgactctggtggtttatggtgacgataacctcattgcag

SEQ ID NO: 370018 - DNA, 57 bp, Artificial
  Synthetic oligonucleotide
cgatttgacgattatacacctaatgagccatctctcggttaacgttacaggaactaa

SEQ ID NO: 370019 - DNA, 60 bp, Artificial
  Synthetic oligonucleotide
cgatttgagataatcgaagggagagatcgtacaatggcttggacagtggtaaatagcatt

SEQ ID NO: 370020 - DNA, 55 bp, Artificial
  Synthetic oligonucleotide
cgatttgcatgttttacattgacggcgaagtacgagatgaggctggcgtgcggtc

SEQ ID NO: 370021 - DNA, 58 bp, Artificial
  Synthetic oligonucleotide
cgatttgcccacatttacaaggcttctacaaatcttcggcatacgtggctttcttgta

SEQ ID NO: 370022 - DNA, 55 bp, Artificial
  Synthetic oligonucleotide
cgatttgccgactaaaccttcatcgcccagtaaccaatctagacccaagtcgcca

SEQ ID NO: 370023 - DNA, 55 bp, Artificial
  Synthetic oligonucleotide
cgatttgcttcgtgatctcataggtgtgattcgtgcgaagagctatgtcgaagcg

SEQ ID NO: 370024 - DNA, 56 bp, Artificial
  Synthetic oligonucleotide
cgatttgggctgagaagccttacaattactattaatacattcttggaccgtagtcc

SEQ ID NO: 370025 - DNA, 54 bp, Artificial
  Synthetic oligonucleotide
cgatttgggttttagccttacagctaccggtaaatccgcaagtagtgtgggatg

SEQ ID NO: 370026 - DNA, 50 bp, Artificial
  Synthetic oligonucleotide
cgatttgtcaccgcccagatacgttgcggcgtccacgccaagactcgtga

SEQ ID NO: 370027 - DNA, 50 bp, Artificial
  Synthetic oligonucleotide
cgattttaaagatagttttcgttcttggcctaaattgtgttatgatagta

SEQ ID NO: 370028 - DNA, 55 bp, Artificial
  Synthetic oligonucleotide
cgattttaacgctaaatatgaagacgatgttggacctctgtatgtgtacgcagcg

SEQ ID NO: 370029 - DNA, 55 bp, Artificial
  Synthetic oligonucleotide
cgattttaagaacttcttcttggtatagaagggatggagaatttgagttcgacta

SEQ ID NO: 370030 - DNA, 56 bp, Artificial
  Synthetic oligonucleotide
cgattttaagttcaattaagagggggatgtttgttgtcactagtgtgcaagtgctt

SEQ ID NO: 370031 - DNA, 56 bp, Artificial
  Synthetic oligonucleotide
cgattttacatacggcacgtgttgaagcgtgttttatcggtagataaagacacgac

SEQ ID NO: 370032 - DNA, 58 bp, Artificial
  Synthetic oligonucleotide
cgattttagaatgtattcctcacatgtacaacataactctattcgtatttctttcatt

SEQ ID NO: 370033 - DNA, 60 bp, Artificial
  Synthetic oligonucleotide
cgattttagcgagatgatcgttataaatagcgattaaaatgaactgatcgtatatattag

SEQ ID NO: 370034 - DNA, 55 bp, Artificial
  Synthetic oligonucleotide
cgattttcatgcatttgcccatcagtttgaccattttctgttctaagaaggttgg

SEQ ID NO: 370035 - DNA, 56 bp, Artificial
  Synthetic oligonucleotide
cgattttccacagccctgagttggctagactacttagctaccaactccataacgtg

SEQ ID NO: 370036 - DNA, 60 bp, Artificial
  Synthetic oligonucleotide
cgattttgaggacttaatgcttactgatcaggtattcatgcatagggatatgctgcccga

SEQ ID NO: 370037 - DNA, 55 bp, Artificial
  Synthetic oligonucleotide
cgattttggactacttggaacgactctattaaatttagacgctaactatgttgaa

SEQ ID NO: 370038 - DNA, 59 bp, Artificial
  Synthetic oligonucleotide
cgattttgtgatagcttacaagggcactttgtacccttgttatgttgatgcaattagga

SEQ ID NO: 370039 - DNA, 60 bp, Artificial
  Synthetic oligonucleotide
cgattttgttgctcatattaacagtgtggcggctcgtgttggacgtccttcagacaatca

SEQ ID NO: 370040 - DNA, 57 bp, Artificial
  Synthetic oligonucleotide
cgcaaaaaacgcccgacacaaaagctttgacacacacttgtgttccacgctctcaac

SEQ ID NO: 370041 - DNA, 55 bp, Artificial
  Synthetic oligonucleotide
cgcaaaaagagtaaaacgggcttctgaacaagacctttatagaagttgtgcacta

SEQ ID NO: 370042 - DNA, 57 bp, Artificial
  Synthetic oligonucleotide
cgcaaaaagatagtactgactcagtggaacccccagactaccagaaaatgtataata

SEQ ID NO: 370043 - DNA, 57 bp, Artificial
  Synthetic oligonucleotide
cgcaaaaatactactcgcgtgatttcgtgaacattctgcgtactaaaacattctcat

SEQ ID NO: 370044 - DNA, 58 bp, Artificial
  Synthetic oligonucleotide
cgcaaaacagttactgttttgccgtcatgtcgattgttacaatcgacctgaccaaaca

SEQ ID NO: 370045 - DNA, 55 bp, Artificial
  Synthetic oligonucleotide
cgcaaaaccaactttgagacaaatcatgcaccatttctcagatgcagcagaagct

SEQ ID NO: 370046 - DNA, 58 bp, Artificial
  Synthetic oligonucleotide
cgcaaaaccagattcctaccggtagcaggcggaacaagcagtgtgtacattgaggtat

SEQ ID NO: 370047 - DNA, 58 bp, Artificial
  Synthetic oligonucleotide
cgcaaaaccagattcttaccagtagccggcgggacaagcagtgtgtacatcgaggtat

SEQ ID NO: 370048 - DNA, 55 bp, Artificial
  Synthetic oligonucleotide
cgcaaaacccacatttaggcaaataatgcaccatttcagtgatgtggctgtcgca

SEQ ID NO: 370049 - DNA, 59 bp, Artificial
  Synthetic oligonucleotide
cgcaaaacgaaaatggaggacagccatgccaagtgtcgatcgatggggtaaacatctta

SEQ ID NO: 370050 - DNA, 57 bp, Artificial
  Synthetic oligonucleotide
cgcaaaacgagatttctcccggttgctggtggaacaagcagtgtgtacattgaagtt

SEQ ID NO: 370051 - DNA, 56 bp, Artificial
  Synthetic oligonucleotide
cgcaaaacgtccccaagctcgtagcaccgaccctatacccatctctagggtcttca

SEQ ID NO: 370052 - DNA, 55 bp, Artificial
  Synthetic oligonucleotide
cgcaaaactatggcatgtacttaccaatcacgggatcaatggatgccgcttacgt

SEQ ID NO: 370053 - DNA, 57 bp, Artificial
  Synthetic oligonucleotide
cgcaaaactttacacctggttgctatcgcacactaaacctatttagatacaaaagca

SEQ ID NO: 370054 - DNA, 52 bp, Artificial
  Synthetic oligonucleotide
cgcaaaagacccgccccttccggggaaggctatataagcccgaccaagaagc

SEQ ID NO: 370055 - DNA, 54 bp, Artificial
  Synthetic oligonucleotide
cgcaaaagcgcagtttctatgaaaacctccatactatcgttaaacccccaccag

SEQ ID NO: 370056 - DNA, 55 bp, Artificial
  Synthetic oligonucleotide
cgcaaaagctgtgtatcgtcctaaattgatgaaggagataatacatgagcaacca

SEQ ID NO: 370057 - DNA, 55 bp, Artificial
  Synthetic oligonucleotide
cgcaaaaggtttcactgagaacactaaatatgctgctttcgacactttcgatgcg

SEQ ID NO: 370058 - DNA, 55 bp, Artificial
  Synthetic oligonucleotide
cgcaaaagtccgtgatgcacaaactcgattgcagatgtcggcaggcgaagcgcca

SEQ ID NO: 370059 - DNA, 60 bp, Artificial
  Synthetic oligonucleotide
cgcaaaagtggaatgatggaggaggctattaagcaatctgctttgattaactcggagagg

SEQ ID NO: 370060 - DNA, 60 bp, Artificial
  Synthetic oligonucleotide
cgcaaaatgagttctttgatggacatttgtatcggacactcggtagtataatcgccatgg

SEQ ID NO: 370061 - DNA, 59 bp, Artificial
  Synthetic oligonucleotide
cgcaaaatgggtcctctgatgaacatttgtatcggaaactcgataatagagtttccatg

SEQ ID NO: 370062 - DNA, 55 bp, Artificial
  Synthetic oligonucleotide
cgcaaaatgtaacacccctacaatggattcagacaagattgtgtttaaagtccgc

SEQ ID NO: 370063 - DNA, 59 bp, Artificial
  Synthetic oligonucleotide
cgcaaaattatggcatgtatttaccaataacgggatcactagacgctgtatacacaaat

SEQ ID NO: 370064 - DNA, 59 bp, Artificial
  Synthetic oligonucleotide
cgcaaaattcacctctgatgaacaatccagggtttcagctacagctcttaaagcgttag

SEQ ID NO: 370065 - DNA, 55 bp, Artificial
  Synthetic oligonucleotide
cgcaaaattccagatcccgaagggtacagcccagctttacgcgggggatgactcg

SEQ ID NO: 370066 - DNA, 51 bp, Artificial
  Synthetic oligonucleotide
cgcaaaattcttcctaacggggggggcgtgtatacccccgtgacaacttga

SEQ ID NO: 370067 - DNA, 54 bp, Artificial
  Synthetic oligonucleotide
cgcaaaatttgacaaattttggcctgtgtatacgggtgttttattcttcgagct

SEQ ID NO: 370068 - DNA, 59 bp, Artificial
  Synthetic oligonucleotide
cgcaaacaccttacaattcggcgcgtatgtagacatttacgatttgagcacaccacaac

SEQ ID NO: 370069 - DNA, 60 bp, Artificial
  Synthetic oligonucleotide
cgcaaacagcaattgcctgataaggttctatcacaaaaggaggagataattacagatgca

SEQ ID NO: 370070 - DNA, 55 bp, Artificial
  Synthetic oligonucleotide
cgcaaacagtatttgcacctttaccccgtttctcggcaacgggctggtctgtgcc

SEQ ID NO: 370071 - DNA, 55 bp, Artificial
  Synthetic oligonucleotide
cgcaaacatcatagactcatatgataacggcaaacgagacggtacgaagactgcg

SEQ ID NO: 370072 - DNA, 55 bp, Artificial
  Synthetic oligonucleotide
cgcaaacattggcttcctccaaacagatcttctccagtagcacgacgacacgtac

SEQ ID NO: 370073 - DNA, 53 bp, Artificial
  Synthetic oligonucleotide
cgcaaacccaaaataatacgcaccctggtcactttctttaacgtgtccgtgtc

SEQ ID NO: 370074 - DNA, 55 bp, Artificial
  Synthetic oligonucleotide
cgcaaaccccacatggagttcgtgcactgctagacatcacttcgataactagaca

SEQ ID NO: 370075 - DNA, 53 bp, Artificial
  Synthetic oligonucleotide
cgcaaacccggttattactttatcagcgtagaccctgcttcgggtagagggga

SEQ ID NO: 370076 - DNA, 55 bp, Artificial
  Synthetic oligonucleotide
cgcaaacctcttccacacaaacaccgtggcgcacatctacacgacggacacggac

SEQ ID NO: 370077 - DNA, 54 bp, Artificial
  Synthetic oligonucleotide
cgcaaacgcgggaccaaacttatcgtgaagaggggtcgactcgtaatacgccaa

SEQ ID NO: 370078 - DNA, 57 bp, Artificial
  Synthetic oligonucleotide
cgcaaacggcaagcgccgtaagcgtaatcgaaggaatcgcaatccgcagacggttcc

SEQ ID NO: 370079 - DNA, 55 bp, Artificial
  Synthetic oligonucleotide
cgcaaacgtaacaataaacggtgtgagtcatgctatcccctatagtttcaccccg

SEQ ID NO: 370080 - DNA, 52 bp, Artificial
  Synthetic oligonucleotide
cgcaaactagagtacagcggattggctgacagtacccacctacccgaacccc

SEQ ID NO: 370081 - DNA, 55 bp, Artificial
  Synthetic oligonucleotide
cgcaaactctcgttaaccaacaaggcgttaatagccgatgtacaattgtcggaat

SEQ ID NO: 370082 - DNA, 52 bp, Artificial
  Synthetic oligonucleotide
cgcaaactgacccccccgtttttaaggctgttaatagcttcgaacgtgctcc

SEQ ID NO: 370083 - DNA, 56 bp, Artificial
  Synthetic oligonucleotide
cgcaaactggcggccatcaacccaaacttcgacgaactcaccaactttcgtctcac

SEQ ID NO: 370084 - DNA, 55 bp, Artificial
  Synthetic oligonucleotide
cgcaaagatcttccttggagtcttaggcatcatgagacttacgggtgagggaccg

SEQ ID NO: 370085 - DNA, 52 bp, Artificial
  Synthetic oligonucleotide
cgcaaagattgcatggcattcttatcgcctctgcgcagtgatgttattggtg

SEQ ID NO: 370086 - DNA, 51 bp, Artificial
  Synthetic oligonucleotide
cgcaaagattggggccaagaattccataagaattgaaatcgtggatgagcg

SEQ ID NO: 370087 - DNA, 55 bp, Artificial
  Synthetic oligonucleotide
cgcaaagcatgacgacgtgttagatcgttggtacatcttccgcatctggcacaca

SEQ ID NO: 370088 - DNA, 55 bp, Artificial
  Synthetic oligonucleotide
cgcaaagccacacgctctcagaaaatcctactgcaaccaggccttgtagatcagg

SEQ ID NO: 370089 - DNA, 55 bp, Artificial
  Synthetic oligonucleotide
cgcaaagcctcacaagtcgtcgatgtcgatgtctacttcgatgaaaccaacggcg

SEQ ID NO: 370090 - DNA, 55 bp, Artificial
  Synthetic oligonucleotide
cgcaaaggatctcaccataccctacaggaatgatccggtgtcggataatacaggt

SEQ ID NO: 370091 - DNA, 54 bp, Artificial
  Synthetic oligonucleotide
cgcaaaggtgagtcgccgtttgaattactcccctcgtgggggatatgggccgaa

SEQ ID NO: 370092 - DNA, 55 bp, Artificial
  Synthetic oligonucleotide
cgcaaaggttacaggtggacagtatgcgagtaacgagcaggcgttagtgaagcgt

SEQ ID NO: 370093 - DNA, 59 bp, Artificial
  Synthetic oligonucleotide
cgcaaaggttctttgcacagaggtataacagttgatcaactgtttgttgtatggttgag

SEQ ID NO: 370094 - DNA, 60 bp, Artificial
  Synthetic oligonucleotide
cgcaaagtaaggtcacacacaccctcacgcaccgcatggttcaatacagcgacgtcgcac

SEQ ID NO: 370095 - DNA, 53 bp, Artificial
  Synthetic oligonucleotide
cgcaaagtacaaagcacctgttcaaatacgttgcccgccaattcttattacta

SEQ ID NO: 370096 - DNA, 60 bp, Artificial
  Synthetic oligonucleotide
cgcaaagtccaaaccagacaaaagtgcccttgtgtcattgagcacatctgccttgacggt

SEQ ID NO: 370097 - DNA, 55 bp, Artificial
  Synthetic oligonucleotide
cgcaaagtgcccacgcaaagcctagtaacactttgaaaggtctatggttggtcgt

SEQ ID NO: 370098 - DNA, 58 bp, Artificial
  Synthetic oligonucleotide
cgcaaagttacatcgaaaaagtttggactcaactcgtatgaaatagcatcgtagctta

SEQ ID NO: 370099 - DNA, 60 bp, Artificial
  Synthetic oligonucleotide
cgcaaagttctaaaactatgcagatgggctagcgacccagctcttccattgatgttaagc

SEQ ID NO: 370100 - DNA, 55 bp, Artificial
  Synthetic oligonucleotide
cgcaaagttgagttcgcagccgtattgtcaaataaagatcggaagagtgatagcc

SEQ ID NO: 370101 - DNA, 50 bp, Artificial
  Synthetic oligonucleotide
cgcaaataacgatcaaaagataaccttaggtgaaatccgaacgatggacc

SEQ ID NO: 370102 - DNA, 58 bp, Artificial
  Synthetic oligonucleotide
cgcaaataagtggcatcctctattaatttctacagaaaagggcttgagagttattgcg

SEQ ID NO: 370103 - DNA, 55 bp, Artificial
  Synthetic oligonucleotide
cgcaaatagcacctacctgctatattcgtcggtggctgacgcacagcaggacaat

SEQ ID NO: 370104 - DNA, 51 bp, Artificial
  Synthetic oligonucleotide
cgcaaatagtctttgacggtcacctattcccgacccggttttccccacgcc

SEQ ID NO: 370105 - DNA, 59 bp, Artificial
  Synthetic oligonucleotide
cgcaaatatctagcgttagcagaagtctgcggttacgtgaattcactacacaagctgac

SEQ ID NO: 370106 - DNA, 55 bp, Artificial
  Synthetic oligonucleotide
cgcaaatatgcatttgctggatactcaaaagcagcgatttaaggtcctgggacca

SEQ ID NO: 370107 - DNA, 60 bp, Artificial
  Synthetic oligonucleotide
cgcaaatatgtatctagctagcctaaccatgatggaacagagtaagaagatattgtccaa

SEQ ID NO: 370108 - DNA, 57 bp, Artificial
  Synthetic oligonucleotide
cgcaaatattgggaagatcagcacccaggggaaaaggccaacagacttgggacaatg

SEQ ID NO: 370109 - DNA, 55 bp, Artificial
  Synthetic oligonucleotide
cgcaaatccaaacgaggagatcattcgagctgaagaagctatgggagcagacccg

SEQ ID NO: 370110 - DNA, 55 bp, Artificial
  Synthetic oligonucleotide
cgcaaatccacaagtattagatgcagtagttaatatcataactggaagcccaact

SEQ ID NO: 370111 - DNA, 52 bp, Artificial
  Synthetic oligonucleotide
cgcaaatccagattgtaagaccattttaaaggcgttgggaccaggggcttca

SEQ ID NO: 370112 - DNA, 58 bp, Artificial
  Synthetic oligonucleotide
cgcaaatccaggaaccataactggctcagctgtgggatgcaacccggatacattctgg

SEQ ID NO: 370113 - DNA, 55 bp, Artificial
  Synthetic oligonucleotide
cgcaaatccgttttaatcaacgaagttaacgagacactgggagctggttcttcag

SEQ ID NO: 370114 - DNA, 50 bp, Artificial
  Synthetic oligonucleotide
cgcaaatggtcagggacaaagtcgttaagaccttgggtcagtggccaagt

SEQ ID NO: 370115 - DNA, 55 bp, Artificial
  Synthetic oligonucleotide
cgcaaatggtgatgatctcctcatagctgtgcgtccagattgtgaattcgtgctc

SEQ ID NO: 370116 - DNA, 60 bp, Artificial
  Synthetic oligonucleotide
cgcaaattgaggcagggaagagacttgtatttatgagtcctgctccctacgttgcaaata

SEQ ID NO: 370117 - DNA, 56 bp, Artificial
  Synthetic oligonucleotide
cgcaaatttcctttctaggcacccattatgtttatctgaaaaaacattgtatggaa

SEQ ID NO: 370118 - DNA, 60 bp, Artificial
  Synthetic oligonucleotide
cgcaaatttctgtaaagctgttgacttctgtccacctcagatctccaatcctcccaagaa

SEQ ID NO: 370119 - DNA, 60 bp, Artificial
  Synthetic oligonucleotide
cgcaaatttgctgcaaacaatacgagtaatcaagatcttgtacgacagcagtaagtactc

SEQ ID NO: 370120 - DNA, 54 bp, Artificial
  Synthetic oligonucleotide
cgcaacaacacctgtgtgcgagtatgatggcaacatggtctccgggtataagaa

SEQ ID NO: 370121 - DNA, 55 bp, Artificial
  Synthetic oligonucleotide
cgcaacaagagatatgtacagaatacataaggggaggattaccagctatgcaaac

SEQ ID NO: 370122 - DNA, 55 bp, Artificial
  Synthetic oligonucleotide
cgcaacaagttttggctcacaagctggcctaaaaccttgtacaggttcctagact

SEQ ID NO: 370123 - DNA, 55 bp, Artificial
  Synthetic oligonucleotide
cgcaacacaccatcgcatgccaaaccagatgcaaaataactggccatttgctctc

SEQ ID NO: 370124 - DNA, 54 bp, Artificial
  Synthetic oligonucleotide
cgcaacaccttgaagtgtaacctcgtcacgtttgaaaataggaatttcaacgcc

SEQ ID NO: 370125 - DNA, 57 bp, Artificial
  Synthetic oligonucleotide
cgcaacactacggtgttagacacgacaacaacgttacagtctagcggatttggtcgc

SEQ ID NO: 370126 - DNA, 60 bp, Artificial
  Synthetic oligonucleotide
cgcaacagcgtacggtgcataattcctagatgcagcttcagctgtgagtaggagttttgc

SEQ ID NO: 370127 - DNA, 60 bp, Artificial
  Synthetic oligonucleotide
cgcaacagctgaaaaattggtgatcactgatgtagttgacggcgtgaatcacaaactaga

SEQ ID NO: 370128 - DNA, 55 bp, Artificial
  Synthetic oligonucleotide
cgcaacagggagattgcccaccaatagagcttgtaaattcatacattcaagatgg

SEQ ID NO: 370129 - DNA, 55 bp, Artificial
  Synthetic oligonucleotide
cgcaacaggtccagtttaaaggcgcacttgtcgttaaacaggctggacatgcgtg

SEQ ID NO: 370130 - DNA, 60 bp, Artificial
  Synthetic oligonucleotide
cgcaacagtctcagagtcttccatcattttacctgaagggaagggatctttctggataca

SEQ ID NO: 370131 - DNA, 58 bp, Artificial
  Synthetic oligonucleotide
cgcaacagtggacctgcaagagagccccttataggggatatggttgagttttatgagg

SEQ ID NO: 370132 - DNA, 55 bp, Artificial
  Synthetic oligonucleotide
cgcaacagtttgaacacatagtcccactacgtagagtgttgactaccgctacaat

SEQ ID NO: 370133 - DNA, 58 bp, Artificial
  Synthetic oligonucleotide
cgcaacatccctgtcacctggaacctcttttcgacctttgacatgatgacatatggcg

SEQ ID NO: 370134 - DNA, 53 bp, Artificial
  Synthetic oligonucleotide
cgcaacatcggaaaagatacagttaacgcacaacgtcccaaagttgagcgaag

SEQ ID NO: 370135 - DNA, 56 bp, Artificial
  Synthetic oligonucleotide
cgcaacatctaccggagttgtgtcctagccctttaagactagtggatgggcaaact

SEQ ID NO: 370136 - DNA, 55 bp, Artificial
  Synthetic oligonucleotide
cgcaacatggtactcatacaaagcaaaacgctctatcactcggtacataaaaccc

SEQ ID NO: 370137 - DNA, 55 bp, Artificial
  Synthetic oligonucleotide
cgcaacattccgcaaattcaataagcaaactgaaggtcgattcaacaagtcccac

SEQ ID NO: 370138 - DNA, 55 bp, Artificial
  Synthetic oligonucleotide
cgcaacattggaattgagtgtgaaacgccaaatatggacataattgggaaacgga

SEQ ID NO: 370139 - DNA, 54 bp, Artificial
  Synthetic oligonucleotide
cgcaaccaaccggtaccacttggtccatagcgaacgtatgtatctcccaccccc

SEQ ID NO: 370140 - DNA, 55 bp, Artificial
  Synthetic oligonucleotide
cgcaaccaggacagcagctgattttagaaacagatgcctctcaaaagtattgggg

SEQ ID NO: 370141 - DNA, 55 bp, Artificial
  Synthetic oligonucleotide
cgcaaccagttccaggcacgagtagcatcgggtgacatcactgcgagtcaagaac

SEQ ID NO: 370142 - DNA, 50 bp, Artificial
  Synthetic oligonucleotide
cgcaaccccttccgtgtggggcgggagtaccgtggaactcccccccacaa

SEQ ID NO: 370143 - DNA, 54 bp, Artificial
  Synthetic oligonucleotide
cgcaacccgggtaccagtacgggacctgggtgcgatgcgagcccaacaacgtgg

SEQ ID NO: 370144 - DNA, 56 bp, Artificial
  Synthetic oligonucleotide
cgcaaccctcgatctattgtgccccacggattgttttaggaagcacccagagacca

SEQ ID NO: 370145 - DNA, 60 bp, Artificial
  Synthetic oligonucleotide
cgcaaccgagatgcgattaacaccgcagctctcattgaagacgcatatcaggcagatgtt

SEQ ID NO: 370146 - DNA, 53 bp, Artificial
  Synthetic oligonucleotide
cgcaaccgctacacggccgggacggacgaagaacaggggcccattcctacggc

SEQ ID NO: 370147 - DNA, 54 bp, Artificial
  Synthetic oligonucleotide
cgcaaccgtctgatttttgtgatttggcttaattcaaacaaaagttgtttgaat

SEQ ID NO: 370148 - DNA, 55 bp, Artificial
  Synthetic oligonucleotide
cgcaacgatgtctgccgacaagcaaattccgatgatccgaaagccctttacccga

SEQ ID NO: 370149 - DNA, 55 bp, Artificial
  Synthetic oligonucleotide
cgcaacgcagcgctttgctcaggctattctgttttgtatgttacggatatgcacc

SEQ ID NO: 370150 - DNA, 55 bp, Artificial
  Synthetic oligonucleotide
cgcaacgcgagcctggcctcggtagcccaatgcgtatcggtcttcaacgatgcca

SEQ ID NO: 370151 - DNA, 59 bp, Artificial
  Synthetic oligonucleotide
cgcaacgcggaagacctttggaaagatctgctagcctgagagttgctcctggatttagg

SEQ ID NO: 370152 - DNA, 60 bp, Artificial
  Synthetic oligonucleotide
cgcaacggagcgatgcttgtcgaccttaactcggctaagatggactttaacagtaatgca

SEQ ID NO: 370153 - DNA, 55 bp, Artificial
  Synthetic oligonucleotide
cgcaacggatatgcaacatccgttcggctcaccactaactgacactcctgttgta

SEQ ID NO: 370154 - DNA, 59 bp, Artificial
  Synthetic oligonucleotide
cgcaacggctgaagacttcgtgagtgggcctaacacctctggtcttgagaccagagttg

SEQ ID NO: 370155 - DNA, 52 bp, Artificial
  Synthetic oligonucleotide
cgcaacgggtcgcaaactgtgaacctcagccgggcctttgacaccctgcgtc

SEQ ID NO: 370156 - DNA, 57 bp, Artificial
  Synthetic oligonucleotide
cgcaacggtaagtatgaacaactagcttatgttgggacaaccgccagtaataccaca

SEQ ID NO: 370157 - DNA, 55 bp, Artificial
  Synthetic oligonucleotide
cgcaacgtcacatgtcacaaagtcgttcgagatgcacgcctatcatcttttcggc

SEQ ID NO: 370158 - DNA, 60 bp, Artificial
  Synthetic oligonucleotide
cgcaacgtcacattagaagatagacaatacgaccaatagtcagtggggcaacccagcctc

SEQ ID NO: 370159 - DNA, 55 bp, Artificial
  Synthetic oligonucleotide
cgcaactattaacggcgaatcgaagatcccgaagacacggcccgaatcgcagaag

SEQ ID NO: 370160 - DNA, 55 bp, Artificial
  Synthetic oligonucleotide
cgcaactcacctccaaggcaggagacttcttgtgcttagactactccaagtggga

SEQ ID NO: 370161 - DNA, 60 bp, Artificial
  Synthetic oligonucleotide
cgcaactctaggacatgttatactttcagagaactttatgcgaggactagtgccatccaa

SEQ ID NO: 370162 - DNA, 54 bp, Artificial
  Synthetic oligonucleotide
cgcaactgtctttgataatacgactcttgagactttagtcctatttcaatcgct

SEQ ID NO: 370163 - DNA, 55 bp, Artificial
  Synthetic oligonucleotide
cgcaacttgatctccaggggcagtaaaatcagctactattatatgacagtctatt

SEQ ID NO: 370164 - DNA, 55 bp, Artificial
  Synthetic oligonucleotide
cgcaacttgccgttcaaacctcctgaaaatcagtgagtatggtgcagagctggag

SEQ ID NO: 370165 - DNA, 55 bp, Artificial
  Synthetic oligonucleotide
cgcaactttggatagtgacaacagatgtgtacgatacattaagaagccagtctca

SEQ ID NO: 370166 - DNA, 55 bp, Artificial
  Synthetic oligonucleotide
cgcaagaaagatagtcccttcgtctacagttattcttgatggttatggcgaatcg

SEQ ID NO: 370167 - DNA, 50 bp, Artificial
  Synthetic oligonucleotide
cgcaagaaatagcgatgtcccagttgatcgatttggcgttgctcccatta

SEQ ID NO: 370168 - DNA, 55 bp, Artificial
  Synthetic oligonucleotide
cgcaagaaattttgatacaattcgattgtcattccagttaatgcgcccgccaaat

SEQ ID NO: 370169 - DNA, 60 bp, Artificial
  Synthetic oligonucleotide
cgcaagaaattttgatacaattcgtctatcattccaattaatgcgtccaccaaatatgac

SEQ ID NO: 370170 - DNA, 55 bp, Artificial
  Synthetic oligonucleotide
cgcaagaactgagcacgacccctcacaactgaataggagacacacgaaatgtccg

SEQ ID NO: 370171 - DNA, 55 bp, Artificial
  Synthetic oligonucleotide
cgcaagaacttccacacgaatcgcccgtccatacatgaacaggaacattagtgtc

SEQ ID NO: 370172 - DNA, 60 bp, Artificial
  Synthetic oligonucleotide
cgcaagaagcaaaatgcactgaatacattaataatgggctaccaccaatacaaaatacga

SEQ ID NO: 370173 - DNA, 59 bp, Artificial
  Synthetic oligonucleotide
cgcaagacaatccacaaaacaaggactaccagttagaatgccaagtggagccaatcaat

SEQ ID NO: 370174 - DNA, 55 bp, Artificial
  Synthetic oligonucleotide
cgcaagaccaaatgttgttatagatccattagggccagcgcctattgtaccagta

SEQ ID NO: 370175 - DNA, 60 bp, Artificial
  Synthetic oligonucleotide
cgcaagaccagattcctaccagtagctggtgggacaagcagcgtgtatattgaggtattg

SEQ ID NO: 370176 - DNA, 60 bp, Artificial
  Synthetic oligonucleotide
cgcaagacgagattcctaccagtagcaggcgggacaagcagtgtgtatatcgaagtattg

SEQ ID NO: 370177 - DNA, 60 bp, Artificial
  Synthetic oligonucleotide
cgcaagacggcaacaaggcactgctgacaacagagtagcagatgatctaggcctgactcc

SEQ ID NO: 370178 - DNA, 55 bp, Artificial
  Synthetic oligonucleotide
cgcaagactccaggactgcaccatgctcgtgtgtggcgacgacctagtcgttatc

SEQ ID NO: 370179 - DNA, 55 bp, Artificial
  Synthetic oligonucleotide
cgcaagactgcaactgttctatgtaccccggtcatataacgggccaccgcatggc

SEQ ID NO: 370180 - DNA, 55 bp, Artificial
  Synthetic oligonucleotide
cgcaagactggtcgcactgggcatcaacgccgtggcttactaccgcggtcttgac

SEQ ID NO: 370181 - DNA, 55 bp, Artificial
  Synthetic oligonucleotide
cgcaagactttacatatggggagttcaccatccctcaactgacacagagcaaacc

SEQ ID NO: 370182 - DNA, 60 bp, Artificial
  Synthetic oligonucleotide
cgcaagagacagtcttgtgcattctctatccagctgcgttagtcaaaagggaatctatac

SEQ ID NO: 370183 - DNA, 55 bp, Artificial
  Synthetic oligonucleotide
cgcaagaggagattcgggttgaggaaaatgtcagacgacttggtggtgaggttgg

SEQ ID NO: 370184 - DNA, 55 bp, Artificial
  Synthetic oligonucleotide
cgcaagaggtttgcatccccacttttgctcacctcttacctcccaaacgaaatac

SEQ ID NO: 370185 - DNA, 58 bp, Artificial
  Synthetic oligonucleotide
cgcaagatgatgggaagcccttgtattctgaactaagaagccccacaaaaaggcatct

SEQ ID NO: 370186 - DNA, 55 bp, Artificial
  Synthetic oligonucleotide
cgcaagatgggagcacaagtgtcaacgcaaaagactggagcccatgacactgggc

SEQ ID NO: 370187 - DNA, 55 bp, Artificial
  Synthetic oligonucleotide
cgcaagatttagttcctgatcccttctccatgctagagtacgcgcccgcagtaga

SEQ ID NO: 370188 - DNA, 55 bp, Artificial
  Synthetic oligonucleotide
cgcaagccactagcgttattacacttggcctctggacacgtgggattaattgcat

SEQ ID NO: 370189 - DNA, 55 bp, Artificial
  Synthetic oligonucleotide
cgcaagccatatgattaccgatttggacaatctaaccaaaagagagcatccaaag

SEQ ID NO: 370190 - DNA, 55 bp, Artificial
  Synthetic oligonucleotide
cgcaagccattgctgtgttgcaagtgcgcttatgatcatgttatgtctactgatc

SEQ ID NO: 370191 - DNA, 60 bp, Artificial
  Synthetic oligonucleotide
cgcaagcccaagatgtacagaatgtatagaagccgtgacgttcctcgcgggtgtgaaggc

SEQ ID NO: 370192 - DNA, 60 bp, Artificial
  Synthetic oligonucleotide
cgcaagcccagactattcagaacgtacagaagtcctgatgtgcccaaaggttgtgaaggc

SEQ ID NO: 370193 - DNA, 52 bp, Artificial
  Synthetic oligonucleotide
cgcaagccccgtcgtttcctacggggaattggaaagttcgagagctttcgtc

SEQ ID NO: 370194 - DNA, 60 bp, Artificial
  Synthetic oligonucleotide
cgcaagcgagcgcgagatcttgtcgtggccaatagacaaggcgctgcggcgttatgagct

SEQ ID NO: 370195 - DNA, 50 bp, Artificial
  Synthetic oligonucleotide
cgcaagctcgcaagagcactttgtgcgaagtgagggacacttgtattgtc

SEQ ID NO: 370196 - DNA, 59 bp, Artificial
  Synthetic oligonucleotide
cgcaagctcgtcgtgatgtcattggccccgaatggggccctgacggacgctttactgga

SEQ ID NO: 370197 - DNA, 55 bp, Artificial
  Synthetic oligonucleotide
cgcaagctgctcgtgttgggatatcggggttatgtgcgaatgtgggaaatgcacg

SEQ ID NO: 370198 - DNA, 60 bp, Artificial
  Synthetic oligonucleotide
cgcaaggaaagacccgctgcattgaagcatgttcaattgattatgttattgcctatagag

SEQ ID NO: 370199 - DNA, 55 bp, Artificial
  Synthetic oligonucleotide
cgcaaggaacagaattggcagtgggaagaacgttctaccaggagttgaggacccc

SEQ ID NO: 370200 - DNA, 57 bp, Artificial
  Synthetic oligonucleotide
cgcaaggaatttataagtgtgttatgtgttcgaatattttcgatagtgtagattgtt

SEQ ID NO: 370201 - DNA, 59 bp, Artificial
  Synthetic oligonucleotide
cgcaaggagagccttatctcaaagaggaacaagaccaacagtacatttgccggagagac

SEQ ID NO: 370202 - DNA, 55 bp, Artificial
  Synthetic oligonucleotide
cgcaaggagctgcgaaagtgtttcttctttggatagaggacagcgaggataggtt

SEQ ID NO: 370203 - DNA, 55 bp, Artificial
  Synthetic oligonucleotide
cgcaaggagcttgtgtccacatgttcatgtgttgcgagattccaaaaccagtgtt

SEQ ID NO: 370204 - DNA, 60 bp, Artificial
  Synthetic oligonucleotide
cgcaaggagttgtggtgtgcccctaggaatgcacagcggtgtgctccttctcccacctct

SEQ ID NO: 370205 - DNA, 56 bp, Artificial
  Synthetic oligonucleotide
cgcaaggatgaacctccatcattaaaacctagattggaggttgagttccttaagcg

SEQ ID NO: 370206 - DNA, 58 bp, Artificial
  Synthetic oligonucleotide
cgcaaggatgagcctccctcactaaaacccagattggaggtggaattcctgaagcgta

SEQ ID NO: 370207 - DNA, 59 bp, Artificial
  Synthetic oligonucleotide
cgcaaggcattgaggatctgaaaggatcgaaaggaattgcaacgttgtacagttcgaaa

SEQ ID NO: 370208 - DNA, 55 bp, Artificial
  Synthetic oligonucleotide
cgcaaggcgctatccgctcagtcccacccggcaaatatcgacatgtgcaaagaac

SEQ ID NO: 370209 - DNA, 55 bp, Artificial
  Synthetic oligonucleotide
cgcaagggtgtggattataacatgcctacacagtattcaatggaacgtgagttat

SEQ ID NO: 370210 - DNA, 55 bp, Artificial
  Synthetic oligonucleotide
cgcaagggttaagcgcaaaccgagtcaacattctcttggacaaggattggggccg

SEQ ID NO: 370211 - DNA, 55 bp, Artificial
  Synthetic oligonucleotide
cgcaaggtgcgtcctactggggccaatgttgtccatcaagtggttgctaatccac

SEQ ID NO: 370212 - DNA, 55 bp, Artificial
  Synthetic oligonucleotide
cgcaaggtgtcatgcatactggggatttgacttgagtcctcgaatgaggtactac

SEQ ID NO: 370213 - DNA, 55 bp, Artificial
  Synthetic oligonucleotide
cgcaaggtgttggctgaggatttcgaaaagaggattggtttggagcgtaaagaaa

SEQ ID NO: 370214 - DNA, 60 bp, Artificial
  Synthetic oligonucleotide
cgcaaggttcttgggaatttgatacacatatgaactccacatattcaagtaaagtcgaca

SEQ ID NO: 370215 - DNA, 59 bp, Artificial
  Synthetic oligonucleotide
cgcaagtaaaagtacaaactcgcgaggagaatccacgcaacgcgcgctttggtgagcca

SEQ ID NO: 370216 - DNA, 59 bp, Artificial
  Synthetic oligonucleotide
cgcaagtacattgtctcgttttagctcacgtacacaacatcacgtatgattgacatatg

SEQ ID NO: 370217 - DNA, 60 bp, Artificial
  Synthetic oligonucleotide
cgcaagtacgcgcggacctcactacacagccctgttcgtagtgacagtccgcagctaaca

SEQ ID NO: 370218 - DNA, 55 bp, Artificial
  Synthetic oligonucleotide
cgcaagtatcgcgttaagcacacggcgctgattgtcaacaaagcaggccctcccg

SEQ ID NO: 370219 - DNA, 55 bp, Artificial
  Synthetic oligonucleotide
cgcaagtcgatagcaggagcgaaactcgtaaggtctaagttaacccctcggcatc

SEQ ID NO: 370220 - DNA, 60 bp, Artificial
  Synthetic oligonucleotide
cgcaagtgcgtggcacaactctcagagcggccatgatgggtaacaccattgttgtttctc

SEQ ID NO: 370221 - DNA, 57 bp, Artificial
  Synthetic oligonucleotide
cgcaagttatagcgtacgatatacgtaacaattcttggatatacgatattccatctc

SEQ ID NO: 370222 - DNA, 57 bp, Artificial
  Synthetic oligonucleotide
cgcaagttctccgcgcttgccgcccttattgagctcgggaattacttctgggaaagc

SEQ ID NO: 370223 - DNA, 55 bp, Artificial
  Synthetic oligonucleotide
cgcaagttttatgcatggatgatcgaacaggctccatatagctctctagcacaag

SEQ ID NO: 370224 - DNA, 51 bp, Artificial
  Synthetic oligonucleotide
cgcaagtttttgttacaaagtggatataggggacggtcctctattcgtacc

SEQ ID NO: 370225 - DNA, 58 bp, Artificial
  Synthetic oligonucleotide
cgcaataatgttcgattggtttgacgtaagatatatgagagaaacaccgttgacaacg

SEQ ID NO: 370226 - DNA, 55 bp, Artificial
  Synthetic oligonucleotide
cgcaatacattcttgcagggtatagttctaactcaatctataccaacgttatctc

SEQ ID NO: 370227 - DNA, 58 bp, Artificial
  Synthetic oligonucleotide
cgcaatacattgcgtatcgtagtacatgttatttatacggtatttctgcatcgtatag

SEQ ID NO: 370228 - DNA, 60 bp, Artificial
  Synthetic oligonucleotide
cgcaataccatatatcgatgagtatctcaatattgagatgtcaacactaatcgagcaaat

SEQ ID NO: 370229 - DNA, 55 bp, Artificial
  Synthetic oligonucleotide
cgcaatacttcctactcggctacatttgtgcaagcgtcttctcgtgtcgctgcct

SEQ ID NO: 370230 - DNA, 51 bp, Artificial
  Synthetic oligonucleotide
cgcaatagagatgacttttcctcggtttggacgtatgctaagaaatgcgtc

SEQ ID NO: 370231 - DNA, 55 bp, Artificial
  Synthetic oligonucleotide
cgcaataggcgatgttttgaagtcgactggcggaatgacatctaacgcctggtct

SEQ ID NO: 370232 - DNA, 60 bp, Artificial
  Synthetic oligonucleotide
cgcaatattgatcaagggggccacagcgacaggagaggaattctcgcaggctacaaagca

SEQ ID NO: 370233 - DNA, 55 bp, Artificial
  Synthetic oligonucleotide
cgcaatattggatgtatgggacattagcaccattaaaagattcgtaccaaaaggc

SEQ ID NO: 370234 - DNA, 60 bp, Artificial
  Synthetic oligonucleotide
cgcaatcacatcggactcactgtgtgacgagctacttgatatcgtgcgtgagcgcaaact

SEQ ID NO: 370235 - DNA, 55 bp, Artificial
  Synthetic oligonucleotide
cgcaatcagcggtcgagaacttcatcaagcattagaagtttcaactaggtacgat

SEQ ID NO: 370236 - DNA, 60 bp, Artificial
  Synthetic oligonucleotide
cgcaatcatggtgttttgctgacaaacattgtctaatacactttagaccagtaccaggat

SEQ ID NO: 370237 - DNA, 60 bp, Artificial
  Synthetic oligonucleotide
cgcaatccgaatatgtagcagcgacaaaggatgtcgacctgacaatacctgacgttcaaa

SEQ ID NO: 370238 - DNA, 55 bp, Artificial
  Synthetic oligonucleotide
cgcaatccgatgaggagagggttattctccaagggcacatcaaagtctcggagac

SEQ ID NO: 370239 - DNA, 55 bp, Artificial
  Synthetic oligonucleotide
cgcaatccttatgctgcgcctagaagaccgtggttcccgaggaccgaccccttct

SEQ ID NO: 370240 - DNA, 55 bp, Artificial
  Synthetic oligonucleotide
cgcaatcgagtttcatggatcagaggcggaaacattaaacgaagcaaaccctcgg

SEQ ID NO: 370241 - DNA, 50 bp, Artificial
  Synthetic oligonucleotide
cgcaatcgcccctagggtaacaaacataacatctgccattcttctagcca

SEQ ID NO: 370242 - DNA, 60 bp, Artificial
  Synthetic oligonucleotide
cgcaatctattaagaattggagtgctcaatcaagacgtgaaaatccagtttatgaatata

SEQ ID NO: 370243 - DNA, 55 bp, Artificial
  Synthetic oligonucleotide
cgcaatctcaagacgtacaccgatgagctgttggatgacctgagacttcatgccg

SEQ ID NO: 370244 - DNA, 55 bp, Artificial
  Synthetic oligonucleotide
cgcaatctcctcgttctcctggtcgcggcgtttgatgtattgctggtttctttcc

SEQ ID NO: 370245 - DNA, 55 bp, Artificial
  Synthetic oligonucleotide
cgcaatctcctgcccgaattcgtaaatgatgatggcgtctaaggacgctacacca

SEQ ID NO: 370246 - DNA, 55 bp, Artificial
  Synthetic oligonucleotide
cgcaatctgcgtcttcttctgcagcgactccagtcggtttagctactgtgaaacc

SEQ ID NO: 370247 - DNA, 56 bp, Artificial
  Synthetic oligonucleotide
cgcaatctttggggcataccgtggtggtccgggcaaatgggaccgcgattttgcga

SEQ ID NO: 370248 - DNA, 60 bp, Artificial
  Synthetic oligonucleotide
cgcaatgaaaagaggttctggatctggtattatcatttcagatacaccaatccacgattg

SEQ ID NO: 370249 - DNA, 59 bp, Artificial
  Synthetic oligonucleotide
cgcaatgatactttgaattaccgctaatggaattgcatttagagattgagtgattcatc

SEQ ID NO: 370250 - DNA, 55 bp, Artificial
  Synthetic oligonucleotide
cgcaatgatagtggagactctgaaatttgtagttagcaggttagaagcacttgag

SEQ ID NO: 370251 - DNA, 60 bp, Artificial
  Synthetic oligonucleotide
cgcaatgatcctatgatgatttatttagtctggagacggatcgagaatttctctatgccg

SEQ ID NO: 370252 - DNA, 58 bp, Artificial
  Synthetic oligonucleotide
cgcaatgcaccgactttttcccaaacaccgatcgatcaccaacttaatgcgtcgaaca

SEQ ID NO: 370253 - DNA, 55 bp, Artificial
  Synthetic oligonucleotide
cgcaatgcattagatggcaatcctatgtgctttgatagaaaacatcgagctatgg

SEQ ID NO: 370254 - DNA, 58 bp, Artificial
  Synthetic oligonucleotide
cgcaatgcattgcattatcgatatcgaatccttataaatcgttatatctaaagagcga

SEQ ID NO: 370255 - DNA, 55 bp, Artificial
  Synthetic oligonucleotide
cgcaatgcccgtgacaacaaaatgggtagggaggtttacggagaagatgacgtca

SEQ ID NO: 370256 - DNA, 55 bp, Artificial
  Synthetic oligonucleotide
cgcaatgctgaccgtgttacctacgacggcgaattaatctatggcagttacctgt

SEQ ID NO: 370257 - DNA, 58 bp, Artificial
  Synthetic oligonucleotide
cgcaatggcgtattacagtaatggtgtaacaagccgctcccatccccaagctgtttac

SEQ ID NO: 370258 - DNA, 57 bp, Artificial
  Synthetic oligonucleotide
cgcaatggcgtcgaccactgggatgcgtacaagggggagagggtcgtcctatgggac

SEQ ID NO: 370259 - DNA, 60 bp, Artificial
  Synthetic oligonucleotide
cgcaatgggatcaggcagcagttttatactctaactatatcgtaaacagacttagaggat

SEQ ID NO: 370260 - DNA, 55 bp, Artificial
  Synthetic oligonucleotide
cgcaatggggagccacacatgattgtcagcaagcacgagaaaggaaagagcctcc

SEQ ID NO: 370261 - DNA, 55 bp, Artificial
  Synthetic oligonucleotide
cgcaatggtgttgatcactgggacgcatataagggagaaagagtcgtcctatggg

SEQ ID NO: 370262 - DNA, 55 bp, Artificial
  Synthetic oligonucleotide
cgcaatgtacggcactgatggcttagaggccctcgatctatcaactagtgctggg

SEQ ID NO: 370263 - DNA, 54 bp, Artificial
  Synthetic oligonucleotide
cgcaatgtcaaattactggatttgcccctttttccaaggacaactcaattcgac

SEQ ID NO: 370264 - DNA, 59 bp, Artificial
  Synthetic oligonucleotide
cgcaatgtggatgtgacgatggttgagtcgtacgactaacattgatgtattgtgttccg

SEQ ID NO: 370265 - DNA, 55 bp, Artificial
  Synthetic oligonucleotide
cgcaatgttaatgggctgatagtcttatcttacaggtcatctgcgggtggcctga

SEQ ID NO: 370266 - DNA, 55 bp, Artificial
  Synthetic oligonucleotide
cgcaatgttatgagattacggggatacagttatgtggatcgtacgagacatcgag

SEQ ID NO: 370267 - DNA, 55 bp, Artificial
  Synthetic oligonucleotide
cgcaatgtttataaatacccgcgaagctcaagggtatggtgctctctctcttctg

SEQ ID NO: 370268 - DNA, 60 bp, Artificial
  Synthetic oligonucleotide
cgcaattaatcgccgtctcgaggattacatcaagttccagaccgcatggctccaggctag

SEQ ID NO: 370269 - DNA, 57 bp, Artificial
  Synthetic oligonucleotide
cgcaattacgagtcttgaagattatttggaatctaagtacacttgaaagtttgacga

SEQ ID NO: 370270 - DNA, 55 bp, Artificial
  Synthetic oligonucleotide
cgcaattagcgggcggatcccggtttcggtacagagttcacggtgccgcacccta

SEQ ID NO: 370271 - DNA, 58 bp, Artificial
  Synthetic oligonucleotide
cgcaattagtgaacttggtcgatagttctgaacctatggtactcgcaaattgagtccc

SEQ ID NO: 370272 - DNA, 60 bp, Artificial
  Synthetic oligonucleotide
cgcaattatacgttgccacataatgctactgtcgctcttgacttctcccgtggtgtaact

SEQ ID NO: 370273 - DNA, 55 bp, Artificial
  Synthetic oligonucleotide
cgcaattatcacaaagattgcggggagcaagcctcggtaatatatttggattagc

SEQ ID NO: 370274 - DNA, 60 bp, Artificial
  Synthetic oligonucleotide
cgcaattcacagatttcgtatcattgaattcattacgatttagatttagtttgacagttg

SEQ ID NO: 370275 - DNA, 59 bp, Artificial
  Synthetic oligonucleotide
cgcaattccactctgtcgaatacaaccaaccttcgcaggatgtagttttcagcaattcc

SEQ ID NO: 370276 - DNA, 55 bp, Artificial
  Synthetic oligonucleotide
cgcaattcccaataagaattgtcaccgagcaatccataagctttaaacagttggt

SEQ ID NO: 370277 - DNA, 55 bp, Artificial
  Synthetic oligonucleotide
cgcaattctttgcgttagtgcattaggaagaagctatgtgcttcctctcgaaggt

SEQ ID NO: 370278 - DNA, 60 bp, Artificial
  Synthetic oligonucleotide
cgcaattgcagtgtgtgagaactacatggccgctcatactagcgaatggcaaccactaca

SEQ ID NO: 370279 - DNA, 56 bp, Artificial
  Synthetic oligonucleotide
cgcaattgcatcccaaaaacctatactacttgggtcacgttccgcgacgaagaaga

SEQ ID NO: 370280 - DNA, 51 bp, Artificial
  Synthetic oligonucleotide
cgcaattgcgagccgttttgcacacgggccccgaccttgtacgcattatct

SEQ ID NO: 370281 - DNA, 56 bp, Artificial
  Synthetic oligonucleotide
cgcaattgtggtcagcatatgatgcgtgttatcgattatgagatgataggggcgtt

SEQ ID NO: 370282 - DNA, 60 bp, Artificial
  Synthetic oligonucleotide
cgcaattgtgtgctttcgctgattgggcaacttatcgcgagttccggtatctagaggata

SEQ ID NO: 370283 - DNA, 60 bp, Artificial
  Synthetic oligonucleotide
cgcaatttccaatcactcgagtgtgttacacatcagagtacccacggtattagcaaggtg

SEQ ID NO: 370284 - DNA, 51 bp, Artificial
  Synthetic oligonucleotide
cgcaatttcttgttttgtggctatcatcttgacaaagacatatttagtata

SEQ ID NO: 370285 - DNA, 58 bp, Artificial
  Synthetic oligonucleotide
cgcaatttgacacctggtaacacgaatacgcgcgtatcccgttattctagtagcgcgc

SEQ ID NO: 370286 - DNA, 60 bp, Artificial
  Synthetic oligonucleotide
cgcaatttggctaatgcgctaggcatctactctgaagcacccgggcgcacaaccataacc

SEQ ID NO: 370287 - DNA, 56 bp, Artificial
  Synthetic oligonucleotide
cgcaattttgattacacacggccctcgcccgaactgcccgtgaaacctgttgtgga

SEQ ID NO: 370288 - DNA, 57 bp, Artificial
  Synthetic oligonucleotide
cgcacaaaactgcccctcgccttcgcctataaagacctctgggaagccatgacccaa

SEQ ID NO: 370289 - DNA, 60 bp, Artificial
  Synthetic oligonucleotide
cgcacaaaattacgggattaatttgcctataactgggtcgatggatatgtcatatgtgaa

SEQ ID NO: 370290 - DNA, 55 bp, Artificial
  Synthetic oligonucleotide
cgcacaaacgttctagtgttgttcggttggatacgcctatcgggcatgctgagtg

SEQ ID NO: 370291 - DNA, 55 bp, Artificial
  Synthetic oligonucleotide
cgcacaacaatgttggtgtgtccaattacaggtactgagtcccacatagacgtta

SEQ ID NO: 370292 - DNA, 55 bp, Artificial
  Synthetic oligonucleotide
cgcacaacagtacaagcaattagttgttatgctcccgaagattgatgttcagtcg

SEQ ID NO: 370293 - DNA, 60 bp, Artificial
  Synthetic oligonucleotide
cgcacaacctgcgcagtatgcaaacacccaagcgagcaaccgggttaatatagtggcacc

SEQ ID NO: 370294 - DNA, 59 bp, Artificial
  Synthetic oligonucleotide
cgcacaactcttcgaatgcagcattgtcacaatcttatggtggtaacggggctttgaag

SEQ ID NO: 370295 - DNA, 55 bp, Artificial
  Synthetic oligonucleotide
cgcacaactgagaacgtcggtggtaagaactacatcgtttattatggtcgtcgcc

SEQ ID NO: 370296 - DNA, 60 bp, Artificial
  Synthetic oligonucleotide
cgcacaactggcttcattttatggctagtacaacagcctattggcgtggtaccttgcatt

SEQ ID NO: 370297 - DNA, 55 bp, Artificial
  Synthetic oligonucleotide
cgcacaagctgtatctctacattggtatggaaaacctctgttttcaaatcctatc

SEQ ID NO: 370298 - DNA, 55 bp, Artificial
  Synthetic oligonucleotide
cgcacaagcttgcgcgtcccttgacaagaccacttctagcggccatccgcaccac

SEQ ID NO: 370299 - DNA, 55 bp, Artificial
  Synthetic oligonucleotide
cgcacaatatcgctcgtattattttgtgcgtctcctaggggcataagcgtaacat

SEQ ID NO: 370300 - DNA, 60 bp, Artificial
  Synthetic oligonucleotide
cgcacaatcactactcaaacgacaacagcaaagcgcaatatatacggatctcaactgggc

SEQ ID NO: 370301 - DNA, 55 bp, Artificial
  Synthetic oligonucleotide
cgcacacaagctttcgtaccctcttttcaagagtcaatccgtactcgagatacct

SEQ ID NO: 370302 - DNA, 55 bp, Artificial
  Synthetic oligonucleotide
cgcacacagggcgagccttctgggcaacgagattagtgcacaccgctatcacctg

SEQ ID NO: 370303 - DNA, 60 bp, Artificial
  Synthetic oligonucleotide
cgcacacaggtcatgcgtgcgccacgtgagccaagaggtgatacctatgacagtgagggg

SEQ ID NO: 370304 - DNA, 55 bp, Artificial
  Synthetic oligonucleotide
cgcacaccatccacaccctgggatgaatagtgccctctatgcatttcgctaaatc

SEQ ID NO: 370305 - DNA, 55 bp, Artificial
  Synthetic oligonucleotide
cgcacaccgttgtatgattatgatgattattccttgccaaggtctaccgtcatgc

SEQ ID NO: 370306 - DNA, 60 bp, Artificial
  Synthetic oligonucleotide
cgcacacctgagagtaaagacgtctatgctaatacacaactggtactgcagagaccggct

SEQ ID NO: 370307 - DNA, 56 bp, Artificial
  Synthetic oligonucleotide
cgcacacgcgattacatgttaggttatatacgcttagcatatcgcaaatagaccgc

SEQ ID NO: 370308 - DNA, 52 bp, Artificial
  Synthetic oligonucleotide
cgcacacgggtgcgatgtcatcgctagatgccaatgtacaacgggtgtgtac

SEQ ID NO: 370309 - DNA, 51 bp, Artificial
  Synthetic oligonucleotide
cgcacacgtacatcctccgacaggcgacacagtaggcacgttcgttgcgta

SEQ ID NO: 370310 - DNA, 57 bp, Artificial
  Synthetic oligonucleotide
cgcacactaacttctcatactaaactcgtgggaatattaaaatatggtggtagaata

SEQ ID NO: 370311 - DNA, 55 bp, Artificial
  Synthetic oligonucleotide
cgcacactactgcaggaagtacgctccactatatgctgctgaggctaaaagggta

SEQ ID NO: 370312 - DNA, 55 bp, Artificial
  Synthetic oligonucleotide
cgcacactattgggctaggtcaaggccttgttgtaggttcagtagaactaccacc

SEQ ID NO: 370313 - DNA, 55 bp, Artificial
  Synthetic oligonucleotide
cgcacactcaactgttgcccgagagtgtagtgatcttcgtagcctctctcccaca

SEQ ID NO: 370314 - DNA, 55 bp, Artificial
  Synthetic oligonucleotide
cgcacactgcgaaaactgcatataacaacacgtgaccccacaatccctatagctg

SEQ ID NO: 370315 - DNA, 55 bp, Artificial
  Synthetic oligonucleotide
cgcacactggatatcctcacgacttttaccactgccttcgcactccccaagaccg

SEQ ID NO: 370316 - DNA, 55 bp, Artificial
  Synthetic oligonucleotide
cgcacactggccagcgaagtcaagactcgaagtagacaacggtcgaccgtgaacc

SEQ ID NO: 370317 - DNA, 60 bp, Artificial
  Synthetic oligonucleotide
cgcacagaagcacccgcattgcggcatctgtggcgaacccatcgactacgagctcccgca

SEQ ID NO: 370318 - DNA, 60 bp, Artificial
  Synthetic oligonucleotide
cgcacagactggatatgctccagttaattggggacacggtgaattgtctgactcaacatt

SEQ ID NO: 370319 - DNA, 60 bp, Artificial
  Synthetic oligonucleotide
cgcacagagacttgaaaatgtctttgctgggaagaacaccgatcttgaggctctcatgga

SEQ ID NO: 370320 - DNA, 59 bp, Artificial
  Synthetic oligonucleotide
cgcacagaggatcctaggcattttgacttgcgcaactaactgaacttgtttgttgcccc

SEQ ID NO: 370321 - DNA, 55 bp, Artificial
  Synthetic oligonucleotide
cgcacagaggtgcagattgctattgcaccagggaggcgcttcattggctacacgc

SEQ ID NO: 370322 - DNA, 55 bp, Artificial
  Synthetic oligonucleotide
cgcacagcgccgttatagcaggggtctccagagtacagggtatctaagtaccggg

SEQ ID NO: 370323 - DNA, 56 bp, Artificial
  Synthetic oligonucleotide
cgcacaggttcatttctacagggacttaagcaccattaacacagaagaacctatag

SEQ ID NO: 370324 - DNA, 60 bp, Artificial
  Synthetic oligonucleotide
cgcacagtggatcctaggcatataagtctacgccaacttcaggatcatgggccaattctt

SEQ ID NO: 370325 - DNA, 60 bp, Artificial
  Synthetic oligonucleotide
cgcacagtggatcctaggcatatacgtctacgcctattggagatcatggggcaattcata

SEQ ID NO: 370326 - DNA, 60 bp, Artificial
  Synthetic oligonucleotide
cgcacagtggatcctaggcgattggattgcgctttgtgataattgtgcagagtaaagtga

SEQ ID NO: 370327 - DNA, 53 bp, Artificial
  Synthetic oligonucleotide
cgcacagtggatcctaggcgtttcttgagcttgcgcaaatagtgattcagtta

SEQ ID NO: 370328 - DNA, 58 bp, Artificial
  Synthetic oligonucleotide
cgcacagtggatcctaggcgtttttactcacgcaaataattgtcactcttttgctggg

SEQ ID NO: 370329 - DNA, 59 bp, Artificial
  Synthetic oligonucleotide
cgcacagtggatcctaggcgtttttactcacgcaataatttgtccacactattgttgag

SEQ ID NO: 370330 - DNA, 60 bp, Artificial
  Synthetic oligonucleotide
cgcacagtggatcctaggctattgagatctctgcgcattggaatctccaagatgggacaa

SEQ ID NO: 370331 - DNA, 58 bp, Artificial
  Synthetic oligonucleotide
cgcacagtggatcctaggcttaaaggatacgcttacagaaggtagtctcttctttgta

SEQ ID NO: 370332 - DNA, 60 bp, Artificial
  Synthetic oligonucleotide
cgcacagtggatcctaggctttattgtttgcgccaccaaagtgcctgatcttggtgtgtt

SEQ ID NO: 370333 - DNA, 60 bp, Artificial
  Synthetic oligonucleotide
cgcacagtggatcctcggcatataagtctacgccaatccttgatcatggggcaattcatc

SEQ ID NO: 370334 - DNA, 57 bp, Artificial
  Synthetic oligonucleotide
cgcacataacattaagttttagtaataataagacagtgagaatagagactactaaac

SEQ ID NO: 370335 - DNA, 55 bp, Artificial
  Synthetic oligonucleotide
cgcacataccagtcgaaagcgcttacttacgccaatgtattatcgttcgttgagt

SEQ ID NO: 370336 - DNA, 55 bp, Artificial
  Synthetic oligonucleotide
cgcacatacgtaaggaaaaggactattatggagcgagaatctggaggttacgcga

SEQ ID NO: 370337 - DNA, 50 bp, Artificial
  Synthetic oligonucleotide
cgcacatatcacccaaattgttctgattgtactagtgacgagtgtattat

SEQ ID NO: 370338 - DNA, 55 bp, Artificial
  Synthetic oligonucleotide
cgcacatcggccggttgtaaatacattacgctctatggttacgatccctcacggc

SEQ ID NO: 370339 - DNA, 58 bp, Artificial
  Synthetic oligonucleotide
cgcacatctgatgggcttcctttcccatttcccataacccacatgggaaaagtccaca

SEQ ID NO: 370340 - DNA, 60 bp, Artificial
  Synthetic oligonucleotide
cgcacatgcgtcgttagcattctggcagcctcctctagcacttctgccgtcgacttgaaa

SEQ ID NO: 370341 - DNA, 60 bp, Artificial
  Synthetic oligonucleotide
cgcacatggaagatatactccaggtgtcattcctccagtaaacgtagataggccaattcc

SEQ ID NO: 370342 - DNA, 60 bp, Artificial
  Synthetic oligonucleotide
cgcacatggcaataccatggaagctaccaaattcgggatgttggtacaaaagccaatgca

SEQ ID NO: 370343 - DNA, 55 bp, Artificial
  Synthetic oligonucleotide
cgcacattcctgtgaattctctacttcacgatggggattgcagtgtggagttccc

SEQ ID NO: 370344 - DNA, 60 bp, Artificial
  Synthetic oligonucleotide
cgcacattgaaaaagctaaaggaagtgatctcgataataagacatactgttctaaatctg

SEQ ID NO: 370345 - DNA, 58 bp, Artificial
  Synthetic oligonucleotide
cgcacattgattcttacagcttcagctggagtaagaaatgtgattttgcaacacaact

SEQ ID NO: 370346 - DNA, 60 bp, Artificial
  Synthetic oligonucleotide
cgcacatttgagtcgtgctgtccgcacatttatttcagtgagtgatagattacccgaggc

SEQ ID NO: 370347 - DNA, 55 bp, Artificial
  Synthetic oligonucleotide
cgcaccaaacaactggggcggcatcttccgtatgcatggcgttagcaatgaagac

SEQ ID NO: 370348 - DNA, 55 bp, Artificial
  Synthetic oligonucleotide
cgcaccaacaccgtacaaatcaacagtgttctctgattggtggagcaatcaactg

SEQ ID NO: 370349 - DNA, 55 bp, Artificial
  Synthetic oligonucleotide
cgcaccaatcaactattcctatcggtacaacgaactgcggcgcacgcatagtctt

SEQ ID NO: 370350 - DNA, 60 bp, Artificial
  Synthetic oligonucleotide
cgcaccacagctcagaccatcaagcacaagggtcgcaagtacgtcgtaattcaccgctcg

SEQ ID NO: 370351 - DNA, 55 bp, Artificial
  Synthetic oligonucleotide
cgcaccaccaaataaagtgtcgaggtcgggaatgtcttcgtggcgactcaaaatg

SEQ ID NO: 370352 - DNA, 57 bp, Artificial
  Synthetic oligonucleotide
cgcaccaccgatagtggatattgcgaaatagatttctgaaagtcgcttcccggcttt

SEQ ID NO: 370353 - DNA, 55 bp, Artificial
  Synthetic oligonucleotide
cgcaccagaattctggaggccaagaaactggatggacctataggattgccattcc

SEQ ID NO: 370354 - DNA, 54 bp, Artificial
  Synthetic oligonucleotide
cgcaccagcgatcggcttaccgtttacacctgttgcggtgaatccggttgcgta

SEQ ID NO: 370355 - DNA, 60 bp, Artificial
  Synthetic oligonucleotide
cgcaccagtagttgatatcaaagactctcacaggatgatgacaaggagtaacatccttga

SEQ ID NO: 370356 - DNA, 55 bp, Artificial
  Synthetic oligonucleotide
cgcaccatatacgtctcctctgggctacctcattttgaccccgtttatggggttg

SEQ ID NO: 370357 - DNA, 59 bp, Artificial
  Synthetic oligonucleotide
cgcaccatcatttgttccgttcggccagaatgtcctcgctgatttgtccaacgacccaa

SEQ ID NO: 370358 - DNA, 59 bp, Artificial
  Synthetic oligonucleotide
cgcacccaatcatgagggaattcaagcaggagttgacaggttttatcgaacctgtaagc

SEQ ID NO: 370359 - DNA, 55 bp, Artificial
  Synthetic oligonucleotide
cgcacccagacgcgcaggcgggtatatttacccaaccatgttcgtaagctcggac

SEQ ID NO: 370360 - DNA, 57 bp, Artificial
  Synthetic oligonucleotide
cgcaccccattattcaaacgacattccactggtaagcgttatggaggtagacgacta

SEQ ID NO: 370361 - DNA, 50 bp, Artificial
  Synthetic oligonucleotide
cgcacccgctaccggcgcgacacacgtacgactttcagctgaacgtcaac

SEQ ID NO: 370362 - DNA, 55 bp, Artificial
  Synthetic oligonucleotide
cgcacccgctgtgagcgccacccgtgctttgcaagagtggttgcaagcgcagggt

SEQ ID NO: 370363 - DNA, 59 bp, Artificial
  Synthetic oligonucleotide
cgcacccggttgcctatatcttttcagaagcctctccaactggcagacgcctccgcaac

SEQ ID NO: 370364 - DNA, 60 bp, Artificial
  Synthetic oligonucleotide
cgcacccttagagacacaacatgcacccaatccacattctgctggcactaccagtgtgtc

SEQ ID NO: 370365 - DNA, 55 bp, Artificial
  Synthetic oligonucleotide
cgcaccgacacgtacactaacgtctctccatattgaagaaggcccatccaattct

SEQ ID NO: 370366 - DNA, 60 bp, Artificial
  Synthetic oligonucleotide
cgcaccgagaacacttatcctggattcgacgaccgcgacatctatgtgtggtctccttat

SEQ ID NO: 370367 - DNA, 57 bp, Artificial
  Synthetic oligonucleotide
cgcaccgaggatcctaggcacaaacagctcacgcctcctgtgatcctcttgcagagc

SEQ ID NO: 370368 - DNA, 55 bp, Artificial
  Synthetic oligonucleotide
cgcaccgaggatcctaggcttattgatcttcgcgcatataggaaagtctacacac

SEQ ID NO: 370369 - DNA, 55 bp, Artificial
  Synthetic oligonucleotide
cgcaccgcaatatatagcaaagagtcttggtacaggtcgtctgcactgattgcgg

SEQ ID NO: 370370 - DNA, 55 bp, Artificial
  Synthetic oligonucleotide
cgcaccgctattacgtaagggaatcttgcccggtaaacggtatgggtctcacgca

SEQ ID NO: 370371 - DNA, 60 bp, Artificial
  Synthetic oligonucleotide
cgcaccggaatggatcccaggatgtgctctctgatgcaaggttcaactctccctaggaga

SEQ ID NO: 370372 - DNA, 60 bp, Artificial
  Synthetic oligonucleotide
cgcaccggggatcctaggcaagtttgatgctcatttgagtggaatctagccagctaggtg

SEQ ID NO: 370373 - DNA, 60 bp, Artificial
  Synthetic oligonucleotide
cgcaccggggatcctaggcaattttgtggatctttgctgatacttcattctgcactcaaa

SEQ ID NO: 370374 - DNA, 55 bp, Artificial
  Synthetic oligonucleotide
cgcaccggggatcctaggcattttgggcgcgctttacaaaccactcatttgaaag

SEQ ID NO: 370375 - DNA, 55 bp, Artificial
  Synthetic oligonucleotide
cgcaccggggatcctaggcggtttgttgcgctgtttagtggcctacatctccttc

SEQ ID NO: 370376 - DNA, 59 bp, Artificial
  Synthetic oligonucleotide
cgcaccggggatcctaggcgtttagttgcgctactcagttgcacagcctttccctgtga

SEQ ID NO: 370377 - DNA, 55 bp, Artificial
  Synthetic oligonucleotide
cgcaccggggatcctaggcgtttagttgcgctgtttgatcgcacggttgtactcg

SEQ ID NO: 370378 - DNA, 55 bp, Artificial
  Synthetic oligonucleotide
cgcaccggggatcctaggcgtttagttgcgctgtttggttgcacaactttcttcg

SEQ ID NO: 370379 - DNA, 60 bp, Artificial
  Synthetic oligonucleotide
cgcaccggggatcctaggcttgtggattgcgctttcctttagatcaactgagtgcgagat

SEQ ID NO: 370380 - DNA, 59 bp, Artificial
  Synthetic oligonucleotide
cgcaccggggatcctaggctttagattgcgccttccattgaggacttgtgggagtgaga

SEQ ID NO: 370381 - DNA, 56 bp, Artificial
  Synthetic oligonucleotide
cgcaccggggatcctaggctttccttgaacatggaggaacacgttaacgaattgca

SEQ ID NO: 370382 - DNA, 59 bp, Artificial
  Synthetic oligonucleotide
cgcaccgtggatcctaggcgtaactttcacgcttattgctctgttacagttccgacatg

SEQ ID NO: 370383 - DNA, 59 bp, Artificial
  Synthetic oligonucleotide
cgcacctaccacactgtccttgactgctatgataggctttacctcaacaccaaccccca

SEQ ID NO: 370384 - DNA, 55 bp, Artificial
  Synthetic oligonucleotide
cgcacctagaagccatgacaacacgatcggaaatgaacaaggaactcatagcgga

SEQ ID NO: 370385 - DNA, 60 bp, Artificial
  Synthetic oligonucleotide
cgcacctcccaaataaagacgccattcctgagttgagctgcagtgatgttgtccccggtg

SEQ ID NO: 370386 - DNA, 60 bp, Artificial
  Synthetic oligonucleotide
cgcacctgaatttggctatttgctcaaaggtgaaagccatggcagaataatccaaaacga

SEQ ID NO: 370387 - DNA, 55 bp, Artificial
  Synthetic oligonucleotide
cgcacctggacaactgcttcgactggatggtggtggaaattacccgatgctctca

SEQ ID NO: 370388 - DNA, 55 bp, Artificial
  Synthetic oligonucleotide
cgcacctggtccgtggtcgaataagctggctgccgtgtcggcatacctggagtac

SEQ ID NO: 370389 - DNA, 60 bp, Artificial
  Synthetic oligonucleotide
cgcaccttatgcggacgaggccatacgtgtcgatgtctcctatgatacgccagccatcat

SEQ ID NO: 370390 - DNA, 60 bp, Artificial
  Synthetic oligonucleotide
cgcaccttctcatacaaggtggggtatggcccaattgacgaccccagatatgctgactgg

SEQ ID NO: 370391 - DNA, 55 bp, Artificial
  Synthetic oligonucleotide
cgcaccttggtgtttcagtgggccgaatcccgtggtccgctagacggagaagagt

SEQ ID NO: 370392 - DNA, 57 bp, Artificial
  Synthetic oligonucleotide
cgcacgaaggcatattggcagtcctacgggttgcccaagtaggacgtcctactgtcc

SEQ ID NO: 370393 - DNA, 55 bp, Artificial
  Synthetic oligonucleotide
cgcacgagaggcaggaccttttgatgctggcagcttgaaacaagtgtgtctggga

SEQ ID NO: 370394 - DNA, 55 bp, Artificial
  Synthetic oligonucleotide
cgcacgagagtttggtgaagatacgcttgtgtaagccatatgatgcccagtcccg

SEQ ID NO: 370395 - DNA, 60 bp, Artificial
  Synthetic oligonucleotide
cgcacgaggcggtatatgtggagacgagttctccatgtctctcgacgttctcacacattc

SEQ ID NO: 370396 - DNA, 56 bp, Artificial
  Synthetic oligonucleotide
cgcacgagtggtccgtgtggcgggtttggcaggtaatctccattcctccttagctc

SEQ ID NO: 370397 - DNA, 60 bp, Artificial
  Synthetic oligonucleotide
cgcacgatcatattacgaggcggtgtgtggtcacggaggactacttctcagcgctcaaga

SEQ ID NO: 370398 - DNA, 55 bp, Artificial
  Synthetic oligonucleotide
cgcacgcagctcagggctctgtatgaatacgtgatcatgcagcttcccatatctc

SEQ ID NO: 370399 - DNA, 56 bp, Artificial
  Synthetic oligonucleotide
cgcacgcaggacaagcccgaatacaagtgtgcggtgttcacgggcgtgtacccttt

SEQ ID NO: 370400 - DNA, 55 bp, Artificial
  Synthetic oligonucleotide
cgcacgcatcttagtgtgactccggtgagtgtaataatattgtccgtaacttacg

SEQ ID NO: 370401 - DNA, 52 bp, Artificial
  Synthetic oligonucleotide
cgcacgccatgccatcttcacagagccattcttttgtcacgctgtgctggta

SEQ ID NO: 370402 - DNA, 60 bp, Artificial
  Synthetic oligonucleotide
cgcacgctctggattcgataagataggattagcctatgactctgctccggaaagtgagtt

SEQ ID NO: 370403 - DNA, 55 bp, Artificial
  Synthetic oligonucleotide
cgcacggacccgttattggtgcccgataacagctttctttatactcttatggtcc

SEQ ID NO: 370404 - DNA, 59 bp, Artificial
  Synthetic oligonucleotide
cgcacggaggatcctaggcgttttggacttgcgcaactaattgaccttgtctgattgcc

SEQ ID NO: 370405 - DNA, 60 bp, Artificial
  Synthetic oligonucleotide
cgcacggatcacagttggtatatgtgattccggatgcgatgctctccatccatgatttct

SEQ ID NO: 370406 - DNA, 55 bp, Artificial
  Synthetic oligonucleotide
cgcacggccttgaactgtaatgcaagccttgacaccggttggttagcagggctct

SEQ ID NO: 370407 - DNA, 53 bp, Artificial
  Synthetic oligonucleotide
cgcacggccttgaactgtaatgcgagcctcgaaactggctggttagcggggct

SEQ ID NO: 370408 - DNA, 55 bp, Artificial
  Synthetic oligonucleotide
cgcacggcttattttgccattgcgaacgttgagaacaaggaaatctccctcgacg

SEQ ID NO: 370409 - DNA, 55 bp, Artificial
  Synthetic oligonucleotide
cgcacgggacactgaacacgtcctgggcacacctacacatgggcacggacaccaa

SEQ ID NO: 370410 - DNA, 60 bp, Artificial
  Synthetic oligonucleotide
cgcacggggtcatggactgtgccgagtgcttccccgtgtcagaatctcaacccgtgtctg

SEQ ID NO: 370411 - DNA, 55 bp, Artificial
  Synthetic oligonucleotide
cgcacggtcgcacacatcaccgtgacgcacacgaatccgttcggctcggtcgaaa

SEQ ID NO: 370412 - DNA, 55 bp, Artificial
  Synthetic oligonucleotide
cgcacggtgacctgccaggcaaacaaaagcagcggggaccaggcaggcgaaaaca

SEQ ID NO: 370413 - DNA, 52 bp, Artificial
  Synthetic oligonucleotide
cgcacggtgttaagcgattttacggacttgacctcatagccattcggagacc

SEQ ID NO: 370414 - DNA, 60 bp, Artificial
  Synthetic oligonucleotide
cgcacggttagaggttatagtgctgactatgttatcatgtgtgtgatagtgagtgtatct

SEQ ID NO: 370415 - DNA, 56 bp, Artificial
  Synthetic oligonucleotide
cgcacgtaacagtgtattcaaccgttcaaccgttgtgaaacgacatgatggtaaac

SEQ ID NO: 370416 - DNA, 55 bp, Artificial
  Synthetic oligonucleotide
cgcacgtaaggggaacacatgagcgcactcacacctggaactgtcatcaccgacc

SEQ ID NO: 370417 - DNA, 55 bp, Artificial
  Synthetic oligonucleotide
cgcacgtagtaaatatatttccggtaaccgtccagagtctagacatttttagatg

SEQ ID NO: 370418 - DNA, 58 bp, Artificial
  Synthetic oligonucleotide
cgcacgtcgatcatgaaccttagtcctttcgtgtttctgtattggagggtcattttgc

SEQ ID NO: 370419 - DNA, 55 bp, Artificial
  Synthetic oligonucleotide
cgcacgtctgaagcggatcgaagacgccctatcgaccttcagtagggaaatccac

SEQ ID NO: 370420 - DNA, 58 bp, Artificial
  Synthetic oligonucleotide
cgcacgtgtaacaggagagacgtcaacgtggggaccggcgcgccaaccatatggcttc

SEQ ID NO: 370421 - DNA, 55 bp, Artificial
  Synthetic oligonucleotide
cgcacgttggaatttaattcgctttcgattcaagaatgatgatgacggagcaaga

SEQ ID NO: 370422 - DNA, 55 bp, Artificial
  Synthetic oligonucleotide
cgcactaaaggatatgggtctgtttggacagaacatgctttaccactacctgggg

SEQ ID NO: 370423 - DNA, 59 bp, Artificial
  Synthetic oligonucleotide
cgcactaaattcaccatctgctgaggagtgcgggtttagcgatagagtgaggtcaatca

SEQ ID NO: 370424 - DNA, 60 bp, Artificial
  Synthetic oligonucleotide
cgcactaactaaggttttgaagtgtgataagcatgatgagggagtcttgcccacagagaa

SEQ ID NO: 370425 - DNA, 57 bp, Artificial
  Synthetic oligonucleotide
cgcactaactggcttggaacccttcctaggaccagactcatctagggaaccacagtg

SEQ ID NO: 370426 - DNA, 57 bp, Artificial
  Synthetic oligonucleotide
cgcactaagccatagtacgggaaaaactatgctacctgtgagccccgtctcaggacg

SEQ ID NO: 370427 - DNA, 55 bp, Artificial
  Synthetic oligonucleotide
cgcactaatgttgacgatgctagcttggttccgttgactggttcccctcgtgtcg

SEQ ID NO: 370428 - DNA, 54 bp, Artificial
  Synthetic oligonucleotide
cgcactacaactgtgtgcggttcctggttagaaataagcacaagatgagatgct

SEQ ID NO: 370429 - DNA, 56 bp, Artificial
  Synthetic oligonucleotide
cgcactaccgagatatgcaaaggtctaaacggtgacgtctttaaattggcagattt

SEQ ID NO: 370430 - DNA, 55 bp, Artificial
  Synthetic oligonucleotide
cgcactactgtaagaagtatgctcctttgtatgccttagaagctaagagggtagc

SEQ ID NO: 370431 - DNA, 55 bp, Artificial
  Synthetic oligonucleotide
cgcactagttatagtagtgagaaaccatcaagacctagtcaccgtaggagcgacg

SEQ ID NO: 370432 - DNA, 56 bp, Artificial
  Synthetic oligonucleotide
cgcactatcttctgggtgtatgggcccgatgggggagaaggaaaatcgacgttcgc

SEQ ID NO: 370433 - DNA, 60 bp, Artificial
  Synthetic oligonucleotide
cgcactatgccatacatgtccatagcaaatacaaattacacaggccaaagtagtgctccc

SEQ ID NO: 370434 - DNA, 55 bp, Artificial
  Synthetic oligonucleotide
cgcactcaatcaatggggattcaactcgaccaaaggataatcttgttatacatgc

SEQ ID NO: 370435 - DNA, 60 bp, Artificial
  Synthetic oligonucleotide
cgcactccaactgctcagcttgcggcgataacggcgatacgacagcggctggtaggtcca

SEQ ID NO: 370436 - DNA, 52 bp, Artificial
  Synthetic oligonucleotide
cgcactccacgcacttgcccccgtatcgtgcctcgaaggtgtgagacccggt

SEQ ID NO: 370437 - DNA, 53 bp, Artificial
  Synthetic oligonucleotide
cgcactccatccgaccgtcgggatgcgtgtagataccgtcgcgacaagacact

SEQ ID NO: 370438 - DNA, 55 bp, Artificial
  Synthetic oligonucleotide
cgcactccctctcctcgcaggagaagatctcaatcaccgcgtcgcagacgctctc

SEQ ID NO: 370439 - DNA, 55 bp, Artificial
  Synthetic oligonucleotide
cgcactcctcttaatttaccaccaactcatgcacacactttcttgtcgttgtcag

SEQ ID NO: 370440 - DNA, 55 bp, Artificial
  Synthetic oligonucleotide
cgcactcgaaagaccaactgagcaagttattgaggtactgagatgcaagggtggc

SEQ ID NO: 370441 - DNA, 56 bp, Artificial
  Synthetic oligonucleotide
cgcactcgaatttgcattagttttctcgaaaaccaaactggatatgaacgttacaa

SEQ ID NO: 370442 - DNA, 60 bp, Artificial
  Synthetic oligonucleotide
cgcactcgattggtgtattgcctcattcgataacatgtacacatccgatggtcataaatg

SEQ ID NO: 370443 - DNA, 55 bp, Artificial
  Synthetic oligonucleotide
cgcactcgcactacgtgatttcgcacaactccgttgtcgattccagtgacctgga

SEQ ID NO: 370444 - DNA, 58 bp, Artificial
  Synthetic oligonucleotide
cgcactcggcttttcgtgagtggcgcggaggcttttggaccacatcttttctgagaac

SEQ ID NO: 370445 - DNA, 59 bp, Artificial
  Synthetic oligonucleotide
cgcactcggtaccttggactcgcctcagacggcgtctatcaacagtgtctttattcctc

SEQ ID NO: 370446 - DNA, 54 bp, Artificial
  Synthetic oligonucleotide
cgcactcgtcaaggttattttctccttgcgacgtaggcggaagaggtaaacgcg

SEQ ID NO: 370447 - DNA, 55 bp, Artificial
  Synthetic oligonucleotide
cgcactctatagtcaccttgagacgcacaaccctgaggctgcacagtcgctggac

SEQ ID NO: 370448 - DNA, 58 bp, Artificial
  Synthetic oligonucleotide
cgcactctcggggtgcgttgagctaaacatgggtatccggagatgtgccgctttcccc

SEQ ID NO: 370449 - DNA, 59 bp, Artificial
  Synthetic oligonucleotide
cgcactctgaatgttggggtggaagccatcaatatcgaagaacctgggatcggtagttc

SEQ ID NO: 370450 - DNA, 60 bp, Artificial
  Synthetic oligonucleotide
cgcactctggagagcaataatacagcgagcacttcaaaggcaaaagcgaaggactggagg

SEQ ID NO: 370451 - DNA, 59 bp, Artificial
  Synthetic oligonucleotide
cgcactcttactatctttggagatataacccagtacccgtgcggggatatgactagctc

SEQ ID NO: 370452 - DNA, 55 bp, Artificial
  Synthetic oligonucleotide
cgcactgaaagtggagttgcccgccgtagccgtgttgggtgacgacgctcaagac

SEQ ID NO: 370453 - DNA, 55 bp, Artificial
  Synthetic oligonucleotide
cgcactgaacaaggattctggttctggaattataacgtcggatgctccggttcac

SEQ ID NO: 370454 - DNA, 60 bp, Artificial
  Synthetic oligonucleotide
cgcactgatgagtacatatactctggacagtgtgatgatgacgacaccagcctcgttcaa

SEQ ID NO: 370455 - DNA, 55 bp, Artificial
  Synthetic oligonucleotide
cgcactgcacgatgctgcctcagcttccacttactcgtagataacttcaactgcg

SEQ ID NO: 370456 - DNA, 59 bp, Artificial
  Synthetic oligonucleotide
cgcactgccttttgattccgccttgaaccactgcaattttggcctattagttgtgccta

SEQ ID NO: 370457 - DNA, 55 bp, Artificial
  Synthetic oligonucleotide
cgcactgctgaggggtggattaacaggtgtgacctcttgtccctgggatggtacc

SEQ ID NO: 370458 - DNA, 60 bp, Artificial
  Synthetic oligonucleotide
cgcactggcttggaaactctctatggctacacgggtatgagcgcatctgggaagcgtcac

SEQ ID NO: 370459 - DNA, 55 bp, Artificial
  Synthetic oligonucleotide
cgcacttaccgctacggtcccaagctcaccagtctactcaacgacttattccacc

SEQ ID NO: 370460 - DNA, 55 bp, Artificial
  Synthetic oligonucleotide
cgcacttcatgggtccagctggtgcacgtaagttccttacacgtgaccagaactc

SEQ ID NO: 370461 - DNA, 54 bp, Artificial
  Synthetic oligonucleotide
cgcacttgggataggttaagaaaatatgtctggcttgtaaacgaaaagaatcgg

SEQ ID NO: 370462 - DNA, 54 bp, Artificial
  Synthetic oligonucleotide
cgcactttagggaactctacgtattttccaacagttagtggatccttggtgacg

SEQ ID NO: 370463 - DNA, 60 bp, Artificial
  Synthetic oligonucleotide
cgcactttcaattggtatgctatgtctctcaaggagagagttgtggagctcgtccatcaa

SEQ ID NO: 370464 - DNA, 55 bp, Artificial
  Synthetic oligonucleotide
cgcactttcacagctgctccaattgacaccttactagcaggaaaggtgtgtgttg

SEQ ID NO: 370465 - DNA, 56 bp, Artificial
  Synthetic oligonucleotide
cgcactttcgctcccacccatttcctttgtcacacgtacattatatcgggccagtt

SEQ ID NO: 370466 - DNA, 55 bp, Artificial
  Synthetic oligonucleotide
cgcactttctgccggtgatatttgaacaccctcctgaaatggtggaaagcggggc

SEQ ID NO: 370467 - DNA, 53 bp, Artificial
  Synthetic oligonucleotide
cgcacttttcaccacaagactggcaacgtctcacaaatgagtacagaagatgg

SEQ ID NO: 370468 - DNA, 60 bp, Artificial
  Synthetic oligonucleotide
cgcagaaaagggactcactgaaacaactgatgcaacccagttctgtggtgccgctgttgg

SEQ ID NO: 370469 - DNA, 60 bp, Artificial
  Synthetic oligonucleotide
cgcagaaaatagatataccgcactatcgaattccgagtggttactattccatcaccattc

SEQ ID NO: 370470 - DNA, 55 bp, Artificial
  Synthetic oligonucleotide
cgcagaaagggcaccaggaggaccctacagacttggaacctcaggatcttgccct

SEQ ID NO: 370471 - DNA, 55 bp, Artificial
  Synthetic oligonucleotide
cgcagaaccagcaggacaggaatgaaaaggatctgttagaattggataaatgggc

SEQ ID NO: 370472 - DNA, 55 bp, Artificial
  Synthetic oligonucleotide
cgcagaagaagacaaagcacatacggtaaacgaaaaggcaatacaaatcagcaac

SEQ ID NO: 370473 - DNA, 51 bp, Artificial
  Synthetic oligonucleotide
cgcagaagaagataaggcacatacaataaacgaaaaagcaatacaactaag

SEQ ID NO: 370474 - DNA, 55 bp, Artificial
  Synthetic oligonucleotide
cgcagaagagaaattactcagctattgggtaaggtcgacatcaacttcgaagacg

SEQ ID NO: 370475 - DNA, 60 bp, Artificial
  Synthetic oligonucleotide
cgcagaagcagaggatttatttagtcactggcaaacggaaagatggcggacaacatgacc

SEQ ID NO: 370476 - DNA, 55 bp, Artificial
  Synthetic oligonucleotide
cgcagaagctctgtcagttgtgaactcttgttgacactactactgatggtaactg

SEQ ID NO: 370477 - DNA, 52 bp, Artificial
  Synthetic oligonucleotide
cgcagaattggacagcgaaaaccggtgtgtgcgctacactaagaaatcagtt

SEQ ID NO: 370478 - DNA, 55 bp, Artificial
  Synthetic oligonucleotide
cgcagacaacaaggatgccattcttgcatggcacaaagcttacagcgagaagcac

SEQ ID NO: 370479 - DNA, 59 bp, Artificial
  Synthetic oligonucleotide
cgcagacaagatctgcctcgggcaccatgccgtgtcaaacgggactaaagtaaacacat

SEQ ID NO: 370480 - DNA, 60 bp, Artificial
  Synthetic oligonucleotide
cgcagacaatggcacttcaccaaacttcgatgaagagctcactatggaagtcaatggcgg

SEQ ID NO: 370481 - DNA, 60 bp, Artificial
  Synthetic oligonucleotide
cgcagacacctggcccgtgagaaacatccggagtattacaagaactgctgacacagaagg

SEQ ID NO: 370482 - DNA, 55 bp, Artificial
  Synthetic oligonucleotide
cgcagacactttagactcgaagacatttgcgtgatcgacccttgttcggtggacc

SEQ ID NO: 370483 - DNA, 55 bp, Artificial
  Synthetic oligonucleotide
cgcagacaggaacccgggaactacgtacagagtgaccctcctaagcccctggaca

SEQ ID NO: 370484 - DNA, 60 bp, Artificial
  Synthetic oligonucleotide
cgcagaccaagatctcaatcgccgcgtcgcagaagatctcaatctcgggaaccccaatgt

SEQ ID NO: 370485 - DNA, 55 bp, Artificial
  Synthetic oligonucleotide
cgcagaccatcaactttgacgagcggtcgcgctggggcgggcagctcaaaaccat

SEQ ID NO: 370486 - DNA, 57 bp, Artificial
  Synthetic oligonucleotide
cgcagaccgaaattatgttaacatgcactgacgcattgaataggaattacattacta

SEQ ID NO: 370487 - DNA, 51 bp, Artificial
  Synthetic oligonucleotide
cgcagaccgagctaccaggcaactggccccaactgacctttgcccaaccaa

SEQ ID NO: 370488 - DNA, 57 bp, Artificial
  Synthetic oligonucleotide
cgcagaccgcacgtacgacttggacctagggttacctatggatgcaggccgttacga

SEQ ID NO: 370489 - DNA, 55 bp, Artificial
  Synthetic oligonucleotide
cgcagacgcgggggctacccgcggcgtttatatgagagggttcgtgtctcggacc

SEQ ID NO: 370490 - DNA, 60 bp, Artificial
  Synthetic oligonucleotide
cgcagacggcatatgtgaaaatggttaacggagattgggctgataagtggccagctgaaa

SEQ ID NO: 370491 - DNA, 60 bp, Artificial
  Synthetic oligonucleotide
cgcagactcaggtgatgcatgacattaccatgacaagccccttctcctaccacgacgagc

SEQ ID NO: 370492 - DNA, 60 bp, Artificial
  Synthetic oligonucleotide
cgcagactcccgatgtcaccattcgctggggtgagcccggtgagactttcgacatggagg

SEQ ID NO: 370493 - DNA, 60 bp, Artificial
  Synthetic oligonucleotide
cgcagactctgtctgtgttttctagagtgtgctgctcggcagctgcatcggagggtttca

SEQ ID NO: 370494 - DNA, 58 bp, Artificial
  Synthetic oligonucleotide
cgcagactgaagactacggattccaggaaggccatctctacactagtcaattttacgg

SEQ ID NO: 370495 - DNA, 55 bp, Artificial
  Synthetic oligonucleotide
cgcagacttaaagaccttgtggaaggcttctgcgacgctcagacagttctgcagc

SEQ ID NO: 370496 - DNA, 53 bp, Artificial
  Synthetic oligonucleotide
cgcagactttttgcacacagtgtagacagcgggctggagtcatcgggtcaaaa

SEQ ID NO: 370497 - DNA, 55 bp, Artificial
  Synthetic oligonucleotide
cgcagagaactacagtaaatccaggtccatttgcacaaactggttatgcaccagt

SEQ ID NO: 370498 - DNA, 55 bp, Artificial
  Synthetic oligonucleotide
cgcagagagagagtgcttattttaatgagcttatcgctttgcaattcgcgtttcg

SEQ ID NO: 370499 - DNA, 55 bp, Artificial
  Synthetic oligonucleotide
cgcagagcatagcagaaaatccaggcattattgcatactacatgtcaagaaatgc

SEQ ID NO: 370500 - DNA, 60 bp, Artificial
  Synthetic oligonucleotide
cgcagaggatccggtaaaggctctgattgcgctagataaacagcttaacttcgcaaacga

SEQ ID NO: 370501 - DNA, 60 bp, Artificial
  Synthetic oligonucleotide
cgcagagggtcagaacctgtgactcatttctgatgaatggttcgaagattaagtcgaaaa

SEQ ID NO: 370502 - DNA, 60 bp, Artificial
  Synthetic oligonucleotide
cgcagagtacacacaaagctcctcaaggattgttaactagtgaataactaattcaatatg

SEQ ID NO: 370503 - DNA, 55 bp, Artificial
  Synthetic oligonucleotide
cgcagagtatattcaaaatccctagacttgttgctaaacatgatacctagcgtcc

SEQ ID NO: 370504 - DNA, 55 bp, Artificial
  Synthetic oligonucleotide
cgcagagtccataattgacaaggtgggatactgtaaaacataccctgcacaagaa

SEQ ID NO: 370505 - DNA, 55 bp, Artificial
  Synthetic oligonucleotide
cgcagagtgaagggcaatttggaccaagtatcgtcttggaaagcttggcagcaac

SEQ ID NO: 370506 - DNA, 55 bp, Artificial
  Synthetic oligonucleotide
cgcagagttatgggctaatactcccctagatacgagtggaactgggttgagcttt

SEQ ID NO: 370507 - DNA, 56 bp, Artificial
  Synthetic oligonucleotide
cgcagataactgtacacttaaagaacatgagtatatggcaaacagttgtgttttgc

SEQ ID NO: 370508 - DNA, 55 bp, Artificial
  Synthetic oligonucleotide
cgcagatagggctgttagtgaaccaatcacatgatgtcgcccagacatcaggcat

SEQ ID NO: 370509 - DNA, 60 bp, Artificial
  Synthetic oligonucleotide
cgcagatgaaatgcgtcttttgacaaaaaggttcgattctgcagtcatcaatcggagtac

SEQ ID NO: 370510 - DNA, 55 bp, Artificial
  Synthetic oligonucleotide
cgcagatgaatatataagactaggggaaattactaaggcagcagttaatgctggt

SEQ ID NO: 370511 - DNA, 59 bp, Artificial
  Synthetic oligonucleotide
cgcagatgacaacacagtggcagtttcaaaaagacttggctgactatccgttgtttaac

SEQ ID NO: 370512 - DNA, 60 bp, Artificial
  Synthetic oligonucleotide
cgcagatgaccaaggacatccctatgtcgacggcctacacgaatccacccagcaccccta

SEQ ID NO: 370513 - DNA, 60 bp, Artificial
  Synthetic oligonucleotide
cgcagatgctaataggatgcaattttctgcaatccttagctggaggagtcagattggaag

SEQ ID NO: 370514 - DNA, 60 bp, Artificial
  Synthetic oligonucleotide
cgcagatggatgatgatgaatgggaatcgaccaggttcgcagaggataggttgggtgaag

SEQ ID NO: 370515 - DNA, 60 bp, Artificial
  Synthetic oligonucleotide
cgcagatgtttctacgacagttgatacagtatcaacgcaaactgctactattgctaagcg

SEQ ID NO: 370516 - DNA, 55 bp, Artificial
  Synthetic oligonucleotide
cgcagattagcatatgctattgtaaatacgggtgattatatgtctggaggtttac

SEQ ID NO: 370517 - DNA, 55 bp, Artificial
  Synthetic oligonucleotide
cgcagattattacctcaatgccactcataggcagcccaggcgactcgctaaccct

SEQ ID NO: 370518 - DNA, 53 bp, Artificial
  Synthetic oligonucleotide
cgcagattgtttgagtggttacgtcaaaacggattccttattaaacgcaaggg

SEQ ID NO: 370519 - DNA, 55 bp, Artificial
  Synthetic oligonucleotide
cgcagattttgacttgactacttttgatatttgcgatcccgttctctatgtagag

SEQ ID NO: 370520 - DNA, 54 bp, Artificial
  Synthetic oligonucleotide
cgcagcaaagacctcatgtcattatcggagcagccgagccccctagcgtcaccg

SEQ ID NO: 370521 - DNA, 55 bp, Artificial
  Synthetic oligonucleotide
cgcagcaaatattcttttgctatcactaagttcgcataccaagtgctgacgtaac

SEQ ID NO: 370522 - DNA, 55 bp, Artificial
  Synthetic oligonucleotide
cgcagcaaccaaagtttggtagtttggttatgaacatcagttaactgttgccaga

SEQ ID NO: 370523 - DNA, 56 bp, Artificial
  Synthetic oligonucleotide
cgcagcaagacgaccgttttgttcgtcacaagagatggcgccattcggggccgttt

SEQ ID NO: 370524 - DNA, 55 bp, Artificial
  Synthetic oligonucleotide
cgcagcaagagcgctcaccgtgatgcgggcatgtgctactttacaagaagcaaga

SEQ ID NO: 370525 - DNA, 55 bp, Artificial
  Synthetic oligonucleotide
cgcagcaagagcgctcactgtgatgcgagcatgtgtctctcatctagatgcatac

SEQ ID NO: 370526 - DNA, 55 bp, Artificial
  Synthetic oligonucleotide
cgcagcaagataagggcattaccatcccacacgatatagatttgggtgactcccg

SEQ ID NO: 370527 - DNA, 52 bp, Artificial
  Synthetic oligonucleotide
cgcagcaagcacctcaatcaacgacgaaccaaacgacgactaaacccgcgcc

SEQ ID NO: 370528 - DNA, 60 bp, Artificial
  Synthetic oligonucleotide
cgcagcaatagcgcaggaaggaaaagctccctacatagcaagcatggcattaagaaaact

SEQ ID NO: 370529 - DNA, 60 bp, Artificial
  Synthetic oligonucleotide
cgcagcaatatgcacacacttagaagtctgcttcatgtactcggatttccacttcattga

SEQ ID NO: 370530 - DNA, 55 bp, Artificial
  Synthetic oligonucleotide
cgcagcaatgactggcctgaacatagatgtgtacaatgtcgactctggagatctg

SEQ ID NO: 370531 - DNA, 53 bp, Artificial
  Synthetic oligonucleotide
cgcagcacatcactgtctgtgtcactggtattagtgggaatcgtgacactgta

SEQ ID NO: 370532 - DNA, 55 bp, Artificial
  Synthetic oligonucleotide
cgcagcaggaccaggtttaatcactcgcgactacagttctttcacagtcacacca

SEQ ID NO: 370533 - DNA, 55 bp, Artificial
  Synthetic oligonucleotide
cgcagcagtcgcccttgtcgaggccaaacaggcaaagtcagacatagagaaactc

SEQ ID NO: 370534 - DNA, 60 bp, Artificial
  Synthetic oligonucleotide
cgcagcagtgcaacctgcactccccccgggtctcgacgcttcgaagcttaatcgtgctac

SEQ ID NO: 370535 - DNA, 55 bp, Artificial
  Synthetic oligonucleotide
cgcagcagtgcgtctttaaaaggaatacttattcatcctggtgtgattgactccg

SEQ ID NO: 370536 - DNA, 54 bp, Artificial
  Synthetic oligonucleotide
cgcagcagttcctttgagtataggaatatgtcgacaaagggaatgttaagatac

SEQ ID NO: 370537 - DNA, 55 bp, Artificial
  Synthetic oligonucleotide
cgcagcatactcagaggcagtagagggtaacaagggttcagggttcttagctatg

SEQ ID NO: 370538 - DNA, 55 bp, Artificial
  Synthetic oligonucleotide
cgcagcatcatcaatatcaagaggttcatctatacgttcgattggatcttcagca

SEQ ID NO: 370539 - DNA, 60 bp, Artificial
  Synthetic oligonucleotide
cgcagcatgctaccctttcatatggtaaggttcgctagaataaaccaaatcataaatgag

SEQ ID NO: 370540 - DNA, 51 bp, Artificial
  Synthetic oligonucleotide
cgcagcatggcccctatgcatatgtgacagggttgacaaccgacaacctta

SEQ ID NO: 370541 - DNA, 56 bp, Artificial
  Synthetic oligonucleotide
cgcagccaagagtaagaggttccagttcaaattggttccaaattactttgtgtcca

SEQ ID NO: 370542 - DNA, 55 bp, Artificial
  Synthetic oligonucleotide
cgcagccacatattgggtgtgctatcgcatggacccgttactcacgcctgacatg

SEQ ID NO: 370543 - DNA, 55 bp, Artificial
  Synthetic oligonucleotide
cgcagccatttgaacatcacgcaacagtaggactcacgcttagaattgaatctgc

SEQ ID NO: 370544 - DNA, 55 bp, Artificial
  Synthetic oligonucleotide
cgcagcccaggaaattagcgctgtaaaacgaaagttaccgctcacaacggagaga

SEQ ID NO: 370545 - DNA, 55 bp, Artificial
  Synthetic oligonucleotide
cgcagccctttgacaaacgtttatggactcattgccgtcaactagctctgcgcac

SEQ ID NO: 370546 - DNA, 60 bp, Artificial
  Synthetic oligonucleotide
cgcagccggctacttttgtcacctatgacaatcccgtatacgatccagaagagaccatat

SEQ ID NO: 370547 - DNA, 57 bp, Artificial
  Synthetic oligonucleotide
cgcagccggtctggagcaaacatcatcgggactgataactctgttgtcctctcccgc

SEQ ID NO: 370548 - DNA, 60 bp, Artificial
  Synthetic oligonucleotide
cgcagccggtctggagcaaacattctcgggactgacaactctgttgttctctctcgcaaa

SEQ ID NO: 370549 - DNA, 60 bp, Artificial
  Synthetic oligonucleotide
cgcagccggtctggagcaaacctcatcgggactgacaattctgtcgtgctctcccgcaag

SEQ ID NO: 370550 - DNA, 55 bp, Artificial
  Synthetic oligonucleotide
cgcagcctcaaaagcgtttgaagtgtcgctctacgaggctgcatctaactacctc

SEQ ID NO: 370551 - DNA, 59 bp, Artificial
  Synthetic oligonucleotide
cgcagcctcaggggacccaacatcccctgacaacatagaatcccctaatgcaccatggg

SEQ ID NO: 370552 - DNA, 55 bp, Artificial
  Synthetic oligonucleotide
cgcagccttgataagctgtagacctgatgagacgagaactagaacgtagtcgggg

SEQ ID NO: 370553 - DNA, 55 bp, Artificial
  Synthetic oligonucleotide
cgcagcgatgattgaagcatggggctatccaactctattgaaccacatacgaaag

SEQ ID NO: 370554 - DNA, 60 bp, Artificial
  Synthetic oligonucleotide
cgcagcgctaatgtgtctagctatgttcccatgtgggaagataacttgtcctgactgtgt

SEQ ID NO: 370555 - DNA, 60 bp, Artificial
  Synthetic oligonucleotide
cgcagcggcactcttctgcaaaatattgactctgaatatctaatgaaggaggatattacg

SEQ ID NO: 370556 - DNA, 52 bp, Artificial
  Synthetic oligonucleotide
cgcagcgggactgcatatattttcggatacccatacctctatgtcgtctggg

SEQ ID NO: 370557 - DNA, 55 bp, Artificial
  Synthetic oligonucleotide
cgcagcggggcacaccacgttctcagctgcccatgacgtcaatgtctctgggaca

SEQ ID NO: 370558 - DNA, 55 bp, Artificial
  Synthetic oligonucleotide
cgcagcgtcgacgataggtaaatgtaaatgctgcgacacggacgcgatagacatg

SEQ ID NO: 370559 - DNA, 60 bp, Artificial
  Synthetic oligonucleotide
cgcagctaatggctttatcgcacaatcgcattccgagtggttactattccatcaccattc

SEQ ID NO: 370560 - DNA, 55 bp, Artificial
  Synthetic oligonucleotide
cgcagctatgatagatatgagcactccacatccattaagtcttgctgctcacacg

SEQ ID NO: 370561 - DNA, 55 bp, Artificial
  Synthetic oligonucleotide
cgcagctcaatatgtcagcatccccgtatttccagttacctgggataccggtggc

SEQ ID NO: 370562 - DNA, 55 bp, Artificial
  Synthetic oligonucleotide
cgcagctcatctgggcttgcagatcaaatgcatcacgtacggtgactcgactggg

SEQ ID NO: 370563 - DNA, 59 bp, Artificial
  Synthetic oligonucleotide
cgcagctgttaacgtgggagtagcgatgtaggatcgtaaagctgtcattccgacaaaaa

SEQ ID NO: 370564 - DNA, 55 bp, Artificial
  Synthetic oligonucleotide
cgcagcttccgcaaggttgctggcgtgtgggctcctatcatggatttggaaaatc

SEQ ID NO: 370565 - DNA, 55 bp, Artificial
  Synthetic oligonucleotide
cgcagcttctaaccgcgtttacgtgtcctcaaggtcactaccaatggaacgtagt

SEQ ID NO: 370566 - DNA, 60 bp, Artificial
  Synthetic oligonucleotide
cgcagcttctggagaccctacatcacctgataacattgactcacccaatgcaccatgggt

SEQ ID NO: 370567 - DNA, 60 bp, Artificial
  Synthetic oligonucleotide
cgcaggaaacattacatgcaaatcaaatattacaggattattattgacacgtgatggagg

SEQ ID NO: 370568 - DNA, 51 bp, Artificial
  Synthetic oligonucleotide
cgcaggaatccgctgtcccccagcgtcctcgcagtccgcgttttgatgaca

SEQ ID NO: 370569 - DNA, 55 bp, Artificial
  Synthetic oligonucleotide
cgcaggacaaattcgagctaacgcttggattgaagtggaccggctcatagcaatc

SEQ ID NO: 370570 - DNA, 60 bp, Artificial
  Synthetic oligonucleotide
cgcaggacaagccagaaccgctgatactacagggactatgccaatgccaaggtttgtccc

SEQ ID NO: 370571 - DNA, 55 bp, Artificial
  Synthetic oligonucleotide
cgcaggacaagtagaaaattaacaccaatcttgcgcgcttgggcacgagacatgc

SEQ ID NO: 370572 - DNA, 50 bp, Artificial
  Synthetic oligonucleotide
cgcaggaccttatctgtacatgctatactggtatggtctaatcaggaagt

SEQ ID NO: 370573 - DNA, 55 bp, Artificial
  Synthetic oligonucleotide
cgcaggagcaagaggtgatgtacagcagatctttcaaggtcgaaacgacccaatg

SEQ ID NO: 370574 - DNA, 55 bp, Artificial
  Synthetic oligonucleotide
cgcaggatcaatcaatgctcccactgtgtcggacagtagagccttagccagaagg

SEQ ID NO: 370575 - DNA, 58 bp, Artificial
  Synthetic oligonucleotide
cgcaggatcgagattggtgaggggcactcgagcaaagcgtataataaccccgaactac

SEQ ID NO: 370576 - DNA, 60 bp, Artificial
  Synthetic oligonucleotide
cgcaggcaaagtagttgattcggaaacggctagtatatgtgacgcaatatttcaagatga

SEQ ID NO: 370577 - DNA, 55 bp, Artificial
  Synthetic oligonucleotide
cgcaggcagttcatatccctctttagcagagaatgtaccatctagatcttgaccg

SEQ ID NO: 370578 - DNA, 57 bp, Artificial
  Synthetic oligonucleotide
cgcaggcattgcgcttacacagctgaccctaattaatgctcccgtgaacgtgtgcga

SEQ ID NO: 370579 - DNA, 55 bp, Artificial
  Synthetic oligonucleotide
cgcaggccgcattcctttgcttcgtgtatggacttccaatttcaacacagagtgt

SEQ ID NO: 370580 - DNA, 58 bp, Artificial
  Synthetic oligonucleotide
cgcaggcgcagaattactgagaagctccgcagcaactacttgaggacatctctagcac

SEQ ID NO: 370581 - DNA, 52 bp, Artificial
  Synthetic oligonucleotide
cgcaggcggaaatcctctatcaactataccgccctctagaggcgtgttctaa

SEQ ID NO: 370582 - DNA, 52 bp, Artificial
  Synthetic oligonucleotide
cgcaggcgtgtgcagactaccggataatatcgacagaggattggctgtgaac

SEQ ID NO: 370583 - DNA, 60 bp, Artificial
  Synthetic oligonucleotide
cgcaggctcacctcattggcaacagtcaatgctccatatatcgttcgccatgctctcgca

SEQ ID NO: 370584 - DNA, 58 bp, Artificial
  Synthetic oligonucleotide
cgcagggaagatcaacgcgacgcctccgaatgggcctcttcttcgctgtccggtgttg

SEQ ID NO: 370585 - DNA, 55 bp, Artificial
  Synthetic oligonucleotide
cgcagggagaccctccttaaatatgctccatggtttggcaaagcctgcccaggcc

SEQ ID NO: 370586 - DNA, 60 bp, Artificial
  Synthetic oligonucleotide
cgcaggggaagacgcaattcatctgctaaagtggacgctcacgctagagagctccgcgcc

SEQ ID NO: 370587 - DNA, 55 bp, Artificial
  Synthetic oligonucleotide
cgcaggggacactgagtgggaatttgccaatttgcatcccagcgtgcagaggatg

SEQ ID NO: 370588 - DNA, 59 bp, Artificial
  Synthetic oligonucleotide
cgcagggtacaacgagaatgcacgctcgcgcgtctcattaatacgccgggtctgttgtt

SEQ ID NO: 370589 - DNA, 60 bp, Artificial
  Synthetic oligonucleotide
cgcagggtttattgaaggaggatggactggaatgatagatgggtggtatggctatcacca

SEQ ID NO: 370590 - DNA, 55 bp, Artificial
  Synthetic oligonucleotide
cgcaggtcattgctgaatcttccctatgccatcttggatctgcgcaccaacactg

SEQ ID NO: 370591 - DNA, 52 bp, Artificial
  Synthetic oligonucleotide
cgcaggtctcaaagcatttaaccttggtgacagtaagcggaatgagaatgct

SEQ ID NO: 370592 - DNA, 52 bp, Artificial
  Synthetic oligonucleotide
cgcaggtgggagagacgccgtgcgaacaccgcgtgatcatgaagttaatagt

SEQ ID NO: 370593 - DNA, 55 bp, Artificial
  Synthetic oligonucleotide
cgcaggtgttaggcgctaactatatgtttcagttgtctacggcgatagactcata

SEQ ID NO: 370594 - DNA, 55 bp, Artificial
  Synthetic oligonucleotide
cgcaggttacccctacgtggctttgggtatcaagaaaagagacattctctcgaag

SEQ ID NO: 370595 - DNA, 60 bp, Artificial
  Synthetic oligonucleotide
cgcaggttactcaatgctataagagctcggcttaacgccacatttactgtgtgtgttggg

SEQ ID NO: 370596 - DNA, 55 bp, Artificial
  Synthetic oligonucleotide
cgcagtaaggcacgacaggtcgtgtgtgcggcaagccgagaataaggagcgagcg

SEQ ID NO: 370597 - DNA, 60 bp, Artificial
  Synthetic oligonucleotide
cgcagtaatcatgaatgaaccaaatggagcagctactcccgccagaacgcaaatggataa

SEQ ID NO: 370598 - DNA, 60 bp, Artificial
  Synthetic oligonucleotide
cgcagtaatttgcgaagtcgtcgacggaaactgcaggacaatttctgttaggtcatgaga

SEQ ID NO: 370599 - DNA, 60 bp, Artificial
  Synthetic oligonucleotide
cgcagtacgaacgagctatgaccgaagatggatatgtcacgttacagtggtgtaacggtg

SEQ ID NO: 370600 - DNA, 55 bp, Artificial
  Synthetic oligonucleotide
cgcagtacgttttattgctgggagcgatacactggacgagtccaaccaggtttac

SEQ ID NO: 370601 - DNA, 52 bp, Artificial
  Synthetic oligonucleotide
cgcagtagatttcgggttaactaaaacagcccctttacacagtgatgtgtat

SEQ ID NO: 370602 - DNA, 55 bp, Artificial
  Synthetic oligonucleotide
cgcagtatcacagatagcgtgtgttttggtctcccatgtggaccctcttggggcc

SEQ ID NO: 370603 - DNA, 50 bp, Artificial
  Synthetic oligonucleotide
cgcagtcagtgagtataaggagggagttgaagaaaaggatcagttcgaaa

SEQ ID NO: 370604 - DNA, 56 bp, Artificial
  Synthetic oligonucleotide
cgcagtccccaacctccaatcactcaccaacctcctgtcctccaacttgtcctggt

SEQ ID NO: 370605 - DNA, 57 bp, Artificial
  Synthetic oligonucleotide
cgcagtccgcaagacgttattaaggtagtaaaatgtatggcgtctaaagcattgaaa

SEQ ID NO: 370606 - DNA, 55 bp, Artificial
  Synthetic oligonucleotide
cgcagtccggaaaaggcagtggagagtcttagtccgcgcctggagagtattagca

SEQ ID NO: 370607 - DNA, 52 bp, Artificial
  Synthetic oligonucleotide
cgcagtccttcccagaatccatcgaggtttcccacgctgagtctgaattgct

SEQ ID NO: 370608 - DNA, 55 bp, Artificial
  Synthetic oligonucleotide
cgcagtcgacgagcacccggactacacgatggcgcgctggctcggacgggaatcg

SEQ ID NO: 370609 - DNA, 55 bp, Artificial
  Synthetic oligonucleotide
cgcagtcgcactaaaagttcatacagctgctctgaaagtcggcctgcgtatagtg

SEQ ID NO: 370610 - DNA, 55 bp, Artificial
  Synthetic oligonucleotide
cgcagtcgcgggctcgtccgagcttggctcgacctactggggtaagacgatcgag

SEQ ID NO: 370611 - DNA, 58 bp, Artificial
  Synthetic oligonucleotide
cgcagtcggcttcatcaaccggcccggcatcggtctcccgtcgtgacccgcaagtggc

SEQ ID NO: 370612 - DNA, 55 bp, Artificial
  Synthetic oligonucleotide
cgcagtcgttttgccagatcatgttaaggaaatctatgatggtattagacatggg

SEQ ID NO: 370613 - DNA, 55 bp, Artificial
  Synthetic oligonucleotide
cgcagtctaggtcaacgcgacgacgcctggtccccttcttcgctagcctatgctg

SEQ ID NO: 370614 - DNA, 58 bp, Artificial
  Synthetic oligonucleotide
cgcagtctctgacgcgtgggccaatcattctcaaatttcgaaaagggtaattcgtgcg

SEQ ID NO: 370615 - DNA, 55 bp, Artificial
  Synthetic oligonucleotide
cgcagtcttcagaaggagctggggatcacgcgtgaaggagtggctgagcaaacgg

SEQ ID NO: 370616 - DNA, 60 bp, Artificial
  Synthetic oligonucleotide
cgcagtgatgagttcccctgtgcgagaatccatggttgatacagtcgatatggagataga

SEQ ID NO: 370617 - DNA, 60 bp, Artificial
  Synthetic oligonucleotide
cgcagtgcaaaacttggctgctagtaccactgagttggttgagactgactacagcaaatt

SEQ ID NO: 370618 - DNA, 60 bp, Artificial
  Synthetic oligonucleotide
cgcagtgcaccttatgcgcacacttcctctgggttctatcgaccctaactttggcaagct

SEQ ID NO: 370619 - DNA, 55 bp, Artificial
  Synthetic oligonucleotide
cgcagtggaatgtatagtcctgaaaatgattatcgttgggtagagtcgtttgatg

SEQ ID NO: 370620 - DNA, 60 bp, Artificial
  Synthetic oligonucleotide
cgcagtggatttgtctgatgagatacagtcagttggatcagagaagaaccagcgcgttac

SEQ ID NO: 370621 - DNA, 55 bp, Artificial
  Synthetic oligonucleotide
cgcagtggcttttgtgttcatgttcaggttaatgccacaaagtttcatcaaggca

SEQ ID NO: 370622 - DNA, 50 bp, Artificial
  Synthetic oligonucleotide
cgcagtgggccctgggaccgtagaagagtgcccataaccagggaagcggg

SEQ ID NO: 370623 - DNA, 54 bp, Artificial
  Synthetic oligonucleotide
cgcagtggtcgattttcatacagctacgactgagtcttgcgcttaattgagacg

SEQ ID NO: 370624 - DNA, 60 bp, Artificial
  Synthetic oligonucleotide
cgcagtggtctatcttcatgcagctacgattgaatctagctgtcaattgggacgccgtcg

SEQ ID NO: 370625 - DNA, 55 bp, Artificial
  Synthetic oligonucleotide
cgcagtggtctgccggtttctttgctgatttctttagccagcccgcgcccgtcga

SEQ ID NO: 370626 - DNA, 55 bp, Artificial
  Synthetic oligonucleotide
cgcagtgtcagcgctggtcgtgcactgtacattccaccttatgagctcttgctgc

SEQ ID NO: 370627 - DNA, 55 bp, Artificial
  Synthetic oligonucleotide
cgcagtgttagcgctggacgtgcactgtatatccctccctatgaagtgctcttgc

SEQ ID NO: 370628 - DNA, 60 bp, Artificial
  Synthetic oligonucleotide
cgcagtgttgttaccagaatatgacgttataattcagcatccggcagatatgagctggtg

SEQ ID NO: 370629 - DNA, 55 bp, Artificial
  Synthetic oligonucleotide
cgcagttaccccaaggggtgacagccactagggcggactttcctttgtgaggaca

SEQ ID NO: 370630 - DNA, 55 bp, Artificial
  Synthetic oligonucleotide
cgcagttgctgatctcatgtacgacatctattgccgtgtctacgcactgaacttc

SEQ ID NO: 370631 - DNA, 52 bp, Artificial
  Synthetic oligonucleotide
cgcagttgggactcgcaccctcagtctgactttacgctggagtagatgaatg

SEQ ID NO: 370632 - DNA, 52 bp, Artificial
  Synthetic oligonucleotide
cgcagttgtaggatataatccaccgtacgtatggactgggttaaagcacgga

SEQ ID NO: 370633 - DNA, 60 bp, Artificial
  Synthetic oligonucleotide
cgcagttgttttgctcgactcttcttgcgtgtttgatgccggttcacgtattatgccagg

SEQ ID NO: 370634 - DNA, 55 bp, Artificial
  Synthetic oligonucleotide
cgcagtttaccggcgtgagaatactggcttttggaaacactggattacaacgaag

SEQ ID NO: 370635 - DNA, 55 bp, Artificial
  Synthetic oligonucleotide
cgcagtttctaagcccattgcgtaacgcttgatatattgcaacataaggacatcc

SEQ ID NO: 370636 - DNA, 55 bp, Artificial
  Synthetic oligonucleotide
cgcagtttgagaacaaatatctacagaagctcagtgaacacacatggtgtagtgg

SEQ ID NO: 370637 - DNA, 55 bp, Artificial
  Synthetic oligonucleotide
cgcagtttgatagttctctaacaccatacctgataaattctgttctgagacttcg

SEQ ID NO: 370638 - DNA, 56 bp, Artificial
  Synthetic oligonucleotide
cgcagtttgatgaagagtttgggcacgatttttccccagaacttgttgaacttgga

SEQ ID NO: 370639 - DNA, 55 bp, Artificial
  Synthetic oligonucleotide
cgcagtttgcccaaggaactcctcacggcgtttgatacatgtaatgtggctcccg

SEQ ID NO: 370640 - DNA, 51 bp, Artificial
  Synthetic oligonucleotide
cgcataaacacctgggaaagttcccttctgaagacctccccaatcctggtc

SEQ ID NO: 370641 - DNA, 55 bp, Artificial
  Synthetic oligonucleotide
cgcataaacggcctctggaatatttatatgagtgtccgaataccttcgacagaag

SEQ ID NO: 370642 - DNA, 60 bp, Artificial
  Synthetic oligonucleotide
cgcataaccagggtgccgtactttgtacgggctcaagggctcatccgtgcatgcatgttg

SEQ ID NO: 370643 - DNA, 55 bp, Artificial
  Synthetic oligonucleotide
cgcataacgataagctggataacgttaggctgaacaactacttacgccaattgaa

SEQ ID NO: 370644 - DNA, 57 bp, Artificial
  Synthetic oligonucleotide
cgcataaggtgcccgtgaaaggggcctttgtggagttcacgtctcgcgtgataatag

SEQ ID NO: 370645 - DNA, 60 bp, Artificial
  Synthetic oligonucleotide
cgcataatacagcaatatctacattcatcaattatccccaactgtgtaagactcagccca

SEQ ID NO: 370646 - DNA, 55 bp, Artificial
  Synthetic oligonucleotide
cgcataatatatgtactgacgacgtgggtaattctcgaccaagttacagtgttaa

SEQ ID NO: 370647 - DNA, 55 bp, Artificial
  Synthetic oligonucleotide
cgcatacaccgggatgcctaaccagaaacccaaagtacccactttgagacaagct

SEQ ID NO: 370648 - DNA, 55 bp, Artificial
  Synthetic oligonucleotide
cgcatacagagacttgggagagttggtaggtgtaaacctggatttgcattgagga

SEQ ID NO: 370649 - DNA, 55 bp, Artificial
  Synthetic oligonucleotide
cgcatacagatatttcttttgtgagctgctaaatctgatcaacatagaatgccag

SEQ ID NO: 370650 - DNA, 55 bp, Artificial
  Synthetic oligonucleotide
cgcatacattattgcactgacaagtgcagtgcttgcaatgccaccacgcaatacc

SEQ ID NO: 370651 - DNA, 55 bp, Artificial
  Synthetic oligonucleotide
cgcatacctaatggatgataagcatactaaaatcagtcatggtcgcatgttacgc

SEQ ID NO: 370652 - DNA, 60 bp, Artificial
  Synthetic oligonucleotide
cgcatacgaaggtctcaatcgccgcgtcgcacaagatctcaatctcgggaatccaaatgt

SEQ ID NO: 370653 - DNA, 58 bp, Artificial
  Synthetic oligonucleotide
cgcatacgtagccttccgcgcgtggcagtccaacgccaggttggcggggattatgaaa

SEQ ID NO: 370654 - DNA, 55 bp, Artificial
  Synthetic oligonucleotide
cgcatacgtgatggtggtcggagagactgtccagttgccatcgtcgcgccacgtg

SEQ ID NO: 370655 - DNA, 58 bp, Artificial
  Synthetic oligonucleotide
cgcatactgaatatgaggcgtctccccttgtactaccgcagaacggggacgttcttga

SEQ ID NO: 370656 - DNA, 54 bp, Artificial
  Synthetic oligonucleotide
cgcatactgcctatccacgggctgtgtggtcatagtaggcagggttgtcctgtc

SEQ ID NO: 370657 - DNA, 59 bp, Artificial
  Synthetic oligonucleotide
cgcatagactaccacgccgctgaaacttcctttcgtaatgaagggaagcacgtgagata

SEQ ID NO: 370658 - DNA, 60 bp, Artificial
  Synthetic oligonucleotide
cgcataggaacatttatctaatttacattccacgcattttacatgatacttcatgcaccg

SEQ ID NO: 370659 - DNA, 55 bp, Artificial
  Synthetic oligonucleotide
cgcataggttccataatctcggggcccaaccatcgggaccatggaaaggcctcct

SEQ ID NO: 370660 - DNA, 55 bp, Artificial
  Synthetic oligonucleotide
cgcatagtccactttgcacgggtgtgggttatgcgggtggtgtgtcggttgcaag

SEQ ID NO: 370661 - DNA, 58 bp, Artificial
  Synthetic oligonucleotide
cgcatagtgtaaataatgtgttccgtcaaaatttgcaggagttatatgtgcaaattcg

SEQ ID NO: 370662 - DNA, 58 bp, Artificial
  Synthetic oligonucleotide
cgcatagtgtcgattttggaatgggatcggtcaagggaaccgtgccatcggctagagg

SEQ ID NO: 370663 - DNA, 60 bp, Artificial
  Synthetic oligonucleotide
cgcatagttacaaggctgctggttcactttcggactcgtaagtataacagcaatgagacg

SEQ ID NO: 370664 - DNA, 57 bp, Artificial
  Synthetic oligonucleotide
cgcatagttcttagaaatctcactgagtttacttgggattcacaagttagtttacat

SEQ ID NO: 370665 - DNA, 55 bp, Artificial
  Synthetic oligonucleotide
cgcatagttcttaggaatcttactgaattcacctgggattctcaaactgatttac

SEQ ID NO: 370666 - DNA, 59 bp, Artificial
  Synthetic oligonucleotide
cgcatatagctgcttctacgatggctggtcacacttcacacagaagggggtttatggtt

SEQ ID NO: 370667 - DNA, 60 bp, Artificial
  Synthetic oligonucleotide
cgcatatataataggttgcaaggatatatagaagcggtgcagttacaagaattaaggaac

SEQ ID NO: 370668 - DNA, 55 bp, Artificial
  Synthetic oligonucleotide
cgcatatataggttgttagaggcgtgtatcccaaatcattaactaaggatacatc

SEQ ID NO: 370669 - DNA, 55 bp, Artificial
  Synthetic oligonucleotide
cgcatatatttctctaatccctgatgcctctgcagttttcggtgagtactgcgag

SEQ ID NO: 370670 - DNA, 60 bp, Artificial
  Synthetic oligonucleotide
cgcatatcatcgtgagctatttacatggccggctttgctgtgtgccatgttcttggccgg

SEQ ID NO: 370671 - DNA, 60 bp, Artificial
  Synthetic oligonucleotide
cgcatatcgtgatatgcagttagagagagatgaaatgtatggttatgtaaatatagctag

SEQ ID NO: 370672 - DNA, 60 bp, Artificial
  Synthetic oligonucleotide
cgcatatgaggagcccgaagattgagcccactattatcgccacaacattagaacatcgat

SEQ ID NO: 370673 - DNA, 60 bp, Artificial
  Synthetic oligonucleotide
cgcatatgatccacgttcaaaggaacgtatcgcagcatatgcatctggcaagtttcagcc

SEQ ID NO: 370674 - DNA, 60 bp, Artificial
  Synthetic oligonucleotide
cgcatattcaagaaactttgtgagtgcgtgctttatgaatgctcagtcacacctcaaaaa

SEQ ID NO: 370675 - DNA, 55 bp, Artificial
  Synthetic oligonucleotide
cgcatatttgatggaatgacacctgcgtttcggcatatgacaactgctatgaaca

SEQ ID NO: 370676 - DNA, 58 bp, Artificial
  Synthetic oligonucleotide
cgcatatttggtgccatccttgggggagttgccttaggtgtagccaccgcagcacaga

SEQ ID NO: 370677 - DNA, 60 bp, Artificial
  Synthetic oligonucleotide
cgcatcaactatctgtgagaagaaattgtcggtgcagactgagatgagaactggatttgc

SEQ ID NO: 370678 - DNA, 55 bp, Artificial
  Synthetic oligonucleotide
cgcatcacgttcttgtaaggcaggctatggggcagactttaggggacgttgaggc

SEQ ID NO: 370679 - DNA, 60 bp, Artificial
  Synthetic oligonucleotide
cgcatcactaatgcctgaagagaccctccatcaagtaatgacacaacaaccgggagactc

SEQ ID NO: 370680 - DNA, 60 bp, Artificial
  Synthetic oligonucleotide
cgcatcactccagataccacacgtactcggctatggcagggtctgtcgaggtatgtgcgc

SEQ ID NO: 370681 - DNA, 55 bp, Artificial
  Synthetic oligonucleotide
cgcatcagacgctaaacttggcaatagttatccagctgacacgtcttatgttgtc

SEQ ID NO: 370682 - DNA, 60 bp, Artificial
  Synthetic oligonucleotide
cgcatcagctgaccaaaacggagctggacgcagtagtgttatattgttcgcaaatagtga

SEQ ID NO: 370683 - DNA, 58 bp, Artificial
  Synthetic oligonucleotide
cgcatcaggatccgaaccaaaatctaaaaccattcggaacatcctcacgcttagcctc

SEQ ID NO: 370684 - DNA, 51 bp, Artificial
  Synthetic oligonucleotide
cgcatcagtctgtcccgacagggtgtggcgttccccctcacttgcctgcag

SEQ ID NO: 370685 - DNA, 60 bp, Artificial
  Synthetic oligonucleotide
cgcatcatatcacgtaggatctttctataacgataacgccacggcgaaacgaattgtaga

SEQ ID NO: 370686 - DNA, 60 bp, Artificial
  Synthetic oligonucleotide
cgcatcatctagcacgctatcccctacacaaatactcgacacaagtcgaattctctcaaa

SEQ ID NO: 370687 - DNA, 55 bp, Artificial
  Synthetic oligonucleotide
cgcatcatctggtagcaattacagccggggatgcggtagtaccaacaaatcgctc

SEQ ID NO: 370688 - DNA, 50 bp, Artificial
  Synthetic oligonucleotide
cgcatcatgcttgacaatataaacatgcccaatggactgatagcccagct

SEQ ID NO: 370689 - DNA, 55 bp, Artificial
  Synthetic oligonucleotide
cgcatcatgtaaattcatcctctctcaccacttctcagggtgttgaagcggcacg

SEQ ID NO: 370690 - DNA, 55 bp, Artificial
  Synthetic oligonucleotide
cgcatcattaacaggtttaagtatcttgcgttcaaaccatgacagcgtttctgcg

SEQ ID NO: 370691 - DNA, 55 bp, Artificial
  Synthetic oligonucleotide
cgcatccacctctagttcccctccattcgctaaagcgtccacttcattacccggt

SEQ ID NO: 370692 - DNA, 55 bp, Artificial
  Synthetic oligonucleotide
cgcatccacgtatgtgtcagtgggcgtccctctcagtcacatcccgtagtaggca

SEQ ID NO: 370693 - DNA, 54 bp, Artificial
  Synthetic oligonucleotide
cgcatccactaatgcggggtcggttaacgcccccacagtctccgacagtagggc

SEQ ID NO: 370694 - DNA, 55 bp, Artificial
  Synthetic oligonucleotide
cgcatccaggaccatcaagactctatccaaccctaccctcagcgccaacagccga

SEQ ID NO: 370695 - DNA, 55 bp, Artificial
  Synthetic oligonucleotide
cgcatccatgaaaatcagtatggtcctgaatttgttatggcgcacaacgcggcgt

SEQ ID NO: 370696 - DNA, 60 bp, Artificial
  Synthetic oligonucleotide
cgcatccgcttggaacactacgcttcccgggagagcattcgagagagccaatctcgctac

SEQ ID NO: 370697 - DNA, 52 bp, Artificial
  Synthetic oligonucleotide
cgcatcctaaagaatacgaatccaaacgaacctccaaaggttactacgttaa

SEQ ID NO: 370698 - DNA, 55 bp, Artificial
  Synthetic oligonucleotide
cgcatcgactacttccgaccacactccccgaactccaatccgacctatcccttca

SEQ ID NO: 370699 - DNA, 51 bp, Artificial
  Synthetic oligonucleotide
cgcatcgcctcacgagctcttcacatgtttcttggtgatccaaagtctatt

SEQ ID NO: 370700 - DNA, 52 bp, Artificial
  Synthetic oligonucleotide
cgcatcgcttttcaaaaagttcactgttccagctttgatcgatagagtagga

SEQ ID NO: 370701 - DNA, 55 bp, Artificial
  Synthetic oligonucleotide
cgcatcggactcccctccactaacgcaccaagtgatgtatgtaccgccaggaggc

SEQ ID NO: 370702 - DNA, 55 bp, Artificial
  Synthetic oligonucleotide
cgcatcggcattcatcattggcgcactgcgagtgttgctcccatgagttacgggg

SEQ ID NO: 370703 - DNA, 55 bp, Artificial
  Synthetic oligonucleotide
cgcatcgtcagcacattccaaatcgaagttcacggttcaagagcaaggtgccttg

SEQ ID NO: 370704 - DNA, 51 bp, Artificial
  Synthetic oligonucleotide
cgcatcgtcggcatatggttcggtgagcgctaccctggcgcacttattgga

SEQ ID NO: 370705 - DNA, 59 bp, Artificial
  Synthetic oligonucleotide
cgcatctaaatgagatacaccgattgtactttttgaggcccatgactcacccggcttta

SEQ ID NO: 370706 - DNA, 55 bp, Artificial
  Synthetic oligonucleotide
cgcatctacatgagacataccgattgtacttcttgaggcccaagactctcctggc

SEQ ID NO: 370707 - DNA, 52 bp, Artificial
  Synthetic oligonucleotide
cgcatctacgctaagatcaagcacactaggtgctggatcccaagagccccta

SEQ ID NO: 370708 - DNA, 55 bp, Artificial
  Synthetic oligonucleotide
cgcatctattaaagaatatcgtccttttagggtcatgcgtctgacatccgtttcg

SEQ ID NO: 370709 - DNA, 60 bp, Artificial
  Synthetic oligonucleotide
cgcatctcagtgcgcaagggccattcccaccaggaggccgctactgagcggaacagtgcc

SEQ ID NO: 370710 - DNA, 55 bp, Artificial
  Synthetic oligonucleotide
cgcatctccaaccctcagaatgcggaatctcagcacgtttggttccagcccaatt

SEQ ID NO: 370711 - DNA, 60 bp, Artificial
  Synthetic oligonucleotide
cgcatctgaatattagatcagaattcgtgctcccaagttatttcgatcaatggatctact

SEQ ID NO: 370712 - DNA, 55 bp, Artificial
  Synthetic oligonucleotide
cgcatctgagtacttcaacgctccggctgtcaaagagatagtcggtgaacacgtc

SEQ ID NO: 370713 - DNA, 55 bp, Artificial
  Synthetic oligonucleotide
cgcatctgctctagtggaggcaaccaaattctgtgcacctatatacgagtgtgct

SEQ ID NO: 370714 - DNA, 60 bp, Artificial
  Synthetic oligonucleotide
cgcatctgggctgtaagatgggcgcgctggcaatcatgaggttctctggcgaagcaagca

SEQ ID NO: 370715 - DNA, 55 bp, Artificial
  Synthetic oligonucleotide
cgcatctgtttaccctcatgtgaaatggctttggtgttacagatagccaggcgac

SEQ ID NO: 370716 - DNA, 55 bp, Artificial
  Synthetic oligonucleotide
cgcatcttgtttcgtggtgctgtgtataacatccatggtgttctgcccgatccaa

SEQ ID NO: 370717 - DNA, 55 bp, Artificial
  Synthetic oligonucleotide
cgcatgaaagagtacattacagagtggcctcactacgtcgtcgactactgcgcct

SEQ ID NO: 370718 - DNA, 55 bp, Artificial
  Synthetic oligonucleotide
cgcatgaacggaacccagttcctctacccgatcaagtcggggcagaagcgaaccg

SEQ ID NO: 370719 - DNA, 55 bp, Artificial
  Synthetic oligonucleotide
cgcatgaccaaaactaatttgcccgcgcgtacaactcctggaccattgcaaacta

SEQ ID NO: 370720 - DNA, 55 bp, Artificial
  Synthetic oligonucleotide
cgcatgagcggcgatataaacacaggccttgggaacaagattctcatgtgcagca

SEQ ID NO: 370721 - DNA, 53 bp, Artificial
  Synthetic oligonucleotide
cgcatgagtgcacctcgattcgtgcgtcttccggtgggctctgggcagatctt

SEQ ID NO: 370722 - DNA, 53 bp, Artificial
  Synthetic oligonucleotide
cgcatgagttaggatacattgactttaccagttcgcagaatttggtggccgcg

SEQ ID NO: 370723 - DNA, 60 bp, Artificial
  Synthetic oligonucleotide
cgcatgatcttaacagtaatagtcgcgatctggaaatttatggacttagcaaacattcag

SEQ ID NO: 370724 - DNA, 58 bp, Artificial
  Synthetic oligonucleotide
cgcatgatgatgacacaatcagctctcatatgatagtgcaatgtgaagcgaaagatcc

SEQ ID NO: 370725 - DNA, 55 bp, Artificial
  Synthetic oligonucleotide
cgcatgattcatttcgtcaaagatcggtgtaacccaaaattttcacatttgcctc

SEQ ID NO: 370726 - DNA, 55 bp, Artificial
  Synthetic oligonucleotide
cgcatgattcggtactcgaagcaagcaatcagttttggagagagaattcaaaggc

SEQ ID NO: 370727 - DNA, 55 bp, Artificial
  Synthetic oligonucleotide
cgcatgcacgaagaaaacgaccgtggaaaatgtgctggtcacgacgaagatgtgt

SEQ ID NO: 370728 - DNA, 60 bp, Artificial
  Synthetic oligonucleotide
cgcatgcaggtgttgtcggctatggatattgcatgtgtgtcccacatgcaaataaaggat

SEQ ID NO: 370729 - DNA, 60 bp, Artificial
  Synthetic oligonucleotide
cgcatgccaaactatgcacgttatagattccttcggatctttgacagttgggtatcacgt

SEQ ID NO: 370730 - DNA, 55 bp, Artificial
  Synthetic oligonucleotide
cgcatgccacgcgatgacataccgcgattccgtggctagcaaaagcttgcctctc

SEQ ID NO: 370731 - DNA, 55 bp, Artificial
  Synthetic oligonucleotide
cgcatgccatgatcaaaggatggactgttgtttctacaatgtgtctcccaagatc

SEQ ID NO: 370732 - DNA, 55 bp, Artificial
  Synthetic oligonucleotide
cgcatgcgcatcattaccgatcatcttatccagtgcgcaattagttcaataaggg

SEQ ID NO: 370733 - DNA, 55 bp, Artificial
  Synthetic oligonucleotide
cgcatgcgttttgtgtgtagagggcgcatgcgtactgcagtaagtggtctgcgca

SEQ ID NO: 370734 - DNA, 50 bp, Artificial
  Synthetic oligonucleotide
cgcatgctcaagggagtgcacccggtacacatgagccgtgttctgaccgc

SEQ ID NO: 370735 - DNA, 57 bp, Artificial
  Synthetic oligonucleotide
cgcatggaagatacactccgggtttaattcctccagtgaacgtagataggccaatcc

SEQ ID NO: 370736 - DNA, 60 bp, Artificial
  Synthetic oligonucleotide
cgcatggattggagtgaggatattattgaactgcctaagcaacaacaggaaagcgttcta

SEQ ID NO: 370737 - DNA, 57 bp, Artificial
  Synthetic oligonucleotide
cgcatggattttgcaatatgttgacatcagggaaagaccgggtgtttgtcggttccg

SEQ ID NO: 370738 - DNA, 58 bp, Artificial
  Synthetic oligonucleotide
cgcatggcacgtggtgattcgcgccgcgcactcgggttaaaccggctcaccggaagca

SEQ ID NO: 370739 - DNA, 55 bp, Artificial
  Synthetic oligonucleotide
cgcatggctaaccctcagcggggtgacgcccgtcgggtgcgaagagctattcatc

SEQ ID NO: 370740 - DNA, 60 bp, Artificial
  Synthetic oligonucleotide
cgcatggctggaagcacaagaggacgaggaggtaggctttccagtcaagccgcaggtacc

SEQ ID NO: 370741 - DNA, 59 bp, Artificial
  Synthetic oligonucleotide
cgcatgggagacgttcgctactacctcagcaaaccagagcatcacggtaactataaacg

SEQ ID NO: 370742 - DNA, 57 bp, Artificial
  Synthetic oligonucleotide
cgcatgggcggggcttagtcctatataagtggtaacacctgggcacttaggcacaaa

SEQ ID NO: 370743 - DNA, 55 bp, Artificial
  Synthetic oligonucleotide
cgcatgggctagtgttgctggtatctgggctccaattactttagtaggccgtgtc

SEQ ID NO: 370744 - DNA, 57 bp, Artificial
  Synthetic oligonucleotide
cgcatggggaagtagaccatgtccccggagatgagcacgttcccgctagcgtttacg

SEQ ID NO: 370745 - DNA, 59 bp, Artificial
  Synthetic oligonucleotide
cgcatgtaaccccgggctaatggaaagtgcagaaggatgtcttaaattgctacagcagt

SEQ ID NO: 370746 - DNA, 54 bp, Artificial
  Synthetic oligonucleotide
cgcatgtacgatacggccgtggaagaatttaacgcccgcgaccgtagaccaaag

SEQ ID NO: 370747 - DNA, 60 bp, Artificial
  Synthetic oligonucleotide
cgcatgtacttgggctaggtcgagttcgcgtatatttaagttcacgtgcacttgagtgag

SEQ ID NO: 370748 - DNA, 50 bp, Artificial
  Synthetic oligonucleotide
cgcatgtcaagcttatatcttcgttagttgcttaataaagcattaatttg

SEQ ID NO: 370749 - DNA, 55 bp, Artificial
  Synthetic oligonucleotide
cgcatgtcgagcgagtacagtgacccgatggcttcggctatgggttacatcctcc

SEQ ID NO: 370750 - DNA, 55 bp, Artificial
  Synthetic oligonucleotide
cgcatgtcggagtgagggaagctaagtatagttcaacgagttggcagcgcatacc

SEQ ID NO: 370751 - DNA, 55 bp, Artificial
  Synthetic oligonucleotide
cgcatgtcggcaaggtcatatgtgtcactgatgtgacacgcggcatgggcatcac

SEQ ID NO: 370752 - DNA, 60 bp, Artificial
  Synthetic oligonucleotide
cgcatgtgcaatgatctcattggtgcacgcaaaccctattgactatgaatttctttgtca

SEQ ID NO: 370753 - DNA, 60 bp, Artificial
  Synthetic oligonucleotide
cgcatgtggataggggctgtggccaaccacgcagttaatcaccgctggtcaaaaaatgat

SEQ ID NO: 370754 - DNA, 57 bp, Artificial
  Synthetic oligonucleotide
cgcatgttctggtctcgttgtcaagacacacaaaatccctaaagtactacaccgttg

SEQ ID NO: 370755 - DNA, 55 bp, Artificial
  Synthetic oligonucleotide
cgcatgtttactatgtccgttctttatgacgctgccaatatctggctcccatact

SEQ ID NO: 370756 - DNA, 55 bp, Artificial
  Synthetic oligonucleotide
cgcatgtttggcttggatggtaacataagcaccgatgatgagaacacagaacgac

SEQ ID NO: 370757 - DNA, 52 bp, Artificial
  Synthetic oligonucleotide
cgcatgtttggtgaaccggtggggtaaggttggtgtgcccaacgcccgtact

SEQ ID NO: 370758 - DNA, 55 bp, Artificial
  Synthetic oligonucleotide
cgcattaaagaagtttgtgcgattgactccagatgaaaggaaagcggttccttct

SEQ ID NO: 370759 - DNA, 59 bp, Artificial
  Synthetic oligonucleotide
cgcattacaacaggtttggagtgacatgcatcttggaactactgaacttttttccatcc

SEQ ID NO: 370760 - DNA, 60 bp, Artificial
  Synthetic oligonucleotide
cgcattacatctaagataagagtgtacatgaagcccaagcatgtaaggtgttggtgtcct

SEQ ID NO: 370761 - DNA, 55 bp, Artificial
  Synthetic oligonucleotide
cgcattaccagacgtcatcacagaagcgtcagagaaattcatacgtaatagggcg

SEQ ID NO: 370762 - DNA, 55 bp, Artificial
  Synthetic oligonucleotide
cgcattaccattgggtaacttcccagtcatgtctggaggtgcggtgtcactacat

SEQ ID NO: 370763 - DNA, 51 bp, Artificial
  Synthetic oligonucleotide
cgcattactccgtgatactccaatcatactgaagggcgctattccgtacgt

SEQ ID NO: 370764 - DNA, 55 bp, Artificial
  Synthetic oligonucleotide
cgcattataataggtctgagactgataaattacaaataagagtacctgtcgaggg

SEQ ID NO: 370765 - DNA, 51 bp, Artificial
  Synthetic oligonucleotide
cgcattatcgggtaacgattatgcgcggcaatttggcgcttgccatgattc

SEQ ID NO: 370766 - DNA, 53 bp, Artificial
  Synthetic oligonucleotide
cgcattatgaacgaactgtaaacgccaaccccactaactgtaaacgccaaccc

SEQ ID NO: 370767 - DNA, 55 bp, Artificial
  Synthetic oligonucleotide
cgcattatgggttctgcctaagcgctcgccctggtcaacaaaccacgcttgcccc

SEQ ID NO: 370768 - DNA, 60 bp, Artificial
  Synthetic oligonucleotide
cgcattcaagatcgactctcctcctcctgttgcgtttcttcgcttccctgtgctgtactt

SEQ ID NO: 370769 - DNA, 60 bp, Artificial
  Synthetic oligonucleotide
cgcattcagcaaaccggtagcaacacttggtcgtgctatttcatttcgcgcgatcctaat

SEQ ID NO: 370770 - DNA, 56 bp, Artificial
  Synthetic oligonucleotide
cgcattcagcacaggaaagtttcttgtcgcgtacacgccaccaggaggtaaactac

SEQ ID NO: 370771 - DNA, 55 bp, Artificial
  Synthetic oligonucleotide
cgcattccaaatttaatggtgctcaacattcgcccaattaaaggaaaggacataa

SEQ ID NO: 370772 - DNA, 55 bp, Artificial
  Synthetic oligonucleotide
cgcattccagtgaacgcagagtccaggggcaccaaataggggccatacatggagt

SEQ ID NO: 370773 - DNA, 55 bp, Artificial
  Synthetic oligonucleotide
cgcattccattggttgcactgcgcacgtactaacccctgatgaaccgtttaacgg

SEQ ID NO: 370774 - DNA, 58 bp, Artificial
  Synthetic oligonucleotide
cgcattcccacatctagagtactcccagtctgattccgtgttcccagaaccctccctc

SEQ ID NO: 370775 - DNA, 55 bp, Artificial
  Synthetic oligonucleotide
cgcattcccacatctgcggtgctcccagtttgaactcgtgttttccaggatcctc

SEQ ID NO: 370776 - DNA, 58 bp, Artificial
  Synthetic oligonucleotide
cgcattcccacgtctggggtgctcccagtctgattccgtgtttccagaatcctccctc

SEQ ID NO: 370777 - DNA, 60 bp, Artificial
  Synthetic oligonucleotide
cgcattcgcgcgagacgtgatgagcaataaaacaggggccatcctccccaaacaatccca

SEQ ID NO: 370778 - DNA, 55 bp, Artificial
  Synthetic oligonucleotide
cgcattcgtttgtattgtgtttactattctacgcgtcaaccacaagttaaatggc

SEQ ID NO: 370779 - DNA, 60 bp, Artificial
  Synthetic oligonucleotide
cgcattctatggtaagcaggctgtctctgaacccaactacatctaccactcagcgtacgt

SEQ ID NO: 370780 - DNA, 60 bp, Artificial
  Synthetic oligonucleotide
cgcattctgagcgcaatttctactacatggtgtctactggcaagaataccccacgtacat

SEQ ID NO: 370781 - DNA, 58 bp, Artificial
  Synthetic oligonucleotide
cgcattcttgagcgcccaattccttagattggaattcttgtcctcgtctaggtattct

SEQ ID NO: 370782 - DNA, 55 bp, Artificial
  Synthetic oligonucleotide
cgcattgacgcacggattgacttcgaatctggacggataaagaaggaggagttca

SEQ ID NO: 370783 - DNA, 59 bp, Artificial
  Synthetic oligonucleotide
cgcattgagaatagggcacacagagaaagggatgactgaaatacctgtggcagtcgctg

SEQ ID NO: 370784 - DNA, 55 bp, Artificial
  Synthetic oligonucleotide
cgcattgagcgggattgatttatcacatatgaggagcccgaagattgagcctact

SEQ ID NO: 370785 - DNA, 57 bp, Artificial
  Synthetic oligonucleotide
cgcattgagtcccatcgcgaaacaaaggttgtgcggtagcggaatctacttaagccc

SEQ ID NO: 370786 - DNA, 57 bp, Artificial
  Synthetic oligonucleotide
cgcattgcaacgggctgtcattgacaaaacgaagaccccgataggaacacgtttcta

SEQ ID NO: 370787 - DNA, 60 bp, Artificial
  Synthetic oligonucleotide
cgcattgcatcaaacttcatacagtgtgcacaacctgagttctttagacttgaatgtgct

SEQ ID NO: 370788 - DNA, 56 bp, Artificial
  Synthetic oligonucleotide
cgcattgcccagatcaactgttatgcttaacggatcttaccgtgacatcagaattt

SEQ ID NO: 370789 - DNA, 55 bp, Artificial
  Synthetic oligonucleotide
cgcattgctccgtgctcgtcatctgagccggggccacaacctcgtagcagtcaac

SEQ ID NO: 370790 - DNA, 52 bp, Artificial
  Synthetic oligonucleotide
cgcattgctgacatccagctagccagcctttgcagaataagcaggtctaaag

SEQ ID NO: 370791 - DNA, 60 bp, Artificial
  Synthetic oligonucleotide
cgcattggaacttgatgcgaagggagcaagttattttgcactatgcacgaaagaatgcca

SEQ ID NO: 370792 - DNA, 60 bp, Artificial
  Synthetic oligonucleotide
cgcattgggagaaatcccaatagagatggagattcatactactattctgagcccacaagt

SEQ ID NO: 370793 - DNA, 60 bp, Artificial
  Synthetic oligonucleotide
cgcattggtgccagtaatcttggtagaccacacaagaaagaccatgcacgtgccaacacc

SEQ ID NO: 370794 - DNA, 56 bp, Artificial
  Synthetic oligonucleotide
cgcattgtgctttgtccaattatttagacttgcattttcttctttgtcgaggaaac

SEQ ID NO: 370795 - DNA, 57 bp, Artificial
  Synthetic oligonucleotide
cgcatttaactcattataattttcgaaaaggcatgttagagggaatacgtgagtcaa

SEQ ID NO: 370796 - DNA, 55 bp, Artificial
  Synthetic oligonucleotide
cgcatttaatcatgtgggatccgctgttgaacgactttccgctctcagtgcatgg

SEQ ID NO: 370797 - DNA, 58 bp, Artificial
  Synthetic oligonucleotide
cgcatttacatgtggaccaatgaaattggctcctcgtgacttaattgttttgtggtcc

SEQ ID NO: 370798 - DNA, 55 bp, Artificial
  Synthetic oligonucleotide
cgcatttacctaatgcgagtcttgcatcggtcgtctgagacttccaataaatatg

SEQ ID NO: 370799 - DNA, 57 bp, Artificial
  Synthetic oligonucleotide
cgcatttcctaatgaacattgattggtcggttacaagcacaaaaaaagagccgatat

SEQ ID NO: 370800 - DNA, 55 bp, Artificial
  Synthetic oligonucleotide
cgcatttgcgaagagaacatgtaaatatcctccgatcgtaaataagtcgtttcgg

SEQ ID NO: 370801 - DNA, 50 bp, Artificial
  Synthetic oligonucleotide
cgcatttgggtcttcaacccttaccagctttgcaagtatcagagtacaaa

SEQ ID NO: 370802 - DNA, 55 bp, Artificial
  Synthetic oligonucleotide
cgcatttggttccagctcatttcaatctactggactacatttcagctttgtatgc

SEQ ID NO: 370803 - DNA, 59 bp, Artificial
  Synthetic oligonucleotide
cgcattttataaagagcaaatcacgttcgggcaatcaagaatgtttattccacacataa

SEQ ID NO: 370804 - DNA, 60 bp, Artificial
  Synthetic oligonucleotide
cgcattttatgttactgcattcaatttcactacagacgccgatataactgagtcaggcag

SEQ ID NO: 370805 - DNA, 55 bp, Artificial
  Synthetic oligonucleotide
cgcattttgacgctcttagattactgccacagtttgaagctgacacgagagagac

SEQ ID NO: 370806 - DNA, 60 bp, Artificial
  Synthetic oligonucleotide
cgcattttgcgcacgaatattggatcaataacgtcaatggacggaaacgctacatatcca

SEQ ID NO: 370807 - DNA, 54 bp, Artificial
  Synthetic oligonucleotide
cgccaaaaacctctgctaagtcccgtgctaagtataaatagccgcgggggctag

SEQ ID NO: 370808 - DNA, 60 bp, Artificial
  Synthetic oligonucleotide
cgccaaaaccagtagttgagtgggtcattgagcaggagattgatttatcgacagttgagt

SEQ ID NO: 370809 - DNA, 55 bp, Artificial
  Synthetic oligonucleotide
cgccaaaacctgattgtccgactagcggagatagtagtgaatcgtctaatcgccg

SEQ ID NO: 370810 - DNA, 56 bp, Artificial
  Synthetic oligonucleotide
cgccaaaattttactagcggaggctagaaggagaaggatgggtgcgagagcgtcgg

SEQ ID NO: 370811 - DNA, 58 bp, Artificial
  Synthetic oligonucleotide
cgccaaacctggaccgaccattctcatgaatgatcaagaagttggtgtgctggatgct

SEQ ID NO: 370812 - DNA, 56 bp, Artificial
  Synthetic oligonucleotide
cgccaaacgagggatggataggctagaacccctataacactagggctccagccgga

SEQ ID NO: 370813 - DNA, 55 bp, Artificial
  Synthetic oligonucleotide
cgccaaacgcggcaagcattacaaacggcggcaatcctacaatgtcgcaagatac

SEQ ID NO: 370814 - DNA, 55 bp, Artificial
  Synthetic oligonucleotide
cgccaaagactggcgatatttctgatatgcagttttactatgataagtgtctccc

SEQ ID NO: 370815 - DNA, 55 bp, Artificial
  Synthetic oligonucleotide
cgccaaagatcgatactacccagtccaattacgtcactgtaagcgatcaacgtgg

SEQ ID NO: 370816 - DNA, 53 bp, Artificial
  Synthetic oligonucleotide
cgccaaagatgtggtttcgttcttcgcggctttccaaggggccattcaggcca

SEQ ID NO: 370817 - DNA, 50 bp, Artificial
  Synthetic oligonucleotide
cgccaaagggttccattgttgcacttgactatgaggcgggatcaacaaat

SEQ ID NO: 370818 - DNA, 55 bp, Artificial
  Synthetic oligonucleotide
cgccaaagtcttcatgattttgtgtgcaaaagtgtgtataaagctctggtttgaa

SEQ ID NO: 370819 - DNA, 53 bp, Artificial
  Synthetic oligonucleotide
cgccaaagttaaagtgataacgattggtcattgtcgggtggtcctaaagtgtt

SEQ ID NO: 370820 - DNA, 60 bp, Artificial
  Synthetic oligonucleotide
cgccaaatgagttcagcgcattttttgagttccgcctattggatgctgacacgtcgcatc

SEQ ID NO: 370821 - DNA, 60 bp, Artificial
  Synthetic oligonucleotide
cgccaaatgttagctgaagtcacagcattgcttaaactcaagaggaaggtagggtcagtc

SEQ ID NO: 370822 - DNA, 58 bp, Artificial
  Synthetic oligonucleotide
cgccaaattctcaggggatcaggagggatcaacaaggaaacaacgggattctcataca

SEQ ID NO: 370823 - DNA, 60 bp, Artificial
  Synthetic oligonucleotide
cgccaaatttccctctcgagcgcattgacgattgtccgcacgtgtcacgccctcaatgac

SEQ ID NO: 370824 - DNA, 55 bp, Artificial
  Synthetic oligonucleotide
cgccaacaattcaacaacacaagtagatacgctacttgagaagaatgtgaccgtc

SEQ ID NO: 370825 - DNA, 60 bp, Artificial
  Synthetic oligonucleotide
cgccaaccaggagttagcaaagcaaatagagcggcgtttggagcgtcagcagcccctaga

SEQ ID NO: 370826 - DNA, 55 bp, Artificial
  Synthetic oligonucleotide
cgccaaccgttcggttatttcttaacagcagctgaagttacgcaacatggacggt

SEQ ID NO: 370827 - DNA, 55 bp, Artificial
  Synthetic oligonucleotide
cgccaacggcgatgatcgacatacccacagtgtagcgcttgtcgacacactgaag

SEQ ID NO: 370828 - DNA, 54 bp, Artificial
  Synthetic oligonucleotide
cgccaactacgagagaatgccgaggacaaaggaaacggatgttttgaaattttc

SEQ ID NO: 370829 - DNA, 60 bp, Artificial
  Synthetic oligonucleotide
cgccaactcagagagaacgctgaagacaaagggaatggatgctttgaaatatttcacaaa

SEQ ID NO: 370830 - DNA, 55 bp, Artificial
  Synthetic oligonucleotide
cgccaactccaatcacttccccaccggctacagaacaggcacaaccaatactctc

SEQ ID NO: 370831 - DNA, 57 bp, Artificial
  Synthetic oligonucleotide
cgccaactgggtgttagctccagggcagttcgcgtcgcgaaagagattccctatccc

SEQ ID NO: 370832 - DNA, 51 bp, Artificial
  Synthetic oligonucleotide
cgccaacttataaggcctttttacgtcaacagtatctgaacctttaccccg

SEQ ID NO: 370833 - DNA, 60 bp, Artificial
  Synthetic oligonucleotide
cgccaagcgaacaatggagaagacgcaactgctggtctcactcacctgatgatctggcat

SEQ ID NO: 370834 - DNA, 60 bp, Artificial
  Synthetic oligonucleotide
cgccaaggattctatggcgatcaatcctcaattccagacttccaaacagctatggacacc

SEQ ID NO: 370835 - DNA, 55 bp, Artificial
  Synthetic oligonucleotide
cgccaagggaacccttcaagataaacaaattagtgacagacttattcggggatgc

SEQ ID NO: 370836 - DNA, 55 bp, Artificial
  Synthetic oligonucleotide
cgccaagggttccttgagaatgtaatcacgtaccttgtttacggatttagcactc

SEQ ID NO: 370837 - DNA, 53 bp, Artificial
  Synthetic oligonucleotide
cgccaagtccatttatgccgtggtaactggcacaacccaaaacccggccggac

SEQ ID NO: 370838 - DNA, 50 bp, Artificial
  Synthetic oligonucleotide
cgccaagtttcactctgttgagtgtattaaacgatccaaggttatcgata

SEQ ID NO: 370839 - DNA, 60 bp, Artificial
  Synthetic oligonucleotide
cgccaataatctggaatctgaggacggacaaaatggctcctgccaattgggaggcttcag

SEQ ID NO: 370840 - DNA, 56 bp, Artificial
  Synthetic oligonucleotide
cgccaatacaggcactgttgattatagctttaaagttcgtaaatataagcaaggtg

SEQ ID NO: 370841 - DNA, 55 bp, Artificial
  Synthetic oligonucleotide
cgccaataccccaagcagagcttgcagagtagaagtaaggcgagtgcttcaaata

SEQ ID NO: 370842 - DNA, 55 bp, Artificial
  Synthetic oligonucleotide
cgccaatattggcagttcccggcatcaatttgcgacacgcgcggcggtgtgtacc

SEQ ID NO: 370843 - DNA, 55 bp, Artificial
  Synthetic oligonucleotide
cgccaatcataccgttccacctatatgattttgctattgacatggctcgctggac

SEQ ID NO: 370844 - DNA, 55 bp, Artificial
  Synthetic oligonucleotide
cgccaatccaaactctgtagacctacatccctcttatctgaggaaatagagcgac

SEQ ID NO: 370845 - DNA, 60 bp, Artificial
  Synthetic oligonucleotide
cgccaatccgtgcccgctcacgagtattccgacctactcaaggcgctcaccccatcgcaa

SEQ ID NO: 370846 - DNA, 59 bp, Artificial
  Synthetic oligonucleotide
cgccaatcctcttatcaagaacaagggactgcaacaaagaatgcatatcaggatttctg

SEQ ID NO: 370847 - DNA, 55 bp, Artificial
  Synthetic oligonucleotide
cgccaatcgacctggttaacaccaggccggcggcgtttgttgagaagaaggctgc

SEQ ID NO: 370848 - DNA, 55 bp, Artificial
  Synthetic oligonucleotide
cgccaatgaatccctacatattttagaacagaaatacccgacttcaccacccttg

SEQ ID NO: 370849 - DNA, 60 bp, Artificial
  Synthetic oligonucleotide
cgccaatgcatatgctagcgcgggatttgggcgggctaacggaatcttcttccagagcgc

SEQ ID NO: 370850 - DNA, 54 bp, Artificial
  Synthetic oligonucleotide
cgccaatggaggggccgtgggtacccgagcagtggatgttccaaggtgcccccc

SEQ ID NO: 370851 - DNA, 58 bp, Artificial
  Synthetic oligonucleotide
cgccaattcaaggttgacgtctaatgatgccgtgtggttgccgttaaatcgaatccca

SEQ ID NO: 370852 - DNA, 55 bp, Artificial
  Synthetic oligonucleotide
cgccaattcgagtggtgtctgttccagaatcagattcgttcatgtcttcagtgcc

SEQ ID NO: 370853 - DNA, 55 bp, Artificial
  Synthetic oligonucleotide
cgccaattgtcagtggcatgattgggactcttaactcaactggtttctcactcga

SEQ ID NO: 370854 - DNA, 57 bp, Artificial
  Synthetic oligonucleotide
cgccaatttactgacatggtgtgaagacttgcatgtgcttgattgtgactcctccgg

SEQ ID NO: 370855 - DNA, 53 bp, Artificial
  Synthetic oligonucleotide
cgccacaaagatgcgagtctcacattggagaccgcatatcaaaggccccatta

SEQ ID NO: 370856 - DNA, 58 bp, Artificial
  Synthetic oligonucleotide
cgccacaaaggagttcttagctgatgatggcattgaagctgtatattacgaagatgca

SEQ ID NO: 370857 - DNA, 54 bp, Artificial
  Synthetic oligonucleotide
cgccacaaagttgtcggccctcggagttaatgctgtagcgtactaccggggtct

SEQ ID NO: 370858 - DNA, 55 bp, Artificial
  Synthetic oligonucleotide
cgccacaaatgtaaatcaatggaaatcacttattaaccataagccgatgctacct

SEQ ID NO: 370859 - DNA, 55 bp, Artificial
  Synthetic oligonucleotide
cgccacaagtgaggacttcagaaggtgcgtgagaagtatgtgggaacgcgacatc

SEQ ID NO: 370860 - DNA, 55 bp, Artificial
  Synthetic oligonucleotide
cgccacaccaaagctgacaactacactgaatctggatatgttaccttgtggtacc

SEQ ID NO: 370861 - DNA, 56 bp, Artificial
  Synthetic oligonucleotide
cgccacacccatggttacacactttccgtggaaatgccgagacgaacaaaggctcg

SEQ ID NO: 370862 - DNA, 56 bp, Artificial
  Synthetic oligonucleotide
cgccacacccccagtgtggttccgagcaagcacttctgttccccggttgcgtctta

SEQ ID NO: 370863 - DNA, 55 bp, Artificial
  Synthetic oligonucleotide
cgccacacctgccacaaatgccacacgggctctttgcgtgagaatttcgacgtgt

SEQ ID NO: 370864 - DNA, 60 bp, Artificial
  Synthetic oligonucleotide
cgccacactaattatgcagatgggtcagccagcacttgacctcgaccaagggtttgttaa

SEQ ID NO: 370865 - DNA, 55 bp, Artificial
  Synthetic oligonucleotide
cgccacactccacccaccgaggacgcccctggtcactttgagtacatggaggaga

SEQ ID NO: 370866 - DNA, 58 bp, Artificial
  Synthetic oligonucleotide
cgccacagaatctaaacattaacggtcagattggggtgccaaacgccgtgctagacgc

SEQ ID NO: 370867 - DNA, 55 bp, Artificial
  Synthetic oligonucleotide
cgccacatggattagtggcggccttaccattgactttgaacggcgtgttttcgac

SEQ ID NO: 370868 - DNA, 58 bp, Artificial
  Synthetic oligonucleotide
cgccacatttaatttactcgctttctcagctttggattcagtatatattaaacaatgt

SEQ ID NO: 370869 - DNA, 51 bp, Artificial
  Synthetic oligonucleotide
cgccaccaaatatagttgcagcacgaccaaaccttaagatagcctcatcac

SEQ ID NO: 370870 - DNA, 56 bp, Artificial
  Synthetic oligonucleotide
cgccacccaagggcacagaggtgtttgggcgcaagcctggggatttcaccgtcacc

SEQ ID NO: 370871 - DNA, 55 bp, Artificial
  Synthetic oligonucleotide
cgccacccaattgaagctttcctttaaccgaagttgtcgcatctggggtggatcc

SEQ ID NO: 370872 - DNA, 55 bp, Artificial
  Synthetic oligonucleotide
cgccacccaatttcccagacgctcattgagtattggtactacgaatgaagatgaa

SEQ ID NO: 370873 - DNA, 53 bp, Artificial
  Synthetic oligonucleotide
cgccaccgctactcctccggggtccgtcactgtgccccatcctaacatcgagg

SEQ ID NO: 370874 - DNA, 60 bp, Artificial
  Synthetic oligonucleotide
cgccaccgctcagagcaccaacattttcacggcgtcacagaaccagcttcaaaccgcttc

SEQ ID NO: 370875 - DNA, 55 bp, Artificial
  Synthetic oligonucleotide
cgccaccgggtcttctataagtcaaaatctggtatgaggaagcagcgccaggaag

SEQ ID NO: 370876 - DNA, 58 bp, Artificial
  Synthetic oligonucleotide
cgccaccgtcgctactcgagactggagtaggaatttttagatgcccgatggctcgttg

SEQ ID NO: 370877 - DNA, 58 bp, Artificial
  Synthetic oligonucleotide
cgccacctccacaattcaagaaacgttataacactaatgacaactcaagaggtatgaa

SEQ ID NO: 370878 - DNA, 55 bp, Artificial
  Synthetic oligonucleotide
cgccacctctggtagcacccttaccgaaaagatcatgtggcacgctaagaacgtg

SEQ ID NO: 370879 - DNA, 60 bp, Artificial
  Synthetic oligonucleotide
cgccacctggcatcgcagaacctactacaagaaaggaagcaatgttaggtactcatgtaa

SEQ ID NO: 370880 - DNA, 56 bp, Artificial
  Synthetic oligonucleotide
cgccaccttaggttttggggcgtatatgtccaaggcacatggtgtcgaccctaaca

SEQ ID NO: 370881 - DNA, 51 bp, Artificial
  Synthetic oligonucleotide
cgccacgcatctctacgatgtcggcggttgcatgtcgatgtcgcgactcat

SEQ ID NO: 370882 - DNA, 55 bp, Artificial
  Synthetic oligonucleotide
cgccacgccatttacaagagaccagacacacagagtatagtcaaggtcccttgcg

SEQ ID NO: 370883 - DNA, 60 bp, Artificial
  Synthetic oligonucleotide
cgccacgcccgtaatcaacgccgcgatccaagcattcctgcaagcatgggacggtctacg

SEQ ID NO: 370884 - DNA, 59 bp, Artificial
  Synthetic oligonucleotide
cgccacgctcgccacatcatgactcagtcccttcccactcgattttttggactattagg

SEQ ID NO: 370885 - DNA, 59 bp, Artificial
  Synthetic oligonucleotide
cgccacggctagtcagaggctcagggcagtgaacgccatcctaaaccacatccccgtgg

SEQ ID NO: 370886 - DNA, 59 bp, Artificial
  Synthetic oligonucleotide
cgccacggtctcgatatgaacctagagaaacagtatgtgagcaaacaagactgcacata

SEQ ID NO: 370887 - DNA, 55 bp, Artificial
  Synthetic oligonucleotide
cgccacgtaagtctcataaacccgatcggggtgttcgacgtgtatcgtcgcgtct

SEQ ID NO: 370888 - DNA, 55 bp, Artificial
  Synthetic oligonucleotide
cgccacgtctggccgataagtgttgcgcgacccgtacgtgacaacgcctttatcg

SEQ ID NO: 370889 - DNA, 60 bp, Artificial
  Synthetic oligonucleotide
cgccacgtgtgagcagatcgctgactcacagcatcggtctcacagacaaatggtgacaac

SEQ ID NO: 370890 - DNA, 57 bp, Artificial
  Synthetic oligonucleotide
cgccactagacgttataatcactattgcggggcaagagccgataaaggtattaatcc

SEQ ID NO: 370891 - DNA, 60 bp, Artificial
  Synthetic oligonucleotide
cgccactagattttgccactgagtcctccactgagatacccattacactaaccatagctc

SEQ ID NO: 370892 - DNA, 55 bp, Artificial
  Synthetic oligonucleotide
cgccactagcgactccaacgccgattccaccctcagcgccatctaccgttctgac

SEQ ID NO: 370893 - DNA, 55 bp, Artificial
  Synthetic oligonucleotide
cgccactcacttctggtaccgtgactatcaaggggacttcggtggattctgtcgt

SEQ ID NO: 370894 - DNA, 52 bp, Artificial
  Synthetic oligonucleotide
cgccactcagtcccaatccccgtactcggtatgattcgggcccttgaagtgc

SEQ ID NO: 370895 - DNA, 58 bp, Artificial
  Synthetic oligonucleotide
cgccactccagtgccttgttgtactaagtttacgcactggatatttcctgtggcgttg

SEQ ID NO: 370896 - DNA, 55 bp, Artificial
  Synthetic oligonucleotide
cgccactcctctctccagtatctcgggagagtcacctgggaacgtccatctccta

SEQ ID NO: 370897 - DNA, 55 bp, Artificial
  Synthetic oligonucleotide
cgccactctctgcctgagttgcagtgagtagttcccctgtgcgagaatccatgat

SEQ ID NO: 370898 - DNA, 57 bp, Artificial
  Synthetic oligonucleotide
cgccactgaagtccccatctgctgaggcgtgtggttatagcgatcgtgtggcacaac

SEQ ID NO: 370899 - DNA, 56 bp, Artificial
  Synthetic oligonucleotide
cgccactgcgaacctttatatgcggcacccagatggaagcacgttcctctgcccaa

SEQ ID NO: 370900 - DNA, 55 bp, Artificial
  Synthetic oligonucleotide
cgccactgctgaggagatggtgaagatacaagtagcgattgaggggctgggagtc

SEQ ID NO: 370901 - DNA, 50 bp, Artificial
  Synthetic oligonucleotide
cgccactgggtagtccaagactgcaattgttccatctatgttggtcatat

SEQ ID NO: 370902 - DNA, 55 bp, Artificial
  Synthetic oligonucleotide
cgccactgtgttgatgcatagaagtccgcatacttcttgttgtctggtgaatgtc

SEQ ID NO: 370903 - DNA, 55 bp, Artificial
  Synthetic oligonucleotide
cgccactgttgtgctaccagtcgaagcccttcacaagagaacatcgctctacccg

SEQ ID NO: 370904 - DNA, 53 bp, Artificial
  Synthetic oligonucleotide
cgccacttatcggacgccgcgaaattagggttttcgttcttgaattgtacgtc

SEQ ID NO: 370905 - DNA, 59 bp, Artificial
  Synthetic oligonucleotide
cgccacttcagtggcgcgacctaaattgtacacagtgcaatttggaagtcttgacccag

SEQ ID NO: 370906 - DNA, 51 bp, Artificial
  Synthetic oligonucleotide
cgccacttcctggttagaaaacgtaaacgcataacatgtcaagttggtacg

SEQ ID NO: 370907 - DNA, 55 bp, Artificial
  Synthetic oligonucleotide
cgccacttcgacaataaaggtaggattttatagagtcgaaatccactaccgcaga

SEQ ID NO: 370908 - DNA, 55 bp, Artificial
  Synthetic oligonucleotide
cgccacttgcagatcagtttcgtgaactgttagtaggggttgactttgtatggga

SEQ ID NO: 370909 - DNA, 60 bp, Artificial
  Synthetic oligonucleotide
cgccagaaactgtggtgtcctcacgtgcaggggtgacagttggagtgtgaccatggtagt

SEQ ID NO: 370910 - DNA, 60 bp, Artificial
  Synthetic oligonucleotide
cgccagaagccggctcgctcagcttatggcgggtgcgggcatcagtcctaggcaattctg

SEQ ID NO: 370911 - DNA, 54 bp, Artificial
  Synthetic oligonucleotide
cgccagacaagacgcatggaacgaactaacccaaacaaaaactaacgacaaatg

SEQ ID NO: 370912 - DNA, 53 bp, Artificial
  Synthetic oligonucleotide
cgccagacacccacttagtgtttaaacccattgtaacggaaggaactacgagc

SEQ ID NO: 370913 - DNA, 57 bp, Artificial
  Synthetic oligonucleotide
cgccagacatcggccgtattataagcatcggcaattttttcacgggctattgaaaaa

SEQ ID NO: 370914 - DNA, 58 bp, Artificial
  Synthetic oligonucleotide
cgccagaccagaagatgtgtctttccaggggcggggagtcttcgagctctcggacgaa

SEQ ID NO: 370915 - DNA, 56 bp, Artificial
  Synthetic oligonucleotide
cgccagactctctttcaaatcagtcaagatccaaaccacctccggtgacatcattc

SEQ ID NO: 370916 - DNA, 55 bp, Artificial
  Synthetic oligonucleotide
cgccagagataccctttacaacggaggcggcgaatgagattgctcgcgtgacagg

SEQ ID NO: 370917 - DNA, 60 bp, Artificial
  Synthetic oligonucleotide
cgccagatagcatctctcaactctgtgcctagctttatgctgaggaaagaactggggact

SEQ ID NO: 370918 - DNA, 50 bp, Artificial
  Synthetic oligonucleotide
cgccagcaatataatagtagagctggagtgacagcatatcctggaataga

SEQ ID NO: 370919 - DNA, 60 bp, Artificial
  Synthetic oligonucleotide
cgccagcacattggttcgttgcattatagaactgtggccagttccgtgcataccgcccag

SEQ ID NO: 370920 - DNA, 52 bp, Artificial
  Synthetic oligonucleotide
cgccagcactcaagatcgatttgaaccctcacaatccaatgagggtctgcga

SEQ ID NO: 370921 - DNA, 55 bp, Artificial
  Synthetic oligonucleotide
cgccagcagatttacaaatctctgagacgcctttgaaaccatctcctaggtttct

SEQ ID NO: 370922 - DNA, 60 bp, Artificial
  Synthetic oligonucleotide
cgccagctacataggcgtggtgcacacgatagtgcatagtgtttttctctccacttaaat

SEQ ID NO: 370923 - DNA, 57 bp, Artificial
  Synthetic oligonucleotide
cgccagctcgagatttcggtcactttggattatcccattattctagggcgactaccc

SEQ ID NO: 370924 - DNA, 55 bp, Artificial
  Synthetic oligonucleotide
cgccagctcgagattttggtcactttgggctgtctcattattcgagagcaaccac

SEQ ID NO: 370925 - DNA, 58 bp, Artificial
  Synthetic oligonucleotide
cgccagctcgtttgttaataagaataccagacctcgctataaatttcgagctgaagga

SEQ ID NO: 370926 - DNA, 55 bp, Artificial
  Synthetic oligonucleotide
cgccagctctggcttcacgactactgccgctgaggtcactaagggtagggccaca

SEQ ID NO: 370927 - DNA, 55 bp, Artificial
  Synthetic oligonucleotide
cgccagctcttagagggtttacgtctagtggctgagttgtcgactggagaactgt

SEQ ID NO: 370928 - DNA, 55 bp, Artificial
  Synthetic oligonucleotide
cgccagctgtcaagcgagaacacacaggaacagaaattgttgacgtgatgtgtca

SEQ ID NO: 370929 - DNA, 58 bp, Artificial
  Synthetic oligonucleotide
cgccaggaagatcaatatacagaaatgtaactgaatttaattggagagatgaattgga

SEQ ID NO: 370930 - DNA, 53 bp, Artificial
  Synthetic oligonucleotide
cgccaggcaggcatggatctccgaacgccgtcaggctattaggagacgtgagc

SEQ ID NO: 370931 - DNA, 57 bp, Artificial
  Synthetic oligonucleotide
cgccaggcatcctttagccgttcccatagacatttcatccggtgttagccggataac

SEQ ID NO: 370932 - DNA, 52 bp, Artificial
  Synthetic oligonucleotide
cgccaggctaggccttcgccactgcgaacctttatatgcggcacccagatgg

SEQ ID NO: 370933 - DNA, 59 bp, Artificial
  Synthetic oligonucleotide
cgccagggcgtgtgatgccaagggaacaagtaccatgaataccctaataagtgctagaa

SEQ ID NO: 370934 - DNA, 52 bp, Artificial
  Synthetic oligonucleotide
cgccaggtaatgaagctcaagagagaagggatactggatcataaccctcttg

SEQ ID NO: 370935 - DNA, 59 bp, Artificial
  Synthetic oligonucleotide
cgccaggtgagaacatgagcatggctcagtggaaagaagctaaccctcacggagtgcgc

SEQ ID NO: 370936 - DNA, 60 bp, Artificial
  Synthetic oligonucleotide
cgccagtacagtgtgcaagctgcaaagttgcacacacggtgtgcccggggacttgcaaat

SEQ ID NO: 370937 - DNA, 55 bp, Artificial
  Synthetic oligonucleotide
cgccagtcattgcatgtgaccatccacacatagactgcgcgttttacgaggtgcc

SEQ ID NO: 370938 - DNA, 55 bp, Artificial
  Synthetic oligonucleotide
cgccagtctggtagatttcgagcaactgtagaccgcctcgcatcgcatgactcaa

SEQ ID NO: 370939 - DNA, 60 bp, Artificial
  Synthetic oligonucleotide
cgccagtgatgggagagacagatgctacatgaatcattgcaacacatcagtcatcacaga

SEQ ID NO: 370940 - DNA, 60 bp, Artificial
  Synthetic oligonucleotide
cgccagtgcgttacgcgagattatgagcactgtcgtgggtagtgctccgattcagcaatc

SEQ ID NO: 370941 - DNA, 60 bp, Artificial
  Synthetic oligonucleotide
cgccagtgtcagacaacttccggattcgacgtcacatatacgctgcctgacggcactact

SEQ ID NO: 370942 - DNA, 55 bp, Artificial
  Synthetic oligonucleotide
cgccagttagcaagtcgtcaacgttaggtactacgaccactacagcgtcaactgt

SEQ ID NO: 370943 - DNA, 59 bp, Artificial
  Synthetic oligonucleotide
cgccagttcactggtactgttggtctccctgggggcaatcggtttctggatgtgctcca

SEQ ID NO: 370944 - DNA, 56 bp, Artificial
  Synthetic oligonucleotide
cgccagttgcacttaccttttgaatacgaacaagatgattaccccgagcgggcagg

SEQ ID NO: 370945 - DNA, 55 bp, Artificial
  Synthetic oligonucleotide
cgccagtttacctttatttcacccttcatccagttatcatccaactggctaggtc

SEQ ID NO: 370946 - DNA, 55 bp, Artificial
  Synthetic oligonucleotide
cgccagtttcccaatgaagaaccgtaccttcagcgtttctgttctggctgaccgt

SEQ ID NO: 370947 - DNA, 58 bp, Artificial
  Synthetic oligonucleotide
cgccataaagctggggagacagtcagcaaaggccaaacgtcggctgtttgagctaccg

SEQ ID NO: 370948 - DNA, 57 bp, Artificial
  Synthetic oligonucleotide
cgccataaaggcaactgcaaccctcaccaaggacgaaagagctgttggctttgttaa

SEQ ID NO: 370949 - DNA, 57 bp, Artificial
  Synthetic oligonucleotide
cgccataacacactcaagaatgctatatcagatatgtcggatgatgttaatattgtc

SEQ ID NO: 370950 - DNA, 55 bp, Artificial
  Synthetic oligonucleotide
cgccataagagttaccttcgtattctcctattggatgcgtagcccgcaaagcctc

SEQ ID NO: 370951 - DNA, 55 bp, Artificial
  Synthetic oligonucleotide
cgccatacagtttggcagattttgttcaggatggtcctattgcgcccgtagtggc

SEQ ID NO: 370952 - DNA, 59 bp, Artificial
  Synthetic oligonucleotide
cgccataccacccatgtcccctacaatccaaccagctcaggacttgtagaacgctctaa

SEQ ID NO: 370953 - DNA, 55 bp, Artificial
  Synthetic oligonucleotide
cgccatacccgttaacatcgccctgaaaggagctgccctagaggtatcgggtaac

SEQ ID NO: 370954 - DNA, 53 bp, Artificial
  Synthetic oligonucleotide
cgccataggcttcggccgcagttttaggccttccggactaccaaaatggccgt

SEQ ID NO: 370955 - DNA, 60 bp, Artificial
  Synthetic oligonucleotide
cgccatatggctctacggacctgccaccaccgggaagaccaacattgcagaagctattgc

SEQ ID NO: 370956 - DNA, 59 bp, Artificial
  Synthetic oligonucleotide
cgccatcaatgacgttataccatgcgtcgttactgtacacctttggactaagatctaag

SEQ ID NO: 370957 - DNA, 56 bp, Artificial
  Synthetic oligonucleotide
cgccatcacattatgacgatatgtttaattcaagaaaagctttaacgccagtgttc

SEQ ID NO: 370958 - DNA, 55 bp, Artificial
  Synthetic oligonucleotide
cgccatccgctggctcattttggccgactactcaagtcataactgaggaggagct

SEQ ID NO: 370959 - DNA, 52 bp, Artificial
  Synthetic oligonucleotide
cgccatccgtcaaccggttctcttcgggatcaagcctttcgtgatcccccgg

SEQ ID NO: 370960 - DNA, 55 bp, Artificial
  Synthetic oligonucleotide
cgccatcgtatcaagaccaggtcttcaagcgtatttcattggaaagaacactgag

SEQ ID NO: 370961 - DNA, 60 bp, Artificial
  Synthetic oligonucleotide
cgccatctagtgagcaaactatacactgatgacatgcggccagaaacggttgaaaccaca

SEQ ID NO: 370962 - DNA, 56 bp, Artificial
  Synthetic oligonucleotide
cgccatgacaaaatatgcgacatcacatctaatcaatgaataccataacgatttgg

SEQ ID NO: 370963 - DNA, 53 bp, Artificial
  Synthetic oligonucleotide
cgccatgcgtttataagatataatactctattggcgacggtgcaagactggac

SEQ ID NO: 370964 - DNA, 60 bp, Artificial
  Synthetic oligonucleotide
cgccatggaccgggaggtggctgcatcgtgcggaggcgcagttttcgtatgcttggtgct

SEQ ID NO: 370965 - DNA, 55 bp, Artificial
  Synthetic oligonucleotide
cgccatggacgcgtacacagccagagcgctttcggttttggagggcctagccatt

SEQ ID NO: 370966 - DNA, 60 bp, Artificial
  Synthetic oligonucleotide
cgccatggccttgcaaagggccatggttgatatgaccagaagggacattcgttctgattg

SEQ ID NO: 370967 - DNA, 55 bp, Artificial
  Synthetic oligonucleotide
cgccatggcgaacctgagaatcctagccgcggtacgtttggccaatgttcgaaca

SEQ ID NO: 370968 - DNA, 55 bp, Artificial
  Synthetic oligonucleotide
cgccatgttgtgaaacgtgttttgtctgtggagaaggacacgactatggttgatc

SEQ ID NO: 370969 - DNA, 54 bp, Artificial
  Synthetic oligonucleotide
cgccattaggcgtggtgaagcaaactaaacccgcagcaggcggtcctattggta

SEQ ID NO: 370970 - DNA, 55 bp, Artificial
  Synthetic oligonucleotide
cgccattattaagtatctaaacccctgcaggtaaacctgaactcgcttacttgga

SEQ ID NO: 370971 - DNA, 55 bp, Artificial
  Synthetic oligonucleotide
cgccattattatttggaaactctccaacgtgtctttaacgatgagagacgtttgg

SEQ ID NO: 370972 - DNA, 57 bp, Artificial
  Synthetic oligonucleotide
cgccattattttggtgaggcatacacaaagaagggcaagaaaagtggtaaggcacga

SEQ ID NO: 370973 - DNA, 60 bp, Artificial
  Synthetic oligonucleotide
cgccattcaacacattggtgaacaatcagccgtcgaggaatgcaacagcttcattggggt

SEQ ID NO: 370974 - DNA, 58 bp, Artificial
  Synthetic oligonucleotide
cgccattccaaccccgaagggacccaatcaatgctggattcgagccattgacattgga

SEQ ID NO: 370975 - DNA, 55 bp, Artificial
  Synthetic oligonucleotide
cgccattcgagggtgtctccgtgcttgttgatgtaggacttgacgtcggaacttg

SEQ ID NO: 370976 - DNA, 60 bp, Artificial
  Synthetic oligonucleotide
cgccattctctgcctgatgtgcagtgatgagttcccctgtgcgtgaatccatgaccggtg

SEQ ID NO: 370977 - DNA, 55 bp, Artificial
  Synthetic oligonucleotide
cgccattctgtgcctgacgagcagtgatggtttcccctgtgcgtgaatccatagt

SEQ ID NO: 370978 - DNA, 55 bp, Artificial
  Synthetic oligonucleotide
cgccattgaccagaagcgatccgaggcactaaatattatggaagttggatatgct

SEQ ID NO: 370979 - DNA, 60 bp, Artificial
  Synthetic oligonucleotide
cgccattgctgccacgctcgccattagtaaagacgcaatagaaattacgtcacgcacgac

SEQ ID NO: 370980 - DNA, 60 bp, Artificial
  Synthetic oligonucleotide
cgccattgctgtagatcttcggactcaggtccagatgaccacatagatagttatgaggac

SEQ ID NO: 370981 - DNA, 52 bp, Artificial
  Synthetic oligonucleotide
cgccattggtccgtttaaaacacgccataggccgcggaccccattttcgccc

SEQ ID NO: 370982 - DNA, 55 bp, Artificial
  Synthetic oligonucleotide
cgccattgtatcaagtaaatataggaacattcggctccgtccggagacgttcggc

SEQ ID NO: 370983 - DNA, 57 bp, Artificial
  Synthetic oligonucleotide
cgccattgttgttgtgttctggaggcggaagtaaattgggttcttgatgtcgtcgaa

SEQ ID NO: 370984 - DNA, 55 bp, Artificial
  Synthetic oligonucleotide
cgccatttcccctggtagacctggcagatgaggctagaaataccccactggcgac

SEQ ID NO: 370985 - DNA, 57 bp, Artificial
  Synthetic oligonucleotide
cgccattttgcagcttctacgctgcagcaacctaaaggcgaccctgtacggtaaatt

SEQ ID NO: 370986 - DNA, 50 bp, Artificial
  Synthetic oligonucleotide
cgcccaaacgccgtaacgttacccgttacatcttcgataaccagtttacc

SEQ ID NO: 370987 - DNA, 53 bp, Artificial
  Synthetic oligonucleotide
cgcccaaacgggaagaacgaaccaaatcccaataacaacaatcataaagagga

SEQ ID NO: 370988 - DNA, 60 bp, Artificial
  Synthetic oligonucleotide
cgcccaaatgcacgcgatgatgaacgatgtgtctccagaagacctagatcgtgtacgtac

SEQ ID NO: 370989 - DNA, 55 bp, Artificial
  Synthetic oligonucleotide
cgcccaaccgactgttccggtttcgattggtcagtcgcgtattggatgctggagg

SEQ ID NO: 370990 - DNA, 57 bp, Artificial
  Synthetic oligonucleotide
cgcccaactacactttttggactgatgaatttgttcagtaaaccactcaaatgagaa

SEQ ID NO: 370991 - DNA, 57 bp, Artificial
  Synthetic oligonucleotide
cgcccaagaagaaatgtacggtggaacattatcgaatgattcaattgaataacgagg

SEQ ID NO: 370992 - DNA, 59 bp, Artificial
  Synthetic oligonucleotide
cgcccaagaaggctcaaagtattctgtccataagagagaaattttcctatggtgctgta

SEQ ID NO: 370993 - DNA, 55 bp, Artificial
  Synthetic oligonucleotide
cgcccaagcggtttcatactcgctaccaagcatttctacctctggcactagctga

SEQ ID NO: 370994 - DNA, 55 bp, Artificial
  Synthetic oligonucleotide
cgcccaattgtggattttgtagcccatgtttctcctggttggaccgtgatgggcc

SEQ ID NO: 370995 - DNA, 55 bp, Artificial
  Synthetic oligonucleotide
cgcccacagaatatcattgaacccactaacttttacctacaacagaacacgagtc

SEQ ID NO: 370996 - DNA, 55 bp, Artificial
  Synthetic oligonucleotide
cgcccacagacgctaagtctctcaacatccgggatagtcctcagtcttcaaacac

SEQ ID NO: 370997 - DNA, 58 bp, Artificial
  Synthetic oligonucleotide
cgcccaccccagaaactcgcgtgcctgaggttggtaagtccggcattgttgcctcaga

SEQ ID NO: 370998 - DNA, 55 bp, Artificial
  Synthetic oligonucleotide
cgcccaccccgggcgcctctaccggtgcgggccccgcctgtggacgcgcgattgc

SEQ ID NO: 370999 - DNA, 60 bp, Artificial
  Synthetic oligonucleotide
cgcccacgcctgttgctacaattgttagcacagatgagtacgtgcaacgcaccagtttat

SEQ ID NO: 371000 - DNA, 57 bp, Artificial
  Synthetic oligonucleotide
cgcccacggaccctccagcccgccacaccacttcgccacaacagaacccatccgcac

SEQ ID NO: 371001 - DNA, 57 bp, Artificial
  Synthetic oligonucleotide
cgcccacgtacggtccacgtcgccctacaatgtctctcttgaccaataggctttgcc

SEQ ID NO: 371002 - DNA, 54 bp, Artificial
  Synthetic oligonucleotide
cgcccactccagcctcgctgggttggtcgaaagagtcgcgcgcacactgggtgc

SEQ ID NO: 371003 - DNA, 55 bp, Artificial
  Synthetic oligonucleotide
cgcccacttgtatcttttaggagggtatctcgtccttcactcactactgcacacc

SEQ ID NO: 371004 - DNA, 55 bp, Artificial
  Synthetic oligonucleotide
cgcccagaggttaaactagcggcttcgatcctgtgcatgatggaattggcagtcc

SEQ ID NO: 371005 - DNA, 56 bp, Artificial
  Synthetic oligonucleotide
cgcccagagtctccaaaccttcgcaactgctgagttcaagagcgggttctgttaca

SEQ ID NO: 371006 - DNA, 55 bp, Artificial
  Synthetic oligonucleotide
cgcccagcaacaacagtccatcactagcatcactgcacagctgggaaccatcgac

SEQ ID NO: 371007 - DNA, 55 bp, Artificial
  Synthetic oligonucleotide
cgcccaggcagtgtcctactacctattgaccagaggctggactcaagacgatggg

SEQ ID NO: 371008 - DNA, 54 bp, Artificial
  Synthetic oligonucleotide
cgcccaggtaattggaccgaatgacacggaatcttggtgttgccagtcatgcac

SEQ ID NO: 371009 - DNA, 55 bp, Artificial
  Synthetic oligonucleotide
cgcccagtactgacagagtcagcgccgcccatgcgtgaaatgagtgactcgcaaa

SEQ ID NO: 371010 - DNA, 55 bp, Artificial
  Synthetic oligonucleotide
cgcccagttgtgcaagccccacctcccacggaagctacgttgactggagctctag

SEQ ID NO: 371011 - DNA, 60 bp, Artificial
  Synthetic oligonucleotide
cgcccagttttcaaagtacgcagattattacctcaatgccactcataggcagcccaggcg

SEQ ID NO: 371012 - DNA, 51 bp, Artificial
  Synthetic oligonucleotide
cgcccatacacaaaagacggcgcgcgtttaacctcgtaccacgcacacggt

SEQ ID NO: 371013 - DNA, 55 bp, Artificial
  Synthetic oligonucleotide
cgcccatagtatcgaggcgagtaaacaggtcgttgaggcatttcaatcggcaggt

SEQ ID NO: 371014 - DNA, 55 bp, Artificial
  Synthetic oligonucleotide
cgcccatatactagtcacaagagagccctacctgtcctgtgatccacagggatgc

SEQ ID NO: 371015 - DNA, 56 bp, Artificial
  Synthetic oligonucleotide
cgcccatatgcagttaaacgtagtgatggtaaacgccgcacgaatcaagttactag

SEQ ID NO: 371016 - DNA, 60 bp, Artificial
  Synthetic oligonucleotide
cgcccatcaagactctgtataaatgtacccgctttgtgcattgtattcagtcgctctgcg

SEQ ID NO: 371017 - DNA, 55 bp, Artificial
  Synthetic oligonucleotide
cgcccatcacagcatacgcccagcagacaaggggcctcctggggtgtataatcac

SEQ ID NO: 371018 - DNA, 55 bp, Artificial
  Synthetic oligonucleotide
cgcccatcaggtcgcagaaagcttctcgaagaaatacaaatttccttctagatct

SEQ ID NO: 371019 - DNA, 55 bp, Artificial
  Synthetic oligonucleotide
cgcccatcgcccctgaaccaacagtttcgccggataccatcatgtggcgtgggct

SEQ ID NO: 371020 - DNA, 60 bp, Artificial
  Synthetic oligonucleotide
cgcccatgaatgtctaaaagcttccttatgtcatcagaaccttgagttgtgatcaccata

SEQ ID NO: 371021 - DNA, 55 bp, Artificial
  Synthetic oligonucleotide
cgcccatgggtagagcatggactgcggtgcatgtgacttcggtcaccacgggcat

SEQ ID NO: 371022 - DNA, 55 bp, Artificial
  Synthetic oligonucleotide
cgcccatgtgctcccaacaagtgatgtacacagctttgagcagggcagttcacgc

SEQ ID NO: 371023 - DNA, 50 bp, Artificial
  Synthetic oligonucleotide
cgcccattggggcggttccagaaaacactcccctaccagatgactcgcct

SEQ ID NO: 371024 - DNA, 56 bp, Artificial
  Synthetic oligonucleotide
cgccccaaagggatcaggggtaccaaagcgacggccgtcagtccgtgcgcctcaga

SEQ ID NO: 371025 - DNA, 50 bp, Artificial
  Synthetic oligonucleotide
cgccccaaattaccccaggaacatttcaaccgttccgcatacccaaaacg

SEQ ID NO: 371026 - DNA, 58 bp, Artificial
  Synthetic oligonucleotide
cgccccaaccacattcgcccggaactatgccgtccaaggagtgctctggctctcgccg

SEQ ID NO: 371027 - DNA, 58 bp, Artificial
  Synthetic oligonucleotide
cgccccaacttaacccgattgatggaccactacctgaggataatgagccaagtggata

SEQ ID NO: 371028 - DNA, 53 bp, Artificial
  Synthetic oligonucleotide
cgccccaagggccactggcctgtttttaggttggtctaaacaaggtctctcgc

SEQ ID NO: 371029 - DNA, 58 bp, Artificial
  Synthetic oligonucleotide
cgccccacgcctcaaaatgtgtatatgtacgcgactcttgagcccttcttcggttcta

SEQ ID NO: 371030 - DNA, 55 bp, Artificial
  Synthetic oligonucleotide
cgccccagaaacggccagtacgttatacataatcttacactatgcgatccctcag

SEQ ID NO: 371031 - DNA, 53 bp, Artificial
  Synthetic oligonucleotide
cgccccaggtccagagggttccaactttgccaaagggaccaacgtggctctag

SEQ ID NO: 371032 - DNA, 52 bp, Artificial
  Synthetic oligonucleotide
cgccccatggaaactcaccggcagaaccgtcggaccacacttcgtcaccacc

SEQ ID NO: 371033 - DNA, 60 bp, Artificial
  Synthetic oligonucleotide
cgccccattgagctacagcacaggagcaaccacatacgtgccaatcacagtaacggtggc

SEQ ID NO: 371034 - DNA, 59 bp, Artificial
  Synthetic oligonucleotide
cgccccattggcaccagatacctgactcgtaatctgtaattgcttgttaatcaataaac

SEQ ID NO: 371035 - DNA, 52 bp, Artificial
  Synthetic oligonucleotide
cgccccccccctggtccatgccccttgtgcaaagacccttcccattggaaac

SEQ ID NO: 371036 - DNA, 52 bp, Artificial
  Synthetic oligonucleotide
cgccccccccgacccgcccaagtcggtcatgccgcctgtcacccacttcccg

SEQ ID NO: 371037 - DNA, 52 bp, Artificial
  Synthetic oligonucleotide
cgcccccctcaaccccggtggagccaaagtggcctaacacacgaataaccca

SEQ ID NO: 371038 - DNA, 55 bp, Artificial
  Synthetic oligonucleotide
cgcccccgacccttactgccgacatcctggttggctctaaccccttcttgctcaa

SEQ ID NO: 371039 - DNA, 59 bp, Artificial
  Synthetic oligonucleotide
cgcccccgagtcgcattatggttgtgcggcgtgtcggtaccatccctgatgtcggttca

SEQ ID NO: 371040 - DNA, 58 bp, Artificial
  Synthetic oligonucleotide
cgccccctaatggtgggttctgtatggaacagaagagcccttcactatgaaagccagc

SEQ ID NO: 371041 - DNA, 52 bp, Artificial
  Synthetic oligonucleotide
cgccccctctgaggtttacaccccggaagcacctgaacaaccgactaacgaa

SEQ ID NO: 371042 - DNA, 58 bp, Artificial
  Synthetic oligonucleotide
cgccccctgaggttaccggaagggcctccatgctctcagcggtcgaaatttctgctga

SEQ ID NO: 371043 - DNA, 57 bp, Artificial
  Synthetic oligonucleotide
cgccccctgatgagttggctcattcggagacaggttccatctcctccatgccccccc

SEQ ID NO: 371044 - DNA, 55 bp, Artificial
  Synthetic oligonucleotide
cgccccgatagagttgatttacgcatgcagatcagcaaaggaatttgcgagattg

SEQ ID NO: 371045 - DNA, 53 bp, Artificial
  Synthetic oligonucleotide
cgccccgctcacattgtcccccacctcgcaaaaccgcacaacacccttgtgag

SEQ ID NO: 371046 - DNA, 52 bp, Artificial
  Synthetic oligonucleotide
cgccccggaagaaacggacagtggtcctcaccgaatcaaccgtgtctactgc

SEQ ID NO: 371047 - DNA, 50 bp, Artificial
  Synthetic oligonucleotide
cgcccctagtgttgtcgccacccctgagcctatagagctggttgggccga

SEQ ID NO: 371048 - DNA, 60 bp, Artificial
  Synthetic oligonucleotide
cgcccctctgtgataccccgtggcaaccctgatcagaatcttgagaccctgcaggccttc

SEQ ID NO: 371049 - DNA, 55 bp, Artificial
  Synthetic oligonucleotide
cgcccctgacggtagttcatcggtgatttcacagagcacttaacggagtatctcg

SEQ ID NO: 371050 - DNA, 55 bp, Artificial
  Synthetic oligonucleotide
cgcccctgctacccgttaagaaaccagggactaatgattataggcctgtccagga

SEQ ID NO: 371051 - DNA, 55 bp, Artificial
  Synthetic oligonucleotide
cgcccctgtggactttgtcaaccttggtccagtgtgtagacgggtcgacttcttg

SEQ ID NO: 371052 - DNA, 55 bp, Artificial
  Synthetic oligonucleotide
cgccccttgtatagcgtaaatatagtcaacgcaacgttaaccgcaaacgggatgc

SEQ ID NO: 371053 - DNA, 59 bp, Artificial
  Synthetic oligonucleotide
cgcccgaatgtctactgttgagactcctgcccaagatacccttgcaaccaaagagccca

SEQ ID NO: 371054 - DNA, 58 bp, Artificial
  Synthetic oligonucleotide
cgcccgacgaccttacgtcctctgtgatgttaattacggcttggtcagtctgcgcaaa

SEQ ID NO: 371055 - DNA, 58 bp, Artificial
  Synthetic oligonucleotide
cgcccgagcttcccgactaacggcaactgttgagctcgttgcaagcccagaccgctta

SEQ ID NO: 371056 - DNA, 53 bp, Artificial
  Synthetic oligonucleotide
cgcccgatcctaaatcgcgtctgggagacgttatccagcacatgggccgcaat

SEQ ID NO: 371057 - DNA, 53 bp, Artificial
  Synthetic oligonucleotide
cgcccgattcccaccccgtgtcttcttgccagatgacacattcactggcgcca

SEQ ID NO: 371058 - DNA, 55 bp, Artificial
  Synthetic oligonucleotide
cgcccgatttttggtgtcctcccctttagcccacggcccaggcccatgaatcgca

SEQ ID NO: 371059 - DNA, 60 bp, Artificial
  Synthetic oligonucleotide
cgcccgcaatagagtggactgaaccgcgctctaaatacaaattccgatggactggcgtca

SEQ ID NO: 371060 - DNA, 55 bp, Artificial
  Synthetic oligonucleotide
cgcccgccacgtgtctcaatcctgacgctccgtggagtcttatttagcgcacccg

SEQ ID NO: 371061 - DNA, 56 bp, Artificial
  Synthetic oligonucleotide
cgcccgcccacctgtggttattgaacctgtgggggccgcggatccatccattgtta

SEQ ID NO: 371062 - DNA, 51 bp, Artificial
  Synthetic oligonucleotide
cgcccgccgtggtgtacttccgaccgcataccggtgaccccggcgcactgg

SEQ ID NO: 371063 - DNA, 54 bp, Artificial
  Synthetic oligonucleotide
cgcccgcgaaaagtactataaatctcgcgggaagtggtgggacggctataatgg

SEQ ID NO: 371064 - DNA, 55 bp, Artificial
  Synthetic oligonucleotide
cgcccgctcaaaatgcagaatgcacaaatacgtagaatcagacccgatggtacag

SEQ ID NO: 371065 - DNA, 56 bp, Artificial
  Synthetic oligonucleotide
cgcccgctcattcaggttctcacgtgtgtgccagccgaagtgtgcctgggaaaaca

SEQ ID NO: 371066 - DNA, 53 bp, Artificial
  Synthetic oligonucleotide
cgcccgcttttatacaaagatcccgtgtaagaaactccctccggttcagttca

SEQ ID NO: 371067 - DNA, 54 bp, Artificial
  Synthetic oligonucleotide
cgcccggactataaccctcctctgctagagtcctggaaagacccggactacgtc

SEQ ID NO: 371068 - DNA, 52 bp, Artificial
  Synthetic oligonucleotide
cgcccggattataaccctccactgttagagtcctggagggacccggactaca

SEQ ID NO: 371069 - DNA, 53 bp, Artificial
  Synthetic oligonucleotide
cgcccgggggctgctcattcgggggctaaccttcccactctcggtttgtacgc

SEQ ID NO: 371070 - DNA, 53 bp, Artificial
  Synthetic oligonucleotide
cgcccggtaagtgtggttcgacttgttcatgcacggggtttaacgtagagacg

SEQ ID NO: 371071 - DNA, 55 bp, Artificial
  Synthetic oligonucleotide
cgcccggtcctggcaaacaaacagcacttggccacttgccttggcaccagctgca

SEQ ID NO: 371072 - DNA, 53 bp, Artificial
  Synthetic oligonucleotide
cgcccgtacctcgggtttccgtcttgctcgtaccgcgaaagagcgaaagcact

SEQ ID NO: 371073 - DNA, 55 bp, Artificial
  Synthetic oligonucleotide
cgcccgtacgaggagaaagccggttttggcttctcactcgacgcacgttcctgct

SEQ ID NO: 371074 - DNA, 60 bp, Artificial
  Synthetic oligonucleotide
cgcccgtcagcggacgcattatccagcatagcactccttgcatcgagcctaggtaggata

SEQ ID NO: 371075 - DNA, 54 bp, Artificial
  Synthetic oligonucleotide
cgcccgtcatgacttaccctccgatatacctgaaataatggactccacactggt

SEQ ID NO: 371076 - DNA, 55 bp, Artificial
  Synthetic oligonucleotide
cgcccgtgaattttccgggctctctatgtctgttgaaaggtctcccagtaccagc

SEQ ID NO: 371077 - DNA, 55 bp, Artificial
  Synthetic oligonucleotide
cgcccgtgtcaaggcgacggccgatgaattgaacgctactgcctcccaactccga

SEQ ID NO: 371078 - DNA, 55 bp, Artificial
  Synthetic oligonucleotide
cgcccgttcagtcgacgagcaattgaagttgtttcatcacgcgttctctgacgtg

SEQ ID NO: 371079 - DNA, 57 bp, Artificial
  Synthetic oligonucleotide
cgccctaactttgtcactcccgaagcaacaggatagcttacctgatactaaggccag

SEQ ID NO: 371080 - DNA, 51 bp, Artificial
  Synthetic oligonucleotide
cgccctacaaatgatggtctacagagtccaaatcctcctccccgtaatccc

SEQ ID NO: 371081 - DNA, 54 bp, Artificial
  Synthetic oligonucleotide
cgccctacactggggcgctggggcttcttgactttgcactcgagcttgaattca

SEQ ID NO: 371082 - DNA, 55 bp, Artificial
  Synthetic oligonucleotide
cgccctacatcaaacgatatttgggatagcgcccaaatttgcaatgggtttttcg

SEQ ID NO: 371083 - DNA, 53 bp, Artificial
  Synthetic oligonucleotide
cgccctagtcgatccaaactaccagtttggcaccaacgaactacctaaccgta

SEQ ID NO: 371084 - DNA, 59 bp, Artificial
  Synthetic oligonucleotide
cgccctatctctacttaggaggaacatcaggcaggtccaaaccgatcagggccacttca

SEQ ID NO: 371085 - DNA, 60 bp, Artificial
  Synthetic oligonucleotide
cgccctcaaatactggtggaatctcctgcaatattggagtcaggaactaagaagtagtgc

SEQ ID NO: 371086 - DNA, 57 bp, Artificial
  Synthetic oligonucleotide
cgccctcacctgtggtggtgacgtttggaacaggcttaattgccgtatctttggtga

SEQ ID NO: 371087 - DNA, 60 bp, Artificial
  Synthetic oligonucleotide
cgccctcatagtgaatgcacctaatcatgagggaatacaagcaggagttgacaggtttta

SEQ ID NO: 371088 - DNA, 51 bp, Artificial
  Synthetic oligonucleotide
cgccctcccatgcggaggacgctatggatgcaagggagcccgtgattgggt

SEQ ID NO: 371089 - DNA, 55 bp, Artificial
  Synthetic oligonucleotide
cgccctccgaggaagaatgttgagtacttcgaaccttcgcccgcaccttgtatga

SEQ ID NO: 371090 - DNA, 55 bp, Artificial
  Synthetic oligonucleotide
cgccctcttccttatatctttaaggacgcataccgcccagagacgaccaactacc

SEQ ID NO: 371091 - DNA, 59 bp, Artificial
  Synthetic oligonucleotide
cgccctcttgacagcctcttacaggcctcccgtgtcctacacgctacatcggtctcctc

SEQ ID NO: 371092 - DNA, 55 bp, Artificial
  Synthetic oligonucleotide
cgccctgactagacacacaaagagcttcaaatattacaccgtagtgttagatcct

SEQ ID NO: 371093 - DNA, 58 bp, Artificial
  Synthetic oligonucleotide
cgccctgactcatgaacgctatacgcaaatgaacgctgaccgaaacgaacccttcgaa

SEQ ID NO: 371094 - DNA, 55 bp, Artificial
  Synthetic oligonucleotide
cgccctgagacgagccgcagtcgccgcaagaattgctatgcatccaggggtgatg

SEQ ID NO: 371095 - DNA, 60 bp, Artificial
  Synthetic oligonucleotide
cgccctgagcgtgcacaaaacgagacttcagctagtcaaattatgccgatgtctgtgaag

SEQ ID NO: 371096 - DNA, 60 bp, Artificial
  Synthetic oligonucleotide
cgccctgcccaaagatcttatacagtggccgattgaacggctagctacacaggtcaacca

SEQ ID NO: 371097 - DNA, 55 bp, Artificial
  Synthetic oligonucleotide
cgccctggcgaatgctgtggtggttcggcctttcctttcccggctacagacagag

SEQ ID NO: 371098 - DNA, 55 bp, Artificial
  Synthetic oligonucleotide
cgccctgggctttgtcggggatcctgctctgggtctcttcgacttagccttccac

SEQ ID NO: 371099 - DNA, 54 bp, Artificial
  Synthetic oligonucleotide
cgccctgggtgtttttcgcgaaaacacttccgcgttctcacttcctcgtatcga

SEQ ID NO: 371100 - DNA, 50 bp, Artificial
  Synthetic oligonucleotide
cgccctggtattgtactatgtatggctgtgcgatagccctgtaaccgcag

SEQ ID NO: 371101 - DNA, 55 bp, Artificial
  Synthetic oligonucleotide
cgccctgtcaaagttgaccacttggcttttactttcgcctatgcggacttgcgcc

SEQ ID NO: 371102 - DNA, 50 bp, Artificial
  Synthetic oligonucleotide
cgccctgtgctcttgaaacggaggacgctggtgaggacacgggttgctgt

SEQ ID NO: 371103 - DNA, 57 bp, Artificial
  Synthetic oligonucleotide
cgccctgtgtggctgtcgggatcggaaaacgataggcgcatagaactaaacgactct

SEQ ID NO: 371104 - DNA, 55 bp, Artificial
  Synthetic oligonucleotide
cgccctgttagtttattattgttggatgtcggatactatatccaaagcatccaca

SEQ ID NO: 371105 - DNA, 55 bp, Artificial
  Synthetic oligonucleotide
cgcccttcaatgtctctcttgaccaataggctaagccggcgagttgacaaggacc

SEQ ID NO: 371106 - DNA, 52 bp, Artificial
  Synthetic oligonucleotide
cgcccttccggttccggtgacgtgcttccggccacgtcaacttccggccacg

SEQ ID NO: 371107 - DNA, 52 bp, Artificial
  Synthetic oligonucleotide
cgcccttctaacagattgctggagggagcgtatgggagcgtttcccagcgta

SEQ ID NO: 371108 - DNA, 55 bp, Artificial
  Synthetic oligonucleotide
cgcccttgcacccacgactcacagagatccctctctgcatccgattctcgaatcc

SEQ ID NO: 371109 - DNA, 60 bp, Artificial
  Synthetic oligonucleotide
cgcccttgctgtgctctcaaagtatatagaggcggtagtttctaccaatgtgatcaacgc

SEQ ID NO: 371110 - DNA, 54 bp, Artificial
  Synthetic oligonucleotide
cgcccttgtaaccgggttggtttgcgcctgtgagactgagtctcccgggtctaa

SEQ ID NO: 371111 - DNA, 60 bp, Artificial
  Synthetic oligonucleotide
cgcccttgtggatcctaggctttttggttgcgcatttctagagcatctcggagatggggc

SEQ ID NO: 371112 - DNA, 53 bp, Artificial
  Synthetic oligonucleotide
cgcccttgtggggacacaggtttacaaagtgaactgcggtcttccgtctgggt

SEQ ID NO: 371113 - DNA, 54 bp, Artificial
  Synthetic oligonucleotide
cgccctttcctcaaccatcaataagttcgggatcacaaagcccgggaggagggc

SEQ ID NO: 371114 - DNA, 51 bp, Artificial
  Synthetic oligonucleotide
cgccctttttgattaccggaggttaataggagagagatgggtgcgagagcg

SEQ ID NO: 371115 - DNA, 53 bp, Artificial
  Synthetic oligonucleotide
cgccgaaaacacttgaataccgaatgcaacgacctgaggcgacgactaccgtt

SEQ ID NO: 371116 - DNA, 57 bp, Artificial
  Synthetic oligonucleotide
cgccgaaagtgcgcagtgtggctgccgctcttttttggttcaaaacaagtctgttta

SEQ ID NO: 371117 - DNA, 55 bp, Artificial
  Synthetic oligonucleotide
cgccgaacacagaacttagaggtggatatataccgatggctgtgcaacagtgtac

SEQ ID NO: 371118 - DNA, 55 bp, Artificial
  Synthetic oligonucleotide
cgccgaacataacggcgacgacttataacaagattgacaaagggttggcaaagaa

SEQ ID NO: 371119 - DNA, 55 bp, Artificial
  Synthetic oligonucleotide
cgccgaaccaatgggaattctagatgatgaggtgctccggcacgtggcaacagac

SEQ ID NO: 371120 - DNA, 55 bp, Artificial
  Synthetic oligonucleotide
cgccgaaccatctagattttgggagctctaccccgaggagtgtgcctttgccgac

SEQ ID NO: 371121 - DNA, 60 bp, Artificial
  Synthetic oligonucleotide
cgccgaacgctacaactgatcaatatactacatcaaattatagcgaattaagtatcgcag

SEQ ID NO: 371122 - DNA, 53 bp, Artificial
  Synthetic oligonucleotide
cgccgaactataagttcgcgctatggagggtatctgcagaggagtacgtggaa

SEQ ID NO: 371123 - DNA, 55 bp, Artificial
  Synthetic oligonucleotide
cgccgaactcaatcgatgggaattcagcttgaccaaaggatcattctcttgttca

SEQ ID NO: 371124 - DNA, 57 bp, Artificial
  Synthetic oligonucleotide
cgccgaactcccaatctgctaccttgcccgcctcacgaaatctcgacgttgtcccaa

SEQ ID NO: 371125 - DNA, 54 bp, Artificial
  Synthetic oligonucleotide
cgccgaactgcccatgaagaataacgacgagggaacacccgacaagaggggaaa

SEQ ID NO: 371126 - DNA, 57 bp, Artificial
  Synthetic oligonucleotide
cgccgaagtccctagtggctttgtactcgcaagacctgctatcaggttggggttctc

SEQ ID NO: 371127 - DNA, 60 bp, Artificial
  Synthetic oligonucleotide
cgccgaatgatcgagacagtgtactcacgatcctactactgtcgacgctcgcagatgttt

SEQ ID NO: 371128 - DNA, 60 bp, Artificial
  Synthetic oligonucleotide
cgccgaattttatttgactagcggaggctagaaggagagagatgggtgcgagagcgtcaa

SEQ ID NO: 371129 - DNA, 56 bp, Artificial
  Synthetic oligonucleotide
cgccgacaaagggaactcgtaattcgatctccggtgagaatggctgaggaaaatcc

SEQ ID NO: 371130 - DNA, 55 bp, Artificial
  Synthetic oligonucleotide
cgccgacacgcttccatatcttcatcgcaccaggcgaaacataccatcttgcacc

SEQ ID NO: 371131 - DNA, 59 bp, Artificial
  Synthetic oligonucleotide
cgccgaccccacaaacgatatttgcatatccggacacgctgaaagcttggccggcaaca

SEQ ID NO: 371132 - DNA, 57 bp, Artificial
  Synthetic oligonucleotide
cgccgactccgtccaactagccttttatcgcgccctatagatttgcgtctcactaag

SEQ ID NO: 371133 - DNA, 55 bp, Artificial
  Synthetic oligonucleotide
cgccgactccttaatgccattagaatgaggcttaacgctacgtttaccgtttgcg

SEQ ID NO: 371134 - DNA, 59 bp, Artificial
  Synthetic oligonucleotide
cgccgactctaccccttcagatccggagcaaggtgttgttctcacctaccgagctgaca

SEQ ID NO: 371135 - DNA, 55 bp, Artificial
  Synthetic oligonucleotide
cgccgactgtgacaggagccgatttaacccacgacttggatttaggactaccgcc

SEQ ID NO: 371136 - DNA, 60 bp, Artificial
  Synthetic oligonucleotide
cgccgactgtgtagagatgcgacctatctgtgcactcggtagcagcagcgggaatacact

SEQ ID NO: 371137 - DNA, 55 bp, Artificial
  Synthetic oligonucleotide
cgccgacttaaactgcatgggtatcggcttatgtgtaacttcaagcgggttcatt

SEQ ID NO: 371138 - DNA, 55 bp, Artificial
  Synthetic oligonucleotide
cgccgagaacacaaaatggcgaagacacaagatggcggggggtgaaaggtcacgg

SEQ ID NO: 371139 - DNA, 54 bp, Artificial
  Synthetic oligonucleotide
cgccgagaagcatttgatgcgtaagccggagccctcgttacctcgctctaaaag

SEQ ID NO: 371140 - DNA, 55 bp, Artificial
  Synthetic oligonucleotide
cgccgagacctagctcaggggattcgacctcgctccgtgattgaggctgctaagg

SEQ ID NO: 371141 - DNA, 55 bp, Artificial
  Synthetic oligonucleotide
cgccgagactacagttaggctacgagcgtacatgaacaccccggggcttcccgtg

SEQ ID NO: 371142 - DNA, 55 bp, Artificial
  Synthetic oligonucleotide
cgccgagcctaaacaggccatgcctggtattgaagacatcttcacgatgccttgg

SEQ ID NO: 371143 - DNA, 55 bp, Artificial
  Synthetic oligonucleotide
cgccgaggcaacccgtcagggcaaatctcaacaaccccagataactgcatggtga

SEQ ID NO: 371144 - DNA, 55 bp, Artificial
  Synthetic oligonucleotide
cgccgagggtgtcaattatgttggacaaagtttcacggtacgaatcgcggctcgg

SEQ ID NO: 371145 - DNA, 55 bp, Artificial
  Synthetic oligonucleotide
cgccgataacagcgactacaacttagcacgcgcaatatggttacacaaacagtat

SEQ ID NO: 371146 - DNA, 55 bp, Artificial
  Synthetic oligonucleotide
cgccgatagagcctctcacagcatcatggcaggaggggactaccacatggacccc

SEQ ID NO: 371147 - DNA, 50 bp, Artificial
  Synthetic oligonucleotide
cgccgatcgagtggacgggcatcgcacgccctgaccgattctcggtgcct

SEQ ID NO: 371148 - DNA, 55 bp, Artificial
  Synthetic oligonucleotide
cgccgatggcaaggcccactttacagagaccattaaacctgtgcttgaccttacg

SEQ ID NO: 371149 - DNA, 59 bp, Artificial
  Synthetic oligonucleotide
cgccgatgtttacactgtgttaagaccagagtttgcgattcacggcgtaaatccgatgc

SEQ ID NO: 371150 - DNA, 55 bp, Artificial
  Synthetic oligonucleotide
cgccgattacggcgatgctcctcccctgagcactaagactatgttttggcgtacc

SEQ ID NO: 371151 - DNA, 55 bp, Artificial
  Synthetic oligonucleotide
cgccgattcatctaacaacttctctagatctctatcattcgaacgtctagcactc

SEQ ID NO: 371152 - DNA, 55 bp, Artificial
  Synthetic oligonucleotide
cgccgattcgtaatagaacgtctgttggtacttcttctctaactgataaaggtta

SEQ ID NO: 371153 - DNA, 58 bp, Artificial
  Synthetic oligonucleotide
cgccgcaaagctatcaggcctcggactcaacgctgtagcgtactaccggggtcttgac

SEQ ID NO: 371154 - DNA, 57 bp, Artificial
  Synthetic oligonucleotide
cgccgcaaaggagtacaaggcacaattctcgtgaagacaaacaccactcgcgcaaat

SEQ ID NO: 371155 - DNA, 55 bp, Artificial
  Synthetic oligonucleotide
cgccgcaatattatccaaattacgatcccgaccccagtagtagcggcgacgtaac

SEQ ID NO: 371156 - DNA, 51 bp, Artificial
  Synthetic oligonucleotide
cgccgcaatctagctgtgctttcgtccaacccccaaatcggtctgccgcgt

SEQ ID NO: 371157 - DNA, 55 bp, Artificial
  Synthetic oligonucleotide
cgccgcactgtctgatgagacccttgcggagatccctgttccacaacttaccctc

SEQ ID NO: 371158 - DNA, 55 bp, Artificial
  Synthetic oligonucleotide
cgccgcacttgccggagcagtacgtaagcatacaaccttacgccagttctgccgg

SEQ ID NO: 371159 - DNA, 60 bp, Artificial
  Synthetic oligonucleotide
cgccgcagcggaaggggatcagatatgtattgggtaccatgccaacaattccacagaaaa

SEQ ID NO: 371160 - DNA, 55 bp, Artificial
  Synthetic oligonucleotide
cgccgcaggtaagttgacggactccgccacgaaggcacggtaagactctgcgagt

SEQ ID NO: 371161 - DNA, 50 bp, Artificial
  Synthetic oligonucleotide
cgccgcagttgtctgcgtgctggtagtccaccgaaaacacgacttgccga

SEQ ID NO: 371162 - DNA, 60 bp, Artificial
  Synthetic oligonucleotide
cgccgcattacaagcactatatcagctggtgcttatggtggcttcagtatttcctgacca

SEQ ID NO: 371163 - DNA, 55 bp, Artificial
  Synthetic oligonucleotide
cgccgcattaggtggattagcattatacaggttacttgaatagaaatcagcccgg

SEQ ID NO: 371164 - DNA, 60 bp, Artificial
  Synthetic oligonucleotide
cgccgcattgcaacgcaatgaagaaattctcagttcgtaattgcatcccgcgcacctact

SEQ ID NO: 371165 - DNA, 55 bp, Artificial
  Synthetic oligonucleotide
cgccgccactctaagttttggggcgtacatgtccaaagcatatggtgtcgaccct

SEQ ID NO: 371166 - DNA, 59 bp, Artificial
  Synthetic oligonucleotide
cgccgcccagttacaacgccttatggctttggtgaggcgtttaatatgtatgacaatga

SEQ ID NO: 371167 - DNA, 51 bp, Artificial
  Synthetic oligonucleotide
cgccgccccggttgtatcacgaaccaagttagccccggtaaactcaacacc

SEQ ID NO: 371168 - DNA, 55 bp, Artificial
  Synthetic oligonucleotide
cgccgccgtgagggccactgtgatgtttactgcagtctctttaccggccaaggcg

SEQ ID NO: 371169 - DNA, 58 bp, Artificial
  Synthetic oligonucleotide
cgccgcctatgtgtagtccactttgcacgggtgtgggttacatatgcggtgtgtcggt

SEQ ID NO: 371170 - DNA, 55 bp, Artificial
  Synthetic oligonucleotide
cgccgcctggtcattcggtgctccactagaaaccctggtctgttaggaccccttc

SEQ ID NO: 371171 - DNA, 55 bp, Artificial
  Synthetic oligonucleotide
cgccgcctgttcaacccagagcaggacagcgggttagacctctcgctgcagaatg

SEQ ID NO: 371172 - DNA, 54 bp, Artificial
  Synthetic oligonucleotide
cgccgcgaatcctcagttgggtaccggtttcgattgacatctcaaacgggtcgg

SEQ ID NO: 371173 - DNA, 50 bp, Artificial
  Synthetic oligonucleotide
cgccgcgacgaacgtctttgcctacaagggggtcgctaccggctaccgtt

SEQ ID NO: 371174 - DNA, 55 bp, Artificial
  Synthetic oligonucleotide
cgccgcgagaactctaggtgggctcctgaacattaaggtcccaaatttggtctac

SEQ ID NO: 371175 - DNA, 52 bp, Artificial
  Synthetic oligonucleotide
cgccgcgccctttaatagtgggccccacaagggaccacgcgtcttttccgta

SEQ ID NO: 371176 - DNA, 50 bp, Artificial
  Synthetic oligonucleotide
cgccgcgctaccctctgagccccctcccagttctgagagtaccgacacat

SEQ ID NO: 371177 - DNA, 55 bp, Artificial
  Synthetic oligonucleotide
cgccgcgggtttgcagcctacacaccccacactgcaactcgtgtgactcgtggcc

SEQ ID NO: 371178 - DNA, 60 bp, Artificial
  Synthetic oligonucleotide
cgccgcgtatgatagaactaaaatacgcgcattggagctctgcaaaatactctcggcgat

SEQ ID NO: 371179 - DNA, 55 bp, Artificial
  Synthetic oligonucleotide
cgccgctaacgtcaggctgagaagttaactcgctaacttcgctatgaccactggc

SEQ ID NO: 371180 - DNA, 55 bp, Artificial
  Synthetic oligonucleotide
cgccgctactataggcgcagactgagacggggcagacgcagagggcgacgaaaga

SEQ ID NO: 371181 - DNA, 60 bp, Artificial
  Synthetic oligonucleotide
cgccgctattagcgcgagcgagaccaagagtgacgccattacgggctagaactagattta

SEQ ID NO: 371182 - DNA, 60 bp, Artificial
  Synthetic oligonucleotide
cgccgctcgtatgcgtgacgttgccatctggcagaaacacctcgacaccgctatgacact

SEQ ID NO: 371183 - DNA, 55 bp, Artificial
  Synthetic oligonucleotide
cgccgctctatactgggatgacttctcggtatacacggcattctcgagcccacgt

SEQ ID NO: 371184 - DNA, 55 bp, Artificial
  Synthetic oligonucleotide
cgccgctgaactcgtctaccaagctcgcgacgtcgtatctggagaccgacgtagc

SEQ ID NO: 371185 - DNA, 55 bp, Artificial
  Synthetic oligonucleotide
cgccgctgctttccaactatgtagacgacgacgcattcgaaagaatgttagagtc

SEQ ID NO: 371186 - DNA, 58 bp, Artificial
  Synthetic oligonucleotide
cgccgctggctcgactcattttagcaaccctacctcagtcgaattggattgggttata

SEQ ID NO: 371187 - DNA, 55 bp, Artificial
  Synthetic oligonucleotide
cgccgcttcttcaattagtagatctacatccataagatcaataggtagcaacacg

SEQ ID NO: 371188 - DNA, 60 bp, Artificial
  Synthetic oligonucleotide
cgccgcttgggcattagatactcaattgatatgatggttagtgagttattgagggaattc

SEQ ID NO: 371189 - DNA, 51 bp, Artificial
  Synthetic oligonucleotide
cgccgctttccccacctgcggcctaaggaagacaaggctgacgcgccctcc

SEQ ID NO: 371190 - DNA, 55 bp, Artificial
  Synthetic oligonucleotide
cgccggaaaactcgcgattgatgaggaatacctcttgtcttggacgactaagggc

SEQ ID NO: 371191 - DNA, 50 bp, Artificial
  Synthetic oligonucleotide
cgccggaaagatcgcttacacacctcaaacagacgtgtattcaattccta

SEQ ID NO: 371192 - DNA, 55 bp, Artificial
  Synthetic oligonucleotide
cgccggaaattttcgcaatccggtcccttatccaaatgagaggagcgtccctatg

SEQ ID NO: 371193 - DNA, 55 bp, Artificial
  Synthetic oligonucleotide
cgccggaagagttgactttatagtcatggtgtaatatgatctacctcgattgata

SEQ ID NO: 371194 - DNA, 58 bp, Artificial
  Synthetic oligonucleotide
cgccggaagtatggcagcaaggcggcaacgagccacgactactcgtcgttagggtcaa

SEQ ID NO: 371195 - DNA, 55 bp, Artificial
  Synthetic oligonucleotide
cgccggaatcaactggcaacacaatgcaggaggaaaatgtaggatttgatggcca

SEQ ID NO: 371196 - DNA, 55 bp, Artificial
  Synthetic oligonucleotide
cgccggaatccgatgattcagccgccctggaggtactaccgcctgagttagaacg

SEQ ID NO: 371197 - DNA, 55 bp, Artificial
  Synthetic oligonucleotide
cgccggaatggtgtcgtgagcgtcttgttaagtgctatgagaagatcctactcgg

SEQ ID NO: 371198 - DNA, 58 bp, Artificial
  Synthetic oligonucleotide
cgccggactgacctgtggaacccaaaaactgggcccacaatggagttgatggctgaga

SEQ ID NO: 371199 - DNA, 55 bp, Artificial
  Synthetic oligonucleotide
cgccggactgacctgtggaacccaaagactggaccttcattggagctgatggctg

SEQ ID NO: 371200 - DNA, 54 bp, Artificial
  Synthetic oligonucleotide
cgccggagaacctgggtgtattgagaaacagacgggaaaatcaacttttgagga

SEQ ID NO: 371201 - DNA, 56 bp, Artificial
  Synthetic oligonucleotide
cgccggagaagacgaaactcgacgattccgacctctatttgcgacacgcagggcgg

SEQ ID NO: 371202 - DNA, 60 bp, Artificial
  Synthetic oligonucleotide
cgccggaggactggctctcatccagtggatgcattgagtgaattgattgtcagggctgtc

SEQ ID NO: 371203 - DNA, 60 bp, Artificial
  Synthetic oligonucleotide
cgccggagggatcagtatcggagactgggggagcatctccaggagttgattcaacaactg

SEQ ID NO: 371204 - DNA, 55 bp, Artificial
  Synthetic oligonucleotide
cgccggcaaagggaaagtgtaattcgaagtccggtgagaatggcggaggagaatc

SEQ ID NO: 371205 - DNA, 55 bp, Artificial
  Synthetic oligonucleotide
cgccggcaaagggaaagtgtaattcggagtccggtaaggatgtctgaagagaatc

SEQ ID NO: 371206 - DNA, 55 bp, Artificial
  Synthetic oligonucleotide
cgccggcagacgtagtctgtcacgatacttttcagagctgttcgtatgatgtgag

SEQ ID NO: 371207 - DNA, 56 bp, Artificial
  Synthetic oligonucleotide
cgccggcagagttgacgatgttcccggacactacgaaatttggtgatttccaacac

SEQ ID NO: 371208 - DNA, 55 bp, Artificial
  Synthetic oligonucleotide
cgccggcccctggactatcaactgcgtattgcagatggtggctacgggtaccatg

SEQ ID NO: 371209 - DNA, 58 bp, Artificial
  Synthetic oligonucleotide
cgccggcgaagttcctgttctctcgttcgacgagagagttcaatacgccgtctggcaa

SEQ ID NO: 371210 - DNA, 55 bp, Artificial
  Synthetic oligonucleotide
cgccggcgccaagttttcggttacagcttgcgcaacggatgtcctgcatcgggtg

SEQ ID NO: 371211 - DNA, 54 bp, Artificial
  Synthetic oligonucleotide
cgccggcgttgacgcacgtggaacccacgtcaccgggggaactgccgcttacac

SEQ ID NO: 371212 - DNA, 53 bp, Artificial
  Synthetic oligonucleotide
cgccggctccgtctttctcggctgggcccagaaaaggttcggaaaacgcaaca

SEQ ID NO: 371213 - DNA, 55 bp, Artificial
  Synthetic oligonucleotide
cgccgggaaacaggtcacctcatggacaactggacactattggggtctacgtctt

SEQ ID NO: 371214 - DNA, 55 bp, Artificial
  Synthetic oligonucleotide
cgccgggatatcgcctcagcatgctggaaaatgattgatgcgtcctcacgtagtc

SEQ ID NO: 371215 - DNA, 54 bp, Artificial
  Synthetic oligonucleotide
cgccgggatttgtgctccagtaatcgtcgttaccaaccttacactgtatttaga

SEQ ID NO: 371216 - DNA, 54 bp, Artificial
  Synthetic oligonucleotide
cgccggggtcccgccaggccccagggtcttcgggtacaccgccgctgatcagag

SEQ ID NO: 371217 - DNA, 54 bp, Artificial
  Synthetic oligonucleotide
cgccggggtgtcgtctatgggcactcctacctcagcgttcgggtccggtacttc

SEQ ID NO: 371218 - DNA, 60 bp, Artificial
  Synthetic oligonucleotide
cgccgggtccctcgtggacatggctggaaccatctctggcattgtgtatcaacagagaca

SEQ ID NO: 371219 - DNA, 54 bp, Artificial
  Synthetic oligonucleotide
cgccggtaatgttactaatggggctaatggtgttagtcacatcattagtaacat

SEQ ID NO: 371220 - DNA, 57 bp, Artificial
  Synthetic oligonucleotide
cgccggtattggacggaacaggactgtaattgttcaatctaccccggccacatatca

SEQ ID NO: 371221 - DNA, 55 bp, Artificial
  Synthetic oligonucleotide
cgccggtcagcagggagcatacactggtttacccaacaagaaacccaatattccc

SEQ ID NO: 371222 - DNA, 54 bp, Artificial
  Synthetic oligonucleotide
cgccggtgtaccttccgtattttctgttgaggagatgttgttaacggctgttcc

SEQ ID NO: 371223 - DNA, 55 bp, Artificial
  Synthetic oligonucleotide
cgccggttactactcctaagggcacatacccgattttgaagcgggcgactgatcg

SEQ ID NO: 371224 - DNA, 60 bp, Artificial
  Synthetic oligonucleotide
cgccggttctcccatcccgttcgatggtgaaaggactataggcatgatgggatgctcgaa

SEQ ID NO: 371225 - DNA, 55 bp, Artificial
  Synthetic oligonucleotide
cgccggttgataaccgcaaccagcgcagtagttaatccggccactgtagcacaga

SEQ ID NO: 371226 - DNA, 55 bp, Artificial
  Synthetic oligonucleotide
cgccggtttggagccagggccatggtcacatatgattgcgagccccgatgccctt

SEQ ID NO: 371227 - DNA, 56 bp, Artificial
  Synthetic oligonucleotide
cgccgtaagaggatgtccggggccaaacaggggcgtacatctgccgcccgtgttgc

SEQ ID NO: 371228 - DNA, 55 bp, Artificial
  Synthetic oligonucleotide
cgccgtaagaggggtgttaatggttagcgtcttgttggactgtgcccgctggtta

SEQ ID NO: 371229 - DNA, 60 bp, Artificial
  Synthetic oligonucleotide
cgccgtacatgacactgctcggtgacagtgaccagatgagctttgcaccggctgagtatg

SEQ ID NO: 371230 - DNA, 55 bp, Artificial
  Synthetic oligonucleotide
cgccgtactgcaatttaatacagaagtgaccaaacagatggttcaagatgtgtcg

SEQ ID NO: 371231 - DNA, 55 bp, Artificial
  Synthetic oligonucleotide
cgccgtacttgacgcaaccgcgttgcaattccagggagttcaataccttggcaag

SEQ ID NO: 371232 - DNA, 55 bp, Artificial
  Synthetic oligonucleotide
cgccgtagattcgtatgcgtacaattcgagagtattagtgttattgtgtatccga

SEQ ID NO: 371233 - DNA, 55 bp, Artificial
  Synthetic oligonucleotide
cgccgtagctgctgaaaagattttagtccgaatgcgactcaggatcgaccgacgt

SEQ ID NO: 371234 - DNA, 55 bp, Artificial
  Synthetic oligonucleotide
cgccgtaggcgctcggttcgtcgttaagctcataagctgtgcggacaaggtgatg

SEQ ID NO: 371235 - DNA, 60 bp, Artificial
  Synthetic oligonucleotide
cgccgtataggagtccgtatggctcgcgtgtaacaccatatgtgaatcgtaagaccgctg

SEQ ID NO: 371236 - DNA, 55 bp, Artificial
  Synthetic oligonucleotide
cgccgtattatcacgcttccatttaacaagaccatgggaagagataacccaacag

SEQ ID NO: 371237 - DNA, 54 bp, Artificial
  Synthetic oligonucleotide
cgccgtcacttacggggaggaggacccgccaaccatctcgggtgtacgaattca

SEQ ID NO: 371238 - DNA, 55 bp, Artificial
  Synthetic oligonucleotide
cgccgtcagattgctcgcaaagcatctaaaaccaaacgtgctaatccgtctactc

SEQ ID NO: 371239 - DNA, 60 bp, Artificial
  Synthetic oligonucleotide
cgccgtcgtaggacgcatcttaatacaactgggcctaagcctgcggtgtcacagacgatc

SEQ ID NO: 371240 - DNA, 55 bp, Artificial
  Synthetic oligonucleotide
cgccgtgagacctagccagacgcagttccgcggcttgttattcgagaaggcccgt

SEQ ID NO: 371241 - DNA, 55 bp, Artificial
  Synthetic oligonucleotide
cgccgtgcatcacaaaccctttaagccattgcgctacatattgctcggctagcat

SEQ ID NO: 371242 - DNA, 55 bp, Artificial
  Synthetic oligonucleotide
cgccgtgcgtggatgtccctgccgaggagtccagtgagttagcggagattgatcc

SEQ ID NO: 371243 - DNA, 52 bp, Artificial
  Synthetic oligonucleotide
cgccgtgtcgcagaagatctcaatctcgggacgcccaatgctagtattcctt

SEQ ID NO: 371244 - DNA, 55 bp, Artificial
  Synthetic oligonucleotide
cgccgtgtttgcctgtttgacctccaacggctggtatgccatcgacgatgaggac

SEQ ID NO: 371245 - DNA, 56 bp, Artificial
  Synthetic oligonucleotide
cgccgttacaggcgccaacttccttgagtccacgaaacaagccgtcattgcgaacg

SEQ ID NO: 371246 - DNA, 54 bp, Artificial
  Synthetic oligonucleotide
cgccgttccggttactcatacaacagaacatacaacggaaacaagagtttccgc

SEQ ID NO: 371247 - DNA, 55 bp, Artificial
  Synthetic oligonucleotide
cgccgttgacagcttgagtttgcctttgaacttggcgaaatgcgtcctttggtgt

SEQ ID NO: 371248 - DNA, 55 bp, Artificial
  Synthetic oligonucleotide
cgccgttgttttgttcgaccaatcgtgtgtatttgacgccggctcacgactttta

SEQ ID NO: 371249 - DNA, 57 bp, Artificial
  Synthetic oligonucleotide
cgccgtttgggtgcgaggtacatgtaaaccctgtgagggccgagaattgtgctgtgg

SEQ ID NO: 371250 - DNA, 55 bp, Artificial
  Synthetic oligonucleotide
cgccgtttggtcacatctggtcgttttaaccacccagcacaagactggtccaggg

SEQ ID NO: 371251 - DNA, 55 bp, Artificial
  Synthetic oligonucleotide
cgccgttttgttctcgtcgtagacgtgtgatttaatcttaccgtccattgttgta

SEQ ID NO: 371252 - DNA, 54 bp, Artificial
  Synthetic oligonucleotide
cgcctaaagaccccgtagtcggtataaaagcgcccgtgggatgtcactcctcac

SEQ ID NO: 371253 - DNA, 55 bp, Artificial
  Synthetic oligonucleotide
cgcctaacctcagacttacgtcgaaggcaatcaagacttcgatcgaagcgcaccc

SEQ ID NO: 371254 - DNA, 55 bp, Artificial
  Synthetic oligonucleotide
cgcctaactgatgaagatctttatacggatgtaatgcgctatgtccttgggagtc

SEQ ID NO: 371255 - DNA, 60 bp, Artificial
  Synthetic oligonucleotide
cgcctaagcaagctagttgcttcgattgcgggtttatgcaaagcccgctagatggcatat

SEQ ID NO: 371256 - DNA, 51 bp, Artificial
  Synthetic oligonucleotide
cgcctaagctgttggggtatcaacaccccagcggataggagcccgacatga

SEQ ID NO: 371257 - DNA, 55 bp, Artificial
  Synthetic oligonucleotide
cgcctaaggcgtagttcttcagcattgggtcagaaagcaattaaacataaggaaa

SEQ ID NO: 371258 - DNA, 55 bp, Artificial
  Synthetic oligonucleotide
cgcctaatcgtggtgggagacgcaagccgacagctcgttctcgcaactgggctgt

SEQ ID NO: 371259 - DNA, 59 bp, Artificial
  Synthetic oligonucleotide
cgcctaatttgaggggagctttcataaggtcagcatttggcgccactccctatcctgaa

SEQ ID NO: 371260 - DNA, 55 bp, Artificial
  Synthetic oligonucleotide
cgcctacaaattaggtgagaggctctattcacatcttgaaatagaacaactgaat

SEQ ID NO: 371261 - DNA, 50 bp, Artificial
  Synthetic oligonucleotide
cgcctacaacgatgatcttagtgaaggttggaacgtggggatttacaata

SEQ ID NO: 371262 - DNA, 60 bp, Artificial
  Synthetic oligonucleotide
cgcctacaacgtccagaatatctatctggcggaactattgatctccaacagaatccagtt

SEQ ID NO: 371263 - DNA, 52 bp, Artificial
  Synthetic oligonucleotide
cgcctacagtaatttttacgacgggtggtctcacttctcgcaaaacggggtg

SEQ ID NO: 371264 - DNA, 60 bp, Artificial
  Synthetic oligonucleotide
cgcctacataggttcgcgcccccttgcaagcctttgctacgagatgaggtgtcattcaga

SEQ ID NO: 371265 - DNA, 56 bp, Artificial
  Synthetic oligonucleotide
cgcctaccaactcggcgtcaggctttgtcagggcccagtttgagcaaggcgggtgg

SEQ ID NO: 371266 - DNA, 55 bp, Artificial
  Synthetic oligonucleotide
cgcctaccggatgtgtctacgcatggtaagcagcgaacttcgacgcatgccacac

SEQ ID NO: 371267 - DNA, 58 bp, Artificial
  Synthetic oligonucleotide
cgcctacctgcttacaccaatgacttcactgcttacgaccaaagccaagacggggcta

SEQ ID NO: 371268 - DNA, 53 bp, Artificial
  Synthetic oligonucleotide
cgcctacctggttggggtaagacaccaggaacccctctacgaaatgttcagtc

SEQ ID NO: 371269 - DNA, 55 bp, Artificial
  Synthetic oligonucleotide
cgcctacgcccaatcacctcgaaggtctccagtctgcttacccgccgacatggag

SEQ ID NO: 371270 - DNA, 59 bp, Artificial
  Synthetic oligonucleotide
cgcctacgctgcgatccgtgtccaagggttcgccactgtaatggcaccttggcagtcgg

SEQ ID NO: 371271 - DNA, 55 bp, Artificial
  Synthetic oligonucleotide
cgcctactcgccgagactgtggcggagagtctagcacactttggaccattcctgc

SEQ ID NO: 371272 - DNA, 60 bp, Artificial
  Synthetic oligonucleotide
cgcctactcttctgctagccaagccctctggccatacagagggaagatagccaacgacca

SEQ ID NO: 371273 - DNA, 55 bp, Artificial
  Synthetic oligonucleotide
cgcctagaagaggaactataacctgtaattccaccattacaggactcctcttaga

SEQ ID NO: 371274 - DNA, 55 bp, Artificial
  Synthetic oligonucleotide
cgcctagccgggctagtgggcgccatggtgtttagctcaaactcggtgctgcaca

SEQ ID NO: 371275 - DNA, 60 bp, Artificial
  Synthetic oligonucleotide
cgcctagctatgattgtccgatggaagtcatcggcggtgatagcggtaggaatcgatgtt

SEQ ID NO: 371276 - DNA, 55 bp, Artificial
  Synthetic oligonucleotide
cgcctagctccgttcctactccgcatgtttagtctagttgattacgtcgcagcag

SEQ ID NO: 371277 - DNA, 59 bp, Artificial
  Synthetic oligonucleotide
cgcctagggtgcagagtgtcccggcagcattatactggtacaagagtagtttatctccg

SEQ ID NO: 371278 - DNA, 55 bp, Artificial
  Synthetic oligonucleotide
cgcctaggtatgatccaagatcgcgcatctgagttctttgctaaccatcgtgatc

SEQ ID NO: 371279 - DNA, 55 bp, Artificial
  Synthetic oligonucleotide
cgcctagtatggaaactgaggggaatagaaataggaagaggaggaccgcttggta

SEQ ID NO: 371280 - DNA, 55 bp, Artificial
  Synthetic oligonucleotide
cgcctagttaacaggggcaataagtacttcattgagtttgactggacccgctatg

SEQ ID NO: 371281 - DNA, 60 bp, Artificial
  Synthetic oligonucleotide
cgcctatagtaatgcacgtgataatacatggcttgcagcgcaagatatatggcttccgca

SEQ ID NO: 371282 - DNA, 60 bp, Artificial
  Synthetic oligonucleotide
cgcctatcacggcctattcccaacagacgcggggcctacttggttgcatcatcactagcc

SEQ ID NO: 371283 - DNA, 56 bp, Artificial
  Synthetic oligonucleotide
cgcctatccagctacccacctactaagcttacagcttaatggatggacgattctgg

SEQ ID NO: 371284 - DNA, 55 bp, Artificial
  Synthetic oligonucleotide
cgcctatccctgctgatgaaccagttgagtttctcaagcggacgattgttcgcac

SEQ ID NO: 371285 - DNA, 52 bp, Artificial
  Synthetic oligonucleotide
cgcctatccggacgcactagtagcttggccgacgacttggaaagttagtcgg

SEQ ID NO: 371286 - DNA, 55 bp, Artificial
  Synthetic oligonucleotide
cgcctatccgtcgagtactattatagcctcgaaagcttccgaatgctgctcaagc

SEQ ID NO: 371287 - DNA, 58 bp, Artificial
  Synthetic oligonucleotide
cgcctatcctcaaggaaattctcgctcccagctttaaagctggcgggattctccgaga

SEQ ID NO: 371288 - DNA, 54 bp, Artificial
  Synthetic oligonucleotide
cgcctatcgcatatttccgaagctcgtaggtatagcttaaaataaacgcagacg

SEQ ID NO: 371289 - DNA, 55 bp, Artificial
  Synthetic oligonucleotide
cgcctatcgctctgacttctcacacattaaactacaacttgcaccacagggtggg

SEQ ID NO: 371290 - DNA, 56 bp, Artificial
  Synthetic oligonucleotide
cgcctatcttttactcaaacaactccaggaagagcaagaaacgagcagttcggagg

SEQ ID NO: 371291 - DNA, 55 bp, Artificial
  Synthetic oligonucleotide
cgcctatggtgggtattcacgatatggaaggagctaacctatggaagttcaaggg

SEQ ID NO: 371292 - DNA, 50 bp, Artificial
  Synthetic oligonucleotide
cgcctatgtggctttctgtcggatgcaccaaggtcgggtagggataccta

SEQ ID NO: 371293 - DNA, 60 bp, Artificial
  Synthetic oligonucleotide
cgcctattcgtaatgtgcaagctggtgtttatcatacgagcagcttttcaagtataattt

SEQ ID NO: 371294 - DNA, 55 bp, Artificial
  Synthetic oligonucleotide
cgcctattgattggaactatcatgatgaagagatgcataagtggcttgatggtag

SEQ ID NO: 371295 - DNA, 55 bp, Artificial
  Synthetic oligonucleotide
cgcctattgtagtacgacacatgctttgtatcatgatcggattgacacgatacgc

SEQ ID NO: 371296 - DNA, 55 bp, Artificial
  Synthetic oligonucleotide
cgcctattttacgtaatctttcgcgagatcagtgcgattcagagaatattggatg

SEQ ID NO: 371297 - DNA, 58 bp, Artificial
  Synthetic oligonucleotide
cgcctcaacgcaaaagtaagaggcgactgttcgaggaacaggacagcggacttgagct

SEQ ID NO: 371298 - DNA, 57 bp, Artificial
  Synthetic oligonucleotide
cgcctcagaatagaaactcagatggaagctccggttgctataggaccaaataagggt

SEQ ID NO: 371299 - DNA, 60 bp, Artificial
  Synthetic oligonucleotide
cgcctcaggatccacgaggatacaagatgctgcatacagagaccttgaaagattgacctg

SEQ ID NO: 371300 - DNA, 55 bp, Artificial
  Synthetic oligonucleotide
cgcctcagtggcacatgttgtaaagggcgactcattctttatgggtgaaagggtg

SEQ ID NO: 371301 - DNA, 55 bp, Artificial
  Synthetic oligonucleotide
cgcctcataacttgggattctgggttatgtacgtcctttgaactcgtccctattg

SEQ ID NO: 371302 - DNA, 55 bp, Artificial
  Synthetic oligonucleotide
cgcctcatcacccgagtctcatgtatcctcggcagacagctcaaatacaatacgc

SEQ ID NO: 371303 - DNA, 60 bp, Artificial
  Synthetic oligonucleotide
cgcctcattactgtatatctttggactcagatccaggtgtccacataaatagttatgtgg

SEQ ID NO: 371304 - DNA, 59 bp, Artificial
  Synthetic oligonucleotide
cgcctcattttgcgggtcaccatattcttgggaacaagagctacagcatgggaggttgg

SEQ ID NO: 371305 - DNA, 53 bp, Artificial
  Synthetic oligonucleotide
cgcctccaaccccgttgtggggctccacctgcccgctaagagggccaccggtg

SEQ ID NO: 371306 - DNA, 53 bp, Artificial
  Synthetic oligonucleotide
cgcctccagatgtgaagaatctattaacacgcttattaggactcaaggactta

SEQ ID NO: 371307 - DNA, 55 bp, Artificial
  Synthetic oligonucleotide
cgcctccagttaccgcacacttgaccgttatgaggccgaaagccagccagaccgc

SEQ ID NO: 371308 - DNA, 55 bp, Artificial
  Synthetic oligonucleotide
cgcctcccacttgaacggtttgcagtggcttatattttcagactcgaacattgag

SEQ ID NO: 371309 - DNA, 58 bp, Artificial
  Synthetic oligonucleotide
cgcctcccattacagtagagtcttctcgtctgggattggctaccatagcccctcttag

SEQ ID NO: 371310 - DNA, 51 bp, Artificial
  Synthetic oligonucleotide
cgcctcccccaaggagacgccggacagtgggtctaaacgagaacaccatag

SEQ ID NO: 371311 - DNA, 54 bp, Artificial
  Synthetic oligonucleotide
cgcctccggaacaaagcagaatgcaattctcctctttaaccgtaaacgtaagag

SEQ ID NO: 371312 - DNA, 55 bp, Artificial
  Synthetic oligonucleotide
cgcctcctcatgatctgaaatagcgtgacgtcacttccgtggctccaagtcgcgg

SEQ ID NO: 371313 - DNA, 58 bp, Artificial
  Synthetic oligonucleotide
cgcctcctcgcgcctatcacggcctactcccaacagacgcggggcctacttggctgta

SEQ ID NO: 371314 - DNA, 55 bp, Artificial
  Synthetic oligonucleotide
cgcctcctctcctactaccgccaagagctttcccgacagcaagagaatcgctgcg

SEQ ID NO: 371315 - DNA, 55 bp, Artificial
  Synthetic oligonucleotide
cgcctccttcgtaaagtacacgcctgaggttggtagggcgcggctgttgagtggc

SEQ ID NO: 371316 - DNA, 60 bp, Artificial
  Synthetic oligonucleotide
cgcctccttgttgcctcgtgactcttcgtccaccattccagatgtgcagtcactgcatac

SEQ ID NO: 371317 - DNA, 55 bp, Artificial
  Synthetic oligonucleotide
cgcctcgaacggagtctcttacctgtggagattctgcttcggtggcgacctagct

SEQ ID NO: 371318 - DNA, 55 bp, Artificial
  Synthetic oligonucleotide
cgcctcgccagttacaggaagaaaattctccacatgaggcaaggcttgacatgtc

SEQ ID NO: 371319 - DNA, 55 bp, Artificial
  Synthetic oligonucleotide
cgcctcgcgcggtcgggtaccgactggatctttaacagtggaaagcctctgtttc

SEQ ID NO: 371320 - DNA, 60 bp, Artificial
  Synthetic oligonucleotide
cgcctcgggatgctctcaggtgagaatatcattctgagccgcaccgctaagtacttcaac

SEQ ID NO: 371321 - DNA, 55 bp, Artificial
  Synthetic oligonucleotide
cgcctcgtcaactcctctatcaccggtgaagtcttctcggtcctggcgaacgctg

SEQ ID NO: 371322 - DNA, 59 bp, Artificial
  Synthetic oligonucleotide
cgcctctagcagatcgtccatcgatttgaaattgtccccattcgacggtgtctccgtcc

SEQ ID NO: 371323 - DNA, 56 bp, Artificial
  Synthetic oligonucleotide
cgcctctatacaaccagaaattaaggagttatataatacgttgacattagaaacca

SEQ ID NO: 371324 - DNA, 60 bp, Artificial
  Synthetic oligonucleotide
cgcctctccaggatgtgagtcaatgccagaaaccctgcagcaataaaagttcaatcagag

SEQ ID NO: 371325 - DNA, 52 bp, Artificial
  Synthetic oligonucleotide
cgcctctcgccagtcaatgggggccgggccgcatagtctctcctacgagctc

SEQ ID NO: 371326 - DNA, 60 bp, Artificial
  Synthetic oligonucleotide
cgcctctctttcgtcggtccgctcgctctcctcgactctgcggtcaccgatgtctctgat

SEQ ID NO: 371327 - DNA, 55 bp, Artificial
  Synthetic oligonucleotide
cgcctctgccgctaagcagttagcaaaggaggtcgtaaaactagataagatcacc

SEQ ID NO: 371328 - DNA, 51 bp, Artificial
  Synthetic oligonucleotide
cgcctcttcgacgtctactgtgccatggcgccagagatcaaccccccggtc

SEQ ID NO: 371329 - DNA, 55 bp, Artificial
  Synthetic oligonucleotide
cgcctgaacatagtccgtgcgtttcttggcaactgctgcgcttctcttttgcttg

SEQ ID NO: 371330 - DNA, 55 bp, Artificial
  Synthetic oligonucleotide
cgcctgaacttaaggctagggtgcgtctcggtaaggatcgttggctgaagctggt

SEQ ID NO: 371331 - DNA, 58 bp, Artificial
  Synthetic oligonucleotide
cgcctgaaggcaagctggtctacaatatgtggtctggcctgtttaagaactacgaaaa

SEQ ID NO: 371332 - DNA, 55 bp, Artificial
  Synthetic oligonucleotide
cgcctgaagtaaggtaagtgactctgctgtacgcggggcgaggcagaggtgggga

SEQ ID NO: 371333 - DNA, 58 bp, Artificial
  Synthetic oligonucleotide
cgcctgaagttcttacccagaatgactcactatactgtggcgcaactaacgaccttct

SEQ ID NO: 371334 - DNA, 60 bp, Artificial
  Synthetic oligonucleotide
cgcctgaagttgctggcgagctttctgaaaagctcaaacgccatgttaaacctacagcat

SEQ ID NO: 371335 - DNA, 57 bp, Artificial
  Synthetic oligonucleotide
cgcctgacaaagtgggaacggcagttcgatcagttggtagacaaagtggtggaagac

SEQ ID NO: 371336 - DNA, 51 bp, Artificial
  Synthetic oligonucleotide
cgcctgacaagagataagttaccctcctaagtcggtcttgtcaactccctc

SEQ ID NO: 371337 - DNA, 55 bp, Artificial
  Synthetic oligonucleotide
cgcctgaggacgctcctcgaaagggccccagatgaccgcactatcttctgggtgt

SEQ ID NO: 371338 - DNA, 55 bp, Artificial
  Synthetic oligonucleotide
cgcctgaggcgtttcagtagcgcgcctgagtacaccagacctggttcacgtctgc

SEQ ID NO: 371339 - DNA, 60 bp, Artificial
  Synthetic oligonucleotide
cgcctgatctcgcttacagagttgggtacttatgtgcggggctgcccagtgatactccaa

SEQ ID NO: 371340 - DNA, 60 bp, Artificial
  Synthetic oligonucleotide
cgcctgatgacagtcagagccctgaaccgccagtgagcacagccttacctgtcacaccgg

SEQ ID NO: 371341 - DNA, 60 bp, Artificial
  Synthetic oligonucleotide
cgcctgatgttcctagaggctgtgagggtccctgtaaggtccaatcctacgagcagcgtc

SEQ ID NO: 371342 - DNA, 56 bp, Artificial
  Synthetic oligonucleotide
cgcctgatttggcacagtttgctaaactcccggtagaacttgcaccccactggccc

SEQ ID NO: 371343 - DNA, 60 bp, Artificial
  Synthetic oligonucleotide
cgcctgcaagctgttgacagggtgatctttgatctgttcagagagtttcatcaccgtgtt

SEQ ID NO: 371344 - DNA, 55 bp, Artificial
  Synthetic oligonucleotide
cgcctgcacagcgtgctggggacggcaaatgccccactgagcatttacgaggcaa

SEQ ID NO: 371345 - DNA, 52 bp, Artificial
  Synthetic oligonucleotide
cgcctgcactgccccatagccaaagctcaggaatcaaacctgagagcacata

SEQ ID NO: 371346 - DNA, 51 bp, Artificial
  Synthetic oligonucleotide
cgcctgcgaactggcctcctcttggctattctgtgttgcactttgattggt

SEQ ID NO: 371347 - DNA, 60 bp, Artificial
  Synthetic oligonucleotide
cgcctgcgctatcaactggcctaatccatctacaccagaatgttgtggacgtgcagtacc

SEQ ID NO: 371348 - DNA, 54 bp, Artificial
  Synthetic oligonucleotide
cgcctgcgctcaacgagcctaaagacacgggggaacctccggccaaaaaggaca

SEQ ID NO: 371349 - DNA, 60 bp, Artificial
  Synthetic oligonucleotide
cgcctgcgttaagtgctgcggcgtaagcgtcgttggctgtctgctgtccccctcttgcag

SEQ ID NO: 371350 - DNA, 55 bp, Artificial
  Synthetic oligonucleotide
cgcctgctaactataggacatccatattacccagtgtctataggggccaaaactg

SEQ ID NO: 371351 - DNA, 55 bp, Artificial
  Synthetic oligonucleotide
cgcctgctgaaatggaggaacccatggttccggaggtgtttggaatatccggtta

SEQ ID NO: 371352 - DNA, 55 bp, Artificial
  Synthetic oligonucleotide
cgcctgctggcaagaagaggagtctccgactacgaagcgtcgtcacttacagggc

SEQ ID NO: 371353 - DNA, 55 bp, Artificial
  Synthetic oligonucleotide
cgcctggaaaaggggcaaatgtagtaaagccaacagttatagtggatgcacttag

SEQ ID NO: 371354 - DNA, 60 bp, Artificial
  Synthetic oligonucleotide
cgcctggctagacaggacagtagaagccataaacagagaggcggtgaatcacctgccccg

SEQ ID NO: 371355 - DNA, 55 bp, Artificial
  Synthetic oligonucleotide
cgcctggctgtacctgacgcacgtgagcggcgagggcgggatgttcacggccagt

SEQ ID NO: 371356 - DNA, 55 bp, Artificial
  Synthetic oligonucleotide
cgcctgggagaaggtaaccaacgtccatgttgtcaagagggcgttatccctcaag

SEQ ID NO: 371357 - DNA, 60 bp, Artificial
  Synthetic oligonucleotide
cgcctgggattgctgacctgactccaactgacatctttgatgtcccgactgggttgaaca

SEQ ID NO: 371358 - DNA, 55 bp, Artificial
  Synthetic oligonucleotide
cgcctgggcatatgcatcgtttgccgtttgttgaccaccacgcttctttcgtcca

SEQ ID NO: 371359 - DNA, 59 bp, Artificial
  Synthetic oligonucleotide
cgcctggggtggaagtgccaccggacacacctgaaagggccgctcactgcatccacgct

SEQ ID NO: 371360 - DNA, 55 bp, Artificial
  Synthetic oligonucleotide
cgcctgggtaagcgtgtttgtgtgaagtccatgggtatagatggtaaggtctgga

SEQ ID NO: 371361 - DNA, 52 bp, Artificial
  Synthetic oligonucleotide
cgcctgggtaggtctactgtttcctttaagggtataaagcctccattttgta

SEQ ID NO: 371362 - DNA, 55 bp, Artificial
  Synthetic oligonucleotide
cgcctggtacttatgagcctgcctacctaggcggaaaagacccaagagtcaaggg

SEQ ID NO: 371363 - DNA, 56 bp, Artificial
  Synthetic oligonucleotide
cgcctggtcattcggggtcccggataacgagccctggtactgtcagaaccctctca

SEQ ID NO: 371364 - DNA, 60 bp, Artificial
  Synthetic oligonucleotide
cgcctggtgctcgtggtccacaggacaggagagaagcaatgctaggtactcatgttgtct

SEQ ID NO: 371365 - DNA, 55 bp, Artificial
  Synthetic oligonucleotide
cgcctggtgttgggaaatcgacttcaattaagcacatcttggacacttatggttc

SEQ ID NO: 371366 - DNA, 57 bp, Artificial
  Synthetic oligonucleotide
cgcctgtatcacctccaatgggtggtacgcgattgatgacgaggacttttacccttg

SEQ ID NO: 371367 - DNA, 55 bp, Artificial
  Synthetic oligonucleotide
cgcctgtcattgacgtgtccaacgtccccccaacttgggacgatgagcgggcccc

SEQ ID NO: 371368 - DNA, 55 bp, Artificial
  Synthetic oligonucleotide
cgcctgtcccagatgtggatagccgcggctccatcctacgccggcagtataacct

SEQ ID NO: 371369 - DNA, 55 bp, Artificial
  Synthetic oligonucleotide
cgcctgtcgtacaagaaatccagtaagtacgatctggaatgtgcacaaatacccg

SEQ ID NO: 371370 - DNA, 56 bp, Artificial
  Synthetic oligonucleotide
cgcctgtgtcaaggttatcttgtccttgcgacgtagacggaagtagtaaatccggc

SEQ ID NO: 371371 - DNA, 55 bp, Artificial
  Synthetic oligonucleotide
cgcctgtgtcacatctgacgggtggtacgcgattgacgacgaggaattctacccc

SEQ ID NO: 371372 - DNA, 55 bp, Artificial
  Synthetic oligonucleotide
cgcctgttaacagtgggacatccgtattatgagctagaaaaaggtggaacggtgg

SEQ ID NO: 371373 - DNA, 57 bp, Artificial
  Synthetic oligonucleotide
cgcctgttatctgtaggtcatccatactttcctataaaggatcctggaggaacggaa

SEQ ID NO: 371374 - DNA, 55 bp, Artificial
  Synthetic oligonucleotide
cgcctgtttatccaattcctaagcctgatggaagatggggaatggtactggatta

SEQ ID NO: 371375 - DNA, 55 bp, Artificial
  Synthetic oligonucleotide
cgcctgtttcgtgtcggcgaatgacgggtcgatttcgcacgaggtgtaaatcttt

SEQ ID NO: 371376 - DNA, 52 bp, Artificial
  Synthetic oligonucleotide
cgcctgtttctccctattgtaccttccctcacaatcctaacccctgtaacgt

SEQ ID NO: 371377 - DNA, 52 bp, Artificial
  Synthetic oligonucleotide
cgccttaaagccccgcagttactggattaaacaagcccaacaagccgtaaac

SEQ ID NO: 371378 - DNA, 60 bp, Artificial
  Synthetic oligonucleotide
cgccttaaggttcaacattgacggcactctcctccccatccgctcagttcatgtctattc

SEQ ID NO: 371379 - DNA, 60 bp, Artificial
  Synthetic oligonucleotide
cgccttacgaactgcgatcgtctctacgcgtgctctgatcaatcgatcagggcggcaaga

SEQ ID NO: 371380 - DNA, 55 bp, Artificial
  Synthetic oligonucleotide
cgccttactaaatgtcctaaatgcgcagctgcgtcctatcagacagtacgtcgaa

SEQ ID NO: 371381 - DNA, 57 bp, Artificial
  Synthetic oligonucleotide
cgccttagttgagtattcacccgcttggtacccgttcgctctacgaatcaatcaagc

SEQ ID NO: 371382 - DNA, 57 bp, Artificial
  Synthetic oligonucleotide
cgccttcagggcacgtcggcgtctgaacttcgacggcccgtatgtcaaccgtgtgag

SEQ ID NO: 371383 - DNA, 55 bp, Artificial
  Synthetic oligonucleotide
cgccttcatgaggaaactccaaagtttcgctctcctctcctcccgtctgttccac

SEQ ID NO: 371384 - DNA, 55 bp, Artificial
  Synthetic oligonucleotide
cgccttccaccgtagcggaagttgtacactttggcgggagtagcgcttctacgcg

SEQ ID NO: 371385 - DNA, 56 bp, Artificial
  Synthetic oligonucleotide
cgccttcctcaggttgtggttgaaccgtatttggatgtggtatatcctggtgttgg

SEQ ID NO: 371386 - DNA, 59 bp, Artificial
  Synthetic oligonucleotide
cgccttccttcagaaaccatccgcttggctccctacatcgattgctattgttggtggac

SEQ ID NO: 371387 - DNA, 55 bp, Artificial
  Synthetic oligonucleotide
cgccttctagaagaccctaccaccttaaatatcagaggaggggccagtcctacca

SEQ ID NO: 371388 - DNA, 55 bp, Artificial
  Synthetic oligonucleotide
cgccttctaggaacaccatggggacgtccacagaaccgaagcgctcggaccttcg

SEQ ID NO: 371389 - DNA, 60 bp, Artificial
  Synthetic oligonucleotide
cgccttctcaatttgcaactgaactagatctcctctaaacaaggccccaagctgctcacg

SEQ ID NO: 371390 - DNA, 55 bp, Artificial
  Synthetic oligonucleotide
cgccttctcaccgctcattggtggagttgggattacgggacagtacgctcgtgag

SEQ ID NO: 371391 - DNA, 55 bp, Artificial
  Synthetic oligonucleotide
cgccttctttctaagccggcggctgatttcaactttgtgtacctgaccccaccca

SEQ ID NO: 371392 - DNA, 53 bp, Artificial
  Synthetic oligonucleotide
cgccttgagctaaggaatactggtgcaagtccagtccaagtgatagtggtgta

SEQ ID NO: 371393 - DNA, 53 bp, Artificial
  Synthetic oligonucleotide
cgccttgatttaggtaaggttccccgtcggtgtaacgcattaagtgatactcg

SEQ ID NO: 371394 - DNA, 56 bp, Artificial
  Synthetic oligonucleotide
cgccttgcctatctaattttaagccgtgattagatttatcgtaggttacatcaaga

SEQ ID NO: 371395 - DNA, 58 bp, Artificial
  Synthetic oligonucleotide
cgccttgctacaaatccttccgtgatccctgccctaccggcaccccctgagcagcaac

SEQ ID NO: 371396 - DNA, 55 bp, Artificial
  Synthetic oligonucleotide
cgccttgctcactcgggcgctcattcgcccaaagaggctgcggagaaaatccacc

SEQ ID NO: 371397 - DNA, 57 bp, Artificial
  Synthetic oligonucleotide
cgccttggaggtagtggccaggcacatccgtgctagtggtggggaagaaccctacta

SEQ ID NO: 371398 - DNA, 55 bp, Artificial
  Synthetic oligonucleotide
cgccttggtcaaagacgtaccattcgcactcgatctggggctcaaataggctcac

SEQ ID NO: 371399 - DNA, 55 bp, Artificial
  Synthetic oligonucleotide
cgccttggtgcgttgcattgcggtgaccggatccttccagatgcagacctcgcta

SEQ ID NO: 371400 - DNA, 55 bp, Artificial
  Synthetic oligonucleotide
cgccttgtgaagcatcgaacttcaggagaggttacggggccgccccgcttgcaca

SEQ ID NO: 371401 - DNA, 57 bp, Artificial
  Synthetic oligonucleotide
cgccttgtgtgggcctgtttaggcgtggaggtggggcgtggacagccactgggagtg

SEQ ID NO: 371402 - DNA, 55 bp, Artificial
  Synthetic oligonucleotide
cgccttgtgtgtggcccacattggacccgtggacagtggaaaccacaacgtcatc

SEQ ID NO: 371403 - DNA, 55 bp, Artificial
  Synthetic oligonucleotide
cgccttgttattgtatatggcatgtactcatgcctcaaaccctgtatatgcgaca

SEQ ID NO: 371404 - DNA, 53 bp, Artificial
  Synthetic oligonucleotide
cgcctttaatttgaatcggcttcccgtactttgtattgctttgccagtccctt

SEQ ID NO: 371405 - DNA, 55 bp, Artificial
  Synthetic oligonucleotide
cgcctttactgctctgcctgcaaactggacagggtcatgtgtgttagccgccctc

SEQ ID NO: 371406 - DNA, 52 bp, Artificial
  Synthetic oligonucleotide
cgcctttcagtttcatggccatgacgggtccgacgagtcgtttcccatcgag

SEQ ID NO: 371407 - DNA, 55 bp, Artificial
  Synthetic oligonucleotide
cgcctttccccgcacaggtctgaggcaagacctcgttctagacttcggtggtagt

SEQ ID NO: 371408 - DNA, 57 bp, Artificial
  Synthetic oligonucleotide
cgcctttccccgcttcgtcgtggccttgctgttgactctcgtgttgacctgttcacg

SEQ ID NO: 371409 - DNA, 55 bp, Artificial
  Synthetic oligonucleotide
cgcctttcgcgaccggtaacgctgtgtaaatgcctgatcgtgcccgtactaccgt

SEQ ID NO: 371410 - DNA, 55 bp, Artificial
  Synthetic oligonucleotide
cgcctttcgggaatcgtggtctagcaacgaatcgtactcaactatcatcactact

SEQ ID NO: 371411 - DNA, 55 bp, Artificial
  Synthetic oligonucleotide
cgcctttcgtgcggccgaggtagcgaaaacagagggcgtcgaccgtatcgccttg

SEQ ID NO: 371412 - DNA, 54 bp, Artificial
  Synthetic oligonucleotide
cgcctttctattacgtatcataagggactcttaaaagtgaggaatacctcgtaa

SEQ ID NO: 371413 - DNA, 51 bp, Artificial
  Synthetic oligonucleotide
cgcctttctgtcgcgaggccgtctccgctatcgtcgcgggattgccctgtg

SEQ ID NO: 371414 - DNA, 60 bp, Artificial
  Synthetic oligonucleotide
cgcctttgaagatgacgtcacaatacagtttgagcgggatttggcagaagttactgcagc

SEQ ID NO: 371415 - DNA, 55 bp, Artificial
  Synthetic oligonucleotide
cgcctttgtgtttccacatcaaatcattaacctgcggaccaacaactgcgccaca

SEQ ID NO: 371416 - DNA, 55 bp, Artificial
  Synthetic oligonucleotide
cgccttttacccaaggataagcgtaattggcctctagctcagatttcctatcagg

SEQ ID NO: 371417 - DNA, 55 bp, Artificial
  Synthetic oligonucleotide
cgccttttccgtagtctttatatagatgtctctaagtaaggtgtcggtcgagaac

SEQ ID NO: 371418 - DNA, 55 bp, Artificial
  Synthetic oligonucleotide
cgcgaaaatccactacatcgagcggatggccgtggacattggtgacagcccggaa

SEQ ID NO: 371419 - DNA, 54 bp, Artificial
  Synthetic oligonucleotide
cgcgaaactaagcataaacctcttgggttaatggtggcttcggactttgttgga

SEQ ID NO: 371420 - DNA, 60 bp, Artificial
  Synthetic oligonucleotide
cgcgaaactcagagcatacacagcttgcatgataatctgaactgatgatccgcaggtacc

SEQ ID NO: 371421 - DNA, 58 bp, Artificial
  Synthetic oligonucleotide
cgcgaaagcggatgaagatcgggaggagagtttggtacagccgtttgcagcacggggc

SEQ ID NO: 371422 - DNA, 59 bp, Artificial
  Synthetic oligonucleotide
cgcgaaagctcgtcgtcgacggtaagatgggtaacatcacctcgaccgctgcgaagcag

SEQ ID NO: 371423 - DNA, 55 bp, Artificial
  Synthetic oligonucleotide
cgcgaaagtatagagaactttctcgtagccaggtgcggttcgcaaaattcctgcc

SEQ ID NO: 371424 - DNA, 55 bp, Artificial
  Synthetic oligonucleotide
cgcgaaatcaatgttggatgcacctcctccaccccgaaaatgtcactctctgatt

SEQ ID NO: 371425 - DNA, 55 bp, Artificial
  Synthetic oligonucleotide
cgcgaaatcgcggtaaaacaatccaagaaattatagaacaatccacacaccaact

SEQ ID NO: 371426 - DNA, 55 bp, Artificial
  Synthetic oligonucleotide
cgcgaaattgtacctagacatgagatagacagtattgaacattattcagcggcgg

SEQ ID NO: 371427 - DNA, 55 bp, Artificial
  Synthetic oligonucleotide
cgcgaacataacgcatgacctgcgtgcgaacctgagtcaccatgtactcaaacgc

SEQ ID NO: 371428 - DNA, 51 bp, Artificial
  Synthetic oligonucleotide
cgcgaaccagggaggcttacgccccggagcctacgcagtctacttagaact

SEQ ID NO: 371429 - DNA, 60 bp, Artificial
  Synthetic oligonucleotide
cgcgaacgccgttcgacacaaggctgattggcgctcccgtactcgtgagtgggccattgc

SEQ ID NO: 371430 - DNA, 59 bp, Artificial
  Synthetic oligonucleotide
cgcgaacgctcccgaattgaattggatattaatcctgcttatgtcagtgaactcgaact

SEQ ID NO: 371431 - DNA, 55 bp, Artificial
  Synthetic oligonucleotide
cgcgaactaataagaacagtgttgtgaagtatgtacctgcagcagtaggtgctgc

SEQ ID NO: 371432 - DNA, 57 bp, Artificial
  Synthetic oligonucleotide
cgcgaacttaggttctagtctgggacgtttgttaggcattcagcactacaagtggaa

SEQ ID NO: 371433 - DNA, 57 bp, Artificial
  Synthetic oligonucleotide
cgcgaagatttttcaccgtaccagcgcgaaactagaagatggaccacgagttcagga

SEQ ID NO: 371434 - DNA, 59 bp, Artificial
  Synthetic oligonucleotide
cgcgaagcatctcaccgcttcgtggtgaaacggcgctggccgtttagactgtccgtcaa

SEQ ID NO: 371435 - DNA, 55 bp, Artificial
  Synthetic oligonucleotide
cgcgaagccagtgctagacaacctgcggaacaaatatgcactctcgtcgtttccg

SEQ ID NO: 371436 - DNA, 50 bp, Artificial
  Synthetic oligonucleotide
cgcgaagcgacacgtgttctttttttgggaagttgcccaaaaaacctcgt

SEQ ID NO: 371437 - DNA, 60 bp, Artificial
  Synthetic oligonucleotide
cgcgaagctacgctggctgcgaggaccagtttttacatggcttttaatgtgactccaaca

SEQ ID NO: 371438 - DNA, 59 bp, Artificial
  Synthetic oligonucleotide
cgcgaaggtctagaaccttgtgaactggacactcgtgattacgtagagggcgctccata

SEQ ID NO: 371439 - DNA, 55 bp, Artificial
  Synthetic oligonucleotide
cgcgaagtccatatcagatcttgcttatcttaatttagaaactgctgacaaggtc

SEQ ID NO: 371440 - DNA, 55 bp, Artificial
  Synthetic oligonucleotide
cgcgaagttgagcgatcagtcagatttgatgagggcggaggtgacggagtagatg

SEQ ID NO: 371441 - DNA, 55 bp, Artificial
  Synthetic oligonucleotide
cgcgaatacccgaaaacgttgtgcgcaatacgaggacacgtgcccgccgaattaa

SEQ ID NO: 371442 - DNA, 60 bp, Artificial
  Synthetic oligonucleotide
cgcgaataccgagactattgccgtcaagttagcggaagttcagcgacgctgtcgcttcca

SEQ ID NO: 371443 - DNA, 60 bp, Artificial
  Synthetic oligonucleotide
cgcgaatgattttagcctttgacacatatgagcacagacaacaattcattaggactatga

SEQ ID NO: 371444 - DNA, 60 bp, Artificial
  Synthetic oligonucleotide
cgcgaattgcttttatgatttgaattactgtcgcgcgatgactgactatggcccattgta

SEQ ID NO: 371445 - DNA, 52 bp, Artificial
  Synthetic oligonucleotide
cgcgaattttgagagagctatgcgatattattcgaccagaaacatgcattta

SEQ ID NO: 371446 - DNA, 55 bp, Artificial
  Synthetic oligonucleotide
cgcgacaacgactggtcctagcgtgcccatcccagagcccaactacaagagggct

SEQ ID NO: 371447 - DNA, 55 bp, Artificial
  Synthetic oligonucleotide
cgcgacaagagatcagtggcgttagctccccatgtcggcatgggactggacacac

SEQ ID NO: 371448 - DNA, 60 bp, Artificial
  Synthetic oligonucleotide
cgcgacagaaaggtggaccgaggtagtgagtacacatactatgatggtggtgacacattg

SEQ ID NO: 371449 - DNA, 55 bp, Artificial
  Synthetic oligonucleotide
cgcgacagacgcgctatccaccggatatactgggaacttcgattccgtgaccgac

SEQ ID NO: 371450 - DNA, 55 bp, Artificial
  Synthetic oligonucleotide
cgcgacagcatatggcatccggacctttcaacacgtcttactatctgagctgagc

SEQ ID NO: 371451 - DNA, 55 bp, Artificial
  Synthetic oligonucleotide
cgcgacagccattgagtaaaatcacaatcgcacagttcccagccgaacgaaatgc

SEQ ID NO: 371452 - DNA, 59 bp, Artificial
  Synthetic oligonucleotide
cgcgacagcccaccaagtacgcaactcctcgggcctctaccacgtcaccaatgattgcc

SEQ ID NO: 371453 - DNA, 55 bp, Artificial
  Synthetic oligonucleotide
cgcgacagttgcagccggatattacacagctttagctgcacgccacgaactcacg

SEQ ID NO: 371454 - DNA, 50 bp, Artificial
  Synthetic oligonucleotide
cgcgacataggcgtcgctccgtctggaattggtgagagtaacacgcggcc

SEQ ID NO: 371455 - DNA, 55 bp, Artificial
  Synthetic oligonucleotide
cgcgaccaccgggtagaactttagccgcatatccactcggtgtagggcagagtat

SEQ ID NO: 371456 - DNA, 55 bp, Artificial
  Synthetic oligonucleotide
cgcgaccacgttagtaccacctatcgcaaagagctgccctctagcgcggagttag

SEQ ID NO: 371457 - DNA, 55 bp, Artificial
  Synthetic oligonucleotide
cgcgaccacttactacgataatctgataacccatatgggcatacatcttagacag

SEQ ID NO: 371458 - DNA, 55 bp, Artificial
  Synthetic oligonucleotide
cgcgacccacgatgtgtattcggcgttgcaggattcgaacttcaacctagaagcc

SEQ ID NO: 371459 - DNA, 55 bp, Artificial
  Synthetic oligonucleotide
cgcgacctggtctcgtcatatgcagatactcaagtctatgaacacgacgttggta

SEQ ID NO: 371460 - DNA, 59 bp, Artificial
  Synthetic oligonucleotide
cgcgaccttgtgggttcaaaacttggagaatggccgacgatgttagatgtcgcaacatg

SEQ ID NO: 371461 - DNA, 60 bp, Artificial
  Synthetic oligonucleotide
cgcgacgctcattggaggatatccataatggggcttccatgaagttgctgcaacaggggg

SEQ ID NO: 371462 - DNA, 55 bp, Artificial
  Synthetic oligonucleotide
cgcgacgctggtgagttccacgagcagcttgcatccatcaatgcgttggatggag

SEQ ID NO: 371463 - DNA, 55 bp, Artificial
  Synthetic oligonucleotide
cgcgacggccaaccctttcttctggatcgagtccacatcgatcctcccggccaac

SEQ ID NO: 371464 - DNA, 60 bp, Artificial
  Synthetic oligonucleotide
cgcgacgtcgacgtatttataggtgcttgttctgaaccgatctatcgtatatataataga

SEQ ID NO: 371465 - DNA, 55 bp, Artificial
  Synthetic oligonucleotide
cgcgacgtcgtcgaatatacagcgaatgctctaagtaaaggattaaagccattgg

SEQ ID NO: 371466 - DNA, 60 bp, Artificial
  Synthetic oligonucleotide
cgcgacgtgttcacatacgccagtgaattgcgcgtatgaggtcttgttatcaggaggtat

SEQ ID NO: 371467 - DNA, 56 bp, Artificial
  Synthetic oligonucleotide
cgcgactcaacagcactgacattgcggagaacattacacgaacatctcataacgag

SEQ ID NO: 371468 - DNA, 55 bp, Artificial
  Synthetic oligonucleotide
cgcgactccaaacgtcatatggacgtggcgctgtctctcgacaggaaattaggag

SEQ ID NO: 371469 - DNA, 53 bp, Artificial
  Synthetic oligonucleotide
cgcgactccctccatgtcgattgcatgcctccgaaagaccaatgccgcgtacc

SEQ ID NO: 371470 - DNA, 55 bp, Artificial
  Synthetic oligonucleotide
cgcgactcgttgaagtattcgacacattctgctggggaaatactcgcactgtctg

SEQ ID NO: 371471 - DNA, 60 bp, Artificial
  Synthetic oligonucleotide
cgcgactgctggtctcactcatctgatgatttggcattccaacctgaatgatgccacata

SEQ ID NO: 371472 - DNA, 56 bp, Artificial
  Synthetic oligonucleotide
cgcgactgtgggatgatcacgtgacatacacgatgtgtgtcactgtatagatatta

SEQ ID NO: 371473 - DNA, 60 bp, Artificial
  Synthetic oligonucleotide
cgcgacttgaaagtataacattgtcacctcagcagaagtctaaacgaaggctctttgcag

SEQ ID NO: 371474 - DNA, 60 bp, Artificial
  Synthetic oligonucleotide
cgcgacttgagtcaatttcattgtcacctcagcagaagtctaagcgaaggctctttgcag

SEQ ID NO: 371475 - DNA, 58 bp, Artificial
  Synthetic oligonucleotide
cgcgagaacccacccaactccaacatccgcgcatttcttgccttatgccacggacctc

SEQ ID NO: 371476 - DNA, 55 bp, Artificial
  Synthetic oligonucleotide
cgcgagaatacaacgcttccagtacacctgccgagaatgtatcgtccgagttgcc

SEQ ID NO: 371477 - DNA, 55 bp, Artificial
  Synthetic oligonucleotide
cgcgagaatctagtgtgtgatttaacgggaaactgcgttttggataacgtgcagg

SEQ ID NO: 371478 - DNA, 55 bp, Artificial
  Synthetic oligonucleotide
cgcgagagaaaccgcgtatcaacccctcaagggttggtgaagagattctcaaccg

SEQ ID NO: 371479 - DNA, 60 bp, Artificial
  Synthetic oligonucleotide
cgcgagagtcagatcaggaggttggcagcgcgtgaggcaacaattcagcaaacacccctg

SEQ ID NO: 371480 - DNA, 55 bp, Artificial
  Synthetic oligonucleotide
cgcgagagttcagcgagatctacgtcaagtatgggcgtggtctgagggatttggc

SEQ ID NO: 371481 - DNA, 60 bp, Artificial
  Synthetic oligonucleotide
cgcgagatactaaataccattccaggagtcaccatacacactgcaggcacccccgaccca

SEQ ID NO: 371482 - DNA, 60 bp, Artificial
  Synthetic oligonucleotide
cgcgagcaacatccggagttctacaaagactgctgacacaggagggactttcagctggga

SEQ ID NO: 371483 - DNA, 60 bp, Artificial
  Synthetic oligonucleotide
cgcgagcaagaggtcctagccttccttgtactgagtcccgcacacattgccaaattgaac

SEQ ID NO: 371484 - DNA, 55 bp, Artificial
  Synthetic oligonucleotide
cgcgagcagctgccccaaaacatgaggaacggtgtcaccacatagtccacggctg

SEQ ID NO: 371485 - DNA, 55 bp, Artificial
  Synthetic oligonucleotide
cgcgagcatactctgataggaattcttcatgagaactgtctggcacgcataggac

SEQ ID NO: 371486 - DNA, 53 bp, Artificial
  Synthetic oligonucleotide
cgcgagcccgaccccgcctcttactcttaagcctacaactactttgcgtaggg

SEQ ID NO: 371487 - DNA, 52 bp, Artificial
  Synthetic oligonucleotide
cgcgagcgatcattaggtgttttgagttaccatctcgacttcatcaacgagc

SEQ ID NO: 371488 - DNA, 55 bp, Artificial
  Synthetic oligonucleotide
cgcgagcgcaatcatgaattgcgtcatgcgcgataaatccgtctagcgtacccat

SEQ ID NO: 371489 - DNA, 51 bp, Artificial
  Synthetic oligonucleotide
cgcgagcgtatgccatggatcgggagatggctgcttcgtgcggaggcgcag

SEQ ID NO: 371490 - DNA, 58 bp, Artificial
  Synthetic oligonucleotide
cgcgagctacatccggagtattacaaagactgctgacacgaagggactttctgctgac

SEQ ID NO: 371491 - DNA, 60 bp, Artificial
  Synthetic oligonucleotide
cgcgagcttctcgtgcgtatgaaacgggccgagctctactgtcccaggccactcctggcg

SEQ ID NO: 371492 - DNA, 55 bp, Artificial
  Synthetic oligonucleotide
cgcgaggatatgcgatgtaggggtgagatggaccccgagactcgattagagtcag

SEQ ID NO: 371493 - DNA, 55 bp, Artificial
  Synthetic oligonucleotide
cgcgaggctcgttcgagtggccaagaggtgctataactgcagatgccgtcttggc

SEQ ID NO: 371494 - DNA, 55 bp, Artificial
  Synthetic oligonucleotide
cgcgagggacttgactcacttcaacatcataaagcaacgatacgttgagcagaca

SEQ ID NO: 371495 - DNA, 56 bp, Artificial
  Synthetic oligonucleotide
cgcgagggaggcttgttacaccaaagcgtagatccttcggcccttttgaagctatc

SEQ ID NO: 371496 - DNA, 56 bp, Artificial
  Synthetic oligonucleotide
cgcgaggggaacaatcgcgtccgagaggcctgggtctacaacacccggtacatgcg

SEQ ID NO: 371497 - DNA, 60 bp, Artificial
  Synthetic oligonucleotide
cgcgaggtaataagtcgcacggagtcctccgtggcatagcccactagagtgttgtcatcc

SEQ ID NO: 371498 - DNA, 55 bp, Artificial
  Synthetic oligonucleotide
cgcgagtatgaggaattcatccgtaaaatcagaagcgtgccagtcgggcgctgtc

SEQ ID NO: 371499 - DNA, 60 bp, Artificial
  Synthetic oligonucleotide
cgcgagtcgcatgtcggaagctcgccgtttgccacgtgccacgctgagtcagctttcaac

SEQ ID NO: 371500 - DNA, 52 bp, Artificial
  Synthetic oligonucleotide
cgcgagtgcgaaacatgtcgcgcgacgccgtccaatcataataaagcctgaa

SEQ ID NO: 371501 - DNA, 55 bp, Artificial
  Synthetic oligonucleotide
cgcgagtgctatataagtttgtttcgctccctcacgagtgctctgattcactcgc

SEQ ID NO: 371502 - DNA, 55 bp, Artificial
  Synthetic oligonucleotide
cgcgagtggatatgaattgtgaatggcccattggacctgtacaatggacgtggcc

SEQ ID NO: 371503 - DNA, 60 bp, Artificial
  Synthetic oligonucleotide
cgcgagtgtcatatacttggttctgcatttcgcgatcccgcaaaaccatgtcaacgtaga

SEQ ID NO: 371504 - DNA, 55 bp, Artificial
  Synthetic oligonucleotide
cgcgagtgttgagttggtagtattgcttcaaactgcctgaagtccctaaacgtgt

SEQ ID NO: 371505 - DNA, 55 bp, Artificial
  Synthetic oligonucleotide
cgcgagttcagatgaagaagattagagaaagctgtacatggaacttcgatcttcg

SEQ ID NO: 371506 - DNA, 60 bp, Artificial
  Synthetic oligonucleotide
cgcgagttcatgtacgacagagcgaggcaccaggagaatgggctcgaatccgtgttcgtc

SEQ ID NO: 371507 - DNA, 55 bp, Artificial
  Synthetic oligonucleotide
cgcgagttcctcacgaaggcaattgagcaggggtccatgtctataccttaccaac

SEQ ID NO: 371508 - DNA, 53 bp, Artificial
  Synthetic oligonucleotide
cgcgagtttattcgggtctgtcgcgttttgtgtcggtgtcgggcgcggtttgg

SEQ ID NO: 371509 - DNA, 54 bp, Artificial
  Synthetic oligonucleotide
cgcgataaatgctgacgtgaaaacgttgcgtattgctacaacactcggttagct

SEQ ID NO: 371510 - DNA, 52 bp, Artificial
  Synthetic oligonucleotide
cgcgataacaatgtttggtttcgcgcgtgtgccattataatgggtgcgccaa

SEQ ID NO: 371511 - DNA, 55 bp, Artificial
  Synthetic oligonucleotide
cgcgataaggcacgtacacgtgctttcgattactcataataagtgtaacagggac

SEQ ID NO: 371512 - DNA, 58 bp, Artificial
  Synthetic oligonucleotide
cgcgataagtgaaaccttcctccatcattatcctaagaatgtccgcagttactgggta

SEQ ID NO: 371513 - DNA, 55 bp, Artificial
  Synthetic oligonucleotide
cgcgataatgtacaaatatacgataatactccgcattaggttcattgttagccag

SEQ ID NO: 371514 - DNA, 55 bp, Artificial
  Synthetic oligonucleotide
cgcgatactgtgaataagctaatcaggaccctgtttaatgtgcatgagcttctgc

SEQ ID NO: 371515 - DNA, 55 bp, Artificial
  Synthetic oligonucleotide
cgcgatacttcaaccaacagttcgatgcatggattaagacgggagaactgcgaat

SEQ ID NO: 371516 - DNA, 55 bp, Artificial
  Synthetic oligonucleotide
cgcgatagcaacgttcatcaattaccctgttctcagtaagactgaaccgaatcgc

SEQ ID NO: 371517 - DNA, 56 bp, Artificial
  Synthetic oligonucleotide
cgcgataggagtaagaccatagcgatagggggagatgctaggagttagaggagacc

SEQ ID NO: 371518 - DNA, 54 bp, Artificial
  Synthetic oligonucleotide
cgcgatatcaaagatagagtccatcgccgaatgttgcttctaggaagatatcta

SEQ ID NO: 371519 - DNA, 54 bp, Artificial
  Synthetic oligonucleotide
cgcgatatgacccttctaaaattggcggaacctttaaaggtgtggttggtgtca

SEQ ID NO: 371520 - DNA, 55 bp, Artificial
  Synthetic oligonucleotide
cgcgatcaacactgtcgtcatcaagacgtacatcgctgctgttatggagctcgcc

SEQ ID NO: 371521 - DNA, 52 bp, Artificial
  Synthetic oligonucleotide
cgcgatcacacctgttacgacgacacggttgcatggctgaatcagcatgaca

SEQ ID NO: 371522 - DNA, 60 bp, Artificial
  Synthetic oligonucleotide
cgcgatcaccagtcgtaggggcatgctgaccggtggcaacacctctggtgaggacgacgt

SEQ ID NO: 371523 - DNA, 60 bp, Artificial
  Synthetic oligonucleotide
cgcgatcagcactcattctgagaggatcagtggcccataaatcatgcctacctgcctgtg

SEQ ID NO: 371524 - DNA, 60 bp, Artificial
  Synthetic oligonucleotide
cgcgatcaggctatgagacctttaaggtcattgatggttgggccaatgctaattccaagt

SEQ ID NO: 371525 - DNA, 55 bp, Artificial
  Synthetic oligonucleotide
cgcgatcatcgtgatcgaggacaacgggatgcagagctacgtcgtcgaggacgcg

SEQ ID NO: 371526 - DNA, 55 bp, Artificial
  Synthetic oligonucleotide
cgcgatccgccaaataatccgggtaggttttaacatggaagcaggtcttatagag

SEQ ID NO: 371527 - DNA, 52 bp, Artificial
  Synthetic oligonucleotide
cgcgatccttgtggacacgttccttatgggggtgcacaacccctcacacgtt

SEQ ID NO: 371528 - DNA, 56 bp, Artificial
  Synthetic oligonucleotide
cgcgatcggagttaataggacggcaccggtggacattttccagttggtgtgccgtg

SEQ ID NO: 371529 - DNA, 55 bp, Artificial
  Synthetic oligonucleotide
cgcgatcgtacttctcacactgaccctaatgatcggtgggatactttattgccta

SEQ ID NO: 371530 - DNA, 55 bp, Artificial
  Synthetic oligonucleotide
cgcgatctggggcggtctgttggaaacgatcgggctcgacggttctgtgttctcg

SEQ ID NO: 371531 - DNA, 55 bp, Artificial
  Synthetic oligonucleotide
cgcgatgatggctggataatgttcaagtctgtcgggaccacatcaggccataacc

SEQ ID NO: 371532 - DNA, 60 bp, Artificial
  Synthetic oligonucleotide
cgcgatgcaattttgtgatagttcaaaccgcagtaacgtggatgagttcatacggcgcgc

SEQ ID NO: 371533 - DNA, 56 bp, Artificial
  Synthetic oligonucleotide
cgcgatgcgtagatcaaacgccccgcagaaaggggacgccagaacgttctcgttcc

SEQ ID NO: 371534 - DNA, 60 bp, Artificial
  Synthetic oligonucleotide
cgcgatgctaagcaagctgctgtaggaacgcaaccttggcgtactatggtcgtttggcct

SEQ ID NO: 371535 - DNA, 55 bp, Artificial
  Synthetic oligonucleotide
cgcgatgctatccaactgtatggaacatgcgcctgtccctttctgcttagcctag

SEQ ID NO: 371536 - DNA, 57 bp, Artificial
  Synthetic oligonucleotide
cgcgatggacgttcaacccctgaaaatcgattttgcagcgttaggaggcgcggtcaa

SEQ ID NO: 371537 - DNA, 54 bp, Artificial
  Synthetic oligonucleotide
cgcgatggattcaacgcctcgtcctactacgccatctcttcagagggcaccgat

SEQ ID NO: 371538 - DNA, 58 bp, Artificial
  Synthetic oligonucleotide
cgcgatggccctacaaagggccatggttgatttgacacgacgggacgtgcgtactgac

SEQ ID NO: 371539 - DNA, 50 bp, Artificial
  Synthetic oligonucleotide
cgcgatggggctacaccttccagagctacgcgtaccagagccgtctccag

SEQ ID NO: 371540 - DNA, 55 bp, Artificial
  Synthetic oligonucleotide
cgcgatgtaccagggttccccgacaaatccagcaggtggtttgttccagcgttcg

SEQ ID NO: 371541 - DNA, 55 bp, Artificial
  Synthetic oligonucleotide
cgcgatgtatcatttcaggacttatctgaaaatccctgtcaagttggtgtggccg

SEQ ID NO: 371542 - DNA, 55 bp, Artificial
  Synthetic oligonucleotide
cgcgatgtgaaggttacaccagggacgaagcacacagaggaacgaccaaaggtcc

SEQ ID NO: 371543 - DNA, 51 bp, Artificial
  Synthetic oligonucleotide
cgcgatgtttccacaggctctacatctaccagcacagctaggaccgttaag

SEQ ID NO: 371544 - DNA, 51 bp, Artificial
  Synthetic oligonucleotide
cgcgattaaggcgctattcgtatcgtctagctgaagttcaacgggaattcg

SEQ ID NO: 371545 - DNA, 60 bp, Artificial
  Synthetic oligonucleotide
cgcgattacataagatgagttgttttaatggatagtgagcgccactatgaatatggttcg

SEQ ID NO: 371546 - DNA, 55 bp, Artificial
  Synthetic oligonucleotide
cgcgattagtagctatgcgctaaataagagcgggaggcggggtgttaacgccgcc

SEQ ID NO: 371547 - DNA, 52 bp, Artificial
  Synthetic oligonucleotide
cgcgattcaagaggtactcttggcggtcctgccaatactcgggaagcggaaa

SEQ ID NO: 371548 - DNA, 51 bp, Artificial
  Synthetic oligonucleotide
cgcgattcgatccgctcctacgctggtctgctgagccgctttcagctaatc

SEQ ID NO: 371549 - DNA, 55 bp, Artificial
  Synthetic oligonucleotide
cgcgattcggatcggaagaagattcttgatatcggttcacggaaagttaaacacc

SEQ ID NO: 371550 - DNA, 55 bp, Artificial
  Synthetic oligonucleotide
cgcgattgacacctggctcgctggcatctccccaactggcatcccacctttccca

SEQ ID NO: 371551 - DNA, 60 bp, Artificial
  Synthetic oligonucleotide
cgcgattgcggctaacccatggagagattgcgtcgcgtaagactgacgacccgtggaaca

SEQ ID NO: 371552 - DNA, 54 bp, Artificial
  Synthetic oligonucleotide
cgcgattggttcggaaacaaagatgagttttttctcgaaaatggcccgacctgc

SEQ ID NO: 371553 - DNA, 60 bp, Artificial
  Synthetic oligonucleotide
cgcgatttagactcggtttgactgccatcgccgacagctctagcgaatatagccgtctgc

SEQ ID NO: 371554 - DNA, 55 bp, Artificial
  Synthetic oligonucleotide
cgcgatttcaaggttgctgcatttaaaggggacgattcagtcgtcctttgtagtg

SEQ ID NO: 371555 - DNA, 55 bp, Artificial
  Synthetic oligonucleotide
cgcgcaaaggatcgtttatgatgatgaattacagatgcatatactaagagggcca

SEQ ID NO: 371556 - DNA, 55 bp, Artificial
  Synthetic oligonucleotide
cgcgcaaatgcgtagaaaggtggagttgttcacctacatgcgttttgacgcagag

SEQ ID NO: 371557 - DNA, 60 bp, Artificial
  Synthetic oligonucleotide
cgcgcaaccatgatcacaagtcgcgctttccccacgccaaatcacaaatctaggcgtgaa

SEQ ID NO: 371558 - DNA, 55 bp, Artificial
  Synthetic oligonucleotide
cgcgcaacgtactacacgagcgtcacagaatttacgcacgtgtgcccgcggagcc

SEQ ID NO: 371559 - DNA, 50 bp, Artificial
  Synthetic oligonucleotide
cgcgcaagaacagggcatgaaagccgtgttttacacaatcacagccccaa

SEQ ID NO: 371560 - DNA, 55 bp, Artificial
  Synthetic oligonucleotide
cgcgcaagccgctatggaggtccgtgcgccgaactttcactcgattgtggaggct

SEQ ID NO: 371561 - DNA, 59 bp, Artificial
  Synthetic oligonucleotide
cgcgcaaggaacgcgtgcgggttcgattgtcgagacaatctcccagatgttccctgagt

SEQ ID NO: 371562 - DNA, 60 bp, Artificial
  Synthetic oligonucleotide
cgcgcaaggaactatgtcgaagcgaccagccgatattatcatttcaactcccgcgtcgaa

SEQ ID NO: 371563 - DNA, 60 bp, Artificial
  Synthetic oligonucleotide
cgcgcaatgtccagtgcgctgtacatgtacccgaacgaccgtggatccatttatctggac

SEQ ID NO: 371564 - DNA, 60 bp, Artificial
  Synthetic oligonucleotide
cgcgcaattaagtcctaaatagtaagagcagccgcacggaagatcaattctccgcctgcg

SEQ ID NO: 371565 - DNA, 60 bp, Artificial
  Synthetic oligonucleotide
cgcgcaattgcagtgagctgtcttccgattggaatggagcatgtaaacttgttaaagata

SEQ ID NO: 371566 - DNA, 55 bp, Artificial
  Synthetic oligonucleotide
cgcgcaatttgtcgtaacgatagctttttgaaagatttatccgattttaataaga

SEQ ID NO: 371567 - DNA, 55 bp, Artificial
  Synthetic oligonucleotide
cgcgcacaaagccgacaggaacaacgcaggcacgatccgcttcgcggtccacata

SEQ ID NO: 371568 - DNA, 52 bp, Artificial
  Synthetic oligonucleotide
cgcgcacagacaaccccgaacggcgatacagacaccgctacgttacaccgtg

SEQ ID NO: 371569 - DNA, 53 bp, Artificial
  Synthetic oligonucleotide
cgcgcaccactcaatccttctagggggttgcacgtctgagttctaccgtgcta

SEQ ID NO: 371570 - DNA, 51 bp, Artificial
  Synthetic oligonucleotide
cgcgcaccacttagtcgctctgaccaggactgacgcgattggtcccactta

SEQ ID NO: 371571 - DNA, 60 bp, Artificial
  Synthetic oligonucleotide
cgcgcacctgtcccgctgtcggggatgtctggggtgtacatgtacactcaatacaatttg

SEQ ID NO: 371572 - DNA, 55 bp, Artificial
  Synthetic oligonucleotide
cgcgcactggatgagtacgaccaactgggcgagattaagcggaacgacgccatca

SEQ ID NO: 371573 - DNA, 55 bp, Artificial
  Synthetic oligonucleotide
cgcgcactgtcgaacctcggtcatataatattcggacgctacgtgtggaggaggc

SEQ ID NO: 371574 - DNA, 56 bp, Artificial
  Synthetic oligonucleotide
cgcgcacttgtcaacaatgcgaccgcagcgagaaagggctctggaatgtctttcag

SEQ ID NO: 371575 - DNA, 53 bp, Artificial
  Synthetic oligonucleotide
cgcgcagaggcgcttttcgggttggtacgatcccgattgaaggagatggcgaa

SEQ ID NO: 371576 - DNA, 55 bp, Artificial
  Synthetic oligonucleotide
cgcgcagattgtagcgacttacggctcaccaaatgttcaaatagtccgcttcgtt

SEQ ID NO: 371577 - DNA, 55 bp, Artificial
  Synthetic oligonucleotide
cgcgcagcctcgtcaaattctcctgcccgttggcactgtctgcaccagggttgac

SEQ ID NO: 371578 - DNA, 60 bp, Artificial
  Synthetic oligonucleotide
cgcgcagcgatcgacgatgccatgcagtcggtcagccacgtgctcgaagttgcgattcag

SEQ ID NO: 371579 - DNA, 55 bp, Artificial
  Synthetic oligonucleotide
cgcgcagttgttaatggtgggacttcaggagtcagaagcggacgcattggccggg

SEQ ID NO: 371580 - DNA, 54 bp, Artificial
  Synthetic oligonucleotide
cgcgcatacttgtaaaccgacgtattcggtttcgaattgtggggaagtagccgc

SEQ ID NO: 371581 - DNA, 55 bp, Artificial
  Synthetic oligonucleotide
cgcgcatatactcgccgtggtcgcgaagcctctggtaagccttcgacttcccgtg

SEQ ID NO: 371582 - DNA, 55 bp, Artificial
  Synthetic oligonucleotide
cgcgcatatgcgtgctcacactctttaacgcgattcgaataagtctgccgtagtc

SEQ ID NO: 371583 - DNA, 60 bp, Artificial
  Synthetic oligonucleotide
cgcgcatatgtgcgtgcttgtggatgatgttcctagttggccaggcggaggccgcattag

SEQ ID NO: 371584 - DNA, 55 bp, Artificial
  Synthetic oligonucleotide
cgcgcatgagggtgtacatgaaacccaaacatattagagtgtggtgtcctagacc

SEQ ID NO: 371585 - DNA, 55 bp, Artificial
  Synthetic oligonucleotide
cgcgcatgtattgaaaatagtctttaatcggcactatgtacaaattgcgcggtat

SEQ ID NO: 371586 - DNA, 55 bp, Artificial
  Synthetic oligonucleotide
cgcgcattgtgaagcgcatgaacatacaaaacttgtggtcaaggcctccagtagg

SEQ ID NO: 371587 - DNA, 55 bp, Artificial
  Synthetic oligonucleotide
cgcgccaaacagcaaggaggatgacgacgatgattgatcccggtatcgccgacat

SEQ ID NO: 371588 - DNA, 55 bp, Artificial
  Synthetic oligonucleotide
cgcgccaagcatgcaaacgactcttcaactcaagacttgatcgaaaatttgcgga

SEQ ID NO: 371589 - DNA, 53 bp, Artificial
  Synthetic oligonucleotide
cgcgccaattctggtgcggacccattcgttgtgacgggaagggttctaacctg

SEQ ID NO: 371590 - DNA, 55 bp, Artificial
  Synthetic oligonucleotide
cgcgccactcgaaagcagcagtggtcgaaccgtcccatgtaccgcaagccaaggt

SEQ ID NO: 371591 - DNA, 55 bp, Artificial
  Synthetic oligonucleotide
cgcgccactctgcgcctgagctgcagtaatgatggtccctgtgcgtgaatccatg

SEQ ID NO: 371592 - DNA, 60 bp, Artificial
  Synthetic oligonucleotide
cgcgccagaatttgtgctacgacgctctcagcagagcgcatcgtcttgggccagtagctt

SEQ ID NO: 371593 - DNA, 59 bp, Artificial
  Synthetic oligonucleotide
cgcgccagccaatacacagcaatttgaacacgttgtacagctccgaagagttttaacta

SEQ ID NO: 371594 - DNA, 60 bp, Artificial
  Synthetic oligonucleotide
cgcgccagcccttactgacatagccagtcatgtgccgttgtgtgagcggcacatcatggt

SEQ ID NO: 371595 - DNA, 55 bp, Artificial
  Synthetic oligonucleotide
cgcgccagctaatacgcaacaatttgagcatattgtacagcttcgaagggtgttg

SEQ ID NO: 371596 - DNA, 53 bp, Artificial
  Synthetic oligonucleotide
cgcgccagctggtcggtcctggacgccaatccgtacaccatcaatgcctgttt

SEQ ID NO: 371597 - DNA, 57 bp, Artificial
  Synthetic oligonucleotide
cgcgccagtgagcatcatgtgcgattatggcttcaacgatgatgtatcgacagacgc

SEQ ID NO: 371598 - DNA, 53 bp, Artificial
  Synthetic oligonucleotide
cgcgccatgtaccgtaagtggagcacaggaaacgccagagacaatgattcagc

SEQ ID NO: 371599 - DNA, 55 bp, Artificial
  Synthetic oligonucleotide
cgcgccatttattggtggtcgccctattcgagttttgttgtttccagacactttg

SEQ ID NO: 371600 - DNA, 57 bp, Artificial
  Synthetic oligonucleotide
cgcgcccacatactcctccgtgcttgcctgcttgttcgtaggctagcggggggaaag

SEQ ID NO: 371601 - DNA, 51 bp, Artificial
  Synthetic oligonucleotide
cgcgcccacatcgtcttccccgtccgactattaccctcgatgacaatactt

SEQ ID NO: 371602 - DNA, 52 bp, Artificial
  Synthetic oligonucleotide
cgcgcccacctacaactggggtagtgatactacggacgtcttcgtccttaat

SEQ ID NO: 371603 - DNA, 60 bp, Artificial
  Synthetic oligonucleotide
cgcgcccagcggtaatgacaacattacagttcacacaaatgaaccagcctagtctaggcc

SEQ ID NO: 371604 - DNA, 55 bp, Artificial
  Synthetic oligonucleotide
cgcgccccgtccggacatgttagggtaggtaggctgggtgtccgtgggaatatca

SEQ ID NO: 371605 - DNA, 53 bp, Artificial
  Synthetic oligonucleotide
cgcgcccctacttttagcgactcgggcattagggaaaaggcggggaaatcgca

SEQ ID NO: 371606 - DNA, 58 bp, Artificial
  Synthetic oligonucleotide
cgcgcccctatatggccagatgcgttaggtgtgccgttgggagttgccatagcccaat

SEQ ID NO: 371607 - DNA, 56 bp, Artificial
  Synthetic oligonucleotide
cgcgcccgactcacaaccggtgagcccgggtttcgataccagccgacaccaatgga

SEQ ID NO: 371608 - DNA, 55 bp, Artificial
  Synthetic oligonucleotide
cgcgcccgtgagacgtcggtgctagaggcacagtgctcagttcagcgtttgtcct

SEQ ID NO: 371609 - DNA, 60 bp, Artificial
  Synthetic oligonucleotide
cgcgccctcttagattacctgatggacctccctgctctcagcggtcgaagtttttgctga

SEQ ID NO: 371610 - DNA, 51 bp, Artificial
  Synthetic oligonucleotide
cgcgccgctaccacggccggggccttcacccacaaaaggaagaaggtccgt

SEQ ID NO: 371611 - DNA, 55 bp, Artificial
  Synthetic oligonucleotide
cgcgccggctcctagaccggcttagtaggacattcccctcaccaccctaatgtcg

SEQ ID NO: 371612 - DNA, 55 bp, Artificial
  Synthetic oligonucleotide
cgcgccgtctgggtgatttgattgaaagataacgatgtcattgcactctgcgcag

SEQ ID NO: 371613 - DNA, 60 bp, Artificial
  Synthetic oligonucleotide
cgcgccgtgtaagggcacgcagagggctctctggtagtctctattcagttgtggggtcgc

SEQ ID NO: 371614 - DNA, 60 bp, Artificial
  Synthetic oligonucleotide
cgcgcctactgaccgatgaggttgatatctatttggtgggtaacctcctttgctcatata

SEQ ID NO: 371615 - DNA, 55 bp, Artificial
  Synthetic oligonucleotide
cgcgcctcgacagtgtggtattgtaccagcgtcgcaggtgtgtggtccggtatac

SEQ ID NO: 371616 - DNA, 60 bp, Artificial
  Synthetic oligonucleotide
cgcgcctgcagcagaaatggttgaactcccgagagtgtcctacacctaggggagaagcag

SEQ ID NO: 371617 - DNA, 60 bp, Artificial
  Synthetic oligonucleotide
cgcgcctgctttaacccactgatctatatcatcgtgggcaaacagatgtctaaggacatg

SEQ ID NO: 371618 - DNA, 60 bp, Artificial
  Synthetic oligonucleotide
cgcgccttaaccgacgtaaccatgggtatagtcgatcattcggatgaggccatcatcctc

SEQ ID NO: 371619 - DNA, 55 bp, Artificial
  Synthetic oligonucleotide
cgcgccttgaagatggaagcagcacccacagaatatatctggcaatacaaccccg

SEQ ID NO: 371620 - DNA, 55 bp, Artificial
  Synthetic oligonucleotide
cgcgcctttaccgctggtgcgaaatctagccatcctatcaccgcggatccgctgg

SEQ ID NO: 371621 - DNA, 60 bp, Artificial
  Synthetic oligonucleotide
cgcgcctttgtcatgggatagcatcaataagcgaattgtgtggacccgaagcagagcccc

SEQ ID NO: 371622 - DNA, 57 bp, Artificial
  Synthetic oligonucleotide
cgcgcgaagataacaaatgccattccgtctcgaacctataccgagttagaggtaaga

SEQ ID NO: 371623 - DNA, 55 bp, Artificial
  Synthetic oligonucleotide
cgcgcgaagcgggaccgtctcagtttgccttatttcaaatcgccactgtgtcagt

SEQ ID NO: 371624 - DNA, 54 bp, Artificial
  Synthetic oligonucleotide
cgcgcgaatatgtacgccgtgacggtaaaatgtgggttattctgcccctgaatg

SEQ ID NO: 371625 - DNA, 60 bp, Artificial
  Synthetic oligonucleotide
cgcgcgaccaagaccgccttgtcgatctgacactgaaccagcattttctttgtcgggtca

SEQ ID NO: 371626 - DNA, 58 bp, Artificial
  Synthetic oligonucleotide
cgcgcgacctccggatgatgttttgcaaggtctaccctttagctatgacactaacgaa

SEQ ID NO: 371627 - DNA, 55 bp, Artificial
  Synthetic oligonucleotide
cgcgcgacgtatccgcttatctcgaaacgtcgctgagaccccaactcgacgctga

SEQ ID NO: 371628 - DNA, 59 bp, Artificial
  Synthetic oligonucleotide
cgcgcgacttgggatatcacggaaagcggtttgatccttttatggttgctcatgatagg

SEQ ID NO: 371629 - DNA, 51 bp, Artificial
  Synthetic oligonucleotide
cgcgcgagacttcagtgaagtatacgtcaaatatgggcgtggcctaaggga

SEQ ID NO: 371630 - DNA, 55 bp, Artificial
  Synthetic oligonucleotide
cgcgcgagagttcagtgagacttacgtcagatatgggcggggcctccgggatcta

SEQ ID NO: 371631 - DNA, 50 bp, Artificial
  Synthetic oligonucleotide
cgcgcgagcagtaagctctgggctgaacccgcaagcgtacgccaagtgtt

SEQ ID NO: 371632 - DNA, 60 bp, Artificial
  Synthetic oligonucleotide
cgcgcgaggcccaagcatctcctcggcttggacttacctctagcaccaatcatcatccat

SEQ ID NO: 371633 - DNA, 60 bp, Artificial
  Synthetic oligonucleotide
cgcgcgagtagcacgttccgcctcgcttgtcaagcagcgtacaggtcacactcgtttaaa

SEQ ID NO: 371634 - DNA, 54 bp, Artificial
  Synthetic oligonucleotide
cgcgcgagtgcttaacatgtcgcgcgatgctgtccaatcagaacgcgcgctcta

SEQ ID NO: 371635 - DNA, 60 bp, Artificial
  Synthetic oligonucleotide
cgcgcgatgactgagtatggcccattgtgtcaggtgaaggacgtggctaaattttgacca

SEQ ID NO: 371636 - DNA, 55 bp, Artificial
  Synthetic oligonucleotide
cgcgcgatttgaatattattggtcgcgatgactgaccatggcccattgtacttga

SEQ ID NO: 371637 - DNA, 60 bp, Artificial
  Synthetic oligonucleotide
cgcgcgccccgcttttctcactcgcgctatcgtccaatcatattgcgcctgccgcgctta

SEQ ID NO: 371638 - DNA, 56 bp, Artificial
  Synthetic oligonucleotide
cgcgcgcgatatcgacatcaagaacgctgccacctacgagcgcgcgctcacgaaac

SEQ ID NO: 371639 - DNA, 54 bp, Artificial
  Synthetic oligonucleotide
cgcgcgctatgggttgcgaaccattggccgaacgacgacgaagttaaggccgaa

SEQ ID NO: 371640 - DNA, 59 bp, Artificial
  Synthetic oligonucleotide
cgcgcgctcaattcagttgagcgcttttttggagtccgcgaaatgggttcagcgcattt

SEQ ID NO: 371641 - DNA, 55 bp, Artificial
  Synthetic oligonucleotide
cgcgcgctgagcagcaggagatgatgacgcagtcgctgcaatacctctctgagcg

SEQ ID NO: 371642 - DNA, 55 bp, Artificial
  Synthetic oligonucleotide
cgcgcggaaggaataatctgtacggcctcaccaattatacagagggaaagcgtgc

SEQ ID NO: 371643 - DNA, 55 bp, Artificial
  Synthetic oligonucleotide
cgcgcggccacctactacttctctgatttggaaatcgtcgtgcgacacgacggca

SEQ ID NO: 371644 - DNA, 58 bp, Artificial
  Synthetic oligonucleotide
cgcgcggccacttactacttctccgacttggaaatcgctgtgacccacactgggaagc

SEQ ID NO: 371645 - DNA, 58 bp, Artificial
  Synthetic oligonucleotide
cgcgcggcgttacgacgtatcatggatgacgacgactgggtaagatttggtggtgtct

SEQ ID NO: 371646 - DNA, 60 bp, Artificial
  Synthetic oligonucleotide
cgcgcggggagcgatgcagatttatcgccttggtaagacgattcacgcgatcacgggact

SEQ ID NO: 371647 - DNA, 52 bp, Artificial
  Synthetic oligonucleotide
cgcgcgggtccgtgggatgctcctcccgattccgcccatcccacccccccgg

SEQ ID NO: 371648 - DNA, 55 bp, Artificial
  Synthetic oligonucleotide
cgcgcggttgcgaataactcatggagagattgcgactagaaagtcagcagatccg

SEQ ID NO: 371649 - DNA, 55 bp, Artificial
  Synthetic oligonucleotide
cgcgcgtataatggactattgtgtgctgataaggagaacataagcgcagaacaat

SEQ ID NO: 371650 - DNA, 51 bp, Artificial
  Synthetic oligonucleotide
cgcgcgtccaagtcgaagcagctcgcccgtattctagccaccgaattgact

SEQ ID NO: 371651 - DNA, 55 bp, Artificial
  Synthetic oligonucleotide
cgcgcgtcgatcacgaaaatattggactacgtaaagtctcgaaacatcaggatag

SEQ ID NO: 371652 - DNA, 55 bp, Artificial
  Synthetic oligonucleotide
cgcgcgtctctcgttattctagtagtgcgcgccacaagttacgccgagggcctga

SEQ ID NO: 371653 - DNA, 55 bp, Artificial
  Synthetic oligonucleotide
cgcgcgtttctcgctattcgagtagcgcacgtcataaattgcgccgtgggcctga

SEQ ID NO: 371654 - DNA, 55 bp, Artificial
  Synthetic oligonucleotide
cgcgctaaacaaaactcggtcattcacagcagctccaattgagacactacttggt

SEQ ID NO: 371655 - DNA, 60 bp, Artificial
  Synthetic oligonucleotide
cgcgctaaaggagcctgtaatgaagagcgatgcatgggcagtggtacgcgtccagtcggt

SEQ ID NO: 371656 - DNA, 60 bp, Artificial
  Synthetic oligonucleotide
cgcgctaaagggagcgatgctgataatgagaagtattgcagtaaagagggggacgttata

SEQ ID NO: 371657 - DNA, 60 bp, Artificial
  Synthetic oligonucleotide
cgcgctaagctggtatgtgctcaggccaggaaatacaagctgcgttctactcatcactgg

SEQ ID NO: 371658 - DNA, 55 bp, Artificial
  Synthetic oligonucleotide
cgcgctacccgagcccggtacgctccctagaatcttacaagtcagtgacccggca

SEQ ID NO: 371659 - DNA, 55 bp, Artificial
  Synthetic oligonucleotide
cgcgctactatgaaaggttgggtcatacttacaatgattaaattgtttaacgtaa

SEQ ID NO: 371660 - DNA, 53 bp, Artificial
  Synthetic oligonucleotide
cgcgctactctgcagctgtctcacgcccggtctcgtaactcagctcagtctct

SEQ ID NO: 371661 - DNA, 55 bp, Artificial
  Synthetic oligonucleotide
cgcgctagatgtagaaccgtttaattcggaagaagactgtataagtcgttcaccg

SEQ ID NO: 371662 - DNA, 60 bp, Artificial
  Synthetic oligonucleotide
cgcgctagtgcggaagatggctggaggccactatgtgcagatggccgtcatcaagttggg

SEQ ID NO: 371663 - DNA, 58 bp, Artificial
  Synthetic oligonucleotide
cgcgctatctataatgacaacggccataaccttaaagacctgtttcacgcttcagtaa

SEQ ID NO: 371664 - DNA, 55 bp, Artificial
  Synthetic oligonucleotide
cgcgctatggtggaagagctgcatcgatcgcgtaggggcgccaatcttagacggc

SEQ ID NO: 371665 - DNA, 55 bp, Artificial
  Synthetic oligonucleotide
cgcgctattaaaacgtatctcagattggttgaaacaactcgggctggcttgctca

SEQ ID NO: 371666 - DNA, 56 bp, Artificial
  Synthetic oligonucleotide
cgcgctcacagcgcttgtccgacgacctaacgcttctcatcacagaagtgcggaac

SEQ ID NO: 371667 - DNA, 58 bp, Artificial
  Synthetic oligonucleotide
cgcgctcatccgtttctccgaggagctcgagtatttcgtcacactcttctgccgttag

SEQ ID NO: 371668 - DNA, 59 bp, Artificial
  Synthetic oligonucleotide
cgcgctcatggttgaccttgagtacggaagggtcgcttatcaagaggtgtacgtctatc

SEQ ID NO: 371669 - DNA, 55 bp, Artificial
  Synthetic oligonucleotide
cgcgctccatagacaatctatgcggagaacttgtgaagagatctctgaagtgcag

SEQ ID NO: 371670 - DNA, 55 bp, Artificial
  Synthetic oligonucleotide
cgcgctcccgcatggctggcccctaatggtcctagacctcaaggattgcttcttc

SEQ ID NO: 371671 - DNA, 56 bp, Artificial
  Synthetic oligonucleotide
cgcgctcctctatcgaactacaactgtacgtcggccaactaccgtagcacgccgga

SEQ ID NO: 371672 - DNA, 55 bp, Artificial
  Synthetic oligonucleotide
cgcgctccttagacaaaagccactagcgtagcatgctcgtccccgtgcacgatag

SEQ ID NO: 371673 - DNA, 58 bp, Artificial
  Synthetic oligonucleotide
cgcgctcgattgcagtgccagtacgagcaccatcactggtacaagcttacaactggct

SEQ ID NO: 371674 - DNA, 55 bp, Artificial
  Synthetic oligonucleotide
cgcgctctagtctggcgtctaatccaccaggtgttaaccgagtgattactaggga

SEQ ID NO: 371675 - DNA, 54 bp, Artificial
  Synthetic oligonucleotide
cgcgctctttggcgggtatctgccgaggactacgttgaggtacggaggttgggg

SEQ ID NO: 371676 - DNA, 55 bp, Artificial
  Synthetic oligonucleotide
cgcgctgcatcaatgaattgtattgcgaggaaatagcagaagccatctgtgtact

SEQ ID NO: 371677 - DNA, 55 bp, Artificial
  Synthetic oligonucleotide
cgcgctgccactaactatcataaatatagccaatagtgtaaccgttatcaaagaa

SEQ ID NO: 371678 - DNA, 55 bp, Artificial
  Synthetic oligonucleotide
cgcgctgcccttccctttcaagatctgaggttctgagcaatggtgttggagcgca

SEQ ID NO: 371679 - DNA, 55 bp, Artificial
  Synthetic oligonucleotide
cgcgctggatgtgtggtcataatgggcgaattcatatcaaggcgcgctgaatgcg

SEQ ID NO: 371680 - DNA, 55 bp, Artificial
  Synthetic oligonucleotide
cgcgctgggcgttaatgctgtggcttactaccgcggccttgacgtgtccgtcatt

SEQ ID NO: 371681 - DNA, 55 bp, Artificial
  Synthetic oligonucleotide
cgcgctgtcaattctcaccttataccctttggtgtggtgcaacagggagcacctg

SEQ ID NO: 371682 - DNA, 55 bp, Artificial
  Synthetic oligonucleotide
cgcgctgtcgttcgatgcggcgactgcggaacagttttctcggcaaccgatgctg

SEQ ID NO: 371683 - DNA, 55 bp, Artificial
  Synthetic oligonucleotide
cgcgctgttatggttgaagtttacgatatgactctcactgaaatgtgtcaagcca

SEQ ID NO: 371684 - DNA, 55 bp, Artificial
  Synthetic oligonucleotide
cgcgcttcggaccatgctattgaacgagtactcgcgatcaaatctcgcgatcgta

SEQ ID NO: 371685 - DNA, 60 bp, Artificial
  Synthetic oligonucleotide
cgcgcttctgaagtcagcagacgaatgagattcgagccacatgaaacttcagcgggttca

SEQ ID NO: 371686 - DNA, 55 bp, Artificial
  Synthetic oligonucleotide
cgcgcttgccgcccttattgagctcgggaattacttctgggaaagcggaggacac

SEQ ID NO: 371687 - DNA, 55 bp, Artificial
  Synthetic oligonucleotide
cgcgctttccccacgccaaatcacagatctaggcgtgaacaaccaaatgacctgc

SEQ ID NO: 371688 - DNA, 52 bp, Artificial
  Synthetic oligonucleotide
cgcgctttccccgcacgtcggtagttgggctctgcgagacggacacctcgga

SEQ ID NO: 371689 - DNA, 55 bp, Artificial
  Synthetic oligonucleotide
cgcgctttgacgatccaaagcaacgaccctacaagctaccagatttgtgcacaga

SEQ ID NO: 371690 - DNA, 55 bp, Artificial
  Synthetic oligonucleotide
cgcgctttgcgaattatcgctgataatcaatttgacacatgtaacgtctgtacgg

SEQ ID NO: 371691 - DNA, 55 bp, Artificial
  Synthetic oligonucleotide
cgcggaaaatcccagagcagcatgtgtggcgggtatggcagtcaattcctatcct

SEQ ID NO: 371692 - DNA, 60 bp, Artificial
  Synthetic oligonucleotide
cgcggaaatccgctagcgcggataaagaggacgattgatggggtcctgagaggagcagga

SEQ ID NO: 371693 - DNA, 56 bp, Artificial
  Synthetic oligonucleotide
cgcggaacagtatgatggtgaactacatggttaacaactctcctacaaaaccgaaa

SEQ ID NO: 371694 - DNA, 53 bp, Artificial
  Synthetic oligonucleotide
cgcggaaccgttatggccgtggtcgtagcgcctaaaaggacgcgggaatttgc

SEQ ID NO: 371695 - DNA, 56 bp, Artificial
  Synthetic oligonucleotide
cgcggaacgttaagggtacacacctacctgtagtgctggagccctttctatgctgg

SEQ ID NO: 371696 - DNA, 55 bp, Artificial
  Synthetic oligonucleotide
cgcggaagacgatcttctctacatcggaatcacaaacaacccgagaagccgattc

SEQ ID NO: 371697 - DNA, 57 bp, Artificial
  Synthetic oligonucleotide
cgcggaatattgttattgtcaaataggcttggtcaactagttgatttgactaggtta

SEQ ID NO: 371698 - DNA, 55 bp, Artificial
  Synthetic oligonucleotide
cgcggaatgccccgcgtgttgtccttgactggactgaagagggcaatgttgagcc

SEQ ID NO: 371699 - DNA, 55 bp, Artificial
  Synthetic oligonucleotide
cgcggacaacatactggtttatgttgcgagctacaatgaggtggatcaactaagt

SEQ ID NO: 371700 - DNA, 55 bp, Artificial
  Synthetic oligonucleotide
cgcggacaactaccagtctccgtgtgcgatacctgagttcgatgtcactccaccc

SEQ ID NO: 371701 - DNA, 55 bp, Artificial
  Synthetic oligonucleotide
cgcggacacaacggcgaggcaggaccggtaggggcaggatgggcacttataggtt

SEQ ID NO: 371702 - DNA, 52 bp, Artificial
  Synthetic oligonucleotide
cgcggaccccattttcgcccgccaaaatcgcttcccggcgcgttttagtgac

SEQ ID NO: 371703 - DNA, 52 bp, Artificial
  Synthetic oligonucleotide
cgcggaccttgcgagattgtatgaaacccgtcgggtaccgagaaccaattaa

SEQ ID NO: 371704 - DNA, 59 bp, Artificial
  Synthetic oligonucleotide
cgcggactctcataccacaaagcacctgggacacagctgctagaaggtatacacgagat

SEQ ID NO: 371705 - DNA, 55 bp, Artificial
  Synthetic oligonucleotide
cgcggactggggaggcactgcttacagtgcgaaggctgccttgggtaggaatagc

SEQ ID NO: 371706 - DNA, 60 bp, Artificial
  Synthetic oligonucleotide
cgcggagagtgaaattggatctgcggcgattgacggaatagttcaaggtagcgttcactc

SEQ ID NO: 371707 - DNA, 56 bp, Artificial
  Synthetic oligonucleotide
cgcggagggtatctgctaaagcggtaatcaagggtaatcacttaccagtcaagtta

SEQ ID NO: 371708 - DNA, 59 bp, Artificial
  Synthetic oligonucleotide
cgcggagggtgtcagaagcttctggtaacgggactgagctaaatcagacacggaggagc

SEQ ID NO: 371709 - DNA, 55 bp, Artificial
  Synthetic oligonucleotide
cgcggaggtgtatgtcgtgcgtgacagtggcataaacgacactattgtcgtccct

SEQ ID NO: 371710 - DNA, 55 bp, Artificial
  Synthetic oligonucleotide
cgcggagtagtagaccttgtggcttctacccgtgaccttgagtatgttgtccctg

SEQ ID NO: 371711 - DNA, 56 bp, Artificial
  Synthetic oligonucleotide
cgcggagtccagggagatagctacccccttaatatgtccgcgttgtccaacttcaa

SEQ ID NO: 371712 - DNA, 55 bp, Artificial
  Synthetic oligonucleotide
cgcggatagtaaggacctgggtagttatgagatgcttgtgcgggacgctaccctg

SEQ ID NO: 371713 - DNA, 60 bp, Artificial
  Synthetic oligonucleotide
cgcggatataatcgctccagctatcgaagcgtcctctactggtaaagcgctcagtgttct

SEQ ID NO: 371714 - DNA, 55 bp, Artificial
  Synthetic oligonucleotide
cgcggatcttattatggtaaaaggttgttgcttcctgattcagtcactgagttcg

SEQ ID NO: 371715 - DNA, 51 bp, Artificial
  Synthetic oligonucleotide
cgcggatgcctcgacgacccttgccgcgtattccatgcgtgctgtcgatag

SEQ ID NO: 371716 - DNA, 60 bp, Artificial
  Synthetic oligonucleotide
cgcggatgcgaggtgactaacgcacacatagtgagcagctcttagccaggcactagtcct

SEQ ID NO: 371717 - DNA, 55 bp, Artificial
  Synthetic oligonucleotide
cgcggatgttccagaaatgggagacgcgattaacatgaaggaaactgcgaaggct

SEQ ID NO: 371718 - DNA, 55 bp, Artificial
  Synthetic oligonucleotide
cgcggatgtttatctgcggctcttctctagacatgatgcctccgtggtgtaaccg

SEQ ID NO: 371719 - DNA, 55 bp, Artificial
  Synthetic oligonucleotide
cgcggattccgattcgtacttataattatgtcttatactgtcaactcaccgtctc

SEQ ID NO: 371720 - DNA, 55 bp, Artificial
  Synthetic oligonucleotide
cgcggattgaattacgatccgagttgggcgatgaagttcgtggttacaatgaagg

SEQ ID NO: 371721 - DNA, 55 bp, Artificial
  Synthetic oligonucleotide
cgcggattgacagcaaacgacagaatggagattatcgggcacgctttgcacgaac

SEQ ID NO: 371722 - DNA, 60 bp, Artificial
  Synthetic oligonucleotide
cgcggattgtggtgggacggatacgaacaacaggacagcgtcatcatagacgacttctac

SEQ ID NO: 371723 - DNA, 55 bp, Artificial
  Synthetic oligonucleotide
cgcggcaagcttccatcttggagattggtccctctctccacagtgccgcgaggct

SEQ ID NO: 371724 - DNA, 54 bp, Artificial
  Synthetic oligonucleotide
cgcggcaccccaaactccgtagccactttaaagacacgagacacaaaacccgca

SEQ ID NO: 371725 - DNA, 56 bp, Artificial
  Synthetic oligonucleotide
cgcggcacctaacccgggtggcgctacgaccatgtcaggtatcggctcagggctat

SEQ ID NO: 371726 - DNA, 55 bp, Artificial
  Synthetic oligonucleotide
cgcggcagacaatattgaattacaacccctgctgcccgtagacccctctggagtc

SEQ ID NO: 371727 - DNA, 55 bp, Artificial
  Synthetic oligonucleotide
cgcggccacaatcaacccatactcacaacccaccgacgctgctgatgttttagag

SEQ ID NO: 371728 - DNA, 55 bp, Artificial
  Synthetic oligonucleotide
cgcggccagactacaaccccccgctagtagagacgtggaaaaagcctgactacga

SEQ ID NO: 371729 - DNA, 58 bp, Artificial
  Synthetic oligonucleotide
cgcggccaggaaattagcaaactcgaaccgcaacagtacctcgactccagtgacggca

SEQ ID NO: 371730 - DNA, 55 bp, Artificial
  Synthetic oligonucleotide
cgcggccatggaaattatgtcacaaaacccagtatctgtgggtatagcagttatg

SEQ ID NO: 371731 - DNA, 52 bp, Artificial
  Synthetic oligonucleotide
cgcggcccacccgttgtacacatatcgccctccgttacaagttacacccgct

SEQ ID NO: 371732 - DNA, 55 bp, Artificial
  Synthetic oligonucleotide
cgcggcccagcattacgttacagggcttacagaggcagccccggatgtaacccgt

SEQ ID NO: 371733 - DNA, 58 bp, Artificial
  Synthetic oligonucleotide
cgcggcccatagaggacctcgcagcgtacaagcggttgacccgaaatacaatacctca

SEQ ID NO: 371734 - DNA, 50 bp, Artificial
  Synthetic oligonucleotide
cgcggccctagctgttcgaacgagcgcttatttgctcggtcacggaccaa

SEQ ID NO: 371735 - DNA, 55 bp, Artificial
  Synthetic oligonucleotide
cgcggccttaggatttccgacgggaatttacatatctcctcccgcaagaatcgct

SEQ ID NO: 371736 - DNA, 52 bp, Artificial
  Synthetic oligonucleotide
cgcggcgcgaagggtaaggcaaaacaaactactaaattgcaaaatactaacc

SEQ ID NO: 371737 - DNA, 51 bp, Artificial
  Synthetic oligonucleotide
cgcggcgcgctgttaagccccaggccaatttccacccttaagggatcctca

SEQ ID NO: 371738 - DNA, 60 bp, Artificial
  Synthetic oligonucleotide
cgcggctacgttgtttctggtgcatggcgtcacgctcaactgcgaagtttgaacgctgag

SEQ ID NO: 371739 - DNA, 60 bp, Artificial
  Synthetic oligonucleotide
cgcggctcagatatagcagggaccaccagctcagtacaagaacagttagaatggatctat

SEQ ID NO: 371740 - DNA, 55 bp, Artificial
  Synthetic oligonucleotide
cgcggctctgcgaaggatcatggatgacggtggatgggtcaggttcggcggtgta

SEQ ID NO: 371741 - DNA, 54 bp, Artificial
  Synthetic oligonucleotide
cgcggcttaataagacgttagcagctggtcgtcctactattaaccacccaacct

SEQ ID NO: 371742 - DNA, 55 bp, Artificial
  Synthetic oligonucleotide
cgcggcttagccgaacggtggctcaacaccaaattaccgaaggagtgaacagtcg

SEQ ID NO: 371743 - DNA, 55 bp, Artificial
  Synthetic oligonucleotide
cgcgggaaaactgaaatggggaagtgaaatctgattaatttcgcgttagtcatac

SEQ ID NO: 371744 - DNA, 53 bp, Artificial
  Synthetic oligonucleotide
cgcgggaaggagttcgaggaaggttcagagggtcgtcttgtgcgttccaagga

SEQ ID NO: 371745 - DNA, 60 bp, Artificial
  Synthetic oligonucleotide
cgcgggaagggatccttcatattacacgacatcccaactagagatcatcgcgggatggag

SEQ ID NO: 371746 - DNA, 55 bp, Artificial
  Synthetic oligonucleotide
cgcgggaattggaatgctcattggtatttatttgttcctttcaaatggtcgagaa

SEQ ID NO: 371747 - DNA, 55 bp, Artificial
  Synthetic oligonucleotide
cgcgggacagttcataagttaattacctcaatgttaaatgtgcatgaacagcaaa

SEQ ID NO: 371748 - DNA, 57 bp, Artificial
  Synthetic oligonucleotide
cgcgggagcccaagacacctctacggtggtcctaaatagacggtgtagcacagtaga

SEQ ID NO: 371749 - DNA, 55 bp, Artificial
  Synthetic oligonucleotide
cgcgggataaggtccctttccaccttcgccgggtaaggctagagtcagcgctgca

SEQ ID NO: 371750 - DNA, 51 bp, Artificial
  Synthetic oligonucleotide
cgcgggatgcttatgtagatgaagcgggtttcctaaggctgcccgcatatt

SEQ ID NO: 371751 - DNA, 59 bp, Artificial
  Synthetic oligonucleotide
cgcgggatggaggtcgcagagccggaggtgttaggcgtggagttcaagaatgtgctacc

SEQ ID NO: 371752 - DNA, 52 bp, Artificial
  Synthetic oligonucleotide
cgcgggattattcaccgggatacgcttgggtacgagttaatacgggatttaa

SEQ ID NO: 371753 - DNA, 56 bp, Artificial
  Synthetic oligonucleotide
cgcgggcacctcaactcgcggggcgttctgacgtgttgacatctcaacagacaggg

SEQ ID NO: 371754 - DNA, 55 bp, Artificial
  Synthetic oligonucleotide
cgcgggcagacgacagatcatccacgcagtacagactgacccagagccccaggtt

SEQ ID NO: 371755 - DNA, 55 bp, Artificial
  Synthetic oligonucleotide
cgcgggcatcagtcaatgtcctccggaggaggtgggttgtcatgcagggatctgc

SEQ ID NO: 371756 - DNA, 53 bp, Artificial
  Synthetic oligonucleotide
cgcgggccgtgtacgaaccgactaccgtgccgttgttagtatgcaccgggtcg

SEQ ID NO: 371757 - DNA, 60 bp, Artificial
  Synthetic oligonucleotide
cgcgggcctatccattgtagctacgaatcgcgccgctgtggccgtgaccaacattgccct

SEQ ID NO: 371758 - DNA, 55 bp, Artificial
  Synthetic oligonucleotide
cgcgggctgatattcgcgacggagaatatagctcaggaattccccgatttcgccc

SEQ ID NO: 371759 - DNA, 55 bp, Artificial
  Synthetic oligonucleotide
cgcggggaacgatgcgaacttgaagacagagatagggctgacatgagtcccctcc

SEQ ID NO: 371760 - DNA, 53 bp, Artificial
  Synthetic oligonucleotide
cgcggggactttccactgggcgttcccaggaggtgtgttctgggcgggactgg

SEQ ID NO: 371761 - DNA, 58 bp, Artificial
  Synthetic oligonucleotide
cgcggggcgcgaaattctgtctgctcagggggatgctattcgtaatataaccggcaca

SEQ ID NO: 371762 - DNA, 56 bp, Artificial
  Synthetic oligonucleotide
cgcggggggtaagtacgtccagatggcgctgttagcacttggtaggtggaccggca

SEQ ID NO: 371763 - DNA, 57 bp, Artificial
  Synthetic oligonucleotide
cgcggggtcgagcccacgctgcccaactggttcgcggtgaccaagacgcgtaatggc

SEQ ID NO: 371764 - DNA, 50 bp, Artificial
  Synthetic oligonucleotide
cgcggggtcgcacgctcagtgacagcaagtcgtctagtcggatggaggtt

SEQ ID NO: 371765 - DNA, 58 bp, Artificial
  Synthetic oligonucleotide
cgcgggtcaaacaacgttcgacgtgtacgcctccatctctgatgcacgtgccgacatg

SEQ ID NO: 371766 - DNA, 56 bp, Artificial
  Synthetic oligonucleotide
cgcgggtcatacaaccgaggaacgtaagatataatgttgaggttggtcgttatcta

SEQ ID NO: 371767 - DNA, 60 bp, Artificial
  Synthetic oligonucleotide
cgcgggtgatgatgaggttcaagattcctagaacgcagcaaccgcaaatccacatttatg

SEQ ID NO: 371768 - DNA, 51 bp, Artificial
  Synthetic oligonucleotide
cgcgggtggcgtacttgcaattctacgtactattatgggcgatactgatgt

SEQ ID NO: 371769 - DNA, 56 bp, Artificial
  Synthetic oligonucleotide
cgcgggtgtatctaggagggtaagcctagagcataaattgtaactaccgcgaataa

SEQ ID NO: 371770 - DNA, 56 bp, Artificial
  Synthetic oligonucleotide
cgcgggttatatgagggcaaaggagtgaagtcttacgactttgaaactaccagtga

SEQ ID NO: 371771 - DNA, 60 bp, Artificial
  Synthetic oligonucleotide
cgcgggttgtatcagctctggagatgctgcagtcgggttgggacgtgggtggtccgcctg

SEQ ID NO: 371772 - DNA, 58 bp, Artificial
  Synthetic oligonucleotide
cgcgggttgttggaaagcgaccggagaagcgctttaacatctcttcgagatagctgtc

SEQ ID NO: 371773 - DNA, 54 bp, Artificial
  Synthetic oligonucleotide
cgcgggtttcgacacgaaatcgcgtcactcacgtacgtagattatttcgaaaac

SEQ ID NO: 371774 - DNA, 60 bp, Artificial
  Synthetic oligonucleotide
cgcggtacataattgcgcgcattaggaggatgcgaggtaaagagagattgaacgtgatcg

SEQ ID NO: 371775 - DNA, 60 bp, Artificial
  Synthetic oligonucleotide
cgcggtcaaatatactataacaatacctcattaaaacatttgggatgcagattctcacta

SEQ ID NO: 371776 - DNA, 56 bp, Artificial
  Synthetic oligonucleotide
cgcggtcaatggtaacgacccagttgcaaccattactgtgccgaccgacaacaacc

SEQ ID NO: 371777 - DNA, 55 bp, Artificial
  Synthetic oligonucleotide
cgcggtcacagttggaggaccgccaccattgataacctggggctttgatccacca

SEQ ID NO: 371778 - DNA, 55 bp, Artificial
  Synthetic oligonucleotide
cgcggtcagttactcaaatgagaagctgtacctagtgctcaccaggaccaacacg

SEQ ID NO: 371779 - DNA, 52 bp, Artificial
  Synthetic oligonucleotide
cgcggtcccagttttaagccctactcgggtaccgcgtacaattccctggctc

SEQ ID NO: 371780 - DNA, 55 bp, Artificial
  Synthetic oligonucleotide
cgcggtcgatacacaggtatgcgctcgtcagtcggggtttagtagtgcgtgtacg

SEQ ID NO: 371781 - DNA, 60 bp, Artificial
  Synthetic oligonucleotide
cgcggtcggaacccagtctctaacggtgctcatacgtgcaagtctgcacaaaccgtgcat

SEQ ID NO: 371782 - DNA, 55 bp, Artificial
  Synthetic oligonucleotide
cgcggtcgttcgtccgctgtagggcctgtacggccccttcttggttccatctcat

SEQ ID NO: 371783 - DNA, 55 bp, Artificial
  Synthetic oligonucleotide
cgcggtctctacgaattggctcagactaagagccgtcctttcgtacccgtagtgg

SEQ ID NO: 371784 - DNA, 54 bp, Artificial
  Synthetic oligonucleotide
cgcggtgagataggttgtttagacaaaacaaggagtagaaactttccgaatgtc

SEQ ID NO: 371785 - DNA, 56 bp, Artificial
  Synthetic oligonucleotide
cgcggtgagccgtttcattgtaatccaaccattcgcatgcgtgggttaacggcctt

SEQ ID NO: 371786 - DNA, 56 bp, Artificial
  Synthetic oligonucleotide
cgcggtgatatatggttcgtaatcttgagcataaatcaatatgcaacattgtctag

SEQ ID NO: 371787 - DNA, 55 bp, Artificial
  Synthetic oligonucleotide
cgcggtgatggagggaaattcacgtccacttctccattcggtgagtgagggacga

SEQ ID NO: 371788 - DNA, 59 bp, Artificial
  Synthetic oligonucleotide
cgcggtgcacacaacctcgactgcgtgttaagagagggtgccacgctattccctgtggt

SEQ ID NO: 371789 - DNA, 60 bp, Artificial
  Synthetic oligonucleotide
cgcggtgcagcagaaatccagcagtggccgaattgcatactcttatgctgctggtctttt

SEQ ID NO: 371790 - DNA, 55 bp, Artificial
  Synthetic oligonucleotide
cgcggtgctgttggatccggaaaatcgactggattacctagtcatttaagcacaa

SEQ ID NO: 371791 - DNA, 60 bp, Artificial
  Synthetic oligonucleotide
cgcggtgggaattgcgtatagtgtacaggcgagacactgcatatggggtatgcaaactat

SEQ ID NO: 371792 - DNA, 55 bp, Artificial
  Synthetic oligonucleotide
cgcggtgggagtgggtaccgacaggtagtgtacactcacaatatgaaggcgacca

SEQ ID NO: 371793 - DNA, 55 bp, Artificial
  Synthetic oligonucleotide
cgcggtggtacctagatctgaagttgtcccgtcacaaggagcggaccctcccgct

SEQ ID NO: 371794 - DNA, 56 bp, Artificial
  Synthetic oligonucleotide
cgcggtggtttagttatgcactgtaatttgggtggattttgttctagaggagcgag

SEQ ID NO: 371795 - DNA, 55 bp, Artificial
  Synthetic oligonucleotide
cgcggtgtcgagaggaacggccaaactgaggtggtttgtagagaggaaccttgtg

SEQ ID NO: 371796 - DNA, 55 bp, Artificial
  Synthetic oligonucleotide
cgcggtgtgctctaccttggaacaaatcgagcatcatatggaagcgcaccgaaac

SEQ ID NO: 371797 - DNA, 58 bp, Artificial
  Synthetic oligonucleotide
cgcggtgtgtcagtggcacgccaggccgaaggagttagatgacggtcgaccatagaca

SEQ ID NO: 371798 - DNA, 55 bp, Artificial
  Synthetic oligonucleotide
cgcggtgttaagtcatctgacccaagtgctgatttgtatcaccgggtagcgcctg

SEQ ID NO: 371799 - DNA, 55 bp, Artificial
  Synthetic oligonucleotide
cgcggtgttgagaaggctcctgtaccacttcaatcagggttcaacattttggacg

SEQ ID NO: 371800 - DNA, 55 bp, Artificial
  Synthetic oligonucleotide
cgcggtgttgtggacttgtatttcggtacacttccatgccagttttatcttcccc

SEQ ID NO: 371801 - DNA, 51 bp, Artificial
  Synthetic oligonucleotide
cgcggttcacgcatcgggaaatcaacccggtgtattacccgcacttacggc

SEQ ID NO: 371802 - DNA, 55 bp, Artificial
  Synthetic oligonucleotide
cgcggttcatgctaggttcaatggtccgagtttccctcttagtatgggtggttct

SEQ ID NO: 371803 - DNA, 55 bp, Artificial
  Synthetic oligonucleotide
cgcggttcgattgctcgctcgtgcgcttcattcgtgggtggtgacttgcaggatc

SEQ ID NO: 371804 - DNA, 57 bp, Artificial
  Synthetic oligonucleotide
cgcggttgtataccacagtcactgaccccttacttccctgaatagaacatgaaacac

SEQ ID NO: 371805 - DNA, 55 bp, Artificial
  Synthetic oligonucleotide
cgcggtttataggtgcaatagattacgcgcgaggttccctttgagttctatacac

SEQ ID NO: 371806 - DNA, 55 bp, Artificial
  Synthetic oligonucleotide
cgcggttttatacccgcttgttgtcgaacggtattgggatgtcatggttggatag

SEQ ID NO: 371807 - DNA, 55 bp, Artificial
  Synthetic oligonucleotide
cgcggttttgaatcagatgattacaccagacgttcacctcaatcactttctaaaa

SEQ ID NO: 371808 - DNA, 55 bp, Artificial
  Synthetic oligonucleotide
cgcgtaaactgtacattttccagtagcccaagcgtaaacatttgacggatttcta

SEQ ID NO: 371809 - DNA, 57 bp, Artificial
  Synthetic oligonucleotide
cgcgtaacacgtggacgaatgaaatgagctcctcgtggcttaattattttgtggtcc

SEQ ID NO: 371810 - DNA, 55 bp, Artificial
  Synthetic oligonucleotide
cgcgtaacgcgcggtagcgaaaaatccacttgggctgtaggacgaaatgggtcac

SEQ ID NO: 371811 - DNA, 52 bp, Artificial
  Synthetic oligonucleotide
cgcgtaactttcgactggggtgggatcccgaaacggggctcgtaatgccagg

SEQ ID NO: 371812 - DNA, 60 bp, Artificial
  Synthetic oligonucleotide
cgcgtaagccaacagaccgagaagtcgagctcaagtcactgattccttcagcaatactaa

SEQ ID NO: 371813 - DNA, 54 bp, Artificial
  Synthetic oligonucleotide
cgcgtaatacacacgtagcagaacgcatgtaggcatggaagcgccatagagtag

SEQ ID NO: 371814 - DNA, 55 bp, Artificial
  Synthetic oligonucleotide
cgcgtacaaccgtacgtgtacacaaagcggcgtattttattcatgaaaacgtata

SEQ ID NO: 371815 - DNA, 55 bp, Artificial
  Synthetic oligonucleotide
cgcgtacagtcagtatctatacgacgtggctaacggcagtattatacctctatct

SEQ ID NO: 371816 - DNA, 50 bp, Artificial
  Synthetic oligonucleotide
cgcgtacagtcgcgagcagctgccccaaaacatgaggaacggtgtcacca

SEQ ID NO: 371817 - DNA, 55 bp, Artificial
  Synthetic oligonucleotide
cgcgtacatgtaacgttcaacgcaacccgcctcagtgacaacgccaatatgtacc

SEQ ID NO: 371818 - DNA, 55 bp, Artificial
  Synthetic oligonucleotide
cgcgtactaacaattatatgagtaataattttccctgtgttggagcgttttggta

SEQ ID NO: 371819 - DNA, 55 bp, Artificial
  Synthetic oligonucleotide
cgcgtactccgaccagttgctgagggatcaccctgaaatcctaaagcgccacagc

SEQ ID NO: 371820 - DNA, 55 bp, Artificial
  Synthetic oligonucleotide
cgcgtactcctcttttgggtaattgcacaatctcgtttaatattgtagtaccgaa

SEQ ID NO: 371821 - DNA, 60 bp, Artificial
  Synthetic oligonucleotide
cgcgtagagaaatttatggctttgcctgagttaactcaagataaggctgaggtgaagcaa

SEQ ID NO: 371822 - DNA, 56 bp, Artificial
  Synthetic oligonucleotide
cgcgtagagtgtaacaccacctctcgctttccagactgttttgagtctatcacccc

SEQ ID NO: 371823 - DNA, 60 bp, Artificial
  Synthetic oligonucleotide
cgcgtagcgcaggaaatgaacccatctatgtaacgtcgatgtactatccctatagttatg

SEQ ID NO: 371824 - DNA, 55 bp, Artificial
  Synthetic oligonucleotide
cgcgtagctcatgaacttactcaagggaatgatgaacgcgagtctttgaataacg

SEQ ID NO: 371825 - DNA, 55 bp, Artificial
  Synthetic oligonucleotide
cgcgtaggagctgaaggcacagttgatgctatgctcgacatctctactgctggtc

SEQ ID NO: 371826 - DNA, 55 bp, Artificial
  Synthetic oligonucleotide
cgcgtagtgtgaacgcgccgtaatgcgcttgtcgcaaataacgtcataactactt

SEQ ID NO: 371827 - DNA, 55 bp, Artificial
  Synthetic oligonucleotide
cgcgtataccgcgtctgacacggcagaaacaaccaacgtacagggctgggtctgc

SEQ ID NO: 371828 - DNA, 57 bp, Artificial
  Synthetic oligonucleotide
cgcgtatagtagattgaataaagggttgatcattcatagaacactagtttcactaga

SEQ ID NO: 371829 - DNA, 54 bp, Artificial
  Synthetic oligonucleotide
cgcgtatgtattcctgccccccaccgaaactaacttttatttcgctgtcttgcc

SEQ ID NO: 371830 - DNA, 59 bp, Artificial
  Synthetic oligonucleotide
cgcgtattacagcacgtttttagagactaccaagagatcgatgtattagagttctgtac

SEQ ID NO: 371831 - DNA, 55 bp, Artificial
  Synthetic oligonucleotide
cgcgtattgtgactatcgctgctagtccaggtcttaatgctacaggtcaagcacg

SEQ ID NO: 371832 - DNA, 55 bp, Artificial
  Synthetic oligonucleotide
cgcgtatttacagtggcttccattagaagcatgctcattaaatgaggaccaagct

SEQ ID NO: 371833 - DNA, 52 bp, Artificial
  Synthetic oligonucleotide
cgcgtcaaaggggtgtttgcatacgagaaccatgatgtggaatcacctagta

SEQ ID NO: 371834 - DNA, 58 bp, Artificial
  Synthetic oligonucleotide
cgcgtcaagaatctcattcgttcatacttcgactctgttattgagtcaaataaatatg

SEQ ID NO: 371835 - DNA, 56 bp, Artificial
  Synthetic oligonucleotide
cgcgtcaaggttacagccccgcacactattaaggccgacccgacaggcgctactat

SEQ ID NO: 371836 - DNA, 60 bp, Artificial
  Synthetic oligonucleotide
cgcgtcaccagaagacaaatatggatgaacaggcccatgtatcggaagcccatgatgtac

SEQ ID NO: 371837 - DNA, 55 bp, Artificial
  Synthetic oligonucleotide
cgcgtcagaccttctacatgcagttacagtctactaaccaggacatcagtacggc

SEQ ID NO: 371838 - DNA, 55 bp, Artificial
  Synthetic oligonucleotide
cgcgtcagctctggtggaagcaaccaaattttgtgcacccatatacgagtgtgcc

SEQ ID NO: 371839 - DNA, 59 bp, Artificial
  Synthetic oligonucleotide
cgcgtcagcttaccaagtacgcaactccacgggcctttaccatgtcaccaatgattgcc

SEQ ID NO: 371840 - DNA, 60 bp, Artificial
  Synthetic oligonucleotide
cgcgtcatttcaactcatcacgtggaaagatggagcgttaagcgttctgaatgatctgag

SEQ ID NO: 371841 - DNA, 51 bp, Artificial
  Synthetic oligonucleotide
cgcgtccacgtgatgcggaagacaaagcttgcacccaccgtcgcacacggt

SEQ ID NO: 371842 - DNA, 55 bp, Artificial
  Synthetic oligonucleotide
cgcgtccactgcatgtttctctgaaagtgagggttaccgaccaccctgtaccggg

SEQ ID NO: 371843 - DNA, 55 bp, Artificial
  Synthetic oligonucleotide
cgcgtccatcggcttccgaagtagctaatgcaacacaacgtgttgatgatgcgac

SEQ ID NO: 371844 - DNA, 56 bp, Artificial
  Synthetic oligonucleotide
cgcgtcccacaagtaaccatcacagcaaaggctgtccgggtaattcgctccaaatt

SEQ ID NO: 371845 - DNA, 50 bp, Artificial
  Synthetic oligonucleotide
cgcgtcccgtacgtaaatatagcacccaccagtgacactactgtacacaa

SEQ ID NO: 371846 - DNA, 50 bp, Artificial
  Synthetic oligonucleotide
cgcgtcccgttggagtacgataacatggggcacaaggtcttaatcttgaa

SEQ ID NO: 371847 - DNA, 57 bp, Artificial
  Synthetic oligonucleotide
cgcgtcctctcagattacctgatggacctccctgctcccaacgatcaaagttcttac

SEQ ID NO: 371848 - DNA, 56 bp, Artificial
  Synthetic oligonucleotide
cgcgtcctggaaatgacttctgactggctgcaccggggacctagggagttctgcat

SEQ ID NO: 371849 - DNA, 54 bp, Artificial
  Synthetic oligonucleotide
cgcgtcctgtatgccctcgtaaaatgtttaatcttcgtaaaggttctggacctg

SEQ ID NO: 371850 - DNA, 55 bp, Artificial
  Synthetic oligonucleotide
cgcgtcgactatcaggcgataggacatgactgcggacgggaagctttcagagtga

SEQ ID NO: 371851 - DNA, 56 bp, Artificial
  Synthetic oligonucleotide
cgcgtcgcaaaggagtatggtcatgacatgagattcctatatgtatgcaacgggga

SEQ ID NO: 371852 - DNA, 55 bp, Artificial
  Synthetic oligonucleotide
cgcgtcgcccacttctcaactgttgttgctactgataagtctatggcgtatctgg

SEQ ID NO: 371853 - DNA, 55 bp, Artificial
  Synthetic oligonucleotide
cgcgtcgccgaccgtcatttctttgatggataacatctacttcgactcattcttc

SEQ ID NO: 371854 - DNA, 57 bp, Artificial
  Synthetic oligonucleotide
cgcgtcggagtttttgaaggccactgaagataggaacagttcacacgcgtcagaaac

SEQ ID NO: 371855 - DNA, 55 bp, Artificial
  Synthetic oligonucleotide
cgcgtcgggtgccgaatgaacccgacgaagcagagtattggatacaccggtgctg

SEQ ID NO: 371856 - DNA, 54 bp, Artificial
  Synthetic oligonucleotide
cgcgtcggttgggtgattgggtccaacctcaaccgggtcgacctcgacatcgtc

SEQ ID NO: 371857 - DNA, 60 bp, Artificial
  Synthetic oligonucleotide
cgcgtcgttccccgtggatgtatccttcaccagagattcgacaactcatacatatcaagc

SEQ ID NO: 371858 - DNA, 55 bp, Artificial
  Synthetic oligonucleotide
cgcgtcgttggcagactggcaacctcctctagctgatcttccatcgacctggaac

SEQ ID NO: 371859 - DNA, 55 bp, Artificial
  Synthetic oligonucleotide
cgcgtcgttgtaacgttataatcttgcgctttgtccactgccagcgcagctgaac

SEQ ID NO: 371860 - DNA, 60 bp, Artificial
  Synthetic oligonucleotide
cgcgtctaccatgcaccgcgagggattcttgagctgcaaggtgactgatacgctgcgcgg

SEQ ID NO: 371861 - DNA, 59 bp, Artificial
  Synthetic oligonucleotide
cgcgtctatagactcggattatgacatatccttaaacctggtgagccctgtggagttca

SEQ ID NO: 371862 - DNA, 54 bp, Artificial
  Synthetic oligonucleotide
cgcgtctccaaacggagtatttgctcctattcccgccatgtcgggtgtatgtct

SEQ ID NO: 371863 - DNA, 60 bp, Artificial
  Synthetic oligonucleotide
cgcgtctctgggaccgttagcgtcactcaaactggaggagatgatcctatgggagagcaa

SEQ ID NO: 371864 - DNA, 55 bp, Artificial
  Synthetic oligonucleotide
cgcgtctgacgagtttatttagcctaagagaacttaacaacgaagttgttgacca

SEQ ID NO: 371865 - DNA, 60 bp, Artificial
  Synthetic oligonucleotide
cgcgtctgcatatacctgagctaaatgctggccctcccccctggcacttcgggcatcgac

SEQ ID NO: 371866 - DNA, 57 bp, Artificial
  Synthetic oligonucleotide
cgcgtctgcttaaacttcgaaccgttataatacgtggcagggagataagacgacata

SEQ ID NO: 371867 - DNA, 55 bp, Artificial
  Synthetic oligonucleotide
cgcgtctggtggtatagtaacaaccagttggaacaagtccgggcagatttccttg

SEQ ID NO: 371868 - DNA, 55 bp, Artificial
  Synthetic oligonucleotide
cgcgtctgtcgtcaggcgcaccggtgatgtcaacgccacagttgggtcagctaac

SEQ ID NO: 371869 - DNA, 55 bp, Artificial
  Synthetic oligonucleotide
cgcgtcttctcggatgaagttgtgaaagagctggagcgggaagcatccgaagccg

SEQ ID NO: 371870 - DNA, 55 bp, Artificial
  Synthetic oligonucleotide
cgcgtcttgactggcgacagtgcgcacgtagctaagtttactctacgtcaagcac

SEQ ID NO: 371871 - DNA, 55 bp, Artificial
  Synthetic oligonucleotide
cgcgtgaatcccttaacggggttaaagaggatacttggaagtctgctagatggtc

SEQ ID NO: 371872 - DNA, 60 bp, Artificial
  Synthetic oligonucleotide
cgcgtgatagtagagaattccgatgggataattatgaattactgttataatctaatggag

SEQ ID NO: 371873 - DNA, 55 bp, Artificial
  Synthetic oligonucleotide
cgcgtgatgggacaattcttgggctatccatctttgatcgaaaagacgcatgagt

SEQ ID NO: 371874 - DNA, 55 bp, Artificial
  Synthetic oligonucleotide
cgcgtgatttggggtgcgtgcaaggaagtgttatatgcagccacacacggagttt

SEQ ID NO: 371875 - DNA, 59 bp, Artificial
  Synthetic oligonucleotide
cgcgtgcaattattaaggtctctcgcatataaataacacgtcacgaggcgggtgtagta

SEQ ID NO: 371876 - DNA, 60 bp, Artificial
  Synthetic oligonucleotide
cgcgtgcaattggactcgaggagagcgttgtgacttggaggacagggatcgatcagagct

SEQ ID NO: 371877 - DNA, 55 bp, Artificial
  Synthetic oligonucleotide
cgcgtgcagacttctactcccttttccaccctttcaccggcactggccattcact

SEQ ID NO: 371878 - DNA, 52 bp, Artificial
  Synthetic oligonucleotide
cgcgtgcagcgttgccgacaacagagaactgagaagccgcacccgacaatcg

SEQ ID NO: 371879 - DNA, 55 bp, Artificial
  Synthetic oligonucleotide
cgcgtgcagctcgttgattgaagttttctcctacgtaggttttagaaccaacgag

SEQ ID NO: 371880 - DNA, 55 bp, Artificial
  Synthetic oligonucleotide
cgcgtgcagttagcggcaaaggctgacaaatacactcgttttaccattccccgcg

SEQ ID NO: 371881 - DNA, 59 bp, Artificial
  Synthetic oligonucleotide
cgcgtgcatatttttctaccaaaatggaccctcagaggcatggaataaaataccatcaa

SEQ ID NO: 371882 - DNA, 50 bp, Artificial
  Synthetic oligonucleotide
cgcgtgcgcatcgcagtggcttggcgtagattccgggatttgacgtggca

SEQ ID NO: 371883 - DNA, 55 bp, Artificial
  Synthetic oligonucleotide
cgcgtgcgtcacggccgctttgtaggtttctcccagcagtcgtgtcgtgacttgt

SEQ ID NO: 371884 - DNA, 60 bp, Artificial
  Synthetic oligonucleotide
cgcgtgcgtgtgcaagaacactgtatgtgcgcgagattccatgaggatagaacgcactat

SEQ ID NO: 371885 - DNA, 57 bp, Artificial
  Synthetic oligonucleotide
cgcgtgctaatcccactaacgtctcagagattgtcgagtcgcatatgagcgaccgag

SEQ ID NO: 371886 - DNA, 59 bp, Artificial
  Synthetic oligonucleotide
cgcgtgctctgcgatgttggcggcagacgcgtatttggctgggcagaaggctaagttcg

SEQ ID NO: 371887 - DNA, 55 bp, Artificial
  Synthetic oligonucleotide
cgcgtgctgttgagatgggagctgacgaaggcacaacgcagtgctctgctcaggc

SEQ ID NO: 371888 - DNA, 55 bp, Artificial
  Synthetic oligonucleotide
cgcgtggaaaatcagaattatgaagctttcaaggatatcacgcacatgataggcg

SEQ ID NO: 371889 - DNA, 57 bp, Artificial
  Synthetic oligonucleotide
cgcgtggaaatcaccccgatctggtggtcaaaccatcaggacaccccgagaaacagc

SEQ ID NO: 371890 - DNA, 57 bp, Artificial
  Synthetic oligonucleotide
cgcgtggaaatgcatcattaaattatatttcccgcgaatgaataacataaagggacg

SEQ ID NO: 371891 - DNA, 55 bp, Artificial
  Synthetic oligonucleotide
cgcgtggcaactgtggggacccagacaggttatcaaaggcacccggtctttccgc

SEQ ID NO: 371892 - DNA, 60 bp, Artificial
  Synthetic oligonucleotide
cgcgtggcatgatcatcccgcaacccggtggcttggcccccatgattcgagacgacgctg

SEQ ID NO: 371893 - DNA, 60 bp, Artificial
  Synthetic oligonucleotide
cgcgtggcgtccccgggaccgctcactcgatgtcctggatctgtgggacagccagccagt

SEQ ID NO: 371894 - DNA, 60 bp, Artificial
  Synthetic oligonucleotide
cgcgtgggagacagcaagacacactccaatcaattcgtggctaggcaacataatcatgtt

SEQ ID NO: 371895 - DNA, 58 bp, Artificial
  Synthetic oligonucleotide
cgcgtgggatcaatccaagacttacaggtaatgttcaatggaagtgtttccgtgcgaa

SEQ ID NO: 371896 - DNA, 56 bp, Artificial
  Synthetic oligonucleotide
cgcgtggggcacactcacggattttaatattacccgtgagtgctctcttggcccca

SEQ ID NO: 371897 - DNA, 55 bp, Artificial
  Synthetic oligonucleotide
cgcgtggtcccaggagaaatctgcgtggtcgatgggcgtggagataaatcgggtc

SEQ ID NO: 371898 - DNA, 51 bp, Artificial
  Synthetic oligonucleotide
cgcgtggtgcgatgtcattctcaccttttctttaatgcgtcggccaccgac

SEQ ID NO: 371899 - DNA, 50 bp, Artificial
  Synthetic oligonucleotide
cgcgtgtaaggcacttggaacgggtctagcttttgtttacccataaagct

SEQ ID NO: 371900 - DNA, 60 bp, Artificial
  Synthetic oligonucleotide
cgcgtgtcatcactgtctcttagatattctccaacttgtgccacaaccacggagggcaag

SEQ ID NO: 371901 - DNA, 55 bp, Artificial
  Synthetic oligonucleotide
cgcgtgtgctaccaatgagtcctccggcccctgaatgcggctaatccaaccccac

SEQ ID NO: 371902 - DNA, 51 bp, Artificial
  Synthetic oligonucleotide
cgcgtgtggtcacaagatgaacaccattgtcgacaacgtagtgaatgccac

SEQ ID NO: 371903 - DNA, 55 bp, Artificial
  Synthetic oligonucleotide
cgcgtgttatttgagacgtgttcaaacccactactatctggagtccacacggaag

SEQ ID NO: 371904 - DNA, 55 bp, Artificial
  Synthetic oligonucleotide
cgcgtgttctctggggcaaacggcgtaacgcaagaatctggtgctgggatcacag

SEQ ID NO: 371905 - DNA, 57 bp, Artificial
  Synthetic oligonucleotide
cgcgtgttgtaacagtgtttcattaagggtatttctgtccaaataatttgagctatg

SEQ ID NO: 371906 - DNA, 58 bp, Artificial
  Synthetic oligonucleotide
cgcgtgttgtgctgtgtgaggccgccaacgggtataaacctatggcttacgatatttc

SEQ ID NO: 371907 - DNA, 60 bp, Artificial
  Synthetic oligonucleotide
cgcgtgtttgcattctatcttctaggtggatgtaatgatgtgacgtattgtgagttcttt

SEQ ID NO: 371908 - DNA, 54 bp, Artificial
  Synthetic oligonucleotide
cgcgttaacgggccctgtctcgtggaacgggtaacaactcatgctctcgcagcc

SEQ ID NO: 371909 - DNA, 55 bp, Artificial
  Synthetic oligonucleotide
cgcgttaatatccaatgtaggcgatcttaaatagccaataggacacgctaccgtc

SEQ ID NO: 371910 - DNA, 59 bp, Artificial
  Synthetic oligonucleotide
cgcgttacaacgttgaactgggatgttatttgaagcggtttgagcactctgcgtatcgc

SEQ ID NO: 371911 - DNA, 54 bp, Artificial
  Synthetic oligonucleotide
cgcgttacgttcaggacgggaacttcgtcaacgtggtgggtccggtgcgagatg

SEQ ID NO: 371912 - DNA, 60 bp, Artificial
  Synthetic oligonucleotide
cgcgttacttcccgatttaatagccggcgcgcatcagaatgcagatcctgtcgtgttaga

SEQ ID NO: 371913 - DNA, 55 bp, Artificial
  Synthetic oligonucleotide
cgcgttagaattgcatcgccgggtgaaacacctgctccacagggtcgcccacacg

SEQ ID NO: 371914 - DNA, 55 bp, Artificial
  Synthetic oligonucleotide
cgcgttagtcataccgcgtaatatttgtcgagggccgagggactttggccgatta

SEQ ID NO: 371915 - DNA, 55 bp, Artificial
  Synthetic oligonucleotide
cgcgttatagtgttcgctgacagaccgtacaaatagtctgtctcaccgacctaag

SEQ ID NO: 371916 - DNA, 58 bp, Artificial
  Synthetic oligonucleotide
cgcgttatccgcaattatcagtgtttaacccaggatcttaccgccaagtattcacata

SEQ ID NO: 371917 - DNA, 60 bp, Artificial
  Synthetic oligonucleotide
cgcgttatctagtaaaggcgcagttcttatgctcgaaccaacaagaccattggcagagaa

SEQ ID NO: 371918 - DNA, 55 bp, Artificial
  Synthetic oligonucleotide
cgcgttattttggcacttttcaacagcggatcgttagacagggcaatggacacgt

SEQ ID NO: 371919 - DNA, 58 bp, Artificial
  Synthetic oligonucleotide
cgcgttcaacgcggaagcagtttgacacatggttcgagggtgtcatggctgactacga

SEQ ID NO: 371920 - DNA, 60 bp, Artificial
  Synthetic oligonucleotide
cgcgttcaatcgacacatttgtggtcgcctctggctcctccacctgacttggtgtttgat

SEQ ID NO: 371921 - DNA, 60 bp, Artificial
  Synthetic oligonucleotide
cgcgttcccgcctatttagttgcttgctctgcaagcaacaacatctattataaataccag

SEQ ID NO: 371922 - DNA, 55 bp, Artificial
  Synthetic oligonucleotide
cgcgttccctgacaccaggcacctgtggcagctcggtcctttacttggtcacgag

SEQ ID NO: 371923 - DNA, 55 bp, Artificial
  Synthetic oligonucleotide
cgcgttcctaagtagcaattgtcaggcaaaatatgtaaaggacgcttgcacaatg

SEQ ID NO: 371924 - DNA, 50 bp, Artificial
  Synthetic oligonucleotide
cgcgttcctgggcgatgaatattgtgtccgcacgcaagggcgcgaatacg

SEQ ID NO: 371925 - DNA, 55 bp, Artificial
  Synthetic oligonucleotide
cgcgttcctttagtctctagaatgcctatcccgaactcccgtagtactatcgtgt

SEQ ID NO: 371926 - DNA, 57 bp, Artificial
  Synthetic oligonucleotide
cgcgttcctttgctatgagtccactgataagacctagcctgtgagccgctacaacgc

SEQ ID NO: 371927 - DNA, 53 bp, Artificial
  Synthetic oligonucleotide
cgcgttcgaaaacttaaaggacatatggggagcgcgttgggacgcggtaaaca

SEQ ID NO: 371928 - DNA, 55 bp, Artificial
  Synthetic oligonucleotide
cgcgttcgctgcacagcgtcgggaagcgggaaagattgcggtgctggtgaacttc

SEQ ID NO: 371929 - DNA, 55 bp, Artificial
  Synthetic oligonucleotide
cgcgttcgggaggatggagtgaggcgctttaggtggtacccaccacgtggtcttc

SEQ ID NO: 371930 - DNA, 54 bp, Artificial
  Synthetic oligonucleotide
cgcgttcgttcctatatcaagttaaagagtttgaacttatcggggaccattgcc

SEQ ID NO: 371931 - DNA, 58 bp, Artificial
  Synthetic oligonucleotide
cgcgttctacaaagagcaaattacgttcggacaatcgagaatgtttattccacatata

SEQ ID NO: 371932 - DNA, 54 bp, Artificial
  Synthetic oligonucleotide
cgcgttctcacttcctcgtatggattttgtgactcaacttccgggttcccacgt

SEQ ID NO: 371933 - DNA, 55 bp, Artificial
  Synthetic oligonucleotide
cgcgttgaatctatcacattgcagtactcaaagcttgtaattgacgagactgagc

SEQ ID NO: 371934 - DNA, 50 bp, Artificial
  Synthetic oligonucleotide
cgcgttgagcacatttgtgaaaccggcgggagtacttgttaaaagacgcg

SEQ ID NO: 371935 - DNA, 60 bp, Artificial
  Synthetic oligonucleotide
cgcgttgatgcactaaatcaagagctcacacaatccccgcgctgagcagcaggagatgat

SEQ ID NO: 371936 - DNA, 55 bp, Artificial
  Synthetic oligonucleotide
cgcgttgctaacagagtgagttgtcaatatctggttaacgttggtcaatagctcc

SEQ ID NO: 371937 - DNA, 50 bp, Artificial
  Synthetic oligonucleotide
cgcgttggaggcagtcacccacaactggggtcctgcacacaatggcacgc

SEQ ID NO: 371938 - DNA, 57 bp, Artificial
  Synthetic oligonucleotide
cgcgttggctagatccattccagtgtgtattccgaaccgatcgagaaacgtatttag

SEQ ID NO: 371939 - DNA, 60 bp, Artificial
  Synthetic oligonucleotide
cgcgttggtagtatctataataggtgtacttgcgtctatatctggaatcgtcgtgagcgc

SEQ ID NO: 371940 - DNA, 55 bp, Artificial
  Synthetic oligonucleotide
cgcgttggttcctatatcaagctaaagagtctgaacatttctgggacagctgctg

SEQ ID NO: 371941 - DNA, 60 bp, Artificial
  Synthetic oligonucleotide
cgcgttgtacatatagacgcctggagctcaaaagctatagacgccatcgtaccgctctca

SEQ ID NO: 371942 - DNA, 52 bp, Artificial
  Synthetic oligonucleotide
cgcgttgtcccagacgactaccctgtcgtctgcaacttaccgatcaacaggc

SEQ ID NO: 371943 - DNA, 55 bp, Artificial
  Synthetic oligonucleotide
cgcgttgtgaagtattttacaagggtggaagcgagtgggacgtgaggacactggt

SEQ ID NO: 371944 - DNA, 60 bp, Artificial
  Synthetic oligonucleotide
cgcgttgttgtgttctctgatcatcattaagtggccgtcatgggtgatatattaggcgca

SEQ ID NO: 371945 - DNA, 56 bp, Artificial
  Synthetic oligonucleotide
cgcgtttacgcggacggtgagactgaagataactcattctctttaaaatatcgttc

SEQ ID NO: 371946 - DNA, 51 bp, Artificial
  Synthetic oligonucleotide
cgcgtttagcaagagatacaatcagcggacgatcatactcaatcttaccgt

SEQ ID NO: 371947 - DNA, 55 bp, Artificial
  Synthetic oligonucleotide
cgcgtttgaaattgtacaccgtttcacagtttatgacatattatgcggtcgcgcg

SEQ ID NO: 371948 - DNA, 55 bp, Artificial
  Synthetic oligonucleotide
cgcgtttggaacgtgattaagaacacgcgaacggaactgattttctgggagcgtg

SEQ ID NO: 371949 - DNA, 52 bp, Artificial
  Synthetic oligonucleotide
cgcgtttggcgtaacgaatatccctcgtggatccaatgtatccttgaagatt

SEQ ID NO: 371950 - DNA, 57 bp, Artificial
  Synthetic oligonucleotide
cgcgtttgtgcaacttgataagatacatctgtaccaggaacgtgtttttagcacttt

SEQ ID NO: 371951 - DNA, 55 bp, Artificial
  Synthetic oligonucleotide
cgcgttttaatgacgtcacggacgccattttgtgatacgcgcgtcccctcccggc

SEQ ID NO: 371952 - DNA, 58 bp, Artificial
  Synthetic oligonucleotide
cgcgttttatctgtcgagaaggatacattaatggttgatctacagggatcgacaacgt

SEQ ID NO: 371953 - DNA, 57 bp, Artificial
  Synthetic oligonucleotide
cgcgttttcgcttccggcgtggataccgccgagagtgtcccatgctctcccgacgtc

SEQ ID NO: 371954 - DNA, 59 bp, Artificial
  Synthetic oligonucleotide
cgcgttttgacgctcgcgagtggtttgatgaactccgcaggatcggatctaacataccg

SEQ ID NO: 371955 - DNA, 59 bp, Artificial
  Synthetic oligonucleotide
cgctaaaagatcaaatatcatggcttacacttcaacggaagaggatgttaagaagagct

SEQ ID NO: 371956 - DNA, 55 bp, Artificial
  Synthetic oligonucleotide
cgctaaacagctaacgtcgcttggcctaaatgccgtggccttttataggggcgtg

SEQ ID NO: 371957 - DNA, 50 bp, Artificial
  Synthetic oligonucleotide
cgctaaacctctgctccaacccgccgctaaacctctgatccaacccgccg

SEQ ID NO: 371958 - DNA, 59 bp, Artificial
  Synthetic oligonucleotide
cgctaaacgactcactgaaaagttgggtcctagtgctctcaaacatcctgtgcgcggaa

SEQ ID NO: 371959 - DNA, 60 bp, Artificial
  Synthetic oligonucleotide
cgctaaagcttgtcgattcagctaatatactagaggctgttaatgaccaagaggtcactg

SEQ ID NO: 371960 - DNA, 55 bp, Artificial
  Synthetic oligonucleotide
cgctaaattacatacggaacaggaacgtgattacttcatgacccgttaccgtgac

SEQ ID NO: 371961 - DNA, 55 bp, Artificial
  Synthetic oligonucleotide
cgctaacacaaccgggtgttgttactaaaatgcaggacgcgtggaccaattggac

SEQ ID NO: 371962 - DNA, 54 bp, Artificial
  Synthetic oligonucleotide
cgctaacatgtaagattatcctgtacggggctagccaatacggcactggattta

SEQ ID NO: 371963 - DNA, 60 bp, Artificial
  Synthetic oligonucleotide
cgctaaccaggcgcaatgggaatacttcgtcaacatggtggcatacagggctggagcgtt

SEQ ID NO: 371964 - DNA, 55 bp, Artificial
  Synthetic oligonucleotide
cgctaaccccgcttgccaaagtgcaattcggccttttaggcagaaggagctttcg

SEQ ID NO: 371965 - DNA, 55 bp, Artificial
  Synthetic oligonucleotide
cgctaaccctatcccgcggccgccccgggggctggccactcatcactggcttaat

SEQ ID NO: 371966 - DNA, 55 bp, Artificial
  Synthetic oligonucleotide
cgctaaccggtacaccgtgttcgccgcttcaggagacgtcgtatcggaaatctcc

SEQ ID NO: 371967 - DNA, 60 bp, Artificial
  Synthetic oligonucleotide
cgctaactccatagctaacttagccctgatcaaaacagtattgtcgcgtatagcgaataa

SEQ ID NO: 371968 - DNA, 58 bp, Artificial
  Synthetic oligonucleotide
cgctaactgccctactaatcgctaacggatacactaggactgacttgcccatttccaa

SEQ ID NO: 371969 - DNA, 51 bp, Artificial
  Synthetic oligonucleotide
cgctaagagctgctctatcagcgaaaaggtgttcccaccaaacccatctga

SEQ ID NO: 371970 - DNA, 55 bp, Artificial
  Synthetic oligonucleotide
cgctaagatagacgaaagtttaacggtgtccgatagtggtgttatgtttcaagac

SEQ ID NO: 371971 - DNA, 55 bp, Artificial
  Synthetic oligonucleotide
cgctaagcactgatctcaattcaattccgagaacactcaatctacttgacaagct

SEQ ID NO: 371972 - DNA, 55 bp, Artificial
  Synthetic oligonucleotide
cgctaagcagacgaatgagaacgacacttcaatcaaggaatcggctcccaagcct

SEQ ID NO: 371973 - DNA, 51 bp, Artificial
  Synthetic oligonucleotide
cgctaagcgcattgagtgttctactgtcgttaatggtgttaaacgtatctt

SEQ ID NO: 371974 - DNA, 60 bp, Artificial
  Synthetic oligonucleotide
cgctaagcgtgaacgcctgcttggacagaggaatttggagcgtatatcgaccagggatat

SEQ ID NO: 371975 - DNA, 55 bp, Artificial
  Synthetic oligonucleotide
cgctaaggataaagctcgctatggccctttggccaaaccggagaggtctccatgc

SEQ ID NO: 371976 - DNA, 55 bp, Artificial
  Synthetic oligonucleotide
cgctaaggcggctactgaggcactccgcatcgttggagctaacatggctcagagt

SEQ ID NO: 371977 - DNA, 49 bp, Artificial
  Synthetic oligonucleotide
cgctaaggctttcgacaaactttcggtcgacggtaaaggtttagttagg

SEQ ID NO: 371978 - DNA, 55 bp, Artificial
  Synthetic oligonucleotide
cgctaaggggttctctttagaacttatcgttcggaatgtggtgcgcgtgactcat

SEQ ID NO: 371979 - DNA, 55 bp, Artificial
  Synthetic oligonucleotide
cgctaagggtgtctggactgagctcagtatcccggtaagcctccaaagcagatgg

SEQ ID NO: 371980 - DNA, 57 bp, Artificial
  Synthetic oligonucleotide
cgctaataaatatccaaacaataagctattggttgttattctaaaatatggtcaata

SEQ ID NO: 371981 - DNA, 57 bp, Artificial
  Synthetic oligonucleotide
cgctaatatagaattaggggcgcgagttgctagggaaatcctgaagaccgctggggc

SEQ ID NO: 371982 - DNA, 55 bp, Artificial
  Synthetic oligonucleotide
cgctaatcaccttttcatagtgcagaaagctaaactcctaacgccacagatgcgc

SEQ ID NO: 371983 - DNA, 55 bp, Artificial
  Synthetic oligonucleotide
cgctaatcagatataagagagctattcggggctgataagtagttacgattgagcg

SEQ ID NO: 371984 - DNA, 57 bp, Artificial
  Synthetic oligonucleotide
cgctaatcatagcaatagtagtgtggactatagtaggtatagaatataggaaattgt

SEQ ID NO: 371985 - DNA, 51 bp, Artificial
  Synthetic oligonucleotide
cgctaatcccgcccttcagtattctaggggctaactttcccggtttgactt

SEQ ID NO: 371986 - DNA, 60 bp, Artificial
  Synthetic oligonucleotide
cgctaatgagaagttcgggtttgagttggtcttcacagctcctacccatgcgggaatgca

SEQ ID NO: 371987 - DNA, 51 bp, Artificial
  Synthetic oligonucleotide
cgctaatgcgggtgccattctggggacggatatgttaatggcgcccaaagc

SEQ ID NO: 371988 - DNA, 60 bp, Artificial
  Synthetic oligonucleotide
cgctaatgtgcctcgctatgttcccatgtgggaagataacttgtcccgactgcgtgacgg

SEQ ID NO: 371989 - DNA, 57 bp, Artificial
  Synthetic oligonucleotide
cgctaattaacaacggcgttcataagcttatcacatttccgctatttttcctggatg

SEQ ID NO: 371990 - DNA, 60 bp, Artificial
  Synthetic oligonucleotide
cgctaattcagagttagatatgtcggaattggcagatttgatacttaatgagtggctttg

SEQ ID NO: 371991 - DNA, 56 bp, Artificial
  Synthetic oligonucleotide
cgctaattgtttaattacatcaagagcctccgacttacttcttgcgttaattgcct

SEQ ID NO: 371992 - DNA, 55 bp, Artificial
  Synthetic oligonucleotide
cgctacaaaaggagctggcaccgtgacaagaagggcgatacctggggtttggaag

SEQ ID NO: 371993 - DNA, 55 bp, Artificial
  Synthetic oligonucleotide
cgctacaaccaggagagccgccaatcgtcttacactgcttcgaagacctcagacc

SEQ ID NO: 371994 - DNA, 55 bp, Artificial
  Synthetic oligonucleotide
cgctacaatatggtccttccaaagaccaaatgcatactaacgtcattgcgctcga

SEQ ID NO: 371995 - DNA, 55 bp, Artificial
  Synthetic oligonucleotide
cgctacaatgttgttgatctcgctgtgcgatgtcacgccgcctggttagcggatg

SEQ ID NO: 371996 - DNA, 55 bp, Artificial
  Synthetic oligonucleotide
cgctacacaagtaatctatccgaatcagcaatttgctatataatacggaaccggc

SEQ ID NO: 371997 - DNA, 57 bp, Artificial
  Synthetic oligonucleotide
cgctacacccttccgcaccaactgcggatgaggaacgtggcgccctctgaggtttcg

SEQ ID NO: 371998 - DNA, 55 bp, Artificial
  Synthetic oligonucleotide
cgctacacgcatagttctgtactgtagtcgctgggatattaaaacctgaaagctg

SEQ ID NO: 371999 - DNA, 59 bp, Artificial
  Synthetic oligonucleotide
cgctacacttgatgaggtactgggttgtgatgttgagggtcaacgaaatggcaggtact

SEQ ID NO: 372000 - DNA, 55 bp, Artificial
  Synthetic oligonucleotide
cgctacagctataatagtagctgaggggactgataggattatagaaatagcacaa

SEQ ID NO: 372001 - DNA, 52 bp, Artificial
  Synthetic oligonucleotide
cgctacagtctcatctgagccccttccagaggggtctacgctgcagatagtt

SEQ ID NO: 372002 - DNA, 58 bp, Artificial
  Synthetic oligonucleotide
cgctacatgacttcgtatgttacttatcctgctaaaacgcgaactggaacgaataaca

SEQ ID NO: 372003 - DNA, 58 bp, Artificial
  Synthetic oligonucleotide
cgctaccaatcacacataactatcggttgtggttacgcagcccctggggactgtggtg

SEQ ID NO: 372004 - DNA, 52 bp, Artificial
  Synthetic oligonucleotide
cgctaccaccagatcccactcactttgatgggtataaacaacaaggagtggt

SEQ ID NO: 372005 - DNA, 60 bp, Artificial
  Synthetic oligonucleotide
cgctaccacctctatcctttttgtgtcatacgtgttatcaggcaaatccacggatatgtg

SEQ ID NO: 372006 - DNA, 57 bp, Artificial
  Synthetic oligonucleotide
cgctaccattcgctacaattgtacaatgtactaacaacgtttaattactgtactaga

SEQ ID NO: 372007 - DNA, 58 bp, Artificial
  Synthetic oligonucleotide
cgctacccaccgaataatagggatcacgaatgaacattgtcgtgaaattgtcggatac

SEQ ID NO: 372008 - DNA, 57 bp, Artificial
  Synthetic oligonucleotide
cgctacccccgagccttaactttgaagatacagcccgtacgatatcatgaaattcac

SEQ ID NO: 372009 - DNA, 55 bp, Artificial
  Synthetic oligonucleotide
cgctaccccgtggctataactctagaccacaagagagcgggttcttatgcttctg

SEQ ID NO: 372010 - DNA, 55 bp, Artificial
  Synthetic oligonucleotide
cgctacccctatgaggtgcctgctcatgccgttcccgtcctccaacgtttcggca

SEQ ID NO: 372011 - DNA, 54 bp, Artificial
  Synthetic oligonucleotide
cgctaccgattttccgaagggcgtttattattgcgacaaccgcgataagccgat

SEQ ID NO: 372012 - DNA, 55 bp, Artificial
  Synthetic oligonucleotide
cgctaccgggcagattctctcatactataaaagggccatggcaatgctcaagtct

SEQ ID NO: 372013 - DNA, 57 bp, Artificial
  Synthetic oligonucleotide
cgctaccgttgctgctgttttagctaggttaactgatttctcgaaaggtatcactgt

SEQ ID NO: 372014 - DNA, 56 bp, Artificial
  Synthetic oligonucleotide
cgctacctgagctccccaaaccccataagatgttgtcaaaattgcccgctgtttta

SEQ ID NO: 372015 - DNA, 51 bp, Artificial
  Synthetic oligonucleotide
cgctacctgcgaggttatccccaccccggtcactgcggacgtggcctactt

SEQ ID NO: 372016 - DNA, 55 bp, Artificial
  Synthetic oligonucleotide
cgctacctggtgttgaagactccacatgttcgatcatcaattatgagacacggtg

SEQ ID NO: 372017 - DNA, 60 bp, Artificial
  Synthetic oligonucleotide
cgctacctgtagatgttatcccagttcctcctgagtcatctgcaataatacctttagcag

SEQ ID NO: 372018 - DNA, 60 bp, Artificial
  Synthetic oligonucleotide
cgctacctttacagagactacaattatagctacagctgatgccaggggtcttatccagtc

SEQ ID NO: 372019 - DNA, 55 bp, Artificial
  Synthetic oligonucleotide
cgctacgaattgaatcagcagtttgtgaatctgtgcttgcggacgcttccgaaac

SEQ ID NO: 372020 - DNA, 59 bp, Artificial
  Synthetic oligonucleotide
cgctacgcgcttgctaagtgaaacagaagtcatagacgttcctacgtccatgactttgt

SEQ ID NO: 372021 - DNA, 55 bp, Artificial
  Synthetic oligonucleotide
cgctacggaggtccccttcaacgagtctaggaagtggtggataagcagccaccgg

SEQ ID NO: 372022 - DNA, 53 bp, Artificial
  Synthetic oligonucleotide
cgctacggttttgttgccaatttcagtatggagctacccagttttggggtttc

SEQ ID NO: 372023 - DNA, 55 bp, Artificial
  Synthetic oligonucleotide
cgctacgttcattgatgaagactggacgtgatgccgatgcacacagggctttcca

SEQ ID NO: 372024 - DNA, 54 bp, Artificial
  Synthetic oligonucleotide
cgctacgtttagtgcgctatccactatgtggggtccgcttttgaacccgtttcc

SEQ ID NO: 372025 - DNA, 55 bp, Artificial
  Synthetic oligonucleotide
cgctactaataatggatgttacatcctcgtcagtgctgtcgccttcctgcaaggc

SEQ ID NO: 372026 - DNA, 60 bp, Artificial
  Synthetic oligonucleotide
cgctactagctcaaaatatgagacgcaagacgtgattatgcctttcgctgaaatgtacgc

SEQ ID NO: 372027 - DNA, 56 bp, Artificial
  Synthetic oligonucleotide
cgctactatagtccggagtcgtgcctgtcccaatgctaaatacctcataaagctta

SEQ ID NO: 372028 - DNA, 55 bp, Artificial
  Synthetic oligonucleotide
cgctactatatctcttggcgttgaagaaaagtgatgcaaactctgcagttgcgaa

SEQ ID NO: 372029 - DNA, 60 bp, Artificial
  Synthetic oligonucleotide
cgctactatggagtgaccataaccttgtggccgagtcagcactactcctacatattctgg

SEQ ID NO: 372030 - DNA, 55 bp, Artificial
  Synthetic oligonucleotide
cgctactcgtcgaagaagcgttgactgaggccctcctggagataaacctcgtcga

SEQ ID NO: 372031 - DNA, 55 bp, Artificial
  Synthetic oligonucleotide
cgctactgcttgaccccagtgctagcattgatagcattcgagctgcttaccgagc

SEQ ID NO: 372032 - DNA, 55 bp, Artificial
  Synthetic oligonucleotide
cgctactgtctttgcacaaattgttaagctcaggaaggttgatactttaaagcca

SEQ ID NO: 372033 - DNA, 60 bp, Artificial
  Synthetic oligonucleotide
cgctacttttgtcgcaggagtatgcaccagatacgcatggttacgatctaatacgagatt

SEQ ID NO: 372034 - DNA, 54 bp, Artificial
  Synthetic oligonucleotide
cgctagaaagtgccccacaaaaacatgtcctacacccaagcctgttccaaaact

SEQ ID NO: 372035 - DNA, 55 bp, Artificial
  Synthetic oligonucleotide
cgctagaactagttcttttacactaagagccaacctcgctaaccagcatggatgg

SEQ ID NO: 372036 - DNA, 60 bp, Artificial
  Synthetic oligonucleotide
cgctagagatgatagttcggaaatagcacatgctttcgttcacaaacccgaagagaagtg

SEQ ID NO: 372037 - DNA, 55 bp, Artificial
  Synthetic oligonucleotide
cgctagagtccaaataattaagccgctcttggatgtagagcgcggtgtgcagacg

SEQ ID NO: 372038 - DNA, 55 bp, Artificial
  Synthetic oligonucleotide
cgctagatcgttattttcacttaaagttaggaaacatttgttagatgccgtggaa

SEQ ID NO: 372039 - DNA, 55 bp, Artificial
  Synthetic oligonucleotide
cgctagatgagtacatctggggcagtacgtcatgtgacctgtttcacccggcgga

SEQ ID NO: 372040 - DNA, 51 bp, Artificial
  Synthetic oligonucleotide
cgctagattttttcctaaccttactaaatatttgcccttagataaaggtat

SEQ ID NO: 372041 - DNA, 60 bp, Artificial
  Synthetic oligonucleotide
cgctagcaagttatatgcatgccgtgaagcccctagtggaggatggtcttctgaatcccc

SEQ ID NO: 372042 - DNA, 55 bp, Artificial
  Synthetic oligonucleotide
cgctagcactctggtattacggtacctttgtgcgcctgttttatgtcccctcccc

SEQ ID NO: 372043 - DNA, 60 bp, Artificial
  Synthetic oligonucleotide
cgctagcccaagcagccgtcgtactgcacagcatgaaccctgcgcagtatcccgcaggtt

SEQ ID NO: 372044 - DNA, 57 bp, Artificial
  Synthetic oligonucleotide
cgctagccctgaacaatttggcctcccgattgttgagaaagatatctttacacttag

SEQ ID NO: 372045 - DNA, 60 bp, Artificial
  Synthetic oligonucleotide
cgctagccggcgttactgtgagcgttggtggcgtcgacatgagggctggacgtataatag

SEQ ID NO: 372046 - DNA, 54 bp, Artificial
  Synthetic oligonucleotide
cgctagcgctcatcacttgcattgtttcgtcagctaacttatcgacattgtcca

SEQ ID NO: 372047 - DNA, 55 bp, Artificial
  Synthetic oligonucleotide
cgctagctacggacttcaagctggggacaatacggaggatgcagtcaccacaatc

SEQ ID NO: 372048 - DNA, 60 bp, Artificial
  Synthetic oligonucleotide
cgctagctcatgtttgtcagtggtgcatccaaaacaaacgttgcttcttggacaatgaac

SEQ ID NO: 372049 - DNA, 58 bp, Artificial
  Synthetic oligonucleotide
cgctagcttgagtcccgtatggtttgcctgtctaaagctactgcttgagaaacttggt

SEQ ID NO: 372050 - DNA, 55 bp, Artificial
  Synthetic oligonucleotide
cgctaggaaaccactggtgccaatatcagttggttggtccccaacagttggtgag

SEQ ID NO: 372051 - DNA, 55 bp, Artificial
  Synthetic oligonucleotide
cgctaggaaagttaaacatgctagctgaacagtcttatttcttgcgtttggttcg

SEQ ID NO: 372052 - DNA, 55 bp, Artificial
  Synthetic oligonucleotide
cgctaggaatgcgcagaacagatgttgtggactgggaatctgccaccatgatccc

SEQ ID NO: 372053 - DNA, 52 bp, Artificial
  Synthetic oligonucleotide
cgctaggagcgtctgccatggacacagcgccttttggcgtatctaccgctga

SEQ ID NO: 372054 - DNA, 55 bp, Artificial
  Synthetic oligonucleotide
cgctaggagttatgctttgcgttagagagaatgttatccctggctgcaggcgggg

SEQ ID NO: 372055 - DNA, 55 bp, Artificial
  Synthetic oligonucleotide
cgctaggcaatatcgccgtgcttatggtaatgagataggcgggcttatgagtgat

SEQ ID NO: 372056 - DNA, 51 bp, Artificial
  Synthetic oligonucleotide
cgctaggcttctgtccaggggaggtagtgctgctatatgcggcaagtacct

SEQ ID NO: 372057 - DNA, 57 bp, Artificial
  Synthetic oligonucleotide
cgctaggggcctcattcagtcatcccgggcccatgctatagtcgcactcacccgcca

SEQ ID NO: 372058 - DNA, 55 bp, Artificial
  Synthetic oligonucleotide
cgctagggtctcactcctagaatgccaacgacagctcctgcgttgcactccaaac

SEQ ID NO: 372059 - DNA, 55 bp, Artificial
  Synthetic oligonucleotide
cgctagggtttcacccctagcatgccatcgacagtccctgcgatgcaccccacac

SEQ ID NO: 372060 - DNA, 55 bp, Artificial
  Synthetic oligonucleotide
cgctaggtagctgaggcttaacctttatgtgcgtaatagggccaataatagggct

SEQ ID NO: 372061 - DNA, 60 bp, Artificial
  Synthetic oligonucleotide
cgctaggtataccaaaaatagatgctgatacatatgtggggtcgaagatatattctcaag

SEQ ID NO: 372062 - DNA, 55 bp, Artificial
  Synthetic oligonucleotide
cgctaggtggggccaagacgacggactttgctgtagcccctagtccggttggcat

SEQ ID NO: 372063 - DNA, 55 bp, Artificial
  Synthetic oligonucleotide
cgctaggtttgtcctcgccttaatctctattgataatgaatacccatggaggctt

SEQ ID NO: 372064 - DNA, 55 bp, Artificial
  Synthetic oligonucleotide
cgctagtaaaattaggtgcaatcaaatacagacggccattgcaaaagtgtgctgt

SEQ ID NO: 372065 - DNA, 55 bp, Artificial
  Synthetic oligonucleotide
cgctagtacctcctttcacaagagcttggccgctttgaaaggtagtcgtccaaag

SEQ ID NO: 372066 - DNA, 55 bp, Artificial
  Synthetic oligonucleotide
cgctagtactccaccctacgggttaagcaaatgagaatatcgaaacggtatgcac

SEQ ID NO: 372067 - DNA, 60 bp, Artificial
  Synthetic oligonucleotide
cgctagtgaaacaatgttagctaatgtgacgtcagttagacgagaatacgcgattccagt

SEQ ID NO: 372068 - DNA, 60 bp, Artificial
  Synthetic oligonucleotide
cgctagtgcgcgagatagccggaggccattacgtgcagatggccataatcaagttggggg

SEQ ID NO: 372069 - DNA, 55 bp, Artificial
  Synthetic oligonucleotide
cgctagtgggaccactatgccagcattgtgcgctattcattgtgtgcgatcgaac

SEQ ID NO: 372070 - DNA, 53 bp, Artificial
  Synthetic oligonucleotide
cgctagttttggattatcttgtgcccgacattagacctcggtctcttgttgtg

SEQ ID NO: 372071 - DNA, 53 bp, Artificial
  Synthetic oligonucleotide
cgctataagatcaattgacatgccaaaccagaaagataaagaacttgtcatgg

SEQ ID NO: 372072 - DNA, 55 bp, Artificial
  Synthetic oligonucleotide
cgctataagcggaggctccaacgaagggtccacggatacaacctctacccacaca

SEQ ID NO: 372073 - DNA, 55 bp, Artificial
  Synthetic oligonucleotide
cgctataatgaagtcacacctccgagagcacttaactcaaggagagacaggcgtg

SEQ ID NO: 372074 - DNA, 55 bp, Artificial
  Synthetic oligonucleotide
cgctatacagaagtgtttgttgaccctgcatgtaagtccttgagagaagaacttc

SEQ ID NO: 372075 - DNA, 60 bp, Artificial
  Synthetic oligonucleotide
cgctataccacaatatactttttcgccgacgtatattatagcactggagtaagagcagca

SEQ ID NO: 372076 - DNA, 55 bp, Artificial
  Synthetic oligonucleotide
cgctatagctgcataccttactgtctgtcatcaaaggtgggtgcgcacacagggc

SEQ ID NO: 372077 - DNA, 60 bp, Artificial
  Synthetic oligonucleotide
cgctatataaatagcttaggccgggaggaccggcagaaccatgcagagtggttgcatgta

SEQ ID NO: 372078 - DNA, 60 bp, Artificial
  Synthetic oligonucleotide
cgctatatcagacttaacgaatagcatgtcagacgcagcttcttcaattagtagatctac

SEQ ID NO: 372079 - DNA, 60 bp, Artificial
  Synthetic oligonucleotide
cgctatatcagatttaacgaatagcatgtcagatgcggcttcttcagttagtaggtccac

SEQ ID NO: 372080 - DNA, 55 bp, Artificial
  Synthetic oligonucleotide
cgctatcaaatacctgcagactgtagcggatacgtatgctccggatacggtaggt

SEQ ID NO: 372081 - DNA, 55 bp, Artificial
  Synthetic oligonucleotide
cgctatcaatggagagttctcccgcaaggaatgactaatagccctacgctgtgcc

SEQ ID NO: 372082 - DNA, 59 bp, Artificial
  Synthetic oligonucleotide
cgctatcatcgtgagactatatttaaacgtcgaatcaatagaagttaaatggctctatc

SEQ ID NO: 372083 - DNA, 60 bp, Artificial
  Synthetic oligonucleotide
cgctatccaatcaccgtttccagaggcggcagtgtctaggattgtggtgcatacgagatg

SEQ ID NO: 372084 - DNA, 55 bp, Artificial
  Synthetic oligonucleotide
cgctatccactatgtgggatccgcttttgaacccgtttccccaaaccgtgcacgc

SEQ ID NO: 372085 - DNA, 60 bp, Artificial
  Synthetic oligonucleotide
cgctatcccctacacaaatactcgacacaagtcgaattctctcaaacatcagcgtccatg

SEQ ID NO: 372086 - DNA, 55 bp, Artificial
  Synthetic oligonucleotide
cgctatcgagcaaaggacgttaaaaatgctcgaaagggaaaatatttcgatgccg

SEQ ID NO: 372087 - DNA, 60 bp, Artificial
  Synthetic oligonucleotide
cgctatcgatagtgtgttcggatcccccactgtgctttctggctatgacaactttaaaca

SEQ ID NO: 372088 - DNA, 55 bp, Artificial
  Synthetic oligonucleotide
cgctatctcctccacggtcacagcacaaggacaggccatcaaccagcgtgccctt

SEQ ID NO: 372089 - DNA, 60 bp, Artificial
  Synthetic oligonucleotide
cgctatcttcggaattccccaaatactatggaaagtatgaagtcatctcgttcaattgca

SEQ ID NO: 372090 - DNA, 59 bp, Artificial
  Synthetic oligonucleotide
cgctatgactttaggatattcaaaccctagagatgcaataagcagacacgtaaaacgac

SEQ ID NO: 372091 - DNA, 60 bp, Artificial
  Synthetic oligonucleotide
cgctatgctgcatcgagttcatcggatagagataagaaatatgttgcagccatccatcga

SEQ ID NO: 372092 - DNA, 55 bp, Artificial
  Synthetic oligonucleotide
cgctatggatgccaaggagcctgtgatcggctctatcttggagcaggatgatcac

SEQ ID NO: 372093 - DNA, 60 bp, Artificial
  Synthetic oligonucleotide
cgctatgtacggtacagatggactcgaggcattagacctcagtaccagtgcaggctaccc

SEQ ID NO: 372094 - DNA, 55 bp, Artificial
  Synthetic oligonucleotide
cgctatgtatggaactgatggcttggaggccctggatctatctaccagtgctggg

SEQ ID NO: 372095 - DNA, 55 bp, Artificial
  Synthetic oligonucleotide
cgctatgtggcttgggttgagcgccaatggttttcagagtcagcttgcttacgat

SEQ ID NO: 372096 - DNA, 57 bp, Artificial
  Synthetic oligonucleotide
cgctatgttacagcaaaaccgtgatggtttgcagttattgttcttacgccgggcgaa

SEQ ID NO: 372097 - DNA, 55 bp, Artificial
  Synthetic oligonucleotide
cgctattctgtgcgatgtccatattctgtaacatttgcgctacatcgtcgtcagt

SEQ ID NO: 372098 - DNA, 54 bp, Artificial
  Synthetic oligonucleotide
cgctattgagcaacctatcgagttcattcgtttagtgccgacactacaaaaaca

SEQ ID NO: 372099 - DNA, 57 bp, Artificial
  Synthetic oligonucleotide
cgctattgatcggttcccgcccacgtgatttcaagacggaagttgacgtcatctacg

SEQ ID NO: 372100 - DNA, 55 bp, Artificial
  Synthetic oligonucleotide
cgctattgcaggtgactggatttgggaccacttacacccagcggagcgtagacct

SEQ ID NO: 372101 - DNA, 60 bp, Artificial
  Synthetic oligonucleotide
cgctattgtgcaggccactatcgccacgtacaccgcggctattgaggcgtacaagtctac

SEQ ID NO: 372102 - DNA, 55 bp, Artificial
  Synthetic oligonucleotide
cgctatttagtagcgcattcagcttatataatcgttacacggaaattgtcgctcg

SEQ ID NO: 372103 - DNA, 60 bp, Artificial
  Synthetic oligonucleotide
cgctattttcggggatccactgcaaggctcgagcgagtgcttaaggcctcatttcacgac

SEQ ID NO: 372104 - DNA, 57 bp, Artificial
  Synthetic oligonucleotide
cgctcaaaagggcaaaatgcgtttaagaccagtggagaaagagctaaagtatggatg

SEQ ID NO: 372105 - DNA, 56 bp, Artificial
  Synthetic oligonucleotide
cgctcaaagattacacggctggtataaagacatgtttgtggtaccaaaggaaaagc

SEQ ID NO: 372106 - DNA, 59 bp, Artificial
  Synthetic oligonucleotide
cgctcaaagtgcatttcatagaaggaaaggatgttgttttagtgcgtatgccaaaggac

SEQ ID NO: 372107 - DNA, 55 bp, Artificial
  Synthetic oligonucleotide
cgctcaaatagttatgtggtcccaatgatctagcccacatcgtctttcccgttcg

SEQ ID NO: 372108 - DNA, 53 bp, Artificial
  Synthetic oligonucleotide
cgctcaaatatggagtatgcctcctatagttccgaacccagtttggagcgtta

SEQ ID NO: 372109 - DNA, 55 bp, Artificial
  Synthetic oligonucleotide
cgctcaaatgacatataatgccgtctaatattgtgatacccatcgtctatctgcc

SEQ ID NO: 372110 - DNA, 55 bp, Artificial
  Synthetic oligonucleotide
cgctcaacggggagagggtctcttttcccgtctgcacgtatgtgccagcgactct

SEQ ID NO: 372111 - DNA, 55 bp, Artificial
  Synthetic oligonucleotide
cgctcaagataaacttgtttatcaggcttgtttagcctcacaggtacaatcatgg

SEQ ID NO: 372112 - DNA, 59 bp, Artificial
  Synthetic oligonucleotide
cgctcaagcgttcctagacaacgaggcggcgctattcccagacactgctaagttccgtc

SEQ ID NO: 372113 - DNA, 52 bp, Artificial
  Synthetic oligonucleotide
cgctcaagggtggggtcccatcacttatgttaggccgcccaagctggaccag

SEQ ID NO: 372114 - DNA, 55 bp, Artificial
  Synthetic oligonucleotide
cgctcaagtggttcaaggactttgcggctggtaagcgatcagcagtgggattcct

SEQ ID NO: 372115 - DNA, 58 bp, Artificial
  Synthetic oligonucleotide
cgctcaatcggtgaccgcagtagcggggctcacagcaatgtttaacaaccgggggcta

SEQ ID NO: 372116 - DNA, 55 bp, Artificial
  Synthetic oligonucleotide
cgctcaatcgtcgacgacttcaagtaccaaatctactagtgatcaagcaacgttc

SEQ ID NO: 372117 - DNA, 55 bp, Artificial
  Synthetic oligonucleotide
cgctcaattagattttcgggtcttaaagcgatcgatggaccgggcacctccaatg

SEQ ID NO: 372118 - DNA, 60 bp, Artificial
  Synthetic oligonucleotide
cgctcacacgtgctattgcacgcgccgcctatgtgtagtccactttgcacgggtgtgggt

SEQ ID NO: 372119 - DNA, 55 bp, Artificial
  Synthetic oligonucleotide
cgctcacaggagcccatttcagcgacgaaaagaaaattatgactgatagtgacct

SEQ ID NO: 372120 - DNA, 56 bp, Artificial
  Synthetic oligonucleotide
cgctcacatacttgggaaacacaatagtgacattagcttgtctgtgtcacgtgtat

SEQ ID NO: 372121 - DNA, 55 bp, Artificial
  Synthetic oligonucleotide
cgctcacatcaaactcgaactacccgctaccgaacagattcatatggtatgggtg

SEQ ID NO: 372122 - DNA, 55 bp, Artificial
  Synthetic oligonucleotide
cgctcaccaagactcgggcccttacaagcagatcgcgatccagaggaaggtcccc

SEQ ID NO: 372123 - DNA, 55 bp, Artificial
  Synthetic oligonucleotide
cgctcaccgtcggtcgcatgatttgctcattcgaagccagacccgaactcctcgc

SEQ ID NO: 372124 - DNA, 55 bp, Artificial
  Synthetic oligonucleotide
cgctcacggaaccactattctgaagggaacgatgatgttcgatggcgctatgatg

SEQ ID NO: 372125 - DNA, 55 bp, Artificial
  Synthetic oligonucleotide
cgctcacggaactacgattttgaaagggacgatgatgttcgacggtgctatgatg

SEQ ID NO: 372126 - DNA, 60 bp, Artificial
  Synthetic oligonucleotide
cgctcactggtactccagcgtacaacttttcgtctgtggctctcggatcacgcagtgtcc

SEQ ID NO: 372127 - DNA, 57 bp, Artificial
  Synthetic oligonucleotide
cgctcacttgtgacaagattcttgatggacgggggaacgccgtttttctcattccca

SEQ ID NO: 372128 - DNA, 55 bp, Artificial
  Synthetic oligonucleotide
cgctcagaatcacttatggtgcaagaaggagagtactcacgtgttctcccacgct

SEQ ID NO: 372129 - DNA, 60 bp, Artificial
  Synthetic oligonucleotide
cgctcagagggagacatgcgaacgggactatacatgataggagcccgttcagagccctca

SEQ ID NO: 372130 - DNA, 55 bp, Artificial
  Synthetic oligonucleotide
cgctcagataattatgtgggcctaaagcacgagcccacattgtcttgcctgttcg

SEQ ID NO: 372131 - DNA, 55 bp, Artificial
  Synthetic oligonucleotide
cgctcagcacaggatctgatcaggagattcatctctggtgctttacaccagagca

SEQ ID NO: 372132 - DNA, 60 bp, Artificial
  Synthetic oligonucleotide
cgctcagctataccccatagtagacctggcagatgaggctagaaacaccccactggcgac

SEQ ID NO: 372133 - DNA, 55 bp, Artificial
  Synthetic oligonucleotide
cgctcaggagctgaaaccgacctcacattccttaaggtcactaaaggacccctct

SEQ ID NO: 372134 - DNA, 60 bp, Artificial
  Synthetic oligonucleotide
cgctcaggatctgtgttgctagtgaagcgcttaagctgaacgaaactgacggaagagcgg

SEQ ID NO: 372135 - DNA, 55 bp, Artificial
  Synthetic oligonucleotide
cgctcagggtgggtcttcggaccccgtccctatgcctggaaagtatcctgtcgtg

SEQ ID NO: 372136 - DNA, 57 bp, Artificial
  Synthetic oligonucleotide
cgctcaggttatgagaccttcagggttattggtggctggaccacacctaattccaag

SEQ ID NO: 372137 - DNA, 55 bp, Artificial
  Synthetic oligonucleotide
cgctcataatgaaccgttggtggtgggttcacaatcttatcgaggaaagaaccgg

SEQ ID NO: 372138 - DNA, 60 bp, Artificial
  Synthetic oligonucleotide
cgctcatacgggaagaaattcactaataatcaccatattgggtaatcgcatgaagcggta

SEQ ID NO: 372139 - DNA, 55 bp, Artificial
  Synthetic oligonucleotide
cgctcatcaccagtggatgaccactgaagacatgctcaaagtgtggaacagggtg

SEQ ID NO: 372140 - DNA, 60 bp, Artificial
  Synthetic oligonucleotide
cgctcatcactccctagcatgatggggagaaacaactggattccagttgttcctccaatc

SEQ ID NO: 372141 - DNA, 60 bp, Artificial
  Synthetic oligonucleotide
cgctcatgaaatgcacgagctcaaccgtctaaaggaaagcggggtcgctgcattgccaga

SEQ ID NO: 372142 - DNA, 60 bp, Artificial
  Synthetic oligonucleotide
cgctcatgagcccagcatccttgactccgccgtagcttgaccaagaacacataaaacaca

SEQ ID NO: 372143 - DNA, 55 bp, Artificial
  Synthetic oligonucleotide
cgctcatgatattataccgaaacttgggacactgaaatctgggccagtcttacct

SEQ ID NO: 372144 - DNA, 50 bp, Artificial
  Synthetic oligonucleotide
cgctcatgctgattatatggacgagctcattcagcttgacagtccgtatg

SEQ ID NO: 372145 - DNA, 60 bp, Artificial
  Synthetic oligonucleotide
cgctcatgtacttcgagaagcctagtatcatcttggaatcttcgatgcgttgcgctcagc

SEQ ID NO: 372146 - DNA, 51 bp, Artificial
  Synthetic oligonucleotide
cgctcattcacggcagcacccattgacactcttctcggaggtaaagtgtgc

SEQ ID NO: 372147 - DNA, 55 bp, Artificial
  Synthetic oligonucleotide
cgctcattgatccgtttgcagcctttgttaagggttctttgcctcaggtgaggaa

SEQ ID NO: 372148 - DNA, 55 bp, Artificial
  Synthetic oligonucleotide
cgctccaaaagtggagtcgtgtgttggtgaatgtttaacccattaacatggcagc

SEQ ID NO: 372149 - DNA, 60 bp, Artificial
  Synthetic oligonucleotide
cgctccaacacctgctacctttttgatccttttggcttctcggatgagcgcctcaagcaa

SEQ ID NO: 372150 - DNA, 56 bp, Artificial
  Synthetic oligonucleotide
cgctccaagaagacccctatggggttttcttatgataccagatgttttgactcgac

SEQ ID NO: 372151 - DNA, 55 bp, Artificial
  Synthetic oligonucleotide
cgctccaagcaacttcgctaacggggtcgctgaatggatcagctctaactcgcgc

SEQ ID NO: 372152 - DNA, 55 bp, Artificial
  Synthetic oligonucleotide
cgctccacggctagcctcccacccttcgagaagaatgatgccgtcgcaatcgagc

SEQ ID NO: 372153 - DNA, 55 bp, Artificial
  Synthetic oligonucleotide
cgctccacttccaaaggatttccactttcagggccgaagagtgatatgattacac

SEQ ID NO: 372154 - DNA, 51 bp, Artificial
  Synthetic oligonucleotide
cgctccaggagaatacggctgccatagtgcgcgggcctacacctggcacta

SEQ ID NO: 372155 - DNA, 52 bp, Artificial
  Synthetic oligonucleotide
cgctccaggcggctggtacgtcaatgatcaccgttccctcgggtggtgtttg

SEQ ID NO: 372156 - DNA, 58 bp, Artificial
  Synthetic oligonucleotide
cgctccaggtgaaatactatggagcgcgcccttaggccctgatctgaatccctacctt

SEQ ID NO: 372157 - DNA, 55 bp, Artificial
  Synthetic oligonucleotide
cgctccagttcatgaagtgctgcgaggaggtcaggatctccgagtaggtgaggcg

SEQ ID NO: 372158 - DNA, 58 bp, Artificial
  Synthetic oligonucleotide
cgctccatgactctgaagtgtacggacgagtttttcattgtggaactaattacgatag

SEQ ID NO: 372159 - DNA, 55 bp, Artificial
  Synthetic oligonucleotide
cgctccatgctgagtggaacgtattgctacggacggcttggcatcagttcgaggg

SEQ ID NO: 372160 - DNA, 59 bp, Artificial
  Synthetic oligonucleotide
cgctcccaataccgggacacaccatctgcaggggttttgcaatctcgagaaacccatgc

SEQ ID NO: 372161 - DNA, 55 bp, Artificial
  Synthetic oligonucleotide
cgctcccacgtccaagcaggcttaattgatcaggcaaagggtcagacattgacac

SEQ ID NO: 372162 - DNA, 55 bp, Artificial
  Synthetic oligonucleotide
cgctcccatttcagacattcaaactgaaatcccggacagggcatggaacgcaggg

SEQ ID NO: 372163 - DNA, 60 bp, Artificial
  Synthetic oligonucleotide
cgctccccaggctcacaatacttgtagagtgatttctgtcatcctactgtttgtaagctt

SEQ ID NO: 372164 - DNA, 55 bp, Artificial
  Synthetic oligonucleotide
cgctccccgaaggtgtctcacctttacgcttccctaatcattcctccagaggcag

SEQ ID NO: 372165 - DNA, 55 bp, Artificial
  Synthetic oligonucleotide
cgctccccgttcactaaagtcctcaatggtacgaccaactacctgttagatgctg

SEQ ID NO: 372166 - DNA, 55 bp, Artificial
  Synthetic oligonucleotide
cgctcccctcactcttcccggaatggcccgttgtcagcaccactgcgatcgtaga

SEQ ID NO: 372167 - DNA, 60 bp, Artificial
  Synthetic oligonucleotide
cgctcccgcaacattcctatcaggcaacggtaccgctatgcacgcggagaattggatgaa

SEQ ID NO: 372168 - DNA, 52 bp, Artificial
  Synthetic oligonucleotide
cgctcccgcgacctaatcccctacccaaacctgccaagtctccccccgcctc

SEQ ID NO: 372169 - DNA, 54 bp, Artificial
  Synthetic oligonucleotide
cgctccctcaaagttaaattagtggtggtcccctatttaatacttgctcgcgaa

SEQ ID NO: 372170 - DNA, 53 bp, Artificial
  Synthetic oligonucleotide
cgctccctcaaagttaaattagtggtggtccctctatttaaacttccttagca

SEQ ID NO: 372171 - DNA, 55 bp, Artificial
  Synthetic oligonucleotide
cgctccctggccccatagtacaatcgcgccatactcagtgtcgcggcagagcatc

SEQ ID NO: 372172 - DNA, 58 bp, Artificial
  Synthetic oligonucleotide
cgctcccttactctcgtttttgcctcatgacttctttccttcaatacgagatcttcta

SEQ ID NO: 372173 - DNA, 55 bp, Artificial
  Synthetic oligonucleotide
cgctccgactcgagcagtgttggaaagatggagaggtgtcaacaaacaaacagcg

SEQ ID NO: 372174 - DNA, 55 bp, Artificial
  Synthetic oligonucleotide
cgctccgcgcccaaaataacgcttctacgcctcaacactcgccgttgcactacgc

SEQ ID NO: 372175 - DNA, 55 bp, Artificial
  Synthetic oligonucleotide
cgctccggagttcttcactgagatagatggcgtgaggatacaccgctatgcaccg

SEQ ID NO: 372176 - DNA, 54 bp, Artificial
  Synthetic oligonucleotide
cgctccggttcgcacgaaaactctaactcagctaccgagggttccactataaac

SEQ ID NO: 372177 - DNA, 52 bp, Artificial
  Synthetic oligonucleotide
cgctccgtcatgcacgaaaaccgtgcaacatcagcggtccacaccttgcacg

SEQ ID NO: 372178 - DNA, 55 bp, Artificial
  Synthetic oligonucleotide
cgctccgtgttctagacccattcttcacgcgagcagtaacagatttccgatacac

SEQ ID NO: 372179 - DNA, 58 bp, Artificial
  Synthetic oligonucleotide
cgctcctaatatcaggaccggggtgagaacaattaccactggcagccccatcacgtac

SEQ ID NO: 372180 - DNA, 58 bp, Artificial
  Synthetic oligonucleotide
cgctcctacaaaagacttctactctttccagacagaacttggaatgtgacttacactg

SEQ ID NO: 372181 - DNA, 51 bp, Artificial
  Synthetic oligonucleotide
cgctcctataccactgtgatgaagttgcgtggcagtgtttggacactccaa

SEQ ID NO: 372182 - DNA, 60 bp, Artificial
  Synthetic oligonucleotide
cgctcctatcccacgggcgcgtcctgttagacgcatgcccctgtcacctaattcacatgt

SEQ ID NO: 372183 - DNA, 55 bp, Artificial
  Synthetic oligonucleotide
cgctcctcaaggaacccgatcactgacaccctgcacttgcggctcctcggacctt

SEQ ID NO: 372184 - DNA, 52 bp, Artificial
  Synthetic oligonucleotide
cgctcctccactacatgccgcaatcggcatatgacttctgggtcgcggagct

SEQ ID NO: 372185 - DNA, 55 bp, Artificial
  Synthetic oligonucleotide
cgctcctcgaaagggccccagatgatcgcactattttctgggtgtatggtcccac

SEQ ID NO: 372186 - DNA, 60 bp, Artificial
  Synthetic oligonucleotide
cgctcctcgtctttccgacgcatatcagcttgccgctggtactcctcttggcgccgcctc

SEQ ID NO: 372187 - DNA, 60 bp, Artificial
  Synthetic oligonucleotide
cgctcctctaattatgtccctcctgatggattgggccgtaaatttgataaatcatctgct

SEQ ID NO: 372188 - DNA, 59 bp, Artificial
  Synthetic oligonucleotide
cgctcctgactaatctaaacatgttaaccgcacccggtgcagagatataaagcgccgtc

SEQ ID NO: 372189 - DNA, 55 bp, Artificial
  Synthetic oligonucleotide
cgctcctgtcgacagcctagaatacgccgacccctttgctgtcgatccctctggt

SEQ ID NO: 372190 - DNA, 60 bp, Artificial
  Synthetic oligonucleotide
cgctccttcaaacgagtgcaagtggatctggtttctacacgatggtggctctgtaccttg

SEQ ID NO: 372191 - DNA, 55 bp, Artificial
  Synthetic oligonucleotide
cgctccttggtatgcatacagattcgtcagcacagataggaaaggagctgtcttc

SEQ ID NO: 372192 - DNA, 55 bp, Artificial
  Synthetic oligonucleotide
cgctcctttcatctgtatcctcagagatcccatacatggtgagttcgcaccaggc

SEQ ID NO: 372193 - DNA, 55 bp, Artificial
  Synthetic oligonucleotide
cgctcgaagaagtgctcgagatgcatcgggtgagagtgactaggaccgagacggc

SEQ ID NO: 372194 - DNA, 56 bp, Artificial
  Synthetic oligonucleotide
cgctcgagtttgacgctggcatcggagtaccgtacatagcttacgggaagccgaca

SEQ ID NO: 372195 - DNA, 60 bp, Artificial
  Synthetic oligonucleotide
cgctcgcactactcggactgcagcccaaggactgaggcgtggggtagaggaggcacttcg

SEQ ID NO: 372196 - DNA, 60 bp, Artificial
  Synthetic oligonucleotide
cgctcgcagatgtttattcagttttgagacctgagttcgcaatccacggtgtaaatccaa

SEQ ID NO: 372197 - DNA, 58 bp, Artificial
  Synthetic oligonucleotide
cgctcgccgctactttccttaggtgatgagattggacttcaagaatccggtgtttcca

SEQ ID NO: 372198 - DNA, 55 bp, Artificial
  Synthetic oligonucleotide
cgctcgcgctagtgggtctcgccgctgtaatttacatcgctgcagtggcgaatat

SEQ ID NO: 372199 - DNA, 55 bp, Artificial
  Synthetic oligonucleotide
cgctcggacactcaacccaagtgaccctgcaacattcaattgggtgcaaccgctc

SEQ ID NO: 372200 - DNA, 60 bp, Artificial
  Synthetic oligonucleotide
cgctcggatagatgggtgctggacaggctgtatggaaatctgaaagccgtgggacagtgt

SEQ ID NO: 372201 - DNA, 50 bp, Artificial
  Synthetic oligonucleotide
cgctcggcaccgtggatgtaaccgcgtgcggcgggattaccctaccgact

SEQ ID NO: 372202 - DNA, 55 bp, Artificial
  Synthetic oligonucleotide
cgctcgggccttaagtgagggacggccagctagcctggtatacctctctcgggac

SEQ ID NO: 372203 - DNA, 55 bp, Artificial
  Synthetic oligonucleotide
cgctcgggttgtctcctcgcgcgacgctcgcttttggcaatctcgtggagatgtg

SEQ ID NO: 372204 - DNA, 53 bp, Artificial
  Synthetic oligonucleotide
cgctcggtaacaacggactttatacggtgaaacgactgtgaaacgaccgtgaa

SEQ ID NO: 372205 - DNA, 54 bp, Artificial
  Synthetic oligonucleotide
cgctcggttcaaacacctccgaaccgggcgctttgttcgtggaggctaacactc

SEQ ID NO: 372206 - DNA, 55 bp, Artificial
  Synthetic oligonucleotide
cgctcggtttcaaagtcgaggagtcctcaaaactggaattctgttctcacatctt

SEQ ID NO: 372207 - DNA, 55 bp, Artificial
  Synthetic oligonucleotide
cgctcgtaaagttgtataggaccctcaacgatcagatgacgcatagtctcacgag

SEQ ID NO: 372208 - DNA, 55 bp, Artificial
  Synthetic oligonucleotide
cgctcgtacctgcattgaagacatctcttctgcacacatgttctccgctatgacc

SEQ ID NO: 372209 - DNA, 54 bp, Artificial
  Synthetic oligonucleotide
cgctcgtaggaacggccgtacacgctacacgtccacttgccaacgttgcccggt

SEQ ID NO: 372210 - DNA, 55 bp, Artificial
  Synthetic oligonucleotide
cgctcgtagtgttccgagacacaagatggagagacgataggtccatcattggatc

SEQ ID NO: 372211 - DNA, 58 bp, Artificial
  Synthetic oligonucleotide
cgctcgtcaaatctcgattcgtatggttactctctgtaccttaaagtgacctcaggga

SEQ ID NO: 372212 - DNA, 55 bp, Artificial
  Synthetic oligonucleotide
cgctcgtcggcggaaacacttccgcaaaagacatccgtgcagaagctttcggtgc

SEQ ID NO: 372213 - DNA, 55 bp, Artificial
  Synthetic oligonucleotide
cgctcgtgagccaggcatgtttagtcatgataatgttaaagatgtgttgcaccgt

SEQ ID NO: 372214 - DNA, 55 bp, Artificial
  Synthetic oligonucleotide
cgctcgttaacatcggtgccagtatagggaacttgcggtttccgttctgccgacc

SEQ ID NO: 372215 - DNA, 58 bp, Artificial
  Synthetic oligonucleotide
cgctcgtttattgtacaatctacagaccgccgtcatcaacccaactaatatgttgaag

SEQ ID NO: 372216 - DNA, 55 bp, Artificial
  Synthetic oligonucleotide
cgctctaaatagatataatgctatgtcattaaggggtgtaacgatgcggccaact

SEQ ID NO: 372217 - DNA, 60 bp, Artificial
  Synthetic oligonucleotide
cgctctaacacgtgtgccgtatttcgtcagggctcacgctctgctgaggatgtgcacgat

SEQ ID NO: 372218 - DNA, 60 bp, Artificial
  Synthetic oligonucleotide
cgctctaactgctgcagagtcgggagaaacatcagatagtagtggccaaacaagcatgga

SEQ ID NO: 372219 - DNA, 60 bp, Artificial
  Synthetic oligonucleotide
cgctctaatgacgggctttaccggcgactttgactcagtgatcgactgtaatacatgtgt

SEQ ID NO: 372220 - DNA, 56 bp, Artificial
  Synthetic oligonucleotide
cgctctacattgcgttcggggattgatgcatgcgtctgttgctcatcgctgtgctg

SEQ ID NO: 372221 - DNA, 60 bp, Artificial
  Synthetic oligonucleotide
cgctctaccagaacgatctgaccgcgggggtgcacatcttctgcgacgggagccatcagt

SEQ ID NO: 372222 - DNA, 58 bp, Artificial
  Synthetic oligonucleotide
cgctctacggggaagccgcacgccgcacttaagcagaagcctgaatatggcgaaaaac

SEQ ID NO: 372223 - DNA, 55 bp, Artificial
  Synthetic oligonucleotide
cgctctactattaccaacaaactgacgaggctaataagtggatatctatgggttc

SEQ ID NO: 372224 - DNA, 60 bp, Artificial
  Synthetic oligonucleotide
cgctctactcagatgtggtagtgaatttgtggaggagtgcgttgtctctgcgggtagtct

SEQ ID NO: 372225 - DNA, 54 bp, Artificial
  Synthetic oligonucleotide
cgctctagattggaaaaagtttcctctacaaaagcacagtttgttagtggaaaa

SEQ ID NO: 372226 - DNA, 58 bp, Artificial
  Synthetic oligonucleotide
cgctctcaacaagtcaaattggtgaccgctgttttgctggtggtaacctcttcaagga

SEQ ID NO: 372227 - DNA, 60 bp, Artificial
  Synthetic oligonucleotide
cgctctcaactggagacacacttgagcctctcctcctattaattggagacattatatagt

SEQ ID NO: 372228 - DNA, 53 bp, Artificial
  Synthetic oligonucleotide
cgctctcaaggtcaagttaacaggcgaaattatgcattcttcatcagttagac

SEQ ID NO: 372229 - DNA, 51 bp, Artificial
  Synthetic oligonucleotide
cgctctcctctaacggctcagcctcctgagaacgtgcctagcttccctggc

SEQ ID NO: 372230 - DNA, 55 bp, Artificial
  Synthetic oligonucleotide
cgctctcctgatgtcccacgtggttgtgagggaccgtgtaaggtccagtcctttg

SEQ ID NO: 372231 - DNA, 59 bp, Artificial
  Synthetic oligonucleotide
cgctctcgtccaatcatattgcgtctgccgcgcctaattattttgaacaacttgggccc

SEQ ID NO: 372232 - DNA, 60 bp, Artificial
  Synthetic oligonucleotide
cgctctctacgtgggggacctttgtggtggggtgatgctcgcagcccagatgttcattgt

SEQ ID NO: 372233 - DNA, 56 bp, Artificial
  Synthetic oligonucleotide
cgctctctcgattggtctaaagttaccttggatggccgcccccttactactattca

SEQ ID NO: 372234 - DNA, 60 bp, Artificial
  Synthetic oligonucleotide
cgctctcttctcaacggaggacaacatggtcgctcggacaccacacatcaagcatcttcg

SEQ ID NO: 372235 - DNA, 55 bp, Artificial
  Synthetic oligonucleotide
cgctctgaagcctacatatgatatcgttgtgcacgctgaaaggagagatcggagt

SEQ ID NO: 372236 - DNA, 55 bp, Artificial
  Synthetic oligonucleotide
cgctctgacaaaactcgcatgtttgagatgatatgtttcgtagcacaagcagatc

SEQ ID NO: 372237 - DNA, 60 bp, Artificial
  Synthetic oligonucleotide
cgctctgaccctgactggcgctacactgcagtgcgtatattcgccaagaaccagcacaag

SEQ ID NO: 372238 - DNA, 55 bp, Artificial
  Synthetic oligonucleotide
cgctctgatcgcaatcgcagcgacagatacacaaaagggcagagtgtggagaacg

SEQ ID NO: 372239 - DNA, 55 bp, Artificial
  Synthetic oligonucleotide
cgctctgcaaagggcatcatggatctcaatacagttctcaatacaggagtaacct

SEQ ID NO: 372240 - DNA, 60 bp, Artificial
  Synthetic oligonucleotide
cgctctgcgtagacactatgaaggagtcgagctgtcgcactacaccatgattgcctacgg

SEQ ID NO: 372241 - DNA, 55 bp, Artificial
  Synthetic oligonucleotide
cgctctgcgtggtctagaagaattcagtctggtttatgtagatgatataatcgtc

SEQ ID NO: 372242 - DNA, 55 bp, Artificial
  Synthetic oligonucleotide
cgctctggagcaagacaaaggatgctggatcggacagagtaatggtgtctcccct

SEQ ID NO: 372243 - DNA, 55 bp, Artificial
  Synthetic oligonucleotide
cgctctggcaactttataacagactccgatctgttgctgaatgcttccaccaccc

SEQ ID NO: 372244 - DNA, 55 bp, Artificial
  Synthetic oligonucleotide
cgctctggtgggcatggtagaattgctcacttctgacactaccacaataggttac

SEQ ID NO: 372245 - DNA, 56 bp, Artificial
  Synthetic oligonucleotide
cgctctgtactgcaggtcggacatgtatgcggcgagacaatcgacattgtcgctcg

SEQ ID NO: 372246 - DNA, 60 bp, Artificial
  Synthetic oligonucleotide
cgctctgtgcaaggtgaatgacacctataacttggttaggctctctcataatagcagttt

SEQ ID NO: 372247 - DNA, 56 bp, Artificial
  Synthetic oligonucleotide
cgctctgtgcggtttcctctaccacaaactgggaatcgcgccctttggcgaccctg

SEQ ID NO: 372248 - DNA, 60 bp, Artificial
  Synthetic oligonucleotide
cgctctgtgctttgtgcgagaaacaagcatcacattcacacagagctcatagcagagcgg

SEQ ID NO: 372249 - DNA, 55 bp, Artificial
  Synthetic oligonucleotide
cgctctgtgtcgtagttggaaaaccactatcgctcactatcagtagttaccggcc

SEQ ID NO: 372250 - DNA, 55 bp, Artificial
  Synthetic oligonucleotide
cgctctgttagtgtattactgttggctgtcggatgcccagtccaaggcatccaac

SEQ ID NO: 372251 - DNA, 55 bp, Artificial
  Synthetic oligonucleotide
cgctcttagactctccagaaacaccaaacgctaccactccatcaagaaaacgaac

SEQ ID NO: 372252 - DNA, 55 bp, Artificial
  Synthetic oligonucleotide
cgctcttccaggtttcgggcaagaaggccaatcaagacttccagaagaggcggtg

SEQ ID NO: 372253 - DNA, 58 bp, Artificial
  Synthetic oligonucleotide
cgctcttcgcgcgatctcccaaactcaaaaccttctatgctacaatggtccttccacc

SEQ ID NO: 372254 - DNA, 60 bp, Artificial
  Synthetic oligonucleotide
cgctcttctgcggatccaagtcagcgtcaacgctataggatgaagattcgtcagtaaact

SEQ ID NO: 372255 - DNA, 60 bp, Artificial
  Synthetic oligonucleotide
cgctcttgagcgagcagctgccaatcctattactgtgagccctcctttgagattagacgg

SEQ ID NO: 372256 - DNA, 54 bp, Artificial
  Synthetic oligonucleotide
cgctcttgccagaatacgtgctacatccttccattgtgcccacgccggggtatc

SEQ ID NO: 372257 - DNA, 55 bp, Artificial
  Synthetic oligonucleotide
cgctcttggatgtacaaattgtgagtttagatcatggcacaatctatgaatgcgc

SEQ ID NO: 372258 - DNA, 60 bp, Artificial
  Synthetic oligonucleotide
cgctcttggctatattgaagggcatttacaatgtgatgacatgtggactgattggactcc

SEQ ID NO: 372259 - DNA, 55 bp, Artificial
  Synthetic oligonucleotide
cgctctttagaaaggcgctactccgttctgcgcccagattaggggtggaataccc

SEQ ID NO: 372260 - DNA, 55 bp, Artificial
  Synthetic oligonucleotide
cgctctttgaaaccagttttgcagacatcctgcaaaactctgctcgctggatttc

SEQ ID NO: 372261 - DNA, 60 bp, Artificial
  Synthetic oligonucleotide
cgctgaaaaaacgcagacacacgccaagcaaggagtgtatattggtcaagatcgtatgat

SEQ ID NO: 372262 - DNA, 55 bp, Artificial
  Synthetic oligonucleotide
cgctgaaaagaggcaagctatctttgacaaatgtttagatgccactctaactgtg

SEQ ID NO: 372263 - DNA, 55 bp, Artificial
  Synthetic oligonucleotide
cgctgaaagctgacaccatctgtgtaggataccatgccaacaactccacagacac

SEQ ID NO: 372264 - DNA, 58 bp, Artificial
  Synthetic oligonucleotide
cgctgaaagggctctttaatgaacaccagttatggagaaatgtttggtctagatctaa

SEQ ID NO: 372265 - DNA, 60 bp, Artificial
  Synthetic oligonucleotide
cgctgaaagtgagataggctcagcggcgatcgatgggttggtacagggaagcgtacattc

SEQ ID NO: 372266 - DNA, 58 bp, Artificial
  Synthetic oligonucleotide
cgctgaacactcagagaaattgttatggttgcgtgaaaagtgtgatgaaaaggttagg

SEQ ID NO: 372267 - DNA, 55 bp, Artificial
  Synthetic oligonucleotide
cgctgaacccattcttatgctattagtacgtgcgatgagagctgccaaatccgtg

SEQ ID NO: 372268 - DNA, 55 bp, Artificial
  Synthetic oligonucleotide
cgctgaacgcagctcttcccaacgacgcagcgaacattctcgcgatccgtgccga

SEQ ID NO: 372269 - DNA, 55 bp, Artificial
  Synthetic oligonucleotide
cgctgaaggtcagtggtatcgcatgcagcctgatcgcgttgcattgccgtataac

SEQ ID NO: 372270 - DNA, 55 bp, Artificial
  Synthetic oligonucleotide
cgctgaaggtttgagacatggcgtgagacatggtgtgacctaaaccattcgcaac

SEQ ID NO: 372271 - DNA, 55 bp, Artificial
  Synthetic oligonucleotide
cgctgaagtcctcgacgtcacttcattcaaccccacccgaggtttcattcgcgcg

SEQ ID NO: 372272 - DNA, 55 bp, Artificial
  Synthetic oligonucleotide
cgctgaagttgagttacactccttacgaacttgtggatgtagactggtacggcgt

SEQ ID NO: 372273 - DNA, 60 bp, Artificial
  Synthetic oligonucleotide
cgctgaatagcagcgcctccctgactctccacctcacaagaggtggagagtcagggaggc

SEQ ID NO: 372274 - DNA, 60 bp, Artificial
  Synthetic oligonucleotide
cgctgaatcaaggcactacttcttgtccaatctgcgtaccatttttggtactgactacaa

SEQ ID NO: 372275 - DNA, 60 bp, Artificial
  Synthetic oligonucleotide
cgctgaatgggagccgcgcatggaagcgttaaatcaagagctagctaaggcgcgtattga

SEQ ID NO: 372276 - DNA, 55 bp, Artificial
  Synthetic oligonucleotide
cgctgacaccgttactactctgcaggacaggactcgatccctggacgcccgtgtc

SEQ ID NO: 372277 - DNA, 55 bp, Artificial
  Synthetic oligonucleotide
cgctgacatcgtgaactccacaacagtgaccggggacataacattccagcttgag

SEQ ID NO: 372278 - DNA, 60 bp, Artificial
  Synthetic oligonucleotide
cgctgacctcgcacgttactttgtggagtcggattgccatgacgcaagcgactttgcacc

SEQ ID NO: 372279 - DNA, 56 bp, Artificial
  Synthetic oligonucleotide
cgctgacctcttacaaggggtcaagatatctgtaccgtctgctccccgacggtttc

SEQ ID NO: 372280 - DNA, 53 bp, Artificial
  Synthetic oligonucleotide
cgctgacctgcccctggataaatggtccttcgggaacaacgtccggtttaaga

SEQ ID NO: 372281 - DNA, 55 bp, Artificial
  Synthetic oligonucleotide
cgctgacgagctatgccaaaggtgatgtggtgtgtcctcattcaggtggcgcgct

SEQ ID NO: 372282 - DNA, 55 bp, Artificial
  Synthetic oligonucleotide
cgctgacggccccccagtgtggttacaaaatagctgaggtggcgtaggggaggga

SEQ ID NO: 372283 - DNA, 60 bp, Artificial
  Synthetic oligonucleotide
cgctgacggcgtatgcgtttaacagtatccagcacgttagtgacatgcgtcttatgccat

SEQ ID NO: 372284 - DNA, 57 bp, Artificial
  Synthetic oligonucleotide
cgctgacggctacacctccaaagggtggagactcctcgctcccattaccgcttacgc

SEQ ID NO: 372285 - DNA, 55 bp, Artificial
  Synthetic oligonucleotide
cgctgacgtaatgatagcccacttagaatcagacggccgagttcccactctgcca

SEQ ID NO: 372286 - DNA, 60 bp, Artificial
  Synthetic oligonucleotide
cgctgactattctgacactgtctccacactacaagttatggctggctaggggattatggt

SEQ ID NO: 372287 - DNA, 55 bp, Artificial
  Synthetic oligonucleotide
cgctgactcaaaggataacaacaacagggccgttcgctattctgacaggatcaac

SEQ ID NO: 372288 - DNA, 58 bp, Artificial
  Synthetic oligonucleotide
cgctgactgggagctcaccgaatcccctgagcacggattttcctttagtacgtctcag

SEQ ID NO: 372289 - DNA, 55 bp, Artificial
  Synthetic oligonucleotide
cgctgagaaataatgtaagtctatgttacatctaagagggaaagtccatgacgcc

SEQ ID NO: 372290 - DNA, 60 bp, Artificial
  Synthetic oligonucleotide
cgctgagaatccagcgactgttgttacacaacaacctattgctacactagagcagaaaag

SEQ ID NO: 372291 - DNA, 60 bp, Artificial
  Synthetic oligonucleotide
cgctgagagggacactgcccttatggatgcgatggataaaatagtcagtggatgactata

SEQ ID NO: 372292 - DNA, 55 bp, Artificial
  Synthetic oligonucleotide
cgctgagattgttcaatacatccgaacaagattaacacgcatcattctgaatggc

SEQ ID NO: 372293 - DNA, 60 bp, Artificial
  Synthetic oligonucleotide
cgctgagcagacatctcgggtccgccccgtggtgatcatggtctctggcaggcccgggat

SEQ ID NO: 372294 - DNA, 55 bp, Artificial
  Synthetic oligonucleotide
cgctgagctccaaagctactcggcaaaagaactcgcactcattgtcaactactac

SEQ ID NO: 372295 - DNA, 52 bp, Artificial
  Synthetic oligonucleotide
cgctgagctgcggttatgccgctggaattggtgcccgcaaagcgtatcccgt

SEQ ID NO: 372296 - DNA, 55 bp, Artificial
  Synthetic oligonucleotide
cgctgagcttggcctcaactacaactttgatgaacggacaaagagaagagaggag

SEQ ID NO: 372297 - DNA, 60 bp, Artificial
  Synthetic oligonucleotide
cgctgaggcatcaggagttaagtcaggtgagttgactacacagttacgtaatacggctac

SEQ ID NO: 372298 - DNA, 55 bp, Artificial
  Synthetic oligonucleotide
cgctgaggctcctaatggctactctgtgcaaatcgtaggggacacctcgaagacc

SEQ ID NO: 372299 - DNA, 60 bp, Artificial
  Synthetic oligonucleotide
cgctgagtcaattgtcgcaggcaattcaatattacgctgggtattacaccgggtcgtatg

SEQ ID NO: 372300 - DNA, 55 bp, Artificial
  Synthetic oligonucleotide
cgctgagttactcattttgctcgagaacgaaagaaccctagatttccatgacttt

SEQ ID NO: 372301 - DNA, 55 bp, Artificial
  Synthetic oligonucleotide
cgctgagtttgttatgtcagatgggtttgcagcctacactctgtcccctcggccc

SEQ ID NO: 372302 - DNA, 55 bp, Artificial
  Synthetic oligonucleotide
cgctgagttttattcgcaatctaatcaattactttcatatggtgacgttactcgg

SEQ ID NO: 372303 - DNA, 55 bp, Artificial
  Synthetic oligonucleotide
cgctgataccattgctctacgtttgacttactttatccaggatccaggtctgcgt

SEQ ID NO: 372304 - DNA, 53 bp, Artificial
  Synthetic oligonucleotide
cgctgatataaatatcgttggagttggttcggtagacgtgaacaccggacttg

SEQ ID NO: 372305 - DNA, 55 bp, Artificial
  Synthetic oligonucleotide
cgctgatattgtcagacagaagatactgcaaactttcggcgaaacagctgtgaat

SEQ ID NO: 372306 - DNA, 59 bp, Artificial
  Synthetic oligonucleotide
cgctgatggtcgacgttgaaggatctacagctctatctaacaggcgttttaattgttgg

SEQ ID NO: 372307 - DNA, 55 bp, Artificial
  Synthetic oligonucleotide
cgctgatggttctccactctggaaaccgtgtgcgcgatctcacgggacacttccg

SEQ ID NO: 372308 - DNA, 60 bp, Artificial
  Synthetic oligonucleotide
cgctgatgtatagtactgtctctaacaggaatgcgaatttcgaagatggttttaggatca

SEQ ID NO: 372309 - DNA, 59 bp, Artificial
  Synthetic oligonucleotide
cgctgatgtcatcccggctcgaagacgcggggacaagcggggagcgctactctccccga

SEQ ID NO: 372310 - DNA, 55 bp, Artificial
  Synthetic oligonucleotide
cgctgattacagcaagcgcttacacgaaaacaccgtgtcaaatcttcgtcacctt

SEQ ID NO: 372311 - DNA, 60 bp, Artificial
  Synthetic oligonucleotide
cgctgattaggctgaacaacatgcgggctagcgtcataaccaaacaaattcaggcggcga

SEQ ID NO: 372312 - DNA, 60 bp, Artificial
  Synthetic oligonucleotide
cgctgattcagcgccttgggcagagaacgtcttagtggttccatgtgacaatacgtggag

SEQ ID NO: 372313 - DNA, 55 bp, Artificial
  Synthetic oligonucleotide
cgctgattccactggcatcgcgggaattgggctcttgggcccaggacagcttctc

SEQ ID NO: 372314 - DNA, 60 bp, Artificial
  Synthetic oligonucleotide
cgctgattcgtactgcaatacaaattcataggtggataagagggactggcatctgggaaa

SEQ ID NO: 372315 - DNA, 60 bp, Artificial
  Synthetic oligonucleotide
cgctgattcgtgcattggtagttcccttcgaactgcaatagcacgtggagatgaggttcc

SEQ ID NO: 372316 - DNA, 60 bp, Artificial
  Synthetic oligonucleotide
cgctgattggtgcctcggtcgctcagatagctatcagagcttaccgttacagtggtcaac

SEQ ID NO: 372317 - DNA, 60 bp, Artificial
  Synthetic oligonucleotide
cgctgattgttgacctcctctagcagatcgtccatcgatctgaaactgtccccattcgac

SEQ ID NO: 372318 - DNA, 55 bp, Artificial
  Synthetic oligonucleotide
cgctgatttacataacggttgctacattaaatgcgtaaataagtcttctgacgtg

SEQ ID NO: 372319 - DNA, 59 bp, Artificial
  Synthetic oligonucleotide
cgctgatttagctccctgaatgttcggatggaaatgtgctgaccgagttggggaaacca

SEQ ID NO: 372320 - DNA, 60 bp, Artificial
  Synthetic oligonucleotide
cgctgatttcttagagtgtaatgctagcttgtcctgccgcacaactgatgatgttcaacg

SEQ ID NO: 372321 - DNA, 59 bp, Artificial
  Synthetic oligonucleotide
cgctgcaaaaagggtttatgacgaggctgtccgcaacctcgatgctaaagacagacgcc

SEQ ID NO: 372322 - DNA, 60 bp, Artificial
  Synthetic oligonucleotide
cgctgcaaagctgtcgggcctcggactgaatgctgtagcgtattaccggggtctcgatgt

SEQ ID NO: 372323 - DNA, 56 bp, Artificial
  Synthetic oligonucleotide
cgctgcaaattgtgttgataacttcaaccgaaaaggttttgaatatgtgatgtcac

SEQ ID NO: 372324 - DNA, 60 bp, Artificial
  Synthetic oligonucleotide
cgctgcaatacctctctgagcgtgacgaattggcccaagagctagatgatttgaaacggg

SEQ ID NO: 372325 - DNA, 60 bp, Artificial
  Synthetic oligonucleotide
cgctgcaataggttcaccaggtccaggtaaagccgatggtctgctaaatgacaataatta

SEQ ID NO: 372326 - DNA, 60 bp, Artificial
  Synthetic oligonucleotide
cgctgcacaaggtaaacaggcaggtaatgcgtttgatatcggcgagatgttgtattggac

SEQ ID NO: 372327 - DNA, 55 bp, Artificial
  Synthetic oligonucleotide
cgctgcacgggcctacgcccctgctgtataggctaggagccgttcaaaatgaggt

SEQ ID NO: 372328 - DNA, 55 bp, Artificial
  Synthetic oligonucleotide
cgctgcagaacatgatgtagaaataaccaaggagcgctaggccggtgttcagggc

SEQ ID NO: 372329 - DNA, 55 bp, Artificial
  Synthetic oligonucleotide
cgctgcagcggtgcatgcactaaaacgaaagtatatacatagtcccgctgcaagc

SEQ ID NO: 372330 - DNA, 60 bp, Artificial
  Synthetic oligonucleotide
cgctgcatcaataaatgcagcggctggtacccagcttaattcagattgggtcgagacggt

SEQ ID NO: 372331 - DNA, 58 bp, Artificial
  Synthetic oligonucleotide
cgctgcatgaataaagctctatattgttgtttacactccttagataagatatgaagcc

SEQ ID NO: 372332 - DNA, 60 bp, Artificial
  Synthetic oligonucleotide
cgctgcatggtattttgcagcatgggcaagaggagtgtggcccaaaagaagagccatatg

SEQ ID NO: 372333 - DNA, 55 bp, Artificial
  Synthetic oligonucleotide
cgctgcatttgatttggaagcacctcagtatgaggtattgccgatgcagtctgat

SEQ ID NO: 372334 - DNA, 55 bp, Artificial
  Synthetic oligonucleotide
cgctgccaagacctaaccctcacaatctcccgccttgactcctggggcccagttc

SEQ ID NO: 372335 - DNA, 55 bp, Artificial
  Synthetic oligonucleotide
cgctgccaatgtttcgacgcatgtgtaaaacgtccataatgtcgcaatgccacgg

SEQ ID NO: 372336 - DNA, 60 bp, Artificial
  Synthetic oligonucleotide
cgctgccactgctccgaatatcgagacaaggacgaaaactgatggttgttgatacacggg

SEQ ID NO: 372337 - DNA, 55 bp, Artificial
  Synthetic oligonucleotide
cgctgccagatgatatgtttaatgcgttacttcccgatttaatagctggcgctca

SEQ ID NO: 372338 - DNA, 55 bp, Artificial
  Synthetic oligonucleotide
cgctgccatcgcagcgaggactatcggatcgggcaagaggaacatgtaaatggcg

SEQ ID NO: 372339 - DNA, 55 bp, Artificial
  Synthetic oligonucleotide
cgctgcccagtacgcgctgatcgagacccctgaccccaacaccgactactacatc

SEQ ID NO: 372340 - DNA, 55 bp, Artificial
  Synthetic oligonucleotide
cgctgcccggaaggagactctattactatggagtttagaaaggattcagtcaccc

SEQ ID NO: 372341 - DNA, 58 bp, Artificial
  Synthetic oligonucleotide
cgctgccgacgtaattctaatatttaccgctttatgtgatgtctttagatttccagtg

SEQ ID NO: 372342 - DNA, 55 bp, Artificial
  Synthetic oligonucleotide
cgctgccgattacgcatcgcgcctacacagcgtgctgggcacagcaaacactcca

SEQ ID NO: 372343 - DNA, 54 bp, Artificial
  Synthetic oligonucleotide
cgctgccgttgcaggagaatcctattctcgcatgcctaaaggtggcctaaacaa

SEQ ID NO: 372344 - DNA, 60 bp, Artificial
  Synthetic oligonucleotide
cgctgcctaataatgtccaatatgtcatacaatgcataggatctaggacgtatcaaatag

SEQ ID NO: 372345 - DNA, 54 bp, Artificial
  Synthetic oligonucleotide
cgctgcctaatggatttcctgggggtcccgacgccgggcttctttaatgtaaca

SEQ ID NO: 372346 - DNA, 55 bp, Artificial
  Synthetic oligonucleotide
cgctgcgacaatcgcacctactcacagcaggtgtctatcgagttcaagtaggtgg

SEQ ID NO: 372347 - DNA, 54 bp, Artificial
  Synthetic oligonucleotide
cgctgcgcgtatgtctcagatgtggatggagtattagttactgacttctgtttt

SEQ ID NO: 372348 - DNA, 60 bp, Artificial
  Synthetic oligonucleotide
cgctgcggagtcaggttagtaggtagtgtcaggagattaacttgcatgatcttttcgagg

SEQ ID NO: 372349 - DNA, 55 bp, Artificial
  Synthetic oligonucleotide
cgctgcgttaggcaacgctgtacacgaatcgtaggcgacgccagacacgaatgtc

SEQ ID NO: 372350 - DNA, 60 bp, Artificial
  Synthetic oligonucleotide
cgctgctatgtgcgggtgtcccgacgctgtcgctcattttaatcatcttgcttctgtgct

SEQ ID NO: 372351 - DNA, 60 bp, Artificial
  Synthetic oligonucleotide
cgctgctcaaggcaaacaagcgggtaatgcgttggatatccaagatatgctatatttaac

SEQ ID NO: 372352 - DNA, 60 bp, Artificial
  Synthetic oligonucleotide
cgctgctcggaacgtcgctttcgagcgcgtgacacagctcatcgatcatgagtccggttg

SEQ ID NO: 372353 - DNA, 55 bp, Artificial
  Synthetic oligonucleotide
cgctgctctaggcctgctttgcaataaatcctaggtagtcagctgttagcgtgtg

SEQ ID NO: 372354 - DNA, 55 bp, Artificial
  Synthetic oligonucleotide
cgctgctgattcagaatgctaacccagactgcaaactcgtgttaaaaggtttggg

SEQ ID NO: 372355 - DNA, 51 bp, Artificial
  Synthetic oligonucleotide
cgctgcttatctcacgacatagtcgtcaaggtcttatcatgcgtagagtac

SEQ ID NO: 372356 - DNA, 59 bp, Artificial
  Synthetic oligonucleotide
cgctgctttgactccactgtaaccgaaagggacatcaggaccgaggaagaggtctatca

SEQ ID NO: 372357 - DNA, 60 bp, Artificial
  Synthetic oligonucleotide
cgctgctttgtaaggcagaacctgaagcctgtatggttccacaatcctccgctggacaat

SEQ ID NO: 372358 - DNA, 55 bp, Artificial
  Synthetic oligonucleotide
cgctggaaaggcttatgaatccagatcaaaacttggaggattcattaagcaggag

SEQ ID NO: 372359 - DNA, 55 bp, Artificial
  Synthetic oligonucleotide
cgctggaaccggtattattttatagcgaagttgaccactattcgtcacaaccgga

SEQ ID NO: 372360 - DNA, 55 bp, Artificial
  Synthetic oligonucleotide
cgctggacaaaggcagaatggcaacgctgatagctgatatggccgcaccgatcct

SEQ ID NO: 372361 - DNA, 56 bp, Artificial
  Synthetic oligonucleotide
cgctggacagaagctctacctacctcctacacctgtgagcaaaacactgtgctcgg

SEQ ID NO: 372362 - DNA, 56 bp, Artificial
  Synthetic oligonucleotide
cgctggaccaagctagctctgctcgagtcgaccacgctgagtagcgcatctgtgag

SEQ ID NO: 372363 - DNA, 59 bp, Artificial
  Synthetic oligonucleotide
cgctggaccggacgcaacttcagtgatattaaccggcaattcatctctttgtcccatcc

SEQ ID NO: 372364 - DNA, 56 bp, Artificial
  Synthetic oligonucleotide
cgctggagtcgagaagcctaaatttcttccggatctatatgattacaaggaaaacc

SEQ ID NO: 372365 - DNA, 55 bp, Artificial
  Synthetic oligonucleotide
cgctggagtgaaaagctccagaatctattctgatgtgagtccgttcaaaagggcc

SEQ ID NO: 372366 - DNA, 55 bp, Artificial
  Synthetic oligonucleotide
cgctggatagtatggggctgagtgatttaaccagtgattcagagtttgggagtga

SEQ ID NO: 372367 - DNA, 60 bp, Artificial
  Synthetic oligonucleotide
cgctggatcggggtcgatgggtggctgctgacgctaatgatgctaggttgctggtgtttc

SEQ ID NO: 372368 - DNA, 57 bp, Artificial
  Synthetic oligonucleotide
cgctggatggcgggacctggcctctactagtgatgcatctcccgttcttcaggcatc

SEQ ID NO: 372369 - DNA, 51 bp, Artificial
  Synthetic oligonucleotide
cgctggcacattttctatccgttcagcacctagtttgaccggtagtgacat

SEQ ID NO: 372370 - DNA, 55 bp, Artificial
  Synthetic oligonucleotide
cgctggcataatcacagagagagcttttcttggaacagcacttattacgcaggaa

SEQ ID NO: 372371 - DNA, 55 bp, Artificial
  Synthetic oligonucleotide
cgctggccctaactggaaaccctgacgaacatagaacatcgacataccgcgcgta

SEQ ID NO: 372372 - DNA, 54 bp, Artificial
  Synthetic oligonucleotide
cgctggcgatacaatcttgtataggggatatgaagacggacaacccgtctcata

SEQ ID NO: 372373 - DNA, 55 bp, Artificial
  Synthetic oligonucleotide
cgctggctatagctcattggggcagagtcaaaccggacaaagactggttggcact

SEQ ID NO: 372374 - DNA, 55 bp, Artificial
  Synthetic oligonucleotide
cgctggctatggtgagcatactcctgatggtaggaaaagaccccacaactatccc

SEQ ID NO: 372375 - DNA, 57 bp, Artificial
  Synthetic oligonucleotide
cgctggctgccagggaatcacggcccccaaggtccaaatcctactggacaacgacac

SEQ ID NO: 372376 - DNA, 56 bp, Artificial
  Synthetic oligonucleotide
cgctgggaaatggtgcattatagtgcggggtacggttgagggaggcttcaccaaac

SEQ ID NO: 372377 - DNA, 58 bp, Artificial
  Synthetic oligonucleotide
cgctgggaagaccccgtggatccaccactctcgactcaagaaagctcctgacaaccaa

SEQ ID NO: 372378 - DNA, 59 bp, Artificial
  Synthetic oligonucleotide
cgctgggagcgtggtgcacacactcaggccggataggtgacgctgtgctaaaacccctc

SEQ ID NO: 372379 - DNA, 60 bp, Artificial
  Synthetic oligonucleotide
cgctgggcgaaactctcggacagtgcgaccgtcatccatgtagtagacctgcacaccgag

SEQ ID NO: 372380 - DNA, 50 bp, Artificial
  Synthetic oligonucleotide
cgctgggctcattctgacattcccccaacatgctgagtcgaaccatagca

SEQ ID NO: 372381 - DNA, 54 bp, Artificial
  Synthetic oligonucleotide
cgctggggactttccagggaggcgtgacctgggcgggactggggagtggctggg

SEQ ID NO: 372382 - DNA, 54 bp, Artificial
  Synthetic oligonucleotide
cgctggggactttccaggggaggtgtggcaggggcggagttggggagtggctaa

SEQ ID NO: 372383 - DNA, 54 bp, Artificial
  Synthetic oligonucleotide
cgctggggcgaagagagcggatcgttcgtttacccactgaaagataagttcggg

SEQ ID NO: 372384 - DNA, 55 bp, Artificial
  Synthetic oligonucleotide
cgctggggtcgtcaaagtcaccacaacccttcgcaagttctgccggttctatgcc

SEQ ID NO: 372385 - DNA, 55 bp, Artificial
  Synthetic oligonucleotide
cgctggggtgtacgcgaaaccggacgcagagtttacgatgtccggcgtctctagc

SEQ ID NO: 372386 - DNA, 53 bp, Artificial
  Synthetic oligonucleotide
cgctgggtcttacggggtttcttacgaggactgacgaggtcgggagtgacgga

SEQ ID NO: 372387 - DNA, 55 bp, Artificial
  Synthetic oligonucleotide
cgctgggtggtagtggggccatgtccataatggagttagctactgctggaattgg

SEQ ID NO: 372388 - DNA, 55 bp, Artificial
  Synthetic oligonucleotide
cgctgggttaccttctgttccgccgaatggccaactttcaatgtaggatggcctc

SEQ ID NO: 372389 - DNA, 53 bp, Artificial
  Synthetic oligonucleotide
cgctgggttgatgcgatgggttcggttcgtcatgcgctcacgatctcgggggg

SEQ ID NO: 372390 - DNA, 54 bp, Artificial
  Synthetic oligonucleotide
cgctggtaaaagaaacaggtttcccattaactgagctttgttccgtccctgaga

SEQ ID NO: 372391 - DNA, 55 bp, Artificial
  Synthetic oligonucleotide
cgctggtaatggctcagatgctccggatcccacaagccatcatggacatgatcgc

SEQ ID NO: 372392 - DNA, 58 bp, Artificial
  Synthetic oligonucleotide
cgctggtactctgccccaacccgtggccctgcggctaactgccgccgctctgcgttac

SEQ ID NO: 372393 - DNA, 54 bp, Artificial
  Synthetic oligonucleotide
cgctggtagaactctctttgtaaaacaagaacagtttgagccattcaaccacgg

SEQ ID NO: 372394 - DNA, 55 bp, Artificial
  Synthetic oligonucleotide
cgctggtatcgcgggtgtgtccggtatggactccgaacggacaaacaccggagtc

SEQ ID NO: 372395 - DNA, 55 bp, Artificial
  Synthetic oligonucleotide
cgctggtattatgacctacaagataataggtgttcctggcgtgtgcccgcccgaa

SEQ ID NO: 372396 - DNA, 55 bp, Artificial
  Synthetic oligonucleotide
cgctggtcaaaccgttggtgacctctacccacaattacaaggcagcaccggagcc

SEQ ID NO: 372397 - DNA, 60 bp, Artificial
  Synthetic oligonucleotide
cgctggtccacataaactattatgctcgcgagttgcccataatgagcacttctccagacc

SEQ ID NO: 372398 - DNA, 60 bp, Artificial
  Synthetic oligonucleotide
cgctggtccctagccggctcagatgcctgtatggatggagttcgttctccatgtccgagt

SEQ ID NO: 372399 - DNA, 60 bp, Artificial
  Synthetic oligonucleotide
cgctggtcgcatagcaacgtgggttacgatttagcaagatacatggggacacacctctac

SEQ ID NO: 372400 - DNA, 55 bp, Artificial
  Synthetic oligonucleotide
cgctggtctcgactgccacctctcattccgataagatgtctgaattcaccacatc

SEQ ID NO: 372401 - DNA, 50 bp, Artificial
  Synthetic oligonucleotide
cgctggtgagtacagcgtgaatatctcttgcgaaggtctacaatctgtgg

SEQ ID NO: 372402 - DNA, 55 bp, Artificial
  Synthetic oligonucleotide
cgctggtgattgttactaccatggcactggtaaagactaaaccgcttgtgttaac

SEQ ID NO: 372403 - DNA, 55 bp, Artificial
  Synthetic oligonucleotide
cgctggtgccagcctcagaaagggcaggtagaggtcaacgttatccgcctcctag

SEQ ID NO: 372404 - DNA, 55 bp, Artificial
  Synthetic oligonucleotide
cgctggtgctaatcctaacactgcgttaaacctgtacagccgatggcttgctatc

SEQ ID NO: 372405 - DNA, 55 bp, Artificial
  Synthetic oligonucleotide
cgctggtgtcctggtggatactagtttcatgtgaatgaatagcctcatgccttgc

SEQ ID NO: 372406 - DNA, 55 bp, Artificial
  Synthetic oligonucleotide
cgctggttatcgtggttgatcgtaaaccacatctaagttcgtctgggtcgttgca

SEQ ID NO: 372407 - DNA, 60 bp, Artificial
  Synthetic oligonucleotide
cgctggttcgatggagctcaatatgggtataaggcgatgtgctgcttttccggccaccaa

SEQ ID NO: 372408 - DNA, 55 bp, Artificial
  Synthetic oligonucleotide
cgctggttgggctggtggcatgcagtttcgcttcatagttgccgggtcaggtgtg

SEQ ID NO: 372409 - DNA, 52 bp, Artificial
  Synthetic oligonucleotide
cgctggttgtggaaaaacgcaccccatccaacacctcctcaaaacccgcccc

SEQ ID NO: 372410 - DNA, 59 bp, Artificial
  Synthetic oligonucleotide
cgctgtacccaccattgaagggataagcttgaacccgagtccaagtctatgtgactgga

SEQ ID NO: 372411 - DNA, 56 bp, Artificial
  Synthetic oligonucleotide
cgctgtagcatattaccggggcctagacgtgtccgtcataccgactagcggagacg

SEQ ID NO: 372412 - DNA, 55 bp, Artificial
  Synthetic oligonucleotide
cgctgtagcctactataggggcttggacgtctcagtaataccaacatctggggac

SEQ ID NO: 372413 - DNA, 59 bp, Artificial
  Synthetic oligonucleotide
cgctgtagcgtactatagaggtctcgatgtgtccgtcttaccaacaacaggagacgtcg

SEQ ID NO: 372414 - DNA, 55 bp, Artificial
  Synthetic oligonucleotide
cgctgtagggaaagagaacctggatattaaccatactgagttggataagcccctg

SEQ ID NO: 372415 - DNA, 58 bp, Artificial
  Synthetic oligonucleotide
cgctgtatacaatatatcagttacgcatcaaatatcaagtttagtgcagaaaagtcgc

SEQ ID NO: 372416 - DNA, 56 bp, Artificial
  Synthetic oligonucleotide
cgctgtatttaattttcaagtgtggtgttcctaaaaccattcttcgtatgattaga

SEQ ID NO: 372417 - DNA, 55 bp, Artificial
  Synthetic oligonucleotide
cgctgtcaccagcccactaaccaccagccaaaccctcctcttcaacgtactgggg

SEQ ID NO: 372418 - DNA, 60 bp, Artificial
  Synthetic oligonucleotide
cgctgtcactgaaatcctcgcttgtttgcaagctaaacaggctaagaacgacaccatacc

SEQ ID NO: 372419 - DNA, 55 bp, Artificial
  Synthetic oligonucleotide
cgctgtcagctacggtctcaaacctctgcaaagtgcttagggatgttcacggtgt

SEQ ID NO: 372420 - DNA, 60 bp, Artificial
  Synthetic oligonucleotide
cgctgtcagtagaaactacccagtagtacagaatgcacaaggacagctagtgcatcagcc

SEQ ID NO: 372421 - DNA, 60 bp, Artificial
  Synthetic oligonucleotide
cgctgtcatctcccagagagctaagaatcgtgacagatttgaggcccgtttacgccagga

SEQ ID NO: 372422 - DNA, 60 bp, Artificial
  Synthetic oligonucleotide
cgctgtccaccaacatgcttattcattgcagggatcgctgaacttggagcattcttttct

SEQ ID NO: 372423 - DNA, 55 bp, Artificial
  Synthetic oligonucleotide
cgctgtccccaacccggcaaagttgttaattcgcatgggaaggagggactgtcaa

SEQ ID NO: 372424 - DNA, 55 bp, Artificial
  Synthetic oligonucleotide
cgctgtcgctttgattgcggcattgtccgcgttagcgacacagcaggcgtcatcg

SEQ ID NO: 372425 - DNA, 55 bp, Artificial
  Synthetic oligonucleotide
cgctgtctagagatagatcgcctccgagagatagatcgctgtctagagatagatc

SEQ ID NO: 372426 - DNA, 60 bp, Artificial
  Synthetic oligonucleotide
cgctgtctggaggttggagctcacccgagatctattaatgataaccccaatgttttgcat

SEQ ID NO: 372427 - DNA, 60 bp, Artificial
  Synthetic oligonucleotide
cgctgtctgttcctcctcctctgattggacttctatctcgttcgtcacctgaaagaggag

SEQ ID NO: 372428 - DNA, 60 bp, Artificial
  Synthetic oligonucleotide
cgctgtgacatcatagtccaatctgagcttggggagacaaacctacactgccatattata

SEQ ID NO: 372429 - DNA, 51 bp, Artificial
  Synthetic oligonucleotide
cgctgtgatttaccgtaaggtaggtcaccgtcgcgtgcccgtggatcggtc

SEQ ID NO: 372430 - DNA, 55 bp, Artificial
  Synthetic oligonucleotide
cgctgtgctgtgcaatcccttattggtatcagagcgagtatcagtctgtaagtac

SEQ ID NO: 372431 - DNA, 54 bp, Artificial
  Synthetic oligonucleotide
cgctgtggaacggaaactagtcaattatgctaaaggtaaacctttagaggctaa

SEQ ID NO: 372432 - DNA, 51 bp, Artificial
  Synthetic oligonucleotide
cgctgtggagggtatccgcggaggaatacgtggaggttcgcagagtagggg

SEQ ID NO: 372433 - DNA, 55 bp, Artificial
  Synthetic oligonucleotide
cgctgtggagggtgtcggcagaggactacgtggaaataaggcaggtgggggattt

SEQ ID NO: 372434 - DNA, 60 bp, Artificial
  Synthetic oligonucleotide
cgctgtggcaactacacactcctggattcctaagagaaatcgctccattcttaacacgag

SEQ ID NO: 372435 - DNA, 51 bp, Artificial
  Synthetic oligonucleotide
cgctgtgggcggtgagcccctagaacttcaaggccttgtaatgaattatga

SEQ ID NO: 372436 - DNA, 55 bp, Artificial
  Synthetic oligonucleotide
cgctgtgtcgcgaggctcggcgaaactgagatggttcgtcgagagaaacctggtc

SEQ ID NO: 372437 - DNA, 57 bp, Artificial
  Synthetic oligonucleotide
cgctgtgtgccccatggtcccctggaccgcgcaaccgtgacctgaaaagactcttgg

SEQ ID NO: 372438 - DNA, 55 bp, Artificial
  Synthetic oligonucleotide
cgctgtgtttctcagggacatggtatgtcttcttgtaaagctcacttctctcatg

SEQ ID NO: 372439 - DNA, 55 bp, Artificial
  Synthetic oligonucleotide
cgctgttaagcgcctttgcataagcctcattaactgtctgttgaccgcctctcgc

SEQ ID NO: 372440 - DNA, 56 bp, Artificial
  Synthetic oligonucleotide
cgctgttaatatgcctaatggctatattgagtatagtagaaccgttactcgttatg

SEQ ID NO: 372441 - DNA, 60 bp, Artificial
  Synthetic oligonucleotide
cgctgttacctccagttctcgtgaaccaggatgcatggcgtgatgctaattacaagcgtt

SEQ ID NO: 372442 - DNA, 50 bp, Artificial
  Synthetic oligonucleotide
cgctgttacttagcagcctagatcggcttgaagacaaagttgacgctcat

SEQ ID NO: 372443 - DNA, 60 bp, Artificial
  Synthetic oligonucleotide
cgctgttatcgcgcttgcgaagacaaaagtaaccggtgatgtagatatcacgcaagctat

SEQ ID NO: 372444 - DNA, 56 bp, Artificial
  Synthetic oligonucleotide
cgctgttcatattttaaacgggagtgtatatgttgtcaataatggaaacgaaagtg

SEQ ID NO: 372445 - DNA, 59 bp, Artificial
  Synthetic oligonucleotide
cgctgttgccacaacgcactcctgggttcctaaaagaaatcgatccatcttgaacacaa

SEQ ID NO: 372446 - DNA, 53 bp, Artificial
  Synthetic oligonucleotide
cgctgttgcgccgtgtagacgcggttacgcccttcgaaagacatacacgggat

SEQ ID NO: 372447 - DNA, 54 bp, Artificial
  Synthetic oligonucleotide
cgctgtttaatagtacttggaatccaaaacaaccagttaatagtactgggaatg

SEQ ID NO: 372448 - DNA, 54 bp, Artificial
  Synthetic oligonucleotide
cgctgtttcttgggcatgcatatgcatctggctttgttacgtagctttccgtta

SEQ ID NO: 372449 - DNA, 54 bp, Artificial
  Synthetic oligonucleotide
cgctgttttcttaaaaagattcgagattgggaatacgcgctgtaacccccattc

SEQ ID NO: 372450 - DNA, 59 bp, Artificial
  Synthetic oligonucleotide
cgcttaaagaacgaccgggccccttatgagacacgtgctcagaactgcgctcagtacac

SEQ ID NO: 372451 - DNA, 53 bp, Artificial
  Synthetic oligonucleotide
cgcttaaagtcttcgggaggtgttactccactcacaccttatacggcaaatac

SEQ ID NO: 372452 - DNA, 58 bp, Artificial
  Synthetic oligonucleotide
cgcttaaataaaaggctgccgcactcccggttagatgcctgcccagtgtagggcagac

SEQ ID NO: 372453 - DNA, 53 bp, Artificial
  Synthetic oligonucleotide
cgcttaaatcgtttagtttgtggtaatagccaacgtcaaatttgtctgggtcc

SEQ ID NO: 372454 - DNA, 52 bp, Artificial
  Synthetic oligonucleotide
cgcttaacacgctttcgacgttagtaaccgctgaggacttttaccgtccgat

SEQ ID NO: 372455 - DNA, 55 bp, Artificial
  Synthetic oligonucleotide
cgcttaagatgccatggtcctgtcgcctaggagaaaagagctgttccggaataga

SEQ ID NO: 372456 - DNA, 56 bp, Artificial
  Synthetic oligonucleotide
cgcttaagggccgcaggcccgtcaagatggaatgaacggtccagattaattcctta

SEQ ID NO: 372457 - DNA, 55 bp, Artificial
  Synthetic oligonucleotide
cgcttaattgggccactgacatcgttatggttgattgggccctctgtaatccagc

SEQ ID NO: 372458 - DNA, 55 bp, Artificial
  Synthetic oligonucleotide
cgcttaattgggctactgacattgtaatgttagattgggccctctgcaacccggt

SEQ ID NO: 372459 - DNA, 55 bp, Artificial
  Synthetic oligonucleotide
cgcttacaagtaccttgaaggcgagtgtaaagatgcagcgttcagacgctccttg

SEQ ID NO: 372460 - DNA, 55 bp, Artificial
  Synthetic oligonucleotide
cgcttacacaaactgcccgccctcaccacacttggcccaagtcgtcgcccatctc

SEQ ID NO: 372461 - DNA, 57 bp, Artificial
  Synthetic oligonucleotide
cgcttacacttcaacgaaatacgagtggggaaaagtgagggcactatatgggtgtga

SEQ ID NO: 372462 - DNA, 55 bp, Artificial
  Synthetic oligonucleotide
cgcttacatctccgattctctacatttcatggaaccagctgatgtgacccacctc

SEQ ID NO: 372463 - DNA, 60 bp, Artificial
  Synthetic oligonucleotide
cgcttaccttcacgcctgcgcgcttgcatatgggtgagcattacgccaaagcccacctta

SEQ ID NO: 372464 - DNA, 55 bp, Artificial
  Synthetic oligonucleotide
cgcttacgcattgcattatgtacaccataagcctagggatggaaaggagatgacc

SEQ ID NO: 372465 - DNA, 53 bp, Artificial
  Synthetic oligonucleotide
cgcttacgcccctccgggagcacagccaccgaccagtcgcaaggaggcaattt

SEQ ID NO: 372466 - DNA, 55 bp, Artificial
  Synthetic oligonucleotide
cgcttacgccgaatcgttttgcgcttcttcgcctgtcgatgctgtgccttgatgc

SEQ ID NO: 372467 - DNA, 55 bp, Artificial
  Synthetic oligonucleotide
cgcttacgcgagcaatcgcgcgcgctgcttatgtgtagcccactttgcacgggtg

SEQ ID NO: 372468 - DNA, 55 bp, Artificial
  Synthetic oligonucleotide
cgcttacgggagccacattagatgagcaaatacatgcagatatacgtttagtgca

SEQ ID NO: 372469 - DNA, 55 bp, Artificial
  Synthetic oligonucleotide
cgcttacgtcttgcagtccaaatggtgagccaccggaacccaacgccaaagtaat

SEQ ID NO: 372470 - DNA, 52 bp, Artificial
  Synthetic oligonucleotide
cgcttactacgggctcacttcaataaacgattttggtacacttgcagtcagg

SEQ ID NO: 372471 - DNA, 58 bp, Artificial
  Synthetic oligonucleotide
cgcttactgccgctccctttcttaacacacactaccgctgagttcagtatctttgttc

SEQ ID NO: 372472 - DNA, 56 bp, Artificial
  Synthetic oligonucleotide
cgcttactggcacctacatttataaccatcttaccccccttcgagactgggcacac

SEQ ID NO: 372473 - DNA, 57 bp, Artificial
  Synthetic oligonucleotide
cgcttactgtgacatttgtcgtaagaatcacttagtgaagttggtttacttgaggtc

SEQ ID NO: 372474 - DNA, 58 bp, Artificial
  Synthetic oligonucleotide
cgcttactttcctaactatacgaactgtggacccgataattgcagtcgctagtgacaa

SEQ ID NO: 372475 - DNA, 53 bp, Artificial
  Synthetic oligonucleotide
cgcttagaaagtccgattccccgatacgaactccgttaacccgaagcacgtgc

SEQ ID NO: 372476 - DNA, 53 bp, Artificial
  Synthetic oligonucleotide
cgcttagaagaaaacactaaggacacgtttaaaaaactagatagcattgaaaa

SEQ ID NO: 372477 - DNA, 60 bp, Artificial
  Synthetic oligonucleotide
cgcttagaccaatgctatcatttgagatggggagcacaatatgtaggagaagattcactg

SEQ ID NO: 372478 - DNA, 55 bp, Artificial
  Synthetic oligonucleotide
cgcttagattctatataattaaatgcgttgggaggattcacaagctgagattcca

SEQ ID NO: 372479 - DNA, 60 bp, Artificial
  Synthetic oligonucleotide
cgcttagcattccatcacatggcccgagagaaacatccggagtactacaaagactgctga

SEQ ID NO: 372480 - DNA, 55 bp, Artificial
  Synthetic oligonucleotide
cgcttaggaaatggatggttactatctttaatggtacgacaaaactccagcatga

SEQ ID NO: 372481 - DNA, 54 bp, Artificial
  Synthetic oligonucleotide
cgcttagtctgatgtatgcggtgcttagtgacttcacacgcgtggtacagagcc

SEQ ID NO: 372482 - DNA, 55 bp, Artificial
  Synthetic oligonucleotide
cgcttagtgcaaccttctaagcgttgagggtggactacaggagaacggcttattt

SEQ ID NO: 372483 - DNA, 52 bp, Artificial
  Synthetic oligonucleotide
cgcttagtgtgggcctgtacaggtttagaggttggtaggggtcaacccttag

SEQ ID NO: 372484 - DNA, 55 bp, Artificial
  Synthetic oligonucleotide
cgcttatatgtccaaggcccacgggattgatcctaacatcaggactggggtgagg

SEQ ID NO: 372485 - DNA, 54 bp, Artificial
  Synthetic oligonucleotide
cgcttatcaaaccaccacttcctgggaatataccgtgtttcaatacgtcccatg

SEQ ID NO: 372486 - DNA, 55 bp, Artificial
  Synthetic oligonucleotide
cgcttatcgcagtttgaacttgacccctaattaagcagatgaccaacatatgagc

SEQ ID NO: 372487 - DNA, 59 bp, Artificial
  Synthetic oligonucleotide
cgcttatcggcctcccatcctgtttgcttcaccatttagatttaacattatctgacgat

SEQ ID NO: 372488 - DNA, 52 bp, Artificial
  Synthetic oligonucleotide
cgcttatctcactatttgccatcagagatatctccgcacacaggccatttcg

SEQ ID NO: 372489 - DNA, 55 bp, Artificial
  Synthetic oligonucleotide
cgcttatgaacatcgaaacacgtgtggctgaagagttggctggatatatgacctc

SEQ ID NO: 372490 - DNA, 59 bp, Artificial
  Synthetic oligonucleotide
cgcttatggaaaagccagagcaactgtggtagtgcctggatatacccgaactggaggaa

SEQ ID NO: 372491 - DNA, 55 bp, Artificial
  Synthetic oligonucleotide
cgcttatgtcacggatttgttctggtggtttaagatgattctcgattggtctgcg

SEQ ID NO: 372492 - DNA, 56 bp, Artificial
  Synthetic oligonucleotide
cgcttattaacaagtgaaacagaactacaactcttcccgctcaaggaaaactcagc

SEQ ID NO: 372493 - DNA, 57 bp, Artificial
  Synthetic oligonucleotide
cgcttattagcgagtattgtaggatggtgcaacgactatacgggcccaaaacttcaa

SEQ ID NO: 372494 - DNA, 60 bp, Artificial
  Synthetic oligonucleotide
cgcttattgcatgcagtaggaagctggatctacaaaacctatggggatacattagaaggg

SEQ ID NO: 372495 - DNA, 58 bp, Artificial
  Synthetic oligonucleotide
cgcttattgtatcttagctgtgagaggctttttaatggagagaaggggatttggaatg

SEQ ID NO: 372496 - DNA, 50 bp, Artificial
  Synthetic oligonucleotide
cgcttcaaacttcctagcttcaaggaacgagatggcaggcaatacaggaa

SEQ ID NO: 372497 - DNA, 59 bp, Artificial
  Synthetic oligonucleotide
cgcttcaactgctggtctacatttaaggatttagaacatgacacatgtaacggtgttta

SEQ ID NO: 372498 - DNA, 55 bp, Artificial
  Synthetic oligonucleotide
cgcttcaatcaggtagtatgcttgttggtatatggagatgacaatctcatttccg

SEQ ID NO: 372499 - DNA, 59 bp, Artificial
  Synthetic oligonucleotide
cgcttcacacctgagaggaaagtgctagccactaaacctgaaacaacttctgtcacgaa

SEQ ID NO: 372500 - DNA, 55 bp, Artificial
  Synthetic oligonucleotide
cgcttcagaaagggaccagtactataatttcacagagtagtgtagggtctaacac

SEQ ID NO: 372501 - DNA, 60 bp, Artificial
  Synthetic oligonucleotide
cgcttcagaccccagattggcacacactatgttgggtgagatattgaattactacacaca

SEQ ID NO: 372502 - DNA, 60 bp, Artificial
  Synthetic oligonucleotide
cgcttcagtatctcaatcgttatcatatagtaattggaacaataacgacgtcccagatct

SEQ ID NO: 372503 - DNA, 55 bp, Artificial
  Synthetic oligonucleotide
cgcttcagtcaacatggtatctagactgctactgaacaggttcacgatgacacac

SEQ ID NO: 372504 - DNA, 55 bp, Artificial
  Synthetic oligonucleotide
cgcttcagtcctagtgggccccacacctgtaaatattgtaggtagaaatgtgctg

SEQ ID NO: 372505 - DNA, 60 bp, Artificial
  Synthetic oligonucleotide
cgcttcatgataaagatagagtatggcttaacctgcttaaatcgcttggcatattgagca

SEQ ID NO: 372506 - DNA, 51 bp, Artificial
  Synthetic oligonucleotide
cgcttccaaggagtcatctttctcacggaaggacccattctgcctaaaaac

SEQ ID NO: 372507 - DNA, 50 bp, Artificial
  Synthetic oligonucleotide
cgcttccataagggagtggctactggtttgcagttcctagcacctactaa

SEQ ID NO: 372508 - DNA, 55 bp, Artificial
  Synthetic oligonucleotide
cgcttccatcagatcggttgggtcatctgcctcggtgtggactgatgtcccttcg

SEQ ID NO: 372509 - DNA, 55 bp, Artificial
  Synthetic oligonucleotide
cgcttccatctaggaggagacgaacagaggctgaacgcgtatactgttgccaggc

SEQ ID NO: 372510 - DNA, 55 bp, Artificial
  Synthetic oligonucleotide
cgcttcccctccggcggccaatataaagacggtactaagcagataaactactgtc

SEQ ID NO: 372511 - DNA, 55 bp, Artificial
  Synthetic oligonucleotide
cgcttcctgcaacaacctctgacgctgaagggcctgggtcgagagttgcatcttg

SEQ ID NO: 372512 - DNA, 55 bp, Artificial
  Synthetic oligonucleotide
cgcttccttcaagcatggtactgggataaccatcgttaaataacccagttttagc

SEQ ID NO: 372513 - DNA, 55 bp, Artificial
  Synthetic oligonucleotide
cgcttccttgtcaggtctatgtactcacgatgtaaccccgaaccctcgtcaagtg

SEQ ID NO: 372514 - DNA, 59 bp, Artificial
  Synthetic oligonucleotide
cgcttcgaactctacgtcttatgaccgagcataagtcgaataagactaaggctgacgaa

SEQ ID NO: 372515 - DNA, 55 bp, Artificial
  Synthetic oligonucleotide
cgcttcgaggctgttaaccacacaatttgagatcattgaagcaagtgcacctcag

SEQ ID NO: 372516 - DNA, 55 bp, Artificial
  Synthetic oligonucleotide
cgcttcgcctacgcagtgccatttatgtcacaacgcgcattgtgggcatgcacga

SEQ ID NO: 372517 - DNA, 55 bp, Artificial
  Synthetic oligonucleotide
cgcttcgcgatcagatctatctgctcttcgcgatgagttagcatctttgcgcacg

SEQ ID NO: 372518 - DNA, 59 bp, Artificial
  Synthetic oligonucleotide
cgcttcggtcattccacagcagaattcctaacctccttgggcatcgaaacatacgcgca

SEQ ID NO: 372519 - DNA, 55 bp, Artificial
  Synthetic oligonucleotide
cgcttcgtacactaagtcgcaggtgctgagcgcgtcgcaggcaggtagctgcatc

SEQ ID NO: 372520 - DNA, 59 bp, Artificial
  Synthetic oligonucleotide
cgcttcgtcaattatatcagaggtcccaaccctcgacgttatgattgataacgcgcaag

SEQ ID NO: 372521 - DNA, 56 bp, Artificial
  Synthetic oligonucleotide
cgcttcgtggtgaaacggcgatggttgttcaacatggagaccgacggtcgaattgg

SEQ ID NO: 372522 - DNA, 60 bp, Artificial
  Synthetic oligonucleotide
cgcttctatgcggtcttagcacctaaagcgcaactaggaggagcaagagatttgttagtg

SEQ ID NO: 372523 - DNA, 60 bp, Artificial
  Synthetic oligonucleotide
cgcttctatggcatccaccagttctaacacttattacatggatggtgaccctagatggcc

SEQ ID NO: 372524 - DNA, 56 bp, Artificial
  Synthetic oligonucleotide
cgcttctcggtgggctaccgacagaattgatttcgtcggccggtggtcaactgttc

SEQ ID NO: 372525 - DNA, 51 bp, Artificial
  Synthetic oligonucleotide
cgcttctggcatctcaacgggcgttcggcgatacaacagtcaaccggacct

SEQ ID NO: 372526 - DNA, 55 bp, Artificial
  Synthetic oligonucleotide
cgcttctgtcgtttgacgacctcgaatttctcttgcacaagaaggacctaaccga

SEQ ID NO: 372527 - DNA, 55 bp, Artificial
  Synthetic oligonucleotide
cgcttctgtgtctaagtccgtaattctgactgtccttgtgtgtctcgcttctgtg

SEQ ID NO: 372528 - DNA, 55 bp, Artificial
  Synthetic oligonucleotide
cgcttcttagttcacaaaatcaaacattccggctaccccttcgacttcacgtcag

SEQ ID NO: 372529 - DNA, 60 bp, Artificial
  Synthetic oligonucleotide
cgcttcttcctactcgccaattgtcatatgtcacctgattgctcgtgtaatgtctggttt

SEQ ID NO: 372530 - DNA, 60 bp, Artificial
  Synthetic oligonucleotide
cgcttcttgcaagggacccagatgatagaactatcttctgggtgtatggccctactggtg

SEQ ID NO: 372531 - DNA, 55 bp, Artificial
  Synthetic oligonucleotide
cgcttgaatgggtgaaacattggaggcatacaccagacaaagttgcatggaatgg

SEQ ID NO: 372532 - DNA, 58 bp, Artificial
  Synthetic oligonucleotide
cgcttgagactaaccagggtgcaaatgggcttactgcgacagttccggtcaactcaac

SEQ ID NO: 372533 - DNA, 60 bp, Artificial
  Synthetic oligonucleotide
cgcttgagcagctttgcgtagcgacgtgtgggtaagagcaaaagtgtcccgcaccataac

SEQ ID NO: 372534 - DNA, 60 bp, Artificial
  Synthetic oligonucleotide
cgcttgatagatgggatttggactcggcaagaggggatgatgtctcaggtaactttgtac

SEQ ID NO: 372535 - DNA, 55 bp, Artificial
  Synthetic oligonucleotide
cgcttgatttcgtaactaccaactatatgtcactaatttcaggcatgtggttgct

SEQ ID NO: 372536 - DNA, 55 bp, Artificial
  Synthetic oligonucleotide
cgcttgatttcgtgaccacaaactacatgtcattgatctcaggtatgtggctact

SEQ ID NO: 372537 - DNA, 54 bp, Artificial
  Synthetic oligonucleotide
cgcttgcaacgttccgaaataaagtttcggcaaaagctcacatcaacccctctt

SEQ ID NO: 372538 - DNA, 60 bp, Artificial
  Synthetic oligonucleotide
cgcttgcacaggtttgcgcccccttgcaagcctttgctgcgagaggaggtgtcgttcaga

SEQ ID NO: 372539 - DNA, 52 bp, Artificial
  Synthetic oligonucleotide
cgcttgcacccggtggacccctacgcttgcacccggcactatgtaattacat

SEQ ID NO: 372540 - DNA, 51 bp, Artificial
  Synthetic oligonucleotide
cgcttgcacttatatccgtgtcagcggcacggacgttacgtctcacggtgt

SEQ ID NO: 372541 - DNA, 55 bp, Artificial
  Synthetic oligonucleotide
cgcttgcagattctggacccacagcgtcaggtgagtcgcatatttatacagaaac

SEQ ID NO: 372542 - DNA, 60 bp, Artificial
  Synthetic oligonucleotide
cgcttgcaggtagcaacaatggccgcccagatctaagcgacgtcccggcgacaggaagtc

SEQ ID NO: 372543 - DNA, 58 bp, Artificial
  Synthetic oligonucleotide
cgcttgcaggttttacacaagttcactggtacggttacaggtggacaatatgcgtcta

SEQ ID NO: 372544 - DNA, 55 bp, Artificial
  Synthetic oligonucleotide
cgcttgccaatttcgggacccggaaggattcaatgtgggtactcccatgttgagt

SEQ ID NO: 372545 - DNA, 55 bp, Artificial
  Synthetic oligonucleotide
cgcttgcctgggaagacctgcggaacctgtgcctcttcagttaccaccacttgag

SEQ ID NO: 372546 - DNA, 58 bp, Artificial
  Synthetic oligonucleotide
cgcttgccttgtgcgaagcccgtctcttcggattcgagggggatcaatggaagtccag

SEQ ID NO: 372547 - DNA, 55 bp, Artificial
  Synthetic oligonucleotide
cgcttgcgctgagggatacgagggtaccgatactaacagtctgtggaacctgtcg

SEQ ID NO: 372548 - DNA, 55 bp, Artificial
  Synthetic oligonucleotide
cgcttgctcggagacgcgatcttcagtatttctataacaagctctctcgcaccat

SEQ ID NO: 372549 - DNA, 55 bp, Artificial
  Synthetic oligonucleotide
cgcttgctgcatccaaattttagactgctcagcagcgagtgcctgggtcgattgg

SEQ ID NO: 372550 - DNA, 55 bp, Artificial
  Synthetic oligonucleotide
cgcttgctggcaggaggaggaatctcccacgaccaagcgtcgacacttgcagggt

SEQ ID NO: 372551 - DNA, 55 bp, Artificial
  Synthetic oligonucleotide
cgcttgcttaagtcgcaggacaggggcaaaagtcctcttcatgcctgtatggtcg

SEQ ID NO: 372552 - DNA, 55 bp, Artificial
  Synthetic oligonucleotide
cgcttgcttgcaaaggaggaggctaggaagtattctgtatgtgttggggaggctg

SEQ ID NO: 372553 - DNA, 55 bp, Artificial
  Synthetic oligonucleotide
cgcttggaaggatttggcaaacaagtgctacgcctactcccgcccggaaccagtg

SEQ ID NO: 372554 - DNA, 55 bp, Artificial
  Synthetic oligonucleotide
cgcttggaggtacctaaagtatctggaaatcaacacagagtgtttagattaaaat

SEQ ID NO: 372555 - DNA, 55 bp, Artificial
  Synthetic oligonucleotide
cgcttggctgttctcccacgacactcgcagcccggaaagacaatctgggtggagc

SEQ ID NO: 372556 - DNA, 60 bp, Artificial
  Synthetic oligonucleotide
cgcttgggaggagccattgacttggtcaatcggtactcagcattagtcctatggcaatcg

SEQ ID NO: 372557 - DNA, 53 bp, Artificial
  Synthetic oligonucleotide
cgcttgggtctctatcgtccccttatccgtctgccgtaccgtccgaccacggg

SEQ ID NO: 372558 - DNA, 60 bp, Artificial
  Synthetic oligonucleotide
cgcttgggtgtccgagcgtgacagcacatgtcaaatatattcccaaatgttgcttagtta

SEQ ID NO: 372559 - DNA, 55 bp, Artificial
  Synthetic oligonucleotide
cgcttgggttaactcggcgtacgtcagcaactttcctgcgctgggccaatcgcag

SEQ ID NO: 372560 - DNA, 55 bp, Artificial
  Synthetic oligonucleotide
cgcttggtattggatgtttaacgactgatcctaatacgttcgagacagttgcaac

SEQ ID NO: 372561 - DNA, 60 bp, Artificial
  Synthetic oligonucleotide
cgcttggtcaatgacgttggcgtcgacatcgtctgttctcgtgccccgattagctcgtca

SEQ ID NO: 372562 - DNA, 59 bp, Artificial
  Synthetic oligonucleotide
cgcttggtcagcggaagaataaagcgagacgtacattattatctcgtagactacggcag

SEQ ID NO: 372563 - DNA, 56 bp, Artificial
  Synthetic oligonucleotide
cgcttgtaaagtcacctacttccccactgcgtacgactccgcgtcaaccgccagcc

SEQ ID NO: 372564 - DNA, 55 bp, Artificial
  Synthetic oligonucleotide
cgcttgtataggtgatttattaccaagaactgacgacattaagttccatcaatgg

SEQ ID NO: 372565 - DNA, 55 bp, Artificial
  Synthetic oligonucleotide
cgcttgtatagtgtttgtgtttccgaggttttgtacgacatgtgacacgtgttcc

SEQ ID NO: 372566 - DNA, 55 bp, Artificial
  Synthetic oligonucleotide
cgcttgtccgctaataagcgtcatgatggcaaacgtcgagctatgaatcctagta

SEQ ID NO: 372567 - DNA, 55 bp, Artificial
  Synthetic oligonucleotide
cgcttgtctaagttgtaacggaagatgcgatagtaatcaggtagagacgcgaccg

SEQ ID NO: 372568 - DNA, 58 bp, Artificial
  Synthetic oligonucleotide
cgcttgtcttagtgtcaaggcaaccccaagcaagctggcccagagccaaccctaattc

SEQ ID NO: 372569 - DNA, 55 bp, Artificial
  Synthetic oligonucleotide
cgcttgtgatcaactgaagtccacgagtattcctgctttccaatcaaacgtcctt

SEQ ID NO: 372570 - DNA, 55 bp, Artificial
  Synthetic oligonucleotide
cgcttgtgcggaaagttaagtcgtttggagttagacattggacggcaggacccag

SEQ ID NO: 372571 - DNA, 60 bp, Artificial
  Synthetic oligonucleotide
cgcttgtggactgacctggtatatgttaggttgcaaccaatctttgattgattcgttgca

SEQ ID NO: 372572 - DNA, 55 bp, Artificial
  Synthetic oligonucleotide
cgcttgttcccagcctatttagatctcgatacgggtgcaactcgttctcgatctc

SEQ ID NO: 372573 - DNA, 52 bp, Artificial
  Synthetic oligonucleotide
cgcttgttggctttgttctccgtggtctttgggatggaggtgacaaatgatg

SEQ ID NO: 372574 - DNA, 55 bp, Artificial
  Synthetic oligonucleotide
cgcttgtttgagcagaatcgacaaaacttacgtttatccttgccgctgtgtgaca

SEQ ID NO: 372575 - DNA, 55 bp, Artificial
  Synthetic oligonucleotide
cgctttaagctacgttttctgtctggccttcggtcaggacctttcagggagcgac

SEQ ID NO: 372576 - DNA, 59 bp, Artificial
  Synthetic oligonucleotide
cgctttacgcaggatgaggagagctacactgggggggagggcctcaggcgagtcggaga

SEQ ID NO: 372577 - DNA, 60 bp, Artificial
  Synthetic oligonucleotide
cgctttacgcgttcatctcctgcttggatccccatcgtctcacagctttacatctctgta

SEQ ID NO: 372578 - DNA, 60 bp, Artificial
  Synthetic oligonucleotide
cgctttacgtagcgcaaggcacaaataaatcgcagcagtacaagttcggcacagctacat

SEQ ID NO: 372579 - DNA, 55 bp, Artificial
  Synthetic oligonucleotide
cgctttactagcggacttgcgaaagaccgagattttaagcgaatattctaagaaa

SEQ ID NO: 372580 - DNA, 58 bp, Artificial
  Synthetic oligonucleotide
cgctttaggcatgaagctaacggaaccagcatctacagtttaggtttcgcggcaaaga

SEQ ID NO: 372581 - DNA, 55 bp, Artificial
  Synthetic oligonucleotide
cgctttaggtgctaatgctaccgtttcagttgcggcactatcccaatagttagcc

SEQ ID NO: 372582 - DNA, 59 bp, Artificial
  Synthetic oligonucleotide
cgctttatgcatgacactaacttgggttcccaggtggcgctaaatgcttttctgagcac

SEQ ID NO: 372583 - DNA, 51 bp, Artificial
  Synthetic oligonucleotide
cgctttcaaattaccaatttggataacagcagtattgggcgctttaccatt

SEQ ID NO: 372584 - DNA, 55 bp, Artificial
  Synthetic oligonucleotide
cgctttcaagattgttgtgtaaacctacggtgttaaccgagtgacatagtcttgg

SEQ ID NO: 372585 - DNA, 55 bp, Artificial
  Synthetic oligonucleotide
cgctttcagaatacttggaatatctgagtgggatgctggcgggttagagatatcg

SEQ ID NO: 372586 - DNA, 55 bp, Artificial
  Synthetic oligonucleotide
cgctttcagcagttgctacccatatgacatccctgactatgcatcgctccggtcc

SEQ ID NO: 372587 - DNA, 57 bp, Artificial
  Synthetic oligonucleotide
cgctttcaggaggtcttcactattgctcggcttaatcaagatggattccagcatgtt

SEQ ID NO: 372588 - DNA, 55 bp, Artificial
  Synthetic oligonucleotide
cgctttcagtgcccaaaatcactgtccaacagatcatggcctggtggcgggtggc

SEQ ID NO: 372589 - DNA, 51 bp, Artificial
  Synthetic oligonucleotide
cgctttccagaggccttcgaccgaacccagtttgtccaccctaacgggtcg

SEQ ID NO: 372590 - DNA, 57 bp, Artificial
  Synthetic oligonucleotide
cgctttccctttcgttaactattctccgcatgccgcttatgttttgtacgcagcttc

SEQ ID NO: 372591 - DNA, 59 bp, Artificial
  Synthetic oligonucleotide
cgctttccgaattgacaaggctccattggcacaacgccccaagtttcaagataatctca

SEQ ID NO: 372592 - DNA, 58 bp, Artificial
  Synthetic oligonucleotide
cgctttcctcaggttgtggttgaatcgtatctgtacgtggtacaccttgctcctcgta

SEQ ID NO: 372593 - DNA, 55 bp, Artificial
  Synthetic oligonucleotide
cgctttcgaatggaacatctctcgctgtgccactcttagcgacgacacactcgcc

SEQ ID NO: 372594 - DNA, 57 bp, Artificial
  Synthetic oligonucleotide
cgctttcggcaccgagcaaacaccaggaataaacatagcgtcagataaatcatgcaa

SEQ ID NO: 372595 - DNA, 54 bp, Artificial
  Synthetic oligonucleotide
cgctttcggtggagagggcaaatctatacccgttggttatatggtccgtcctaa

SEQ ID NO: 372596 - DNA, 60 bp, Artificial
  Synthetic oligonucleotide
cgctttctcacccagtactgagaaaacccaattgactcttgacatcaggcagttccagcc

SEQ ID NO: 372597 - DNA, 53 bp, Artificial
  Synthetic oligonucleotide
cgctttctggaactcgttaaccgacgggttgccgctgttaccactaataagcc

SEQ ID NO: 372598 - DNA, 55 bp, Artificial
  Synthetic oligonucleotide
cgctttctggatgtgatccccaatgaacctcattacagccctttaattctggccc

SEQ ID NO: 372599 - DNA, 57 bp, Artificial
  Synthetic oligonucleotide
cgctttctgtcttgtttgttccagggctgtccccttgccctaggctctggccgttgc

SEQ ID NO: 372600 - DNA, 59 bp, Artificial
  Synthetic oligonucleotide
cgctttgaagcaagaaatcgagaaatctggaaacagattgaacgagttcgagctgaaaa

SEQ ID NO: 372601 - DNA, 60 bp, Artificial
  Synthetic oligonucleotide
cgctttgaatctgtggcatggtctgccactgcatgtagcgacggatccggttggctaaca

SEQ ID NO: 372602 - DNA, 55 bp, Artificial
  Synthetic oligonucleotide
cgctttgaccttgaagtcaccatagtagctgtcaatctaactggaaacggcgggg

SEQ ID NO: 372603 - DNA, 51 bp, Artificial
  Synthetic oligonucleotide
cgctttgaggcaacagattaccgaacaacatagaattgcaaacgaaagggc

SEQ ID NO: 372604 - DNA, 58 bp, Artificial
  Synthetic oligonucleotide
cgctttgatcagactaattcggtagacgcagccgttaaattacccgatggaatcaatc

SEQ ID NO: 372605 - DNA, 60 bp, Artificial
  Synthetic oligonucleotide
cgctttgcttaataaccttcattatgctctgacgattctttaggaatgtcagacatgaaa

SEQ ID NO: 372606 - DNA, 57 bp, Artificial
  Synthetic oligonucleotide
cgctttggaaccttattggaaatctgaatcaataaagaaacatgttttgattgccac

SEQ ID NO: 372607 - DNA, 58 bp, Artificial
  Synthetic oligonucleotide
cgctttggcacaaagcgcggtggtacctagatctgaagttgtcccgtcacaaggagcg

SEQ ID NO: 372608 - DNA, 56 bp, Artificial
  Synthetic oligonucleotide
cgctttggcagttttgaacgactcgactgttcctgagagcgttgttttaagtgaag

SEQ ID NO: 372609 - DNA, 55 bp, Artificial
  Synthetic oligonucleotide
cgctttggcgatctgacatgcacggatgcaattttgccggcggtagctggcaggg

SEQ ID NO: 372610 - DNA, 55 bp, Artificial
  Synthetic oligonucleotide
cgctttggggcagttttgatatgtgttcccacacgagttctagcgaatgcattac

SEQ ID NO: 372611 - DNA, 60 bp, Artificial
  Synthetic oligonucleotide
cgctttgtgtagattccgcttcgtcgcttgatccttcgtatgcgtcgctgtttgacagac

SEQ ID NO: 372612 - DNA, 57 bp, Artificial
  Synthetic oligonucleotide
cgcttttaagtgagacctaagactgcgtcggaaccttagattcacgagccgcgtgat

SEQ ID NO: 372613 - DNA, 56 bp, Artificial
  Synthetic oligonucleotide
cgcttttatatggtgtccccaaattgcaaattggtaatttgcacaactttaattca

SEQ ID NO: 372614 - DNA, 53 bp, Artificial
  Synthetic oligonucleotide
cgcttttctaacgttttagaatctttccgtccttcaaacagctcaaacaaaga

SEQ ID NO: 372615 - DNA, 59 bp, Artificial
  Synthetic oligonucleotide
cgcttttctatagacttgatatagtgccaattaatgaagttagtagtaagaataataca

SEQ ID NO: 372616 - DNA, 55 bp, Artificial
  Synthetic oligonucleotide
cgcttttgaacgcgcgcaccaaagtcactctcatgatctcacgcggcgttgaagt

SEQ ID NO: 372617 - DNA, 55 bp, Artificial
  Synthetic oligonucleotide
cgcttttgagatgatggtcaaacctatgtgtatcggacaattgtggtgccctgcg

SEQ ID NO: 372618 - DNA, 54 bp, Artificial
  Synthetic oligonucleotide
cgcttttgtaatgactaagtgggactttgaccgacccaactacacttcggacta

SEQ ID NO: 372619 - DNA, 59 bp, Artificial
  Synthetic oligonucleotide
cgctttttatggtgtatagtaatacatgtaaagcgaaataaggaggtggatgtatgaca

SEQ ID NO: 372620 - DNA, 57 bp, Artificial
  Synthetic oligonucleotide
cggaaaaacagatggttgctcctaaatgtgacatctgaggacctcgggaaaacattc

SEQ ID NO: 372621 - DNA, 55 bp, Artificial
  Synthetic oligonucleotide
cggaaaacaggctatcaagaaaaggataccgaacatgatttcctatgatctcaaa

SEQ ID NO: 372622 - DNA, 59 bp, Artificial
  Synthetic oligonucleotide
cggaaaaggatcctttatattacatgatattccaaccagagatcatcgcggcatggagg

SEQ ID NO: 372623 - DNA, 57 bp, Artificial
  Synthetic oligonucleotide
cggaaaaggtgaccagcaagtcacccaccattggcacaagtccgggagtagcatagg

SEQ ID NO: 372624 - DNA, 52 bp, Artificial
  Synthetic oligonucleotide
cggaaaagtcaagcaagttgaagtaaacttgaacgatctcaaagcagcattc

SEQ ID NO: 372625 - DNA, 55 bp, Artificial
  Synthetic oligonucleotide
cggaaaagtgcttacacttgtggcagatcggggagaggatggtttagatgacgca

SEQ ID NO: 372626 - DNA, 56 bp, Artificial
  Synthetic oligonucleotide
cggaaaatatcttagtgaccctaaattatcctgtaaacataacttgtcagagacca

SEQ ID NO: 372627 - DNA, 55 bp, Artificial
  Synthetic oligonucleotide
cggaaaatatgaatggtcaagcaaccttaagtaagcttcaaaacgacgctgtagg

SEQ ID NO: 372628 - DNA, 59 bp, Artificial
  Synthetic oligonucleotide
cggaaaatgggtgagagaactgatcctgtatgacaaagaagaaatcaggaggatttggc

SEQ ID NO: 372629 - DNA, 53 bp, Artificial
  Synthetic oligonucleotide
cggaaaattcctggtgttctctgccgtgttgcgaatctttgggcggaagagga

SEQ ID NO: 372630 - DNA, 55 bp, Artificial
  Synthetic oligonucleotide
cggaaacacactatggcaatggctgaatgaaaatggggaagacagacttggcaga

SEQ ID NO: 372631 - DNA, 57 bp, Artificial
  Synthetic oligonucleotide
cggaaacaccttacagatatgcgtgctagatatgtatcggacaggtgggagccgggc

SEQ ID NO: 372632 - DNA, 60 bp, Artificial
  Synthetic oligonucleotide
cggaaacactgccagatggcagttccctctgtctgacgccgatatcaatatcgggtacct

SEQ ID NO: 372633 - DNA, 60 bp, Artificial
  Synthetic oligonucleotide
cggaaacaggatattggggtatcactgctgcctcttccagagccctctgtgcagatacac

SEQ ID NO: 372634 - DNA, 55 bp, Artificial
  Synthetic oligonucleotide
cggaaacattcagtgagtgtatagccaagactgataacattgtttgggcacgagg

SEQ ID NO: 372635 - DNA, 60 bp, Artificial
  Synthetic oligonucleotide
cggaaacattttgagaactcaggaatcatcatgcacttgcattcaaggtgagtgttattg

SEQ ID NO: 372636 - DNA, 60 bp, Artificial
  Synthetic oligonucleotide
cggaaaccaaagcatttgtatgtgtcaatgcctaatgcccaatctagcatgaaggctgaa

SEQ ID NO: 372637 - DNA, 54 bp, Artificial
  Synthetic oligonucleotide
cggaaaccatgcgcttgttatttagtgggtacgcaagtatccctttgaacgtta

SEQ ID NO: 372638 - DNA, 59 bp, Artificial
  Synthetic oligonucleotide
cggaaacccatctcccataaccagtgcaagcgcggctcaacggaggggcagagtaggca

SEQ ID NO: 372639 - DNA, 55 bp, Artificial
  Synthetic oligonucleotide
cggaaacctcgggcgcaacctgccagggtctcttgctgcaaagattagtgtcact

SEQ ID NO: 372640 - DNA, 53 bp, Artificial
  Synthetic oligonucleotide
cggaaacgctcttcagaggaaactcctccattggtgttcccttttcaaaactg

SEQ ID NO: 372641 - DNA, 51 bp, Artificial
  Synthetic oligonucleotide
cggaaacggcactaaggagactttacacgaatactgaggctaaccaggctg

SEQ ID NO: 372642 - DNA, 55 bp, Artificial
  Synthetic oligonucleotide
cggaaacggctagtatatgtgacgcaatatttcaagatgaagagacggaaggtgc

SEQ ID NO: 372643 - DNA, 55 bp, Artificial
  Synthetic oligonucleotide
cggaaacgggcccgactattccactcctggaagtacagcctaagccgtgagcgtc

SEQ ID NO: 372644 - DNA, 55 bp, Artificial
  Synthetic oligonucleotide
cggaaacgtccacgaggcttgcaaggactcgttgtccgtcattcgtttatcgtga

SEQ ID NO: 372645 - DNA, 52 bp, Artificial
  Synthetic oligonucleotide
cggaaacgtggccaattggggaatcccccagaggggtagaggaaggctctat

SEQ ID NO: 372646 - DNA, 59 bp, Artificial
  Synthetic oligonucleotide
cggaaactccaggatcaatgagttcaccatctgaagggaagacgaatgcttgggtcaac

SEQ ID NO: 372647 - DNA, 55 bp, Artificial
  Synthetic oligonucleotide
cggaaacttcgatgcgtgatgcgaccaatgccatttatgggactttcgttgactg

SEQ ID NO: 372648 - DNA, 55 bp, Artificial
  Synthetic oligonucleotide
cggaaagagtatgctcaacaagcaagcatatgttaaggatttcacaaagtactct

SEQ ID NO: 372649 - DNA, 55 bp, Artificial
  Synthetic oligonucleotide
cggaaagagttagattggatgattctctttctgcaatgccttacatctatgtgcc

SEQ ID NO: 372650 - DNA, 55 bp, Artificial
  Synthetic oligonucleotide
cggaaagccatctagcgcaatgacttacgacccaactaaccgcgagcaagaatcc

SEQ ID NO: 372651 - DNA, 60 bp, Artificial
  Synthetic oligonucleotide
cggaaagccgccgggggtcattatatccaaatggccttcatgaagctggccgcactgaca

SEQ ID NO: 372652 - DNA, 60 bp, Artificial
  Synthetic oligonucleotide
cggaaagggatgttttgagatatatcatacttgtgatgattcgtgcatggagagtataag

SEQ ID NO: 372653 - DNA, 54 bp, Artificial
  Synthetic oligonucleotide
cggaaaggtatggctaagacacctagcttttgtggtgactacgaattaccctat

SEQ ID NO: 372654 - DNA, 54 bp, Artificial
  Synthetic oligonucleotide
cggaaaggttttggtgacgcactaaggagctacgcttttaaagtcgcaatcgag

SEQ ID NO: 372655 - DNA, 52 bp, Artificial
  Synthetic oligonucleotide
cggaaagtcaacagacatgtggatcgagaggacggctgacattacttgggag

SEQ ID NO: 372656 - DNA, 59 bp, Artificial
  Synthetic oligonucleotide
cggaaagtcaatcaagtaatacgcaattactgtttcctgagacctatctattgtacaca

SEQ ID NO: 372657 - DNA, 55 bp, Artificial
  Synthetic oligonucleotide
cggaaagtgagcatatcctatggcgaaagaattcagcgactcggaagggttggga

SEQ ID NO: 372658 - DNA, 52 bp, Artificial
  Synthetic oligonucleotide
cggaaagtgggtgcggtgcgacaacctcgcaaacttcttggtctggaacgca

SEQ ID NO: 372659 - DNA, 60 bp, Artificial
  Synthetic oligonucleotide
cggaaagttctgaagatgagaggagtagcacccagtctgaagaggtgctagattcggaaa

SEQ ID NO: 372660 - DNA, 55 bp, Artificial
  Synthetic oligonucleotide
cggaaataccttccagctatcgttagagaggcaatcaagagacgtttaagaactc

SEQ ID NO: 372661 - DNA, 55 bp, Artificial
  Synthetic oligonucleotide
cggaaatagttactgaagcttctgagaaatttatcccaaatagaacatatagggt

SEQ ID NO: 372662 - DNA, 55 bp, Artificial
  Synthetic oligonucleotide
cggaaatatgtttacaaaacccgcctggatttcagctcaagtatctaatatcttc

SEQ ID NO: 372663 - DNA, 56 bp, Artificial
  Synthetic oligonucleotide
cggaaatcaaggaaattatttactccgatcaaaagagcaatccttccttccagctc

SEQ ID NO: 372664 - DNA, 55 bp, Artificial
  Synthetic oligonucleotide
cggaaatccattccgtcattgtccctctgatctcgcacaatccttacgcgaattc

SEQ ID NO: 372665 - DNA, 55 bp, Artificial
  Synthetic oligonucleotide
cggaaatccctctcgagggtcccaatcggtaagtatcttttctggcaagtgccag

SEQ ID NO: 372666 - DNA, 51 bp, Artificial
  Synthetic oligonucleotide
cggaaatccgacgttgctcgccgcggacaaatcggacacggtaaacacgcg

SEQ ID NO: 372667 - DNA, 55 bp, Artificial
  Synthetic oligonucleotide
cggaaatcgtggagcgaatagcaagaaaagtgcctctggccctattgtggtccat

SEQ ID NO: 372668 - DNA, 60 bp, Artificial
  Synthetic oligonucleotide
cggaaatgaacaagttatatgagagagtgagacgacaactgagagagaatgctgaagagg

SEQ ID NO: 372669 - DNA, 60 bp, Artificial
  Synthetic oligonucleotide
cggaaatgacgtttggatgggaagaacaatcagcaaggattcacgctcaggttatgagac

SEQ ID NO: 372670 - DNA, 55 bp, Artificial
  Synthetic oligonucleotide
cggaaatgggtttagcactgttagctcaatgtcaagtcgattgtggtctgaggag

SEQ ID NO: 372671 - DNA, 55 bp, Artificial
  Synthetic oligonucleotide
cggaaatgtccaggttgcctgtaacgactcgttatccgtcattctttggtcgtgg

SEQ ID NO: 372672 - DNA, 58 bp, Artificial
  Synthetic oligonucleotide
cggaaattcccaatggttttgatggctatgagcacacaacccactgactggggttcta

SEQ ID NO: 372673 - DNA, 52 bp, Artificial
  Synthetic oligonucleotide
cggaaattcccgaaattatgttcgctttgataccgtttactgtacctactaa

SEQ ID NO: 372674 - DNA, 59 bp, Artificial
  Synthetic oligonucleotide
cggaacaaacggaactctatcagaactcgaacacttatgtgtctgtaggaacatcaaca

SEQ ID NO: 372675 - DNA, 53 bp, Artificial
  Synthetic oligonucleotide
cggaacaaggaggttacagattgctacaattttcctgggagttctaaaggttg

SEQ ID NO: 372676 - DNA, 55 bp, Artificial
  Synthetic oligonucleotide
cggaacaatacacgacaggactgctttcagagggttaatatcaactcctttagga

SEQ ID NO: 372677 - DNA, 58 bp, Artificial
  Synthetic oligonucleotide
cggaacaatcagtctaatactgcaaatagggaatattatctcaatatggattagccac

SEQ ID NO: 372678 - DNA, 55 bp, Artificial
  Synthetic oligonucleotide
cggaacaatgaacaaaggactcatagacaagcacacaattgttggggagaacgac

SEQ ID NO: 372679 - DNA, 53 bp, Artificial
  Synthetic oligonucleotide
cggaacaatgagtttctggaaaccctctcgtaaaaactttacgatcgagtgac

SEQ ID NO: 372680 - DNA, 55 bp, Artificial
  Synthetic oligonucleotide
cggaacaatgcatccagttgtccatgaaactctcaagcgctataaattgcgtgat

SEQ ID NO: 372681 - DNA, 57 bp, Artificial
  Synthetic oligonucleotide
cggaacacaccagatttgaacaccatttcaatggtgactattcggggttcgacactg

SEQ ID NO: 372682 - DNA, 60 bp, Artificial
  Synthetic oligonucleotide
cggaacacattttgctcagtacagaaacgtgtgggatgtggactattcggcctttgatgc

SEQ ID NO: 372683 - DNA, 58 bp, Artificial
  Synthetic oligonucleotide
cggaacacggatccatggatccgtcaatctctgaaactttttgatcctgacctatacg

SEQ ID NO: 372684 - DNA, 55 bp, Artificial
  Synthetic oligonucleotide
cggaacacttacctgtctgctttggctctcaattacacccagtacagaggtagta

SEQ ID NO: 372685 - DNA, 60 bp, Artificial
  Synthetic oligonucleotide
cggaacagaaagcatgctcatttggatgactgaacaaggtatcattactaaagaagtaca

SEQ ID NO: 372686 - DNA, 55 bp, Artificial
  Synthetic oligonucleotide
cggaacatgacccggcagcaccttacattgaacaattgccagtaagtaacacgct

SEQ ID NO: 372687 - DNA, 60 bp, Artificial
  Synthetic oligonucleotide
cggaacattgttcatatcaccatacagcactaaggcaagctattctgtgttggggtgagt

SEQ ID NO: 372688 - DNA, 55 bp, Artificial
  Synthetic oligonucleotide
cggaaccaacatgtggacgaacgtctccgtcgaaaacatcgcagtacaaggcttg

SEQ ID NO: 372689 - DNA, 55 bp, Artificial
  Synthetic oligonucleotide
cggaaccagaccggacctcacggaccagcccatcccagacgctgattacacttgg

SEQ ID NO: 372690 - DNA, 55 bp, Artificial
  Synthetic oligonucleotide
cggaaccagtgataatgttggtctccagttttgttgaaaagaaggccgcaagcgc

SEQ ID NO: 372691 - DNA, 60 bp, Artificial
  Synthetic oligonucleotide
cggaaccatattataatcgatgccatcaactcctcgcagagattcgtctacgatagcctg

SEQ ID NO: 372692 - DNA, 55 bp, Artificial
  Synthetic oligonucleotide
cggaacccaacgaggactatccagactacgtgcacgcggagaagagccggttggc

SEQ ID NO: 372693 - DNA, 55 bp, Artificial
  Synthetic oligonucleotide
cggaacccagggaacgctgaaattgaggatctcattttcctggcacggtcagcac

SEQ ID NO: 372694 - DNA, 53 bp, Artificial
  Synthetic oligonucleotide
cggaacccatcacgttctcggaaacccagacttcaagttcctcaggaacgtta

SEQ ID NO: 372695 - DNA, 55 bp, Artificial
  Synthetic oligonucleotide
cggaacccatccgggaacctaaaattccagtggccccatcaatagagatgactaa

SEQ ID NO: 372696 - DNA, 53 bp, Artificial
  Synthetic oligonucleotide
cggaaccccctcttggcgacaagaacctctgcggccaaaagccccgtggataa

SEQ ID NO: 372697 - DNA, 55 bp, Artificial
  Synthetic oligonucleotide
cggaacccctggggtcctcaagaggaatgggaaagctgggcaggtgacatggagc

SEQ ID NO: 372698 - DNA, 56 bp, Artificial
  Synthetic oligonucleotide
cggaaccctatctagcaacaccttaattaaagaccagatttatataggattagcca

SEQ ID NO: 372699 - DNA, 55 bp, Artificial
  Synthetic oligonucleotide
cggaaccgaagaaccgagcgaaacctgagttggtagcagtatgagataccaccta

SEQ ID NO: 372700 - DNA, 55 bp, Artificial
  Synthetic oligonucleotide
cggaaccgatctatcgcatatataataggttgcaagggtacattgaggcagtgca

SEQ ID NO: 372701 - DNA, 55 bp, Artificial
  Synthetic oligonucleotide
cggaaccgcagaagacacacctacccataagcacaaaagagaatgagcttgcacc

SEQ ID NO: 372702 - DNA, 60 bp, Artificial
  Synthetic oligonucleotide
cggaaccgccacactcatgacggtgtccgtagatatgaaagctcctaatggcaccatcag

SEQ ID NO: 372703 - DNA, 58 bp, Artificial
  Synthetic oligonucleotide
cggaacctaagggatacgtgctgaatgttccaggacctggtgcgtacagaattcagga

SEQ ID NO: 372704 - DNA, 55 bp, Artificial
  Synthetic oligonucleotide
cggaaccttgttgaatgactccggtgtaaaaggcgacatatatgcctggacaggc

SEQ ID NO: 372705 - DNA, 52 bp, Artificial
  Synthetic oligonucleotide
cggaacctttggccctgtacactttagaaaccaagtcaaaatacgccgaaga

SEQ ID NO: 372706 - DNA, 57 bp, Artificial
  Synthetic oligonucleotide
cggaacgacccgcggtgcaatcagacccaggtagcaatggtggtcaaagccttaaca

SEQ ID NO: 372707 - DNA, 55 bp, Artificial
  Synthetic oligonucleotide
cggaacgagtgaacataatgacctacctaactctctgcaataagactggactttc

SEQ ID NO: 372708 - DNA, 54 bp, Artificial
  Synthetic oligonucleotide
cggaacgatagcaccaagcagtggctggacttccacagttccaacagttgcaga

SEQ ID NO: 372709 - DNA, 55 bp, Artificial
  Synthetic oligonucleotide
cggaacgccaacacaatgcctatggagatccttttacgacagtaagccctgtggt

SEQ ID NO: 372710 - DNA, 55 bp, Artificial
  Synthetic oligonucleotide
cggaacgcgaggcaagatagtcacaacgcagatggtgaccgacgtagagattaat

SEQ ID NO: 372711 - DNA, 56 bp, Artificial
  Synthetic oligonucleotide
cggaacggccaaactggcacttccggtcatcaatttacgacacgcgcggcggtgtg

SEQ ID NO: 372712 - DNA, 53 bp, Artificial
  Synthetic oligonucleotide
cggaacggcggttgtgaattttataatggcggttagacgcaatagaaaagacc

SEQ ID NO: 372713 - DNA, 58 bp, Artificial
  Synthetic oligonucleotide
cggaacgtatcagtcgatgaattattatcaggacgttgacagaaacgatacgttctat

SEQ ID NO: 372714 - DNA, 55 bp, Artificial
  Synthetic oligonucleotide
cggaacgtctgtcacaatattttaccatgcatcttcatacacacaacttctacgc

SEQ ID NO: 372715 - DNA, 57 bp, Artificial
  Synthetic oligonucleotide
cggaacgtgcaaaattgtgcactggcgaggtgattacaaaccttcgacagttaacaa

SEQ ID NO: 372716 - DNA, 55 bp, Artificial
  Synthetic oligonucleotide
cggaacgtttaagtgtgttacaggacaaaatcctagaccactatgaaaatgacag

SEQ ID NO: 372717 - DNA, 54 bp, Artificial
  Synthetic oligonucleotide
cggaactaccgcgagcgtgtgtagtaactggcaaccgaagttttcttcgaagaa

SEQ ID NO: 372718 - DNA, 60 bp, Artificial
  Synthetic oligonucleotide
cggaactatcctaccagctgatgttggatgcactgggagacagaagtcgctacttttcta

SEQ ID NO: 372719 - DNA, 57 bp, Artificial
  Synthetic oligonucleotide
cggaactcctagccgcttgttttgctcgcagccggtctggagcaaaaattatcggga

SEQ ID NO: 372720 - DNA, 55 bp, Artificial
  Synthetic oligonucleotide
cggaactggcaacaagaccctagccggctcacggggcccggtcacacagatgtac

SEQ ID NO: 372721 - DNA, 51 bp, Artificial
  Synthetic oligonucleotide
cggaactgtccgtggaaactagatgtccaaccatgggcgaagcgcacaatt

SEQ ID NO: 372722 - DNA, 55 bp, Artificial
  Synthetic oligonucleotide
cggaacttaagaagggcgatagcggtgttatattgaaccccgatcgaatgcatgg

SEQ ID NO: 372723 - DNA, 52 bp, Artificial
  Synthetic oligonucleotide
cggaacttacttcaatggtgtgataactgtacgggttttaaatcgtcaaacc

SEQ ID NO: 372724 - DNA, 52 bp, Artificial
  Synthetic oligonucleotide
cggaacttcacccagacgctccagttcgctttaacggttacgacccgaaggc

SEQ ID NO: 372725 - DNA, 50 bp, Artificial
  Synthetic oligonucleotide
cggaacttcccgattgagtccgccaccgacggttctaggaacccccggct

SEQ ID NO: 372726 - DNA, 59 bp, Artificial
  Synthetic oligonucleotide
cggaacttgactccttgccagttcagacacgttcccccatcactagagttgctgagagg

SEQ ID NO: 372727 - DNA, 55 bp, Artificial
  Synthetic oligonucleotide
cggaacttgcgttgtggcagtaacagatgggccagcagacaataaagccgaccat

SEQ ID NO: 372728 - DNA, 60 bp, Artificial
  Synthetic oligonucleotide
cggaacttgctgtctgtactcgataacgcaatggtcgattttcatacagctccgactaag

SEQ ID NO: 372729 - DNA, 60 bp, Artificial
  Synthetic oligonucleotide
cggaagaaatcatcattctatcaatcctatctcaggcggactcaatcaatgggaatacaa

SEQ ID NO: 372730 - DNA, 55 bp, Artificial
  Synthetic oligonucleotide
cggaagaacgtttattcacacccggcgatccaagactacaaccgcactaccgaca

SEQ ID NO: 372731 - DNA, 55 bp, Artificial
  Synthetic oligonucleotide
cggaagaagatctacagatgcgccggctagctacggcgttacagaaagagatcgg

SEQ ID NO: 372732 - DNA, 55 bp, Artificial
  Synthetic oligonucleotide
cggaagaagcttatcaatcacatattagaagtgtacgaagaagattattccccga

SEQ ID NO: 372733 - DNA, 57 bp, Artificial
  Synthetic oligonucleotide
cggaagaaggtccctgcttactggaggttggaagaccgtgtcaggccacgcaagtgc

SEQ ID NO: 372734 - DNA, 60 bp, Artificial
  Synthetic oligonucleotide
cggaagaatagttatcagggcgctcgctttcgcgcgagaataataggagtgtgcgtggat

SEQ ID NO: 372735 - DNA, 54 bp, Artificial
  Synthetic oligonucleotide
cggaagaattcttcggagttcgtaccagtaccttacatagtgaggtaataagac

SEQ ID NO: 372736 - DNA, 55 bp, Artificial
  Synthetic oligonucleotide
cggaagacaatgtgccgccatggttgcctccacacgacatcgcaccatatgtcgc

SEQ ID NO: 372737 - DNA, 58 bp, Artificial
  Synthetic oligonucleotide
cggaagaccactgcaagagacggccccatttggctgtaagattgccgtcaaccctctg

SEQ ID NO: 372738 - DNA, 52 bp, Artificial
  Synthetic oligonucleotide
cggaagacgaaaaggtttaaatacaggctacgagttctcctcgtagggtctc

SEQ ID NO: 372739 - DNA, 55 bp, Artificial
  Synthetic oligonucleotide
cggaagacgagattcctcccagtggctggtggaacgagcagtgtgtacattgagg

SEQ ID NO: 372740 - DNA, 55 bp, Artificial
  Synthetic oligonucleotide
cggaagactgctacccgagtactgttgggacgcgaaaggccgttgtgggactgcc

SEQ ID NO: 372741 - DNA, 60 bp, Artificial
  Synthetic oligonucleotide
cggaagactggtcaacctctcaaaagacaaggagagtatgactgaagttatcatggtgtc

SEQ ID NO: 372742 - DNA, 54 bp, Artificial
  Synthetic oligonucleotide
cggaagagacctggatcaccccagggtatctactccacaggccgggaacccacc

SEQ ID NO: 372743 - DNA, 55 bp, Artificial
  Synthetic oligonucleotide
cggaagagccttgctgctcccagagtactctactttgtaccgccgttggcttgac

SEQ ID NO: 372744 - DNA, 55 bp, Artificial
  Synthetic oligonucleotide
cggaagagctctgttgctccctgagtactctacattgtaccgccgttggctcgac

SEQ ID NO: 372745 - DNA, 55 bp, Artificial
  Synthetic oligonucleotide
cggaagagctttattgctcccagagtactccacattgtaccgccgatggctcgat

SEQ ID NO: 372746 - DNA, 55 bp, Artificial
  Synthetic oligonucleotide
cggaagaggaattcctagggcatttggagaacactgacacggagttgcattcttt

SEQ ID NO: 372747 - DNA, 53 bp, Artificial
  Synthetic oligonucleotide
cggaagagtaagaccaaggggtctccctttaccccccgtacagctgcgtatca

SEQ ID NO: 372748 - DNA, 51 bp, Artificial
  Synthetic oligonucleotide
cggaagatacggctcgcacggccaacctagcactagaaatagatgctgcca

SEQ ID NO: 372749 - DNA, 55 bp, Artificial
  Synthetic oligonucleotide
cggaagatcaccaggtgactcgtctaatatcattgcgaggcagacatacactccg

SEQ ID NO: 372750 - DNA, 55 bp, Artificial
  Synthetic oligonucleotide
cggaagcagcatcgttacatttcggtttgcgtgattacaatcctattgcgcaagc

SEQ ID NO: 372751 - DNA, 50 bp, Artificial
  Synthetic oligonucleotide
cggaagcatgtgctgtacagggggtcatgagacgtcgtgatcgggcacga

SEQ ID NO: 372752 - DNA, 55 bp, Artificial
  Synthetic oligonucleotide
cggaagcattcacatttcatcatgcccaaggatctacattggctggaggagtgtt

SEQ ID NO: 372753 - DNA, 58 bp, Artificial
  Synthetic oligonucleotide
cggaagctcaaattgcaatggtgcctggaaggcgcttcatcggttactcccacttctt

SEQ ID NO: 372754 - DNA, 60 bp, Artificial
  Synthetic oligonucleotide
cggaagctccaattctttcttccgaaacatgatctggctgatacatcaatcaggaacata

SEQ ID NO: 372755 - DNA, 58 bp, Artificial
  Synthetic oligonucleotide
cggaagctccgagcatggctgagttggcctttcgtggttggtggagcggggaggttga

SEQ ID NO: 372756 - DNA, 55 bp, Artificial
  Synthetic oligonucleotide
cggaagctcgccgtttgccacgtgccacgctgagtcagctttcaaccctccgtgt

SEQ ID NO: 372757 - DNA, 60 bp, Artificial
  Synthetic oligonucleotide
cggaagcttctttaagcccagattgactaaataatccatcccgtagactgcagacatgac

SEQ ID NO: 372758 - DNA, 59 bp, Artificial
  Synthetic oligonucleotide
cggaagcttgcttaacgtagtactaacagttttttattagagagcagatctctgatgaa

SEQ ID NO: 372759 - DNA, 55 bp, Artificial
  Synthetic oligonucleotide
cggaaggacgataccattatgcacttgacactactgaaactacttcatctgaaga

SEQ ID NO: 372760 - DNA, 52 bp, Artificial
  Synthetic oligonucleotide
cggaaggactggattgcaaatatctgaaagttttaagtttctcgggggtcgt

SEQ ID NO: 372761 - DNA, 50 bp, Artificial
  Synthetic oligonucleotide
cggaaggcaaatcaggtcagtctacctgactttgcatcccctaagtactc

SEQ ID NO: 372762 - DNA, 55 bp, Artificial
  Synthetic oligonucleotide
cggaaggcaatcgattcaacaagttggtggttctttcttctcatacggttacacc

SEQ ID NO: 372763 - DNA, 55 bp, Artificial
  Synthetic oligonucleotide
cggaaggcagtatgtaacagcagtcctatatatgtaccctaacctagaccctcag

SEQ ID NO: 372764 - DNA, 55 bp, Artificial
  Synthetic oligonucleotide
cggaagggcgatgagaaactttgaacagtttatggcacgcatagtggaccatccc

SEQ ID NO: 372765 - DNA, 59 bp, Artificial
  Synthetic oligonucleotide
cggaagggcttcgtgagaagctcgtgcacggtaatacactgatattaccaagagtgcgg

SEQ ID NO: 372766 - DNA, 55 bp, Artificial
  Synthetic oligonucleotide
cggaagggtctcctatgtgaggagcgacgttatgtattgacgaaccattctgtag

SEQ ID NO: 372767 - DNA, 60 bp, Artificial
  Synthetic oligonucleotide
cggaaggtgattcggtactgtgcctgacaggttccagggtctggccatgtacaggtgata

SEQ ID NO: 372768 - DNA, 55 bp, Artificial
  Synthetic oligonucleotide
cggaaggtgcagttcgaagccacacgtaagccacctcctcccaacttggtgcgta

SEQ ID NO: 372769 - DNA, 55 bp, Artificial
  Synthetic oligonucleotide
cggaaggtgccttcatgacatatatcatccccaacgtaacaatgacagttgagga

SEQ ID NO: 372770 - DNA, 55 bp, Artificial
  Synthetic oligonucleotide
cggaagtagacaatagagaaaacaccagcaatacatacctgcattcaagatgcag

SEQ ID NO: 372771 - DNA, 56 bp, Artificial
  Synthetic oligonucleotide
cggaagtagtatatccggctactcctcctgtggccacgtaggttcctggagaggcg

SEQ ID NO: 372772 - DNA, 59 bp, Artificial
  Synthetic oligonucleotide
cggaagtatcaaaactggaagcgctatcgcagtacccattccatagcacgttctccaac

SEQ ID NO: 372773 - DNA, 53 bp, Artificial
  Synthetic oligonucleotide
cggaagtccaattcctttcgaaggagaacgaaaactcacattacgtaattgcg

SEQ ID NO: 372774 - DNA, 56 bp, Artificial
  Synthetic oligonucleotide
cggaagtctttgaatgatggaggagcaacgcggttcccccgtacaagcgctcggac

SEQ ID NO: 372775 - DNA, 55 bp, Artificial
  Synthetic oligonucleotide
cggaagtgagtaagctctgcggattggtagaccgcatgggaaaactcccaaggac

SEQ ID NO: 372776 - DNA, 57 bp, Artificial
  Synthetic oligonucleotide
cggaagtgatgtacaatgcactttcggagttatcggtgttaagggagtctgacaaat

SEQ ID NO: 372777 - DNA, 55 bp, Artificial
  Synthetic oligonucleotide
cggaagtggtatgcaactgtcactggtggacagtatggagcaaaggaacaggctt

SEQ ID NO: 372778 - DNA, 60 bp, Artificial
  Synthetic oligonucleotide
cggaagtgtctcattgcagggctactgaatacatcatgaaaggagtgtacataaatacag

SEQ ID NO: 372779 - DNA, 55 bp, Artificial
  Synthetic oligonucleotide
cggaagttcacggcaactgttgttggtggtcagtatgcttgtaaggaacaaacgt

SEQ ID NO: 372780 - DNA, 56 bp, Artificial
  Synthetic oligonucleotide
cggaagttcccgcatacaacgcctcagaaaagtacccaagcatgacttcagttaat

SEQ ID NO: 372781 - DNA, 52 bp, Artificial
  Synthetic oligonucleotide
cggaagtttgggtaagtaattctactactgtactagccgaagggggtgtgga

SEQ ID NO: 372782 - DNA, 55 bp, Artificial
  Synthetic oligonucleotide
cggaataacgaaattggagcgcgaccaaataaatattggccggtagttgcggcag

SEQ ID NO: 372783 - DNA, 55 bp, Artificial
  Synthetic oligonucleotide
cggaataatcgtagctcggaagaagacgtcgggaccgcacgcgctcctagaactc

SEQ ID NO: 372784 - DNA, 58 bp, Artificial
  Synthetic oligonucleotide
cggaataatgtgagtccgagttcgttgcatgggcttataaacccctatcagttggtga

SEQ ID NO: 372785 - DNA, 60 bp, Artificial
  Synthetic oligonucleotide
cggaatacattgtcggatgttggcgtgttgcacacactcgtactcgtgcgagagatctta

SEQ ID NO: 372786 - DNA, 60 bp, Artificial
  Synthetic oligonucleotide
cggaatactgaattcgcgacggatactgaatggatgaagtgggcgatagaggatagaatg

SEQ ID NO: 372787 - DNA, 57 bp, Artificial
  Synthetic oligonucleotide
cggaatagtgtctactggtggcaatgggctcgttggctttgcagacgtcagggacct

SEQ ID NO: 372788 - DNA, 51 bp, Artificial
  Synthetic oligonucleotide
cggaatatagtcggtacgagttttggtatgtacaaagggatacctcgcata

SEQ ID NO: 372789 - DNA, 58 bp, Artificial
  Synthetic oligonucleotide
cggaatattctaggaaccagagcgtgggaagatgtaatggaattatatcgtcggagga

SEQ ID NO: 372790 - DNA, 55 bp, Artificial
  Synthetic oligonucleotide
cggaatcaacgatggtaaaggagtatagacaaaagattgacgcattaaaggcggc

SEQ ID NO: 372791 - DNA, 60 bp, Artificial
  Synthetic oligonucleotide
cggaatcacaggatcacaatgtttcatctgggctggccattcattatatttgggctacgg

SEQ ID NO: 372792 - DNA, 55 bp, Artificial
  Synthetic oligonucleotide
cggaatcctccttagatagcgtagcttccgccaccagggtcgtgaggtaggccgt

SEQ ID NO: 372793 - DNA, 51 bp, Artificial
  Synthetic oligonucleotide
cggaatcgatagattacgtagtagagcaggtttactcggagttccttggaa

SEQ ID NO: 372794 - DNA, 54 bp, Artificial
  Synthetic oligonucleotide
cggaatcgtacgggtagaaggtgtgaaccccgagtgcgaggccgaagctcaaac

SEQ ID NO: 372795 - DNA, 55 bp, Artificial
  Synthetic oligonucleotide
cggaatcgtggatcttgagaaaccctgggtatgctctagtggccgcggtcatcgg

SEQ ID NO: 372796 - DNA, 50 bp, Artificial
  Synthetic oligonucleotide
cggaatcgttaccgacccaacaactaaggggattgctgacagcgaacgag

SEQ ID NO: 372797 - DNA, 56 bp, Artificial
  Synthetic oligonucleotide
cggaatgacgtaaactatatactgaacatggatcgaaatttaccttcaacagctag

SEQ ID NO: 372798 - DNA, 55 bp, Artificial
  Synthetic oligonucleotide
cggaatgattggatgaccgaggactgattagcggttccccgtaagacagcccctc

SEQ ID NO: 372799 - DNA, 59 bp, Artificial
  Synthetic oligonucleotide
cggaatgattttgatcggaacgagatgcccgatttaccaggtgtgatgaggtcaaatta

SEQ ID NO: 372800 - DNA, 55 bp, Artificial
  Synthetic oligonucleotide
cggaatgcatgtagctttcaatggaagagaagggagtgcaagtttcatgccttac

SEQ ID NO: 372801 - DNA, 52 bp, Artificial
  Synthetic oligonucleotide
cggaatgcgcagggtgagggctggtttaacaaccggtttgggattgggggta

SEQ ID NO: 372802 - DNA, 60 bp, Artificial
  Synthetic oligonucleotide
cggaatgctatgagtggcctgttggatacggtgcgtaatatgggttctcaggttgctaat

SEQ ID NO: 372803 - DNA, 55 bp, Artificial
  Synthetic oligonucleotide
cggaatggacatgtcattaaccaattaatggaggctctaatgcagctatcacgac

SEQ ID NO: 372804 - DNA, 60 bp, Artificial
  Synthetic oligonucleotide
cggaatggacgctgtgtgctgcgttcctaaccgtcacggcctgatatacgggatgaacat

SEQ ID NO: 372805 - DNA, 55 bp, Artificial
  Synthetic oligonucleotide
cggaatggcgggatcgtggactcacgtgtcttacaagtggcagccaaatgtcaac

SEQ ID NO: 372806 - DNA, 55 bp, Artificial
  Synthetic oligonucleotide
cggaatgggtggatatgaaacttcatggatagagggagcaacttttaagggtgct

SEQ ID NO: 372807 - DNA, 59 bp, Artificial
  Synthetic oligonucleotide
cggaatgtcttaagcattgctcctataatgttctcaaacaaaatggcgagactaggaaa

SEQ ID NO: 372808 - DNA, 54 bp, Artificial
  Synthetic oligonucleotide
cggaattagcaggtgttttgcgttggttatcgaaaggtacggttacattggaca

SEQ ID NO: 372809 - DNA, 60 bp, Artificial
  Synthetic oligonucleotide
cggaattcataagaatgaatggttgtatagctgatagtgtaccggtgaaaacatctacta

SEQ ID NO: 372810 - DNA, 55 bp, Artificial
  Synthetic oligonucleotide
cggaattccttgcaaatccgttgatccccatataaagtctggatccgcttggtgg

SEQ ID NO: 372811 - DNA, 60 bp, Artificial
  Synthetic oligonucleotide
cggaattcgatagcacccagaataacttctcactcggccttgaatgcgtgattatggaag

SEQ ID NO: 372812 - DNA, 60 bp, Artificial
  Synthetic oligonucleotide
cggaattcgtaccagtatctcacatagtgaggtaataagactggtgggcagcgcctagtc

SEQ ID NO: 372813 - DNA, 60 bp, Artificial
  Synthetic oligonucleotide
cggaattctctgcctgatccacagtgatgctctcccctgtgcgtgaatccatggttggcg

SEQ ID NO: 372814 - DNA, 55 bp, Artificial
  Synthetic oligonucleotide
cggaattgagcagcctcaactaccgctagattacgttcaccgttgcgcatcaacc

SEQ ID NO: 372815 - DNA, 55 bp, Artificial
  Synthetic oligonucleotide
cggaattgcaccgcaatcagactcgctaagaaagctgtcaggtattagattcaag

SEQ ID NO: 372816 - DNA, 54 bp, Artificial
  Synthetic oligonucleotide
cggaattggttgggtgttcaccctttagaacggttaagatcgaagagcatgtgg

SEQ ID NO: 372817 - DNA, 55 bp, Artificial
  Synthetic oligonucleotide
cggaatttgccagagttccgaatttcaggggtaatgatttgagtgaaagtggaga

SEQ ID NO: 372818 - DNA, 57 bp, Artificial
  Synthetic oligonucleotide
cggaattttgtgtggggaaatcattgatgctagttgggacaagtccgcgttggatat

SEQ ID NO: 372819 - DNA, 60 bp, Artificial
  Synthetic oligonucleotide
cggacaaagctcactcagcagagatagtactgaaccaactatgcgttaggttctttggac

SEQ ID NO: 372820 - DNA, 52 bp, Artificial
  Synthetic oligonucleotide
cggacaaaggacgactgaacagatagttacggcccaggggtgggttccggat

SEQ ID NO: 372821 - DNA, 60 bp, Artificial
  Synthetic oligonucleotide
cggacaacacagtccatgcttacaagaccgtactgtcgcaaggatacgtggcgtccagtc

SEQ ID NO: 372822 - DNA, 52 bp, Artificial
  Synthetic oligonucleotide
cggacaacagcgtatcgacggtgaacccgcggagacgaaggttatgggtcgc

SEQ ID NO: 372823 - DNA, 58 bp, Artificial
  Synthetic oligonucleotide
cggacaacctggtgcctagctgccgcccgtgcaacttcgacagacacaaccccaacag

SEQ ID NO: 372824 - DNA, 54 bp, Artificial
  Synthetic oligonucleotide
cggacaacgaaagtcttacggggagcaggacacacagttattaataaccggaca

SEQ ID NO: 372825 - DNA, 55 bp, Artificial
  Synthetic oligonucleotide
cggacaacgagatgtttccacacttggctaaacgaccccgactagatgaacctaa

SEQ ID NO: 372826 - DNA, 55 bp, Artificial
  Synthetic oligonucleotide
cggacaactggtggactcttttgcttacatgaggaatggctgggacgtggaggtg

SEQ ID NO: 372827 - DNA, 55 bp, Artificial
  Synthetic oligonucleotide
cggacaagacaagccctatccaagccgtacccttgcaccactactgtgttcgaag

SEQ ID NO: 372828 - DNA, 54 bp, Artificial
  Synthetic oligonucleotide
cggacaagacgttccccattttactggacggacgcgtaaatgggtatgcgtgcg

SEQ ID NO: 372829 - DNA, 60 bp, Artificial
  Synthetic oligonucleotide
cggacaagagaataatagagatggttcctgaaaggaatgaacaagggcagacgctctgga

SEQ ID NO: 372830 - DNA, 55 bp, Artificial
  Synthetic oligonucleotide
cggacaatagcaaaagagatggcgagggattctaaggttttggagagtgatctcg

SEQ ID NO: 372831 - DNA, 60 bp, Artificial
  Synthetic oligonucleotide
cggacaatagtatgtggtctattccctactcaaatacaagtacgcaacatcatgagtcca

SEQ ID NO: 372832 - DNA, 55 bp, Artificial
  Synthetic oligonucleotide
cggacaatcttgagcgcttttctaccgtccgggcgaacgttcgcaccagcccagt

SEQ ID NO: 372833 - DNA, 54 bp, Artificial
  Synthetic oligonucleotide
cggacaatgtgggtagaagggttgacaaggtgaccttttggcgcgctcctcggg

SEQ ID NO: 372834 - DNA, 53 bp, Artificial
  Synthetic oligonucleotide
cggacaattagtcgaacctccaggtcaggatttgaggtaataagggtaaagaa

SEQ ID NO: 372835 - DNA, 58 bp, Artificial
  Synthetic oligonucleotide
cggacacaactttccgtagtccacaagatgtagtaccacttgtgcgtttgatggctac

SEQ ID NO: 372836 - DNA, 51 bp, Artificial
  Synthetic oligonucleotide
cggacacaggtggcgtttactccttggcgggggcacgcaatcaggctcgac

SEQ ID NO: 372837 - DNA, 55 bp, Artificial
  Synthetic oligonucleotide
cggacacatcacagggcataggatggcgtgggacatgatgatgaactggtccccg

SEQ ID NO: 372838 - DNA, 53 bp, Artificial
  Synthetic oligonucleotide
cggacacatgggtgacctatggaacgtgttctcaaactggcgaacaccgacga

SEQ ID NO: 372839 - DNA, 55 bp, Artificial
  Synthetic oligonucleotide
cggacaccagtgagggctagagaggcacacattcaaatgaaggccgcagctttac

SEQ ID NO: 372840 - DNA, 55 bp, Artificial
  Synthetic oligonucleotide
cggacaccgtgcaaacacgccatgtcattcagagacgaacacgatcagagtccac

SEQ ID NO: 372841 - DNA, 55 bp, Artificial
  Synthetic oligonucleotide
cggacaccgtgcaaacgcgccatgtcatccagaggcgaacacggtcagagaccac

SEQ ID NO: 372842 - DNA, 55 bp, Artificial
  Synthetic oligonucleotide
cggacacgaggatttagcaaaggcgaagttttacgtcgatagagtgtttgatttg

SEQ ID NO: 372843 - DNA, 55 bp, Artificial
  Synthetic oligonucleotide
cggacacggcaggacgccatgctagccacacacgttgtatgggacgttggtctcc

SEQ ID NO: 372844 - DNA, 55 bp, Artificial
  Synthetic oligonucleotide
cggacactaaggtgttccgtgttcttattggtttcgtcgccatgtctgatgggac

SEQ ID NO: 372845 - DNA, 54 bp, Artificial
  Synthetic oligonucleotide
cggacactttactggattgggtttgacaccactcagttcatgttctcggctatg

SEQ ID NO: 372846 - DNA, 55 bp, Artificial
  Synthetic oligonucleotide
cggacagaatcccaactgtagatctcattaccaaagatttagatacccgtgatcc

SEQ ID NO: 372847 - DNA, 53 bp, Artificial
  Synthetic oligonucleotide
cggacagaggaaagattgcagagtctcttaggggactacctacacgaggcatc

SEQ ID NO: 372848 - DNA, 54 bp, Artificial
  Synthetic oligonucleotide
cggacagatcgtcggtggagtttacttactgccgcgcaggggccctcgtttggg

SEQ ID NO: 372849 - DNA, 59 bp, Artificial
  Synthetic oligonucleotide
cggacagatcttccagaccctatgcaatccctgtctactcaaactaagtctcccgagac

SEQ ID NO: 372850 - DNA, 55 bp, Artificial
  Synthetic oligonucleotide
cggacagcttagaggcttattcaaggcaagcagttagtgatttaaaccttatcaa

SEQ ID NO: 372851 - DNA, 55 bp, Artificial
  Synthetic oligonucleotide
cggacagggagaccacgtgacgcaaatcaagcgattcaatatcaaccggttcagg

SEQ ID NO: 372852 - DNA, 55 bp, Artificial
  Synthetic oligonucleotide
cggacagtatatcgttgtctcgccaaactctgtgctgaagaatgccaaactcgca

SEQ ID NO: 372853 - DNA, 60 bp, Artificial
  Synthetic oligonucleotide
cggacagtctctactgatgctgaagggtccttgagaatttacttagctgatctaggtgac

SEQ ID NO: 372854 - DNA, 60 bp, Artificial
  Synthetic oligonucleotide
cggacagtgcgaccgtcatccatgtagtagacctgcacaccgagacgtgcgaccactgga

SEQ ID NO: 372855 - DNA, 55 bp, Artificial
  Synthetic oligonucleotide
cggacagtgggtctgagcgagagcaccataggagacgccctccaacagctggcta

SEQ ID NO: 372856 - DNA, 59 bp, Artificial
  Synthetic oligonucleotide
cggacagtggtcctaactgaatcaaacctatctactgccttggccgagcttgccaccaa

SEQ ID NO: 372857 - DNA, 57 bp, Artificial
  Synthetic oligonucleotide
cggacataacgtacactgttgctccccttgtttgggtttccgcgataagatgcgcca

SEQ ID NO: 372858 - DNA, 59 bp, Artificial
  Synthetic oligonucleotide
cggacatatggaataacatgacctggttgcaatgggataaagaaattaacaattacaca

SEQ ID NO: 372859 - DNA, 55 bp, Artificial
  Synthetic oligonucleotide
cggacatcatgaggagacgactgtcggtagcgtccacgacgacgtcagttacttc

SEQ ID NO: 372860 - DNA, 59 bp, Artificial
  Synthetic oligonucleotide
cggacatgaaataatatttcatggtgcttcttctcgtcctccagtctatctggaaaaac

SEQ ID NO: 372861 - DNA, 55 bp, Artificial
  Synthetic oligonucleotide
cggacatggattgctgatagagggttcccaattgcccttttgtcttccagtgggg

SEQ ID NO: 372862 - DNA, 60 bp, Artificial
  Synthetic oligonucleotide
cggacatggggtcgtggtgcgatgactcactaacctatgagtgtgtgaccatagaccagg

SEQ ID NO: 372863 - DNA, 60 bp, Artificial
  Synthetic oligonucleotide
cggacatgtcaaaaacggttctatgagaatcgttgggcctagagcctgcagcaatacgtg

SEQ ID NO: 372864 - DNA, 55 bp, Artificial
  Synthetic oligonucleotide
cggacatgtgacctttatattgcaatggtcactcaatgttgagcatgtcaagccg

SEQ ID NO: 372865 - DNA, 57 bp, Artificial
  Synthetic oligonucleotide
cggacattctattataccgtaactctcctacaaactcagttaactcaataatatgcc

SEQ ID NO: 372866 - DNA, 55 bp, Artificial
  Synthetic oligonucleotide
cggacattggattgactgcgaacactgttctcgaatatgtagccgaaaacggatt

SEQ ID NO: 372867 - DNA, 60 bp, Artificial
  Synthetic oligonucleotide
cggacattggctttgatactctaatagctgcgactgatgggagcgatctggcgttaattg

SEQ ID NO: 372868 - DNA, 55 bp, Artificial
  Synthetic oligonucleotide
cggaccacaaccaccaactggaggacaaatagctgaatcatccgtctgagggccg

SEQ ID NO: 372869 - DNA, 55 bp, Artificial
  Synthetic oligonucleotide
cggaccacaagctttagttactctgtacgaaaacttacaagctatgggagatgac

SEQ ID NO: 372870 - DNA, 59 bp, Artificial
  Synthetic oligonucleotide
cggaccagaagtctatgcagtcctccttgtaaccctttgtcaggatcttgatcgtcgga

SEQ ID NO: 372871 - DNA, 55 bp, Artificial
  Synthetic oligonucleotide
cggaccagcacattataaagaattgtcagacctgaacaccataagtcatccctta

SEQ ID NO: 372872 - DNA, 55 bp, Artificial
  Synthetic oligonucleotide
cggaccagcgatagcgcaggatgtgcgtcgtgaacgtttaaccacttcatgaggc

SEQ ID NO: 372873 - DNA, 55 bp, Artificial
  Synthetic oligonucleotide
cggaccaggaacggttagtgtgggcatgtgtaggtttggaggtaggccgcggaca

SEQ ID NO: 372874 - DNA, 60 bp, Artificial
  Synthetic oligonucleotide
cggaccaggcgctacctaattgcgacctccgcatgggtgctggactatgcgttgattatt

SEQ ID NO: 372875 - DNA, 59 bp, Artificial
  Synthetic oligonucleotide
cggaccagtcgcctttctgggagggatacactcgagccctctccatcatattcggtgcg

SEQ ID NO: 372876 - DNA, 55 bp, Artificial
  Synthetic oligonucleotide
cggaccagtggaccggacggtgcttgcagtgttgggtagctgcagaagccagaga

SEQ ID NO: 372877 - DNA, 52 bp, Artificial
  Synthetic oligonucleotide
cggaccataatccgtgtaatggtacgaagggaaaaggtaaggcaccaggacc

SEQ ID NO: 372878 - DNA, 55 bp, Artificial
  Synthetic oligonucleotide
cggaccataattgcacttcagatttggatgttcggacgtgtggagaagtcgcagc

SEQ ID NO: 372879 - DNA, 56 bp, Artificial
  Synthetic oligonucleotide
cggaccattcgcacaaaccggatatgcaccagttaattggggaccaggagaggtaa

SEQ ID NO: 372880 - DNA, 52 bp, Artificial
  Synthetic oligonucleotide
cggacccaccttcataccaaaatggggtggccaaataaaatgggacaaacca

SEQ ID NO: 372881 - DNA, 53 bp, Artificial
  Synthetic oligonucleotide
cggacccagaccattttgatggatacaaacaacaggtcgtcactgttatggac

SEQ ID NO: 372882 - DNA, 55 bp, Artificial
  Synthetic oligonucleotide
cggacccaggcatcgcctatgtggttccactccttaccgtctccatccacgacgg

SEQ ID NO: 372883 - DNA, 60 bp, Artificial
  Synthetic oligonucleotide
cggacccattagcatctctcttagaaatgtgccatagcacacagattggaggaataagga

SEQ ID NO: 372884 - DNA, 54 bp, Artificial
  Synthetic oligonucleotide
cggaccccaaccacacaaaaggtgggtgttcacgctgaataatccttccgagga

SEQ ID NO: 372885 - DNA, 58 bp, Artificial
  Synthetic oligonucleotide
cggacccccggtttagggacatcgtgaagttgtcctctgcacgctatagcaccacaga

SEQ ID NO: 372886 - DNA, 51 bp, Artificial
  Synthetic oligonucleotide
cggacccccttccaaaagactggggggaggatccttagagcaccgggagac

SEQ ID NO: 372887 - DNA, 55 bp, Artificial
  Synthetic oligonucleotide
cggaccccgtcatctctagggtagtctcgctagtagcgtcgagagataccgtggt

SEQ ID NO: 372888 - DNA, 55 bp, Artificial
  Synthetic oligonucleotide
cggacccgaatatcagcggaatgactttccgccaagtttgtgaagcatttgctcc

SEQ ID NO: 372889 - DNA, 53 bp, Artificial
  Synthetic oligonucleotide
cggacccgactttaaccgcctggtgtccgcgtttgaggaactggccataggag

SEQ ID NO: 372890 - DNA, 60 bp, Artificial
  Synthetic oligonucleotide
cggacccgtcatctttgcggttaatgacttccgccgatctatctacgctgtctcagtctg

SEQ ID NO: 372891 - DNA, 55 bp, Artificial
  Synthetic oligonucleotide
cggaccctcagccgaatttttacgccttcacaaacacaacgaccaggtctcaggc

SEQ ID NO: 372892 - DNA, 55 bp, Artificial
  Synthetic oligonucleotide
cggaccctcctatgaaggattatcagtggttgttgatcttgacaaaaggctcaac

SEQ ID NO: 372893 - DNA, 55 bp, Artificial
  Synthetic oligonucleotide
cggaccgacaagtctctatcaccaagccaataagggagttagagtcgcctactgg

SEQ ID NO: 372894 - DNA, 54 bp, Artificial
  Synthetic oligonucleotide
cggaccgagtccagttcggaccaatagtgaccctaaaccccactacgctgctcc

SEQ ID NO: 372895 - DNA, 55 bp, Artificial
  Synthetic oligonucleotide
cggaccggattggcacggcttgttccaaaggcgtagtctcggtgtcttacaccac

SEQ ID NO: 372896 - DNA, 51 bp, Artificial
  Synthetic oligonucleotide
cggaccggcagatagtctcgagggacaagggtggcgactccttgcacctat

SEQ ID NO: 372897 - DNA, 60 bp, Artificial
  Synthetic oligonucleotide
cggaccggctcatctcgacaagaggcggcggtcctcagtactctcaatcttttctgataa

SEQ ID NO: 372898 - DNA, 55 bp, Artificial
  Synthetic oligonucleotide
cggaccgtaaagaccaccaaggagtctctcgttattatatctccgagtgtggctg

SEQ ID NO: 372899 - DNA, 55 bp, Artificial
  Synthetic oligonucleotide
cggaccgttactgggatttagtgaactcgctaataaacaggggcatcgtgacgag

SEQ ID NO: 372900 - DNA, 58 bp, Artificial
  Synthetic oligonucleotide
cggacctaaaggaggtgctcatcaatgaccaaaagagcaaccagttcccatacttgga

SEQ ID NO: 372901 - DNA, 50 bp, Artificial
  Synthetic oligonucleotide
cggacctactgattcatgacattgagacaaatccagggcccttcatgttt

SEQ ID NO: 372902 - DNA, 55 bp, Artificial
  Synthetic oligonucleotide
cggacctatatattaaaggcactagcgctaatatgcgtgaaacccctggcagttg

SEQ ID NO: 372903 - DNA, 55 bp, Artificial
  Synthetic oligonucleotide
cggacctccggacaataatcctgtggagttaccagatcttgagcagcttaacatc

SEQ ID NO: 372904 - DNA, 55 bp, Artificial
  Synthetic oligonucleotide
cggacctcggtccgcttgacctcagtattccgtcgtgctaggtcggtcccagcaa

SEQ ID NO: 372905 - DNA, 60 bp, Artificial
  Synthetic oligonucleotide
cggacctgacatcgatgggttagtgaactatgcccaaagctggatgtcaaagacccaaga

SEQ ID NO: 372906 - DNA, 55 bp, Artificial
  Synthetic oligonucleotide
cggacctggcagaataaccctgtcgccacacttggatggccagactccaacttcc

SEQ ID NO: 372907 - DNA, 55 bp, Artificial
  Synthetic oligonucleotide
cggaccttatgaagctattgctaaaagccgacccgcgatggccctacaaagggcc

SEQ ID NO: 372908 - DNA, 55 bp, Artificial
  Synthetic oligonucleotide
cggaccttgatggggagttcgtttataatcagtccaaaacaacacattggcttcg

SEQ ID NO: 372909 - DNA, 55 bp, Artificial
  Synthetic oligonucleotide
cggaccttggaacttttgtcgcccggacttcgcgaaactcgtgatcgagtctcaa

SEQ ID NO: 372910 - DNA, 55 bp, Artificial
  Synthetic oligonucleotide
cggacctttccggacttgggtcggctctatatacgatttgtgcaattggatgggg

SEQ ID NO: 372911 - DNA, 50 bp, Artificial
  Synthetic oligonucleotide
cggacctttgggaattggcacaacaggtcatcctttatttgataaacaaa

SEQ ID NO: 372912 - DNA, 59 bp, Artificial
  Synthetic oligonucleotide
cggacgaaatatgctttccttatccaaatccgaagcagcctgccatcctaagcgccgaa

SEQ ID NO: 372913 - DNA, 55 bp, Artificial
  Synthetic oligonucleotide
cggacgaaccgtcacgtgcatccacgtttgtatcgtttgatttggattacttggg

SEQ ID NO: 372914 - DNA, 57 bp, Artificial
  Synthetic oligonucleotide
cggacgaggatttacaatcttttgagatagatttctcgaaattcgacaagtcaaaga

SEQ ID NO: 372915 - DNA, 51 bp, Artificial
  Synthetic oligonucleotide
cggacgagggtatgacaatcgttacgggttcagtcaataggctttcaccga

SEQ ID NO: 372916 - DNA, 51 bp, Artificial
  Synthetic oligonucleotide
cggacgagtggccaggcttgggcgtattttctccggtgagcgtagctgcct

SEQ ID NO: 372917 - DNA, 55 bp, Artificial
  Synthetic oligonucleotide
cggacgatcagaacgcctgatgttcctagaggctgtgaagggccctgtaaggtcc

SEQ ID NO: 372918 - DNA, 53 bp, Artificial
  Synthetic oligonucleotide
cggacgattcaggtacagaaaatgaggggtcggggtgtacaggatggtttatg

SEQ ID NO: 372919 - DNA, 59 bp, Artificial
  Synthetic oligonucleotide
cggacgcaacaaacgtcagtctaatcaacgtgtccgtaacattgtcaataagcaactca

SEQ ID NO: 372920 - DNA, 53 bp, Artificial
  Synthetic oligonucleotide
cggacgccaacaaggtgggagcgggagcattcgggccagggttcgtccctccc

SEQ ID NO: 372921 - DNA, 55 bp, Artificial
  Synthetic oligonucleotide
cggacgccagtccaggaatacggtcacctgtcagtagtcgtgtgcaccggtcttc

SEQ ID NO: 372922 - DNA, 55 bp, Artificial
  Synthetic oligonucleotide
cggacgcgaagatgctgatcatacgggaacgcacatagtaggaggagcctgactc

SEQ ID NO: 372923 - DNA, 55 bp, Artificial
  Synthetic oligonucleotide
cggacgctggagaagcatgccggagcaaatgagaaaatcagccagcagcgccggg

SEQ ID NO: 372924 - DNA, 55 bp, Artificial
  Synthetic oligonucleotide
cggacgctttggaagttttgcctgagtctatcacgctcacaccgactgggacggt

SEQ ID NO: 372925 - DNA, 55 bp, Artificial
  Synthetic oligonucleotide
cggacggaccacacggtaacgaacctgaattcatcgccgaggcatgccccagttg

SEQ ID NO: 372926 - DNA, 60 bp, Artificial
  Synthetic oligonucleotide
cggacggagcctcaccggtactggtttatcagtatgctgcatccggagtccaagccaaca

SEQ ID NO: 372927 - DNA, 55 bp, Artificial
  Synthetic oligonucleotide
cggacggatcttatgttgtgcaagagtgtcctgacaattacacgtttgacgccgc

SEQ ID NO: 372928 - DNA, 55 bp, Artificial
  Synthetic oligonucleotide
cggacggattcgtcctgagacctaaactatcactgtaggacagacgtccagttcg

SEQ ID NO: 372929 - DNA, 55 bp, Artificial
  Synthetic oligonucleotide
cggacggcctgtcgcttattgtgggcaggccgtttcaacaacgaactaaggagtc

SEQ ID NO: 372930 - DNA, 55 bp, Artificial
  Synthetic oligonucleotide
cggacggctgacctgagatacttagacttagcaactgaatccccaacagtgaagg

SEQ ID NO: 372931 - DNA, 51 bp, Artificial
  Synthetic oligonucleotide
cggacgggtttgcagcctacaccctaactccccggcccattatccatgctg

SEQ ID NO: 372932 - DNA, 55 bp, Artificial
  Synthetic oligonucleotide
cggacggtaggagtaagaccgtagcgataggagaggatgctaggagttaggggcg

SEQ ID NO: 372933 - DNA, 55 bp, Artificial
  Synthetic oligonucleotide
cggacggtctaagacatgctcgctcgtctctttaacgcttcggctgcgatcccga

SEQ ID NO: 372934 - DNA, 55 bp, Artificial
  Synthetic oligonucleotide
cggacggtgaaaactgtcaaaataccttacgcaaccacccagatagtcaccacta

SEQ ID NO: 372935 - DNA, 53 bp, Artificial
  Synthetic oligonucleotide
cggacggtgacaaacgtgtgctacacggcctcccctcggggtggaagtggacc

SEQ ID NO: 372936 - DNA, 50 bp, Artificial
  Synthetic oligonucleotide
cggacggtgataaacgtgtgctagacggcctcccctcggggtggaaggct

SEQ ID NO: 372937 - DNA, 58 bp, Artificial
  Synthetic oligonucleotide
cggacggtgttaacacagcacgtctcgacgttgttgctccggcgtactatgcgtacgc

SEQ ID NO: 372938 - DNA, 59 bp, Artificial
  Synthetic oligonucleotide
cggacgtaaaatgttagatgttcaagaagagccgaaggatgagatggcgttatctacta

SEQ ID NO: 372939 - DNA, 60 bp, Artificial
  Synthetic oligonucleotide
cggacgtgaacacagtgcacgaggtgcaaggggaaacatacgagaagactgctatcgttc

SEQ ID NO: 372940 - DNA, 58 bp, Artificial
  Synthetic oligonucleotide
cggacgtggatacatttgagattgttgcgtcgtctgaaaaattggtaattactgatgt

SEQ ID NO: 372941 - DNA, 55 bp, Artificial
  Synthetic oligonucleotide
cggacgtgtctatcaagtctgtcatgcagcaacaagcgtatgacggcttcaagac

SEQ ID NO: 372942 - DNA, 60 bp, Artificial
  Synthetic oligonucleotide
cggacgttactgtcgagcatcaaagcagtggaagcttacgtgcaatttacctttgacaca

SEQ ID NO: 372943 - DNA, 57 bp, Artificial
  Synthetic oligonucleotide
cggacgttagacatgttggcaagtaggacgcaaataatagttaatgcagacaaattt

SEQ ID NO: 372944 - DNA, 59 bp, Artificial
  Synthetic oligonucleotide
cggacgttcttgtcgctctggagaaccagcacacaattgatctgactgactcggaaatg

SEQ ID NO: 372945 - DNA, 58 bp, Artificial
  Synthetic oligonucleotide
cggacgtttgtgttatgggcagactacatcaccacctcctattcaattgtaccaatac

SEQ ID NO: 372946 - DNA, 55 bp, Artificial
  Synthetic oligonucleotide
cggactaactcaacaccactgaaagagttgtcattcatacgtcccacaaaaggtg

SEQ ID NO: 372947 - DNA, 55 bp, Artificial
  Synthetic oligonucleotide
cggactacggctgtcacacttcggctgggttcggaggtgcgttacccgtgacctc

SEQ ID NO: 372948 - DNA, 58 bp, Artificial
  Synthetic oligonucleotide
cggactaggaacagtagaccaggattataaagcctgttcaaaagacctagctattgca

SEQ ID NO: 372949 - DNA, 55 bp, Artificial
  Synthetic oligonucleotide
cggactagttccaacctgcttaacaatctcctaagactttagcctatgctttatt

SEQ ID NO: 372950 - DNA, 57 bp, Artificial
  Synthetic oligonucleotide
cggactatcactgaagaaactctttgttgaatacaaagatgttatagaaaacgctac

SEQ ID NO: 372951 - DNA, 59 bp, Artificial
  Synthetic oligonucleotide
cggactatgcgggaaaaactgtgtggttcgtggcaagtgtgaagatggggaatgagatc

SEQ ID NO: 372952 - DNA, 56 bp, Artificial
  Synthetic oligonucleotide
cggactcagataaccctaaacgcctcgctcaaaccttctggcttccaacacgtgtg

SEQ ID NO: 372953 - DNA, 58 bp, Artificial
  Synthetic oligonucleotide
cggactcaggcaatgaggacttgtgtgggaaccaagtgaatgaacccaatgtcctact

SEQ ID NO: 372954 - DNA, 60 bp, Artificial
  Synthetic oligonucleotide
cggactcaggcgtggagaactgcaatgatccgcttgaatttcacagtggaccagaagtcg

SEQ ID NO: 372955 - DNA, 60 bp, Artificial
  Synthetic oligonucleotide
cggactccaatcctctgatgacttcgccctcatagtgaatgcaccgaatcatgagggaat

SEQ ID NO: 372956 - DNA, 57 bp, Artificial
  Synthetic oligonucleotide
cggactccacacttaaaaggctattgacgtcagcccaggactctagaatcctaggag

SEQ ID NO: 372957 - DNA, 50 bp, Artificial
  Synthetic oligonucleotide
cggactccccgtttaataaatttcccgtaaagtatatatccgtcacggaa

SEQ ID NO: 372958 - DNA, 55 bp, Artificial
  Synthetic oligonucleotide
cggactcggcgggtccgtcccgcctcacgtccatgataataccacatacgtcggg

SEQ ID NO: 372959 - DNA, 60 bp, Artificial
  Synthetic oligonucleotide
cggactctaacacaacagtcctctgcggcatcaactgatgagctacataacatattattt

SEQ ID NO: 372960 - DNA, 53 bp, Artificial
  Synthetic oligonucleotide
cggactgaaggataaccggagtttgtttgcagcgggggagggacttagagaga

SEQ ID NO: 372961 - DNA, 59 bp, Artificial
  Synthetic oligonucleotide
cggactgaaggttgaagattcactcggagtcccgacgcctagcaagctagtgtttgcac

SEQ ID NO: 372962 - DNA, 55 bp, Artificial
  Synthetic oligonucleotide
cggactgatggctcaaatattacaactcaatggcctagtagaagaaatgacggtg

SEQ ID NO: 372963 - DNA, 55 bp, Artificial
  Synthetic oligonucleotide
cggactgcagataagggttagtgcgagacaatgccatatccaaggcaggatctgg

SEQ ID NO: 372964 - DNA, 52 bp, Artificial
  Synthetic oligonucleotide
cggactgcctccgaccttgaaaaccgaccccccacgcaccccatttcctctc

SEQ ID NO: 372965 - DNA, 60 bp, Artificial
  Synthetic oligonucleotide
cggactgcttcgctcacccatctaccccgatgaggtgcccataggcctgaattgtgagca

SEQ ID NO: 372966 - DNA, 55 bp, Artificial
  Synthetic oligonucleotide
cggactggaaagattatcgggcaatcagtcctacctatgctgatgattggttaga

SEQ ID NO: 372967 - DNA, 55 bp, Artificial
  Synthetic oligonucleotide
cggactgtcgcatcatcagggatgccgctcggaccttgtcttgcggccagtgtgt

SEQ ID NO: 372968 - DNA, 55 bp, Artificial
  Synthetic oligonucleotide
cggacttaaccgtcgtggcaacatatgggcatgagcgtgatatgacgcgcgcctt

SEQ ID NO: 372969 - DNA, 56 bp, Artificial
  Synthetic oligonucleotide
cggacttatgtaaagagcctgcaccgacaacaaaaccggaagacttgaaatcgaca

SEQ ID NO: 372970 - DNA, 53 bp, Artificial
  Synthetic oligonucleotide
cggactttacaggattagtccaattagaaagaccacgtcttaaagcctgggtc

SEQ ID NO: 372971 - DNA, 55 bp, Artificial
  Synthetic oligonucleotide
cggactttcacagcagccccaattgatacactattaggtggtaaggtgtgtgtag

SEQ ID NO: 372972 - DNA, 54 bp, Artificial
  Synthetic oligonucleotide
cggactttgcagcgaatttttcacgccaagcgacatggggcgcccaccgaagtt

SEQ ID NO: 372973 - DNA, 55 bp, Artificial
  Synthetic oligonucleotide
cggactttgctgttgtaaagagaaaccagcgcgcagcggaagagcggagacacgg

SEQ ID NO: 372974 - DNA, 53 bp, Artificial
  Synthetic oligonucleotide
cggacttttatacggactacttatgtaaagctgttcagtcttcatgcgattcc

SEQ ID NO: 372975 - DNA, 56 bp, Artificial
  Synthetic oligonucleotide
cggagaaaactcaaagtgtaacagtaaatccaggtccatttgcacaaaccagatac

SEQ ID NO: 372976 - DNA, 59 bp, Artificial
  Synthetic oligonucleotide
cggagaaacacacactgatagccagtggtgtagttccgagagataaggttttcacttca

SEQ ID NO: 372977 - DNA, 55 bp, Artificial
  Synthetic oligonucleotide
cggagaaaccacctccagaggaccccttcagcgaacagagaagcgcactgggacg

SEQ ID NO: 372978 - DNA, 54 bp, Artificial
  Synthetic oligonucleotide
cggagaaatctgacctttataaggcactacgaaacagggggccggtaaatgtga

SEQ ID NO: 372979 - DNA, 58 bp, Artificial
  Synthetic oligonucleotide
cggagaaccaatcacgattctcccactaggggcatggatcgacagtacgcaaggtagt

SEQ ID NO: 372980 - DNA, 56 bp, Artificial
  Synthetic oligonucleotide
cggagaaccacggcgtgagcatcaggctctttcaaagtcaggagctcgtaaaatag

SEQ ID NO: 372981 - DNA, 60 bp, Artificial
  Synthetic oligonucleotide
cggagaacgccctgttattgtatatggcatgtacccatgcttctaaccctgtgtatgcaa

SEQ ID NO: 372982 - DNA, 60 bp, Artificial
  Synthetic oligonucleotide
cggagaacgcgttgttattgtatatggcatgtactcatgcatctaaccccgtgtatgcga

SEQ ID NO: 372983 - DNA, 54 bp, Artificial
  Synthetic oligonucleotide
cggagaactattgcatgcagccctcggtgcgtattcgctgccatatggatacta

SEQ ID NO: 372984 - DNA, 55 bp, Artificial
  Synthetic oligonucleotide
cggagaactggacattagtggacacaagtgcagaaacgtataacaatgttccaga

SEQ ID NO: 372985 - DNA, 55 bp, Artificial
  Synthetic oligonucleotide
cggagaagacgcaaccgctggtctaacccatatgatgatctggcattccaatctg

SEQ ID NO: 372986 - DNA, 55 bp, Artificial
  Synthetic oligonucleotide
cggagaagactcagcttcgcaacccctatggcactacctgcacctgccgtttctg

SEQ ID NO: 372987 - DNA, 55 bp, Artificial
  Synthetic oligonucleotide
cggagaagagctattaatactatttactggttcgtgcctgatttcgtacgattag

SEQ ID NO: 372988 - DNA, 58 bp, Artificial
  Synthetic oligonucleotide
cggagaagcccaaggctccggagccttagagaatatcctgtccaggttactggacaga

SEQ ID NO: 372989 - DNA, 50 bp, Artificial
  Synthetic oligonucleotide
cggagaagggccaatatcagtcaccctcataaatttgtgtgcatgagcac

SEQ ID NO: 372990 - DNA, 58 bp, Artificial
  Synthetic oligonucleotide
cggagaagggtgatcatatgtgtcgtttcaaaggcactcgacgttttgttggtagata

SEQ ID NO: 372991 - DNA, 52 bp, Artificial
  Synthetic oligonucleotide
cggagaagtaggtcccgagaacggggaaccggagccatttctaacaggtctg

SEQ ID NO: 372992 - DNA, 60 bp, Artificial
  Synthetic oligonucleotide
cggagaatgagctgtggatgtatgaccaatttcgtaaaaatattgctgcgcctaacgcgg

SEQ ID NO: 372993 - DNA, 55 bp, Artificial
  Synthetic oligonucleotide
cggagaattcctgcaaccacgaagactgatttcactgcgtcccttgtgacgggcc

SEQ ID NO: 372994 - DNA, 59 bp, Artificial
  Synthetic oligonucleotide
cggagacaacgacaaagaactcctccaagcagtcggatacatcaagatcttgtaccaaa

SEQ ID NO: 372995 - DNA, 60 bp, Artificial
  Synthetic oligonucleotide
cggagacaacgacgagcggctcctctcagcagtaaggatcatcaaaatcctgtaccaaag

SEQ ID NO: 372996 - DNA, 60 bp, Artificial
  Synthetic oligonucleotide
cggagacaagacacctccagaggaccccttcagcgaacagaagagtctatccccagatga

SEQ ID NO: 372997 - DNA, 55 bp, Artificial
  Synthetic oligonucleotide
cggagacaagcggaagagtctgtagatgacctcagaagagaatacgggcctccca

SEQ ID NO: 372998 - DNA, 53 bp, Artificial
  Synthetic oligonucleotide
cggagacaatcagtcaatagatgttagtaaaccagtaaaattgtctgaaggta

SEQ ID NO: 372999 - DNA, 57 bp, Artificial
  Synthetic oligonucleotide
cggagacacggagcaaatttcttttaagtcgcgagatgcaactttccgcctgaaata

SEQ ID NO: 373000 - DNA, 60 bp, Artificial
  Synthetic oligonucleotide
cggagacagcgacacagaactcctaaaagcagtccgctacatcaagatcctataccaaag

SEQ ID NO: 373001 - DNA, 58 bp, Artificial
  Synthetic oligonucleotide
cggagacaggttccatctcttccatgccccccctcgagggggagcttggagatccaga

SEQ ID NO: 373002 - DNA, 55 bp, Artificial
  Synthetic oligonucleotide
cggagacagtcatcaaccaagatcctgataaactactaactgttatagcctccga

SEQ ID NO: 373003 - DNA, 59 bp, Artificial
  Synthetic oligonucleotide
cggagacatccgccagatcatatgccccgatgtgatttactctcgcatcggcgcagctc

SEQ ID NO: 373004 - DNA, 55 bp, Artificial
  Synthetic oligonucleotide
cggagacatgccgtttcttgcaccatacatccctattacatggtggatcaagtgg

SEQ ID NO: 373005 - DNA, 58 bp, Artificial
  Synthetic oligonucleotide
cggagaccacagttatagctacggctgatgctaggggccttattcaatcttcccgggc

SEQ ID NO: 373006 - DNA, 60 bp, Artificial
  Synthetic oligonucleotide
cggagaccagagcaccgacaagtcatatctgccacaggtgactgtcaagtcctcagcccg

SEQ ID NO: 373007 - DNA, 58 bp, Artificial
  Synthetic oligonucleotide
cggagaccaggttgttagccacgatacctctagctttactggacgactgtgccgcgga

SEQ ID NO: 373008 - DNA, 60 bp, Artificial
  Synthetic oligonucleotide
cggagacctgagcacagacaagtcatacctgccacacgtgactataaagtcctcagccgg

SEQ ID NO: 373009 - DNA, 60 bp, Artificial
  Synthetic oligonucleotide
cggagacgaaggtctcaatcgccgcgtcgcagaagatctcaatctccagcttccaaatgt

SEQ ID NO: 373010 - DNA, 59 bp, Artificial
  Synthetic oligonucleotide
cggagacgatgaacggaggtcttaacggcttcaatttgcgacacgcgcggcagtatgaa

SEQ ID NO: 373011 - DNA, 55 bp, Artificial
  Synthetic oligonucleotide
cggagacgccttcgtcagtgacgtcgagccgctaccctctggcatacctggtgaa

SEQ ID NO: 373012 - DNA, 55 bp, Artificial
  Synthetic oligonucleotide
cggagacggggctctcgtcggatctgccttaacgaacccgttcgtactcgtgcga

SEQ ID NO: 373013 - DNA, 55 bp, Artificial
  Synthetic oligonucleotide
cggagacggtagaaactgcgagtatcaagaaaatctgcacccaagggaaaaggcc

SEQ ID NO: 373014 - DNA, 60 bp, Artificial
  Synthetic oligonucleotide
cggagacgtgcgaatatgaaattcaggagttgcgttgctactactgataatgttcgcacc

SEQ ID NO: 373015 - DNA, 54 bp, Artificial
  Synthetic oligonucleotide
cggagacgttagtggagaattttcttggtagggcagccctagtgtcaaagaaaa

SEQ ID NO: 373016 - DNA, 55 bp, Artificial
  Synthetic oligonucleotide
cggagactaccactccgtgctccggttcctggctaagggacatctgggactggat

SEQ ID NO: 373017 - DNA, 55 bp, Artificial
  Synthetic oligonucleotide
cggagactacctactcgtcagaactccgtttcgctggggtggtatgaccaaccag

SEQ ID NO: 373018 - DNA, 55 bp, Artificial
  Synthetic oligonucleotide
cggagactgcgggcggagctgctagaggtcggtttcctaaaccagtgctgccttg

SEQ ID NO: 373019 - DNA, 55 bp, Artificial
  Synthetic oligonucleotide
cggagacttgtccatcagtgcagtggacggatgtagtggaagaaaatacgtggac

SEQ ID NO: 373020 - DNA, 55 bp, Artificial
  Synthetic oligonucleotide
cggagagaagtctttcagaccaagctgcttacggtaggcatcccaccaacgggaa

SEQ ID NO: 373021 - DNA, 60 bp, Artificial
  Synthetic oligonucleotide
cggagagagaagtgctgatgtggaagtttgacagcagcttagcattccatcacagggccc

SEQ ID NO: 373022 - DNA, 55 bp, Artificial
  Synthetic oligonucleotide
cggagagagtggtggtaagcattgaccgattcttgagggttcgggatcaacgggg

SEQ ID NO: 373023 - DNA, 55 bp, Artificial
  Synthetic oligonucleotide
cggagagatcatcagcatggatctgactgaggaccagtataccgctgcaacttcg

SEQ ID NO: 373024 - DNA, 58 bp, Artificial
  Synthetic oligonucleotide
cggagagattaatgattcaactacagtggaaccagttttagatggtccttatcaacca

SEQ ID NO: 373025 - DNA, 53 bp, Artificial
  Synthetic oligonucleotide
cggagagattcccttttatggcaaggctatcccccttgaggctatcaaggggg

SEQ ID NO: 373026 - DNA, 55 bp, Artificial
  Synthetic oligonucleotide
cggagagcagtccacgcgacgtggtgatcttgctacccttgcacagagggtgagc

SEQ ID NO: 373027 - DNA, 56 bp, Artificial
  Synthetic oligonucleotide
cggagagcggattcagcgtttaggacgagttggcagaacgaaacctggtgcggcct

SEQ ID NO: 373028 - DNA, 55 bp, Artificial
  Synthetic oligonucleotide
cggagaggatgctactgctggtcttactcacatgatgatttggcactccaatctc

SEQ ID NO: 373029 - DNA, 57 bp, Artificial
  Synthetic oligonucleotide
cggagaggccataccccggttggagtgctcagggtgaccgtgtcacgcgtagctacc

SEQ ID NO: 373030 - DNA, 59 bp, Artificial
  Synthetic oligonucleotide
cggagaggggcctactttcgatgccaacacagagtgttcaattgcctaccaccacacca

SEQ ID NO: 373031 - DNA, 55 bp, Artificial
  Synthetic oligonucleotide
cggagaggtaccagttccactttaatgactgaagtgactggaggcaggactggcc

SEQ ID NO: 373032 - DNA, 55 bp, Artificial
  Synthetic oligonucleotide
cggagaggtagaggtaccatggcttgagaagggtaggacatatttacaaacaacc

SEQ ID NO: 373033 - DNA, 55 bp, Artificial
  Synthetic oligonucleotide
cggagagtcgacataaacccgggccacgcagacctcagtgctaaagaggcacagg

SEQ ID NO: 373034 - DNA, 55 bp, Artificial
  Synthetic oligonucleotide
cggagagtcgaggagcccagaggcagtctataatagaatcatcatgaacaagggg

SEQ ID NO: 373035 - DNA, 55 bp, Artificial
  Synthetic oligonucleotide
cggagagtgtcaatgtgttgcgcatgccccacgtgcttattgatgcccgcggcgg

SEQ ID NO: 373036 - DNA, 60 bp, Artificial
  Synthetic oligonucleotide
cggagagtgtggcttggctattgcaggtggcgtaccagtgttacaatcatattattcttg

SEQ ID NO: 373037 - DNA, 55 bp, Artificial
  Synthetic oligonucleotide
cggagataacaccaagtggggcccaatacactgctgttccttcttttctggtatg

SEQ ID NO: 373038 - DNA, 60 bp, Artificial
  Synthetic oligonucleotide
cggagatacgcaatacattgcgtatcgtagtacatgttatttatacggtatttctgcatc

SEQ ID NO: 373039 - DNA, 59 bp, Artificial
  Synthetic oligonucleotide
cggagatacgcaatactttgcgtattgtagtacacgttcctcatacggtgtatttgtga

SEQ ID NO: 373040 - DNA, 60 bp, Artificial
  Synthetic oligonucleotide
cggagatagggactagattcgacgatgagccgactgatgagaagttagtatcgatgcttg

SEQ ID NO: 373041 - DNA, 57 bp, Artificial
  Synthetic oligonucleotide
cggagatagggttggcattctatatcgcccccgtgggtattgtctttcgcggcgagc

SEQ ID NO: 373042 - DNA, 55 bp, Artificial
  Synthetic oligonucleotide
cggagatatcctatgcgggctgcccgtctctgcacgattaggccgtgaggtgttg

SEQ ID NO: 373043 - DNA, 58 bp, Artificial
  Synthetic oligonucleotide
cggagatattcatccgtgcctgtgtatacacctaggtttactaggtataatttcaaca

SEQ ID NO: 373044 - DNA, 51 bp, Artificial
  Synthetic oligonucleotide
cggagatattctacgtagctacgcattcagaaaggcaataatattacacgg

SEQ ID NO: 373045 - DNA, 60 bp, Artificial
  Synthetic oligonucleotide
cggagatcatcgctaccaatagtgtgactccttacctgctatccaaattcagatctcccc

SEQ ID NO: 373046 - DNA, 55 bp, Artificial
  Synthetic oligonucleotide
cggagatgattggagttttgcgccaacaggaagaggcaaaggaggttgatgtttc

SEQ ID NO: 373047 - DNA, 60 bp, Artificial
  Synthetic oligonucleotide
cggagatgctggggactgatcctgatgacaaatggggtccgttggaatggatgtactgtg

SEQ ID NO: 373048 - DNA, 57 bp, Artificial
  Synthetic oligonucleotide
cggagatgtggcttactacgatggctcttagggctaagttaccatatctaccccaag

SEQ ID NO: 373049 - DNA, 56 bp, Artificial
  Synthetic oligonucleotide
cggagattaagtagggaggacgtcatcacccttataaacgacgtaatggagctcac

SEQ ID NO: 373050 - DNA, 55 bp, Artificial
  Synthetic oligonucleotide
cggagattctgaagaaccagtaacgtatgatattgatgactacgattgcacatct

SEQ ID NO: 373051 - DNA, 55 bp, Artificial
  Synthetic oligonucleotide
cggagattgtatatcaagttcacattgtgcgcttgggaatgttgttggtctcgct

SEQ ID NO: 373052 - DNA, 55 bp, Artificial
  Synthetic oligonucleotide
cggagatttgctcaggccctgcctgtttgggcacggccggactacaaccccccgc

SEQ ID NO: 373053 - DNA, 52 bp, Artificial
  Synthetic oligonucleotide
cggagatttgctccggccctgcccgtttgggcacggccggactacaaccccc

SEQ ID NO: 373054 - DNA, 60 bp, Artificial
  Synthetic oligonucleotide
cggagcaaagattttatataacgataaggcgcatattatatataacggaatatatcatcc

SEQ ID NO: 373055 - DNA, 60 bp, Artificial
  Synthetic oligonucleotide
cggagcaaccacatggtatttcaatccagtgattctcagaccaaataacgttgaagtgga

SEQ ID NO: 373056 - DNA, 55 bp, Artificial
  Synthetic oligonucleotide
cggagcaatacgttggagatgatacgttgttttactgtaaattacacacaactga

SEQ ID NO: 373057 - DNA, 55 bp, Artificial
  Synthetic oligonucleotide
cggagcaatcacaagtagcactgcaaataatgctgattgtgtctggctagaagca

SEQ ID NO: 373058 - DNA, 60 bp, Artificial
  Synthetic oligonucleotide
cggagcaatcactttcgggccgtctctatcagagagcccagcattcagctctggaatact

SEQ ID NO: 373059 - DNA, 55 bp, Artificial
  Synthetic oligonucleotide
cggagcacattcagattgtaggcaacggttcgattgcaaggagcatcgaaaagcc

SEQ ID NO: 373060 - DNA, 55 bp, Artificial
  Synthetic oligonucleotide
cggagcaccgattggaggcgatcacagcagcaatgatagaatcatggggttatgg

SEQ ID NO: 373061 - DNA, 55 bp, Artificial
  Synthetic oligonucleotide
cggagcaccttcgtaggtggttcgaatgttacctgcatcatacaattctgttgcg

SEQ ID NO: 373062 - DNA, 55 bp, Artificial
  Synthetic oligonucleotide
cggagcagtactgtacgtatgcggaagactacgaccagtggggcctcctacactc

SEQ ID NO: 373063 - DNA, 60 bp, Artificial
  Synthetic oligonucleotide
cggagcagtagcatcaggtgaaaaacagactaaagctgcaaactcaatagccaatttagc

SEQ ID NO: 373064 - DNA, 55 bp, Artificial
  Synthetic oligonucleotide
cggagcatactgcttctcgtgctgttgacactacattccccataccaccgccgaa

SEQ ID NO: 373065 - DNA, 55 bp, Artificial
  Synthetic oligonucleotide
cggagcatcagtaattggacatggcaaaccgcactgtttcatacgagacacagtc

SEQ ID NO: 373066 - DNA, 55 bp, Artificial
  Synthetic oligonucleotide
cggagcatgagatggctaactcacaagagtaattcctacccttttcaggacgccc

SEQ ID NO: 373067 - DNA, 53 bp, Artificial
  Synthetic oligonucleotide
cggagcattaattcagctcgattatagtgccttagagtctcgtattctagcat

SEQ ID NO: 373068 - DNA, 57 bp, Artificial
  Synthetic oligonucleotide
cggagccaaaggtgccaactcctataaatttactaggttcggcacgctcaccattca

SEQ ID NO: 373069 - DNA, 56 bp, Artificial
  Synthetic oligonucleotide
cggagccagtacgcagcctccacgaatacaagtcacggacccgaaactcctcggtc

SEQ ID NO: 373070 - DNA, 60 bp, Artificial
  Synthetic oligonucleotide
cggagccagtgtacctggaagttcttccaggagcagtagcacctgggatgatctctactg

SEQ ID NO: 373071 - DNA, 60 bp, Artificial
  Synthetic oligonucleotide
cggagccatccgcaaccccctcgctctgttcgctaagctaatgatcgctatagacgacca

SEQ ID NO: 373072 - DNA, 55 bp, Artificial
  Synthetic oligonucleotide
cggagccatgaccagcaaactgtcgccattcactgagaccgcgtcactccactgc

SEQ ID NO: 373073 - DNA, 55 bp, Artificial
  Synthetic oligonucleotide
cggagccatgtggatctgatggtaggggctgctactgtttgttcagccctctaca

SEQ ID NO: 373074 - DNA, 54 bp, Artificial
  Synthetic oligonucleotide
cggagcccacgaaaattcaaacagagcctacggcgggtctaccattaactatac

SEQ ID NO: 373075 - DNA, 59 bp, Artificial
  Synthetic oligonucleotide
cggagcccagatgtcccaaaggggtgtgaaggtccatgtaaggtccagtcatatgaaca

SEQ ID NO: 373076 - DNA, 55 bp, Artificial
  Synthetic oligonucleotide
cggagcccctcctaacacttcacgaattgggcgagtttgaaacttctacgctcgc

SEQ ID NO: 373077 - DNA, 54 bp, Artificial
  Synthetic oligonucleotide
cggagccggatttggtcgaagcgtggcgacccgatgtgaaccccggatattcca

SEQ ID NO: 373078 - DNA, 56 bp, Artificial
  Synthetic oligonucleotide
cggagccggtggtctcaccgcagaggtcggtccttccggtctcaccgcacgtacta

SEQ ID NO: 373079 - DNA, 55 bp, Artificial
  Synthetic oligonucleotide
cggagccggttcaataaggacaacaacatggacaacacaccaggtacagacccat

SEQ ID NO: 373080 - DNA, 60 bp, Artificial
  Synthetic oligonucleotide
cggagcctcgcagcataatccaatgttgtagaggtcgtaacgagtaattctgggatggga

SEQ ID NO: 373081 - DNA, 60 bp, Artificial
  Synthetic oligonucleotide
cggagcctgcatctgcgagatccccactgacgtctcgtgcgagggcttgggggcctgggt

SEQ ID NO: 373082 - DNA, 55 bp, Artificial
  Synthetic oligonucleotide
cggagcctgggttctatgttggaaggtccgcgagatttgtgccccagtaccaggg

SEQ ID NO: 373083 - DNA, 60 bp, Artificial
  Synthetic oligonucleotide
cggagccttgtgacataatccaatgtcattaaggtcgtaatgagcaattctgggacggga

SEQ ID NO: 373084 - DNA, 60 bp, Artificial
  Synthetic oligonucleotide
cggagcgaacattctacatccgaaggctcatctgttaaagcaggcttacgcagttcaaaa

SEQ ID NO: 373085 - DNA, 55 bp, Artificial
  Synthetic oligonucleotide
cggagcgacaagtgcctgcagaagatcaggttcttctttctatgcagagatgaag

SEQ ID NO: 373086 - DNA, 55 bp, Artificial
  Synthetic oligonucleotide
cggagcgactacatggtacttcaaaccagtaattcttagaccaaacaacgttgaa

SEQ ID NO: 373087 - DNA, 55 bp, Artificial
  Synthetic oligonucleotide
cggagcgattcacgagaatgttcgtgggctcgcgcactacatttcttcagccacg

SEQ ID NO: 373088 - DNA, 55 bp, Artificial
  Synthetic oligonucleotide
cggagcgcatagaaactattctatgtggcgccaatgatttaaacgctaaagctcc

SEQ ID NO: 373089 - DNA, 55 bp, Artificial
  Synthetic oligonucleotide
cggagcgccagtccttagagagactgagccgcccgggtacccgtgtgtccaataa

SEQ ID NO: 373090 - DNA, 51 bp, Artificial
  Synthetic oligonucleotide
cggagcgccgggagcgcagtgggaagggttcattacggggactgataacag

SEQ ID NO: 373091 - DNA, 60 bp, Artificial
  Synthetic oligonucleotide
cggagcgcgcaatttttaaactgtcctataacctctcctatatgaatagcacaagtgaca

SEQ ID NO: 373092 - DNA, 55 bp, Artificial
  Synthetic oligonucleotide
cggagcggacacacaaggatcaaattggatacagaaggagacattggtcactttc

SEQ ID NO: 373093 - DNA, 55 bp, Artificial
  Synthetic oligonucleotide
cggagcggaggtatggacggtgacggattcgtttctttggcctggaaggatggtg

SEQ ID NO: 373094 - DNA, 55 bp, Artificial
  Synthetic oligonucleotide
cggagcgtacatgtccaaagcccatgggatcgatcctaacatcaggaccggggtg

SEQ ID NO: 373095 - DNA, 55 bp, Artificial
  Synthetic oligonucleotide
cggagcgtacgttctttctagcatcacgtcaggcccactcaaaggtgagatcgcg

SEQ ID NO: 373096 - DNA, 55 bp, Artificial
  Synthetic oligonucleotide
cggagctaacgcccctctacgatactacccgactgtacctggtggacaacaagtc

SEQ ID NO: 373097 - DNA, 60 bp, Artificial
  Synthetic oligonucleotide
cggagctaaggaggtagcacttagctactcaaccggtgcacttgccagctgcatgggtct

SEQ ID NO: 373098 - DNA, 55 bp, Artificial
  Synthetic oligonucleotide
cggagctagtcatggcctacaccattgtcgactacggggagcagactccccagac

SEQ ID NO: 373099 - DNA, 55 bp, Artificial
  Synthetic oligonucleotide
cggagctatgtgcccgtgcacacacccctgtatgccttctgtgttattatgtggg

SEQ ID NO: 373100 - DNA, 57 bp, Artificial
  Synthetic oligonucleotide
cggagctcagtaactggttagtgtcgtggcacagcgctaacctaaacggcggcaagg

SEQ ID NO: 373101 - DNA, 54 bp, Artificial
  Synthetic oligonucleotide
cggagctcgaaagcgatccactaaaaggccgcgtgtatcgtcgtgagcttgtca

SEQ ID NO: 373102 - DNA, 59 bp, Artificial
  Synthetic oligonucleotide
cggagctcgattgctaatcttattatgaacatagcgacgtgtttacctacgggagagta

SEQ ID NO: 373103 - DNA, 54 bp, Artificial
  Synthetic oligonucleotide
cggagctgacctaatttacatacaaggacaagataataccagactaggtcactt

SEQ ID NO: 373104 - DNA, 58 bp, Artificial
  Synthetic oligonucleotide
cggagctgatctgccattcaccattgacaagtagtttatccaaaaaactccttgtttc

SEQ ID NO: 373105 - DNA, 60 bp, Artificial
  Synthetic oligonucleotide
cggagctgcctatgaagacctgagagttttgtctgcattaacaggcacagaattcaagcc

SEQ ID NO: 373106 - DNA, 55 bp, Artificial
  Synthetic oligonucleotide
cggagcttccccaatcactataatgactagtgggtacgcattacactattatgcc

SEQ ID NO: 373107 - DNA, 55 bp, Artificial
  Synthetic oligonucleotide
cggagcttcggtggaatggacaagatgggccgctgaaaatccgttcccatttcca

SEQ ID NO: 373108 - DNA, 60 bp, Artificial
  Synthetic oligonucleotide
cggagcttgatttagctccctgtatgtttggatggtaatgtgctgacctggttggggaca

SEQ ID NO: 373109 - DNA, 60 bp, Artificial
  Synthetic oligonucleotide
cggagcttgcgcgttggaagcatgctggcgggcgtgggatacgcgggttgacgttgcgcc

SEQ ID NO: 373110 - DNA, 55 bp, Artificial
  Synthetic oligonucleotide
cggaggaaatgacattagcattaaatcgagaatataagcctcgtagacggcgagc

SEQ ID NO: 373111 - DNA, 52 bp, Artificial
  Synthetic oligonucleotide
cggaggaaatttgtatgccacggaagaaaaaagaatgtttgagcttgttaag

SEQ ID NO: 373112 - DNA, 55 bp, Artificial
  Synthetic oligonucleotide
cggaggaaccatttgatggaaaagccacagttcaatatttggctaacggtacaat

SEQ ID NO: 373113 - DNA, 54 bp, Artificial
  Synthetic oligonucleotide
cggaggaactgtctttactgtacaatcgagaaacaaagcccgaagaggttgacg

SEQ ID NO: 373114 - DNA, 55 bp, Artificial
  Synthetic oligonucleotide
cggaggaaggatattgaagacgtgcaaggatacgtgcgctcgcaagtgcaaacga

SEQ ID NO: 373115 - DNA, 58 bp, Artificial
  Synthetic oligonucleotide
cggaggaccaaacgggcatctgccaccgacctgtacaggacctgtaaggcctctggca

SEQ ID NO: 373116 - DNA, 58 bp, Artificial
  Synthetic oligonucleotide
cggaggaccagatttagagtttgcaggaccgacctgccccagctatgtaccatacgcc

SEQ ID NO: 373117 - DNA, 55 bp, Artificial
  Synthetic oligonucleotide
cggaggacttgtgggtcacagtctactatggggtgcctgtatggagagaagcaaa

SEQ ID NO: 373118 - DNA, 55 bp, Artificial
  Synthetic oligonucleotide
cggaggagaaaagctccggtcatacaatggaaccctcctagccggaggacctgcc

SEQ ID NO: 373119 - DNA, 55 bp, Artificial
  Synthetic oligonucleotide
cggaggagacctagaaggaatcacactatccaaacccctcacaaaccagaccctg

SEQ ID NO: 373120 - DNA, 57 bp, Artificial
  Synthetic oligonucleotide
cggaggagatactacaagcgttaccgttcgattatcagacgagtgagaaaggtgggc

SEQ ID NO: 373121 - DNA, 55 bp, Artificial
  Synthetic oligonucleotide
cggaggagatagaatacatagacagacctaggtcgtccagagggtacgacggtac

SEQ ID NO: 373122 - DNA, 58 bp, Artificial
  Synthetic oligonucleotide
cggaggagatgtccttagtaatcgagaaattagcgtacgtagtaccagcaccgccaga

SEQ ID NO: 373123 - DNA, 51 bp, Artificial
  Synthetic oligonucleotide
cggaggagcggcaatattccaccgagatttgcaccgtggcggctccggacc

SEQ ID NO: 373124 - DNA, 58 bp, Artificial
  Synthetic oligonucleotide
cggaggagctgatctttggtcctggtgagaggccccctgtcgcttctgccgacggttc

SEQ ID NO: 373125 - DNA, 56 bp, Artificial
  Synthetic oligonucleotide
cggaggaggaggactgtcgctccgttccggagacagggaggattgtgacgtttcgc

SEQ ID NO: 373126 - DNA, 55 bp, Artificial
  Synthetic oligonucleotide
cggaggatatgcgcaatcgattcaaacagcagttagttattaacttgcgcaaaac

SEQ ID NO: 373127 - DNA, 54 bp, Artificial
  Synthetic oligonucleotide
cggaggatcggaactttttcgaatgcggcaggaaacgcacaagatacaccacaa

SEQ ID NO: 373128 - DNA, 58 bp, Artificial
  Synthetic oligonucleotide
cggaggatgcgtaggcttcagaccaggagggatcccctggtatctagggtggactaga

SEQ ID NO: 373129 - DNA, 60 bp, Artificial
  Synthetic oligonucleotide
cggaggatggaatgaacttttaacgaagctaccagatgggtggattcactgtgatgccga

SEQ ID NO: 373130 - DNA, 60 bp, Artificial
  Synthetic oligonucleotide
cggaggattcgcagtgttagcgctggacgtgcgctgtacattcctccatacgaaatgctc

SEQ ID NO: 373131 - DNA, 54 bp, Artificial
  Synthetic oligonucleotide
cggaggatttagtgaatataataactaacttcaaacgccctcagggctgggtaa

SEQ ID NO: 373132 - DNA, 55 bp, Artificial
  Synthetic oligonucleotide
cggaggatttgctgcacctcaattctctctttggagaagaccaatagtcacggcc

SEQ ID NO: 373133 - DNA, 55 bp, Artificial
  Synthetic oligonucleotide
cggaggcagctctggagaaccttatagtactcaatgcagcgtctctggccgggac

SEQ ID NO: 373134 - DNA, 60 bp, Artificial
  Synthetic oligonucleotide
cggaggcatatatagagatgagaaatgcagaagcaccatacatgccgaggtatggtttgc

SEQ ID NO: 373135 - DNA, 55 bp, Artificial
  Synthetic oligonucleotide
cggaggcatcagcgatctactaaatcgagtagcagcaagattaaagcgtcagtac

SEQ ID NO: 373136 - DNA, 60 bp, Artificial
  Synthetic oligonucleotide
cggaggcatggctcataggttgagttgcaagactgacatgttgtgcatcttgctcgcaat

SEQ ID NO: 373137 - DNA, 60 bp, Artificial
  Synthetic oligonucleotide
cggaggccactacgtgcagatggccatcattaaggtgggggcgcttactggcacttatgt

SEQ ID NO: 373138 - DNA, 60 bp, Artificial
  Synthetic oligonucleotide
cggaggccatggaggttgccagtcaggctaggcagatggtgcatgcgatgagaacaattg

SEQ ID NO: 373139 - DNA, 55 bp, Artificial
  Synthetic oligonucleotide
cggaggcctttctgcgtgaagacatagcgcaagttacggccctacttaacactca

SEQ ID NO: 373140 - DNA, 52 bp, Artificial
  Synthetic oligonucleotide
cggaggcgggacggggtttagtgaatatcccgtttgatgtccttcaaggcgg

SEQ ID NO: 373141 - DNA, 55 bp, Artificial
  Synthetic oligonucleotide
cggaggctacccacgtattacagattcgagtcgtctcaatcgcaggagcgtttct

SEQ ID NO: 373142 - DNA, 60 bp, Artificial
  Synthetic oligonucleotide
cggaggctagaaggagagagattgggtgcgagagcgtcaatattacgcggcgacaaatta

SEQ ID NO: 373143 - DNA, 59 bp, Artificial
  Synthetic oligonucleotide
cggaggcttacttggctggaataggggctacgctgttgagcgcgagggatagcgggcac

SEQ ID NO: 373144 - DNA, 55 bp, Artificial
  Synthetic oligonucleotide
cggagggaacaccaatcaacagagagtatctgcaggacaaatcagtgtgcaaccc

SEQ ID NO: 373145 - DNA, 53 bp, Artificial
  Synthetic oligonucleotide
cggagggacccacggttccggagccttttgaaatattctggttgcgttagcaa

SEQ ID NO: 373146 - DNA, 60 bp, Artificial
  Synthetic oligonucleotide
cggagggactcctagatcttaagcaatggccagactgagagaggtttttagctcattcac

SEQ ID NO: 373147 - DNA, 60 bp, Artificial
  Synthetic oligonucleotide
cggagggagcatctctcctttctgcgacacttgagacgccaagcgttcgagcttttagct

SEQ ID NO: 373148 - DNA, 52 bp, Artificial
  Synthetic oligonucleotide
cggagggcccattcggcaaattcgtgggtaacgcccatgtgcccccggggcc

SEQ ID NO: 373149 - DNA, 55 bp, Artificial
  Synthetic oligonucleotide
cggagggcgcaaattcgcatgaccgacgcacaggccatgattgatcagattgagg

SEQ ID NO: 373150 - DNA, 55 bp, Artificial
  Synthetic oligonucleotide
cggagggcgctgctcaaacagctcgctccccttgtggaatcaagcgacgtgcgtt

SEQ ID NO: 373151 - DNA, 55 bp, Artificial
  Synthetic oligonucleotide
cggaggggcgattgcgcgaaacgatgatgcccgttctgttggaccgagcgacgtt

SEQ ID NO: 373152 - DNA, 59 bp, Artificial
  Synthetic oligonucleotide
cggagggtgattgttatcgacgtaagagtgatgctcccaagtcggtacaagactctcta

SEQ ID NO: 373153 - DNA, 56 bp, Artificial
  Synthetic oligonucleotide
cggagggtggtgattagaggttggtggccaatattacagtgtctaaaaggacagga

SEQ ID NO: 373154 - DNA, 56 bp, Artificial
  Synthetic oligonucleotide
cggagggtgtaaggtcgtccagattcggaaggtcagaaaacacttgtgcactccca

SEQ ID NO: 373155 - DNA, 51 bp, Artificial
  Synthetic oligonucleotide
cggaggtaacctcggaaaggccgtattccaggccaaaaaacgtatcctaga

SEQ ID NO: 373156 - DNA, 53 bp, Artificial
  Synthetic oligonucleotide
cggaggtaatcttggaaaggctgtatttcaggccaaaaaacgtatcttagaac

SEQ ID NO: 373157 - DNA, 51 bp, Artificial
  Synthetic oligonucleotide
cggaggtcaccttccttaagcgggcttttgttcctgacggggccttttaca

SEQ ID NO: 373158 - DNA, 55 bp, Artificial
  Synthetic oligonucleotide
cggaggtcattacgtgcaaatggctatcatcaagttaggggcgcttaccggcacc

SEQ ID NO: 373159 - DNA, 51 bp, Artificial
  Synthetic oligonucleotide
cggaggtccctcgggtgggttcacatccccaacccgcgggccggctactct

SEQ ID NO: 373160 - DNA, 55 bp, Artificial
  Synthetic oligonucleotide
cggaggtcttaacggcctcaatttgcgacacgcgcggcggtgtgtacccctggga

SEQ ID NO: 373161 - DNA, 59 bp, Artificial
  Synthetic oligonucleotide
cggaggtgccccatatcaactgggctttggaccattcgtgttcaaaggctcacattctg

SEQ ID NO: 373162 - DNA, 55 bp, Artificial
  Synthetic oligonucleotide
cggaggtggatttacaaactcaagatttgtatatacctgagatgtctgaccatta

SEQ ID NO: 373163 - DNA, 55 bp, Artificial
  Synthetic oligonucleotide
cggaggtggccgcgtcatgtggaggtgctgttcttatcgggttaatggcgctgac

SEQ ID NO: 373164 - DNA, 59 bp, Artificial
  Synthetic oligonucleotide
cggaggtgtcccactgcagggctactgaatacataatgaagggggtgtacataaataca

SEQ ID NO: 373165 - DNA, 55 bp, Artificial
  Synthetic oligonucleotide
cggaggttactaaacaaatggttcaggatgtttcaaatgatgtaagagatacata

SEQ ID NO: 373166 - DNA, 55 bp, Artificial
  Synthetic oligonucleotide
cggaggttcgaggccgtccatccatgaaacactacaatgctgctgtgagcccgca

SEQ ID NO: 373167 - DNA, 54 bp, Artificial
  Synthetic oligonucleotide
cggaggttctgatgcctctgtactacggacgttccgggctgaacaaggtcgtgt

SEQ ID NO: 373168 - DNA, 54 bp, Artificial
  Synthetic oligonucleotide
cggaggttgctttctccgtgaaggtaccgaagttaaatattgacttcgaagtga

SEQ ID NO: 373169 - DNA, 57 bp, Artificial
  Synthetic oligonucleotide
cggaggttggccgcgcatgaggtacagcgagaatgtcggccgcgtgtacgggtcggc

SEQ ID NO: 373170 - DNA, 50 bp, Artificial
  Synthetic oligonucleotide
cggaggttgtgagaggaaaaggtgctttaaacccaataactttaccgtta

SEQ ID NO: 373171 - DNA, 55 bp, Artificial
  Synthetic oligonucleotide
cggagtaaaaggatttagtttcaggtatggagatggggtctggatagggaggaca

SEQ ID NO: 373172 - DNA, 59 bp, Artificial
  Synthetic oligonucleotide
cggagtaacacttgctccacagacaatggttccaatcaaagttgagtacggtgcgcgta

SEQ ID NO: 373173 - DNA, 50 bp, Artificial
  Synthetic oligonucleotide
cggagtaaggattgcttcgttagtgcaaggggacaatcagaccatagccg

SEQ ID NO: 373174 - DNA, 55 bp, Artificial
  Synthetic oligonucleotide
cggagtacgattaccttttgtaacttcagccactacaagttcagttgctaacgct

SEQ ID NO: 373175 - DNA, 55 bp, Artificial
  Synthetic oligonucleotide
cggagtacgcatcgacgcatgcaaagatgtaaaggtggcctttcatataaaggac

SEQ ID NO: 373176 - DNA, 55 bp, Artificial
  Synthetic oligonucleotide
cggagtagagcggttgggtgagaaagacgaatgttgcattctttaaagcccaggc

SEQ ID NO: 373177 - DNA, 56 bp, Artificial
  Synthetic oligonucleotide
cggagtagttaacattccaacgacgggtcctagcacgagcagtttccatccgacgc

SEQ ID NO: 373178 - DNA, 55 bp, Artificial
  Synthetic oligonucleotide
cggagtagttcagctttgtgacaacaagatccggtgaccatcaccatcttcggtc

SEQ ID NO: 373179 - DNA, 55 bp, Artificial
  Synthetic oligonucleotide
cggagtatataatgaagggagtatacatcaacactgctctactcaatgcatcctg

SEQ ID NO: 373180 - DNA, 59 bp, Artificial
  Synthetic oligonucleotide
cggagtatgatgtccaagtccgttgggaagcacctgggcggattattaccatgaatctc

SEQ ID NO: 373181 - DNA, 56 bp, Artificial
  Synthetic oligonucleotide
cggagtattacaagaactgctgacacaagaagggactttctactgggactttccac

SEQ ID NO: 373182 - DNA, 59 bp, Artificial
  Synthetic oligonucleotide
cggagtcaaaggatttgcatacctagatggaggcaatacttggctaggtagaacaatta

SEQ ID NO: 373183 - DNA, 60 bp, Artificial
  Synthetic oligonucleotide
cggagtcaacaggagtggctctaaagagaagctgctggatgatcacactccttattctgc

SEQ ID NO: 373184 - DNA, 55 bp, Artificial
  Synthetic oligonucleotide
cggagtcaacccttccgacctggtgatcaaacattaatcaattttagcaggggac

SEQ ID NO: 373185 - DNA, 55 bp, Artificial
  Synthetic oligonucleotide
cggagtcaatcacaaattaagtgtaacaacggatacttgtacgattaggaactgt

SEQ ID NO: 373186 - DNA, 55 bp, Artificial
  Synthetic oligonucleotide
cggagtcagaagacgatccgttatcagccgcaccagatgtaggctttggcggaac

SEQ ID NO: 373187 - DNA, 55 bp, Artificial
  Synthetic oligonucleotide
cggagtcataatggtaggactgagacgattgtatttggcgctgtctacggcacgg

SEQ ID NO: 373188 - DNA, 58 bp, Artificial
  Synthetic oligonucleotide
cggagtccattggatggcccacaggtattccctgagttgtcacctaggaagaccaata

SEQ ID NO: 373189 - DNA, 57 bp, Artificial
  Synthetic oligonucleotide
cggagtccctccattggaattgggggactgtagcattgcaggttggctccttgggaa

SEQ ID NO: 373190 - DNA, 59 bp, Artificial
  Synthetic oligonucleotide
cggagtccctctcgcaatcgctagagtctccactccaggaacaagacgaagttccagac

SEQ ID NO: 373191 - DNA, 58 bp, Artificial
  Synthetic oligonucleotide
cggagtcccttatgattaacgaaggtgactatgctcgtgtgatacccaaatttctaga

SEQ ID NO: 373192 - DNA, 55 bp, Artificial
  Synthetic oligonucleotide
cggagtcccttggatcttaggcctctcggagctcacagagcgagaagccgttcct

SEQ ID NO: 373193 - DNA, 52 bp, Artificial
  Synthetic oligonucleotide
cggagtccgtgtctccgtatacgcctttaaaatcgtaattgtaatccgtcgg

SEQ ID NO: 373194 - DNA, 55 bp, Artificial
  Synthetic oligonucleotide
cggagtctatctggagtatggccgttgtgggaaacaggagggctcacggacaaga

SEQ ID NO: 373195 - DNA, 55 bp, Artificial
  Synthetic oligonucleotide
cggagtctcaaaatccgtgtgcttactagtgaatgattcagatgggtgcacaaca

SEQ ID NO: 373196 - DNA, 59 bp, Artificial
  Synthetic oligonucleotide
cggagtctggaaaccctgagccgatctcttcccgccggatagctgcgcagcaaaggtaa

SEQ ID NO: 373197 - DNA, 56 bp, Artificial
  Synthetic oligonucleotide
cggagtctgtggctaagtcccccatgccccgctccacggctcccttccgaagtgtc

SEQ ID NO: 373198 - DNA, 55 bp, Artificial
  Synthetic oligonucleotide
cggagtcttgataattgttggtcgagtgttgaagggaacagcagagtcacgtctg

SEQ ID NO: 373199 - DNA, 53 bp, Artificial
  Synthetic oligonucleotide
cggagtcttttatagagttggtgaaaggtcttaaaccttattatcacccatta

SEQ ID NO: 373200 - DNA, 54 bp, Artificial
  Synthetic oligonucleotide
cggagtgaaatggcttttcaaactccttatcccacctctcgtcgttctggttac

SEQ ID NO: 373201 - DNA, 54 bp, Artificial
  Synthetic oligonucleotide
cggagtgaagaaaatagctgcgtaccaatttaaagatgcgtaaggacttaccct

SEQ ID NO: 373202 - DNA, 58 bp, Artificial
  Synthetic oligonucleotide
cggagtgaatgattttagttttaatggtgggtcactaccaactgactttgtcatatca

SEQ ID NO: 373203 - DNA, 60 bp, Artificial
  Synthetic oligonucleotide
cggagtgatggtagagggagtgttccacacactatggcacaccactaagggagccgctct

SEQ ID NO: 373204 - DNA, 55 bp, Artificial
  Synthetic oligonucleotide
cggagtgcacgatcactccttgggcaatgttcggaggggacttgtcgagcggcta

SEQ ID NO: 373205 - DNA, 55 bp, Artificial
  Synthetic oligonucleotide
cggagtggaggatagggatattgccattcttcaaatgcctaaagacttcccaccc

SEQ ID NO: 373206 - DNA, 57 bp, Artificial
  Synthetic oligonucleotide
cggagtggagtctgcagtactaaggggattcctaattctaggcaaggaggacagaag

SEQ ID NO: 373207 - DNA, 55 bp, Artificial
  Synthetic oligonucleotide
cggagtgggagctgatgttggcggtgctgtggacactgaacggatggagctccgt

SEQ ID NO: 373208 - DNA, 55 bp, Artificial
  Synthetic oligonucleotide
cggagtgggaggccttcttttcattccacactagtgtcaattggagtacttcgga

SEQ ID NO: 373209 - DNA, 56 bp, Artificial
  Synthetic oligonucleotide
cggagtgggccgtttcatctatcgtgagttaccagagttaagttcacctgtttggc

SEQ ID NO: 373210 - DNA, 60 bp, Artificial
  Synthetic oligonucleotide
cggagtgtggatgcgcactcctccagcatatagaccaacaaatgcccctatcttatcaac

SEQ ID NO: 373211 - DNA, 55 bp, Artificial
  Synthetic oligonucleotide
cggagtgttagcgaccccagaagttccatttaccactgagtgtgcgaatgaggtc

SEQ ID NO: 373212 - DNA, 53 bp, Artificial
  Synthetic oligonucleotide
cggagtgtttcgccgtcgacaatttcagtttccctttgaatttcgcgaagtgg

SEQ ID NO: 373213 - DNA, 60 bp, Artificial
  Synthetic oligonucleotide
cggagttacttctttgtcaatgatcaagcaggtaaacgctattgtacatgatgccatact

SEQ ID NO: 373214 - DNA, 55 bp, Artificial
  Synthetic oligonucleotide
cggagttattcacggcgtacagctgttaaacgtcattatactacatcacgtctcg

SEQ ID NO: 373215 - DNA, 60 bp, Artificial
  Synthetic oligonucleotide
cggagttcatacattacatagtcggcattaagccgacgaaaaacacacacatagtgcagc

SEQ ID NO: 373216 - DNA, 55 bp, Artificial
  Synthetic oligonucleotide
cggagttcctacccaacttggaagctccactgggccagtgagaagacccaggcag

SEQ ID NO: 373217 - DNA, 55 bp, Artificial
  Synthetic oligonucleotide
cggagttcgtaccagtacttcacatagtgaagtgataagactggtgggcagtgcc

SEQ ID NO: 373218 - DNA, 55 bp, Artificial
  Synthetic oligonucleotide
cggagttgacctacctttcgtgactttcgtgaaagacgagcttagatcaagagag

SEQ ID NO: 373219 - DNA, 55 bp, Artificial
  Synthetic oligonucleotide
cggagttgcccgatttcctggcaaagaagggtggggaggccatggataccatcag

SEQ ID NO: 373220 - DNA, 56 bp, Artificial
  Synthetic oligonucleotide
cggagttgggcagagaaatcacctccggaggaccccttcaacgaacagaagagctc

SEQ ID NO: 373221 - DNA, 55 bp, Artificial
  Synthetic oligonucleotide
cggagttgtgtcctagccctttaagactagtggatgggcaaacttgtgacatcgt

SEQ ID NO: 373222 - DNA, 60 bp, Artificial
  Synthetic oligonucleotide
cggagttgttacatggctatgattatattatcgacgtaagcacacgtatcgatgagccca

SEQ ID NO: 373223 - DNA, 59 bp, Artificial
  Synthetic oligonucleotide
cggagtttattagactctgcggaggaatggagtagcttaatgtctatggcgtcgcccca

SEQ ID NO: 373224 - DNA, 55 bp, Artificial
  Synthetic oligonucleotide
cggagtttcatcaacgggccattcggtatactggtaatgactaattctccgtgag

SEQ ID NO: 373225 - DNA, 55 bp, Artificial
  Synthetic oligonucleotide
cggagtttcggtccaggatgaggaagactctccggcatctggggagggaggagac

SEQ ID NO: 373226 - DNA, 58 bp, Artificial
  Synthetic oligonucleotide
cggagtttctgcatctgatcgatcacctctaaagggtccagggtaccttcttgacgta

SEQ ID NO: 373227 - DNA, 55 bp, Artificial
  Synthetic oligonucleotide
cggagtttgactatgactgaaatgttccatgttctgcaaggagccgcatataccc

SEQ ID NO: 373228 - DNA, 55 bp, Artificial
  Synthetic oligonucleotide
cggataaaatcaaactagttgagggtattatagagtatgtacaaccgtaacatac

SEQ ID NO: 373229 - DNA, 60 bp, Artificial
  Synthetic oligonucleotide
cggataaagaactagctgtgagcgtcttagcgaaaaacgatgcgatagtagcgaatacta

SEQ ID NO: 373230 - DNA, 55 bp, Artificial
  Synthetic oligonucleotide
cggataaagagtgctgatccacttgtggcgaaaaagtaatttactttagttgaca

SEQ ID NO: 373231 - DNA, 52 bp, Artificial
  Synthetic oligonucleotide
cggataaagcgcgtttagtgctgtattccggtttttcttactctttacttgg

SEQ ID NO: 373232 - DNA, 57 bp, Artificial
  Synthetic oligonucleotide
cggataacgtcattatgcttgaacgttatgtgtcgctagcaattgatgcgtatccac

SEQ ID NO: 373233 - DNA, 55 bp, Artificial
  Synthetic oligonucleotide
cggataactctggctatagtcgaacagtatggaggacttacttacgatctcacga

SEQ ID NO: 373234 - DNA, 58 bp, Artificial
  Synthetic oligonucleotide
cggataactggtgcacggttatatcagctaacgaaagccctagtgtattaaagtgtca

SEQ ID NO: 373235 - DNA, 60 bp, Artificial
  Synthetic oligonucleotide
cggataagcatcgcacccaccactttagtggtggtccagatgtcccaagttagtgcgcca

SEQ ID NO: 373236 - DNA, 55 bp, Artificial
  Synthetic oligonucleotide
cggataatatattagtgtacgtggctagttacaacgaggttgacgaacttagtcg

SEQ ID NO: 373237 - DNA, 57 bp, Artificial
  Synthetic oligonucleotide
cggataccactaaacgtcataccttagatatgattaagatagtacttgaagttttga

SEQ ID NO: 373238 - DNA, 52 bp, Artificial
  Synthetic oligonucleotide
cggataccctaggttacgagttaatacgggatttaatctgtattctacgttc

SEQ ID NO: 373239 - DNA, 60 bp, Artificial
  Synthetic oligonucleotide
cggataccctctcttcagtcaccactgatgagatcaataggagtttcaagcctaacatag

SEQ ID NO: 373240 - DNA, 60 bp, Artificial
  Synthetic oligonucleotide
cggatacgagatgctaaaggtgccaaatgcactgaccgacgataggtcaaaacccattca

SEQ ID NO: 373241 - DNA, 55 bp, Artificial
  Synthetic oligonucleotide
cggatacgaggatagttgcttatgataatacagcgaagttagccacacgtatggg

SEQ ID NO: 373242 - DNA, 60 bp, Artificial
  Synthetic oligonucleotide
cggatacgtctgtctcaagtgtgactagtaaggttagacgtcgtgctattgctagcaaca

SEQ ID NO: 373243 - DNA, 55 bp, Artificial
  Synthetic oligonucleotide
cggatagaacggatggaatacatgttaattttgcctacgagcaaaacgacaatgc

SEQ ID NO: 373244 - DNA, 55 bp, Artificial
  Synthetic oligonucleotide
cggatagacttagggaagcgactaattagggacgacagcttagccttgaactgac

SEQ ID NO: 373245 - DNA, 55 bp, Artificial
  Synthetic oligonucleotide
cggatagcgttaggtaatgtaactgtcgaaagtaggactgatagaccttatcggt

SEQ ID NO: 373246 - DNA, 60 bp, Artificial
  Synthetic oligonucleotide
cggataggttgcctcgggatatcgaggtctatgctgctaagcaagacattttgaaacagt

SEQ ID NO: 373247 - DNA, 55 bp, Artificial
  Synthetic oligonucleotide
cggatagtatcttgttagataatacgttccacccgacgtgctcgtgagacccggg

SEQ ID NO: 373248 - DNA, 60 bp, Artificial
  Synthetic oligonucleotide
cggatatagtacataagcaaacatcatctattgttacgataaacgacatcatattactat

SEQ ID NO: 373249 - DNA, 55 bp, Artificial
  Synthetic oligonucleotide
cggatatctacaatgatggatatgagactgtgagctgtttcctaacaacagatct

SEQ ID NO: 373250 - DNA, 60 bp, Artificial
  Synthetic oligonucleotide
cggatatctacgtcaggcatgggcggggcttgcataacctctcgctattggttggatccc

SEQ ID NO: 373251 - DNA, 57 bp, Artificial
  Synthetic oligonucleotide
cggatatgatgaggaagccccaacaccgattgtcacctttaccagcaacggggacca

SEQ ID NO: 373252 - DNA, 60 bp, Artificial
  Synthetic oligonucleotide
cggatatgcgcaacttctatatgatagatagtggcagaactggcgtgccagggatgaaac

SEQ ID NO: 373253 - DNA, 55 bp, Artificial
  Synthetic oligonucleotide
cggatatgtggttgacgtttcacatggctcagacgtggttacagttcccctgcca

SEQ ID NO: 373254 - DNA, 58 bp, Artificial
  Synthetic oligonucleotide
cggatattgatcaagatgtccccggtctgtctcttaactttgtagaatggctttctac

SEQ ID NO: 373255 - DNA, 56 bp, Artificial
  Synthetic oligonucleotide
cggatatttacgataaatcgaagagcctgaatagcgtgggtataaaagtgttcaaa

SEQ ID NO: 373256 - DNA, 57 bp, Artificial
  Synthetic oligonucleotide
cggatcaaggggcttatcgggcagagcgaccctggagcggaaaagggctcaatggag

SEQ ID NO: 373257 - DNA, 55 bp, Artificial
  Synthetic oligonucleotide
cggatcaatgcgggaattcagttaggtaaacgtcatagattatggatcgagcgcc

SEQ ID NO: 373258 - DNA, 55 bp, Artificial
  Synthetic oligonucleotide
cggatcactcgtgagaactattatttccaaagccgaatgtgtttaatggaattgc

SEQ ID NO: 373259 - DNA, 60 bp, Artificial
  Synthetic oligonucleotide
cggatcagacttattcataccgagggatgacctatggtattgagcggtgcgttatccacg

SEQ ID NO: 373260 - DNA, 60 bp, Artificial
  Synthetic oligonucleotide
cggatcagtatggggcattgatagcttcccgtggatatggtcatgatgttaccggaaacc

SEQ ID NO: 373261 - DNA, 54 bp, Artificial
  Synthetic oligonucleotide
cggatcataccgaccttctgactccttctcacggtagaacctgacctcgccacg

SEQ ID NO: 373262 - DNA, 60 bp, Artificial
  Synthetic oligonucleotide
cggatcatgtgtgcacgtctgatatggatgttaccatgtgtggtgaagtggcggctcttg

SEQ ID NO: 373263 - DNA, 55 bp, Artificial
  Synthetic oligonucleotide
cggatcattaaatccgttgcctcgagataaggaagacctttgtgtctcattgttc

SEQ ID NO: 373264 - DNA, 55 bp, Artificial
  Synthetic oligonucleotide
cggatccaaaattgatagttagacagtcggctgtgatgcgtggctctgacacgcc

SEQ ID NO: 373265 - DNA, 55 bp, Artificial
  Synthetic oligonucleotide
cggatccaggccttgggtcagaggccaatctaggagaataagtatctactggaca

SEQ ID NO: 373266 - DNA, 54 bp, Artificial
  Synthetic oligonucleotide
cggatcccggttcttagaatttgaggcccttgggtttctgaacgaggatcactg

SEQ ID NO: 373267 - DNA, 60 bp, Artificial
  Synthetic oligonucleotide
cggatccctcatttgtccctctatgtaaatctagtcaggcagttgaattgccataatttc

SEQ ID NO: 373268 - DNA, 55 bp, Artificial
  Synthetic oligonucleotide
cggatccggcaacgagtactacatatcgggcgaggtagagtacacgctagacgtg

SEQ ID NO: 373269 - DNA, 55 bp, Artificial
  Synthetic oligonucleotide
cggatccgtaaacgcttgcaggggaacattgaaggtggcggaacgccaccgcgat

SEQ ID NO: 373270 - DNA, 56 bp, Artificial
  Synthetic oligonucleotide
cggatccgtggaataagcgcgtcgtattcggatatgttaaagcgtcaacggaaagc

SEQ ID NO: 373271 - DNA, 55 bp, Artificial
  Synthetic oligonucleotide
cggatccgtgtgtgtggagtctgattatacagcatttgacgtttcgcaagaccac

SEQ ID NO: 373272 - DNA, 55 bp, Artificial
  Synthetic oligonucleotide
cggatcctcttgtggtcccaatatctgtgggctttcgcaaggcagttattgcgaa

SEQ ID NO: 373273 - DNA, 55 bp, Artificial
  Synthetic oligonucleotide
cggatcgacgctcatctgggccaagaccaacgtgcgcgacgacttcaatcgcgac

SEQ ID NO: 373274 - DNA, 59 bp, Artificial
  Synthetic oligonucleotide
cggatcgacgtcatcaatgacgttgtaccaggcctcattactgtagacctttggactaa

SEQ ID NO: 373275 - DNA, 60 bp, Artificial
  Synthetic oligonucleotide
cggatcgatttccattggctgatgctgaatcccaatgacacagtcaccttcagcttcaat

SEQ ID NO: 373276 - DNA, 55 bp, Artificial
  Synthetic oligonucleotide
cggatcgccaacaacatgccggaacagtacgacgaaaagccgcaggtacagcagg

SEQ ID NO: 373277 - DNA, 56 bp, Artificial
  Synthetic oligonucleotide
cggatcgcccaatgggcgaatccagggaaataggggtgcccagtagtcgtcacagg

SEQ ID NO: 373278 - DNA, 51 bp, Artificial
  Synthetic oligonucleotide
cggatcgcttattaaagattttaaacgtcgtcgcttctttttaaataaagc

SEQ ID NO: 373279 - DNA, 59 bp, Artificial
  Synthetic oligonucleotide
cggatctaacaaccagcaatcatccatacaaatgatggacgttagccaacttcctccgt

SEQ ID NO: 373280 - DNA, 60 bp, Artificial
  Synthetic oligonucleotide
cggatctaatcattcttctctcccatttgccgtagcccacatgactgaagtcgatatcct

SEQ ID NO: 373281 - DNA, 59 bp, Artificial
  Synthetic oligonucleotide
cggatctacgtcatcaatgacgttataccacgcattattagagtatacttttgggctaa

SEQ ID NO: 373282 - DNA, 55 bp, Artificial
  Synthetic oligonucleotide
cggatctatcaaattctgaagttgaataactataaccctcaatatgtagggagcg

SEQ ID NO: 373283 - DNA, 55 bp, Artificial
  Synthetic oligonucleotide
cggatctatgataggtctgaatgagaaactactaggacagtatgttgagttcact

SEQ ID NO: 373284 - DNA, 58 bp, Artificial
  Synthetic oligonucleotide
cggatctctaatagtcactggagtactggggcggttcacctcagtcttcacaagtttg

SEQ ID NO: 373285 - DNA, 55 bp, Artificial
  Synthetic oligonucleotide
cggatctctataggcccggatacctttgactgggcgaccctccaacaccgtcgcc

SEQ ID NO: 373286 - DNA, 60 bp, Artificial
  Synthetic oligonucleotide
cggatctctgcttggattggctgcgctaattggactggcgagttcactgcaattgtcaac

SEQ ID NO: 373287 - DNA, 55 bp, Artificial
  Synthetic oligonucleotide
cggatctgacattccatatgtcaagctccccaaaattttcttaccatcacagcac

SEQ ID NO: 373288 - DNA, 58 bp, Artificial
  Synthetic oligonucleotide
cggatctgtatgactacaaagagaaccgattcgtagaaattggagtgacacggaggga

SEQ ID NO: 373289 - DNA, 60 bp, Artificial
  Synthetic oligonucleotide
cggatcttccacacctcttttttgctctctgaccatgagtctctggtattctcatcttgt

SEQ ID NO: 373290 - DNA, 55 bp, Artificial
  Synthetic oligonucleotide
cggatcttggtccaccgtgagcgaggaggctagtgaggacgtcgtctgctgttcg

SEQ ID NO: 373291 - DNA, 57 bp, Artificial
  Synthetic oligonucleotide
cggatctttccaacacgcgttcaacgcggaagcagtttgacacatggttcgagggcg

SEQ ID NO: 373292 - DNA, 52 bp, Artificial
  Synthetic oligonucleotide
cggatgaagcaatccaaaactgtaattcgctgatagcatataaatcacccga

SEQ ID NO: 373293 - DNA, 55 bp, Artificial
  Synthetic oligonucleotide
cggatgaagcttggtaggtctgtcctgccatatatcactcagtttagctccacca

SEQ ID NO: 373294 - DNA, 55 bp, Artificial
  Synthetic oligonucleotide
cggatgaatatgtaacacgaaccaacatatattatcacgcaggcagtgctaggct

SEQ ID NO: 373295 - DNA, 55 bp, Artificial
  Synthetic oligonucleotide
cggatgaatatgtaacacgcttgcccctttattaccatgctgggagcagccgcct

SEQ ID NO: 373296 - DNA, 55 bp, Artificial
  Synthetic oligonucleotide
cggatgaccaagtctccggggttggctttcgtatgggcgagaacctgattactgc

SEQ ID NO: 373297 - DNA, 60 bp, Artificial
  Synthetic oligonucleotide
cggatgaccatttgtgtgcagggaaataatgacaacgcaacagctacagtgtactatgac

SEQ ID NO: 373298 - DNA, 57 bp, Artificial
  Synthetic oligonucleotide
cggatgaggaacgtggcgccctctgaggtttcatcggaggtcagtatcgagattggg

SEQ ID NO: 373299 - DNA, 55 bp, Artificial
  Synthetic oligonucleotide
cggatgaggctgttcgcacactgttggggcagtctgtgaatcgtgatttttatgc

SEQ ID NO: 373300 - DNA, 55 bp, Artificial
  Synthetic oligonucleotide
cggatgaggttcagaagctattgaaagaaacctactatggtgctggaagtcctaa

SEQ ID NO: 373301 - DNA, 57 bp, Artificial
  Synthetic oligonucleotide
cggatgatcctaaccaaggctggaatggtacaccggttcacggtagtcgtgagatct

SEQ ID NO: 373302 - DNA, 55 bp, Artificial
  Synthetic oligonucleotide
cggatgatgaggaagaagtgggatttccagtgagaccaagagtacccttaaggca

SEQ ID NO: 373303 - DNA, 55 bp, Artificial
  Synthetic oligonucleotide
cggatgatgggtacttcccgtattatcgagcaggactgtgaaacttggttgggtg

SEQ ID NO: 373304 - DNA, 60 bp, Artificial
  Synthetic oligonucleotide
cggatgatgttaacaaaaatacactccagagcagacgggcagctgtgtcaacattggagg

SEQ ID NO: 373305 - DNA, 60 bp, Artificial
  Synthetic oligonucleotide
cggatgattgggttgctccagacatataccctatgcgaagacctagaatggaaatgtgcc

SEQ ID NO: 373306 - DNA, 50 bp, Artificial
  Synthetic oligonucleotide
cggatgcaataagaaatagctcaagggcagcttattgcacgtataatacc

SEQ ID NO: 373307 - DNA, 60 bp, Artificial
  Synthetic oligonucleotide
cggatgcaggatttggaaggatctgtagttcgagtgcgtgcaaaattgcgtatacgttgc

SEQ ID NO: 373308 - DNA, 55 bp, Artificial
  Synthetic oligonucleotide
cggatgcaggttatgacatattctcagctgaaactgtcgtacttgagccacaaga

SEQ ID NO: 373309 - DNA, 55 bp, Artificial
  Synthetic oligonucleotide
cggatgccaggccaatcgttcatggtggaacattaacccacaggctcccgtcaag

SEQ ID NO: 373310 - DNA, 57 bp, Artificial
  Synthetic oligonucleotide
cggatgcctatgttacacgtactaaaatattttatcatgctagcagttctagactac

SEQ ID NO: 373311 - DNA, 53 bp, Artificial
  Synthetic oligonucleotide
cggatgcctttctaagtgatttgagacatctatacatgtgtgttgctttctgt

SEQ ID NO: 373312 - DNA, 55 bp, Artificial
  Synthetic oligonucleotide
cggatgcgcaggaacgatggcgcagtccagcgcagaaaacgcatcagaaaacgcc

SEQ ID NO: 373313 - DNA, 60 bp, Artificial
  Synthetic oligonucleotide
cggatgcggtgacagatgacgcagacgaggtcgcacttcgcggcctcttcgcgctttctg

SEQ ID NO: 373314 - DNA, 59 bp, Artificial
  Synthetic oligonucleotide
cggatgcgtactcacgtcgtatatggaggtccaatccatatccctgtctacggggcacg

SEQ ID NO: 373315 - DNA, 60 bp, Artificial
  Synthetic oligonucleotide
cggatgctacgtttagagtcttgtcgcagcagctttcgcgacttaataagacattagcag

SEQ ID NO: 373316 - DNA, 60 bp, Artificial
  Synthetic oligonucleotide
cggatgctcacctaatattaatggtgtttggacaatgatggatggagatgagcaaaggaa

SEQ ID NO: 373317 - DNA, 60 bp, Artificial
  Synthetic oligonucleotide
cggatgctcttcattattttgatgataactggcaccgttatctggcagaaggaacttcaa

SEQ ID NO: 373318 - DNA, 55 bp, Artificial
  Synthetic oligonucleotide
cggatgcttcatactggcaaaatttatcactgcaatatgcagataaggcggctac

SEQ ID NO: 373319 - DNA, 59 bp, Artificial
  Synthetic oligonucleotide
cggatgcttctacctccgcgatcaataagaattcggttgttgcccagaacgatgaatcc

SEQ ID NO: 373320 - DNA, 60 bp, Artificial
  Synthetic oligonucleotide
cggatgctttgaattctaccacaagtgtgacaatgaatgcatggaaagtgtaagaaatgg

SEQ ID NO: 373321 - DNA, 55 bp, Artificial
  Synthetic oligonucleotide
cggatggaaagagccccacattgtcaagccgcatgagaaaggcataaatccaaac

SEQ ID NO: 373322 - DNA, 55 bp, Artificial
  Synthetic oligonucleotide
cggatggattaaatacgacgaactgctaaagatcacagaccgctacccatacaag

SEQ ID NO: 373323 - DNA, 49 bp, Artificial
  Synthetic oligonucleotide
cggatggccgcgcgatttttttaagtgtgggtccagaacgcaccacgat

SEQ ID NO: 373324 - DNA, 54 bp, Artificial
  Synthetic oligonucleotide
cggatgggaagagtatatcctacgggaatcctccggttcccgtcacgtctagcc

SEQ ID NO: 373325 - DNA, 56 bp, Artificial
  Synthetic oligonucleotide
cggatgggaagagtatatcctatgggaatccgcggtcccccctcacgtccagccca

SEQ ID NO: 373326 - DNA, 58 bp, Artificial
  Synthetic oligonucleotide
cggatgggagctaaacttgctgcgcaaccggacattatgaactgccctatatttaaaa

SEQ ID NO: 373327 - DNA, 57 bp, Artificial
  Synthetic oligonucleotide
cggatggtcacccgattggactattccaaatcgaagtactcaataggctaacctata

SEQ ID NO: 373328 - DNA, 60 bp, Artificial
  Synthetic oligonucleotide
cggatggtctgttataagggaaagaatgagacgagctgaaccaagagctgagcaatcagc

SEQ ID NO: 373329 - DNA, 55 bp, Artificial
  Synthetic oligonucleotide
cggatggtcttgttatttccgaaatcactcatcggaggagaaatggagttctggg

SEQ ID NO: 373330 - DNA, 53 bp, Artificial
  Synthetic oligonucleotide
cggatggtgctagcattcatcacgtttttgcgagtcctttccatcccaccaac

SEQ ID NO: 373331 - DNA, 59 bp, Artificial
  Synthetic oligonucleotide
cggatggtggcgtaggcagcatcaagaagggtgccctgtactttgtaatagcccctggc

SEQ ID NO: 373332 - DNA, 55 bp, Artificial
  Synthetic oligonucleotide
cggatggtggcttttcccaagccacctactaaaattgcatccaagagggatgctc

SEQ ID NO: 373333 - DNA, 55 bp, Artificial
  Synthetic oligonucleotide
cggatgtaagccaacggctcgaggtagatatattgattgggatgatcttggaaca

SEQ ID NO: 373334 - DNA, 55 bp, Artificial
  Synthetic oligonucleotide
cggatgtcgtctttatgtcaggcatccctttcactagtgactacaaacatacaag

SEQ ID NO: 373335 - DNA, 60 bp, Artificial
  Synthetic oligonucleotide
cggatgtcttagaagcagcatcggaggaggtgcccttaattggcgcgggtatggccacag

SEQ ID NO: 373336 - DNA, 60 bp, Artificial
  Synthetic oligonucleotide
cggatgtgaacactgtgcatgaggtacaaggggaaacatacgagaagacagctattgttc

SEQ ID NO: 373337 - DNA, 60 bp, Artificial
  Synthetic oligonucleotide
cggatgtgactatggctggagcactctatgataagcgtcacaagactattgcgagttcct

SEQ ID NO: 373338 - DNA, 57 bp, Artificial
  Synthetic oligonucleotide
cggatgtggttacaattgaacacccctctctacgaggtctcttccctgcctgaccta

SEQ ID NO: 373339 - DNA, 55 bp, Artificial
  Synthetic oligonucleotide
cggatgtgttctgccatgcgctcctgaaactcaacatcgtcatcaaacgcacggg

SEQ ID NO: 373340 - DNA, 59 bp, Artificial
  Synthetic oligonucleotide
cggatgttcctagaggctgtgagggtccatgtaaggtccagtcttttgagtccagacac

SEQ ID NO: 373341 - DNA, 59 bp, Artificial
  Synthetic oligonucleotide
cggatgttcttaccaaacaagtgtttttccaatcagctattgatgcagctcgaaaatcc

SEQ ID NO: 373342 - DNA, 59 bp, Artificial
  Synthetic oligonucleotide
cggatgttgaccctgctgaggaagctaccgtgagtatctccgggtcatatattgttacc

SEQ ID NO: 373343 - DNA, 59 bp, Artificial
  Synthetic oligonucleotide
cggattaaggacggccatactgaatagaactacactgccaaatatgctgccacctattt

SEQ ID NO: 373344 - DNA, 60 bp, Artificial
  Synthetic oligonucleotide
cggattacacacagcacatggcgacgattggagtgctagcaacgccagaaatccctttca

SEQ ID NO: 373345 - DNA, 60 bp, Artificial
  Synthetic oligonucleotide
cggattagatgcatccaggtttgaccaacacgttagtgtggccgctttgaaattcacgca

SEQ ID NO: 373346 - DNA, 55 bp, Artificial
  Synthetic oligonucleotide
cggattagggaattcatggaaaaagagtgcccctttatcaaaccagaggtgaagc

SEQ ID NO: 373347 - DNA, 55 bp, Artificial
  Synthetic oligonucleotide
cggattcacttttcccaacgtgagttcatacaaagccactacccatcttgggatg

SEQ ID NO: 373348 - DNA, 60 bp, Artificial
  Synthetic oligonucleotide
cggattcagatgccatccgtcgcaggttctatatggactgcgacattgaggggaccgatt

SEQ ID NO: 373349 - DNA, 53 bp, Artificial
  Synthetic oligonucleotide
cggattcagcacgtcgtttgcttgcgtcttcagctcggaaatttgaagcggga

SEQ ID NO: 373350 - DNA, 55 bp, Artificial
  Synthetic oligonucleotide
cggattcatgagaatcaatatggcccagagtttgtcatgggtaataacacggcta

SEQ ID NO: 373351 - DNA, 55 bp, Artificial
  Synthetic oligonucleotide
cggattccagaccgaatactcagtttggtccgttagcacgagtactcggtacgag

SEQ ID NO: 373352 - DNA, 55 bp, Artificial
  Synthetic oligonucleotide
cggattcggatggtaacgtgctgaacagtacgcaacaggagtcgtacgacggcga

SEQ ID NO: 373353 - DNA, 55 bp, Artificial
  Synthetic oligonucleotide
cggattcggggccctattcgcgatggtggccaagaccatagcccagatacctcgc

SEQ ID NO: 373354 - DNA, 57 bp, Artificial
  Synthetic oligonucleotide
cggattcggtgttaatgaacctactaacacttcctcatcagagtatgttcccgagta

SEQ ID NO: 373355 - DNA, 55 bp, Artificial
  Synthetic oligonucleotide
cggattctgacgctacggcggtggacaaaccaacgcgcccagatgtgtcggtgaa

SEQ ID NO: 373356 - DNA, 57 bp, Artificial
  Synthetic oligonucleotide
cggattctgtaattccgctcacgctcagggtttaaacgtattagtcagaatagacat

SEQ ID NO: 373357 - DNA, 60 bp, Artificial
  Synthetic oligonucleotide
cggattgaatatagtcgctggatatgacaggtacagatgtatccatgtgcaacaatttga

SEQ ID NO: 373358 - DNA, 55 bp, Artificial
  Synthetic oligonucleotide
cggattgatggtttggtgcattgagaacggtacttcaccaaacataaatggaatg

SEQ ID NO: 373359 - DNA, 60 bp, Artificial
  Synthetic oligonucleotide
cggattgcaaaacgacgcaagagatgagcaatcagatgaggctaaacggttgaaaagact

SEQ ID NO: 373360 - DNA, 55 bp, Artificial
  Synthetic oligonucleotide
cggattgcaatttatcattcgtctatgtgtgaccgcgattgatgtcaattggcta

SEQ ID NO: 373361 - DNA, 55 bp, Artificial
  Synthetic oligonucleotide
cggattgcaggtttgggcaacctgtatgaatttggagtccacaacaactctgcgg

SEQ ID NO: 373362 - DNA, 55 bp, Artificial
  Synthetic oligonucleotide
cggattggagatcattactatacaacgaattgttacacaggcgctgaagcattgg

SEQ ID NO: 373363 - DNA, 56 bp, Artificial
  Synthetic oligonucleotide
cggattggcaaaactacacaccgggaccaggggtcagatatccgctgacctttgga

SEQ ID NO: 373364 - DNA, 55 bp, Artificial
  Synthetic oligonucleotide
cggattggttcacatcgcccggagtcgaatacggaacaggtgtagtcttcaccta

SEQ ID NO: 373365 - DNA, 57 bp, Artificial
  Synthetic oligonucleotide
cggatttaagttctgacagcgacgccaacactcgcaaatcaaaacgcaagtaaggcg

SEQ ID NO: 373366 - DNA, 55 bp, Artificial
  Synthetic oligonucleotide
cggatttactgtaatgtccttctggcttccgacaagccctttccaacaaggaaca

SEQ ID NO: 373367 - DNA, 59 bp, Artificial
  Synthetic oligonucleotide
cggatttatctcaccgagacgaatccaatgagcactggcacacgtcaaaattccttcgg

SEQ ID NO: 373368 - DNA, 55 bp, Artificial
  Synthetic oligonucleotide
cggatttcaacccaagctgtgctggccctgacaaacgtggagaaggataagcatg

SEQ ID NO: 373369 - DNA, 55 bp, Artificial
  Synthetic oligonucleotide
cggatttccattttattgacgaacggggcgaatcaataattgtagagtctggcga

SEQ ID NO: 373370 - DNA, 53 bp, Artificial
  Synthetic oligonucleotide
cggatttctgattggttaaaacaactcgggttagcctactcacctatattccg

SEQ ID NO: 373371 - DNA, 55 bp, Artificial
  Synthetic oligonucleotide
cggatttgaagctagaaagctcatgtaattttgacctccatacaacctcaatgac

SEQ ID NO: 373372 - DNA, 56 bp, Artificial
  Synthetic oligonucleotide
cggatttgagttcgcaactattgactgggttctggagaacggctcaaggggcccaa

SEQ ID NO: 373373 - DNA, 55 bp, Artificial
  Synthetic oligonucleotide
cggatttgcgatgggagatgggaatgcgtcgggtggaagacggtccgataacgcg

SEQ ID NO: 373374 - DNA, 55 bp, Artificial
  Synthetic oligonucleotide
cggatttggacatctattatgtgaaacggccggttgaacgggtgtattaggtgtc

SEQ ID NO: 373375 - DNA, 55 bp, Artificial
  Synthetic oligonucleotide
cggatttggcaaatacgagagcaacacagaatcaatttgcccgttggtttgatgg

SEQ ID NO: 373376 - DNA, 58 bp, Artificial
  Synthetic oligonucleotide
cggatttgtagccaattttagcatggaactgcccagctttggagtgtctgggattaac

SEQ ID NO: 373377 - DNA, 60 bp, Artificial
  Synthetic oligonucleotide
cggatttgtatgtggtatatccttgtgtgcgtgtagagtggatcctccacgttgtacatc

SEQ ID NO: 373378 - DNA, 60 bp, Artificial
  Synthetic oligonucleotide
cggatttgttgacaatcaacaagacgcatacacgcgcttggttgccaactactctgatac

SEQ ID NO: 373379 - DNA, 58 bp, Artificial
  Synthetic oligonucleotide
cggatttttgcgttccttggtcaatggagagtgtgcagttttgtcaaaggacactcta

SEQ ID NO: 373380 - DNA, 58 bp, Artificial
  Synthetic oligonucleotide
cggcaaaaattatgtttatggcttgcagtgagtgaggtcgtacctcgtctacaagcgg

SEQ ID NO: 373381 - DNA, 55 bp, Artificial
  Synthetic oligonucleotide
cggcaaaatactaaggactctgtgtatgctcaaaacgaaatgctccaatacaacc

SEQ ID NO: 373382 - DNA, 59 bp, Artificial
  Synthetic oligonucleotide
cggcaaaatgtctgacggacgcggacaggtggacattttctggcaacagcgatggtacc

SEQ ID NO: 373383 - DNA, 51 bp, Artificial
  Synthetic oligonucleotide
cggcaaacgaggataacagaatatgtctctgtcagatatgaaggtttataa

SEQ ID NO: 373384 - DNA, 54 bp, Artificial
  Synthetic oligonucleotide
cggcaaacgttacagttaatccgggaccattcgcgcagactgggtacgctccgg

SEQ ID NO: 373385 - DNA, 51 bp, Artificial
  Synthetic oligonucleotide
cggcaaactcaatcctgcagagatgacctacacgaaagtggtactctcaca

SEQ ID NO: 373386 - DNA, 58 bp, Artificial
  Synthetic oligonucleotide
cggcaaagagactaaagatgcagatgtggatagacgcgtacatactgcagtgggatct

SEQ ID NO: 373387 - DNA, 55 bp, Artificial
  Synthetic oligonucleotide
cggcaaagaggtgtaagcggagatggttacgtaataacgcgcggctacgtcgtac

SEQ ID NO: 373388 - DNA, 60 bp, Artificial
  Synthetic oligonucleotide
cggcaaagtttaagagattcacacaggcattatatgatggcttgtcagatgagaagttaa

SEQ ID NO: 373389 - DNA, 55 bp, Artificial
  Synthetic oligonucleotide
cggcaaatcagaactatgggcgccctcagtgaatcccacgtcaggaatacactca

SEQ ID NO: 373390 - DNA, 54 bp, Artificial
  Synthetic oligonucleotide
cggcaaatgtttaaacttacctgagtacagtgttcttagaaaacgctggttgga

SEQ ID NO: 373391 - DNA, 55 bp, Artificial
  Synthetic oligonucleotide
cggcaacaataattgtgccatatgtaaatgcagtaccaatggattcaatgcttag

SEQ ID NO: 373392 - DNA, 55 bp, Artificial
  Synthetic oligonucleotide
cggcaacagtaacacaggagatatcaagcacgggttttcggcgtcactacctgga

SEQ ID NO: 373393 - DNA, 53 bp, Artificial
  Synthetic oligonucleotide
cggcaaccaaacgattgacagcctcgtttccttcgtgcttaccggtaccgact

SEQ ID NO: 373394 - DNA, 57 bp, Artificial
  Synthetic oligonucleotide
cggcaaccgctccttttgtaaagaggaatctgcttttgagctgtcgatggggcccaa

SEQ ID NO: 373395 - DNA, 60 bp, Artificial
  Synthetic oligonucleotide
cggcaacctccgtcgttgcagaggtaacgggtatgtagatcttgacgctacagcgatgca

SEQ ID NO: 373396 - DNA, 52 bp, Artificial
  Synthetic oligonucleotide
cggcaacctctgcgaactccccgcgcagtcaccggtacccgcacacgtgcgc

SEQ ID NO: 373397 - DNA, 56 bp, Artificial
  Synthetic oligonucleotide
cggcaacgtgcaccatacgcaactgtaaaaagttaggaccaagggagaacgtagca

SEQ ID NO: 373398 - DNA, 58 bp, Artificial
  Synthetic oligonucleotide
cggcaacgtgggcagtgacttcctgtaagatataaaagaccgcacaagcgccgttata

SEQ ID NO: 373399 - DNA, 52 bp, Artificial
  Synthetic oligonucleotide
cggcaactacatcgcgacaactcctcatttccccgagagacacggttactac

SEQ ID NO: 373400 - DNA, 56 bp, Artificial
  Synthetic oligonucleotide
cggcaacttcaactagtacatttgagggtgcttttggtaacctacaggcgtcattc

SEQ ID NO: 373401 - DNA, 55 bp, Artificial
  Synthetic oligonucleotide
cggcaagaccttgtcttagacttcggaggaagttgggtcacacattacctccgcg

SEQ ID NO: 373402 - DNA, 55 bp, Artificial
  Synthetic oligonucleotide
cggcaagagcttccgaatgtctactcctccaactaatccccaaacagccgacgac

SEQ ID NO: 373403 - DNA, 55 bp, Artificial
  Synthetic oligonucleotide
cggcaagaggagatgacgtctcaggtaattttgtgctttatcagagagatgcggt

SEQ ID NO: 373404 - DNA, 55 bp, Artificial
  Synthetic oligonucleotide
cggcaagcggtgcttcaagccttctcgcgtggtcggcgttcagcatcgtcatgct

SEQ ID NO: 373405 - DNA, 51 bp, Artificial
  Synthetic oligonucleotide
cggcaaggaaaagactaacctgatgcagactcaagaccccgtggtccaact

SEQ ID NO: 373406 - DNA, 53 bp, Artificial
  Synthetic oligonucleotide
cggcaaggaattcaccttaattgcccagaaacagttaaagtaccgttctatgt

SEQ ID NO: 373407 - DNA, 55 bp, Artificial
  Synthetic oligonucleotide
cggcaaggatcatgctaagccacttacagcgtggactcagagaggtagacgattg

SEQ ID NO: 373408 - DNA, 55 bp, Artificial
  Synthetic oligonucleotide
cggcaaggtatacctgcctcccaatcctgtttctaaggttctcagtactgatcgc

SEQ ID NO: 373409 - DNA, 55 bp, Artificial
  Synthetic oligonucleotide
cggcaaggtatacctgcctcccactcctgtgtctaaagttatcagtactgaccgt

SEQ ID NO: 373410 - DNA, 53 bp, Artificial
  Synthetic oligonucleotide
cggcaagtaaatgagtcaaaagtccaagatatagttgatctcattgaccatgc

SEQ ID NO: 373411 - DNA, 55 bp, Artificial
  Synthetic oligonucleotide
cggcaagtctaccgtggtgataaaagcagattccgttaaggagtgtagagatgcc

SEQ ID NO: 373412 - DNA, 55 bp, Artificial
  Synthetic oligonucleotide
cggcaagtgcttgtcatgatggcactagttggttgacaattggaatttctggccc

SEQ ID NO: 373413 - DNA, 60 bp, Artificial
  Synthetic oligonucleotide
cggcaagttggctgttctcccgacatggttagatcgcttgaaatatgcaagcctggagaa

SEQ ID NO: 373414 - DNA, 55 bp, Artificial
  Synthetic oligonucleotide
cggcaataacgttttccgtggtaacaaaagcatacgggtctgctgaagtatcacg

SEQ ID NO: 373415 - DNA, 58 bp, Artificial
  Synthetic oligonucleotide
cggcaatatgacattttgaggttatgttgcaacaacttccgtgtcccgacttcctcga

SEQ ID NO: 373416 - DNA, 55 bp, Artificial
  Synthetic oligonucleotide
cggcaatcacttttcaagcgtaatgataataaacgacgaccatttcaaactgcga

SEQ ID NO: 373417 - DNA, 60 bp, Artificial
  Synthetic oligonucleotide
cggcaatttgacaatcactccttcgctgaaagatcgtttctacatacgtcacgtgctgaa

SEQ ID NO: 373418 - DNA, 55 bp, Artificial
  Synthetic oligonucleotide
cggcacaacgagcaatgatggaccaggtgagggaaagccggaatcctggaaatgc

SEQ ID NO: 373419 - DNA, 55 bp, Artificial
  Synthetic oligonucleotide
cggcacaacgcctgaacaatgttttcacaagcctttccgccgtgtgtgtacaggg

SEQ ID NO: 373420 - DNA, 55 bp, Artificial
  Synthetic oligonucleotide
cggcacacgagccgaagtactcttcggcccagagacgcatctcgtcagggacgtt

SEQ ID NO: 373421 - DNA, 58 bp, Artificial
  Synthetic oligonucleotide
cggcacagacactcgaagctaggaactctcagataactgctcgggggagacgaaatct

SEQ ID NO: 373422 - DNA, 55 bp, Artificial
  Synthetic oligonucleotide
cggcacagagaccatcaccgacagctacatgagtgcgccggcatcagagctggac

SEQ ID NO: 373423 - DNA, 55 bp, Artificial
  Synthetic oligonucleotide
cggcacagatgagcagaccttaagttatacaaacccgctcgcacttcgtgctcgc

SEQ ID NO: 373424 - DNA, 60 bp, Artificial
  Synthetic oligonucleotide
cggcacagatttcatgaagtaaaatctattgtgtgtatgcaactttagtgacttatggct

SEQ ID NO: 373425 - DNA, 60 bp, Artificial
  Synthetic oligonucleotide
cggcacagcacatgatagaactcctcatagaacccttttaatgaatgagttgggtgttcc

SEQ ID NO: 373426 - DNA, 55 bp, Artificial
  Synthetic oligonucleotide
cggcacagtgaaggaccgaagtccatataggactttgatgagtgtcgaagtaggg

SEQ ID NO: 373427 - DNA, 55 bp, Artificial
  Synthetic oligonucleotide
cggcacatcaaaccgggccatcaacatgcacttcattatgtcctgtttggtgtcc

SEQ ID NO: 373428 - DNA, 60 bp, Artificial
  Synthetic oligonucleotide
cggcacatgcgtagccgtgggctacggtatggctgacagagccactgagaatatcttgac

SEQ ID NO: 373429 - DNA, 60 bp, Artificial
  Synthetic oligonucleotide
cggcacattcagtgaggttcaacctccatatgtgctagtctgttattgtcaaacacaggc

SEQ ID NO: 373430 - DNA, 54 bp, Artificial
  Synthetic oligonucleotide
cggcaccaatactcacatcatggcgactgaggcgtccaattatgctcagtatcg

SEQ ID NO: 373431 - DNA, 52 bp, Artificial
  Synthetic oligonucleotide
cggcaccataggagtcgtggacacgtctgttaatccactggtagagatccca

SEQ ID NO: 373432 - DNA, 55 bp, Artificial
  Synthetic oligonucleotide
cggcacccacatctgtcgaccaggacgaacttgtgaccttattttagcacgatca

SEQ ID NO: 373433 - DNA, 55 bp, Artificial
  Synthetic oligonucleotide
cggcaccgcttaactcacttcaacagttatccaccgggctagacacatatccgac

SEQ ID NO: 373434 - DNA, 60 bp, Artificial
  Synthetic oligonucleotide
cggcaccgtacaatgagaagcaacaagtgttgtcgctggcttagtcacgtatcttgacca

SEQ ID NO: 373435 - DNA, 55 bp, Artificial
  Synthetic oligonucleotide
cggcacctagcccgagagaaacatccggagttttacaaggactgctgacatcgag

SEQ ID NO: 373436 - DNA, 60 bp, Artificial
  Synthetic oligonucleotide
cggcacctctctcgattagcaataatcgtatgactatgggcttgaatgacggattaacat

SEQ ID NO: 373437 - DNA, 55 bp, Artificial
  Synthetic oligonucleotide
cggcaccttataccacgggttaggcgtcattgtgccgttcattacacgcgtgtac

SEQ ID NO: 373438 - DNA, 56 bp, Artificial
  Synthetic oligonucleotide
cggcacgagacctaatgctaatgactggaccaccaaactgggaaggaacccttgct

SEQ ID NO: 373439 - DNA, 55 bp, Artificial
  Synthetic oligonucleotide
cggcacgatgaccgcttagacgcgctgtatggcgctatacggcaactgacctctc

SEQ ID NO: 373440 - DNA, 56 bp, Artificial
  Synthetic oligonucleotide
cggcacgcctagtgccaccctagggacaaataatcccgttgggcgcccacctgaga

SEQ ID NO: 373441 - DNA, 60 bp, Artificial
  Synthetic oligonucleotide
cggcacgcgtcatagacttcgtaggcgcgtcaagaaacgagtagaccccaccatgcacga

SEQ ID NO: 373442 - DNA, 60 bp, Artificial
  Synthetic oligonucleotide
cggcacggtcatcaatgggtacggagtgttcaacggctcgactctgctgcgtcgcgagac

SEQ ID NO: 373443 - DNA, 55 bp, Artificial
  Synthetic oligonucleotide
cggcacgtagcattgctttgcctaaagaccaagggggtatggctataggtggggg

SEQ ID NO: 373444 - DNA, 59 bp, Artificial
  Synthetic oligonucleotide
cggcacgttggcccaggcgagggggcagtgcaatggatgaaccggctaatagctttcgc

SEQ ID NO: 373445 - DNA, 60 bp, Artificial
  Synthetic oligonucleotide
cggcactaacgccgatgagacgttggtgcatagggtgctgcaacacgaagcagcgattag

SEQ ID NO: 373446 - DNA, 60 bp, Artificial
  Synthetic oligonucleotide
cggcactactcagaagcatttctggctgactcaaggctctactgtgatcaatttagaaca

SEQ ID NO: 373447 - DNA, 56 bp, Artificial
  Synthetic oligonucleotide
cggcactcctcccaaaatagtcatcggcccactcttgcatttcgtcgggaacgtta

SEQ ID NO: 373448 - DNA, 55 bp, Artificial
  Synthetic oligonucleotide
cggcactctcttcagtatgccgaaatcaaacgtctagtatatacattgttgaggc

SEQ ID NO: 373449 - DNA, 60 bp, Artificial
  Synthetic oligonucleotide
cggcactgctcagctctacgcgggtgacgactgcgctttggctactgtcccagaggataa

SEQ ID NO: 373450 - DNA, 55 bp, Artificial
  Synthetic oligonucleotide
cggcactggggtcatccttttatcaactactatgagggcttagagaagctacaca

SEQ ID NO: 373451 - DNA, 60 bp, Artificial
  Synthetic oligonucleotide
cggcactggttcgagtccgtttggcgttcgcatgctgccttttgtagctgtggcgactgt

SEQ ID NO: 373452 - DNA, 51 bp, Artificial
  Synthetic oligonucleotide
cggcactggttttcgaaaatcgtaccctaacattaacgaacgtttgtacta

SEQ ID NO: 373453 - DNA, 59 bp, Artificial
  Synthetic oligonucleotide
cggcactgtgattgtggtaggtaggggcttccaacagatattgcagaggtccgaattcc

SEQ ID NO: 373454 - DNA, 55 bp, Artificial
  Synthetic oligonucleotide
cggcacttactcagttttgcctccttggtacattcacggccgctatacagtcccc

SEQ ID NO: 373455 - DNA, 53 bp, Artificial
  Synthetic oligonucleotide
cggcacttgactaaagtcggttggcttgtaaaacgacgtgtaaactgtaatag

SEQ ID NO: 373456 - DNA, 53 bp, Artificial
  Synthetic oligonucleotide
cggcactttgctgactcggatagatgtccgggctaaggctgcaacctttgata

SEQ ID NO: 373457 - DNA, 55 bp, Artificial
  Synthetic oligonucleotide
cggcagaacctgccgccgctatcgctttcaagtgacctatccaagcgaaatgaac

SEQ ID NO: 373458 - DNA, 51 bp, Artificial
  Synthetic oligonucleotide
cggcagacaccacattctcggtagcccattcttcaagttcctcgggaactt

SEQ ID NO: 373459 - DNA, 55 bp, Artificial
  Synthetic oligonucleotide
cggcagaccttgcccttcccgacggaaatggaaacctcgcgatttcgatcgtcga

SEQ ID NO: 373460 - DNA, 55 bp, Artificial
  Synthetic oligonucleotide
cggcagacgtagttacagaccacgtagatcatatgctagagcagttaagccggtt

SEQ ID NO: 373461 - DNA, 55 bp, Artificial
  Synthetic oligonucleotide
cggcagactcaattcccgagaactttcgactcaagatcgagcttggagtggggcg

SEQ ID NO: 373462 - DNA, 60 bp, Artificial
  Synthetic oligonucleotide
cggcagactggcaagctgtcgtggaactttatgctgaactggaagaagccacatcttttc

SEQ ID NO: 373463 - DNA, 55 bp, Artificial
  Synthetic oligonucleotide
cggcagagaagcagaagtgtcgtggtatatgggtagatggtaggcctggttgtgg

SEQ ID NO: 373464 - DNA, 55 bp, Artificial
  Synthetic oligonucleotide
cggcagagaatttatatgagatcaattgttaatcttttggggattcctgtccgac

SEQ ID NO: 373465 - DNA, 60 bp, Artificial
  Synthetic oligonucleotide
cggcagagcacttgcctgcaggaccatgtgcaatattggggacttgtgcgcagggagagc

SEQ ID NO: 373466 - DNA, 55 bp, Artificial
  Synthetic oligonucleotide
cggcagaggaaaaggtcgtgaccaaggtttgcactctggaagagtggccgtttcc

SEQ ID NO: 373467 - DNA, 55 bp, Artificial
  Synthetic oligonucleotide
cggcagaggtttccagacttaagcagaccctcacagctaggaacgtgttacacgg

SEQ ID NO: 373468 - DNA, 55 bp, Artificial
  Synthetic oligonucleotide
cggcagagtcgcaatgcggctgccctaatcgctgggtgtgggttgaagcttaagg

SEQ ID NO: 373469 - DNA, 51 bp, Artificial
  Synthetic oligonucleotide
cggcagatatggcgtgcattcaaatatgtttaagaagcatcctagtatttg

SEQ ID NO: 373470 - DNA, 55 bp, Artificial
  Synthetic oligonucleotide
cggcagatgaggtggctcgagaagtagctatacgtccgttgagcacccaggcacc

SEQ ID NO: 373471 - DNA, 55 bp, Artificial
  Synthetic oligonucleotide
cggcagcaccttcacgttcttgttgttctcgccgccgacgatgaccgacttccgc

SEQ ID NO: 373472 - DNA, 60 bp, Artificial
  Synthetic oligonucleotide
cggcagcacgctaggagtcatgcttcatctctgaggatgtgttatccctggctgcaagcg

SEQ ID NO: 373473 - DNA, 55 bp, Artificial
  Synthetic oligonucleotide
cggcagcagagatggaaagagaatacgcgaatgttacaccagcccatgtgatacc

SEQ ID NO: 373474 - DNA, 60 bp, Artificial
  Synthetic oligonucleotide
cggcagcatcattagctgtctgttgacctcctctagcagatcgtccatcgatctgaaacc

SEQ ID NO: 373475 - DNA, 60 bp, Artificial
  Synthetic oligonucleotide
cggcagccacctgatagatggatgactaatgcccggatgacacactatcagagtctgctg

SEQ ID NO: 373476 - DNA, 55 bp, Artificial
  Synthetic oligonucleotide
cggcagccctcgctaacgttaacactagattgtttggtctagatggtaacgtggc

SEQ ID NO: 373477 - DNA, 55 bp, Artificial
  Synthetic oligonucleotide
cggcagcctactcccttatctccacctctaagggacactcatccacaggccatgc

SEQ ID NO: 373478 - DNA, 55 bp, Artificial
  Synthetic oligonucleotide
cggcagcgaaggttatagtcgcggtcatgagcaatgagagcggtctgactctcac

SEQ ID NO: 373479 - DNA, 55 bp, Artificial
  Synthetic oligonucleotide
cggcagcgtacacaccgatccaggccgtcccgtgtacccacagaaaccaataaag

SEQ ID NO: 373480 - DNA, 55 bp, Artificial
  Synthetic oligonucleotide
cggcagcttgatggaaacaaacgtctactacaaaagggttgacaagtggactgac

SEQ ID NO: 373481 - DNA, 58 bp, Artificial
  Synthetic oligonucleotide
cggcagggggaggtggactaggagatatagacgatggcgccgcaagggcaaacgcaga

SEQ ID NO: 373482 - DNA, 55 bp, Artificial
  Synthetic oligonucleotide
cggcagtacgggcattcaactatcgcaggtaatcttgccttactcaattcgtaac

SEQ ID NO: 373483 - DNA, 55 bp, Artificial
  Synthetic oligonucleotide
cggcagtagactggacaggttggttgctggttgtcgtcctgttgggagtgacact

SEQ ID NO: 373484 - DNA, 55 bp, Artificial
  Synthetic oligonucleotide
cggcagtcaggagaggagacctagaggtacaacttttctggcatgcatgtcaggg

SEQ ID NO: 373485 - DNA, 52 bp, Artificial
  Synthetic oligonucleotide
cggcagtccagacacccggcacgtgggtcacaccgagcgagcttgaaccgcg

SEQ ID NO: 373486 - DNA, 55 bp, Artificial
  Synthetic oligonucleotide
cggcagtgaaagttgacgggattgcctcctggatccacgcttcacacgtcaagag

SEQ ID NO: 373487 - DNA, 55 bp, Artificial
  Synthetic oligonucleotide
cggcagtgaaggaggagagttgaaacggaggaacccacggctccggagccttcga

SEQ ID NO: 373488 - DNA, 55 bp, Artificial
  Synthetic oligonucleotide
cggcagtgccgcggactgggagggcatttgcctacatcacaaatgcgcttttagc

SEQ ID NO: 373489 - DNA, 55 bp, Artificial
  Synthetic oligonucleotide
cggcagtgttgggttggggaaggttctcgtggacatccttgcagggtatggcgcg

SEQ ID NO: 373490 - DNA, 55 bp, Artificial
  Synthetic oligonucleotide
cggcagttcgatcagttggtagacaaagtggtggaagacttacgcggctactggc

SEQ ID NO: 373491 - DNA, 56 bp, Artificial
  Synthetic oligonucleotide
cggcagttcggtaacagggaccagcggccatacattatggaaggtctgtgggaaac

SEQ ID NO: 373492 - DNA, 55 bp, Artificial
  Synthetic oligonucleotide
cggcagttggagatcaacaggtgggaggggctatcgtcgatgtgatgtgccacgc

SEQ ID NO: 373493 - DNA, 55 bp, Artificial
  Synthetic oligonucleotide
cggcagttgttgagaataacacggaaccagtcttccgggataccgtgcaccgcct

SEQ ID NO: 373494 - DNA, 55 bp, Artificial
  Synthetic oligonucleotide
cggcagtttacataatgacagttttccaccctgagacaaggagtgcagagttgcc

SEQ ID NO: 373495 - DNA, 52 bp, Artificial
  Synthetic oligonucleotide
cggcataagagaccagattggcgtccggaagaggctaaccgtgcagtcgccg

SEQ ID NO: 373496 - DNA, 60 bp, Artificial
  Synthetic oligonucleotide
cggcataattagagtgccgtacttcgtacgcgctcaggggctcattcgtgcatgcatgtt

SEQ ID NO: 373497 - DNA, 59 bp, Artificial
  Synthetic oligonucleotide
cggcatacgcgcaccccctttactcaccttactctgcagtgactaacagattaggctcc

SEQ ID NO: 373498 - DNA, 60 bp, Artificial
  Synthetic oligonucleotide
cggcataggagtcacctcctatggcacttcacctcatcctcatgccgctcataaggccat

SEQ ID NO: 373499 - DNA, 55 bp, Artificial
  Synthetic oligonucleotide
cggcatagtgcttttgccagtcatcacatcacaagttactaatttaactggcgga

SEQ ID NO: 373500 - DNA, 60 bp, Artificial
  Synthetic oligonucleotide
cggcatataacagagcgggagcttggtgtaggagctaagtcaccgtcttacatctagagc

SEQ ID NO: 373501 - DNA, 57 bp, Artificial
  Synthetic oligonucleotide
cggcatatcataaatagtttcaaactaccctttggtattgccactgaggctttaggc

SEQ ID NO: 373502 - DNA, 55 bp, Artificial
  Synthetic oligonucleotide
cggcatcaaggcctccattgtcagttcgggcaattgtaaatctatacgattagct

SEQ ID NO: 373503 - DNA, 55 bp, Artificial
  Synthetic oligonucleotide
cggcatcatcacagctggtggtgagggtcatgtggcatttatagatctacgccac

SEQ ID NO: 373504 - DNA, 55 bp, Artificial
  Synthetic oligonucleotide
cggcatccaaacactccttcgtggccaagttacatttgtgagcgaggtcggtctc

SEQ ID NO: 373505 - DNA, 55 bp, Artificial
  Synthetic oligonucleotide
cggcatccacaaagtgacaggacgccatatctggactcaaacatggcggcagggg

SEQ ID NO: 373506 - DNA, 55 bp, Artificial
  Synthetic oligonucleotide
cggcatcccctgataattttgaggctatttatccaaggcataaggctggggacac

SEQ ID NO: 373507 - DNA, 55 bp, Artificial
  Synthetic oligonucleotide
cggcatcgcacttgaggtcgcttaagtgagaattttcctttcttgcctcgttgtt

SEQ ID NO: 373508 - DNA, 55 bp, Artificial
  Synthetic oligonucleotide
cggcatctattctaagcagactaagtacgattcgtgtgtcatcaaggtgagtcgc

SEQ ID NO: 373509 - DNA, 55 bp, Artificial
  Synthetic oligonucleotide
cggcatctatttgaacggaacaatggtgagctcttaataaagtcgcgacatggtg

SEQ ID NO: 373510 - DNA, 53 bp, Artificial
  Synthetic oligonucleotide
cggcatctctctgttgattggctgctctaaagttcccgaatgttctacgacgc

SEQ ID NO: 373511 - DNA, 59 bp, Artificial
  Synthetic oligonucleotide
cggcatctctgtaaagttcttgtaaagaattccagactataccatatgccgtaattaga

SEQ ID NO: 373512 - DNA, 55 bp, Artificial
  Synthetic oligonucleotide
cggcatctctgttgacgctgtacttgacgagttagactccactgcgtttgctgta

SEQ ID NO: 373513 - DNA, 55 bp, Artificial
  Synthetic oligonucleotide
cggcatctgttttggtaaccaggtgtttgtaactgttgtggatacaactcgcagc

SEQ ID NO: 373514 - DNA, 60 bp, Artificial
  Synthetic oligonucleotide
cggcatgaaacagtacaggactgcaattgttcaatctaccctggccacgtaacaggtcat

SEQ ID NO: 373515 - DNA, 55 bp, Artificial
  Synthetic oligonucleotide
cggcatgaccagaataacgccatcgctatactgaaccaaatcgcatcccaaggca

SEQ ID NO: 373516 - DNA, 55 bp, Artificial
  Synthetic oligonucleotide
cggcatgattaggctggttaagagggtccgcttaaaggaggtgtctacggaggct

SEQ ID NO: 373517 - DNA, 55 bp, Artificial
  Synthetic oligonucleotide
cggcatgcctctggcaccaggaatgccacaatacagatcagaatccgataaagac

SEQ ID NO: 373518 - DNA, 55 bp, Artificial
  Synthetic oligonucleotide
cggcatgctctccgccatgagagtggccaacaaattgaaggatgtgacctccgtg

SEQ ID NO: 373519 - DNA, 55 bp, Artificial
  Synthetic oligonucleotide
cggcatggacgattcggggaagatggtcgctcccttgagcagacctccgaaggtc

SEQ ID NO: 373520 - DNA, 55 bp, Artificial
  Synthetic oligonucleotide
cggcatggcagtgccagtggcttatgatcaattgccaccaaagagtgaggacttg

SEQ ID NO: 373521 - DNA, 60 bp, Artificial
  Synthetic oligonucleotide
cggcatgggcgatgaatttcgctgtctcgttaaaagagccgatacctgaccctcctgtgc

SEQ ID NO: 373522 - DNA, 59 bp, Artificial
  Synthetic oligonucleotide
cggcatggtgtttggtctaatttagagttagaggattctgaagcagaggagatggttta

SEQ ID NO: 373523 - DNA, 55 bp, Artificial
  Synthetic oligonucleotide
cggcatgtatttaccaataacgggatcactagacgctgtatacacaaattcaact

SEQ ID NO: 373524 - DNA, 53 bp, Artificial
  Synthetic oligonucleotide
cggcatgtcaggtgtacccgtagcccccggttaggctttggtattacacttaa

SEQ ID NO: 373525 - DNA, 55 bp, Artificial
  Synthetic oligonucleotide
cggcatgtcgtagttctggcaaccaggccatgatcgcgtagtctccgcgagttgc

SEQ ID NO: 373526 - DNA, 55 bp, Artificial
  Synthetic oligonucleotide
cggcatgtcgttgtaagaggtaatcaccaccggctttccgaatgctctggacgtc

SEQ ID NO: 373527 - DNA, 60 bp, Artificial
  Synthetic oligonucleotide
cggcattcacagggaatacagagggcagaacatctgacatgaggactgaaatcataagga

SEQ ID NO: 373528 - DNA, 46 bp, Artificial
  Synthetic oligonucleotide
cggcattcaggttttggcattgctgacggacgaggggatatggtat

SEQ ID NO: 373529 - DNA, 55 bp, Artificial
  Synthetic oligonucleotide
cggcatttctcagggatctgcggaaaagagcaaactggagatgccgttggcagtg

SEQ ID NO: 373530 - DNA, 56 bp, Artificial
  Synthetic oligonucleotide
cggccaaaatttcacaggcaagcaacgataaggtgtcggacggaccaacgtatgtg

SEQ ID NO: 373531 - DNA, 55 bp, Artificial
  Synthetic oligonucleotide
cggccaaatttcaggaatagtttgttgaaattaagtcgccaaattatgcgatgac

SEQ ID NO: 373532 - DNA, 60 bp, Artificial
  Synthetic oligonucleotide
cggccaacaatctggagccatctatgtgagcaactacagagtggtgaatagacacttggc

SEQ ID NO: 373533 - DNA, 55 bp, Artificial
  Synthetic oligonucleotide
cggccaacactgtcaagatctacgcgaataacgaattgcagttaaccgtcgcgcc

SEQ ID NO: 373534 - DNA, 60 bp, Artificial
  Synthetic oligonucleotide
cggccaaccaaggagtgcaagctccttggacgtcatattacagacatggtgtgaagagcc

SEQ ID NO: 373535 - DNA, 55 bp, Artificial
  Synthetic oligonucleotide
cggccaaccggacgatgatgaagtctcaacctggtccgctcaaatcaaccacatc

SEQ ID NO: 373536 - DNA, 55 bp, Artificial
  Synthetic oligonucleotide
cggccaagataaccaacggttttagcacagatctagtcatagccacagtgtcggc

SEQ ID NO: 373537 - DNA, 55 bp, Artificial
  Synthetic oligonucleotide
cggccaagatcaatcggtaattgctacgaaatttccacccgtcggattaaagaga

SEQ ID NO: 373538 - DNA, 55 bp, Artificial
  Synthetic oligonucleotide
cggccaagcgggggactcccatcgagagtacctcggtccgcgtcccgattcacga

SEQ ID NO: 373539 - DNA, 53 bp, Artificial
  Synthetic oligonucleotide
cggccaagtgttttccaattagccgggtaatggacgtttctttcagatgtccg

SEQ ID NO: 373540 - DNA, 57 bp, Artificial
  Synthetic oligonucleotide
cggccaatcatgggatagctgtaaaggttagttagtagtggtgggccactatatact

SEQ ID NO: 373541 - DNA, 60 bp, Artificial
  Synthetic oligonucleotide
cggccaatcatgtagtagctgtaaaggttgtgtattagtggtgggccactatatacttgc

SEQ ID NO: 373542 - DNA, 55 bp, Artificial
  Synthetic oligonucleotide
cggccaatgccagagagcgtcgagagtatgttatatgcatacggcacacagatga

SEQ ID NO: 373543 - DNA, 52 bp, Artificial
  Synthetic oligonucleotide
cggccaatgggggagccgtgcccgcgtcccgggagcccgcattggctggcgc

SEQ ID NO: 373544 - DNA, 52 bp, Artificial
  Synthetic oligonucleotide
cggccaccattggcgcgcttgaggaaattcagaccccctacgcgcgcgccaa

SEQ ID NO: 373545 - DNA, 55 bp, Artificial
  Synthetic oligonucleotide
cggccaccgacaagatggagttttcaggcatttgaaccgactcaacaatagtatt

SEQ ID NO: 373546 - DNA, 57 bp, Artificial
  Synthetic oligonucleotide
cggccaccggtgtttataggatcatgactcgtggactactaggtaactatcaagccg

SEQ ID NO: 373547 - DNA, 55 bp, Artificial
  Synthetic oligonucleotide
cggccacctgcctagcgttgcgcttggtaatgggccaccagcattttacacaacc

SEQ ID NO: 373548 - DNA, 55 bp, Artificial
  Synthetic oligonucleotide
cggccacctgtgtcttcaaagtgctggccccgtaccgcccagaggtcatagaagc

SEQ ID NO: 373549 - DNA, 55 bp, Artificial
  Synthetic oligonucleotide
cggccacgaaattgggtgtcacgacagaatcatcgctaaatgcccgcattactac

SEQ ID NO: 373550 - DNA, 60 bp, Artificial
  Synthetic oligonucleotide
cggccacgatatcccaccccatcattcactcaaggttgaatgcagtaggtctagtcaacc

SEQ ID NO: 373551 - DNA, 55 bp, Artificial
  Synthetic oligonucleotide
cggccacgttaagaatggatccatgaggatctctgggtcgcggtggtgcagtaac

SEQ ID NO: 373552 - DNA, 60 bp, Artificial
  Synthetic oligonucleotide
cggccactctggctgagtgtgaagaagttctggcatacggagacaccgaacagattcctg

SEQ ID NO: 373553 - DNA, 55 bp, Artificial
  Synthetic oligonucleotide
cggccagaatgactattccagcagtagtagcggctttcctagtgatgatcttggg

SEQ ID NO: 373554 - DNA, 55 bp, Artificial
  Synthetic oligonucleotide
cggccagagacgttgtgcaggcttgccctcactgcaattccgccccagctatagg

SEQ ID NO: 373555 - DNA, 55 bp, Artificial
  Synthetic oligonucleotide
cggccagggaaagagtttccttgcgaacgtgctcgcacaagcaatctccacacac

SEQ ID NO: 373556 - DNA, 55 bp, Artificial
  Synthetic oligonucleotide
cggccaggtagatgaattggcgagtctcattgtcagcgtggcccgaaccactgcc

SEQ ID NO: 373557 - DNA, 57 bp, Artificial
  Synthetic oligonucleotide
cggccaggtgtggtcccccgctctgctaaacgacaacatagggcctggcgaggcggc

SEQ ID NO: 373558 - DNA, 55 bp, Artificial
  Synthetic oligonucleotide
cggccataaccctggttttgagggagctcgcttactaggaatttctgggcagagt

SEQ ID NO: 373559 - DNA, 60 bp, Artificial
  Synthetic oligonucleotide
cggccatcaacccgtgggatgcgtcattggccaactccatgctgtctatgtttgagacca

SEQ ID NO: 373560 - DNA, 55 bp, Artificial
  Synthetic oligonucleotide
cggccatcccaattttggctcggccggagtacaatcctcccctagttgacacttg

SEQ ID NO: 373561 - DNA, 60 bp, Artificial
  Synthetic oligonucleotide
cggccatctctataaaagcgaggtgcttaacactggtgacacggctcacaggcaatatgc

SEQ ID NO: 373562 - DNA, 54 bp, Artificial
  Synthetic oligonucleotide
cggccattcgttaatattaccgaatggccgcgcaaatttttaggtgggccctca

SEQ ID NO: 373563 - DNA, 54 bp, Artificial
  Synthetic oligonucleotide
cggccattgttttgttgtcgcaaaattccgatcggtggaagggtttattgacag

SEQ ID NO: 373564 - DNA, 60 bp, Artificial
  Synthetic oligonucleotide
cggcccaaccggcatgaatccacctccgtctgcgagtaacattcgagtctctgtgtatgg

SEQ ID NO: 373565 - DNA, 54 bp, Artificial
  Synthetic oligonucleotide
cggcccaagatcatcttggcgcgaggaccccgatatgcccatgaccccggagca

SEQ ID NO: 373566 - DNA, 55 bp, Artificial
  Synthetic oligonucleotide
cggcccaatgcagcttgaccgtgcttccatagggaaactcgcggatctcattgcg

SEQ ID NO: 373567 - DNA, 55 bp, Artificial
  Synthetic oligonucleotide
cggcccacctaaagaggttgtggaaaatgctggacccaagacaaggcttggctgt

SEQ ID NO: 373568 - DNA, 60 bp, Artificial
  Synthetic oligonucleotide
cggcccactaatagctggaggcatgctaatagcatgttacgtcatatccggaagctcagc

SEQ ID NO: 373569 - DNA, 51 bp, Artificial
  Synthetic oligonucleotide
cggcccactagatggagaagagctagaatactcacaggagataacctggga

SEQ ID NO: 373570 - DNA, 51 bp, Artificial
  Synthetic oligonucleotide
cggcccataattcacgctgttgctcccgattatcgagtagaacataatcct

SEQ ID NO: 373571 - DNA, 55 bp, Artificial
  Synthetic oligonucleotide
cggcccatgtatatcactgagaaatgtttatgacatgaagatagagtgcccgcat

SEQ ID NO: 373572 - DNA, 58 bp, Artificial
  Synthetic oligonucleotide
cggcccattagtgaacggattcttagcacttatctgggtcgacctgaggagcctgttc

SEQ ID NO: 373573 - DNA, 51 bp, Artificial
  Synthetic oligonucleotide
cggcccccgaggaatggggagttctccgcggtcgtataatgtcgtctgggc

SEQ ID NO: 373574 - DNA, 57 bp, Artificial
  Synthetic oligonucleotide
cggccccctcacaatcagatgtagcactgattaggtttacaaatccagacacaggac

SEQ ID NO: 373575 - DNA, 55 bp, Artificial
  Synthetic oligonucleotide
cggccccgtaccgtaattggtgatgagcgacattcactggggcggaagcgtttcc

SEQ ID NO: 373576 - DNA, 54 bp, Artificial
  Synthetic oligonucleotide
cggcccctccgatattatacctgtggacaccttaaatccggtggagccttctac

SEQ ID NO: 373577 - DNA, 57 bp, Artificial
  Synthetic oligonucleotide
cggcccctcctgtaagtgaacctagacccttttcggtctagctgccctcagcatgcc

SEQ ID NO: 373578 - DNA, 56 bp, Artificial
  Synthetic oligonucleotide
cggcccctgaatgcggctaatcccaaccacggagcaggtggctacaacccagtaac

SEQ ID NO: 373579 - DNA, 58 bp, Artificial
  Synthetic oligonucleotide
cggcccctgaatgcggctaatcccaaccacggagcaggtggttgcaaaccagcaattg

SEQ ID NO: 373580 - DNA, 60 bp, Artificial
  Synthetic oligonucleotide
cggcccctgaatgtggctaaccttaaccctgcagctagagcacacaatccagtgtgtttc

SEQ ID NO: 373581 - DNA, 60 bp, Artificial
  Synthetic oligonucleotide
cggcccctgaatgtggctaatcctaaccccgtagctgtggtgtgcaatccagcacattcg

SEQ ID NO: 373582 - DNA, 53 bp, Artificial
  Synthetic oligonucleotide
cggcccctgtcttcagtttcggagccccggtcctgttggcaggtttggtcaaa

SEQ ID NO: 373583 - DNA, 55 bp, Artificial
  Synthetic oligonucleotide
cggcccgaggttttatggaaccaccctatacaacgtgtgattcacaatgagctcg

SEQ ID NO: 373584 - DNA, 57 bp, Artificial
  Synthetic oligonucleotide
cggcccgcccttccttagagtacggtttctgctatagctcatacaagcttttatcac

SEQ ID NO: 373585 - DNA, 53 bp, Artificial
  Synthetic oligonucleotide
cggcccgtaggggagaatagaacaccggggggtgatccaccaggagaagtagc

SEQ ID NO: 373586 - DNA, 55 bp, Artificial
  Synthetic oligonucleotide
cggcccgtcagcctgaaatgctggaacctcagaatcagaaattgctggagaacgg

SEQ ID NO: 373587 - DNA, 55 bp, Artificial
  Synthetic oligonucleotide
cggcccgttgagttgtccggtggagtaaatttgcaaattgttatcgcggcgcacc

SEQ ID NO: 373588 - DNA, 60 bp, Artificial
  Synthetic oligonucleotide
cggccctcatgcacacttcacccatgcagtctagtcatcatacatctagtcatcttcagg

SEQ ID NO: 373589 - DNA, 55 bp, Artificial
  Synthetic oligonucleotide
cggccctcgacatcattgaattcatactcaacaccgactcccaagagaacacggc

SEQ ID NO: 373590 - DNA, 55 bp, Artificial
  Synthetic oligonucleotide
cggccctcgttgtcatccagggtgtaggtacgtcccaggagaacgaacccatcga

SEQ ID NO: 373591 - DNA, 51 bp, Artificial
  Synthetic oligonucleotide
cggccctctatgtgggggacctgtgcgggtccgttttccttgtcgggcagc

SEQ ID NO: 373592 - DNA, 55 bp, Artificial
  Synthetic oligonucleotide
cggccctcttctacacacataggttcaattctagtggctgtcccgagaggatggc

SEQ ID NO: 373593 - DNA, 60 bp, Artificial
  Synthetic oligonucleotide
cggccctgagtcagtgcttgttaatacttatcagtggatcatcaggaattgggagactgt

SEQ ID NO: 373594 - DNA, 50 bp, Artificial
  Synthetic oligonucleotide
cggccctggtgacaggtctgtccgccgcttcaaaccgtccgctacattga

SEQ ID NO: 373595 - DNA, 59 bp, Artificial
  Synthetic oligonucleotide
cggcccttagtgtacttagaagtcataccgcatttacgctaacgcagcaatatacatta

SEQ ID NO: 373596 - DNA, 60 bp, Artificial
  Synthetic oligonucleotide
cggcccttctcgcagcaactatggaagccgagtcacctgggtccaacatgctggtgccca

SEQ ID NO: 373597 - DNA, 54 bp, Artificial
  Synthetic oligonucleotide
cggcccttgcggcactacccatcagacccccctcactacccctggctaccaaaa

SEQ ID NO: 373598 - DNA, 60 bp, Artificial
  Synthetic oligonucleotide
cggccgaagattgcaaagttcaagcccactttgctatatctattcatggaggttatgata

SEQ ID NO: 373599 - DNA, 59 bp, Artificial
  Synthetic oligonucleotide
cggccgacaatcttgaagggcagggatggcgactccttgcacctatcacggcctactcc

SEQ ID NO: 373600 - DNA, 55 bp, Artificial
  Synthetic oligonucleotide
cggccgacgctagaggtcttattcaatcttcccgcgcacatgccatcgttgcgct

SEQ ID NO: 373601 - DNA, 60 bp, Artificial
  Synthetic oligonucleotide
cggccgagcaacgactatgacgcatggtacataagggcaaccatggcagcattgcaagca

SEQ ID NO: 373602 - DNA, 55 bp, Artificial
  Synthetic oligonucleotide
cggccgaggcacttcccgattaagtttttagatgttccagggctcatttgattcg

SEQ ID NO: 373603 - DNA, 60 bp, Artificial
  Synthetic oligonucleotide
cggccgaggctatggaggttgctagccaggctaggcaaatggtacaggcaatgagaacaa

SEQ ID NO: 373604 - DNA, 55 bp, Artificial
  Synthetic oligonucleotide
cggccgatcccttgctgcgaatgtcgttgaatggcgggtaactcttagagtttgc

SEQ ID NO: 373605 - DNA, 55 bp, Artificial
  Synthetic oligonucleotide
cggccgattatgctgacaagtgggcactgattaagggagcggatggtgctaacgg

SEQ ID NO: 373606 - DNA, 60 bp, Artificial
  Synthetic oligonucleotide
cggccgcacactccattacacccccgaatctcaccacgcaggcagctacgaccagcctct

SEQ ID NO: 373607 - DNA, 55 bp, Artificial
  Synthetic oligonucleotide
cggccgcgcagcggaactacggccaaaataatcatcggcccactcttgcatctgc

SEQ ID NO: 373608 - DNA, 55 bp, Artificial
  Synthetic oligonucleotide
cggccgctccatccaatacgcagggaactgtagcaatgggattcctgtatgattc

SEQ ID NO: 373609 - DNA, 56 bp, Artificial
  Synthetic oligonucleotide
cggccggacagggtacatcagaaactttctctatgggcctattgtgccttaccttg

SEQ ID NO: 373610 - DNA, 54 bp, Artificial
  Synthetic oligonucleotide
cggccggattacaatcctccactgttagagtcttggaaagacccggactacgtc

SEQ ID NO: 373611 - DNA, 58 bp, Artificial
  Synthetic oligonucleotide
cggccgtaacttagctgatatatctgttgtccctcttaacatgaagtacgtagtaata

SEQ ID NO: 373612 - DNA, 55 bp, Artificial
  Synthetic oligonucleotide
cggccgtaaggaaagccatactaggagaagtagttagacctaggtgtgaatatca

SEQ ID NO: 373613 - DNA, 55 bp, Artificial
  Synthetic oligonucleotide
cggccgtagctgttgtagtggcgccacgatctcatcaacatatagccaccgatat

SEQ ID NO: 373614 - DNA, 60 bp, Artificial
  Synthetic oligonucleotide
cggccgtcaggcatttttgacaccgtcgttctatgtgaggcatacgacactggctgcgca

SEQ ID NO: 373615 - DNA, 55 bp, Artificial
  Synthetic oligonucleotide
cggcctaaaggatctgattgaagggcgattgcccgtttgcccttatactggagcg

SEQ ID NO: 373616 - DNA, 53 bp, Artificial
  Synthetic oligonucleotide
cggcctaacctccccctgtcctagcctacctgggggtatgctgtaggcaaccg

SEQ ID NO: 373617 - DNA, 55 bp, Artificial
  Synthetic oligonucleotide
cggcctaatgaccccgggagcggaaactgtgatgcaccgataaccggagggagcc

SEQ ID NO: 373618 - DNA, 50 bp, Artificial
  Synthetic oligonucleotide
cggcctacaccttgacaccccggcccataattcacgctgttgctcccgat

SEQ ID NO: 373619 - DNA, 56 bp, Artificial
  Synthetic oligonucleotide
cggcctacccttcgtgagtatgatcctaggcctagcaaacctggtgttgtacttcc

SEQ ID NO: 373620 - DNA, 55 bp, Artificial
  Synthetic oligonucleotide
cggcctagggctaagttcctctattcggtatcatgcctttacgaaagcatacgag

SEQ ID NO: 373621 - DNA, 60 bp, Artificial
  Synthetic oligonucleotide
cggcctatcacgccgatggtgtgatagttggcttttggcgcgatccatctagtggtggtg

SEQ ID NO: 373622 - DNA, 60 bp, Artificial
  Synthetic oligonucleotide
cggcctcatctgactccataaatcagatcacgtctgatctcactgagtacctattctacg

SEQ ID NO: 373623 - DNA, 55 bp, Artificial
  Synthetic oligonucleotide
cggcctcattcgaaatttgcgagatatgagtttagctcgttacgcatttgacttc

SEQ ID NO: 373624 - DNA, 55 bp, Artificial
  Synthetic oligonucleotide
cggcctccaaagcaagacctatgactttgatgctggtaaagtgactgccttcaag

SEQ ID NO: 373625 - DNA, 58 bp, Artificial
  Synthetic oligonucleotide
cggcctcgaccaatggaaacgctccttcatcgcttaacaatcatattgtcctctattt

SEQ ID NO: 373626 - DNA, 59 bp, Artificial
  Synthetic oligonucleotide
cggcctctcgaccggctgtcatgagtgtcaaagcctacacaattggtggaaagggacac

SEQ ID NO: 373627 - DNA, 58 bp, Artificial
  Synthetic oligonucleotide
cggcctctgcagcgtccggaaccgtggtgtcaatgggcaggcgggccaagggcaaaga

SEQ ID NO: 373628 - DNA, 57 bp, Artificial
  Synthetic oligonucleotide
cggcctgatttcctcgcccaccccatcaattattgatcgtctcggtgattattaaaa

SEQ ID NO: 373629 - DNA, 55 bp, Artificial
  Synthetic oligonucleotide
cggcctgcaatgacttctcggtgcgcctgttaagggatacaccgttcatatctca

SEQ ID NO: 373630 - DNA, 58 bp, Artificial
  Synthetic oligonucleotide
cggcctggcttttccatgaatggagggacgcccgttcacgagctcaacttactgacta

SEQ ID NO: 373631 - DNA, 60 bp, Artificial
  Synthetic oligonucleotide
cggcctggtgtgcgccacgtgtgagcagattgctgattcccagcatcggtcccacagaca

SEQ ID NO: 373632 - DNA, 55 bp, Artificial
  Synthetic oligonucleotide
cggcctgtatgatggttgctctggatagtaacaacatactgccttacacacctgc

SEQ ID NO: 373633 - DNA, 53 bp, Artificial
  Synthetic oligonucleotide
cggcctgttaatccatataacccatgtccaggaccacaacaagatctagatca

SEQ ID NO: 373634 - DNA, 55 bp, Artificial
  Synthetic oligonucleotide
cggccttaccatgcatatggaaggcagatcgagacacatccccgtataccccagt

SEQ ID NO: 373635 - DNA, 54 bp, Artificial
  Synthetic oligonucleotide
cggccttacccacgcacagggaagagccaacttggttaggggtgtaggtgttgc

SEQ ID NO: 373636 - DNA, 55 bp, Artificial
  Synthetic oligonucleotide
cggccttgcacggtagatactaccgttatatcgtctgacctactacactggtgcc

SEQ ID NO: 373637 - DNA, 60 bp, Artificial
  Synthetic oligonucleotide
cggcctttataatgtcgagagcctctcccgcacttcctgcattgacggcgttgtgatata

SEQ ID NO: 373638 - DNA, 54 bp, Artificial
  Synthetic oligonucleotide
cggcgaaaccaatggcttgtccaccgcaaccctcgtataaccattaactggcgg

SEQ ID NO: 373639 - DNA, 51 bp, Artificial
  Synthetic oligonucleotide
cggcgaaaccttattacgttgtgaacagtagtgggttttatggtcctccgg

SEQ ID NO: 373640 - DNA, 55 bp, Artificial
  Synthetic oligonucleotide
cggcgaaagctcgaaatgttcacgtacatgaggtttgctgcggagttcacctttg

SEQ ID NO: 373641 - DNA, 54 bp, Artificial
  Synthetic oligonucleotide
cggcgaaagggcttgcttgcgtttaggctggcgagatttaccctttggtttgac

SEQ ID NO: 373642 - DNA, 54 bp, Artificial
  Synthetic oligonucleotide
cggcgaaatacgagcctggaaccctagggttcgagctttgctccgatttaatcc

SEQ ID NO: 373643 - DNA, 52 bp, Artificial
  Synthetic oligonucleotide
cggcgaacgtcttagccttgcccgtctaatagggcgtgcaatgacgcctgga

SEQ ID NO: 373644 - DNA, 53 bp, Artificial
  Synthetic oligonucleotide
cggcgaacgtgatttgcccacacctacccgggactggtgttctatttcccaac

SEQ ID NO: 373645 - DNA, 55 bp, Artificial
  Synthetic oligonucleotide
cggcgaagactcaaatggacaccaacttcaagcaacaattaagataccagatgag

SEQ ID NO: 373646 - DNA, 55 bp, Artificial
  Synthetic oligonucleotide
cggcgaataatactataacagttaaactctacaatccgactgctagattatacgg

SEQ ID NO: 373647 - DNA, 55 bp, Artificial
  Synthetic oligonucleotide
cggcgaatcaaatgaggcatttgaagcccggctgaaatcactggagttggctaga

SEQ ID NO: 373648 - DNA, 55 bp, Artificial
  Synthetic oligonucleotide
cggcgacacattaagtgccgcatgtaatagtattttaaacagcaaatgtaagcgg

SEQ ID NO: 373649 - DNA, 55 bp, Artificial
  Synthetic oligonucleotide
cggcgacacgcaaacttgacttcagatgtattacagacagcgcacagatcacgct

SEQ ID NO: 373650 - DNA, 51 bp, Artificial
  Synthetic oligonucleotide
cggcgaccctgcacaaggtattaactttaaggcagggtctgctgttaacta

SEQ ID NO: 373651 - DNA, 54 bp, Artificial
  Synthetic oligonucleotide
cggcgaccgcagatctctttttgtcggcacgaagttccaccgtgccgcagttgc

SEQ ID NO: 373652 - DNA, 55 bp, Artificial
  Synthetic oligonucleotide
cggcgagaattcgactctcatcgctaactcgatgcataacatggctattgggacc

SEQ ID NO: 373653 - DNA, 60 bp, Artificial
  Synthetic oligonucleotide
cggcgagacgattccaacgagccattttgcatcctgattttcccactacaactgcaagaa

SEQ ID NO: 373654 - DNA, 55 bp, Artificial
  Synthetic oligonucleotide
cggcgagctaaatcaaatgaaaccagtctcaaaggtatcactctcaagggcgagt

SEQ ID NO: 373655 - DNA, 52 bp, Artificial
  Synthetic oligonucleotide
cggcgaggaactcctcagagccgtaaggatcatcaaaatcctctaccagagc

SEQ ID NO: 373656 - DNA, 56 bp, Artificial
  Synthetic oligonucleotide
cggcgagttgaattcaataaatttcatcccaaaggtgcaactctagagggtggact

SEQ ID NO: 373657 - DNA, 55 bp, Artificial
  Synthetic oligonucleotide
cggcgataacgatataatcgcaacgaaactgccggagtagtggtgcatgacaatc

SEQ ID NO: 373658 - DNA, 55 bp, Artificial
  Synthetic oligonucleotide
cggcgataaggctgaccatcgagcagtacacaattacgcgaagtatgtgtcgcgt

SEQ ID NO: 373659 - DNA, 55 bp, Artificial
  Synthetic oligonucleotide
cggcgatgaccggcctcgatgaggtatccatcgatgagtcgtgaggatgtccgcg

SEQ ID NO: 373660 - DNA, 55 bp, Artificial
  Synthetic oligonucleotide
cggcgatgggtgagtcttggcggtagagcttcgatgctgtacaaagctccgcttg

SEQ ID NO: 373661 - DNA, 55 bp, Artificial
  Synthetic oligonucleotide
cggcgattaaaccgttatatgagatcttcgatggcttcactctacccggttcggt

SEQ ID NO: 373662 - DNA, 50 bp, Artificial
  Synthetic oligonucleotide
cggcgcaaatgggccgtgtccggtctagtgtcgccctccactcaaatgtc

SEQ ID NO: 373663 - DNA, 55 bp, Artificial
  Synthetic oligonucleotide
cggcgcaagaacttgggtgggtcagattgtaggtatagacagactagcgggagaa

SEQ ID NO: 373664 - DNA, 55 bp, Artificial
  Synthetic oligonucleotide
cggcgcaatgatcggttttcgttctcccctggtactgctgtccggcggtatggac

SEQ ID NO: 373665 - DNA, 56 bp, Artificial
  Synthetic oligonucleotide
cggcgcatattgtatcaatggctatagatggattacttatattgctaatagtggac

SEQ ID NO: 373666 - DNA, 60 bp, Artificial
  Synthetic oligonucleotide
cggcgcatgactactccctgaagaccaaggaggccgtatgagtggcaagagctacactgt

SEQ ID NO: 373667 - DNA, 54 bp, Artificial
  Synthetic oligonucleotide
cggcgccaggaggaccctacaagattggaacctcagggtcttgccctaacgtta

SEQ ID NO: 373668 - DNA, 55 bp, Artificial
  Synthetic oligonucleotide
cggcgccatagctgggttcatcgaaaacggatgggaaggtttggttgatgggtgg

SEQ ID NO: 373669 - DNA, 55 bp, Artificial
  Synthetic oligonucleotide
cggcgccgcccactatgacggacagtacaaccacgggagcagttaatgggcaaac

SEQ ID NO: 373670 - DNA, 59 bp, Artificial
  Synthetic oligonucleotide
cggcgccgcttatggggtcgtcggacgtggccaattccgccatgactctgattacagcc

SEQ ID NO: 373671 - DNA, 58 bp, Artificial
  Synthetic oligonucleotide
cggcgccgtctgaacttcgacagcccgtatgccaaccgtgcgagtgcccccattgccc

SEQ ID NO: 373672 - DNA, 53 bp, Artificial
  Synthetic oligonucleotide
cggcgcctactcgctgacgtacgaccggcgcctacacgcgttcatctgccaca

SEQ ID NO: 373673 - DNA, 55 bp, Artificial
  Synthetic oligonucleotide
cggcgcctgctgaatgcaattagagccagattcaatgctaccttcacagtctgtg

SEQ ID NO: 373674 - DNA, 60 bp, Artificial
  Synthetic oligonucleotide
cggcgcgattagcaggcagttcgtgaactcacggccttggttgatgctacactaagtcga

SEQ ID NO: 373675 - DNA, 55 bp, Artificial
  Synthetic oligonucleotide
cggcgcgatttatacagggtataaggtgtctatcaaatgatgttacaaacagcat

SEQ ID NO: 373676 - DNA, 54 bp, Artificial
  Synthetic oligonucleotide
cggcgcgctgttacacttttatcgcatggaccccaaatgcgtgggtgaggtgac

SEQ ID NO: 373677 - DNA, 55 bp, Artificial
  Synthetic oligonucleotide
cggcgcgtgccacttgccgataagtgtacgtgcatggtgtcacgtacgccaattg

SEQ ID NO: 373678 - DNA, 54 bp, Artificial
  Synthetic oligonucleotide
cggcgcgtttaggtctactaccggggcaggagcgacacggtgacgcgaaacaaa

SEQ ID NO: 373679 - DNA, 51 bp, Artificial
  Synthetic oligonucleotide
cggcgctaacccccttgtggggctatacaaggccattactgccacgtacgc

SEQ ID NO: 373680 - DNA, 54 bp, Artificial
  Synthetic oligonucleotide
cggcgctaggtaagtttccacactcgtgaggttttgaagggtgactggtttcac

SEQ ID NO: 373681 - DNA, 60 bp, Artificial
  Synthetic oligonucleotide
cggcgctattcacgagggtgcagcagggcgtcgtgtctcgtcctcatttatgggagtccc

SEQ ID NO: 373682 - DNA, 55 bp, Artificial
  Synthetic oligonucleotide
cggcgctcagacgacagcgaataaaacggcgacggagagagaggaagattgcgag

SEQ ID NO: 373683 - DNA, 55 bp, Artificial
  Synthetic oligonucleotide
cggcgctcccgaacctccgatagttacaaaccatgttgaccactacactagcgta

SEQ ID NO: 373684 - DNA, 60 bp, Artificial
  Synthetic oligonucleotide
cggcgctgcgccccaatactccttctggaagaaatccatggaccacttcatatctgaccg

SEQ ID NO: 373685 - DNA, 59 bp, Artificial
  Synthetic oligonucleotide
cggcgctgctttggtatcgttactgaattaaatggagtgataggcgaaggtcacactgt

SEQ ID NO: 373686 - DNA, 55 bp, Artificial
  Synthetic oligonucleotide
cggcgctgtgtcgtcgggaacgtatgagcggtacgcgtactcgaacaactcgctc

SEQ ID NO: 373687 - DNA, 54 bp, Artificial
  Synthetic oligonucleotide
cggcgctttggatttcgtagatttgctacttttggctggtttgacgttggtttg

SEQ ID NO: 373688 - DNA, 60 bp, Artificial
  Synthetic oligonucleotide
cggcgcttttttgatcggtgcgctagtcgatgcgtgtgtagcaccaacggctagtgacag

SEQ ID NO: 373689 - DNA, 53 bp, Artificial
  Synthetic oligonucleotide
cggcggaaattaatcctaccgttaaccgcccatctactccgagaagcctagta

SEQ ID NO: 373690 - DNA, 58 bp, Artificial
  Synthetic oligonucleotide
cggcggaaggaggaaacttctcccattggacagaaccagaagacctcatttgcattga

SEQ ID NO: 373691 - DNA, 52 bp, Artificial
  Synthetic oligonucleotide
cggcggacataactacattcctattcttggcctacttttacacgctattgtt

SEQ ID NO: 373692 - DNA, 50 bp, Artificial
  Synthetic oligonucleotide
cggcggacgcattggaaaacctcggaatcatcaccaacccctactcaatc

SEQ ID NO: 373693 - DNA, 55 bp, Artificial
  Synthetic oligonucleotide
cggcggactccgttgactttgccgtgatcggcaacgaaataggtgacagcgggac

SEQ ID NO: 373694 - DNA, 55 bp, Artificial
  Synthetic oligonucleotide
cggcggcaatcaaagatcagaaagctgtgcatgctgacatgggttattggataga

SEQ ID NO: 373695 - DNA, 60 bp, Artificial
  Synthetic oligonucleotide
cggcggcagataactccgtggttacgtcatctctgagcatttcactggatcgaggaatat

SEQ ID NO: 373696 - DNA, 56 bp, Artificial
  Synthetic oligonucleotide
cggcggccattaagaagagctcgtctggtacgtcgtgtaaggtatatgtgggggcg

SEQ ID NO: 373697 - DNA, 55 bp, Artificial
  Synthetic oligonucleotide
cggcggccctgacaacagcaccaccctcacttatcgaaaggtttcatgcttgctg

SEQ ID NO: 373698 - DNA, 52 bp, Artificial
  Synthetic oligonucleotide
cggcggcgagggccctggggccccggggttgaatcccaccagatttctaata

SEQ ID NO: 373699 - DNA, 55 bp, Artificial
  Synthetic oligonucleotide
cggcggcggctattattacactacagtggtttctcctgccgctgacgcatatagt

SEQ ID NO: 373700 - DNA, 60 bp, Artificial
  Synthetic oligonucleotide
cggcggctgccgtggctaggaggaatggtggaatacgctggaagcaatcagacagcgatg

SEQ ID NO: 373701 - DNA, 55 bp, Artificial
  Synthetic oligonucleotide
cggcgggaattgaatcgctgtttgacgttctagccgcagctattagaactgaggg

SEQ ID NO: 373702 - DNA, 60 bp, Artificial
  Synthetic oligonucleotide
cggcgggcatacttgatgacattccaatggtcattagcacatcaaagaaaccgatgacga

SEQ ID NO: 373703 - DNA, 52 bp, Artificial
  Synthetic oligonucleotide
cggcgggccacgtttaaagagacttccctcattccccaaggggaacctgtgc

SEQ ID NO: 373704 - DNA, 57 bp, Artificial
  Synthetic oligonucleotide
cggcgggcgtaagcccgtccagatttggaacattagaacacatttgtgaagccgcag

SEQ ID NO: 373705 - DNA, 58 bp, Artificial
  Synthetic oligonucleotide
cggcggggaaggcgttacaaagagtggtcgagagcgaaattgggagcgctgctattga

SEQ ID NO: 373706 - DNA, 56 bp, Artificial
  Synthetic oligonucleotide
cggcggggcccatctcgactggggggcggcgtcctcagtactctcttactttctca

SEQ ID NO: 373707 - DNA, 53 bp, Artificial
  Synthetic oligonucleotide
cggcgggtaaggagatgcggcgttccgtcttccgtcccctactgcttggaacc

SEQ ID NO: 373708 - DNA, 55 bp, Artificial
  Synthetic oligonucleotide
cggcgggtccgtcccgcctcacaccaaccacaataccgacatctgagggattgtc

SEQ ID NO: 373709 - DNA, 56 bp, Artificial
  Synthetic oligonucleotide
cggcgggtgtttacggatgggaccggagagaagttacacacatcctcctgactgac

SEQ ID NO: 373710 - DNA, 54 bp, Artificial
  Synthetic oligonucleotide
cggcggtacgtattttacagtttcgttttgcatacacgaccaacagtacacaag

SEQ ID NO: 373711 - DNA, 55 bp, Artificial
  Synthetic oligonucleotide
cggcggtgcaaaggccagcagttttggagcatgatgcatctggacgcgcgtatag

SEQ ID NO: 373712 - DNA, 60 bp, Artificial
  Synthetic oligonucleotide
cggcggtgcagtgaatggattcttgacacttatctgggacgatctgtggaccctgtgcag

SEQ ID NO: 373713 - DNA, 55 bp, Artificial
  Synthetic oligonucleotide
cggcggtgctgtcgtgactggtctcctcatcgcacttgttgccttgcaatcggtc

SEQ ID NO: 373714 - DNA, 56 bp, Artificial
  Synthetic oligonucleotide
cggcggtggcacccccgggagggtaggtaccataacgctacgcagcagctagctac

SEQ ID NO: 373715 - DNA, 51 bp, Artificial
  Synthetic oligonucleotide
cggcggtgtgtacccctgggagggtaggtaccgtcgattacgggtacacta

SEQ ID NO: 373716 - DNA, 55 bp, Artificial
  Synthetic oligonucleotide
cggcggttcagggccgaactacacattgacgatgacgatcggggaccaggtcgag

SEQ ID NO: 373717 - DNA, 55 bp, Artificial
  Synthetic oligonucleotide
cggcggttctaccaccaaacccgtgagagacaacactgcgtgttgcatcattccg

SEQ ID NO: 373718 - DNA, 55 bp, Artificial
  Synthetic oligonucleotide
cggcggtttgctcgtcaccgtcagatcaagtttagcgattgctcgcatttgttga

SEQ ID NO: 373719 - DNA, 55 bp, Artificial
  Synthetic oligonucleotide
cggcgtaagcgtcgttggccgtctgcggggctcctcttgctgatcttccatcgat

SEQ ID NO: 373720 - DNA, 55 bp, Artificial
  Synthetic oligonucleotide
cggcgtactccggcagcagcttgcgtttcagctcgatcttccgctcgatcgactg

SEQ ID NO: 373721 - DNA, 58 bp, Artificial
  Synthetic oligonucleotide
cggcgtactcggcgttttctggaacacgcaccgagagatgtggcaggcggcagtgacg

SEQ ID NO: 373722 - DNA, 50 bp, Artificial
  Synthetic oligonucleotide
cggcgtagggaagcatagcgtgcgttccacctgcgtgcaccatctcagat

SEQ ID NO: 373723 - DNA, 55 bp, Artificial
  Synthetic oligonucleotide
cggcgtagttatagtagctatcatgtttacgaaagtctgaatgatatcagtccca

SEQ ID NO: 373724 - DNA, 55 bp, Artificial
  Synthetic oligonucleotide
cggcgtatttaattataactacacgtgggcgggtaaagactatgagcgtgtttca

SEQ ID NO: 373725 - DNA, 54 bp, Artificial
  Synthetic oligonucleotide
cggcgtcaatagcttgccaacgtatgccgagttattcgggccttattcgtctgc

SEQ ID NO: 373726 - DNA, 55 bp, Artificial
  Synthetic oligonucleotide
cggcgtcacaagcgactcgtaatacatgctttctatcggaaactgtttagacttg

SEQ ID NO: 373727 - DNA, 55 bp, Artificial
  Synthetic oligonucleotide
cggcgtcactacctggaagtattggactgggaaatctagcattgggtaactacat

SEQ ID NO: 373728 - DNA, 55 bp, Artificial
  Synthetic oligonucleotide
cggcgtcatcatgcctaatggttcatacataagcgccattgtgcaaggagagaga

SEQ ID NO: 373729 - DNA, 55 bp, Artificial
  Synthetic oligonucleotide
cggcgtcccactggaacgccgttggattttcaacaggtgtttaatgtgtacgata

SEQ ID NO: 373730 - DNA, 58 bp, Artificial
  Synthetic oligonucleotide
cggcgtcccgaagaggttcactccgtactgcttcgacttcgcactactggataacaga

SEQ ID NO: 373731 - DNA, 51 bp, Artificial
  Synthetic oligonucleotide
cggcgtcgggggggtcggggactttattaaacagactccgagttgccattg

SEQ ID NO: 373732 - DNA, 55 bp, Artificial
  Synthetic oligonucleotide
cggcgtgaattcaatgagaacagcggggcgcacggccacgatcacttacgaccta

SEQ ID NO: 373733 - DNA, 60 bp, Artificial
  Synthetic oligonucleotide
cggcgtgcataaaacctgttattgcagcgagacgctcgagggttaagccgacatgaccga

SEQ ID NO: 373734 - DNA, 60 bp, Artificial
  Synthetic oligonucleotide
cggcgtgctcagaccaatcacactggtggcctatgagaagatgacaccgctgtccatcct

SEQ ID NO: 373735 - DNA, 55 bp, Artificial
  Synthetic oligonucleotide
cggcgtgtgtgcactgtgcctctactacaacctccaagtgagcctgtggagacac

SEQ ID NO: 373736 - DNA, 58 bp, Artificial
  Synthetic oligonucleotide
cggcgtgtgttggactgtctatcatggcgccggctcaaagaccctagccggcccaaag

SEQ ID NO: 373737 - DNA, 55 bp, Artificial
  Synthetic oligonucleotide
cggcgtgttaagaagcctcgcaccacaggcagataaactgataccacggagccgt

SEQ ID NO: 373738 - DNA, 55 bp, Artificial
  Synthetic oligonucleotide
cggcgttaatagcttgccaacatatgcggagttattcggaccgtattcgtccgct

SEQ ID NO: 373739 - DNA, 55 bp, Artificial
  Synthetic oligonucleotide
cggcgttaccttccaaaatccctcgtttgtcgaggaatggagtggttgatgcgta

SEQ ID NO: 373740 - DNA, 55 bp, Artificial
  Synthetic oligonucleotide
cggcgttattggcagcctcgtctagcggtggggataacccaaagccagacgttcc

SEQ ID NO: 373741 - DNA, 60 bp, Artificial
  Synthetic oligonucleotide
cggcgttcatgctccttatgttgtcaagcgtatgatgcatgaggtggttatgaatgtggg

SEQ ID NO: 373742 - DNA, 54 bp, Artificial
  Synthetic oligonucleotide
cggcgttgaaagtcccggttgcaaaaccgacgaacactatactgccacagacgg

SEQ ID NO: 373743 - DNA, 55 bp, Artificial
  Synthetic oligonucleotide
cggcgttgacgggccctcccgcacgataggtgggacggcagcccactcaacccaa

SEQ ID NO: 373744 - DNA, 57 bp, Artificial
  Synthetic oligonucleotide
cggcgttgatactcaggtaaggtccggatgtcaaccaactatggaaccaaacacatc

SEQ ID NO: 373745 - DNA, 54 bp, Artificial
  Synthetic oligonucleotide
cggcgttgtcagtccaggttatgaaccccaacccacttatgtccaccactggaa

SEQ ID NO: 373746 - DNA, 52 bp, Artificial
  Synthetic oligonucleotide
cggcgttgttactgaacgaacgggaaaacttacgacgaaacaccgtatgcac

SEQ ID NO: 373747 - DNA, 55 bp, Artificial
  Synthetic oligonucleotide
cggcgtttcgatagatgattatacaaggatgtcgcaacctttcttcgaacatggt

SEQ ID NO: 373748 - DNA, 55 bp, Artificial
  Synthetic oligonucleotide
cggcgtttgatgtattgctggtttctttcccgttcatccagcagttccagcacgg

SEQ ID NO: 373749 - DNA, 55 bp, Artificial
  Synthetic oligonucleotide
cggcgtttgccttcagttatgagtcattctttcgcgcaagtgccatcagcgcgaa

SEQ ID NO: 373750 - DNA, 56 bp, Artificial
  Synthetic oligonucleotide
cggcgtttgttgagaagaaggctgcactcaaaattgagggaaccagaggtggaaac

SEQ ID NO: 373751 - DNA, 55 bp, Artificial
  Synthetic oligonucleotide
cggctaaaatggtcagtcgtgtctttacacgccgatgtcttacaagatgtcgagg

SEQ ID NO: 373752 - DNA, 56 bp, Artificial
  Synthetic oligonucleotide
cggctaaacacggacagtgaggttgacatccgctatttcgacaagaagatgtgtac

SEQ ID NO: 373753 - DNA, 54 bp, Artificial
  Synthetic oligonucleotide
cggctaaacgatccaaatctgtccgtcaaatggttaccgaggtaaacgtcattc

SEQ ID NO: 373754 - DNA, 54 bp, Artificial
  Synthetic oligonucleotide
cggctaacgttagtgttttgtgcaacagcgcgagatacagtaagagcgatgcga

SEQ ID NO: 373755 - DNA, 55 bp, Artificial
  Synthetic oligonucleotide
cggctaatattgttacgcttagcccgaactatcgtatcagaactggccaatggac

SEQ ID NO: 373756 - DNA, 59 bp, Artificial
  Synthetic oligonucleotide
cggctaatcctaactgcggagcacatgctcacaaaccagtgggtggtgtgtcgtaacgg

SEQ ID NO: 373757 - DNA, 59 bp, Artificial
  Synthetic oligonucleotide
cggctaatgtcctgctgattcaggtaaactgtcctacggatgtaattcgaacaatcaag

SEQ ID NO: 373758 - DNA, 55 bp, Artificial
  Synthetic oligonucleotide
cggctaatttgaatgatgtaatctgtagtggtggtgattatagcttcgcgctgcc

SEQ ID NO: 373759 - DNA, 58 bp, Artificial
  Synthetic oligonucleotide
cggctacaattgctatctccgcgttacctgctattgtgtgtttttcacccagttacga

SEQ ID NO: 373760 - DNA, 55 bp, Artificial
  Synthetic oligonucleotide
cggctacctggaaaagtggaacacttcatttccaagttctcatggaagggaatcc

SEQ ID NO: 373761 - DNA, 56 bp, Artificial
  Synthetic oligonucleotide
cggctacgaggcttgaacgatatggggctagctcgctatgctttcgacttctacga

SEQ ID NO: 373762 - DNA, 55 bp, Artificial
  Synthetic oligonucleotide
cggctacgagtaataaggtagttgttgcagaagtcaagaacgctaacgggaacga

SEQ ID NO: 373763 - DNA, 54 bp, Artificial
  Synthetic oligonucleotide
cggctacgataactcttttaccagatgctgaaaggtttagttttcctagagtaa

SEQ ID NO: 373764 - DNA, 55 bp, Artificial
  Synthetic oligonucleotide
cggctacgccggcctcccaaagggaaagccatgggcatgggactgattctcggaa

SEQ ID NO: 373765 - DNA, 60 bp, Artificial
  Synthetic oligonucleotide
cggctacgctgctcccactgcctgagaaagggctgcaacacaactgccttgatatcctgg

SEQ ID NO: 373766 - DNA, 60 bp, Artificial
  Synthetic oligonucleotide
cggctacggataagatactgcaaagcgctggaattggatcgcttgactccctcttggctg

SEQ ID NO: 373767 - DNA, 55 bp, Artificial
  Synthetic oligonucleotide
cggctacgttaggagaaatcaattgcggttgggcatgagggtgtctgcccttcaa

SEQ ID NO: 373768 - DNA, 55 bp, Artificial
  Synthetic oligonucleotide
cggctactgttatccgtggtcatctttatatacagggtgtcaaacttggcactgg

SEQ ID NO: 373769 - DNA, 54 bp, Artificial
  Synthetic oligonucleotide
cggctagaaataagattcttcaagaactttggttcaaaaagattccgactgaac

SEQ ID NO: 373770 - DNA, 52 bp, Artificial
  Synthetic oligonucleotide
cggctagaactgtggtcgctcagccttatgatcctaatcaagccgtaaagtg

SEQ ID NO: 373771 - DNA, 57 bp, Artificial
  Synthetic oligonucleotide
cggctagagcgcaattaggcactactgccgaggctataacaactagtgatagtttaa

SEQ ID NO: 373772 - DNA, 51 bp, Artificial
  Synthetic oligonucleotide
cggctagcgaggcgtggcacgccgactacgtgtgcgcgctgcgtggcgcac

SEQ ID NO: 373773 - DNA, 55 bp, Artificial
  Synthetic oligonucleotide
cggctagcggggtgtagtaggttaacgtaaaagttagccatttgcggatctgcca

SEQ ID NO: 373774 - DNA, 55 bp, Artificial
  Synthetic oligonucleotide
cggctaggggctatatccctaggacggcggtcagccaaagccaaacgacggctgt

SEQ ID NO: 373775 - DNA, 52 bp, Artificial
  Synthetic oligonucleotide
cggctagtacaccggtatcacggtacccttgtacgcctgttttatactccct

SEQ ID NO: 373776 - DNA, 51 bp, Artificial
  Synthetic oligonucleotide
cggctagtacactggtattacggtacccttgtacgcctgttttacacccct

SEQ ID NO: 373777 - DNA, 50 bp, Artificial
  Synthetic oligonucleotide
cggctagtactccggtattacggtacccttgtacgcctgttttatacccc

SEQ ID NO: 373778 - DNA, 53 bp, Artificial
  Synthetic oligonucleotide
cggctagtactctggtattacggtacctttgtacgcctgttttgtatcccttc

SEQ ID NO: 373779 - DNA, 55 bp, Artificial
  Synthetic oligonucleotide
cggctagtctggaaagcttaagctgacaggctgcccctcaggtagaataaagccc

SEQ ID NO: 373780 - DNA, 55 bp, Artificial
  Synthetic oligonucleotide
cggctataaagtgttatacagatccctcccctttcgtgaaaggctcgccagagct

SEQ ID NO: 373781 - DNA, 55 bp, Artificial
  Synthetic oligonucleotide
cggctatagtgatgtcgtgtcgacaatttcctttaatcgcgaaccaggccgtggt

SEQ ID NO: 373782 - DNA, 55 bp, Artificial
  Synthetic oligonucleotide
cggctatatagccacctctctggccaactattcggatacggcgtttagcgtgtac

SEQ ID NO: 373783 - DNA, 55 bp, Artificial
  Synthetic oligonucleotide
cggctatgggtccttctcagcgtcccagacttcagacgccgagtccagaggaacc

SEQ ID NO: 373784 - DNA, 60 bp, Artificial
  Synthetic oligonucleotide
cggctatgtaccaatggctgatgcgcctaccctgccaaagaagactaacatggtaccagt

SEQ ID NO: 373785 - DNA, 60 bp, Artificial
  Synthetic oligonucleotide
cggctatgtatgtagtgggatatttggggacaatcccaggcccatggatggcacaggctc

SEQ ID NO: 373786 - DNA, 60 bp, Artificial
  Synthetic oligonucleotide
cggctatgtgtgggacgagagtgacgtgtcacaagtgattgcgccgtctctaggtgcgag

SEQ ID NO: 373787 - DNA, 54 bp, Artificial
  Synthetic oligonucleotide
cggctattataatttcttgttcgggccaaagacggtcgacttgaacaacgtaca

SEQ ID NO: 373788 - DNA, 56 bp, Artificial
  Synthetic oligonucleotide
cggctattcttagaaaggcaaccaggagactgatccagctaatagtaagtgggagg

SEQ ID NO: 373789 - DNA, 52 bp, Artificial
  Synthetic oligonucleotide
cggctattgatgtgccgcaaaggcaaatttttatcgaggccgtaatcactga

SEQ ID NO: 373790 - DNA, 55 bp, Artificial
  Synthetic oligonucleotide
cggctcaccactaactgacaacccttgcgtcaacttccagattttggggccccag

SEQ ID NO: 373791 - DNA, 55 bp, Artificial
  Synthetic oligonucleotide
cggctcacgcgttcctactggggagaaggtgtgggaccgtgggaatgttacgctg

SEQ ID NO: 373792 - DNA, 55 bp, Artificial
  Synthetic oligonucleotide
cggctcagaggggagcacttgacagaaggaaattgtttatggtgccttaaaacat

SEQ ID NO: 373793 - DNA, 54 bp, Artificial
  Synthetic oligonucleotide
cggctcagctgccaccgggcacctatgagccggcatacctcggcggcaaggacc

SEQ ID NO: 373794 - DNA, 55 bp, Artificial
  Synthetic oligonucleotide
cggctcagtatgtgtggaatcagattatacggcttttaacgtctcgcaagatcac

SEQ ID NO: 373795 - DNA, 55 bp, Artificial
  Synthetic oligonucleotide
cggctcagtgggatacccaccggtgagaataccctcgaaattctctataatccgg

SEQ ID NO: 373796 - DNA, 59 bp, Artificial
  Synthetic oligonucleotide
cggctcatgtccaaagccacatcggttgactagtaaaggtatctgtagttgtggtgtgt

SEQ ID NO: 373797 - DNA, 59 bp, Artificial
  Synthetic oligonucleotide
cggctcattctcaaaacccagatgggataactttctaaggcgtccagtcgctcagcgat

SEQ ID NO: 373798 - DNA, 57 bp, Artificial
  Synthetic oligonucleotide
cggctccacaatcgtggaccaaaggcttggtagcgaactaggttgctacacaattaa

SEQ ID NO: 373799 - DNA, 55 bp, Artificial
  Synthetic oligonucleotide
cggctccacaggtttactcaccaatcgatggcaacggaaatacttccacgcagac

SEQ ID NO: 373800 - DNA, 52 bp, Artificial
  Synthetic oligonucleotide
cggctccaggaatccgttccaaaggaccgagggtaggacttggagcaccggg

SEQ ID NO: 373801 - DNA, 51 bp, Artificial
  Synthetic oligonucleotide
cggctcccgtccaacttggggcccaaatgacccccggcgaaggtcccgcaa

SEQ ID NO: 373802 - DNA, 55 bp, Artificial
  Synthetic oligonucleotide
cggctccctcaatgacttctgttccgtgcaaccgacctacctagaagtgatcggt

SEQ ID NO: 373803 - DNA, 54 bp, Artificial
  Synthetic oligonucleotide
cggctccgaccaacgcccttactgctggcactaccccccgagaccttgtggtat

SEQ ID NO: 373804 - DNA, 55 bp, Artificial
  Synthetic oligonucleotide
cggctccggtccctggctaacacccaggtgcctggtccactactcctataggctt

SEQ ID NO: 373805 - DNA, 56 bp, Artificial
  Synthetic oligonucleotide
cggctccgtccggagacgttcggctctttccgtaaacggtcatcgagatattgcgc

SEQ ID NO: 373806 - DNA, 55 bp, Artificial
  Synthetic oligonucleotide
cggctcctaagtgtacctgaatggtcctatatagtggaaaaggaaaacccagcga

SEQ ID NO: 373807 - DNA, 55 bp, Artificial
  Synthetic oligonucleotide
cggctcctacacactcactggttacgtaagtaatcagcctggctatacgacgcgc

SEQ ID NO: 373808 - DNA, 55 bp, Artificial
  Synthetic oligonucleotide
cggctcctcaagacaggtgaatgcaaaatagcaggagtattatccagaattgcag

SEQ ID NO: 373809 - DNA, 55 bp, Artificial
  Synthetic oligonucleotide
cggctcgatgctggttgagggcggggcactccaaggccgcggtgtatcgcccgtt

SEQ ID NO: 373810 - DNA, 55 bp, Artificial
  Synthetic oligonucleotide
cggctcgcgtggcgaagcggaaccacctgacgctcaccggccgcattcgggatat

SEQ ID NO: 373811 - DNA, 54 bp, Artificial
  Synthetic oligonucleotide
cggctcgcgttggcgccaattccgtatttatcggtactatttacgaccagggcg

SEQ ID NO: 373812 - DNA, 55 bp, Artificial
  Synthetic oligonucleotide
cggctcgggaaacccagggaacattacggggatatgccagctggcgcggaattcg

SEQ ID NO: 373813 - DNA, 60 bp, Artificial
  Synthetic oligonucleotide
cggctcgtatccggtcatccatgccgtagggcctaatttctctgccacgactgaagcgga

SEQ ID NO: 373814 - DNA, 60 bp, Artificial
  Synthetic oligonucleotide
cggctcgttcatacaacgccattgctatataagtttgcctcgctcactcacgagtgcgat

SEQ ID NO: 373815 - DNA, 55 bp, Artificial
  Synthetic oligonucleotide
cggctctaaggaccaccgcaaagcgtccggcaacagctaaacgcgcccctacttc

SEQ ID NO: 373816 - DNA, 60 bp, Artificial
  Synthetic oligonucleotide
cggctctaaggacgagagagtcgacgggccttctctgcagcaggttatgcgggatcagct

SEQ ID NO: 373817 - DNA, 60 bp, Artificial
  Synthetic oligonucleotide
cggctctaatagttgactgtgcggacgttgtcacgacggagacttccaatcaggcaggga

SEQ ID NO: 373818 - DNA, 60 bp, Artificial
  Synthetic oligonucleotide
cggctctaattgtgacatgacacgacatggtgataacatacttgtgtacgtcgcaagtta

SEQ ID NO: 373819 - DNA, 57 bp, Artificial
  Synthetic oligonucleotide
cggctctaggatatgaacctgccgcccgtatttgagatccaatccctcagcccccgt

SEQ ID NO: 373820 - DNA, 55 bp, Artificial
  Synthetic oligonucleotide
cggctctgagccggcagaccagggtgccaagggactgggcattgttaaagacctt

SEQ ID NO: 373821 - DNA, 60 bp, Artificial
  Synthetic oligonucleotide
cggctcttggctccagagcacctccacccgtacatcgacgatgcagtgggtcacctccga

SEQ ID NO: 373822 - DNA, 60 bp, Artificial
  Synthetic oligonucleotide
cggctgaacaccgtgctatgattcagaatatattagatgggattgtagtcgaaaatggta

SEQ ID NO: 373823 - DNA, 56 bp, Artificial
  Synthetic oligonucleotide
cggctgaacagccttacagttacttttaatacattcttgtacagtagtcctaacta

SEQ ID NO: 373824 - DNA, 60 bp, Artificial
  Synthetic oligonucleotide
cggctgaacttcgacagcccgtatgccagccgtgctgctgtccccactgtcctcgtcaca

SEQ ID NO: 373825 - DNA, 55 bp, Artificial
  Synthetic oligonucleotide
cggctgaagaatacacggattcactgatggatccagcgatcttgacgtcactatc

SEQ ID NO: 373826 - DNA, 55 bp, Artificial
  Synthetic oligonucleotide
cggctgaagttggctcacaccaacctgaacctttgagaacttcggttgataagcc

SEQ ID NO: 373827 - DNA, 55 bp, Artificial
  Synthetic oligonucleotide
cggctgaagttggttcacaccaacctgaacctctgaaaacctctgttgacaagcc

SEQ ID NO: 373828 - DNA, 55 bp, Artificial
  Synthetic oligonucleotide
cggctgacaaaagaataatggagatgatccctgaaaggaatgagcaaggtcaaac

SEQ ID NO: 373829 - DNA, 54 bp, Artificial
  Synthetic oligonucleotide
cggctgacctgaatggactgtaacgtagttcagtccgcaaccatgttcccttac

SEQ ID NO: 373830 - DNA, 55 bp, Artificial
  Synthetic oligonucleotide
cggctgaccttcccgtttggctggcttataaggtagcagccgctggagtatccta

SEQ ID NO: 373831 - DNA, 58 bp, Artificial
  Synthetic oligonucleotide
cggctgagatcaaaataggaatttgacctttatctgaccgttcgattattttagatgc

SEQ ID NO: 373832 - DNA, 56 bp, Artificial
  Synthetic oligonucleotide
cggctgagcctagcggttaactgcgacgccgtggacggaaactgcagtattatctc

SEQ ID NO: 373833 - DNA, 55 bp, Artificial
  Synthetic oligonucleotide
cggctgagtagcgcagtgctcgatccagtgcccagaagtagaggagagggagcga

SEQ ID NO: 373834 - DNA, 55 bp, Artificial
  Synthetic oligonucleotide
cggctgcaatcgaagcactctgtattcctatgtagtaaaatgtacgagttcaccg

SEQ ID NO: 373835 - DNA, 55 bp, Artificial
  Synthetic oligonucleotide
cggctgcacagatacgctccggcgtgcaaacccctcttacgggaggaggtcacat

SEQ ID NO: 373836 - DNA, 56 bp, Artificial
  Synthetic oligonucleotide
cggctgcatgcggggacgtcttgcacggacttcccgtgtccgcccgacttggccgg

SEQ ID NO: 373837 - DNA, 50 bp, Artificial
  Synthetic oligonucleotide
cggctgccatagtgcgcgggcctacacctggcactagtgactacctaggg

SEQ ID NO: 373838 - DNA, 55 bp, Artificial
  Synthetic oligonucleotide
cggctgcccagatgccaagcctcgatcatccaacctttgtttctagcaggaagtg

SEQ ID NO: 373839 - DNA, 57 bp, Artificial
  Synthetic oligonucleotide
cggctgctaactgcggcgcttaaattggttgagtatagacacatctttaagcagcct

SEQ ID NO: 373840 - DNA, 55 bp, Artificial
  Synthetic oligonucleotide
cggctgctaactgtgggacatccttattttcccatcacaaaagtgaatgacccta

SEQ ID NO: 373841 - DNA, 55 bp, Artificial
  Synthetic oligonucleotide
cggctgctacaagacctggacactgtggacttgcggagacgcagcagtgtggacc

SEQ ID NO: 373842 - DNA, 55 bp, Artificial
  Synthetic oligonucleotide
cggctgctagccaggatgatttggaagccctgtttggaaatgtacagtacttggc

SEQ ID NO: 373843 - DNA, 55 bp, Artificial
  Synthetic oligonucleotide
cggctgctaggattatcgatttcgatgctgccattcaaggtcgctcgagcgtaga

SEQ ID NO: 373844 - DNA, 59 bp, Artificial
  Synthetic oligonucleotide
cggctgctgtccagaacccgggtgtcttcccccatgcgttcattgacgctcgcacaacc

SEQ ID NO: 373845 - DNA, 54 bp, Artificial
  Synthetic oligonucleotide
cggctggaaagagccaaacataataaaaccacatgaaaagggcataaaccccaa

SEQ ID NO: 373846 - DNA, 55 bp, Artificial
  Synthetic oligonucleotide
cggctggaagatagacgccggagcgcagccaacccaatgcagcgacctttacagc

SEQ ID NO: 373847 - DNA, 55 bp, Artificial
  Synthetic oligonucleotide
cggctggaatgaatatcgtggtacctatcgaacacgaaacaggtgagtcattacg

SEQ ID NO: 373848 - DNA, 60 bp, Artificial
  Synthetic oligonucleotide
cggctggacatgtctgacaaggctatcttccgccgctatccccatctgcggcccaaggag

SEQ ID NO: 373849 - DNA, 55 bp, Artificial
  Synthetic oligonucleotide
cggctggaggtcaactgttttactcccgccctgttgtctcagccaatggttacac

SEQ ID NO: 373850 - DNA, 55 bp, Artificial
  Synthetic oligonucleotide
cggctggaggtgtgacagtcctaacgcactctgagctctcaactgagctctcagt

SEQ ID NO: 373851 - DNA, 55 bp, Artificial
  Synthetic oligonucleotide
cggctggatcccatacttagagaggatctgcagtgaagtaaatctacagagacgc

SEQ ID NO: 373852 - DNA, 55 bp, Artificial
  Synthetic oligonucleotide
cggctgggtcctggaatcccggatcatcccctcaggctcctgcgaattggaaacc

SEQ ID NO: 373853 - DNA, 60 bp, Artificial
  Synthetic oligonucleotide
cggctgggttggaggcagctactttactgactcatatgtcataacaaagaacactagaca

SEQ ID NO: 373854 - DNA, 55 bp, Artificial
  Synthetic oligonucleotide
cggctgtactcaattggttgatcgagggctacaacctgtactgccaaagcgagcg

SEQ ID NO: 373855 - DNA, 57 bp, Artificial
  Synthetic oligonucleotide
cggctgtagctgataattgcagcgagatcgctcatattaagcaagagatattaccca

SEQ ID NO: 373856 - DNA, 55 bp, Artificial
  Synthetic oligonucleotide
cggctgtccgtcctccatcaagtagattgcctgtgggtggtagggccactgttgg

SEQ ID NO: 373857 - DNA, 55 bp, Artificial
  Synthetic oligonucleotide
cggctgtcctggcagaccaaggtcatcctgagtatcacgccttctgcgaagggcg

SEQ ID NO: 373858 - DNA, 55 bp, Artificial
  Synthetic oligonucleotide
cggctgtcgtagtacgtataggcgcgagcgcgaacacttgcacggactctcgtcg

SEQ ID NO: 373859 - DNA, 55 bp, Artificial
  Synthetic oligonucleotide
cggctgtctacttcgggaaacctagtaccatcatgaagactgcaaagcgtttcgc

SEQ ID NO: 373860 - DNA, 55 bp, Artificial
  Synthetic oligonucleotide
cggctgtgccgggttacaattgttactaatacattcgtgaaccgtagtcctaaca

SEQ ID NO: 373861 - DNA, 55 bp, Artificial
  Synthetic oligonucleotide
cggctgtggctcagtgtggtttggtgctaaacgctggagtacccatactcgaaag

SEQ ID NO: 373862 - DNA, 60 bp, Artificial
  Synthetic oligonucleotide
cggctgttcacagagagcataatctacaatggctgatcctgcaggtacagatgaggggga

SEQ ID NO: 373863 - DNA, 55 bp, Artificial
  Synthetic oligonucleotide
cggctgttggagcaatgtacagaggtaagaagcgggactacttcgagacatacac

SEQ ID NO: 373864 - DNA, 54 bp, Artificial
  Synthetic oligonucleotide
cggcttaagcctacactacacgggccaacacccctgttgtacaggctaggggcc

SEQ ID NO: 373865 - DNA, 55 bp, Artificial
  Synthetic oligonucleotide
cggcttacacctccttacaagtccattttggtgcaagtctgggtcacaccaccat

SEQ ID NO: 373866 - DNA, 52 bp, Artificial
  Synthetic oligonucleotide
cggcttacgcaacacagtaggccatcgcgtcgcaagtcgcacaaaacgtccg

SEQ ID NO: 373867 - DNA, 54 bp, Artificial
  Synthetic oligonucleotide
cggcttacggggtccggtcacgcagatgtactcgagtgctgagggggacttggt

SEQ ID NO: 373868 - DNA, 57 bp, Artificial
  Synthetic oligonucleotide
cggcttacgtattagtcttgacagctgttattaagaactattaattttgtcgtatca

SEQ ID NO: 373869 - DNA, 50 bp, Artificial
  Synthetic oligonucleotide
cggcttagactgcttagtgtgtaaacgccccttgggctcatacgatgcct

SEQ ID NO: 373870 - DNA, 59 bp, Artificial
  Synthetic oligonucleotide
cggcttagaggtagcgcttgatatccgcgaggtctattccaaggctgacgggattatcg

SEQ ID NO: 373871 - DNA, 55 bp, Artificial
  Synthetic oligonucleotide
cggcttatgttgcatcctacccttgagcttggctaggctcttgggctcgtcaaag

SEQ ID NO: 373872 - DNA, 55 bp, Artificial
  Synthetic oligonucleotide
cggcttattccattgttcccgcggttagcggagtcactcagttttcagaacacgg

SEQ ID NO: 373873 - DNA, 55 bp, Artificial
  Synthetic oligonucleotide
cggcttattcgagcttgcgagaccctggctttgctctagtgcgtgcagcacacac

SEQ ID NO: 373874 - DNA, 60 bp, Artificial
  Synthetic oligonucleotide
cggcttcaattatagaatcttcggattcacgatcttcaactatagaatcttcggattcac

SEQ ID NO: 373875 - DNA, 55 bp, Artificial
  Synthetic oligonucleotide
cggcttcacattagctcaaaacgctcgcccacgttacgacgaccacagacacgct

SEQ ID NO: 373876 - DNA, 57 bp, Artificial
  Synthetic oligonucleotide
cggcttcagcttggactagcacagtaacgaatgaagtaccggaagtttctaatacaa

SEQ ID NO: 373877 - DNA, 60 bp, Artificial
  Synthetic oligonucleotide
cggcttcatcacactactgcttagggccgtgctgttctacatcccccgctacctgtggaa

SEQ ID NO: 373878 - DNA, 55 bp, Artificial
  Synthetic oligonucleotide
cggcttccaatactcacccaagcagcgagtggaacgcttgctcaggatgtggcgc

SEQ ID NO: 373879 - DNA, 55 bp, Artificial
  Synthetic oligonucleotide
cggcttccgtcaacaagtgctggaagataccattcagccagctattgattccggc

SEQ ID NO: 373880 - DNA, 56 bp, Artificial
  Synthetic oligonucleotide
cggcttcggaacattggtgttggtcctctcggcccggacattcgatcttcagggcc

SEQ ID NO: 373881 - DNA, 55 bp, Artificial
  Synthetic oligonucleotide
cggcttctggcgagattagaatttcgggcgaggcatatgttctcgtgtacggtgc

SEQ ID NO: 373882 - DNA, 52 bp, Artificial
  Synthetic oligonucleotide
cggcttgactaaaagagagacaagtgagaccgtaatgccgacattcattgat

SEQ ID NO: 373883 - DNA, 57 bp, Artificial
  Synthetic oligonucleotide
cggcttgagcaatgcccggcaattcaggcttatgacacgcttgatcgcgtcctgtcg

SEQ ID NO: 373884 - DNA, 55 bp, Artificial
  Synthetic oligonucleotide
cggcttgccggctgatctatgacgtactgaatttccctggactgaagtactggcc

SEQ ID NO: 373885 - DNA, 55 bp, Artificial
  Synthetic oligonucleotide
cggcttgcgagatctggccgtggctgtggaaccagtcgtcttctcccgaatggag

SEQ ID NO: 373886 - DNA, 60 bp, Artificial
  Synthetic oligonucleotide
cggcttgctgaggtgcacgcagcaagaggcgagagcggcgactggtgagtacgcctgaat

SEQ ID NO: 373887 - DNA, 60 bp, Artificial
  Synthetic oligonucleotide
cggcttgctgcagcgcgcacagcaagaggcgagagcggcgactggtgagtacgccaaatt

SEQ ID NO: 373888 - DNA, 59 bp, Artificial
  Synthetic oligonucleotide
cggcttggaagggtaggtcgcatacagaagggcaccgcacttcggataggtcacactga

SEQ ID NO: 373889 - DNA, 55 bp, Artificial
  Synthetic oligonucleotide
cggcttggatctgtcccattaactactcccgcctagccagcctactcccaaaagg

SEQ ID NO: 373890 - DNA, 56 bp, Artificial
  Synthetic oligonucleotide
cggcttgggttttaccttggtgttcgttggcggctatctctcaacttacgccatca

SEQ ID NO: 373891 - DNA, 54 bp, Artificial
  Synthetic oligonucleotide
cggcttgtaacgagcccgacttcgagtttaacgacatattggagggtatccaaa

SEQ ID NO: 373892 - DNA, 58 bp, Artificial
  Synthetic oligonucleotide
cggcttgtcaatgagttgttaactcccaaagcttcagaattatactcggagcgtagcg

SEQ ID NO: 373893 - DNA, 57 bp, Artificial
  Synthetic oligonucleotide
cggcttgtgcgtatcgttgggctgcatacccggatctccgctgcgcaagtggtggat

SEQ ID NO: 373894 - DNA, 54 bp, Artificial
  Synthetic oligonucleotide
cggcttgttccctttcgtaatattcttgccgggaaccgtgcacgagacgtacaa

SEQ ID NO: 373895 - DNA, 55 bp, Artificial
  Synthetic oligonucleotide
cggcttgttccgtatcagacaatagcatataactcgcaagatacggggcatccgt

SEQ ID NO: 373896 - DNA, 56 bp, Artificial
  Synthetic oligonucleotide
cggcttgttgcccgacgttgatatcgaaggtcaacactggaccgtaccctctggat

SEQ ID NO: 373897 - DNA, 52 bp, Artificial
  Synthetic oligonucleotide
cggctttaccgggaacgccgtatcccgtgcctggtctgcgtgggttctccaa

SEQ ID NO: 373898 - DNA, 55 bp, Artificial
  Synthetic oligonucleotide
cggctttacttttcttgaaagttccagcgcaaaatgccataagcaccacattccc

SEQ ID NO: 373899 - DNA, 55 bp, Artificial
  Synthetic oligonucleotide
cggctttagtacagatctagccatagccacggtatcggtagctttgctaacctgg

SEQ ID NO: 373900 - DNA, 55 bp, Artificial
  Synthetic oligonucleotide
cggctttcctgacatccttttcatcctgaaggtctccagatacacattagcgtac

SEQ ID NO: 373901 - DNA, 55 bp, Artificial
  Synthetic oligonucleotide
cggctttcgtcctcatccagacctcagtaccaattcaacaagtcactaccgctgc

SEQ ID NO: 373902 - DNA, 55 bp, Artificial
  Synthetic oligonucleotide
cggctttctgctcggagctcctatagtgatcataggtcttagtagcgttcgtttg

SEQ ID NO: 373903 - DNA, 55 bp, Artificial
  Synthetic oligonucleotide
cggctttgcttaccatcaacgcaagaaagataccctttctgcctatataaggact

SEQ ID NO: 373904 - DNA, 54 bp, Artificial
  Synthetic oligonucleotide
cggctttgggtgattattgagcggcaaagtaaaggggggaattatcgcggagcg

SEQ ID NO: 373905 - DNA, 59 bp, Artificial
  Synthetic oligonucleotide
cggctttgtatgctaatctccctaacgtctctaatagtttcactgctattatggattgg

SEQ ID NO: 373906 - DNA, 55 bp, Artificial
  Synthetic oligonucleotide
cggctttgtattatccatgcaaacgaagataagtgtactgatttagacccagagg

SEQ ID NO: 373907 - DNA, 59 bp, Artificial
  Synthetic oligonucleotide
cggcttttagacatatagattggtggattcatacattacttaaaatcaaagacatggtc

SEQ ID NO: 373908 - DNA, 55 bp, Artificial
  Synthetic oligonucleotide
cggcttttatcaccaaagttgatgcagattacgggcacaacggtatggtttaccc

SEQ ID NO: 373909 - DNA, 54 bp, Artificial
  Synthetic oligonucleotide
cgggaaaacagagacgtcaaacactagtaggcgctgaagtaaaggaggtgttac

SEQ ID NO: 373910 - DNA, 50 bp, Artificial
  Synthetic oligonucleotide
cgggaaaacttcgggattgtgttgaaatatgtaaaaccctcgtaaaccgc

SEQ ID NO: 373911 - DNA, 58 bp, Artificial
  Synthetic oligonucleotide
cgggaaaagattctgaggcggcgtactttcgcagcatgttaccctttcatatggtgag

SEQ ID NO: 373912 - DNA, 55 bp, Artificial
  Synthetic oligonucleotide
cgggaaaatcgcccgtgatgcttgggattcgttcgtgagtcccgtggcaatcggg

SEQ ID NO: 373913 - DNA, 58 bp, Artificial
  Synthetic oligonucleotide
cgggaaaatttcctgaggtattcagagtgttatgtaactgatggtgtccactgttaca

SEQ ID NO: 373914 - DNA, 52 bp, Artificial
  Synthetic oligonucleotide
cgggaaacaggaccggattcgttcgctatttccaggagttaaaggtaggtga

SEQ ID NO: 373915 - DNA, 56 bp, Artificial
  Synthetic oligonucleotide
cgggaaacctagtaacaccatgaaagttgcgcagtgtttcgctccgcacaacccca

SEQ ID NO: 373916 - DNA, 54 bp, Artificial
  Synthetic oligonucleotide
cgggaaacctccttggattccattgcccagctatctgtcacttcatcgaaagga

SEQ ID NO: 373917 - DNA, 49 bp, Artificial
  Synthetic oligonucleotide
cgggaaactaagatgggtttataaggggactcaagggttaaggaggttg

SEQ ID NO: 373918 - DNA, 56 bp, Artificial
  Synthetic oligonucleotide
cgggaaactatgtaaactaagaggagtagccccattgcatttgggtaaatgcaaca

SEQ ID NO: 373919 - DNA, 57 bp, Artificial
  Synthetic oligonucleotide
cgggaaagacgaagagataccttccagcaatagtcagagaggccataaaacgaggct

SEQ ID NO: 373920 - DNA, 51 bp, Artificial
  Synthetic oligonucleotide
cgggaaagccaggtctcgtccgcgcaaagacgggggttttgacatcctcgt

SEQ ID NO: 373921 - DNA, 55 bp, Artificial
  Synthetic oligonucleotide
cgggaaagccctcacaaacgctattcctcttagtgttgggttctgttgaggagta

SEQ ID NO: 373922 - DNA, 55 bp, Artificial
  Synthetic oligonucleotide
cgggaaagtgttgcacagtcaatccaagggaaaattgatgagttgcggagacagc

SEQ ID NO: 373923 - DNA, 55 bp, Artificial
  Synthetic oligonucleotide
cgggaaagttgataatctcgcgtctaccatgcaccgcgagggattcttgagctgc

SEQ ID NO: 373924 - DNA, 59 bp, Artificial
  Synthetic oligonucleotide
cgggaaagttgtatttaagagatatctcagatacgacgggacggaagcttcattgcaca

SEQ ID NO: 373925 - DNA, 57 bp, Artificial
  Synthetic oligonucleotide
cgggaaagtttgcaggaccttgttagcaaaatctgtgtttaacagtttatatgcatc

SEQ ID NO: 373926 - DNA, 55 bp, Artificial
  Synthetic oligonucleotide
cgggaaataagctgtgaccaactgaccgatagcggatgaatggtcagtatccgcg

SEQ ID NO: 373927 - DNA, 52 bp, Artificial
  Synthetic oligonucleotide
cgggaaataatcgtaatcaggttattatccctaagcaaaattgaccttcggg

SEQ ID NO: 373928 - DNA, 55 bp, Artificial
  Synthetic oligonucleotide
cgggaaatatgaacccgttttgaaaattgtagaatatgtggaagtcaggctaatg

SEQ ID NO: 373929 - DNA, 55 bp, Artificial
  Synthetic oligonucleotide
cgggaaatctgtgtctgtggccgatgcccacttaaatgctcgaagtgcctgctgg

SEQ ID NO: 373930 - DNA, 55 bp, Artificial
  Synthetic oligonucleotide
cgggaaattaaccactgttcttggacaatagactacaacactgtgtatgaatgtc

SEQ ID NO: 373931 - DNA, 59 bp, Artificial
  Synthetic oligonucleotide
cgggaaatttcgggatgatgataaattccatgctataataagtcaaggagaattcacaa

SEQ ID NO: 373932 - DNA, 55 bp, Artificial
  Synthetic oligonucleotide
cgggaacaaattcttgctctcaaaactactagccaaaacagagaagtagcgtgac

SEQ ID NO: 373933 - DNA, 60 bp, Artificial
  Synthetic oligonucleotide
cgggaacaggatataatggatgggcgacaattgatgttgagtatagagaacctgcgccct

SEQ ID NO: 373934 - DNA, 60 bp, Artificial
  Synthetic oligonucleotide
cgggaacagtgtgtcggacacattatctaaataagtagaacgttcatgttcagagcgtca

SEQ ID NO: 373935 - DNA, 60 bp, Artificial
  Synthetic oligonucleotide
cgggaaccaggcctcacaacgtccgttctaccgcatcactaatagcagactccagtcatg

SEQ ID NO: 373936 - DNA, 50 bp, Artificial
  Synthetic oligonucleotide
cgggaacccatcacacgagcagaaatagttgactgtcggagatctcctag

SEQ ID NO: 373937 - DNA, 53 bp, Artificial
  Synthetic oligonucleotide
cgggaacctaaataatatgcgtgccacttacctagaaactttgtccgtaagta

SEQ ID NO: 373938 - DNA, 51 bp, Artificial
  Synthetic oligonucleotide
cgggaacggtcgcatataagtatcagtgtgcccccataaccgtattcgttc

SEQ ID NO: 373939 - DNA, 55 bp, Artificial
  Synthetic oligonucleotide
cgggaacggtgtgctggtgggcggaagctcatatgtgagtgccatatcccaggtc

SEQ ID NO: 373940 - DNA, 56 bp, Artificial
  Synthetic oligonucleotide
cgggaacgtcgtttctatcgactgaggtgcgaccaaatccccgcattggtcggata

SEQ ID NO: 373941 - DNA, 52 bp, Artificial
  Synthetic oligonucleotide
cgggaactgtaaaatgtacccttgcattgaaggaaccgcgaaggtgaaaacg

SEQ ID NO: 373942 - DNA, 55 bp, Artificial
  Synthetic oligonucleotide
cgggaacttgacagtgtagagcaaaccaagtgcactcagcgcttggacaacatca

SEQ ID NO: 373943 - DNA, 58 bp, Artificial
  Synthetic oligonucleotide
cgggaagacaatagccatctgttgtgctactggagtgtttggtactgcctacctcgtg

SEQ ID NO: 373944 - DNA, 59 bp, Artificial
  Synthetic oligonucleotide
cgggaagacagttttatggaccagatgcactgctgaatcctaaacacagttgtaaccga

SEQ ID NO: 373945 - DNA, 54 bp, Artificial
  Synthetic oligonucleotide
cgggaagacggtttggtttgtgcctagtgtgaaaatggggaatgagattgccct

SEQ ID NO: 373946 - DNA, 55 bp, Artificial
  Synthetic oligonucleotide
cgggaagatacatcggtttctgacaacgcgctacacctgcctgtcgtgtttctgg

SEQ ID NO: 373947 - DNA, 55 bp, Artificial
  Synthetic oligonucleotide
cgggaagatcatatctagacattgatatgttccagctaggacaagcagtagcacg

SEQ ID NO: 373948 - DNA, 55 bp, Artificial
  Synthetic oligonucleotide
cgggaagcagcgttacaagtacacatagcgcagcgagatgcaagcagaataccgg

SEQ ID NO: 373949 - DNA, 60 bp, Artificial
  Synthetic oligonucleotide
cgggaagccttagagtctcctgagcattgttcacctcaccatactgcactcaggcaagct

SEQ ID NO: 373950 - DNA, 55 bp, Artificial
  Synthetic oligonucleotide
cgggaagctcgtgacccaccaggcgttattattgaagggtcaactagccaaatca

SEQ ID NO: 373951 - DNA, 55 bp, Artificial
  Synthetic oligonucleotide
cgggaaggaaagatgagcacgaacctgatgaacaaactggatacgattggattcg

SEQ ID NO: 373952 - DNA, 58 bp, Artificial
  Synthetic oligonucleotide
cgggaaggattggaccaaccggagagatgggagtggcttctagattatatggacagaa

SEQ ID NO: 373953 - DNA, 55 bp, Artificial
  Synthetic oligonucleotide
cgggaaggcattgccggctatcgcacgatcattgccccggtagagatcgacggca

SEQ ID NO: 373954 - DNA, 55 bp, Artificial
  Synthetic oligonucleotide
cgggaaggtaattgctcaactgcatgccgactctgccgagatatctcatgacatc

SEQ ID NO: 373955 - DNA, 60 bp, Artificial
  Synthetic oligonucleotide
cgggaaggtcattgggcagctacatgctgattcggcagagatttcacatgatgtcatgtt

SEQ ID NO: 373956 - DNA, 55 bp, Artificial
  Synthetic oligonucleotide
cgggaagttctgcaaacagctgtacgacgtgtggtgcagcccctactggaacggg

SEQ ID NO: 373957 - DNA, 57 bp, Artificial
  Synthetic oligonucleotide
cgggaagtttgatgacgctgctacagccttccataaggctttggcttacttagaagg

SEQ ID NO: 373958 - DNA, 55 bp, Artificial
  Synthetic oligonucleotide
cgggaatacgatcgcggtactgtcggggctgaatatatacgcgacctaatagggg

SEQ ID NO: 373959 - DNA, 55 bp, Artificial
  Synthetic oligonucleotide
cgggaatcctgtaaaccgtgattacatccgacaaaggcaaggtgcactggcaggg

SEQ ID NO: 373960 - DNA, 56 bp, Artificial
  Synthetic oligonucleotide
cgggaatcctgtcgaggcccctttgacaatacaggcattggcaggtgcgtttaacg

SEQ ID NO: 373961 - DNA, 55 bp, Artificial
  Synthetic oligonucleotide
cgggaatccttagagtcctctgatcattgttcgcctcaccatacagcactcaggc

SEQ ID NO: 373962 - DNA, 55 bp, Artificial
  Synthetic oligonucleotide
cgggaatgatgcagttcatgacctcggcccagaacatattgcaggtactcggacc

SEQ ID NO: 373963 - DNA, 55 bp, Artificial
  Synthetic oligonucleotide
cgggaatgcaaaaccaaaatttcaagcgttcctatgccgtagccctctgtttgga

SEQ ID NO: 373964 - DNA, 55 bp, Artificial
  Synthetic oligonucleotide
cgggaatgccgacaagtcgtcgggagtgtcaagacacgacacttagtggctggcg

SEQ ID NO: 373965 - DNA, 57 bp, Artificial
  Synthetic oligonucleotide
cgggaatgtgacgtacctagcccacttctgtcgcaagttccaaccgctatacgccac

SEQ ID NO: 373966 - DNA, 55 bp, Artificial
  Synthetic oligonucleotide
cgggaattaacggacagtggatatggctattctgaagtggaagctgcaacgcagg

SEQ ID NO: 373967 - DNA, 54 bp, Artificial
  Synthetic oligonucleotide
cgggaattccctcacatgaacgaatctacaggccgtaaattcgacgtcggaaaa

SEQ ID NO: 373968 - DNA, 56 bp, Artificial
  Synthetic oligonucleotide
cgggaattctgaaaattcatatctccattattatcattattcggttagcagcagcg

SEQ ID NO: 373969 - DNA, 55 bp, Artificial
  Synthetic oligonucleotide
cgggaatttatggtggaaattctgaaaacaattgggatttctctgaatcatttac

SEQ ID NO: 373970 - DNA, 55 bp, Artificial
  Synthetic oligonucleotide
cgggacaaaatgttccagcaacacgacgggttgcggtggtaattgcacaacggaa

SEQ ID NO: 373971 - DNA, 60 bp, Artificial
  Synthetic oligonucleotide
cgggacaactagtgcatgtaaaagatcaggaccttcattctatgcagaactgaaatggct

SEQ ID NO: 373972 - DNA, 54 bp, Artificial
  Synthetic oligonucleotide
cgggacaagaaccaggttgagggggaggttcaagtggtctccaccgcaacacaa

SEQ ID NO: 373973 - DNA, 56 bp, Artificial
  Synthetic oligonucleotide
cgggacaaggtactgggctcccgatgctaggactacaacatacaatgcaggccgct

SEQ ID NO: 373974 - DNA, 55 bp, Artificial
  Synthetic oligonucleotide
cgggacaagtcaacatggaggtcaaggtagagaatgttggcaagtcacaggagct

SEQ ID NO: 373975 - DNA, 55 bp, Artificial
  Synthetic oligonucleotide
cgggacaatggtgaaaaccttgactgatgaccaagtagaagtcgtcactgcccaa

SEQ ID NO: 373976 - DNA, 55 bp, Artificial
  Synthetic oligonucleotide
cgggacaatgtggtacaagaaagaaacaacgttcaacacatgtacgacgagctag

SEQ ID NO: 373977 - DNA, 55 bp, Artificial
  Synthetic oligonucleotide
cgggacacatagcaaggcagtgtagacaaccaagaaaaggacaaggcaaccctcc

SEQ ID NO: 373978 - DNA, 58 bp, Artificial
  Synthetic oligonucleotide
cgggacacgccgtgggcatattcagggccgcggtgtgcacccgtggagtggctaaggc

SEQ ID NO: 373979 - DNA, 56 bp, Artificial
  Synthetic oligonucleotide
cgggacagtgggtatggcaatacgcaggtggatacgggagcatccgaaagtgaggt

SEQ ID NO: 373980 - DNA, 55 bp, Artificial
  Synthetic oligonucleotide
cgggacatcgtttagcagcacgcgaacgattctcacgccagagcatgttgagccg

SEQ ID NO: 373981 - DNA, 58 bp, Artificial
  Synthetic oligonucleotide
cgggacatgtggtttcacagggttcagtgggccagtgtttcaaattatgttcttgcca

SEQ ID NO: 373982 - DNA, 57 bp, Artificial
  Synthetic oligonucleotide
cgggacattagtggacggattcttagcacttatctgggtcgatctgcggagcctgct

SEQ ID NO: 373983 - DNA, 51 bp, Artificial
  Synthetic oligonucleotide
cgggaccaacctacgggaattcctgagttcccctggcgtccaggccgtccc

SEQ ID NO: 373984 - DNA, 55 bp, Artificial
  Synthetic oligonucleotide
cgggaccaacgggggaacgtactattgtcacctgaagaagtcagcgagacacaag

SEQ ID NO: 373985 - DNA, 58 bp, Artificial
  Synthetic oligonucleotide
cgggaccaggggtcagatagccactgacctttggatggtgctacaagctagtaccagt

SEQ ID NO: 373986 - DNA, 58 bp, Artificial
  Synthetic oligonucleotide
cgggaccaggggtcagatatccactgacctttggatggtgcttcaagttggtgccagt

SEQ ID NO: 373987 - DNA, 58 bp, Artificial
  Synthetic oligonucleotide
cgggaccagtaggtattcgaatgtgacggctaacgatcatcccttggtattcttctca

SEQ ID NO: 373988 - DNA, 55 bp, Artificial
  Synthetic oligonucleotide
cgggaccatgcgccttgcaggaccacgcacatgtgctaacatgtggcacggtact

SEQ ID NO: 373989 - DNA, 55 bp, Artificial
  Synthetic oligonucleotide
cgggacccacgtccagaaaccagttatgaggtatcccgagtagtaatctgtcgcc

SEQ ID NO: 373990 - DNA, 58 bp, Artificial
  Synthetic oligonucleotide
cgggacccactcaaattatcagaggctatcgacaaattagtcgcgtcaggaacgttca

SEQ ID NO: 373991 - DNA, 55 bp, Artificial
  Synthetic oligonucleotide
cgggaccctagggtgtctggcggtccctcactccaacaagtgttgcgggatcagt

SEQ ID NO: 373992 - DNA, 56 bp, Artificial
  Synthetic oligonucleotide
cgggaccttgagtcggctaactacgggtcacgctcggttgagaaactaaggcatga

SEQ ID NO: 373993 - DNA, 55 bp, Artificial
  Synthetic oligonucleotide
cgggacgaccagtactgtgaccgagaatagcagcctttacggaacctcgctgggg

SEQ ID NO: 373994 - DNA, 60 bp, Artificial
  Synthetic oligonucleotide
cgggacgcatgtcatatgggacgttggtttgcaatccagctgcgtgctgtgcgtaccatg

SEQ ID NO: 373995 - DNA, 55 bp, Artificial
  Synthetic oligonucleotide
cgggacgctgtcgttagatctccggtacgaatggcggaagaaaatccggcagtgt

SEQ ID NO: 373996 - DNA, 56 bp, Artificial
  Synthetic oligonucleotide
cgggacggatgttttgagtttaatgattactgagagtggaattgaggtaacgcaaa

SEQ ID NO: 373997 - DNA, 52 bp, Artificial
  Synthetic oligonucleotide
cgggacgtcctttgtctacgtcccgtcggcactgaatcccgcggacgacccg

SEQ ID NO: 373998 - DNA, 50 bp, Artificial
  Synthetic oligonucleotide
cgggacgttaacaaacgacgagagtctgaacggcggaacccaaggttcgg

SEQ ID NO: 373999 - DNA, 55 bp, Artificial
  Synthetic oligonucleotide
cgggactactatagaatttgtggaggtgacagttacagcagatgtggacaagggg

SEQ ID NO: 374000 - DNA, 51 bp, Artificial
  Synthetic oligonucleotide
cgggactactggtttcggacggaggaccaaacttatacaacatccggaacc

SEQ ID NO: 374001 - DNA, 55 bp, Artificial
  Synthetic oligonucleotide
cgggactccgatgcagcagttctctagaagtcagacggtctgagcacacctgtcc

SEQ ID NO: 374002 - DNA, 55 bp, Artificial
  Synthetic oligonucleotide
cgggactcgaaatagagccggtgttgtgacttattggaagacgttcacaagactg

SEQ ID NO: 374003 - DNA, 60 bp, Artificial
  Synthetic oligonucleotide
cgggactcgacgtcactgagtgtggagaagtcgcagcgctaatgtgcctcgctatgttcc

SEQ ID NO: 374004 - DNA, 55 bp, Artificial
  Synthetic oligonucleotide
cgggacttctatgaagacaagcagttaactattgactttgatatcactggagaaa

SEQ ID NO: 374005 - DNA, 55 bp, Artificial
  Synthetic oligonucleotide
cgggactttcttagtcttgacccaacatgggtctcccagaatatgaggccgatag

SEQ ID NO: 374006 - DNA, 55 bp, Artificial
  Synthetic oligonucleotide
cgggactttgatgtctcacgtgttttacctcataatattagcaccggctcatttg

SEQ ID NO: 374007 - DNA, 55 bp, Artificial
  Synthetic oligonucleotide
cgggagaatcatacggtgaatcagttaaacaggcggtactgctaaacgtgttagg

SEQ ID NO: 374008 - DNA, 59 bp, Artificial
  Synthetic oligonucleotide
cgggagacaacccatatataaaattcaatcacgctgaccaggactttatagatagcctc

SEQ ID NO: 374009 - DNA, 60 bp, Artificial
  Synthetic oligonucleotide
cgggagacataataggaaacataagacaagcacactgtaacatcagtaggaaaagctgga

SEQ ID NO: 374010 - DNA, 52 bp, Artificial
  Synthetic oligonucleotide
cgggagaccaaaattggccacctctaaatagagaacaaacaaactttaactg

SEQ ID NO: 374011 - DNA, 60 bp, Artificial
  Synthetic oligonucleotide
cgggagacgggagattctatatataaatgggacatcaggactatgcgagacgacaagatg

SEQ ID NO: 374012 - DNA, 53 bp, Artificial
  Synthetic oligonucleotide
cgggagactcttcattcctagactgggctagcgacccttactcagcaaatctt

SEQ ID NO: 374013 - DNA, 55 bp, Artificial
  Synthetic oligonucleotide
cgggagagcgagacgacaaaaggtgcctattgcctctccgtttctgactttgaca

SEQ ID NO: 374014 - DNA, 50 bp, Artificial
  Synthetic oligonucleotide
cgggagagcgtaagcgcctgccgagtgggcgtaaggcaattgtttgggcg

SEQ ID NO: 374015 - DNA, 54 bp, Artificial
  Synthetic oligonucleotide
cgggagaggatttgcgaagacccgctcggctacttttgcttcggggacgggctc

SEQ ID NO: 374016 - DNA, 58 bp, Artificial
  Synthetic oligonucleotide
cgggagaggcaaaatcaccgtattggagcctgatggtaagataaccgtatttgagcaa

SEQ ID NO: 374017 - DNA, 55 bp, Artificial
  Synthetic oligonucleotide
cgggagataacttaagtgatgctaaaattgtttcacagcccagaagaggcagcag

SEQ ID NO: 374018 - DNA, 55 bp, Artificial
  Synthetic oligonucleotide
cgggagatcaaagagtcggactcataccgagaaacggtgtggaccattgggatgc

SEQ ID NO: 374019 - DNA, 60 bp, Artificial
  Synthetic oligonucleotide
cgggagatggctgcatcatgcggaggcgcggttttcataggtctggcactcttgaccttg

SEQ ID NO: 374020 - DNA, 60 bp, Artificial
  Synthetic oligonucleotide
cgggagcaagtcacagagagccaagtatggcacggcaggctacggagtggaggctcgagg

SEQ ID NO: 374021 - DNA, 55 bp, Artificial
  Synthetic oligonucleotide
cgggagcaggagtgactgctgcatgcaaattcggaagctccaattctttcttccg

SEQ ID NO: 374022 - DNA, 51 bp, Artificial
  Synthetic oligonucleotide
cgggagcagtagggcataggttggaagagaaacccttttgtgaaaatgatt

SEQ ID NO: 374023 - DNA, 57 bp, Artificial
  Synthetic oligonucleotide
cgggagcggtcacaagagagtaggtacgacgaaggaggtccttacagctatcaagaa

SEQ ID NO: 374024 - DNA, 55 bp, Artificial
  Synthetic oligonucleotide
cgggagctcgtcttcatggaactagaagcacttccatatccaacactagctcgca

SEQ ID NO: 374025 - DNA, 55 bp, Artificial
  Synthetic oligonucleotide
cgggaggacatgagaggcaaaagagagtcccgtttgtgctagggttcttaggctt

SEQ ID NO: 374026 - DNA, 55 bp, Artificial
  Synthetic oligonucleotide
cgggaggaccgcagactaacacgaagagaaacccaagtataacatcagatatgcg

SEQ ID NO: 374027 - DNA, 55 bp, Artificial
  Synthetic oligonucleotide
cgggaggacctgttcttgagttgcaggatgtgtttcgatggataagcgagacagt

SEQ ID NO: 374028 - DNA, 55 bp, Artificial
  Synthetic oligonucleotide
cgggaggaggcttctctcaagcagcaatgcacgccaggaatgcagctcgggcaca

SEQ ID NO: 374029 - DNA, 55 bp, Artificial
  Synthetic oligonucleotide
cgggaggaggtcacattccaggtcgggctcaatcagtacctggtcgggtcacagc

SEQ ID NO: 374030 - DNA, 54 bp, Artificial
  Synthetic oligonucleotide
cgggaggagtagtttacataggggtcataggtgaggactggggcctttgttaca

SEQ ID NO: 374031 - DNA, 54 bp, Artificial
  Synthetic oligonucleotide
cgggaggatagtctagccagggccacttccgcgagctagagagtgctagtgttt

SEQ ID NO: 374032 - DNA, 54 bp, Artificial
  Synthetic oligonucleotide
cgggaggattccccgaggtcctgcgattcctcggcacgattcgtcctgtccggt

SEQ ID NO: 374033 - DNA, 60 bp, Artificial
  Synthetic oligonucleotide
cgggaggctgatatccaggaaatacgacgttcaaagctccacgctgccggctgggctcta

SEQ ID NO: 374034 - DNA, 55 bp, Artificial
  Synthetic oligonucleotide
cgggaggcttattcatagtgcgtggatcacatgaagggaagttgtacgacgcacg

SEQ ID NO: 374035 - DNA, 50 bp, Artificial
  Synthetic oligonucleotide
cgggagggccaccgatgctgattggtccgttgccccttcccgatgggtct

SEQ ID NO: 374036 - DNA, 60 bp, Artificial
  Synthetic oligonucleotide
cgggagggctcgatgcaaaggtcctaagagctgtgctccccagggacatggtattcagaa

SEQ ID NO: 374037 - DNA, 59 bp, Artificial
  Synthetic oligonucleotide
cgggagggtgtttcgctttcacatgccacgtgtttgagggagaatgcacgttaatcatc

SEQ ID NO: 374038 - DNA, 56 bp, Artificial
  Synthetic oligonucleotide
cgggaggtaatatagactatacgatatgggttaatatgacaaacgtaagaacagag

SEQ ID NO: 374039 - DNA, 57 bp, Artificial
  Synthetic oligonucleotide
cgggaggtattaggtggagtggtactaccgagtgtagtacgaggtatgtgcatgtta

SEQ ID NO: 374040 - DNA, 57 bp, Artificial
  Synthetic oligonucleotide
cgggaggtccacggaggagctgatatttggatcggaagctgtggataggaggaaccc

SEQ ID NO: 374041 - DNA, 55 bp, Artificial
  Synthetic oligonucleotide
cgggaggtgttactccactcacaccttatacggcaaatacgtcgacgctgttgcc

SEQ ID NO: 374042 - DNA, 60 bp, Artificial
  Synthetic oligonucleotide
cgggagtactgtgctctgagttgtacaatgatgtcgatagcttgtatcctgcaagccccc

SEQ ID NO: 374043 - DNA, 50 bp, Artificial
  Synthetic oligonucleotide
cgggagtcagacaggtcatctacgtattcacgtagtcacgttgcatcgta

SEQ ID NO: 374044 - DNA, 58 bp, Artificial
  Synthetic oligonucleotide
cgggagtccccagttcatgcaaacagtccggctcgcaattcagcaattcgaccccacg

SEQ ID NO: 374045 - DNA, 59 bp, Artificial
  Synthetic oligonucleotide
cgggagtcgcgcctagcgagtcctggtaggtagagcggcctgggagcccttgcctgcta

SEQ ID NO: 374046 - DNA, 55 bp, Artificial
  Synthetic oligonucleotide
cgggagtctatgggactttgtaatccgagaactcgcatcagtgtgacgtattgga

SEQ ID NO: 374047 - DNA, 57 bp, Artificial
  Synthetic oligonucleotide
cgggagtgtctggctcgtcattctcacatctatgctgatggaacacgtttaattgga

SEQ ID NO: 374048 - DNA, 55 bp, Artificial
  Synthetic oligonucleotide
cgggagttatggagtcatggactgacaggatagacagcacaggggaagaaacgcc

SEQ ID NO: 374049 - DNA, 53 bp, Artificial
  Synthetic oligonucleotide
cgggagttggaggtggatcctttattgacgaccgtgtatggttcccagtttac

SEQ ID NO: 374050 - DNA, 53 bp, Artificial
  Synthetic oligonucleotide
cgggataaatcgcctaagatttattctactgcccaaccattaatcccgtttgt

SEQ ID NO: 374051 - DNA, 55 bp, Artificial
  Synthetic oligonucleotide
cgggatacatgttggtgggaacggttcacacgggttcgcagcagccctaaaacga

SEQ ID NO: 374052 - DNA, 55 bp, Artificial
  Synthetic oligonucleotide
cgggatatagggttatcccttagttagttcattcagacttaaacagcaattcacg

SEQ ID NO: 374053 - DNA, 55 bp, Artificial
  Synthetic oligonucleotide
cgggatatgcgcctgttgactggggacatggtgaactgcctgactcaacactagt

SEQ ID NO: 374054 - DNA, 53 bp, Artificial
  Synthetic oligonucleotide
cgggatattatactaccgtaccagggtacaccgtgaattatcccaacggcgcc

SEQ ID NO: 374055 - DNA, 56 bp, Artificial
  Synthetic oligonucleotide
cgggatatttcttacgtgtcaaagcggttaggccataaggacataatgactacgta

SEQ ID NO: 374056 - DNA, 53 bp, Artificial
  Synthetic oligonucleotide
cgggatcaaatcttcgctatcctgaaggaggagtacaagtgacccaacgatgc

SEQ ID NO: 374057 - DNA, 55 bp, Artificial
  Synthetic oligonucleotide
cgggatcaacaaccggctgtcataccacagggatctcaggttatcccttctcaac

SEQ ID NO: 374058 - DNA, 54 bp, Artificial
  Synthetic oligonucleotide
cgggatcaaccctaacatcagaaccggagtgcggactgtgaccaccggggaccc

SEQ ID NO: 374059 - DNA, 55 bp, Artificial
  Synthetic oligonucleotide
cgggatcaacctgcccctggttacttatgtgaaggatgagctgagaagcaagagc

SEQ ID NO: 374060 - DNA, 54 bp, Artificial
  Synthetic oligonucleotide
cgggatcaacggggaaacgtactattgtcacccgaagaagtcagcgaaacgcaa

SEQ ID NO: 374061 - DNA, 56 bp, Artificial
  Synthetic oligonucleotide
cgggatcaacgggggaatgtactactgtcacccgaggaagtcagcgagacacaagg

SEQ ID NO: 374062 - DNA, 53 bp, Artificial
  Synthetic oligonucleotide
cgggatcacagttatctggaagaagagcgatgagagtcataatccgcgaacgg

SEQ ID NO: 374063 - DNA, 60 bp, Artificial
  Synthetic oligonucleotide
cgggatcactatcacaggagaacgcattgagactaaggccgcgaatcatcttttcctctt

SEQ ID NO: 374064 - DNA, 60 bp, Artificial
  Synthetic oligonucleotide
cgggatcaggaagccaaaacatctgtatgtatccatgcccactgctcaatctaccatgaa

SEQ ID NO: 374065 - DNA, 59 bp, Artificial
  Synthetic oligonucleotide
cgggatcccctcgacaccgccactgctctgcatcgggaggccttagagtctccggaaca

SEQ ID NO: 374066 - DNA, 55 bp, Artificial
  Synthetic oligonucleotide
cgggatccgccatctccgttaaagtgggctccggcctccgctttgataacagcgg

SEQ ID NO: 374067 - DNA, 60 bp, Artificial
  Synthetic oligonucleotide
cgggatcgaaactcgctatccagccttggcactgaatgagctacaagctgacctaggaac

SEQ ID NO: 374068 - DNA, 50 bp, Artificial
  Synthetic oligonucleotide
cgggatcggattactctggaaccgcaacagaccttcacgtaggctacgaa

SEQ ID NO: 374069 - DNA, 60 bp, Artificial
  Synthetic oligonucleotide
cgggatctccacccccttgggagtggagatccggggagcagatgcagctcacaggtgtat

SEQ ID NO: 374070 - DNA, 55 bp, Artificial
  Synthetic oligonucleotide
cgggatctcggaggacaccactggcggccccaggtgcccggacagcccaacgtct

SEQ ID NO: 374071 - DNA, 58 bp, Artificial
  Synthetic oligonucleotide
cgggatctgctccagcttacttaactggcaacgacatacttggtgttttatcggatta

SEQ ID NO: 374072 - DNA, 58 bp, Artificial
  Synthetic oligonucleotide
cgggatgccccaggtattggggacagataatgggcctgccttcatctcccaggtaagc

SEQ ID NO: 374073 - DNA, 56 bp, Artificial
  Synthetic oligonucleotide
cgggatggaagttgcggaaccagaagtgttaggcgtggaattcaagaacgtactgc

SEQ ID NO: 374074 - DNA, 55 bp, Artificial
  Synthetic oligonucleotide
cgggatggacttggtcagatactttggctgtagaattagactatatccaacagag

SEQ ID NO: 374075 - DNA, 55 bp, Artificial
  Synthetic oligonucleotide
cgggatggaggaccaacaaatgagagtacagagatattcagacctggaggaggag

SEQ ID NO: 374076 - DNA, 60 bp, Artificial
  Synthetic oligonucleotide
cgggatgggcctacacacatcaaggagggatcagctcagtagaccatgtcacagccggaa

SEQ ID NO: 374077 - DNA, 55 bp, Artificial
  Synthetic oligonucleotide
cgggatggtaccaagtgggtcactctggactggatggttggacacggctttaaac

SEQ ID NO: 374078 - DNA, 55 bp, Artificial
  Synthetic oligonucleotide
cgggatgtaatcgcaagatttgccttcgcccggaagtgaaacggcaacttcacac

SEQ ID NO: 374079 - DNA, 58 bp, Artificial
  Synthetic oligonucleotide
cgggatgtagtcataccactcctcacaaacaacgacctcttagtaaggatggcactgt

SEQ ID NO: 374080 - DNA, 56 bp, Artificial
  Synthetic oligonucleotide
cgggattaaccgagatgagaggatgggttaggaagaggctgttaatttggcgccaa

SEQ ID NO: 374081 - DNA, 57 bp, Artificial
  Synthetic oligonucleotide
cgggattaatttaccactggtcacttatgtgaaggatgaactcagatccaaaactaa

SEQ ID NO: 374082 - DNA, 55 bp, Artificial
  Synthetic oligonucleotide
cgggattaatttgcctataactgggtcgatggatatgtcatatgtgaacattact

SEQ ID NO: 374083 - DNA, 59 bp, Artificial
  Synthetic oligonucleotide
cgggattagcacacgtgcttatagatttaatacaaaccatggtgaaacatctataaggc

SEQ ID NO: 374084 - DNA, 55 bp, Artificial
  Synthetic oligonucleotide
cgggattcatagaaaacggctgggaaggaatggttgatgggtggtatggattccg

SEQ ID NO: 374085 - DNA, 54 bp, Artificial
  Synthetic oligonucleotide
cgggattcggccacatacgaaccgttccggtcgtacaacagaacgtgagtgccg

SEQ ID NO: 374086 - DNA, 55 bp, Artificial
  Synthetic oligonucleotide
cgggattgaggctgagtcagtcgacgctggtggtgtgagcaatctcggtgagggg

SEQ ID NO: 374087 - DNA, 54 bp, Artificial
  Synthetic oligonucleotide
cgggattggtgatattaattccgttgaggtgttgaaaaacacctttgtgggcag

SEQ ID NO: 374088 - DNA, 55 bp, Artificial
  Synthetic oligonucleotide
cgggattgtcacagaacagtatcattagtctaacagggaatgacaggactgttgc

SEQ ID NO: 374089 - DNA, 56 bp, Artificial
  Synthetic oligonucleotide
cgggatttaatttgtattttacgctcccgtaattatgtcgaagcgagctgccgata

SEQ ID NO: 374090 - DNA, 56 bp, Artificial
  Synthetic oligonucleotide
cgggatttcgtgcatcaaaacgaattttagttgagtcgaatagatttcgatttgat

SEQ ID NO: 374091 - DNA, 55 bp, Artificial
  Synthetic oligonucleotide
cgggatttgcaggaatcctatgaagaagctaaattactgattgaaagtggaacac

SEQ ID NO: 374092 - DNA, 55 bp, Artificial
  Synthetic oligonucleotide
cgggcaacagcaggatattgctatacctctgtcctcgcgatttggaaaccatccg

SEQ ID NO: 374093 - DNA, 59 bp, Artificial
  Synthetic oligonucleotide
cgggcaaccaataacattgactgcacttttggttagacatgatcccagttaggttgaca

SEQ ID NO: 374094 - DNA, 58 bp, Artificial
  Synthetic oligonucleotide
cgggcaaccatcggtgttgtagaattcaatagggagtgtgtgcgcggggcgagaagga

SEQ ID NO: 374095 - DNA, 53 bp, Artificial
  Synthetic oligonucleotide
cgggcaacgcagattgtttgagtggttacgtcaaaacggattccttattaaac

SEQ ID NO: 374096 - DNA, 58 bp, Artificial
  Synthetic oligonucleotide
cgggcaactagtcgacaaagtgcacgtagagcctcacacaccaagtacgtttgatgtt

SEQ ID NO: 374097 - DNA, 60 bp, Artificial
  Synthetic oligonucleotide
cgggcaagtttgtttcaaatagtgagttgatcacatgtgctaccattgcagtttctacaa

SEQ ID NO: 374098 - DNA, 55 bp, Artificial
  Synthetic oligonucleotide
cgggcaatagcagacaagtatcactcaagtgtgtactcactcccaccagacccgg

SEQ ID NO: 374099 - DNA, 54 bp, Artificial
  Synthetic oligonucleotide
cgggcaattgaaaatgggcaatggatccagaaaggggttagtgatgtcgcccgt

SEQ ID NO: 374100 - DNA, 55 bp, Artificial
  Synthetic oligonucleotide
cgggcacaaccctagattaacgatatggcaaatttgaggagtgttttcgaacagt

SEQ ID NO: 374101 - DNA, 55 bp, Artificial
  Synthetic oligonucleotide
cgggcacaggccgcaggtcatggtcccataggacatgatggggtcattgagcgct

SEQ ID NO: 374102 - DNA, 55 bp, Artificial
  Synthetic oligonucleotide
cgggcaccacctttcctgagttgagttcactgatgtccaggcatagtcgttatcg

SEQ ID NO: 374103 - DNA, 59 bp, Artificial
  Synthetic oligonucleotide
cgggcacctcacagcctcttgtccggtttgagaaagctggacctagggcagatcaatct

SEQ ID NO: 374104 - DNA, 59 bp, Artificial
  Synthetic oligonucleotide
cgggcacgaattctgactgacctgggttggagtgtctctcttcacagagggaaggtcga

SEQ ID NO: 374105 - DNA, 55 bp, Artificial
  Synthetic oligonucleotide
cgggcacgagcaaaatgagtatccattaaagcctgtcattgaaaacgccaagcca

SEQ ID NO: 374106 - DNA, 56 bp, Artificial
  Synthetic oligonucleotide
cgggcacgagtattgcttcgtgtgtcaacaccgggttcccggctcagaggaacgta

SEQ ID NO: 374107 - DNA, 55 bp, Artificial
  Synthetic oligonucleotide
cgggcacgtcatctttcaatcggtgcactttaactacgctcaataacgtttctgg

SEQ ID NO: 374108 - DNA, 54 bp, Artificial
  Synthetic oligonucleotide
cgggcagagtcccaaaccccggagaagagtacgaggactatgtgcgaaaaccga

SEQ ID NO: 374109 - DNA, 55 bp, Artificial
  Synthetic oligonucleotide
cgggcagcatgatgtttgatgtaaacatagcaggtaaagattacaagaagggcac

SEQ ID NO: 374110 - DNA, 55 bp, Artificial
  Synthetic oligonucleotide
cgggcagcccctgactggatgctgcctctaattctaggcctctacggcactgtgt

SEQ ID NO: 374111 - DNA, 55 bp, Artificial
  Synthetic oligonucleotide
cgggcagcggggcacttgaatacaaggtaaatttcgtgtcgctgaccgtagtacc

SEQ ID NO: 374112 - DNA, 59 bp, Artificial
  Synthetic oligonucleotide
cgggcaggcgaggacgaacttgcgggtgcggtcaaagatgagcagcgggcaggcgttct

SEQ ID NO: 374113 - DNA, 60 bp, Artificial
  Synthetic oligonucleotide
cgggcagtgagcatgcaaagtaccgattttttcttgagagttgacacttactatgagagg

SEQ ID NO: 374114 - DNA, 55 bp, Artificial
  Synthetic oligonucleotide
cgggcagttccacaggaagtatcaccttcgggccgtctctttcagagagcccagc

SEQ ID NO: 374115 - DNA, 52 bp, Artificial
  Synthetic oligonucleotide
cgggcatcaagaagttagttcctgacggttatttggttaagggaacctccac

SEQ ID NO: 374116 - DNA, 58 bp, Artificial
  Synthetic oligonucleotide
cgggcatcatggggaggtaccaggcaattggttgcagggtaacttgaacaagtgttca

SEQ ID NO: 374117 - DNA, 55 bp, Artificial
  Synthetic oligonucleotide
cgggcatcggaaaaacgaaggtagattgccagtggaacggctagaagataagcac

SEQ ID NO: 374118 - DNA, 55 bp, Artificial
  Synthetic oligonucleotide
cgggcatgtatgctctgaccactaaggagacattaagtgttgtgacggatcatgc

SEQ ID NO: 374119 - DNA, 57 bp, Artificial
  Synthetic oligonucleotide
cgggcatgtcagcccaacacgggtatccttcattgtcaatagaccgtacttttccaa

SEQ ID NO: 374120 - DNA, 55 bp, Artificial
  Synthetic oligonucleotide
cgggcattcaaatgacacagtacatgataggaccccttaccggaccctattgatg

SEQ ID NO: 374121 - DNA, 55 bp, Artificial
  Synthetic oligonucleotide
cgggcattcgcccacgcctatacgcccaagaaacaggcttcgggcgggacttaca

SEQ ID NO: 374122 - DNA, 55 bp, Artificial
  Synthetic oligonucleotide
cgggcatttactggcctccagattatgacccgtgttcatcttctatgattcttgg

SEQ ID NO: 374123 - DNA, 54 bp, Artificial
  Synthetic oligonucleotide
cgggccaaactgcataaggcctcgactgggaaggccttccctgtagggaagcgg

SEQ ID NO: 374124 - DNA, 56 bp, Artificial
  Synthetic oligonucleotide
cgggccaaatcagtatacaacctacgttttctgtgcagagaaacctcccatttgac

SEQ ID NO: 374125 - DNA, 55 bp, Artificial
  Synthetic oligonucleotide
cgggccaacgacaagcacagtccattatcccaaagtccacaaaacttactttgaa

SEQ ID NO: 374126 - DNA, 55 bp, Artificial
  Synthetic oligonucleotide
cgggccagacatggcgattgcattgccgacgctatacgacgtctggaagtccgca

SEQ ID NO: 374127 - DNA, 57 bp, Artificial
  Synthetic oligonucleotide
cgggccatatatcctgaaggttggatgttgagatatgcgtaaacaagatcatgtggc

SEQ ID NO: 374128 - DNA, 53 bp, Artificial
  Synthetic oligonucleotide
cgggccatggaagatcgtggtgagttctaccaaaagaaatcccgccttacctt

SEQ ID NO: 374129 - DNA, 58 bp, Artificial
  Synthetic oligonucleotide
cgggccatgggcccgtacatggagcggctggcgggtaaacatccaagtatatactgtg

SEQ ID NO: 374130 - DNA, 55 bp, Artificial
  Synthetic oligonucleotide
cgggccattgcacatccagcattgcactcacgaggctaagagggttcagcatgtc

SEQ ID NO: 374131 - DNA, 56 bp, Artificial
  Synthetic oligonucleotide
cgggcccacaacgtcttccccgttcttgttgctccttcaacaacgatgctcatcgg

SEQ ID NO: 374132 - DNA, 55 bp, Artificial
  Synthetic oligonucleotide
cgggcccacatcgtctttcccgtacgactctcaccctctaccacgatactcttag

SEQ ID NO: 374133 - DNA, 55 bp, Artificial
  Synthetic oligonucleotide
cgggcccagttctaatattgaaggagtattttctatggtcatcgtggttgatcgg

SEQ ID NO: 374134 - DNA, 56 bp, Artificial
  Synthetic oligonucleotide
cgggcccatcaatctctacactttccgggtcgttgggcgaatgacaatcgcaaccg

SEQ ID NO: 374135 - DNA, 55 bp, Artificial
  Synthetic oligonucleotide
cgggcccatgcaacaacattacagtagttacttgtacacatggtatcaggccaac

SEQ ID NO: 374136 - DNA, 55 bp, Artificial
  Synthetic oligonucleotide
cgggcccattctgcgtcaaactgagaaagcgctacgggagctcctgcccgagaag

SEQ ID NO: 374137 - DNA, 56 bp, Artificial
  Synthetic oligonucleotide
cgggcccattgacaacccggaaaagtgcaattggcacttcgtcctcacgggcgaga

SEQ ID NO: 374138 - DNA, 51 bp, Artificial
  Synthetic oligonucleotide
cgggccccctgaaccgaggggcccgaccaccaagtttggagagcactccgg

SEQ ID NO: 374139 - DNA, 55 bp, Artificial
  Synthetic oligonucleotide
cgggcccgaacacgccatgacaaccgttcaattggatcgcctgtgtcatattggg

SEQ ID NO: 374140 - DNA, 55 bp, Artificial
  Synthetic oligonucleotide
cgggccctgcgatatggatgatggcggagcaaggtcgattgttcctcggtgctca

SEQ ID NO: 374141 - DNA, 57 bp, Artificial
  Synthetic oligonucleotide
cgggccgaagggttgagtagcacacggagggagacatccactcggagaaagcagaaa

SEQ ID NO: 374142 - DNA, 60 bp, Artificial
  Synthetic oligonucleotide
cgggccgagaggcatctcagatgattccgtggctgggtatggacaggggtcatagtaagt

SEQ ID NO: 374143 - DNA, 56 bp, Artificial
  Synthetic oligonucleotide
cgggccgctctccgtttccagctgaacggggacttccttccgttcatgaactctca

SEQ ID NO: 374144 - DNA, 53 bp, Artificial
  Synthetic oligonucleotide
cgggccgtctggtattatatagaacggaaaattcttcctaatatcacctcgta

SEQ ID NO: 374145 - DNA, 55 bp, Artificial
  Synthetic oligonucleotide
cgggcctacacctggctcgaagaggacgaagacagtccacacccagagctcgcaa

SEQ ID NO: 374146 - DNA, 55 bp, Artificial
  Synthetic oligonucleotide
cgggcctaggcacgctctctcctgagatgggtgcttccgttgcgttgtccaataa

SEQ ID NO: 374147 - DNA, 50 bp, Artificial
  Synthetic oligonucleotide
cgggcctcagatgggtggggtagtgtacgactcatatgataggatggtta

SEQ ID NO: 374148 - DNA, 50 bp, Artificial
  Synthetic oligonucleotide
cgggcctcccaaggtagggctgaaacactgcttggtgtgctacccctcca

SEQ ID NO: 374149 - DNA, 53 bp, Artificial
  Synthetic oligonucleotide
cgggcctccctttcgagatcctctaacttctttcttccgttcacccactgctc

SEQ ID NO: 374150 - DNA, 54 bp, Artificial
  Synthetic oligonucleotide
cgggcctcgtcggtccaccttcttggcgaccccaaccaaatccctgccattgat

SEQ ID NO: 374151 - DNA, 55 bp, Artificial
  Synthetic oligonucleotide
cgggcctctagcggtttcttgcccgcccagctttacacttcgttgcacacgaggc

SEQ ID NO: 374152 - DNA, 53 bp, Artificial
  Synthetic oligonucleotide
cgggcctgactttaaccggttagtgtccgcctttgaggaattggccactggag

SEQ ID NO: 374153 - DNA, 55 bp, Artificial
  Synthetic oligonucleotide
cgggcctgatcacccattccactgtaagtgcacaggggcagagtgcaatggcggc

SEQ ID NO: 374154 - DNA, 55 bp, Artificial
  Synthetic oligonucleotide
cgggcctgcggcccttaagcgttaagatacacaatcagatacccgtacatttgtc

SEQ ID NO: 374155 - DNA, 57 bp, Artificial
  Synthetic oligonucleotide
cgggcctgtgcagtatctggaaacccgtcattctttaggaacatggtttggcttaca

SEQ ID NO: 374156 - DNA, 53 bp, Artificial
  Synthetic oligonucleotide
cgggccttataccccgacttgccgagtttctctaggagagtccctttcccagc

SEQ ID NO: 374157 - DNA, 54 bp, Artificial
  Synthetic oligonucleotide
cgggcgaaaccaaaggtcatccaagatcctttcgcggatccgaagccgcaaccg

SEQ ID NO: 374158 - DNA, 55 bp, Artificial
  Synthetic oligonucleotide
cgggcgaatcctatggtgagtcggtcaaacaagcggtgctgctgaacgtgttagg

SEQ ID NO: 374159 - DNA, 55 bp, Artificial
  Synthetic oligonucleotide
cgggcgaatccttcaacgtccgcttcatgcaaaaccccgccctcacctctcaggc

SEQ ID NO: 374160 - DNA, 55 bp, Artificial
  Synthetic oligonucleotide
cgggcgagactcctgtttatcggacctgggtcaagtgggttgagaccgagtatca

SEQ ID NO: 374161 - DNA, 55 bp, Artificial
  Synthetic oligonucleotide
cgggcgagagcgccactctgtacgtgcggctcgaacgtaaggccggttcctcgac

SEQ ID NO: 374162 - DNA, 60 bp, Artificial
  Synthetic oligonucleotide
cgggcgagcagcttctgtataataaggtggctgagttggagagagcggagaaggaggatc

SEQ ID NO: 374163 - DNA, 60 bp, Artificial
  Synthetic oligonucleotide
cgggcgagcctggcaccttattgtggaatactgtttggaacatggcagtcatagcgcact

SEQ ID NO: 374164 - DNA, 56 bp, Artificial
  Synthetic oligonucleotide
cgggcgagtaaagtgtgccgtttcgtgacattacagccggattcacaattccctcg

SEQ ID NO: 374165 - DNA, 60 bp, Artificial
  Synthetic oligonucleotide
cgggcgatgatgtgtggttggggaggactgtatcaactagtgggagatcaggctttgaaa

SEQ ID NO: 374166 - DNA, 57 bp, Artificial
  Synthetic oligonucleotide
cgggcgattgtggctgcccctatgtctacaagaagggaaacacctgggttgtgatcg

SEQ ID NO: 374167 - DNA, 59 bp, Artificial
  Synthetic oligonucleotide
cgggcgcaggtaatcttacatacctcaccgtgaaatacggcatcgacacataaggtgtg

SEQ ID NO: 374168 - DNA, 53 bp, Artificial
  Synthetic oligonucleotide
cgggcgcccgaatccgtctaccgatattacacgaaattcttccggtgttatcc

SEQ ID NO: 374169 - DNA, 55 bp, Artificial
  Synthetic oligonucleotide
cgggcgccggtacgattggagggttcgtgataccacagagatcgaagaagatcga

SEQ ID NO: 374170 - DNA, 57 bp, Artificial
  Synthetic oligonucleotide
cgggcgctcattcgcccaaagaggctgcggagaaaatccacctttccctgggtgtca

SEQ ID NO: 374171 - DNA, 59 bp, Artificial
  Synthetic oligonucleotide
cgggcggaagctaggcgcagattccaccccatcacaggatcctctcgtggtccttatgg

SEQ ID NO: 374172 - DNA, 55 bp, Artificial
  Synthetic oligonucleotide
cgggcggatgaaaggagcagatatcatagggtaattgtcgaattggatagtgcgg

SEQ ID NO: 374173 - DNA, 55 bp, Artificial
  Synthetic oligonucleotide
cgggcggatgttagcggagcggatagtacatgcggttacgaagtcacggttacga

SEQ ID NO: 374174 - DNA, 55 bp, Artificial
  Synthetic oligonucleotide
cgggcggggatgtgtcacgttctactcgaccacccactaaccttccactcactca

SEQ ID NO: 374175 - DNA, 52 bp, Artificial
  Synthetic oligonucleotide
cgggcggtaacgctaacgcggccaaatcaaacaatgatcgcggtctagaacc

SEQ ID NO: 374176 - DNA, 55 bp, Artificial
  Synthetic oligonucleotide
cgggcggtagatttacgaatttaacacagaatatggcgagacagctcgatatagc

SEQ ID NO: 374177 - DNA, 54 bp, Artificial
  Synthetic oligonucleotide
cgggcggtccccttggccgcttattccctcactggcttgtggcccttttgcctg

SEQ ID NO: 374178 - DNA, 57 bp, Artificial
  Synthetic oligonucleotide
cgggcggtttgtgtccttcccaaagatcgggagcagcagggcataggttggaagaga

SEQ ID NO: 374179 - DNA, 53 bp, Artificial
  Synthetic oligonucleotide
cgggcgtaaccgtgataccgctgctaaaacctccctccgttaagacgcgttgc

SEQ ID NO: 374180 - DNA, 53 bp, Artificial
  Synthetic oligonucleotide
cgggcgtattagcgttgagacgtctccctcacacgaggcgagtttagcagcac

SEQ ID NO: 374181 - DNA, 55 bp, Artificial
  Synthetic oligonucleotide
cgggcgtgttggttacagtacgaggggacagtacgcattgaaactgagccccacc

SEQ ID NO: 374182 - DNA, 54 bp, Artificial
  Synthetic oligonucleotide
cgggcgtttgttacaacgtgctatgcctagagacctgtagggtggagtttttaa

SEQ ID NO: 374183 - DNA, 55 bp, Artificial
  Synthetic oligonucleotide
cgggctacaatcgtctgttactcttgtaataccatggattagcaacacccactac

SEQ ID NO: 374184 - DNA, 54 bp, Artificial
  Synthetic oligonucleotide
cgggctacattacttgctggtaccagactaacatagtggtcccgcccgaaaccc

SEQ ID NO: 374185 - DNA, 58 bp, Artificial
  Synthetic oligonucleotide
cgggctatccaattgcgcacctgttcccagtgattcgcccaatcgccgttgttccaac

SEQ ID NO: 374186 - DNA, 56 bp, Artificial
  Synthetic oligonucleotide
cgggctattcgtgttatctatcctgttggacaagaaaccgtatttaccagatggtg

SEQ ID NO: 374187 - DNA, 60 bp, Artificial
  Synthetic oligonucleotide
cgggctcattcgtgtatgcatgctggtgcggaaagccgctgggggccactatgtccagat

SEQ ID NO: 374188 - DNA, 60 bp, Artificial
  Synthetic oligonucleotide
cgggctccatcaatacgcggttgggtcacagcttccatgcgagcccgagccagatgtagc

SEQ ID NO: 374189 - DNA, 55 bp, Artificial
  Synthetic oligonucleotide
cgggctcccatttctgcttatcacccagtccgtgctggccctggcagtgatcgtg

SEQ ID NO: 374190 - DNA, 56 bp, Artificial
  Synthetic oligonucleotide
cgggctcgcaatgatgctaatcgatatcacgatgagttcactatgatcgttaaggc

SEQ ID NO: 374191 - DNA, 55 bp, Artificial
  Synthetic oligonucleotide
cgggctcgctgccgctttcatgatccgtcacaagctgaccgatggggtattcagc

SEQ ID NO: 374192 - DNA, 60 bp, Artificial
  Synthetic oligonucleotide
cgggctctacatcacagctcatagggggatcatagctgcagggaaggccatatgggctgt

SEQ ID NO: 374193 - DNA, 54 bp, Artificial
  Synthetic oligonucleotide
cgggctctccgattcgaggggcccggcgcccaagtttggagagcactccgggcc

SEQ ID NO: 374194 - DNA, 60 bp, Artificial
  Synthetic oligonucleotide
cgggctctcctcgcatcggactggctcatcttcgacgagaggcgggcgatcctgagaact

SEQ ID NO: 374195 - DNA, 54 bp, Artificial
  Synthetic oligonucleotide
cgggctctcgagaagttggacgtcttgtctgaggagctccaagctctcaggaaa

SEQ ID NO: 374196 - DNA, 55 bp, Artificial
  Synthetic oligonucleotide
cgggctctgcgatcctatcagactattcgtcaagggagagcctcacaaacagagc

SEQ ID NO: 374197 - DNA, 60 bp, Artificial
  Synthetic oligonucleotide
cgggctctgtgcctcgtagtcgttagccatgaacagtactgtgcgtagattctgtttcac

SEQ ID NO: 374198 - DNA, 58 bp, Artificial
  Synthetic oligonucleotide
cgggctctgttctctacggctggtgcactcgcgcctttggaaagaggaacaccgtctg

SEQ ID NO: 374199 - DNA, 55 bp, Artificial
  Synthetic oligonucleotide
cgggctcttctcccacctttagctcatggcggatcaatccgtctgacgtaggtag

SEQ ID NO: 374200 - DNA, 55 bp, Artificial
  Synthetic oligonucleotide
cgggctcttggactcacgtgacatacaagtggcaaccagatgtcaacaacgcacg

SEQ ID NO: 374201 - DNA, 52 bp, Artificial
  Synthetic oligonucleotide
cgggctgaacataacgaaaggttcgtcactagggacaacgcctatatggacc

SEQ ID NO: 374202 - DNA, 54 bp, Artificial
  Synthetic oligonucleotide
cgggctgcaaagcaagtggtacacgcgcagaactaaaagtcgtgtcatatactg

SEQ ID NO: 374203 - DNA, 56 bp, Artificial
  Synthetic oligonucleotide
cgggctgcattgtcactgtggaaactaaaccggggccagatttcaagtttcacctc

SEQ ID NO: 374204 - DNA, 53 bp, Artificial
  Synthetic oligonucleotide
cgggctgcctaaacgtgcacttgaggccttggcgtctgcttacagactaccct

SEQ ID NO: 374205 - DNA, 58 bp, Artificial
  Synthetic oligonucleotide
cgggctgcctgtaaggagcccgatatgaatatgtaccttcagaaaggagttggcgctt

SEQ ID NO: 374206 - DNA, 60 bp, Artificial
  Synthetic oligonucleotide
cgggctgcgtgggagacagctagacacactccagtcaattcctggctaggcaacatcatt

SEQ ID NO: 374207 - DNA, 55 bp, Artificial
  Synthetic oligonucleotide
cgggctggagaggagagatgcgtagagggacggatcaattctctgagaaaacccg

SEQ ID NO: 374208 - DNA, 55 bp, Artificial
  Synthetic oligonucleotide
cgggctgggtgactgctcggtcagataagtaacgaaaggtcgcatagcgttcccc

SEQ ID NO: 374209 - DNA, 56 bp, Artificial
  Synthetic oligonucleotide
cgggctgtaacggggcatggcttaactaaggggactatggcatgtataggcgtaaa

SEQ ID NO: 374210 - DNA, 55 bp, Artificial
  Synthetic oligonucleotide
cgggctgtgcccatttgacacgagtcctgtgatcaaagggaagtacaataccact

SEQ ID NO: 374211 - DNA, 56 bp, Artificial
  Synthetic oligonucleotide
cgggcttaaccaatatttggtcggatcacagctcccatgtgaacccgaaccggatg

SEQ ID NO: 374212 - DNA, 56 bp, Artificial
  Synthetic oligonucleotide
cgggcttaccaagagcgagtgaatccgttcagattaggtttgaattatagacctcc

SEQ ID NO: 374213 - DNA, 59 bp, Artificial
  Synthetic oligonucleotide
cgggcttgagccaatcagttactcatctcaggatctttccttaatgtgactactaaggg

SEQ ID NO: 374214 - DNA, 60 bp, Artificial
  Synthetic oligonucleotide
cggggaaaaatatgtgatggtgcggaatccattagtcagtctgtctaaagattcatactc

SEQ ID NO: 374215 - DNA, 53 bp, Artificial
  Synthetic oligonucleotide
cggggaaaattcttccgagatgccgagtacttaacctcttctacccttcgaga

SEQ ID NO: 374216 - DNA, 55 bp, Artificial
  Synthetic oligonucleotide
cggggaaacaatgggatcatcgtagaagagatcctacctacatagatggtaggag

SEQ ID NO: 374217 - DNA, 60 bp, Artificial
  Synthetic oligonucleotide
cggggaaacgctcaacgcatcgtatacgatgatgaattacaaatgcatatcttgcgtggt

SEQ ID NO: 374218 - DNA, 55 bp, Artificial
  Synthetic oligonucleotide
cggggaaatgtactactgtcaccagaggaagtcagcgagacacaagggacggaga

SEQ ID NO: 374219 - DNA, 53 bp, Artificial
  Synthetic oligonucleotide
cggggaacaagggtgctaccaagaggacaactgtctactaggggtgtccaaat

SEQ ID NO: 374220 - DNA, 56 bp, Artificial
  Synthetic oligonucleotide
cggggaacagagtatggccaggactaacaacctcaatgtgggcccggtgtcgttca

SEQ ID NO: 374221 - DNA, 50 bp, Artificial
  Synthetic oligonucleotide
cggggaacattgtgaattcagtgaacatccagtctcgaaagctgctggct

SEQ ID NO: 374222 - DNA, 50 bp, Artificial
  Synthetic oligonucleotide
cggggaacggattcaaaggcttgggcgagttggaaggtttaaacctggtg

SEQ ID NO: 374223 - DNA, 55 bp, Artificial
  Synthetic oligonucleotide
cggggaactaaccttagtattagtgtagctgcagatggaaacgcattgtcagagt

SEQ ID NO: 374224 - DNA, 55 bp, Artificial
  Synthetic oligonucleotide
cggggaactaacgaggaccataagcggccagacctaatagtctgtgatgacgttc

SEQ ID NO: 374225 - DNA, 55 bp, Artificial
  Synthetic oligonucleotide
cggggaagacccgaaaatcgaaacgaacaagtttgcggcaatatgcactcacttg

SEQ ID NO: 374226 - DNA, 55 bp, Artificial
  Synthetic oligonucleotide
cggggaagatgagctggacccaaatgaaatacgtgtgaataagacaattcaggca

SEQ ID NO: 374227 - DNA, 55 bp, Artificial
  Synthetic oligonucleotide
cggggaagattgtgtaatcctctgaatccgtttgtcaaccataagggaattgagt

SEQ ID NO: 374228 - DNA, 55 bp, Artificial
  Synthetic oligonucleotide
cggggaagcctatggggcttactgccagtccttcaccgcatctggctcagaaccc

SEQ ID NO: 374229 - DNA, 55 bp, Artificial
  Synthetic oligonucleotide
cggggaaggtgaactggaccggcaaagggtctatcacaatcctggactgcaagct

SEQ ID NO: 374230 - DNA, 58 bp, Artificial
  Synthetic oligonucleotide
cggggaatacagactgcggggtgaagcaaggaaaacgttcgtggagctcatgagaaga

SEQ ID NO: 374231 - DNA, 55 bp, Artificial
  Synthetic oligonucleotide
cggggaatacggggtttagtacaggacctcacttacattatgagatgcgttggaa

SEQ ID NO: 374232 - DNA, 54 bp, Artificial
  Synthetic oligonucleotide
cggggaatcaatgaccggaatttctggagaggcgaaaatggacggagaacaagg

SEQ ID NO: 374233 - DNA, 55 bp, Artificial
  Synthetic oligonucleotide
cggggaatgggagcattcagttggcttctcgaactgggaggaggttcctttctgc

SEQ ID NO: 374234 - DNA, 55 bp, Artificial
  Synthetic oligonucleotide
cggggaattgaatcgtacgcagatagcccaagagggcctcaaacgcgtgaggaaa

SEQ ID NO: 374235 - DNA, 55 bp, Artificial
  Synthetic oligonucleotide
cggggaattgtagtgtaacaaattgggatggatgtaactgtacaaggtcaggaaa

SEQ ID NO: 374236 - DNA, 59 bp, Artificial
  Synthetic oligonucleotide
cggggacagattcaattcatgtttagttcagcattataccaaagcggctactcttggtc

SEQ ID NO: 374237 - DNA, 54 bp, Artificial
  Synthetic oligonucleotide
cggggacattgttctccgccaaggggaagggacctagaatctaatgtcctgaac

SEQ ID NO: 374238 - DNA, 54 bp, Artificial
  Synthetic oligonucleotide
cggggacctactattccatgcgtaccacaaggcaatggggcttccaaaggaccc

SEQ ID NO: 374239 - DNA, 53 bp, Artificial
  Synthetic oligonucleotide
cggggacgacaccagtattcaactttgatttaatggtagttctcgcttgggtt

SEQ ID NO: 374240 - DNA, 55 bp, Artificial
  Synthetic oligonucleotide
cggggactccactaacggtcaaccatacacttatgctgttgggtttatgccaaac

SEQ ID NO: 374241 - DNA, 55 bp, Artificial
  Synthetic oligonucleotide
cggggagagggattctagaagtttatatgcgttgctgggagtgtatgaaggaact

SEQ ID NO: 374242 - DNA, 56 bp, Artificial
  Synthetic oligonucleotide
cggggagagtcaaagattgtagaatctggtgacccaaatgcactcttgaagcaccg

SEQ ID NO: 374243 - DNA, 60 bp, Artificial
  Synthetic oligonucleotide
cggggagcacttcagactcatgcgtataatcaatggatgtgtagtcaaagctatggcttc

SEQ ID NO: 374244 - DNA, 58 bp, Artificial
  Synthetic oligonucleotide
cggggagccccctacacctttactgacactttggatgctggttcatctctgtgttata

SEQ ID NO: 374245 - DNA, 55 bp, Artificial
  Synthetic oligonucleotide
cggggagccctaaaattcccctgacggcctttgagttggccaccgcagctctgct

SEQ ID NO: 374246 - DNA, 53 bp, Artificial
  Synthetic oligonucleotide
cggggagggctacacggtggcccagaccaacatgaccaaagactggttcctgg

SEQ ID NO: 374247 - DNA, 52 bp, Artificial
  Synthetic oligonucleotide
cggggaggtaacagacagctatgacaactatactttcttgaatgcaaggaaa

SEQ ID NO: 374248 - DNA, 55 bp, Artificial
  Synthetic oligonucleotide
cggggaggtgtactctacaggaggttctgggaacaggctgcttgccgagtactcg

SEQ ID NO: 374249 - DNA, 59 bp, Artificial
  Synthetic oligonucleotide
cggggagtcagcctaaaactgcttgtaacaagtgctattgtaaagtgtgttgctggcat

SEQ ID NO: 374250 - DNA, 55 bp, Artificial
  Synthetic oligonucleotide
cggggagtccttcacaggcaagctggcagaccaggcttccaaggccaacctgatg

SEQ ID NO: 374251 - DNA, 60 bp, Artificial
  Synthetic oligonucleotide
cggggatctatcgctgtgtctggtgaattatgcgatagaagcaagcttcgggtacaggtt

SEQ ID NO: 374252 - DNA, 55 bp, Artificial
  Synthetic oligonucleotide
cggggatctattccttcgaccccgatatgatcaagtttcaacggcgtttcgcgac

SEQ ID NO: 374253 - DNA, 55 bp, Artificial
  Synthetic oligonucleotide
cggggatctgaatccccatcttgagaaacagcgagctcgtcggacggacgaagct

SEQ ID NO: 374254 - DNA, 53 bp, Artificial
  Synthetic oligonucleotide
cggggatctttagggccgctgtgtgcaccagaggtgtagcaaaagccctacag

SEQ ID NO: 374255 - DNA, 55 bp, Artificial
  Synthetic oligonucleotide
cggggatgactgcgttctaattgtggagcggaggaatcttaagcagatacagagg

SEQ ID NO: 374256 - DNA, 60 bp, Artificial
  Synthetic oligonucleotide
cggggatggactgcatgaggccttgcttctgggttgagctgatcagaggaaggcccaagg

SEQ ID NO: 374257 - DNA, 58 bp, Artificial
  Synthetic oligonucleotide
cggggattgccccaagtatgtgaatgtcaaatccttaaagcttgcaacaggacctaga

SEQ ID NO: 374258 - DNA, 60 bp, Artificial
  Synthetic oligonucleotide
cggggcaacacgatggcacattacagaacagagggacacttcatgacgttcactcgtgaa

SEQ ID NO: 374259 - DNA, 55 bp, Artificial
  Synthetic oligonucleotide
cggggcaacgaacgagtggcattttcgtagtcagggaagaaggctgtatcatgca

SEQ ID NO: 374260 - DNA, 60 bp, Artificial
  Synthetic oligonucleotide
cggggcaagacagtaattgggactgtaatctgccgctcgatggataacccaggctctatc

SEQ ID NO: 374261 - DNA, 56 bp, Artificial
  Synthetic oligonucleotide
cggggcaatccgacgagatggaggaaaaactgagtggtgatccatacctgaaaggt

SEQ ID NO: 374262 - DNA, 57 bp, Artificial
  Synthetic oligonucleotide
cggggcacaactgggtcaagcgtcagttcattgacattgcacctccgggggttgttg

SEQ ID NO: 374263 - DNA, 55 bp, Artificial
  Synthetic oligonucleotide
cggggcagtttctctctcatgttgaagaagttagaccagacctgctactaactgc

SEQ ID NO: 374264 - DNA, 55 bp, Artificial
  Synthetic oligonucleotide
cggggcatatatgtctcaagcccatggcatagaccccaacatacgtaccggggtt

SEQ ID NO: 374265 - DNA, 55 bp, Artificial
  Synthetic oligonucleotide
cggggcatatttgtaaatttatgttcaggactccagcccaggactccaggggagc

SEQ ID NO: 374266 - DNA, 57 bp, Artificial
  Synthetic oligonucleotide
cggggcatctctgggagtctgcaaaccccttttgcggtgaaagcacgctttacacac

SEQ ID NO: 374267 - DNA, 55 bp, Artificial
  Synthetic oligonucleotide
cggggcatgcacgaatcacacctagttgttatattagcgctgttacttatagctc

SEQ ID NO: 374268 - DNA, 56 bp, Artificial
  Synthetic oligonucleotide
cggggcatggcttaactaaggggactatagcatgtataggcgcaaagcggggtttc

SEQ ID NO: 374269 - DNA, 59 bp, Artificial
  Synthetic oligonucleotide
cggggccaatctcacatcaggtgattgtcaacaaccaaaactggtcgggatactcagga

SEQ ID NO: 374270 - DNA, 55 bp, Artificial
  Synthetic oligonucleotide
cggggccaccaacatgcagcaggctaataacaagactggtgaacccgcttcgttg

SEQ ID NO: 374271 - DNA, 52 bp, Artificial
  Synthetic oligonucleotide
cggggccaccctcgggtgccccctcgtctgctagtgatatctgggtgcttcc

SEQ ID NO: 374272 - DNA, 50 bp, Artificial
  Synthetic oligonucleotide
cggggcccgttttaaagtcggacgccgtggtgtagaattttggaacgagc

SEQ ID NO: 374273 - DNA, 50 bp, Artificial
  Synthetic oligonucleotide
cggggccgttcaaaatccagaaagatggtatccctcaattttcaatcctc

SEQ ID NO: 374274 - DNA, 57 bp, Artificial
  Synthetic oligonucleotide
cggggccgttcgctattctgaccgggtcgaccccaactgcgcagcaacttaatgatg

SEQ ID NO: 374275 - DNA, 55 bp, Artificial
  Synthetic oligonucleotide
cggggcctaatcccggcacgtcgactcggaccaaaactgctgcgaatccgaatcg

SEQ ID NO: 374276 - DNA, 57 bp, Artificial
  Synthetic oligonucleotide
cggggcctacgcccctgctgtacaggcttgggtccgtacaaaatgagatcacgacca

SEQ ID NO: 374277 - DNA, 55 bp, Artificial
  Synthetic oligonucleotide
cggggccttgaaagggctttgctataagatgggtggcaagtggtcaaaatgcagt

SEQ ID NO: 374278 - DNA, 54 bp, Artificial
  Synthetic oligonucleotide
cggggcctttcaaggttccggtagtgccagcagacatcacacaaggcctagacc

SEQ ID NO: 374279 - DNA, 53 bp, Artificial
  Synthetic oligonucleotide
cggggcctttggtcaccagtccggagccgtctacgtaggcaactacagggtgg

SEQ ID NO: 374280 - DNA, 56 bp, Artificial
  Synthetic oligonucleotide
cggggcgaaaagctctacctagcatttgcaaaatagtttcgtaagagaaagtagca

SEQ ID NO: 374281 - DNA, 60 bp, Artificial
  Synthetic oligonucleotide
cggggcgaatcaataattgtagagtctggcgatccaaatgcattattgaaacatcgattt

SEQ ID NO: 374282 - DNA, 55 bp, Artificial
  Synthetic oligonucleotide
cggggcgaatcagtaattatggaatcgggcgatccgaatgcactattgaaacacc

SEQ ID NO: 374283 - DNA, 55 bp, Artificial
  Synthetic oligonucleotide
cggggcgagagtcgccaagatctctgtgaacctgaaagagttcctgctagcgtca

SEQ ID NO: 374284 - DNA, 55 bp, Artificial
  Synthetic oligonucleotide
cggggcgaggcagaggtttccttctaaattgaaagagaagtgttgctgcgagagg

SEQ ID NO: 374285 - DNA, 60 bp, Artificial
  Synthetic oligonucleotide
cggggcgcataatcgcatgggatgggcaggcggtgctacaaattcacaatccgactcaac

SEQ ID NO: 374286 - DNA, 55 bp, Artificial
  Synthetic oligonucleotide
cggggcgcggtctagctcgcaatactgataaccccattatcagcgaatatgtgtg

SEQ ID NO: 374287 - DNA, 54 bp, Artificial
  Synthetic oligonucleotide
cggggcggcggtaaacccttaatagatgcctactgcctaagccggccggtcgca

SEQ ID NO: 374288 - DNA, 53 bp, Artificial
  Synthetic oligonucleotide
cggggcgggtagccaaagcggtgttgggaggggcctatgccttccagtacacc

SEQ ID NO: 374289 - DNA, 55 bp, Artificial
  Synthetic oligonucleotide
cggggcggtcttagagaccaacggcccagagcgccacaatctctcttttgacgtc

SEQ ID NO: 374290 - DNA, 56 bp, Artificial
  Synthetic oligonucleotide
cggggcgtccaagagtgctaccctgcttggttcctgccctacgaaacctgatgtcc

SEQ ID NO: 374291 - DNA, 55 bp, Artificial
  Synthetic oligonucleotide
cggggcgttaataattctccacgtgcaggagttgggccacggtccaacaaggcca

SEQ ID NO: 374292 - DNA, 55 bp, Artificial
  Synthetic oligonucleotide
cggggctagcaggtgggtgttccgcctcccgagagacgagtgaggcttatcccgg

SEQ ID NO: 374293 - DNA, 56 bp, Artificial
  Synthetic oligonucleotide
cggggctatgtctttcagtttgaaacgtgcagaacttacggcggttacacctgaga

SEQ ID NO: 374294 - DNA, 55 bp, Artificial
  Synthetic oligonucleotide
cggggctcagaaggccattgcactgtacttcgtacctaaagtaggccagtgaaac

SEQ ID NO: 374295 - DNA, 55 bp, Artificial
  Synthetic oligonucleotide
cggggctccaaaccttgaacgtgttaagtatatgcgtgaaagaggtgtgttgccc

SEQ ID NO: 374296 - DNA, 55 bp, Artificial
  Synthetic oligonucleotide
cggggctgttccaagcgtggatgcgttggatgacgacaccctttcctgtggtgtc

SEQ ID NO: 374297 - DNA, 53 bp, Artificial
  Synthetic oligonucleotide
cggggctttaatagttctcctcgagcaggagttgggccccggtctaataaggc

SEQ ID NO: 374298 - DNA, 59 bp, Artificial
  Synthetic oligonucleotide
cggggcttttggaagaagcattctggtgagcctggcaccctgttatggaacactgtatg

SEQ ID NO: 374299 - DNA, 56 bp, Artificial
  Synthetic oligonucleotide
cgggggaaacatatccttcacgcgacgctacttgctattccaccatggggtgaact

SEQ ID NO: 374300 - DNA, 60 bp, Artificial
  Synthetic oligonucleotide
cgggggaaattgttatcttatgataactgatggctcagcttcaggtattagtgagtgcag

SEQ ID NO: 374301 - DNA, 60 bp, Artificial
  Synthetic oligonucleotide
cgggggacacgttggagcatacaccctggctgcatgtgactggttgttaggatcgcttcc

SEQ ID NO: 374302 - DNA, 51 bp, Artificial
  Synthetic oligonucleotide
cgggggacgtcgtgctccttcgatcggggtcctacccgctctcccggctgc

SEQ ID NO: 374303 - DNA, 60 bp, Artificial
  Synthetic oligonucleotide
cgggggagccgaccatctcaggtgcatcactctatgtcctcgatgtgctcatccctttca

SEQ ID NO: 374304 - DNA, 60 bp, Artificial
  Synthetic oligonucleotide
cgggggatgtcgtgtgctgctcaatgtcttatacctggacaggcgcacttgtcaccccgt

SEQ ID NO: 374305 - DNA, 52 bp, Artificial
  Synthetic oligonucleotide
cgggggcaggtacgtggacggcaccaaagggattctttacaatagccccacc

SEQ ID NO: 374306 - DNA, 49 bp, Artificial
  Synthetic oligonucleotide
cgggggccgtttttgtggcccgacctgagtccaaaaatcccgatcgttt

SEQ ID NO: 374307 - DNA, 60 bp, Artificial
  Synthetic oligonucleotide
cgggggcgcaagcaagcacttgcttgaagtggtgcgttatataaggaacaggacagattc

SEQ ID NO: 374308 - DNA, 57 bp, Artificial
  Synthetic oligonucleotide
cgggggctcaattacactgacttttactctttactgatagagaaatgctctagtttc

SEQ ID NO: 374309 - DNA, 51 bp, Artificial
  Synthetic oligonucleotide
cgggggggtcggcaataacaccttaacctgccccacggactgcttccggaa

SEQ ID NO: 374310 - DNA, 50 bp, Artificial
  Synthetic oligonucleotide
cggggggtagtggacccaacaccagattgaggggcttttgccccaccccc

SEQ ID NO: 374311 - DNA, 51 bp, Artificial
  Synthetic oligonucleotide
cggggggtggagactagagggtatataaagaaagaaccaggaagtcaaaaa

SEQ ID NO: 374312 - DNA, 56 bp, Artificial
  Synthetic oligonucleotide
cgggggtacaagggagtttggcagggagacggtatcgtgcacaccacttgcccatg

SEQ ID NO: 374313 - DNA, 57 bp, Artificial
  Synthetic oligonucleotide
cgggggtagctccatgaccctcgaagacacagctgaaccagtatcggacgctgagtc

SEQ ID NO: 374314 - DNA, 54 bp, Artificial
  Synthetic oligonucleotide
cgggggtcgtgtcccgagggagccccacagtcgttctcctgtaatcactccgaa

SEQ ID NO: 374315 - DNA, 52 bp, Artificial
  Synthetic oligonucleotide
cgggggtgctccaaaggttaacccatgggctattcctcgatacggttcaacc

SEQ ID NO: 374316 - DNA, 60 bp, Artificial
  Synthetic oligonucleotide
cgggggtggaggtaacaccactgcatggcctcgtgctctggggtcgtgttgtagatgatc

SEQ ID NO: 374317 - DNA, 56 bp, Artificial
  Synthetic oligonucleotide
cgggggttgattgtgctatcctaacgattaagggccgcagcccataatgggccgga

SEQ ID NO: 374318 - DNA, 54 bp, Artificial
  Synthetic oligonucleotide
cgggggttgtcggtggaacacaggctttccgagtcgagaggagagccgatttgg

SEQ ID NO: 374319 - DNA, 55 bp, Artificial
  Synthetic oligonucleotide
cgggggttgtgcacccgacccctaattcttgaggagtctcgcggagtggttctgc

SEQ ID NO: 374320 - DNA, 53 bp, Artificial
  Synthetic oligonucleotide
cggggtaaaggtaccttgtccatcctgacaaccaacccggctggtactagaga

SEQ ID NO: 374321 - DNA, 60 bp, Artificial
  Synthetic oligonucleotide
cggggtacctgtgtgggaagatgcaaatacccctctattttgtgcatctgatgctaaatc

SEQ ID NO: 374322 - DNA, 55 bp, Artificial
  Synthetic oligonucleotide
cggggtacgactgcataggtacgctccggcgtgcaaacctctcctacgggaggag

SEQ ID NO: 374323 - DNA, 57 bp, Artificial
  Synthetic oligonucleotide
cggggtagagtgtacaccatttcattaggttatgagttggggactatagatagattg

SEQ ID NO: 374324 - DNA, 59 bp, Artificial
  Synthetic oligonucleotide
cggggtagataatgctgagatttgggaaagtgcctcttctttagtaagagagcagtgtg

SEQ ID NO: 374325 - DNA, 53 bp, Artificial
  Synthetic oligonucleotide
cggggtagcgttgacgcgtcgggtctacccggtacctaacctcacgtgtgctg

SEQ ID NO: 374326 - DNA, 54 bp, Artificial
  Synthetic oligonucleotide
cggggtaggcatctcatcggttggcccctccctcttccgggtccaacttagaga

SEQ ID NO: 374327 - DNA, 55 bp, Artificial
  Synthetic oligonucleotide
cggggtagttccgatacagggtccgataaatagagctgttgcacaaaacgcctac

SEQ ID NO: 374328 - DNA, 52 bp, Artificial
  Synthetic oligonucleotide
cggggtcaaattggaatcaatgggcacctatcaaatactatcaatctactca

SEQ ID NO: 374329 - DNA, 55 bp, Artificial
  Synthetic oligonucleotide
cggggtcaacctcgactggtagtttccagttgaagagtgagatcgactccatcag

SEQ ID NO: 374330 - DNA, 53 bp, Artificial
  Synthetic oligonucleotide
cggggtcaagcgttagacagttggaccttattttacaccacaaacaccaatcg

SEQ ID NO: 374331 - DNA, 54 bp, Artificial
  Synthetic oligonucleotide
cggggtcacgtatgggtacgcaacggttgaggattttgtgagcggaccaaacac

SEQ ID NO: 374332 - DNA, 56 bp, Artificial
  Synthetic oligonucleotide
cggggtcactagacgctgtatatacgaattcgactagtggagagccatttttaact

SEQ ID NO: 374333 - DNA, 57 bp, Artificial
  Synthetic oligonucleotide
cggggtccgtaagacaaaccgaagtgatgcgagaagcacctcccctggtcatgacag

SEQ ID NO: 374334 - DNA, 55 bp, Artificial
  Synthetic oligonucleotide
cggggtctaaagaaggctgttaagtcagacatggtgtccatgttcaaaagctacc

SEQ ID NO: 374335 - DNA, 55 bp, Artificial
  Synthetic oligonucleotide
cggggtctcgatggaggcaagtcgtggagggctcccgccgacgtccgtcaaactc

SEQ ID NO: 374336 - DNA, 60 bp, Artificial
  Synthetic oligonucleotide
cggggtgaaaagcatttaaagcgtgctgtggatcttagtgaggcacgtgccacgcgctca

SEQ ID NO: 374337 - DNA, 60 bp, Artificial
  Synthetic oligonucleotide
cggggtgaaactagaatcagtgggagttcatcagattttggcgatctactccacagtcgc

SEQ ID NO: 374338 - DNA, 53 bp, Artificial
  Synthetic oligonucleotide
cggggtgaaaggattttcatttaggtatggtaatggcgtttggataggtagaa

SEQ ID NO: 374339 - DNA, 50 bp, Artificial
  Synthetic oligonucleotide
cggggtgagccacattgggaagcccgtctgggttggagcgtccgatgtag

SEQ ID NO: 374340 - DNA, 58 bp, Artificial
  Synthetic oligonucleotide
cggggtgatctgaactttgtcaatagagcaaaccagcgactaaaccccatgcaccaac

SEQ ID NO: 374341 - DNA, 55 bp, Artificial
  Synthetic oligonucleotide
cggggtgcagcgaaaccaggccacacatcagattgtcaagtattaccaaaaggct

SEQ ID NO: 374342 - DNA, 55 bp, Artificial
  Synthetic oligonucleotide
cggggtggatatagaggctctcagaatggtgggccagctagataacaccctgaag

SEQ ID NO: 374343 - DNA, 55 bp, Artificial
  Synthetic oligonucleotide
cggggtggcatctcgccggattggaccacgttactgtttcccgtcatgtcgcctg

SEQ ID NO: 374344 - DNA, 55 bp, Artificial
  Synthetic oligonucleotide
cggggtgggtcccctctgtaagggagacgggttgtaccttacatctgcagatata

SEQ ID NO: 374345 - DNA, 52 bp, Artificial
  Synthetic oligonucleotide
cggggtgggtttccctccgatcactaggttaaatgttccagtgaagtactcc

SEQ ID NO: 374346 - DNA, 51 bp, Artificial
  Synthetic oligonucleotide
cggggtgttaacgccgcctcccgaaccgaaagcctgtgttaggcgttatcc

SEQ ID NO: 374347 - DNA, 56 bp, Artificial
  Synthetic oligonucleotide
cggggttaattacgtctcaacgacgcttcttgcacttagacgcgagctaattctcc

SEQ ID NO: 374348 - DNA, 51 bp, Artificial
  Synthetic oligonucleotide
cggggttactcaggaagataacggagatctaacaggtgttcgcgttgaata

SEQ ID NO: 374349 - DNA, 52 bp, Artificial
  Synthetic oligonucleotide
cggggttaggagttcaagttactatcgaacacataaacggaaaggagaacca

SEQ ID NO: 374350 - DNA, 55 bp, Artificial
  Synthetic oligonucleotide
cggggttatcgcaccttatacgccaaatgaggtcgatcgaagaattacaccgcag

SEQ ID NO: 374351 - DNA, 51 bp, Artificial
  Synthetic oligonucleotide
cggggttcctgtcgatatcaccggatggacaattgcttctcaggttcgata

SEQ ID NO: 374352 - DNA, 55 bp, Artificial
  Synthetic oligonucleotide
cggggttcgagtgcgaaataaaccatccagaattgggatggattccttacggcgc

SEQ ID NO: 374353 - DNA, 57 bp, Artificial
  Synthetic oligonucleotide
cggggttcttcggaaggtgagacttgaattccatgtagagtctcgccgtgcacggta

SEQ ID NO: 374354 - DNA, 55 bp, Artificial
  Synthetic oligonucleotide
cggggttcttctatgcccgaaaggatgccacatgatcaccgaaaacggctggccc

SEQ ID NO: 374355 - DNA, 53 bp, Artificial
  Synthetic oligonucleotide
cggggttctttcgaagattattaaagagcctatacagggtgttattggtggtg

SEQ ID NO: 374356 - DNA, 52 bp, Artificial
  Synthetic oligonucleotide
cggggttgagagaacgacgcaccagggttccgtccctgtttggtaagtcgtc

SEQ ID NO: 374357 - DNA, 50 bp, Artificial
  Synthetic oligonucleotide
cggggttgcctaaattgcctacgataattgttttgtccctaacgttaaac

SEQ ID NO: 374358 - DNA, 55 bp, Artificial
  Synthetic oligonucleotide
cggggttggagcatagagcgagcaggctccgcatggtcctaattggagggctcca

SEQ ID NO: 374359 - DNA, 57 bp, Artificial
  Synthetic oligonucleotide
cggggttggcaacttaactatataccctcatcagtggatcaacctacgcactaacaa

SEQ ID NO: 374360 - DNA, 54 bp, Artificial
  Synthetic oligonucleotide
cgggtaaattctgctgttttatgcggtggttagggcaggagtgtacctgctttt

SEQ ID NO: 374361 - DNA, 57 bp, Artificial
  Synthetic oligonucleotide
cgggtaacctaaataggtgacgcaacatagtatactgtgttacgttgcctgctctta

SEQ ID NO: 374362 - DNA, 55 bp, Artificial
  Synthetic oligonucleotide
cgggtaagacccgtgtgatagaagctagtagtgtgaatgacactgtattatttag

SEQ ID NO: 374363 - DNA, 53 bp, Artificial
  Synthetic oligonucleotide
cgggtaaggggacattaatctttgcactagggttaagggtcattatcttatag

SEQ ID NO: 374364 - DNA, 53 bp, Artificial
  Synthetic oligonucleotide
cgggtaagttacgtattaggcaaaacgtagtacaaaacaatagttctactgca

SEQ ID NO: 374365 - DNA, 55 bp, Artificial
  Synthetic oligonucleotide
cgggtaattcaccatggcagctgactcaatttctggattggataagtctagggcg

SEQ ID NO: 374366 - DNA, 53 bp, Artificial
  Synthetic oligonucleotide
cgggtaatttctttgctcgaggccacttggctccggctggagattttttcctc

SEQ ID NO: 374367 - DNA, 55 bp, Artificial
  Synthetic oligonucleotide
cgggtacaatccggaatgtggatccatccaggtcctcaggaattatattgacgct

SEQ ID NO: 374368 - DNA, 52 bp, Artificial
  Synthetic oligonucleotide
cgggtacagagagaagataacggagcccctggaggtctataaaacatcccgc

SEQ ID NO: 374369 - DNA, 54 bp, Artificial
  Synthetic oligonucleotide
cgggtaccgagacaaaacttagtcaagtgttcaaaatgtttgaccagtacgcaa

SEQ ID NO: 374370 - DNA, 51 bp, Artificial
  Synthetic oligonucleotide
cgggtacgaaagggcttgtaattgggaaagggcctcttcctttgttaatga

SEQ ID NO: 374371 - DNA, 60 bp, Artificial
  Synthetic oligonucleotide
cgggtactagaggtgaattcttacgcaagcactatagcgaagcaggtgtcttcgcatacc

SEQ ID NO: 374372 - DNA, 56 bp, Artificial
  Synthetic oligonucleotide
cgggtactagtgatccttacgttgatacgttaggttatgcggcttatatgggcgat

SEQ ID NO: 374373 - DNA, 57 bp, Artificial
  Synthetic oligonucleotide
cgggtactgcggggcctcggctccgtacgccactgcctgtggtctcgacgtctgtgt

SEQ ID NO: 374374 - DNA, 60 bp, Artificial
  Synthetic oligonucleotide
cgggtagatatcatcagtccagtatcgtagagattccctatgataattgttcacggtcgc

SEQ ID NO: 374375 - DNA, 58 bp, Artificial
  Synthetic oligonucleotide
cgggtagcagctgaggagtacgtggaggtcacgcgggtgggggatttccactatgtga

SEQ ID NO: 374376 - DNA, 55 bp, Artificial
  Synthetic oligonucleotide
cgggtagccccgtttaaacgagctgatgtgaaatgtcgaacgaggcagacgacta

SEQ ID NO: 374377 - DNA, 55 bp, Artificial
  Synthetic oligonucleotide
cgggtagctatagcagtcggatagtaatatatccggcgtttcgaaataccatacc

SEQ ID NO: 374378 - DNA, 55 bp, Artificial
  Synthetic oligonucleotide
cgggtaggccgtcaacctaccgccgtatcgtattgtgtttggccgatggatgacc

SEQ ID NO: 374379 - DNA, 55 bp, Artificial
  Synthetic oligonucleotide
cgggtaggtgtctgattcacctatgtggctcaggttccgactgccagtgggctgc

SEQ ID NO: 374380 - DNA, 55 bp, Artificial
  Synthetic oligonucleotide
cgggtagttcctcaggaagtatcacgttcgggccgagtctatcagactgcccagc

SEQ ID NO: 374381 - DNA, 54 bp, Artificial
  Synthetic oligonucleotide
cgggtatagtgagagttgaggttcttaaccagttggttgccgctaacaacgtgt

SEQ ID NO: 374382 - DNA, 55 bp, Artificial
  Synthetic oligonucleotide
cgggtatattgggcacattcgtcatgtgtttcatacgtgacaaacgaccggacgt

SEQ ID NO: 374383 - DNA, 59 bp, Artificial
  Synthetic oligonucleotide
cgggtatcttatataaaagagagtcaacacatagcgcctcattttgcgggtcaccatat

SEQ ID NO: 374384 - DNA, 55 bp, Artificial
  Synthetic oligonucleotide
cgggtatgagcatgtcgaggagtttcgtatatctctccttgatgtcgctcatagt

SEQ ID NO: 374385 - DNA, 52 bp, Artificial
  Synthetic oligonucleotide
cgggtattccacaggggaagaccacgttgcagggcctaacacatcgggccta

SEQ ID NO: 374386 - DNA, 53 bp, Artificial
  Synthetic oligonucleotide
cgggtattgacccattaaactcggatccttttctcaaaatggttagcgttgga

SEQ ID NO: 374387 - DNA, 55 bp, Artificial
  Synthetic oligonucleotide
cgggtattgataacttaaatggtctcttgggtggtaatggcttagataagccttc

SEQ ID NO: 374388 - DNA, 53 bp, Artificial
  Synthetic oligonucleotide
cgggtatttcaacacacctttgaggtttgacaatttccaaggacaaatctacg

SEQ ID NO: 374389 - DNA, 57 bp, Artificial
  Synthetic oligonucleotide
cgggtcaaaggtcgtacctacgtcataagtcacgtgggaagagctgctgtgaacctg

SEQ ID NO: 374390 - DNA, 55 bp, Artificial
  Synthetic oligonucleotide
cgggtcaaaggttacagccgccatgttaaaacacgtgacgtatgacgtcacggcc

SEQ ID NO: 374391 - DNA, 55 bp, Artificial
  Synthetic oligonucleotide
cgggtcaaatgcaaacattcggaccaagcaaagtacagacgggaccttatgcagg

SEQ ID NO: 374392 - DNA, 56 bp, Artificial
  Synthetic oligonucleotide
cgggtcaatacctgcgtctggttcagtagctcttacgcctacggaagtaggtatat

SEQ ID NO: 374393 - DNA, 59 bp, Artificial
  Synthetic oligonucleotide
cgggtcaatgcgggcaggaggtctaggcgcacaaaccatgataaccctgtggctacacg

SEQ ID NO: 374394 - DNA, 60 bp, Artificial
  Synthetic oligonucleotide
cgggtcaattaatagagggccaatgttttaatcctgcacacactctgacacttgctcagc

SEQ ID NO: 374395 - DNA, 55 bp, Artificial
  Synthetic oligonucleotide
cgggtcacaggcaagcacgaccgaaatgctacgagacgctgtccaaagatgcggt

SEQ ID NO: 374396 - DNA, 55 bp, Artificial
  Synthetic oligonucleotide
cgggtcaggaggtcttactgccatgtgtctcagatggaatcgattcagcagaggg

SEQ ID NO: 374397 - DNA, 54 bp, Artificial
  Synthetic oligonucleotide
cgggtcaggccacattcccatctactggcagcagagatggtggatcagactagc

SEQ ID NO: 374398 - DNA, 57 bp, Artificial
  Synthetic oligonucleotide
cgggtcaggtataatgtgcagtttgactgaggggaccatgatgtgtataggcgtcaa

SEQ ID NO: 374399 - DNA, 52 bp, Artificial
  Synthetic oligonucleotide
cgggtcatctcgtgcggtgtatactaaccgcgcctgtcccgcgttagcgctc

SEQ ID NO: 374400 - DNA, 55 bp, Artificial
  Synthetic oligonucleotide
cgggtccacgtcggcaagatggctggagatgtactgtccggtttcggcgtcgtat

SEQ ID NO: 374401 - DNA, 55 bp, Artificial
  Synthetic oligonucleotide
cgggtccagaccctgggtacggggtgtctccagcataataagcatctattggaca

SEQ ID NO: 374402 - DNA, 52 bp, Artificial
  Synthetic oligonucleotide
cgggtccagcggttgggacgtgtcggaagagtcaaaccagggttcgcgttac

SEQ ID NO: 374403 - DNA, 55 bp, Artificial
  Synthetic oligonucleotide
cgggtccatcataatggctgcctgtacaaacaacagagacctgagaccagtggat

SEQ ID NO: 374404 - DNA, 55 bp, Artificial
  Synthetic oligonucleotide
cgggtccgattttctcgcccgacgtatcaaggccatgcttattctacccctcgcc

SEQ ID NO: 374405 - DNA, 50 bp, Artificial
  Synthetic oligonucleotide
cgggtccgcgggtctgaagcacgcactcttccgttgaaggacggggtggg

SEQ ID NO: 374406 - DNA, 55 bp, Artificial
  Synthetic oligonucleotide
cgggtccggcgcagcaagatgctttgccatcaggtcgtctacatataccttcagc

SEQ ID NO: 374407 - DNA, 57 bp, Artificial
  Synthetic oligonucleotide
cgggtcctctgacgcctattgggtgcaaaatgttaccgaggcacgaccagaactcga

SEQ ID NO: 374408 - DNA, 58 bp, Artificial
  Synthetic oligonucleotide
cgggtcctctgcccaaactgaaatgataggcaccggtccatactccaatggggtcagc

SEQ ID NO: 374409 - DNA, 55 bp, Artificial
  Synthetic oligonucleotide
cgggtcctggtctaccgtaagcgaggaggccagtgaggacgtcgtttgctgttcg

SEQ ID NO: 374410 - DNA, 55 bp, Artificial
  Synthetic oligonucleotide
cgggtccttgaaatggttgaggattggctgcaccgagggccaagggaattctgcg

SEQ ID NO: 374411 - DNA, 50 bp, Artificial
  Synthetic oligonucleotide
cgggtcgaaaaacagcacctctagcggcatagagcgacggctagcctccg

SEQ ID NO: 374412 - DNA, 52 bp, Artificial
  Synthetic oligonucleotide
cgggtcgaaatcaactatatctaaattaataagaaaatattcagtatataag

SEQ ID NO: 374413 - DNA, 58 bp, Artificial
  Synthetic oligonucleotide
cgggtcgcaggtgaaatctacagagccggccaactcacccctacagttctgaagacta

SEQ ID NO: 374414 - DNA, 54 bp, Artificial
  Synthetic oligonucleotide
cgggtcgggaccctgatttacatccagggaacgtcatggtgttggggactgcaa

SEQ ID NO: 374415 - DNA, 55 bp, Artificial
  Synthetic oligonucleotide
cgggtcgtcagtatgctaagacgcggagcatcccgcgtttccccgcttatgggga

SEQ ID NO: 374416 - DNA, 55 bp, Artificial
  Synthetic oligonucleotide
cgggtcgtttagtgcaaaataaaactacacatcgcgacatccttgcgtcgtccct

SEQ ID NO: 374417 - DNA, 55 bp, Artificial
  Synthetic oligonucleotide
cgggtctaagatggtggtgcccaatctgttgagctctcggtacggatgttgggcc

SEQ ID NO: 374418 - DNA, 55 bp, Artificial
  Synthetic oligonucleotide
cgggtctagatcgttgccccaacatcgcacatactacatcgttagtaccgcgttt

SEQ ID NO: 374419 - DNA, 55 bp, Artificial
  Synthetic oligonucleotide
cgggtctagcgatttgtgacacttggatattgttaccaatgcatgcggacccagg

SEQ ID NO: 374420 - DNA, 53 bp, Artificial
  Synthetic oligonucleotide
cgggtctcgttacagtacactttcgatccgacgtgtttcgcgcctcgttcccg

SEQ ID NO: 374421 - DNA, 59 bp, Artificial
  Synthetic oligonucleotide
cgggtctgcgggcttctgggagtcgtctcccgcttccacacttgagggctctctgagtc

SEQ ID NO: 374422 - DNA, 58 bp, Artificial
  Synthetic oligonucleotide
cgggtctggcatcgcgcctgacaaagtgggatcaacagtacaaacagttagtggaaaa

SEQ ID NO: 374423 - DNA, 50 bp, Artificial
  Synthetic oligonucleotide
cgggtctggccagtttctaacaacagatgatagacaatctcctagtgcaa

SEQ ID NO: 374424 - DNA, 54 bp, Artificial
  Synthetic oligonucleotide
cgggtctgggaagggtggcagacttcctcagatcgagcaggtacgagaaaccct

SEQ ID NO: 374425 - DNA, 57 bp, Artificial
  Synthetic oligonucleotide
cgggtctgtcccgtgttccatatgacaactatgtagcccggttgcacaaagacgaaa

SEQ ID NO: 374426 - DNA, 55 bp, Artificial
  Synthetic oligonucleotide
cgggtctgttcttcttgtctcacaactgttcaccttttcgcctcgccggcatgag

SEQ ID NO: 374427 - DNA, 56 bp, Artificial
  Synthetic oligonucleotide
cgggtcttatgcctcctctggcaaacttgactgcttgggagaaattattcgttccc

SEQ ID NO: 374428 - DNA, 57 bp, Artificial
  Synthetic oligonucleotide
cgggtcttcagctgaatttctacgtcttcataaacataacaaccaggtctcgggcta

SEQ ID NO: 374429 - DNA, 58 bp, Artificial
  Synthetic oligonucleotide
cgggtcttgacgttaacgcgattgatagcgcgttattacgactgcgaacattaggtgc

SEQ ID NO: 374430 - DNA, 55 bp, Artificial
  Synthetic oligonucleotide
cgggtcttgatgcgttaatcagtggatgggcaagagttgagcaaataaaagcggc

SEQ ID NO: 374431 - DNA, 55 bp, Artificial
  Synthetic oligonucleotide
cgggtgaaaacactacgctcgtctggaactctgtgcataatcttgcagcaggtac

SEQ ID NO: 374432 - DNA, 54 bp, Artificial
  Synthetic oligonucleotide
cgggtgaaacctcttaggctaatacttctatgaaaagataccttggatagggta

SEQ ID NO: 374433 - DNA, 50 bp, Artificial
  Synthetic oligonucleotide
cgggtgaaatcactgtactagtggaggttgctgacatggagttacacaca

SEQ ID NO: 374434 - DNA, 54 bp, Artificial
  Synthetic oligonucleotide
cgggtgaaattgttaagcaaggagccacgaatttcgaacttttacaacaagctg

SEQ ID NO: 374435 - DNA, 58 bp, Artificial
  Synthetic oligonucleotide
cgggtgacagaactgctgtaccgcatgaagagggccgagacgtactgccctcggcccc

SEQ ID NO: 374436 - DNA, 55 bp, Artificial
  Synthetic oligonucleotide
cgggtgacccctggtggcaatcccttcccttaggagcatgagtgtggtcgacaca

SEQ ID NO: 374437 - DNA, 56 bp, Artificial
  Synthetic oligonucleotide
cgggtgaccttgattggtcactcaacgtcaaggagacgtttactcgtctctctgac

SEQ ID NO: 374438 - DNA, 55 bp, Artificial
  Synthetic oligonucleotide
cgggtgaggatgtaccacctccggaatctgatagtccctctattaatactgaagg

SEQ ID NO: 374439 - DNA, 55 bp, Artificial
  Synthetic oligonucleotide
cgggtgagggcgggtggcatttccttttctataccgatcatggcagtcctcctgc

SEQ ID NO: 374440 - DNA, 60 bp, Artificial
  Synthetic oligonucleotide
cgggtgagttatctggatgaagcagcttactgcaacccattggatgtgctcaaagttctg

SEQ ID NO: 374441 - DNA, 56 bp, Artificial
  Synthetic oligonucleotide
cgggtgatacaacctagagatcctaggtataatgtggaggtggggcgctttttgcg

SEQ ID NO: 374442 - DNA, 60 bp, Artificial
  Synthetic oligonucleotide
cgggtgatgagaactggcagagctggctgttgcctatgattatcgttcgcgaaggactag

SEQ ID NO: 374443 - DNA, 60 bp, Artificial
  Synthetic oligonucleotide
cgggtgatgagaactggcagagttggctgctgcctatgattattgttcgtgaagggttag

SEQ ID NO: 374444 - DNA, 52 bp, Artificial
  Synthetic oligonucleotide
cgggtgcaacaaacagtagccaagacataggagagccaagcccacgcacgcg

SEQ ID NO: 374445 - DNA, 58 bp, Artificial
  Synthetic oligonucleotide
cgggtgcccaaaacccaaagatgatgaggagttcgtcatttcatccgacgacatcaaa

SEQ ID NO: 374446 - DNA, 42 bp, Artificial
  Synthetic oligonucleotide
cgggtgcccctcgctctgcgggggtcctccaaaaggagacca

SEQ ID NO: 374447 - DNA, 55 bp, Artificial
  Synthetic oligonucleotide
cgggtgccgcagacgatgaatctagccccgttcgagaaatagggtccaaggcaag

SEQ ID NO: 374448 - DNA, 58 bp, Artificial
  Synthetic oligonucleotide
cgggtgccggaggatccctgatccggagtcaaggggcctatcgggcaggagcagctag

SEQ ID NO: 374449 - DNA, 60 bp, Artificial
  Synthetic oligonucleotide
cgggtgcctatgaagggcttctgctcaattggaaacattaactacaaatcatgtgataat

SEQ ID NO: 374450 - DNA, 55 bp, Artificial
  Synthetic oligonucleotide
cgggtgcgacgttcacccttcatgagaacaagaacacgaatgcgcctccggcggc

SEQ ID NO: 374451 - DNA, 54 bp, Artificial
  Synthetic oligonucleotide
cgggtgcgagtggtaaattgcaagaagcgttacggaagaacggcgcttacaccg

SEQ ID NO: 374452 - DNA, 55 bp, Artificial
  Synthetic oligonucleotide
cgggtgcgtatggccgactggctgacgctatccgcactggctcacctgacgtaat

SEQ ID NO: 374453 - DNA, 55 bp, Artificial
  Synthetic oligonucleotide
cgggtgcgttaactgatttaaagatagcaattgaaaagaatggtggcggtaagca

SEQ ID NO: 374454 - DNA, 58 bp, Artificial
  Synthetic oligonucleotide
cgggtgctatcgtgaggcaatcgcaagcgcaccgactgaggaaaaaacggttcgtgta

SEQ ID NO: 374455 - DNA, 55 bp, Artificial
  Synthetic oligonucleotide
cgggtgctcactgaagaaccatatctgttaatcatgagcgtattatcacctggcg

SEQ ID NO: 374456 - DNA, 52 bp, Artificial
  Synthetic oligonucleotide
cgggtggaacctgcttgcagaaaatctgatggtacacgaatggttcatagat

SEQ ID NO: 374457 - DNA, 57 bp, Artificial
  Synthetic oligonucleotide
cgggtggaagggcaaattgaggacgcgctccctgtctccgaacgctggcctcacaac

SEQ ID NO: 374458 - DNA, 55 bp, Artificial
  Synthetic oligonucleotide
cgggtggacaatatatccctgcggattctaagacagaatctgggtataatagagt

SEQ ID NO: 374459 - DNA, 55 bp, Artificial
  Synthetic oligonucleotide
cgggtggagagagactagcagaattagtacagacatacgcatcaggattttcgga

SEQ ID NO: 374460 - DNA, 55 bp, Artificial
  Synthetic oligonucleotide
cgggtggatggttcggaactgctagagatgtaccaccacgtgagtgtggtgaaat

SEQ ID NO: 374461 - DNA, 52 bp, Artificial
  Synthetic oligonucleotide
cgggtggccttcttttacgacagagctgtccccataggaatgttgagacccg

SEQ ID NO: 374462 - DNA, 54 bp, Artificial
  Synthetic oligonucleotide
cgggtgggtcagttattccgttgtgggtgggtttaggagccatgctgccttaag

SEQ ID NO: 374463 - DNA, 55 bp, Artificial
  Synthetic oligonucleotide
cgggtggtacttcaatattgaaaagacggagtactcgagaataccagagatggtt

SEQ ID NO: 374464 - DNA, 55 bp, Artificial
  Synthetic oligonucleotide
cgggtgtaaatgaactcgccatttatcaatgtgtccaacatgttttcgattctgg

SEQ ID NO: 374465 - DNA, 53 bp, Artificial
  Synthetic oligonucleotide
cgggtgtcacaggcttggacgaaagagttcgaaggtgttaacctcttacaatt

SEQ ID NO: 374466 - DNA, 55 bp, Artificial
  Synthetic oligonucleotide
cgggtgtcacccaagctgcataccacacagagaatccttttccgcttgtgccggc

SEQ ID NO: 374467 - DNA, 55 bp, Artificial
  Synthetic oligonucleotide
cgggtgtctaacatatatgaagaacctctcaagctcggtgggagacggtcacatt

SEQ ID NO: 374468 - DNA, 57 bp, Artificial
  Synthetic oligonucleotide
cgggtgtgataccatcgccaggtgccagtgtacaacaggagtgtatttttgcgcttc

SEQ ID NO: 374469 - DNA, 55 bp, Artificial
  Synthetic oligonucleotide
cgggtgtgtctctttgtacgcacgtaggttagcggctaccttggcatcacctagc

SEQ ID NO: 374470 - DNA, 55 bp, Artificial
  Synthetic oligonucleotide
cgggtgtgttgatgtgaggaggcacaaacacgctcactgtaatcttttccgccac

SEQ ID NO: 374471 - DNA, 55 bp, Artificial
  Synthetic oligonucleotide
cgggtgttaccttccgcgtagacgtgccaccagttgttatatacggcgcgaacga

SEQ ID NO: 374472 - DNA, 60 bp, Artificial
  Synthetic oligonucleotide
cgggtgttagcagtccatcaaactaacactgggtatactggaggtgctgtcataatagac

SEQ ID NO: 374473 - DNA, 52 bp, Artificial
  Synthetic oligonucleotide
cgggtgtttatttcatatatcacccgtgggcacatccgtcatttaatgatgt

SEQ ID NO: 374474 - DNA, 60 bp, Artificial
  Synthetic oligonucleotide
cgggttaatggtgctcactttgtcaccgcattataagcgctatatcagctggtgcatgtg

SEQ ID NO: 374475 - DNA, 55 bp, Artificial
  Synthetic oligonucleotide
cgggttacgcgtagagtcctctttaatgcgggtacgtaatcctcgcgtgcaccag

SEQ ID NO: 374476 - DNA, 56 bp, Artificial
  Synthetic oligonucleotide
cgggttactgtatgcataccaacaacgcgctgaccacctaccgataggagcccaca

SEQ ID NO: 374477 - DNA, 54 bp, Artificial
  Synthetic oligonucleotide
cgggttagagtgggtcgccaacgacacggatcaattccgcatcctttacaaagg

SEQ ID NO: 374478 - DNA, 55 bp, Artificial
  Synthetic oligonucleotide
cgggttagcctactcacctatattccgtcttttcattgaactccctactctatta

SEQ ID NO: 374479 - DNA, 52 bp, Artificial
  Synthetic oligonucleotide
cgggttagtcaaagtggttatcgggcttgtactttcaggatctccagtcccg

SEQ ID NO: 374480 - DNA, 55 bp, Artificial
  Synthetic oligonucleotide
cgggttatgggaggatcaaatatactgcttggatatgtccaacggcccaacatgc

SEQ ID NO: 374481 - DNA, 58 bp, Artificial
  Synthetic oligonucleotide
cgggttcaacatctctgccgttgattaatttgaattgttcacaattgttattatacac

SEQ ID NO: 374482 - DNA, 52 bp, Artificial
  Synthetic oligonucleotide
cgggttcccacgctacgtcatcaaaacacgactttcaaattccgtcgaccgt

SEQ ID NO: 374483 - DNA, 55 bp, Artificial
  Synthetic oligonucleotide
cgggttcgacatacagatttgtggattacattaaaactagttccacacaagcgta

SEQ ID NO: 374484 - DNA, 55 bp, Artificial
  Synthetic oligonucleotide
cgggttcgactcgaggctcagcctttggtcgctagtatgatgccctccgttcgtg

SEQ ID NO: 374485 - DNA, 60 bp, Artificial
  Synthetic oligonucleotide
cgggttcggctcaattaagagtgtgaatgcaacgaagattagttacactctaagcactga

SEQ ID NO: 374486 - DNA, 53 bp, Artificial
  Synthetic oligonucleotide
cgggttcggggagacaaccccagctccgaagcaggaacagaaagagagggaac

SEQ ID NO: 374487 - DNA, 60 bp, Artificial
  Synthetic oligonucleotide
cgggttctaaacccatctggactatgtcttgcctctggattggcggtcgcaatctgattg

SEQ ID NO: 374488 - DNA, 59 bp, Artificial
  Synthetic oligonucleotide
cgggttctcctcgcatcggactggctcatcttcgatagggcggacggtcccgagagctc

SEQ ID NO: 374489 - DNA, 58 bp, Artificial
  Synthetic oligonucleotide
cgggttctcctcgcatcggactggctcattctcggagagggcggacggtcctgagaac

SEQ ID NO: 374490 - DNA, 55 bp, Artificial
  Synthetic oligonucleotide
cgggttctctacgtggtgtatcttgaaataaaggggatttggagtctcccagata

SEQ ID NO: 374491 - DNA, 55 bp, Artificial
  Synthetic oligonucleotide
cgggttctctatagagtcagactacactgctttcgattcgtcccaggaccacgtc

SEQ ID NO: 374492 - DNA, 54 bp, Artificial
  Synthetic oligonucleotide
cgggttctgatgttcccggagcgcggcagcaaacccgttcccacctcccaggcc

SEQ ID NO: 374493 - DNA, 55 bp, Artificial
  Synthetic oligonucleotide
cgggttgacgtcaaaccctacaatcgattgacctgcacgaggaggacacatgccc

SEQ ID NO: 374494 - DNA, 54 bp, Artificial
  Synthetic oligonucleotide
cgggttgatacaccttgaatccttcatccttggacctcaggtcccccggtctaa

SEQ ID NO: 374495 - DNA, 55 bp, Artificial
  Synthetic oligonucleotide
cgggttgggagtgaggacgcagtggaagaatgtaacagacggtggggtcggtgcg

SEQ ID NO: 374496 - DNA, 54 bp, Artificial
  Synthetic oligonucleotide
cgggttggggataccaggtcgaagaatcgttgatttgtgcagttgtatttaccc

SEQ ID NO: 374497 - DNA, 53 bp, Artificial
  Synthetic oligonucleotide
cgggttggtaaacgtttctgcgttaagtccgtgtatatattagggaagatctg

SEQ ID NO: 374498 - DNA, 60 bp, Artificial
  Synthetic oligonucleotide
cgggttggtcatccagctaacggctaaaatgatcagtcgcatcttctgatgcgccggagg

SEQ ID NO: 374499 - DNA, 55 bp, Artificial
  Synthetic oligonucleotide
cgggttgtacattggacgcaggagctaactatggagtcgcagacgacttgggacg

SEQ ID NO: 374500 - DNA, 58 bp, Artificial
  Synthetic oligonucleotide
cgggttgtccatccagctagcggctaaaatggtcagtctcacccaaaaggtgagccag

SEQ ID NO: 374501 - DNA, 55 bp, Artificial
  Synthetic oligonucleotide
cgggttgtcgtgaatggggtttcggtgcggagtgaatgggatgtgccggtagagc

SEQ ID NO: 374502 - DNA, 55 bp, Artificial
  Synthetic oligonucleotide
cgggttgtgatcatcacagcgctcttcacacccacgccgcatggagtcgtaggcc

SEQ ID NO: 374503 - DNA, 55 bp, Artificial
  Synthetic oligonucleotide
cgggttgtgcacagagtcggactatgaagccttcgacgctagtcaagatcagtac

SEQ ID NO: 374504 - DNA, 56 bp, Artificial
  Synthetic oligonucleotide
cgggtttaaacaagataaattttagatccatgacggatgtggtagactccatacca

SEQ ID NO: 374505 - DNA, 51 bp, Artificial
  Synthetic oligonucleotide
cgggtttagaatcggaggtaacctactgaatcccaaacaggtgggcgaccc

SEQ ID NO: 374506 - DNA, 60 bp, Artificial
  Synthetic oligonucleotide
cgggtttagacccatcactagtgaagttgggagtacaaatatgccttcatgcggcagcta

SEQ ID NO: 374507 - DNA, 53 bp, Artificial
  Synthetic oligonucleotide
cgggtttatgtttggactcctctttcagtacctacaggggcttccaatgaggt

SEQ ID NO: 374508 - DNA, 55 bp, Artificial
  Synthetic oligonucleotide
cgggtttattacagagacagcagagacccgatttggaaaggaccggccaccctgc

SEQ ID NO: 374509 - DNA, 52 bp, Artificial
  Synthetic oligonucleotide
cgggtttattataggacaggttctgatccgtcttggaagggacccgccgtct

SEQ ID NO: 374510 - DNA, 55 bp, Artificial
  Synthetic oligonucleotide
cgggtttcaggggtagattgggggcgagggaatcgtgcgatttgatgcatgttgt

SEQ ID NO: 374511 - DNA, 52 bp, Artificial
  Synthetic oligonucleotide
cgggtttcccgtatttgcagttgctttgccagtcacgttgggccccaacgag

SEQ ID NO: 374512 - DNA, 60 bp, Artificial
  Synthetic oligonucleotide
cgggtttcgggatggctcttagagctatacacgaaactggcatgctcgatcatcttaagg

SEQ ID NO: 374513 - DNA, 55 bp, Artificial
  Synthetic oligonucleotide
cgggtttctctccaactttccttccctatgaataccttcagcttcgctggctcaa

SEQ ID NO: 374514 - DNA, 55 bp, Artificial
  Synthetic oligonucleotide
cgggtttgatgtggaagtcgatgtgagcgtcatagatccgtttcgaattaccggc

SEQ ID NO: 374515 - DNA, 54 bp, Artificial
  Synthetic oligonucleotide
cgggtttggacaaacccctgctagaaaccaggatcatcctcaaccataggcggg

SEQ ID NO: 374516 - DNA, 55 bp, Artificial
  Synthetic oligonucleotide
cgggtttgtccccaccgcaccagttgtcatccgtaggtgcgggaagggctctctg

SEQ ID NO: 374517 - DNA, 53 bp, Artificial
  Synthetic oligonucleotide
cgggtttgtttaaccttaggtttgcggttgcgtcattcgaaatacagtgattg

SEQ ID NO: 374518 - DNA, 55 bp, Artificial
  Synthetic oligonucleotide
cgggttttaatggcagaaccagacgacagaacgataatctgggtttacggatctg

SEQ ID NO: 374519 - DNA, 50 bp, Artificial
  Synthetic oligonucleotide
cgggttttatccctcgacttaacgtcaaatgggaaattgaaaccgaaagc

SEQ ID NO: 374520 - DNA, 53 bp, Artificial
  Synthetic oligonucleotide
cgggttttcttttcccgatgcttggggtagtgccaaaatcgcctacgcctcaa

SEQ ID NO: 374521 - DNA, 55 bp, Artificial
  Synthetic oligonucleotide
cggtaaaagccgtgttggtcctgatggtaatttatatggtgatgtgtggggtggc

SEQ ID NO: 374522 - DNA, 54 bp, Artificial
  Synthetic oligonucleotide
cggtaaaaggagtcggaacaatggtgatggaactaattcggatgataaagaggg

SEQ ID NO: 374523 - DNA, 55 bp, Artificial
  Synthetic oligonucleotide
cggtaaacaaggctgctgcactgtattcaaactgttggagtctgatggcccagtc

SEQ ID NO: 374524 - DNA, 50 bp, Artificial
  Synthetic oligonucleotide
cggtaaacacgtacgggtctaacgtactcacggtttcgggtaatgtttca

SEQ ID NO: 374525 - DNA, 55 bp, Artificial
  Synthetic oligonucleotide
cggtaaaccatgcatggggcgtcgaaaagatcaggtatgcactcggacctggtgg

SEQ ID NO: 374526 - DNA, 52 bp, Artificial
  Synthetic oligonucleotide
cggtaaactattgatctttacgggcacaaaggtatacgagattagtttttcc

SEQ ID NO: 374527 - DNA, 50 bp, Artificial
  Synthetic oligonucleotide
cggtaaacttcctaatgtacttaggcggtgtgaggttaagcttcttaacg

SEQ ID NO: 374528 - DNA, 54 bp, Artificial
  Synthetic oligonucleotide
cggtaaaggggccgatcccttatacctgctgacgatggtaagcgatacttaccc

SEQ ID NO: 374529 - DNA, 55 bp, Artificial
  Synthetic oligonucleotide
cggtaaatagctcaacctgtgatgtataccagcaatgtaaacagcgaccacaact

SEQ ID NO: 374530 - DNA, 58 bp, Artificial
  Synthetic oligonucleotide
cggtaaatgagatcccgtgcctagaatttttataccgagatcatggtgtcggtgatat

SEQ ID NO: 374531 - DNA, 51 bp, Artificial
  Synthetic oligonucleotide
cggtaaatgtgaataaaattaaccacaaggttaatttggagaccccaatag

SEQ ID NO: 374532 - DNA, 55 bp, Artificial
  Synthetic oligonucleotide
cggtaaattgtacaggcagtaatttaggcaatgttagcggatgctgtggagaagc

SEQ ID NO: 374533 - DNA, 57 bp, Artificial
  Synthetic oligonucleotide
cggtaacaaccgttcagtatgatcccacagcactatcgttcttattgaacgcccgtg

SEQ ID NO: 374534 - DNA, 57 bp, Artificial
  Synthetic oligonucleotide
cggtaacagttcttaagcacctgcgacagaaaagggagcctcagtcttttcttgctg

SEQ ID NO: 374535 - DNA, 52 bp, Artificial
  Synthetic oligonucleotide
cggtaacatcattcgaactgtgatgaatttaatggtggcattcgggccactc

SEQ ID NO: 374536 - DNA, 59 bp, Artificial
  Synthetic oligonucleotide
cggtaacatcttgagcacaattaaacaggagcaaagtgctcgattcactgcgataatag

SEQ ID NO: 374537 - DNA, 58 bp, Artificial
  Synthetic oligonucleotide
cggtaacgcgtactgttgttctcagtgctgcggtgtactttactacggaactctgcca

SEQ ID NO: 374538 - DNA, 56 bp, Artificial
  Synthetic oligonucleotide
cggtaacgggtcgttgtgacccgatttcatcgcccgtctggtaagacgcgctctga

SEQ ID NO: 374539 - DNA, 53 bp, Artificial
  Synthetic oligonucleotide
cggtaacgttttccaagtatacgtcatgtatacccgccatggaagacgtcttt

SEQ ID NO: 374540 - DNA, 52 bp, Artificial
  Synthetic oligonucleotide
cggtaactttaaagttacgcgtggcagagctaagaaaggagcttggaacatt

SEQ ID NO: 374541 - DNA, 55 bp, Artificial
  Synthetic oligonucleotide
cggtaagaactcttaattttcaaccgtaggcgttcatttataatgcatggcaaca

SEQ ID NO: 374542 - DNA, 60 bp, Artificial
  Synthetic oligonucleotide
cggtaagacagtcttcgagcggtagtcacagcccgagcagccctagctctagttcctgct

SEQ ID NO: 374543 - DNA, 55 bp, Artificial
  Synthetic oligonucleotide
cggtaagatcgaacctaatcgaaccaggtcctatgtcaagctaaaacgactccga

SEQ ID NO: 374544 - DNA, 60 bp, Artificial
  Synthetic oligonucleotide
cggtaaggcattcatgtctaccgtgaggggagcgcagaggatggtagcacttggagacac

SEQ ID NO: 374545 - DNA, 53 bp, Artificial
  Synthetic oligonucleotide
cggtaagggtagatcatttcgttcgtaccgtcgtcgtggacctgttcgtccat

SEQ ID NO: 374546 - DNA, 55 bp, Artificial
  Synthetic oligonucleotide
cggtaagggttacacaaagatcgagtggaaaggttcaaacacagacgagtgtgac

SEQ ID NO: 374547 - DNA, 54 bp, Artificial
  Synthetic oligonucleotide
cggtaaggtcggtggtggtgatcccgtcaaatctgttactcgtaggcgagtaac

SEQ ID NO: 374548 - DNA, 56 bp, Artificial
  Synthetic oligonucleotide
cggtaagtctgttaaatgtagttaatcttgatagtattaagtcatatgtatggggg

SEQ ID NO: 374549 - DNA, 52 bp, Artificial
  Synthetic oligonucleotide
cggtaagtcttggcacgtaggtggttatttgatcgttgggatgattgtggtt

SEQ ID NO: 374550 - DNA, 57 bp, Artificial
  Synthetic oligonucleotide
cggtaagtgggtaactggcttattctcatggctagggggcacgtgggctgcaatcct

SEQ ID NO: 374551 - DNA, 51 bp, Artificial
  Synthetic oligonucleotide
cggtaagtttatgtttactgtataccccaagtttggaataagccttaatac

SEQ ID NO: 374552 - DNA, 52 bp, Artificial
  Synthetic oligonucleotide
cggtaatcccaagaaatacatcaccaattaggtttaaaccacctagacgttg

SEQ ID NO: 374553 - DNA, 55 bp, Artificial
  Synthetic oligonucleotide
cggtaatcgctctgtaccttggtttgaaagcgtacctgtgattggctggttgttc

SEQ ID NO: 374554 - DNA, 55 bp, Artificial
  Synthetic oligonucleotide
cggtaatgatgagatatcttggatggaagcctcacaaatagcacaaacacgtgca

SEQ ID NO: 374555 - DNA, 50 bp, Artificial
  Synthetic oligonucleotide
cggtaattagtaccgatacgccgcaactatgcatccgggcattgctttac

SEQ ID NO: 374556 - DNA, 55 bp, Artificial
  Synthetic oligonucleotide
cggtaattggcgacctaatcgttctgcaacaatgcgttctggtttagggtatagc

SEQ ID NO: 374557 - DNA, 48 bp, Artificial
  Synthetic oligonucleotide
cggtaattttgtacgccagttttataacccttccccttttgtaactta

SEQ ID NO: 374558 - DNA, 58 bp, Artificial
  Synthetic oligonucleotide
cggtacaacaaacgttccaatggcagagggatggagaccctgaggtcactagcttctg

SEQ ID NO: 374559 - DNA, 50 bp, Artificial
  Synthetic oligonucleotide
cggtacaaccccaaaaccaccgaaatatggggaactacattacttaggga

SEQ ID NO: 374560 - DNA, 55 bp, Artificial
  Synthetic oligonucleotide
cggtacaacgagatgtccttagaaagcaccgacgaaagcaccaggtcctcaacac

SEQ ID NO: 374561 - DNA, 54 bp, Artificial
  Synthetic oligonucleotide
cggtacaatatcaacaccccattaggaattatcctactggcgaagggaacctta

SEQ ID NO: 374562 - DNA, 59 bp, Artificial
  Synthetic oligonucleotide
cggtacaatggcccgttacatgaggaggatgagagaggcgttccaacccccagagatca

SEQ ID NO: 374563 - DNA, 55 bp, Artificial
  Synthetic oligonucleotide
cggtacaattattcaatatacgggtcaacgttagaaagtagaacgcgcaggagct

SEQ ID NO: 374564 - DNA, 55 bp, Artificial
  Synthetic oligonucleotide
cggtacacatgaaggctgtccggtcgcgtctggaaatcaacaaggtagcttctgt

SEQ ID NO: 374565 - DNA, 54 bp, Artificial
  Synthetic oligonucleotide
cggtacacctgtccgtcgccgcttacgattttagtgccctcgccggatttagag

SEQ ID NO: 374566 - DNA, 55 bp, Artificial
  Synthetic oligonucleotide
cggtacagattattatttgcatcctgcatactatttaagaaaacgccgaaagcgc

SEQ ID NO: 374567 - DNA, 57 bp, Artificial
  Synthetic oligonucleotide
cggtacaggactgcaattgttcaatctatcccggccatctaacaggtcaccgcatgg

SEQ ID NO: 374568 - DNA, 59 bp, Artificial
  Synthetic oligonucleotide
cggtacagtcccaaatgtagcgacagtgagtgtgggttaaccatagcttactccagcga

SEQ ID NO: 374569 - DNA, 50 bp, Artificial
  Synthetic oligonucleotide
cggtacatactataacaacctgttgaatcttattcgcaaccaatatccgc

SEQ ID NO: 374570 - DNA, 55 bp, Artificial
  Synthetic oligonucleotide
cggtacattaatggtcagtttacagcattcgagctgattaggaacagaagggctg

SEQ ID NO: 374571 - DNA, 56 bp, Artificial
  Synthetic oligonucleotide
cggtacattgcttatatagtgcggggggaccaataaatagacttgctcacgaagtt

SEQ ID NO: 374572 - DNA, 53 bp, Artificial
  Synthetic oligonucleotide
cggtacatttccataccagttttatacaccctaccccgaaacatatagaagct

SEQ ID NO: 374573 - DNA, 55 bp, Artificial
  Synthetic oligonucleotide
cggtacatttgcacgccagtttgccaccccttaccccaagtaacttagaagcatg

SEQ ID NO: 374574 - DNA, 55 bp, Artificial
  Synthetic oligonucleotide
cggtaccatcctgccgtttcaggaaaacaacgacctctcgtcagccatacccgcg

SEQ ID NO: 374575 - DNA, 53 bp, Artificial
  Synthetic oligonucleotide
cggtacccaatatatagtgggtaccgaatgccagtattgtaataacaaaaagt

SEQ ID NO: 374576 - DNA, 55 bp, Artificial
  Synthetic oligonucleotide
cggtacccagatctaatcctatgtcaattggggaacggtaccctatatatagttg

SEQ ID NO: 374577 - DNA, 50 bp, Artificial
  Synthetic oligonucleotide
cggtacccctcatttaccacagagccctacagatgtccatgttaagtacg

SEQ ID NO: 374578 - DNA, 54 bp, Artificial
  Synthetic oligonucleotide
cggtacccgcataaggtgcccgtgaaaggggcctttgtggagttcacgtctcgc

SEQ ID NO: 374579 - DNA, 53 bp, Artificial
  Synthetic oligonucleotide
cggtacctgatattacttctcatggaggttttaatattactacatctactggt

SEQ ID NO: 374580 - DNA, 54 bp, Artificial
  Synthetic oligonucleotide
cggtacctttgtacgcctgttttatgctcccttcccctgcaacttagaagatta

SEQ ID NO: 374581 - DNA, 54 bp, Artificial
  Synthetic oligonucleotide
cggtacgaattaccttctctgtaacaacacctctaaagtgtcataccttacgta

SEQ ID NO: 374582 - DNA, 55 bp, Artificial
  Synthetic oligonucleotide
cggtacgacaaggtgattcctactttcagtgatcgtttacgattagtagtattac

SEQ ID NO: 374583 - DNA, 60 bp, Artificial
  Synthetic oligonucleotide
cggtacgagatcttctagataccgctgcagctctgtatcgggatgccttagagtctcagg

SEQ ID NO: 374584 - DNA, 55 bp, Artificial
  Synthetic oligonucleotide
cggtactaaggggattcctaattctaggcaaggaggacagaaggtatgggccagc

SEQ ID NO: 374585 - DNA, 60 bp, Artificial
  Synthetic oligonucleotide
cggtactaatgggtctcaatggtatgattggcttatgatagtctgtgatttgtaaagcaa

SEQ ID NO: 374586 - DNA, 54 bp, Artificial
  Synthetic oligonucleotide
cggtactactgtttccgaactcaagaacgattggtctttcatttgggagttcga

SEQ ID NO: 374587 - DNA, 60 bp, Artificial
  Synthetic oligonucleotide
cggtactcagctctagtcttatgtcaattggtgatcagtactcaatatatagtgagtacc

SEQ ID NO: 374588 - DNA, 55 bp, Artificial
  Synthetic oligonucleotide
cggtactcgacatacctatcagctgcgtgcaagatcagtttcaccaaaacttttc

SEQ ID NO: 374589 - DNA, 55 bp, Artificial
  Synthetic oligonucleotide
cggtactgcaggtactactcgtgggtgtttatcgccctgttcgttcaggcagtgt

SEQ ID NO: 374590 - DNA, 55 bp, Artificial
  Synthetic oligonucleotide
cggtactgggtctttcagggcaaacctgtgatgcccagtcaagacaccttcgaac

SEQ ID NO: 374591 - DNA, 53 bp, Artificial
  Synthetic oligonucleotide
cggtactggttccgttacatttaaaggtgttgacgttacagcaggtgtcgacg

SEQ ID NO: 374592 - DNA, 60 bp, Artificial
  Synthetic oligonucleotide
cggtactgttgaatgtactaggagcaggagatgagattccagacccgttgagtccaggag

SEQ ID NO: 374593 - DNA, 54 bp, Artificial
  Synthetic oligonucleotide
cggtacttcaagcgataagaaagtgtctaaaatcaaaaggcgacacaggggtaa

SEQ ID NO: 374594 - DNA, 60 bp, Artificial
  Synthetic oligonucleotide
cggtagaaaacgctattgctggccttatcagcaatgcacttacagctagtgatacacagt

SEQ ID NO: 374595 - DNA, 53 bp, Artificial
  Synthetic oligonucleotide
cggtagaaaagagcgagcctcccagttttcgagtagtcccggacctatctaaa

SEQ ID NO: 374596 - DNA, 54 bp, Artificial
  Synthetic oligonucleotide
cggtagaaaagagcgagcctcccgaaacgagtttgccaggacctatcaagtttg

SEQ ID NO: 374597 - DNA, 52 bp, Artificial
  Synthetic oligonucleotide
cggtagaaaagagcgagcctcccgatccgagggggccctggacccctcagct

SEQ ID NO: 374598 - DNA, 55 bp, Artificial
  Synthetic oligonucleotide
cggtagaacaatatcgggtgtaacatctcctgatactgtagagctactccggggc

SEQ ID NO: 374599 - DNA, 51 bp, Artificial
  Synthetic oligonucleotide
cggtagaaccggttgttcgacccgtaccacctccgcgtcctaaacgtgcca

SEQ ID NO: 374600 - DNA, 53 bp, Artificial
  Synthetic oligonucleotide
cggtagaagttagaagtgattgtttaggtactacactttcgtgtggttgtctg

SEQ ID NO: 374601 - DNA, 55 bp, Artificial
  Synthetic oligonucleotide
cggtagaatgggcgggcatatctacctcgtctaatctgaaatgtagcgcatgcgc

SEQ ID NO: 374602 - DNA, 55 bp, Artificial
  Synthetic oligonucleotide
cggtagacccaggcgatgacagaacagtcaaaataaccgggtttaactatgacaa

SEQ ID NO: 374603 - DNA, 55 bp, Artificial
  Synthetic oligonucleotide
cggtagacgcgcagaggaggacaggtggttcgaacacgtggttaggtaacacaat

SEQ ID NO: 374604 - DNA, 55 bp, Artificial
  Synthetic oligonucleotide
cggtagactagaaaacacttgtgtatccccaacgctttcctcaggttgtaattga

SEQ ID NO: 374605 - DNA, 55 bp, Artificial
  Synthetic oligonucleotide
cggtagagaggagtacttgttcccacctgtccaaggaaagctggtaaagtgccac

SEQ ID NO: 374606 - DNA, 51 bp, Artificial
  Synthetic oligonucleotide
cggtagagggacacataatgcacgggggagctgtgtcaattgagggacggg

SEQ ID NO: 374607 - DNA, 52 bp, Artificial
  Synthetic oligonucleotide
cggtagaggtagggtcagacgtaaccttaggaagggagtgaaacttctgacc

SEQ ID NO: 374608 - DNA, 55 bp, Artificial
  Synthetic oligonucleotide
cggtagataaagacacaaccatgatagacgttgagggttccactttgttgtctaa

SEQ ID NO: 374609 - DNA, 55 bp, Artificial
  Synthetic oligonucleotide
cggtagataaaggaatagatcaaccgtggggttctttatatttgagtgctgaaac

SEQ ID NO: 374610 - DNA, 55 bp, Artificial
  Synthetic oligonucleotide
cggtagatgcgagtttaatggtcgagccgaactacacgagtcagatgctaagcgt

SEQ ID NO: 374611 - DNA, 50 bp, Artificial
  Synthetic oligonucleotide
cggtagcaatcaaaactataggaagattgaccaccaatatacagtcaaaa

SEQ ID NO: 374612 - DNA, 55 bp, Artificial
  Synthetic oligonucleotide
cggtagcaccttcggaccaaccagtgcgatagaatttagtcacgtcaccttgagt

SEQ ID NO: 374613 - DNA, 52 bp, Artificial
  Synthetic oligonucleotide
cggtagcactgacggtttaccattgtaacatgctagaaaactatctttccct

SEQ ID NO: 374614 - DNA, 55 bp, Artificial
  Synthetic oligonucleotide
cggtagccatgagctctagcctgggtgcgatttgctctccccaaactctatgcct

SEQ ID NO: 374615 - DNA, 52 bp, Artificial
  Synthetic oligonucleotide
cggtagcgaacgcacgttctgcgcgctagccagacttataattcagtgtatc

SEQ ID NO: 374616 - DNA, 55 bp, Artificial
  Synthetic oligonucleotide
cggtagcgaaggatacctactctatcaacccttggaataatgagtgtgacgctgg

SEQ ID NO: 374617 - DNA, 55 bp, Artificial
  Synthetic oligonucleotide
cggtagcgtttagaacaccgctagcagcacgtacaactgctagttgtccaccata

SEQ ID NO: 374618 - DNA, 55 bp, Artificial
  Synthetic oligonucleotide
cggtagctattcgtctatatcttaaatgattacgtacgcgtcgtgaggcacgctc

SEQ ID NO: 374619 - DNA, 60 bp, Artificial
  Synthetic oligonucleotide
cggtagctgcagtggtgtgcggtccggatatgattcaggtgtcactaaatgctggagcga

SEQ ID NO: 374620 - DNA, 55 bp, Artificial
  Synthetic oligonucleotide
cggtagctgcgcagtgatgttgcttacctggggaccccttaaggatatttcctta

SEQ ID NO: 374621 - DNA, 55 bp, Artificial
  Synthetic oligonucleotide
cggtagctgggacgtgcagccgaccaccatggggagtagcaagagcaagcctaag

SEQ ID NO: 374622 - DNA, 57 bp, Artificial
  Synthetic oligonucleotide
cggtaggcagccgatgatagctaccagtagtggctaaactagaacggttgtcggttg

SEQ ID NO: 374623 - DNA, 55 bp, Artificial
  Synthetic oligonucleotide
cggtaggggaccgagcagcaccctcgaacaggtgtgcgatttgctgggttagggt

SEQ ID NO: 374624 - DNA, 52 bp, Artificial
  Synthetic oligonucleotide
cggtagtaggaaacaccacgtcgagctctgtcggggtaaggtcttcgaacca

SEQ ID NO: 374625 - DNA, 54 bp, Artificial
  Synthetic oligonucleotide
cggtagtccggaacggtccctcgaagagttaagtccacggctacaggctgttca

SEQ ID NO: 374626 - DNA, 55 bp, Artificial
  Synthetic oligonucleotide
cggtagtcgtgtttgacacgctaagacctttacaaagtgtcttaagacgtccata

SEQ ID NO: 374627 - DNA, 59 bp, Artificial
  Synthetic oligonucleotide
cggtagtctggaatatgatgatactcactgaccagcctccagcgaactggtccaaactc

SEQ ID NO: 374628 - DNA, 55 bp, Artificial
  Synthetic oligonucleotide
cggtagtcttcgaaattcagtgtatgtgggttcggtgtcgtttctaggaagtctg

SEQ ID NO: 374629 - DNA, 60 bp, Artificial
  Synthetic oligonucleotide
cggtagtctttgccataccacgcgcgcataagttagctacatatgggttaggatcaacaa

SEQ ID NO: 374630 - DNA, 55 bp, Artificial
  Synthetic oligonucleotide
cggtagtgcctcaccctttccgagtcggtgacacagtgtgggtccgcagacacca

SEQ ID NO: 374631 - DNA, 60 bp, Artificial
  Synthetic oligonucleotide
cggtagtgctttctatctagtctgcccaatagggtggacgggtgttatagagtgcacagc

SEQ ID NO: 374632 - DNA, 59 bp, Artificial
  Synthetic oligonucleotide
cggtagttacgcatggattattaagtggtccctatgcactaacttgacagacaagtgta

SEQ ID NO: 374633 - DNA, 57 bp, Artificial
  Synthetic oligonucleotide
cggtagttctgtatactgcccctctcccagcggttccatggtaacctctgattccca

SEQ ID NO: 374634 - DNA, 58 bp, Artificial
  Synthetic oligonucleotide
cggtagttcttactggtttttccgtctgtactaatgcatgtaaatgcatatttccatc

SEQ ID NO: 374635 - DNA, 53 bp, Artificial
  Synthetic oligonucleotide
cggtagttcttgcctattccgtatcaattacggacacgattaacagcttcccg

SEQ ID NO: 374636 - DNA, 55 bp, Artificial
  Synthetic oligonucleotide
cggtagttgataattacttagcactaaactatcgtatttagtaggcgacgacgca

SEQ ID NO: 374637 - DNA, 55 bp, Artificial
  Synthetic oligonucleotide
cggtagttgttgtcaacacctcgtattacccgcagctgttcatgccagtcgggcg

SEQ ID NO: 374638 - DNA, 55 bp, Artificial
  Synthetic oligonucleotide
cggtataaccgcattgctacttgttgtcgcattgcctatctatacagtggctagt

SEQ ID NO: 374639 - DNA, 54 bp, Artificial
  Synthetic oligonucleotide
cggtataagcggctaacgcaccaggttaggaactttaaaagcgaagtctatata

SEQ ID NO: 374640 - DNA, 55 bp, Artificial
  Synthetic oligonucleotide
cggtatacaaattgctcactaggagcccatccgatcccacagggagtaggatgag

SEQ ID NO: 374641 - DNA, 60 bp, Artificial
  Synthetic oligonucleotide
cggtatacctgatccagcaatattacgtggttgggacatcagtactatacctgagtcaat

SEQ ID NO: 374642 - DNA, 49 bp, Artificial
  Synthetic oligonucleotide
cggtatacgtaaattccccgcaaaggtactttccgttaaggacggtaca

SEQ ID NO: 374643 - DNA, 55 bp, Artificial
  Synthetic oligonucleotide
cggtatagaaggtttagaggcactggacctacacactagtgctggttacccatac

SEQ ID NO: 374644 - DNA, 57 bp, Artificial
  Synthetic oligonucleotide
cggtatagttcatgggaacttagcaactgtaacactaaagttcagtgttcatctggg

SEQ ID NO: 374645 - DNA, 55 bp, Artificial
  Synthetic oligonucleotide
cggtatatcaatccaccatgcaggaaatcttacgggaatggatagcaagccaccc

SEQ ID NO: 374646 - DNA, 50 bp, Artificial
  Synthetic oligonucleotide
cggtatattctcgtctaaagattgtgggtgccaatagttcctatcaccag

SEQ ID NO: 374647 - DNA, 55 bp, Artificial
  Synthetic oligonucleotide
cggtatattggacggtgccactgtagtgtatataggatcggctcctggtacacac

SEQ ID NO: 374648 - DNA, 60 bp, Artificial
  Synthetic oligonucleotide
cggtatcagcggacccactggcatcactactagagatgtgccatagcacacaaattggtg

SEQ ID NO: 374649 - DNA, 57 bp, Artificial
  Synthetic oligonucleotide
cggtatccagaagttaggtgtgtttgcagagacaattggaggggatccaatagaccc

SEQ ID NO: 374650 - DNA, 59 bp, Artificial
  Synthetic oligonucleotide
cggtatccatgccctgtaccaggcgaaactcgaagctattgcttcccgacagcaacgga

SEQ ID NO: 374651 - DNA, 55 bp, Artificial
  Synthetic oligonucleotide
cggtatccgttataatccctcattacctagtcttcctgtattatgcagacctttt

SEQ ID NO: 374652 - DNA, 57 bp, Artificial
  Synthetic oligonucleotide
cggtatccttgggattggtagttcttaacattctcctacacataattagcattacag

SEQ ID NO: 374653 - DNA, 55 bp, Artificial
  Synthetic oligonucleotide
cggtatctcttcaactgggcggtgaaaaccaagctcaaactcactccattgccgg

SEQ ID NO: 374654 - DNA, 55 bp, Artificial
  Synthetic oligonucleotide
cggtatctgctcaagcggggaagggtgagctgtgcgctgtgttcagagccgatcc

SEQ ID NO: 374655 - DNA, 55 bp, Artificial
  Synthetic oligonucleotide
cggtatgcctagacataacattcgatacagatacgaatgggaaactatgaaagat

SEQ ID NO: 374656 - DNA, 55 bp, Artificial
  Synthetic oligonucleotide
cggtatgcttgtcttggctactcttcgtttcttcccgtacttgggattgacgacg

SEQ ID NO: 374657 - DNA, 58 bp, Artificial
  Synthetic oligonucleotide
cggtatggaatatctgacgagataagaaacaatagtataccaaagagaatgttagttg

SEQ ID NO: 374658 - DNA, 60 bp, Artificial
  Synthetic oligonucleotide
cggtatggatgcttatcctaaagatccacgaaccaaattctgggacggctatcgagatca

SEQ ID NO: 374659 - DNA, 54 bp, Artificial
  Synthetic oligonucleotide
cggtatggccagatttcaagttgccctcacggaaggaggttgaagatttgtact

SEQ ID NO: 374660 - DNA, 55 bp, Artificial
  Synthetic oligonucleotide
cggtatgtccactagacacaacaatgaatggtatcggatgtacgccagcaagtac

SEQ ID NO: 374661 - DNA, 60 bp, Artificial
  Synthetic oligonucleotide
cggtatgtgctcagggtcaccatgcactactgtcctaaactcaattgtgaaccagctggc

SEQ ID NO: 374662 - DNA, 55 bp, Artificial
  Synthetic oligonucleotide
cggtatgttgtaggcgcgctgtagaggccttgaagcgtttagtcctacacgtcgg

SEQ ID NO: 374663 - DNA, 51 bp, Artificial
  Synthetic oligonucleotide
cggtattaagtgggggaaaattagatgcatgggaaaaaattcggttacggc

SEQ ID NO: 374664 - DNA, 60 bp, Artificial
  Synthetic oligonucleotide
cggtattatgcaaaccacctgtccatgtggagcacagattactggacatgtcaaaaacgg

SEQ ID NO: 374665 - DNA, 55 bp, Artificial
  Synthetic oligonucleotide
cggtattcacgtagataaggacaaagcaactctgcaaattgatgttgtagatgcc

SEQ ID NO: 374666 - DNA, 57 bp, Artificial
  Synthetic oligonucleotide
cggtattgacaaatgccaatatacgttgtttaacaacattacgatagtcaacagtta

SEQ ID NO: 374667 - DNA, 57 bp, Artificial
  Synthetic oligonucleotide
cggtattgagatacgctaatgaaattgaagggtatataaacaaagtatatagtataa

SEQ ID NO: 374668 - DNA, 54 bp, Artificial
  Synthetic oligonucleotide
cggtattgattctattaagacgggtattgataacttaaatggtctcttgggtgg

SEQ ID NO: 374669 - DNA, 60 bp, Artificial
  Synthetic oligonucleotide
cggtattgcgatagtggctttgctaacgcaatacgtataaggcgataatacatgagccta

SEQ ID NO: 374670 - DNA, 58 bp, Artificial
  Synthetic oligonucleotide
cggtattggagaattaacaatctggtctacaatacctctggtactcaaatcaatggac

SEQ ID NO: 374671 - DNA, 50 bp, Artificial
  Synthetic oligonucleotide
cggtattgtcgattacaaacgaagaactctcgttaggaatagtcacagac

SEQ ID NO: 374672 - DNA, 53 bp, Artificial
  Synthetic oligonucleotide
cggtattttggtcgtagagttggcacccgtgtatacggtatgccctttggcgg

SEQ ID NO: 374673 - DNA, 55 bp, Artificial
  Synthetic oligonucleotide
cggtcaaacagcaagaagaatattccttacgacattgatgtagtgtatcagaatc

SEQ ID NO: 374674 - DNA, 53 bp, Artificial
  Synthetic oligonucleotide
cggtcaaaggttaattatccctgtacccgtgtctgaatatcctaagaagaagg

SEQ ID NO: 374675 - DNA, 55 bp, Artificial
  Synthetic oligonucleotide
cggtcaaatacaggtatcgtaccgataagactttgatgtgcgaatttggaatcgg

SEQ ID NO: 374676 - DNA, 55 bp, Artificial
  Synthetic oligonucleotide
cggtcaaccctacttaaatgcgcggcggcaattggttggagtgcacgccgcaacc

SEQ ID NO: 374677 - DNA, 51 bp, Artificial
  Synthetic oligonucleotide
cggtcaagcacttctgtttccccggtccttacggatcgttacccgcccagg

SEQ ID NO: 374678 - DNA, 60 bp, Artificial
  Synthetic oligonucleotide
cggtcaatggctcccatggatgaccgctgcactagttgcaattcagtttaatataaagat

SEQ ID NO: 374679 - DNA, 51 bp, Artificial
  Synthetic oligonucleotide
cggtcaattaatccgagcggtaaatgcaatccctgaagtgttcactggtgg

SEQ ID NO: 374680 - DNA, 54 bp, Artificial
  Synthetic oligonucleotide
cggtcacaacgaaggtggtacgaaacgttgttgagtatcaaatccgtacaggtg

SEQ ID NO: 374681 - DNA, 52 bp, Artificial
  Synthetic oligonucleotide
cggtcacaacggagaagtaggtcccgagaacggggaaccggagccatttcta

SEQ ID NO: 374682 - DNA, 55 bp, Artificial
  Synthetic oligonucleotide
cggtcacaccacaagtgcccgtacctgccttaagtctaaggcgtatcaaacggga

SEQ ID NO: 374683 - DNA, 55 bp, Artificial
  Synthetic oligonucleotide
cggtcacgaccgaaaacggtgtatataaagctgaacacagcagttctctatacta

SEQ ID NO: 374684 - DNA, 59 bp, Artificial
  Synthetic oligonucleotide
cggtcactacggcattgatattattattctcactcaaaatctaagaaagattcatgctg

SEQ ID NO: 374685 - DNA, 55 bp, Artificial
  Synthetic oligonucleotide
cggtcactactacaagtcaagtttcatcttccactgatgacgctcgagcttccaa

SEQ ID NO: 374686 - DNA, 55 bp, Artificial
  Synthetic oligonucleotide
cggtcactggcagaaagttctccacatgaggcaatgcctggcaagtccagccagc

SEQ ID NO: 374687 - DNA, 60 bp, Artificial
  Synthetic oligonucleotide
cggtcagaagacgatgctcaatgtcaattcggcgctcaatcgaatcaacgtgcgtcgact

SEQ ID NO: 374688 - DNA, 55 bp, Artificial
  Synthetic oligonucleotide
cggtcagacctgcatccacgtcgcagtgaagaaccacacggggctgcttgcgata

SEQ ID NO: 374689 - DNA, 55 bp, Artificial
  Synthetic oligonucleotide
cggtcagatgcatgaagacgttctttgggtggaaggaacctaccatcattaagcc

SEQ ID NO: 374690 - DNA, 55 bp, Artificial
  Synthetic oligonucleotide
cggtcagatgggactattattctgtgtccggatgatgtccggcgtgtggctaggc

SEQ ID NO: 374691 - DNA, 60 bp, Artificial
  Synthetic oligonucleotide
cggtcagcagtgaggctgacgcggaggatgtcgtgtgctgctcaatgtcttatacctgga

SEQ ID NO: 374692 - DNA, 55 bp, Artificial
  Synthetic oligonucleotide
cggtcagcgttggcggagtagatatgcgagcgggacgtattatagcgtgggacgg

SEQ ID NO: 374693 - DNA, 55 bp, Artificial
  Synthetic oligonucleotide
cggtcagctagtatcacaattgttgcagtacatgtatgtgcctcccggagctcca

SEQ ID NO: 374694 - DNA, 55 bp, Artificial
  Synthetic oligonucleotide
cggtcagtcgtacactatcacgttggaagttacccaggatgcaacgggcggtaag

SEQ ID NO: 374695 - DNA, 58 bp, Artificial
  Synthetic oligonucleotide
cggtcagtttctcgaaacccagtttgatcttcgtggaggccagcgagtattatccagc

SEQ ID NO: 374696 - DNA, 54 bp, Artificial
  Synthetic oligonucleotide
cggtcatagcgtgatacgattattcccgagttttaacgattaagcccgaaggcg

SEQ ID NO: 374697 - DNA, 55 bp, Artificial
  Synthetic oligonucleotide
cggtcatataagagcggcgtgacagaagctttagagtaatgtaaccgttactatg

SEQ ID NO: 374698 - DNA, 54 bp, Artificial
  Synthetic oligonucleotide
cggtcatcacttgcttcgagacccatgcttgtctctgcggtacattcattttgc

SEQ ID NO: 374699 - DNA, 59 bp, Artificial
  Synthetic oligonucleotide
cggtcatgagaaacattgaatagtatttgtgagtcaactgccacgcaatgctttgacag

SEQ ID NO: 374700 - DNA, 55 bp, Artificial
  Synthetic oligonucleotide
cggtcatgatacagtgggcatatgacaatggctaccaagatgagtgcgaggtggc

SEQ ID NO: 374701 - DNA, 55 bp, Artificial
  Synthetic oligonucleotide
cggtcatgttctacctagtccgtgatagaagaccctttggtactcctcaggattt

SEQ ID NO: 374702 - DNA, 58 bp, Artificial
  Synthetic oligonucleotide
cggtcattagagtttctcttaagcccggggtgccttacaatgcaaatgacccatgtgc

SEQ ID NO: 374703 - DNA, 59 bp, Artificial
  Synthetic oligonucleotide
cggtcattataacctacctgaactattagccactaaagatgaacaactagctgatatcc

SEQ ID NO: 374704 - DNA, 54 bp, Artificial
  Synthetic oligonucleotide
cggtcatttacagccgcaccgattgatacgcttctagcagggaaggtttgtgtg

SEQ ID NO: 374705 - DNA, 59 bp, Artificial
  Synthetic oligonucleotide
cggtccaaatgcgcccaataggacacgtgtgaaggcaggaaaatacagtgccaagcaat

SEQ ID NO: 374706 - DNA, 55 bp, Artificial
  Synthetic oligonucleotide
cggtccaacaggtcaacccctagattttcgtattggagcaaggaatcagtacgat

SEQ ID NO: 374707 - DNA, 55 bp, Artificial
  Synthetic oligonucleotide
cggtccaagtacaatgcgtcacgtctcatctctgctctcccgggaataactcaat

SEQ ID NO: 374708 - DNA, 54 bp, Artificial
  Synthetic oligonucleotide
cggtccaattggatctactaaaccccctctggttcctgtgtttactctggtgcc

SEQ ID NO: 374709 - DNA, 54 bp, Artificial
  Synthetic oligonucleotide
cggtccaccgaggtctatgtccgatcaatctttggcccgggtggaaccccctca

SEQ ID NO: 374710 - DNA, 55 bp, Artificial
  Synthetic oligonucleotide
cggtccaccgtaatcttaccgaggtcggatgcactacttcaacgccgaggtatgg

SEQ ID NO: 374711 - DNA, 55 bp, Artificial
  Synthetic oligonucleotide
cggtccactctttaatcgtggccgagatgtagagaatccgaatgcccgaacgaca

SEQ ID NO: 374712 - DNA, 60 bp, Artificial
  Synthetic oligonucleotide
cggtccactggctagcccttgcatggttcttgcatggtcctatagcggtgatgtaacgga

SEQ ID NO: 374713 - DNA, 55 bp, Artificial
  Synthetic oligonucleotide
cggtccagtgtgtcgtggtctcagtttagcaaccctgcattcgaggttgcccctg

SEQ ID NO: 374714 - DNA, 59 bp, Artificial
  Synthetic oligonucleotide
cggtccatgcaccgacttctttgtacttccaggcaatgaaaggagtacgcacagcgtat

SEQ ID NO: 374715 - DNA, 55 bp, Artificial
  Synthetic oligonucleotide
cggtccatgtctccattgctacaccaccattagatttacaggctgttagttgtcg

SEQ ID NO: 374716 - DNA, 58 bp, Artificial
  Synthetic oligonucleotide
cggtccattagtgaacggattcttagcactcttctgggtcgacctgcggaacctgtgc

SEQ ID NO: 374717 - DNA, 55 bp, Artificial
  Synthetic oligonucleotide
cggtccccagagttcaatgactctacgttccttatcgtaccacatgtacgaaaga

SEQ ID NO: 374718 - DNA, 55 bp, Artificial
  Synthetic oligonucleotide
cggtccccgaggggagagagcttagtctctagccccagcattccctgaactgtca

SEQ ID NO: 374719 - DNA, 55 bp, Artificial
  Synthetic oligonucleotide
cggtcccgatatcaaagggccgcgtatgaatcgcactataagtacagccaagggt

SEQ ID NO: 374720 - DNA, 55 bp, Artificial
  Synthetic oligonucleotide
cggtcccggacatgaagagccccaactagtgcaaagttatggatggaacattgtc

SEQ ID NO: 374721 - DNA, 60 bp, Artificial
  Synthetic oligonucleotide
cggtcccggagttggctccaacgctcacaagatgttatgcgtatgtgtctcccacttggc

SEQ ID NO: 374722 - DNA, 56 bp, Artificial
  Synthetic oligonucleotide
cggtccctatcactgtatcaattagcccaatgtttgctgaattttctggagcacgt

SEQ ID NO: 374723 - DNA, 55 bp, Artificial
  Synthetic oligonucleotide
cggtccctgttttgcactaactcgtcatctccccagactattgctgggccggaca

SEQ ID NO: 374724 - DNA, 51 bp, Artificial
  Synthetic oligonucleotide
cggtcccttcgaatttggggattattgccctagtgggtcccacaaacgccg

SEQ ID NO: 374725 - DNA, 55 bp, Artificial
  Synthetic oligonucleotide
cggtccgatgttttcagagttaactagacagttgcttgagagaattgatgggagt

SEQ ID NO: 374726 - DNA, 55 bp, Artificial
  Synthetic oligonucleotide
cggtccgctctccgcggacttccacctgttgaccgtacatactgttttgatggtt

SEQ ID NO: 374727 - DNA, 57 bp, Artificial
  Synthetic oligonucleotide
cggtccgtcgcatcttacgacacgggccgctgtctttgactcagagcgaatgcctcg

SEQ ID NO: 374728 - DNA, 53 bp, Artificial
  Synthetic oligonucleotide
cggtccgtgtacttctagcacaagatgctagtttagggtacgggtccccccac

SEQ ID NO: 374729 - DNA, 55 bp, Artificial
  Synthetic oligonucleotide
cggtccgtgtacttctagcacaatgtgctggtttcagggtacgggtgcccctcgc

SEQ ID NO: 374730 - DNA, 54 bp, Artificial
  Synthetic oligonucleotide
cggtcctaaaggatcgtacctgagttcactgctctcgatgcctaactgtggtat

SEQ ID NO: 374731 - DNA, 55 bp, Artificial
  Synthetic oligonucleotide
cggtcctaggacctgcagcaacgtctggcatggcaggtttcccatcaacgctacc

SEQ ID NO: 374732 - DNA, 57 bp, Artificial
  Synthetic oligonucleotide
cggtcctgagggcactggtccctgtgccgcgttacaagatattcggttcttgctttc

SEQ ID NO: 374733 - DNA, 55 bp, Artificial
  Synthetic oligonucleotide
cggtcctggaagaaaagatatcgagctggtcttgtagactcgcttggacgtgcgg

SEQ ID NO: 374734 - DNA, 56 bp, Artificial
  Synthetic oligonucleotide
cggtccttatcaacctactacatttacaccacctattgattattggatacttatta

SEQ ID NO: 374735 - DNA, 55 bp, Artificial
  Synthetic oligonucleotide
cggtccttcccatggattttcctcacaaactccttctgcacttttggtggttcca

SEQ ID NO: 374736 - DNA, 55 bp, Artificial
  Synthetic oligonucleotide
cggtcgacacggaacatatacgcaacattatgttctataacacaaaatggccccg

SEQ ID NO: 374737 - DNA, 55 bp, Artificial
  Synthetic oligonucleotide
cggtcgagcctcatctctcaaaggggtcgctcactagtgtacgtccacactccct

SEQ ID NO: 374738 - DNA, 55 bp, Artificial
  Synthetic oligonucleotide
cggtcgaggagccctctttcacgataactaggacacgcgtgtcaaagctgtatgg

SEQ ID NO: 374739 - DNA, 57 bp, Artificial
  Synthetic oligonucleotide
cggtcgatatttcaatttactatggctgccaatatttcagatgaaaacttcggaaac

SEQ ID NO: 374740 - DNA, 59 bp, Artificial
  Synthetic oligonucleotide
cggtcgccccatacttgacaaccaagggcgtgtggtcgctattgtgcttggcggagtga

SEQ ID NO: 374741 - DNA, 59 bp, Artificial
  Synthetic oligonucleotide
cggtcgccgtaatgtcagtgtcgtgaatcatggttacgttcggcgcctcatatccctct

SEQ ID NO: 374742 - DNA, 55 bp, Artificial
  Synthetic oligonucleotide
cggtcgctcagacttccgacgagattgatgcatacaacaaagcgtttgatatctg

SEQ ID NO: 374743 - DNA, 55 bp, Artificial
  Synthetic oligonucleotide
cggtcgctgaaacgtcgtcaattcgctccaggtccggcaatccacgcgccttacc

SEQ ID NO: 374744 - DNA, 60 bp, Artificial
  Synthetic oligonucleotide
cggtcgctggggtgagcaacttcgagctgatcccgaatcctgagctagccaagaacctag

SEQ ID NO: 374745 - DNA, 56 bp, Artificial
  Synthetic oligonucleotide
cggtcggtaaagttggaaacagctcacgctgcgcaaagacctttcacccaagtcaa

SEQ ID NO: 374746 - DNA, 60 bp, Artificial
  Synthetic oligonucleotide
cggtcgtaccgaatcgggtgcatatataaggagagcagtgcggatttggtgcatgaggca

SEQ ID NO: 374747 - DNA, 60 bp, Artificial
  Synthetic oligonucleotide
cggtcgtccgctcaacagattgacaaaatggagaatcctaatcatatatggagcgataaa

SEQ ID NO: 374748 - DNA, 55 bp, Artificial
  Synthetic oligonucleotide
cggtcgtgagcatttaacttactgtcatccatccattgattatacgcgtcgggag

SEQ ID NO: 374749 - DNA, 55 bp, Artificial
  Synthetic oligonucleotide
cggtcgtgcgctcaacatagacaaacaacttgacgcaatgctaatgggctgatag

SEQ ID NO: 374750 - DNA, 56 bp, Artificial
  Synthetic oligonucleotide
cggtcgtgggaagagtggaccaacatcgacatccagcccgcacgttcttggggaac

SEQ ID NO: 374751 - DNA, 55 bp, Artificial
  Synthetic oligonucleotide
cggtcgtgggcacttataccaatcattctaccgccccggccaactgtacggccac

SEQ ID NO: 374752 - DNA, 55 bp, Artificial
  Synthetic oligonucleotide
cggtcgtgtgaacatcaatcaaaagaccatagtcgcccctgataaggaagtcctg

SEQ ID NO: 374753 - DNA, 60 bp, Artificial
  Synthetic oligonucleotide
cggtcgtgttgtccaatatacatatgagattgctcggttacaagcgaatatgggacagtt

SEQ ID NO: 374754 - DNA, 59 bp, Artificial
  Synthetic oligonucleotide
cggtctaagtattggtcaattcatgcctatgaccatggtggggttatactgttcatcct

SEQ ID NO: 374755 - DNA, 51 bp, Artificial
  Synthetic oligonucleotide
cggtctaccgaggtctatgttcggtcaatcttcggcccgggtggtaccccc

SEQ ID NO: 374756 - DNA, 54 bp, Artificial
  Synthetic oligonucleotide
cggtctactccgtgagtcctttggacctcccagccataattgaaaggttacacg

SEQ ID NO: 374757 - DNA, 57 bp, Artificial
  Synthetic oligonucleotide
cggtctactgaccattacgcctatcctcctacgcgacaccacatacaaaggggagat

SEQ ID NO: 374758 - DNA, 52 bp, Artificial
  Synthetic oligonucleotide
cggtctagtcgaccccaattatcgcgttggcaccaatgacctccctaaccgc

SEQ ID NO: 374759 - DNA, 55 bp, Artificial
  Synthetic oligonucleotide
cggtctagtcggccttcagcatgcctcttaccgccgggaaacggaagaggtcagg

SEQ ID NO: 374760 - DNA, 54 bp, Artificial
  Synthetic oligonucleotide
cggtctagtcgttcactaccggataccgaattgctccggtacccggtcgtcagc

SEQ ID NO: 374761 - DNA, 55 bp, Artificial
  Synthetic oligonucleotide
cggtctatgcctcagaattgacagttatgaagacagatatgcagcagatggccct

SEQ ID NO: 374762 - DNA, 51 bp, Artificial
  Synthetic oligonucleotide
cggtctattacacgcggtaccgccggggcgacaactgcgtgtgggcctact

SEQ ID NO: 374763 - DNA, 60 bp, Artificial
  Synthetic oligonucleotide
cggtctcaaagtatacacaattctacctacaagcatgctaatcacactgactgaacaaac

SEQ ID NO: 374764 - DNA, 60 bp, Artificial
  Synthetic oligonucleotide
cggtctcagacatacagttttggaggaccagagccccataccagtcacaattagagagca

SEQ ID NO: 374765 - DNA, 59 bp, Artificial
  Synthetic oligonucleotide
cggtctcagatctttaacagtccctgtaacgcaggggctgcccacaatgctcacacccg

SEQ ID NO: 374766 - DNA, 56 bp, Artificial
  Synthetic oligonucleotide
cggtctcagtttatactaagaccgcatatgggaggttgctcgcggacgcccgtacc

SEQ ID NO: 374767 - DNA, 56 bp, Artificial
  Synthetic oligonucleotide
cggtctccccgtttgtgccttatcatccaacggaccgtgtgcacttcgcttcacct

SEQ ID NO: 374768 - DNA, 51 bp, Artificial
  Synthetic oligonucleotide
cggtctccgaacatagcgaaacggagattcaggcccggtttcggttttgtg

SEQ ID NO: 374769 - DNA, 55 bp, Artificial
  Synthetic oligonucleotide
cggtctccggagtatttcgcgccaaaatgtagagctcggcgaccgttactggtcc

SEQ ID NO: 374770 - DNA, 54 bp, Artificial
  Synthetic oligonucleotide
cggtctcgaaacaattcgaggttccaaccaaatactagacaaaatcgcttccga

SEQ ID NO: 374771 - DNA, 55 bp, Artificial
  Synthetic oligonucleotide
cggtctcgaaggacgataaagtgcaagtcacgcaggtgacagcgttcccctccgc

SEQ ID NO: 374772 - DNA, 60 bp, Artificial
  Synthetic oligonucleotide
cggtctctcacaagacgtgctaggaccatccctgcagaggtcctctatctggcccaacga

SEQ ID NO: 374773 - DNA, 60 bp, Artificial
  Synthetic oligonucleotide
cggtctgatccgaaccatcgcattgaagttgcatctggcctaggcgttatttttggtata

SEQ ID NO: 374774 - DNA, 53 bp, Artificial
  Synthetic oligonucleotide
cggtctgcctccgacttgaggcggaaagggttccctagcaccgaagggcggcc

SEQ ID NO: 374775 - DNA, 60 bp, Artificial
  Synthetic oligonucleotide
cggtctgctctcattctgaggggatcagtggcccacaagtcctgcctgcctgcttgtgtg

SEQ ID NO: 374776 - DNA, 60 bp, Artificial
  Synthetic oligonucleotide
cggtctgctgaagttgttagtaggatgcttgtacaccctaggggagaagaccatgatgcc

SEQ ID NO: 374777 - DNA, 55 bp, Artificial
  Synthetic oligonucleotide
cggtctggaccattttgattcatacactggtgaggatgtggccattgcagacgag

SEQ ID NO: 374778 - DNA, 55 bp, Artificial
  Synthetic oligonucleotide
cggtctggcctacgcgaaattgccggcaaggcgacattggagctgaacaagacct

SEQ ID NO: 374779 - DNA, 55 bp, Artificial
  Synthetic oligonucleotide
cggtctggctaaccgtaacggcgtatcggcttggctttccaatgattaggctccg

SEQ ID NO: 374780 - DNA, 55 bp, Artificial
  Synthetic oligonucleotide
cggtctgtacacaggcgtggaggcattcgggtacgaagatgtgattggcgcacgg

SEQ ID NO: 374781 - DNA, 59 bp, Artificial
  Synthetic oligonucleotide
cggtctgtgcttggctattcggtgttgcaccttgaccggaatagagtggctcctcgagg

SEQ ID NO: 374782 - DNA, 55 bp, Artificial
  Synthetic oligonucleotide
cggtctgtgtctgttttgttacgtcgctgagactgaccgggagggccaccgatgc

SEQ ID NO: 374783 - DNA, 55 bp, Artificial
  Synthetic oligonucleotide
cggtctgttgtcgtgttgaatgatcttgaaatagaggggatttggtacctcccag

SEQ ID NO: 374784 - DNA, 53 bp, Artificial
  Synthetic oligonucleotide
cggtcttaaccaaggcaaatgggcccctgtcctcgcgtacctcctgggtccaa

SEQ ID NO: 374785 - DNA, 60 bp, Artificial
  Synthetic oligonucleotide
cggtcttagctactctcagatagtcgacgctctaaatgccaagcgtaattacagtaatga

SEQ ID NO: 374786 - DNA, 55 bp, Artificial
  Synthetic oligonucleotide
cggtcttatgaccgcaatttgggtctggttgggatgatcctctcccctggcaagc

SEQ ID NO: 374787 - DNA, 55 bp, Artificial
  Synthetic oligonucleotide
cggtcttcaagagtctggtaaaggttctcattagaccaaacctcattacggtgat

SEQ ID NO: 374788 - DNA, 57 bp, Artificial
  Synthetic oligonucleotide
cggtcttcagtttattatcgatgccgagtgacgacggctagggggaaattcagctat

SEQ ID NO: 374789 - DNA, 60 bp, Artificial
  Synthetic oligonucleotide
cggtcttccaccaatgcagaatactagaaacgtggtatcagtcgcattatcagctagaga

SEQ ID NO: 374790 - DNA, 54 bp, Artificial
  Synthetic oligonucleotide
cggtcttgacttcgagaaagccccaatgcactaccagtggcttccgaaccgtca

SEQ ID NO: 374791 - DNA, 59 bp, Artificial
  Synthetic oligonucleotide
cggtcttgcaaccgccaggtgtgcatgactgtaagtattgactcacaccgcatgcggtg

SEQ ID NO: 374792 - DNA, 58 bp, Artificial
  Synthetic oligonucleotide
cggtcttgtttggtagttatactccggatattttgcattccgcattgcccaatgaggc

SEQ ID NO: 374793 - DNA, 57 bp, Artificial
  Synthetic oligonucleotide
cggtcttgtttttaagcgagtgatgaaagacacaacgataagtattgaagcaaaggc

SEQ ID NO: 374794 - DNA, 55 bp, Artificial
  Synthetic oligonucleotide
cggtctttgttggctgggatagtgcagcaacaggctaatctgttgagagccgtag

SEQ ID NO: 374795 - DNA, 54 bp, Artificial
  Synthetic oligonucleotide
cggtgaaaacccctgtaaaattggattacagacatcctcaattgaaggggcctg

SEQ ID NO: 374796 - DNA, 55 bp, Artificial
  Synthetic oligonucleotide
cggtgaaaacctccgaccgagagtggacaacagctgaggcgttgcgtgtcgcaag

SEQ ID NO: 374797 - DNA, 50 bp, Artificial
  Synthetic oligonucleotide
cggtgaaacgccacatgctacaactgattactcgtcaacttcaaatttat

SEQ ID NO: 374798 - DNA, 57 bp, Artificial
  Synthetic oligonucleotide
cggtgaacacttaattacacgccaggccccgactgacaccattccgacggatgacga

SEQ ID NO: 374799 - DNA, 55 bp, Artificial
  Synthetic oligonucleotide
cggtgaacatgagcatccatcagtgtatatggttccaaacactactatataccag

SEQ ID NO: 374800 - DNA, 55 bp, Artificial
  Synthetic oligonucleotide
cggtgaactaggcaagtggccgtcattgctagacgtcgcgacagcttgttatttc

SEQ ID NO: 374801 - DNA, 56 bp, Artificial
  Synthetic oligonucleotide
cggtgaacttatagtgaaatcccagcacggtaagttcgttgtcaagaacaccacaa

SEQ ID NO: 374802 - DNA, 55 bp, Artificial
  Synthetic oligonucleotide
cggtgaacttctcatatacgatctcaagtttcacaatagaaggaaacccggccac

SEQ ID NO: 374803 - DNA, 55 bp, Artificial
  Synthetic oligonucleotide
cggtgaagggcaatgcttgttgtaagctcgggaggtcttgtcaacctccgtcgta

SEQ ID NO: 374804 - DNA, 60 bp, Artificial
  Synthetic oligonucleotide
cggtgaagtatatccgagcaaagatccctctcatgctgacgtacagctgctatacgagag

SEQ ID NO: 374805 - DNA, 55 bp, Artificial
  Synthetic oligonucleotide
cggtgaagtatgagatgagacttccgtgtggccataacactggacgaggtgctgc

SEQ ID NO: 374806 - DNA, 55 bp, Artificial
  Synthetic oligonucleotide
cggtgaagtctcccgcacgagtcctcttcctaggtccggtatcgacctccatccg

SEQ ID NO: 374807 - DNA, 58 bp, Artificial
  Synthetic oligonucleotide
cggtgaatattctgcaggccgagtgattccattcagtagctcgttgaaagtaaaaact

SEQ ID NO: 374808 - DNA, 57 bp, Artificial
  Synthetic oligonucleotide
cggtgaatcaagagtcattaaatttggcagacgaacggtaagatcaactaagaagaa

SEQ ID NO: 374809 - DNA, 60 bp, Artificial
  Synthetic oligonucleotide
cggtgaatcaattttatatgctatacaaggcaaatggtagtacatctgacaccgccgggc

SEQ ID NO: 374810 - DNA, 55 bp, Artificial
  Synthetic oligonucleotide
cggtgaatcagttaaacaggcggtactgctaaacgtgttaggtgcaggagatgaa

SEQ ID NO: 374811 - DNA, 50 bp, Artificial
  Synthetic oligonucleotide
cggtgaatcggcagcaaaacgggtagatggggtggcacacaggcttcagc

SEQ ID NO: 374812 - DNA, 53 bp, Artificial
  Synthetic oligonucleotide
cggtgaatcggtgacctatttatatgtaggagagttacaaaaaccctcagggg

SEQ ID NO: 374813 - DNA, 60 bp, Artificial
  Synthetic oligonucleotide
cggtgaatcttcctgagcacatcagtagcaagctggtctacgagcagcgcagtgagcgcg

SEQ ID NO: 374814 - DNA, 55 bp, Artificial
  Synthetic oligonucleotide
cggtgaatgagagaacgataattgatatatttacgatttgcaggtaccgttcacc

SEQ ID NO: 374815 - DNA, 58 bp, Artificial
  Synthetic oligonucleotide
cggtgaattgcttggacaggattttcaccgttggcgctctgaacggaatgtccacgga

SEQ ID NO: 374816 - DNA, 55 bp, Artificial
  Synthetic oligonucleotide
cggtgacaatatcgcggatagcatgaacgacatcgctagagcattaggagggtat

SEQ ID NO: 374817 - DNA, 55 bp, Artificial
  Synthetic oligonucleotide
cggtgacacaagtggaagaactcgtgcatggcggaattgatccgatcctatgtgg

SEQ ID NO: 374818 - DNA, 55 bp, Artificial
  Synthetic oligonucleotide
cggtgacacttaaacatagatcatcctacgaggttcctctccctactggaatacg

SEQ ID NO: 374819 - DNA, 55 bp, Artificial
  Synthetic oligonucleotide
cggtgacattaacacctcctgtggcaacaaattaatcatgtgtggtatgatgcac

SEQ ID NO: 374820 - DNA, 58 bp, Artificial
  Synthetic oligonucleotide
cggtgacccgtctcgcgtggttaggtgactcaaaacatcgttctgacgttgttgcata

SEQ ID NO: 374821 - DNA, 55 bp, Artificial
  Synthetic oligonucleotide
cggtgacctacgcgccatcgttcgtagtgctggaatcgcaactctgtgggttgga

SEQ ID NO: 374822 - DNA, 57 bp, Artificial
  Synthetic oligonucleotide
cggtgacgatagtgcggtgcagaaagactttactttgcgaaggaacctcagtggtcc

SEQ ID NO: 374823 - DNA, 55 bp, Artificial
  Synthetic oligonucleotide
cggtgactaaaagtttgcacctggatattttggctgtacatccaaccgctcccgg

SEQ ID NO: 374824 - DNA, 60 bp, Artificial
  Synthetic oligonucleotide
cggtgactcaggttgctgagtcttctccaccaccagtaatcaccgcacctgtagggcgaa

SEQ ID NO: 374825 - DNA, 54 bp, Artificial
  Synthetic oligonucleotide
cggtgacttgaacaccaagctcacaactagacttattgaggattactctgaatc

SEQ ID NO: 374826 - DNA, 54 bp, Artificial
  Synthetic oligonucleotide
cggtgagaaatacggcttcaaacacgcttatccgctagtttttataaaagatta

SEQ ID NO: 374827 - DNA, 54 bp, Artificial
  Synthetic oligonucleotide
cggtgagagcggatacccgacactggtacgatgggaggacccaagtggtagcac

SEQ ID NO: 374828 - DNA, 55 bp, Artificial
  Synthetic oligonucleotide
cggtgagagtatgggtaagactggcaaatgtgacaggatgggttaatggaacgcc

SEQ ID NO: 374829 - DNA, 55 bp, Artificial
  Synthetic oligonucleotide
cggtgagatccaataacgactgctcgtcgaagggacagtacgctatcatgaaacg

SEQ ID NO: 374830 - DNA, 55 bp, Artificial
  Synthetic oligonucleotide
cggtgaggaaactgttccgtctaataccactgaagtacacagtgagagtgtctct

SEQ ID NO: 374831 - DNA, 55 bp, Artificial
  Synthetic oligonucleotide
cggtgaggatcattggtggtatgatgttactcgcagatcgaagatccttgtggac

SEQ ID NO: 374832 - DNA, 55 bp, Artificial
  Synthetic oligonucleotide
cggtgaggggcccactttcgacgcaaacactgaatgcaatatcgccttcacacac

SEQ ID NO: 374833 - DNA, 60 bp, Artificial
  Synthetic oligonucleotide
cggtgagtcgtaccgtgcgtatcgtgaagatatgcttaaacgcgacactctcgaactatc

SEQ ID NO: 374834 - DNA, 60 bp, Artificial
  Synthetic oligonucleotide
cggtgagtgcccaactccagagcgtgaaggtgactactccacatctgcaatcaatactac

SEQ ID NO: 374835 - DNA, 59 bp, Artificial
  Synthetic oligonucleotide
cggtgagttcgacgccgttagtttctgtggactgaagttgagacagagctgtgttataa

SEQ ID NO: 374836 - DNA, 55 bp, Artificial
  Synthetic oligonucleotide
cggtgataaacgtgcttaaatgccgaccggacagaattgtgccgtctaaagtgtg

SEQ ID NO: 374837 - DNA, 53 bp, Artificial
  Synthetic oligonucleotide
cggtgataagttagacggcactggccctagtcagattactgctagtcccactg

SEQ ID NO: 374838 - DNA, 55 bp, Artificial
  Synthetic oligonucleotide
cggtgataatatacacaatctccctcacggaggaaattatcaggacgggacaaag

SEQ ID NO: 374839 - DNA, 55 bp, Artificial
  Synthetic oligonucleotide
cggtgatattgaatgttttaggaggaggcgacacgatagctgacccgctgagccc

SEQ ID NO: 374840 - DNA, 55 bp, Artificial
  Synthetic oligonucleotide
cggtgatcccttccagactaacacgaatctcgtgcaccccgcttcgttcatctgc

SEQ ID NO: 374841 - DNA, 55 bp, Artificial
  Synthetic oligonucleotide
cggtgatccgaggatgactcaattagccatccagtaccaacaatacaatggccgg

SEQ ID NO: 374842 - DNA, 55 bp, Artificial
  Synthetic oligonucleotide
cggtgatcgcgaatgagctccaccgctgccggactccgacgactgaggaccaaga

SEQ ID NO: 374843 - DNA, 55 bp, Artificial
  Synthetic oligonucleotide
cggtgatcgcgatttcgtccggtaagccggtcaagaacagctccgaccttcctac

SEQ ID NO: 374844 - DNA, 55 bp, Artificial
  Synthetic oligonucleotide
cggtgatcgtcggcctatccgagggtctcgccgcagccacctactcgaactatgg

SEQ ID NO: 374845 - DNA, 60 bp, Artificial
  Synthetic oligonucleotide
cggtgatctcgcataagctgtgcccacggctgaaggcaagtgatccgttatccgcttggg

SEQ ID NO: 374846 - DNA, 55 bp, Artificial
  Synthetic oligonucleotide
cggtgatgatcaggtggaattcccgattaaaccgctcattgatcacgccaagccc

SEQ ID NO: 374847 - DNA, 55 bp, Artificial
  Synthetic oligonucleotide
cggtgatggagctaatttggaagattttgacattaacgatgttagtgcatgtcga

SEQ ID NO: 374848 - DNA, 58 bp, Artificial
  Synthetic oligonucleotide
cggtgatggtataactcaaacgttaacaagcgatctgacaacggagcaagcgttagct

SEQ ID NO: 374849 - DNA, 55 bp, Artificial
  Synthetic oligonucleotide
cggtgatggtgagcactacccaaattggaactctgggcataatcactggattgtg

SEQ ID NO: 374850 - DNA, 55 bp, Artificial
  Synthetic oligonucleotide
cggtgatgtggcacgccttgtcacctacgtagatcatgttggtctgacggcaccg

SEQ ID NO: 374851 - DNA, 55 bp, Artificial
  Synthetic oligonucleotide
cggtgattattcttatttcatgagagtataggctcatctatgagagcctgaacgg

SEQ ID NO: 374852 - DNA, 56 bp, Artificial
  Synthetic oligonucleotide
cggtgatttcctaggaatgaaagtacctctctcaaacaaagccagaggttccttga

SEQ ID NO: 374853 - DNA, 55 bp, Artificial
  Synthetic oligonucleotide
cggtgcaacgtatggtggtacattatagtttgcgactaagaatgaaccatcgtca

SEQ ID NO: 374854 - DNA, 55 bp, Artificial
  Synthetic oligonucleotide
cggtgcaactttctccgatcgtagggcgtcgtacttattactactacatgcggag

SEQ ID NO: 374855 - DNA, 55 bp, Artificial
  Synthetic oligonucleotide
cggtgcaagaggaactgctaacactctatgagacaggcagcaatacgttggacag

SEQ ID NO: 374856 - DNA, 55 bp, Artificial
  Synthetic oligonucleotide
cggtgcaagcgaattcgctggatcgcgcacatgataaggaattataaccattgcg

SEQ ID NO: 374857 - DNA, 60 bp, Artificial
  Synthetic oligonucleotide
cggtgcaaggatccacagtcatggtaatttggcaatcacttcttcactgaaggatcgctt

SEQ ID NO: 374858 - DNA, 58 bp, Artificial
  Synthetic oligonucleotide
cggtgcacatgcaagaggctttaaacgtcaggcgaaattcgatttcctaatgttccgc

SEQ ID NO: 374859 - DNA, 55 bp, Artificial
  Synthetic oligonucleotide
cggtgcaccctgcaaattcatggcggagtctcttattgccgggagtttatctggg

SEQ ID NO: 374860 - DNA, 60 bp, Artificial
  Synthetic oligonucleotide
cggtgcacttgccagctgtatgggcctcatatacaacagaatgggaacagtaaccacaga

SEQ ID NO: 374861 - DNA, 55 bp, Artificial
  Synthetic oligonucleotide
cggtgcagaacgcaatacctgctgacaacaccacattgtatagtttggatgtctc

SEQ ID NO: 374862 - DNA, 60 bp, Artificial
  Synthetic oligonucleotide
cggtgcaggagtcctcctgtatggagtactcccgtgcgcaaggcggtctactgcagtcgt

SEQ ID NO: 374863 - DNA, 55 bp, Artificial
  Synthetic oligonucleotide
cggtgcaggtactggtaacgcaatagagatgtataataacactgccgaaattgtg

SEQ ID NO: 374864 - DNA, 54 bp, Artificial
  Synthetic oligonucleotide
cggtgcataggtcaagagttctagtcctactgggggaccccttacagagcacgt

SEQ ID NO: 374865 - DNA, 60 bp, Artificial
  Synthetic oligonucleotide
cggtgcatgttccgaaccagtttaccgcatatataacagattgcaaggttacatagaggc

SEQ ID NO: 374866 - DNA, 55 bp, Artificial
  Synthetic oligonucleotide
cggtgccaggcttgggaacgagactgcgttcgctaccctggtcgtgaaatggctg

SEQ ID NO: 374867 - DNA, 55 bp, Artificial
  Synthetic oligonucleotide
cggtgccatagcgtactgcatatccaagttctggggctatggggcaattgcgccc

SEQ ID NO: 374868 - DNA, 55 bp, Artificial
  Synthetic oligonucleotide
cggtgcccatgcggagctgtcgtttcgggcaatgtccgtcacggttccatgagga

SEQ ID NO: 374869 - DNA, 59 bp, Artificial
  Synthetic oligonucleotide
cggtgcccgtgcttacagccttacccgttcatccaagagaatgcgtattgctcaaatgg

SEQ ID NO: 374870 - DNA, 60 bp, Artificial
  Synthetic oligonucleotide
cggtgccctagtcgtcggagtcgtgtgtgcagcagtactgcgtcggcatgtgggtccggg

SEQ ID NO: 374871 - DNA, 55 bp, Artificial
  Synthetic oligonucleotide
cggtgccctatcaattctgcatccatttggagagattggtagatgatggagcccc

SEQ ID NO: 374872 - DNA, 55 bp, Artificial
  Synthetic oligonucleotide
cggtgcctcaatggggcacaagttgcaggatgcagcgccttacaagaagttcgct

SEQ ID NO: 374873 - DNA, 57 bp, Artificial
  Synthetic oligonucleotide
cggtgccttacccgacagtataggagttatgctgccggattcaaacgctgccctccc

SEQ ID NO: 374874 - DNA, 55 bp, Artificial
  Synthetic oligonucleotide
cggtgcgaaaatccatatccatgacagttaatactgaggtaatatgagcagccgc

SEQ ID NO: 374875 - DNA, 55 bp, Artificial
  Synthetic oligonucleotide
cggtgcgagcctttgtacggttcataatctcaacactccacaagtgctacagtga

SEQ ID NO: 374876 - DNA, 55 bp, Artificial
  Synthetic oligonucleotide
cggtgcgctacttacaactcctgacggagttcagttcgttactccgaacactacc

SEQ ID NO: 374877 - DNA, 55 bp, Artificial
  Synthetic oligonucleotide
cggtgcggattaattgcgtacctggaatacatggttttctttccctccaaggcga

SEQ ID NO: 374878 - DNA, 55 bp, Artificial
  Synthetic oligonucleotide
cggtgcggcccctcttgctgctgacactcacatgcctagcatggatcgtcctacc

SEQ ID NO: 374879 - DNA, 55 bp, Artificial
  Synthetic oligonucleotide
cggtgcggcgctatgtacgcttccattgcgctctctagcgactgcatcttaaacg

SEQ ID NO: 374880 - DNA, 53 bp, Artificial
  Synthetic oligonucleotide
cggtgcgtaacgaccttctttggattaaaaccgaattagggcaatatactgga

SEQ ID NO: 374881 - DNA, 60 bp, Artificial
  Synthetic oligonucleotide
cggtgcgtgaatccattgttggcgcagtcgatgtgttggtagaatgagcagccacagttt

SEQ ID NO: 374882 - DNA, 55 bp, Artificial
  Synthetic oligonucleotide
cggtgcgtgcaatgcgaaacacctactttcgacttgggctacgttactacgacgt

SEQ ID NO: 374883 - DNA, 55 bp, Artificial
  Synthetic oligonucleotide
cggtgcgtgttccgagccagtttaccgcatatataatagattgcagggctatata

SEQ ID NO: 374884 - DNA, 55 bp, Artificial
  Synthetic oligonucleotide
cggtgcgtttctgagctgcgcgcaacacatacctgcatttagctacgcacttccg

SEQ ID NO: 374885 - DNA, 56 bp, Artificial
  Synthetic oligonucleotide
cggtgctaaagattccccacgcacttactgtggcctagacggtcaatttcactggt

SEQ ID NO: 374886 - DNA, 55 bp, Artificial
  Synthetic oligonucleotide
cggtgctaatgatgctggtatcaaatccgctattcaaggctctaatccacccaat

SEQ ID NO: 374887 - DNA, 60 bp, Artificial
  Synthetic oligonucleotide
cggtgctataatgttctgtgctgataagcttggtgcctcagaaattctcgctcagggcga

SEQ ID NO: 374888 - DNA, 55 bp, Artificial
  Synthetic oligonucleotide
cggtgctatgcgtcgcattcccctctgtctcagcttcacgagcagtgtgtggcgc

SEQ ID NO: 374889 - DNA, 60 bp, Artificial
  Synthetic oligonucleotide
cggtgctattaatgaattcgctgattacagcaagcgcttacacgaaaacaccgtgtcaaa

SEQ ID NO: 374890 - DNA, 55 bp, Artificial
  Synthetic oligonucleotide
cggtgctcaattggtgctaagatccgtacacatatatccttttgacgaaaacacc

SEQ ID NO: 374891 - DNA, 55 bp, Artificial
  Synthetic oligonucleotide
cggtgctcatacaggccgggatctacataaggcggatctagcgatcccccgtgaa

SEQ ID NO: 374892 - DNA, 60 bp, Artificial
  Synthetic oligonucleotide
cggtgctcttcagaggtggcactctcgcgaggaggtcttattggcagcggagatatgcga

SEQ ID NO: 374893 - DNA, 55 bp, Artificial
  Synthetic oligonucleotide
cggtgctgtgactgaacagggatacctcaaccttggtggccgacagaccgctcgc

SEQ ID NO: 374894 - DNA, 55 bp, Artificial
  Synthetic oligonucleotide
cggtgcttcctgcatcatgaggatgtcaattgcctcgatcatgtcttcgtatctg

SEQ ID NO: 374895 - DNA, 60 bp, Artificial
  Synthetic oligonucleotide
cggtggaaattataagaacatttccaaaaatgctattgtactgagctatgcatttatatc

SEQ ID NO: 374896 - DNA, 50 bp, Artificial
  Synthetic oligonucleotide
cggtggaacctagtgccggtgatgtgctgtggataggcagctagcgcacc

SEQ ID NO: 374897 - DNA, 55 bp, Artificial
  Synthetic oligonucleotide
cggtggacccgtgagggcatgccgtaaaacgtgcagacttacagctcataacggc

SEQ ID NO: 374898 - DNA, 55 bp, Artificial
  Synthetic oligonucleotide
cggtggaccggcgtgcaccagaatctgcacggtgcccgtagggcagggcgctttt

SEQ ID NO: 374899 - DNA, 60 bp, Artificial
  Synthetic oligonucleotide
cggtggactagactggcattattagagtccacgacattgagtagcgcgtcgattagaatt

SEQ ID NO: 374900 - DNA, 58 bp, Artificial
  Synthetic oligonucleotide
cggtggagttcttgagttggtagactgtgaatttgaccatgactccgttgactttata

SEQ ID NO: 374901 - DNA, 52 bp, Artificial
  Synthetic oligonucleotide
cggtggatcggttagtgggtcgcttaagctaaacaacttcgttgttaactta

SEQ ID NO: 374902 - DNA, 55 bp, Artificial
  Synthetic oligonucleotide
cggtggattaaacaaaagcaagccttactacacaggggaacatgcaaaggccata

SEQ ID NO: 374903 - DNA, 55 bp, Artificial
  Synthetic oligonucleotide
cggtggattcaaacgtgtgtagatccgaaaggataggaagcatttgtgaagtccc

SEQ ID NO: 374904 - DNA, 54 bp, Artificial
  Synthetic oligonucleotide
cggtggcaagtgcccgcgtattgagtggacggaaccccgctcgtcgtatcggtt

SEQ ID NO: 374905 - DNA, 59 bp, Artificial
  Synthetic oligonucleotide
cggtggcagaattgattgcatgtagtattccatgggcccggggactaagcaccgttcca

SEQ ID NO: 374906 - DNA, 56 bp, Artificial
  Synthetic oligonucleotide
cggtggcatttttgtaataagaaggggtactccagatgagttactctagttgaggc

SEQ ID NO: 374907 - DNA, 56 bp, Artificial
  Synthetic oligonucleotide
cggtggcccaattcccaagaaagtggatggttatgagtggcagacctcgaccaacc

SEQ ID NO: 374908 - DNA, 54 bp, Artificial
  Synthetic oligonucleotide
cggtggccggctcaacggtccacttttcgaccacgtctcgaaagacaatgtgtt

SEQ ID NO: 374909 - DNA, 55 bp, Artificial
  Synthetic oligonucleotide
cggtggcctaaatatctaacaaggaggcgctaaatggcaagctcacagaaacgtg

SEQ ID NO: 374910 - DNA, 55 bp, Artificial
  Synthetic oligonucleotide
cggtggcctgtgggctggggctgaggacgtctactaactcactgccccacatgaa

SEQ ID NO: 374911 - DNA, 55 bp, Artificial
  Synthetic oligonucleotide
cggtggcgaagtgtggacatgaagcctcacctagtaagacaatgatgacgccata

SEQ ID NO: 374912 - DNA, 60 bp, Artificial
  Synthetic oligonucleotide
cggtggcgactacgactcggtctacgaggagcgtgaagcattgagcgtctgagaggtatc

SEQ ID NO: 374913 - DNA, 55 bp, Artificial
  Synthetic oligonucleotide
cggtggcgctcctggaccaatcccggagagagttatatcacaacgttaccccaag

SEQ ID NO: 374914 - DNA, 52 bp, Artificial
  Synthetic oligonucleotide
cggtggctccctcagaggtaatttgggttctcgcccctcccttccgagggtc

SEQ ID NO: 374915 - DNA, 55 bp, Artificial
  Synthetic oligonucleotide
cggtggctcctacatctatcaatctttcctcaaggatgagttgcgccctacggcg

SEQ ID NO: 374916 - DNA, 57 bp, Artificial
  Synthetic oligonucleotide
cggtgggacggaccttgctgccgactactacgtagttagccctccgaatgctgtctc

SEQ ID NO: 374917 - DNA, 58 bp, Artificial
  Synthetic oligonucleotide
cggtgggacggaccttgctgctgactactacgtagtcagccccccgacagcggtctca

SEQ ID NO: 374918 - DNA, 55 bp, Artificial
  Synthetic oligonucleotide
cggtgggagaagcacgtccgaaagtcggacgagtaggctctgttctcccgctcga

SEQ ID NO: 374919 - DNA, 55 bp, Artificial
  Synthetic oligonucleotide
cggtgggatgtcgtctacctcccagaggttagcgcgacagttgcggggagtatcg

SEQ ID NO: 374920 - DNA, 55 bp, Artificial
  Synthetic oligonucleotide
cggtgggcacgaaattcccggtagcgtccatgtaacccttcagctcgctagcggt

SEQ ID NO: 374921 - DNA, 57 bp, Artificial
  Synthetic oligonucleotide
cggtgggccacaattgacggcgtatgggatcctagggcccattctgtgtacctcaag

SEQ ID NO: 374922 - DNA, 59 bp, Artificial
  Synthetic oligonucleotide
cggtgggcgctaatggatgagcatttggtgcgatacgtgtcggaagcggcattccgtca

SEQ ID NO: 374923 - DNA, 53 bp, Artificial
  Synthetic oligonucleotide
cggtgggcgtattatagtgattacatcgaaaaatcttagtgtgatataattaa

SEQ ID NO: 374924 - DNA, 55 bp, Artificial
  Synthetic oligonucleotide
cggtgggctctactatctatcacgaaaagagggacctactgcggagctggcactt

SEQ ID NO: 374925 - DNA, 60 bp, Artificial
  Synthetic oligonucleotide
cggtgggcttgaggatggaacatatggctcattcgcatttgatggtagagaatgggtaga

SEQ ID NO: 374926 - DNA, 55 bp, Artificial
  Synthetic oligonucleotide
cggtggggcactgtcgacggtgtatgggatcctagagccctgaccgtataccaga

SEQ ID NO: 374927 - DNA, 51 bp, Artificial
  Synthetic oligonucleotide
cggtggggcctcgggagcccgaactgccacggccccgattgggcctccccg

SEQ ID NO: 374928 - DNA, 53 bp, Artificial
  Synthetic oligonucleotide
cggtggggtaaggttggtgtgcccaacgcccgtactttggtgacacctcaaga

SEQ ID NO: 374929 - DNA, 55 bp, Artificial
  Synthetic oligonucleotide
cggtggggttattctcttcacttcatgggatatgtgattggaagttggggtacct

SEQ ID NO: 374930 - DNA, 53 bp, Artificial
  Synthetic oligonucleotide
cggtgggtccgagaccccgaatgagcctgccgccaaggaggttcccgaggagt

SEQ ID NO: 374931 - DNA, 52 bp, Artificial
  Synthetic oligonucleotide
cggtggtaattacgaggacgtgtggacgtcaacgtatgctacgtttgctaaa

SEQ ID NO: 374932 - DNA, 55 bp, Artificial
  Synthetic oligonucleotide
cggtggtatcaccccaaaggctaaagggattccgtttgatgctgcgatgagtggt

SEQ ID NO: 374933 - DNA, 60 bp, Artificial
  Synthetic oligonucleotide
cggtggtctctcctttacaacatcccaatcacctacttcagacacgcacagacatcctac

SEQ ID NO: 374934 - DNA, 55 bp, Artificial
  Synthetic oligonucleotide
cggtggtgattggctaagattcggtgtaaggttcgtgtgccaacgccctgtgcgg

SEQ ID NO: 374935 - DNA, 55 bp, Artificial
  Synthetic oligonucleotide
cggtggtggccgagtgagattcgaaagctatccggtaattagggtggggtggcga

SEQ ID NO: 374936 - DNA, 54 bp, Artificial
  Synthetic oligonucleotide
cggtggtggtccggtgattgcccatgatcgaacatctcagacctaacgtgattg

SEQ ID NO: 374937 - DNA, 56 bp, Artificial
  Synthetic oligonucleotide
cggtggttccgaccgagtaaacatgcaaaacgtagcgcaaacgacacatcaaggta

SEQ ID NO: 374938 - DNA, 58 bp, Artificial
  Synthetic oligonucleotide
cggtggttgctgtcccgtatgatcctagtcaggccatcaaatgtctgaaagttctgca

SEQ ID NO: 374939 - DNA, 60 bp, Artificial
  Synthetic oligonucleotide
cggtgtaaagacaaaggcttgcgtagcaggtgtagatcaagcacattgtagcgttgagtc

SEQ ID NO: 374940 - DNA, 49 bp, Artificial
  Synthetic oligonucleotide
cggtgtaaatccgtaggggtgacgtaaaccaaattacgtaatgttttgg

SEQ ID NO: 374941 - DNA, 58 bp, Artificial
  Synthetic oligonucleotide
cggtgtaaccaaggtagctcaattcgtctggcgtgtcatgaccaacccagtggacgcc

SEQ ID NO: 374942 - DNA, 52 bp, Artificial
  Synthetic oligonucleotide
cggtgtaagtggcgggttgacgcacgtcggatacttgcgtgcttagttgcga

SEQ ID NO: 374943 - DNA, 55 bp, Artificial
  Synthetic oligonucleotide
cggtgtaatggtatctatgagaacttcggtttgtcgcttgacttgttagtcggac

SEQ ID NO: 374944 - DNA, 55 bp, Artificial
  Synthetic oligonucleotide
cggtgtacaatggggtgagcaagtacgctgtgggcgattcaggcagacgtggtga

SEQ ID NO: 374945 - DNA, 54 bp, Artificial
  Synthetic oligonucleotide
cggtgtacacgggaagtgacaattttcgcgcggttttaggcggatgttgtagta

SEQ ID NO: 374946 - DNA, 54 bp, Artificial
  Synthetic oligonucleotide
cggtgtaccccctccgccgtctgccagtttacaggatacctatagatatttgca

SEQ ID NO: 374947 - DNA, 53 bp, Artificial
  Synthetic oligonucleotide
cggtgtagaatgtgtgtgcccctgtccggtccgtgtaaaatttcacaccattc

SEQ ID NO: 374948 - DNA, 55 bp, Artificial
  Synthetic oligonucleotide
cggtgtagttgaccaaaacatcgacctagtggacgaaaagaccattgatgggcta

SEQ ID NO: 374949 - DNA, 54 bp, Artificial
  Synthetic oligonucleotide
cggtgtatccatcaccgtgcacaatgcaaaagttaaccaacccgtttagcacta

SEQ ID NO: 374950 - DNA, 53 bp, Artificial
  Synthetic oligonucleotide
cggtgtatctttaaggttggaacacacagtaccctactcttgttagtaggtcc

SEQ ID NO: 374951 - DNA, 54 bp, Artificial
  Synthetic oligonucleotide
cggtgtatgacaccgcggggagaccactatttggggacccaagtgaggtacacc

SEQ ID NO: 374952 - DNA, 60 bp, Artificial
  Synthetic oligonucleotide
cggtgtatgagagagagggttgctttaggtgagacggcttagcattgcctcatgaacttg

SEQ ID NO: 374953 - DNA, 53 bp, Artificial
  Synthetic oligonucleotide
cggtgtatgctcttaatttcaaacaaaggggtagaatagggggaatatcccca

SEQ ID NO: 374954 - DNA, 54 bp, Artificial
  Synthetic oligonucleotide
cggtgtattctgttccaggtttaagaaggatttaatatcccaacgagcgtgacc

SEQ ID NO: 374955 - DNA, 55 bp, Artificial
  Synthetic oligonucleotide
cggtgtcacagaggagacacacaaatccagacgaggaggtcatttgagctgaaga

SEQ ID NO: 374956 - DNA, 55 bp, Artificial
  Synthetic oligonucleotide
cggtgtcacagaggggacacacagattcagacaagaaggtcattcgagctgaaga

SEQ ID NO: 374957 - DNA, 59 bp, Artificial
  Synthetic oligonucleotide
cggtgtcacgtcaacatccaccaacacaactacgctgctcctccctccaccaaggtgga

SEQ ID NO: 374958 - DNA, 60 bp, Artificial
  Synthetic oligonucleotide
cggtgtcactgatggtagtattatgtctcaaagcggaagtcttatcgatatgttcaacac

SEQ ID NO: 374959 - DNA, 60 bp, Artificial
  Synthetic oligonucleotide
cggtgtcagcagacccactagcatccctattggagatgtgccacagcacacagattgggg

SEQ ID NO: 374960 - DNA, 59 bp, Artificial
  Synthetic oligonucleotide
cggtgtcagcttattaaggtcactaagcactccgagcgaagcgaggagtgcgaccctta

SEQ ID NO: 374961 - DNA, 60 bp, Artificial
  Synthetic oligonucleotide
cggtgtcatcacttcagacgcaccagtgcatgattgtgacacgaagtgtcaaacacccca

SEQ ID NO: 374962 - DNA, 59 bp, Artificial
  Synthetic oligonucleotide
cggtgtcgatcgaggggcgaggatttaggcaagcttatagtgaattcatgaacgcggct

SEQ ID NO: 374963 - DNA, 52 bp, Artificial
  Synthetic oligonucleotide
cggtgtcggcggtaacggaagcaagtcataacgggaggtcgcagaccagcac

SEQ ID NO: 374964 - DNA, 58 bp, Artificial
  Synthetic oligonucleotide
cggtgtcgggtttagtgtgaattatcagcctcgaactggagacgcttgtacatacctg

SEQ ID NO: 374965 - DNA, 56 bp, Artificial
  Synthetic oligonucleotide
cggtgtcgtacaacactttggtcaaaattgatttagcgtaagatatcatgtaatgg

SEQ ID NO: 374966 - DNA, 55 bp, Artificial
  Synthetic oligonucleotide
cggtgtcgtccctcgacgccagtgtcttcatccccaggcgcatcgataccatgac

SEQ ID NO: 374967 - DNA, 52 bp, Artificial
  Synthetic oligonucleotide
cggtgtctagaaactcgtcatacgctgcttggatttctccagaagtatatgc

SEQ ID NO: 374968 - DNA, 57 bp, Artificial
  Synthetic oligonucleotide
cggtgtctattttaatgtcggacggtgtcaacacggcgcgtctcgacgttgtcgctc

SEQ ID NO: 374969 - DNA, 60 bp, Artificial
  Synthetic oligonucleotide
cggtgtctctagtaattgtctatcaatcggtgtattggagtcctatatatagttagacac

SEQ ID NO: 374970 - DNA, 60 bp, Artificial
  Synthetic oligonucleotide
cggtgtctgcccggtagtgttcacagatgggtctgccactggacctgcagaaacaagagt

SEQ ID NO: 374971 - DNA, 55 bp, Artificial
  Synthetic oligonucleotide
cggtgtctggatggattcgaccgcttgtctgaccatctcatagtgacgcgtcagg

SEQ ID NO: 374972 - DNA, 54 bp, Artificial
  Synthetic oligonucleotide
cggtgtctggggtcttatttatagttggacaccgtatggcattttggtaattcg

SEQ ID NO: 374973 - DNA, 58 bp, Artificial
  Synthetic oligonucleotide
cggtgtctggggtcttatttatatgtggacaccaaatggcataattgtaattctgaaa

SEQ ID NO: 374974 - DNA, 55 bp, Artificial
  Synthetic oligonucleotide
cggtgtcttatttatatgtaggagagttactaaaaccctcaggggtcctcagcaa

SEQ ID NO: 374975 - DNA, 55 bp, Artificial
  Synthetic oligonucleotide
cggtgtgcaacagttgagtgattgcgctccgggctatcaactgcagtccgacggg

SEQ ID NO: 374976 - DNA, 60 bp, Artificial
  Synthetic oligonucleotide
cggtgtgcacgagcgttcggaggtctgatggacgaacttaaagcccactgtgtcacactc

SEQ ID NO: 374977 - DNA, 51 bp, Artificial
  Synthetic oligonucleotide
cggtgtgcccgaagatactgagaaaccatgacggggaggtgggggtcagga

SEQ ID NO: 374978 - DNA, 55 bp, Artificial
  Synthetic oligonucleotide
cggtgtgcgtgatatctgtagctgcgtaaagccataccaatcggactatcaaaag

SEQ ID NO: 374979 - DNA, 54 bp, Artificial
  Synthetic oligonucleotide
cggtgtgctgttgctccattaacgtttaaagcggctacccctgtcggggcaacc

SEQ ID NO: 374980 - DNA, 58 bp, Artificial
  Synthetic oligonucleotide
cggtgtggacggatgtttcaaatcaaatcgtagacgcatcgaattcagttagtagtat

SEQ ID NO: 374981 - DNA, 59 bp, Artificial
  Synthetic oligonucleotide
cggtgtggtcttgggaaaagaaagcttgctggaggctgctgttcagccccatacattac

SEQ ID NO: 374982 - DNA, 56 bp, Artificial
  Synthetic oligonucleotide
cggtgtgtacccctgggagggtaggtaccatggtacactacgctacgcagcagcct

SEQ ID NO: 374983 - DNA, 52 bp, Artificial
  Synthetic oligonucleotide
cggtgtgtattttaccgttttaataagcctacgaccagtgaaaatctggtgg

SEQ ID NO: 374984 - DNA, 56 bp, Artificial
  Synthetic oligonucleotide
cggtgtgtcaacccacccaggaaatgttgaagcacgagaatagttaccagggctaa

SEQ ID NO: 374985 - DNA, 57 bp, Artificial
  Synthetic oligonucleotide
cggtgtgtcgtctgtacctcggagacatgtcagcaattccgttcgtcggaacttgtt

SEQ ID NO: 374986 - DNA, 55 bp, Artificial
  Synthetic oligonucleotide
cggtgtgtgcgctacaacaagaaatcagttagttatggggaaaggattcagcggc

SEQ ID NO: 374987 - DNA, 56 bp, Artificial
  Synthetic oligonucleotide
cggtgttaattcacaatacttatcgaaagaaactgttgttactaatcatccatggg

SEQ ID NO: 374988 - DNA, 59 bp, Artificial
  Synthetic oligonucleotide
cggtgttacatcagtatacacagaagacggagaattgaccattccgaagcagttttctc

SEQ ID NO: 374989 - DNA, 55 bp, Artificial
  Synthetic oligonucleotide
cggtgttactgccagatctgaatgggacacggataaggcaattctaggtccactg

SEQ ID NO: 374990 - DNA, 55 bp, Artificial
  Synthetic oligonucleotide
cggtgttagcgttgaggactcttttagcaatgttatacatgctccgagaagacgg

SEQ ID NO: 374991 - DNA, 51 bp, Artificial
  Synthetic oligonucleotide
cggtgttaggacactcactacaggcggccccgttacttattccacatacgg

SEQ ID NO: 374992 - DNA, 55 bp, Artificial
  Synthetic oligonucleotide
cggtgttccggttacaagttctgtagatctggttgagaccaaccacacagggaca

SEQ ID NO: 374993 - DNA, 57 bp, Artificial
  Synthetic oligonucleotide
cggtgttcctggtggtggtaagaccaagtttgtgtatgagaatgttgaggtgaggaa

SEQ ID NO: 374994 - DNA, 55 bp, Artificial
  Synthetic oligonucleotide
cggtgttctctgcactttacaacgccaatctgatatccctgcacagcctgttccc

SEQ ID NO: 374995 - DNA, 55 bp, Artificial
  Synthetic oligonucleotide
cggtgttctgtccgcgattctatgataacaggcttatatagatgcctttgttggt

SEQ ID NO: 374996 - DNA, 55 bp, Artificial
  Synthetic oligonucleotide
cggtgttgagccggtcatgtagctgttcgtgtccccgaacatcgcccatctcatg

SEQ ID NO: 374997 - DNA, 57 bp, Artificial
  Synthetic oligonucleotide
cggtgttgatagggctgagatttgggaaagtgcctcttctttagtaagggagcactg

SEQ ID NO: 374998 - DNA, 54 bp, Artificial
  Synthetic oligonucleotide
cggtgttggctgttttcccggaccgaaagagttactcatagaccggaggcgatc

SEQ ID NO: 374999 - DNA, 59 bp, Artificial
  Synthetic oligonucleotide
cggtgttgttggtgacagtattcctcaggttaatgaggatcctcaaacactatatgtaa

SEQ ID NO: 375000 - DNA, 55 bp, Artificial
  Synthetic oligonucleotide
cggtgtttccatgtagatatgataagtagcaaacctcatcattaaggttgcttcg

SEQ ID NO: 375001 - DNA, 55 bp, Artificial
  Synthetic oligonucleotide
cggtgtttgactgccaaaatcgtatcgggtagtgtacgagacgtcggcggtgcag

SEQ ID NO: 375002 - DNA, 53 bp, Artificial
  Synthetic oligonucleotide
cggtgtttgcaaggcagtatacaaaaaatggccggagtcctttaagaacagtg

SEQ ID NO: 375003 - DNA, 60 bp, Artificial
  Synthetic oligonucleotide
cggtgtttgcttggcaggcgtgtgcttcgcaggactcaagttcaacaaggctagagagca

SEQ ID NO: 375004 - DNA, 60 bp, Artificial
  Synthetic oligonucleotide
cggtgtttgtgatgcattaaccgacaggacgtcactcacgctattgaaacgtatctcaga

SEQ ID NO: 375005 - DNA, 56 bp, Artificial
  Synthetic oligonucleotide
cggttaaaaggaaccgcatacgaaggtctgtttgcaaactgctacggatggcaata

SEQ ID NO: 375006 - DNA, 55 bp, Artificial
  Synthetic oligonucleotide
cggttaaagcgatcaaagataagactggtgcgacgacactaatggactacatcac

SEQ ID NO: 375007 - DNA, 53 bp, Artificial
  Synthetic oligonucleotide
cggttaaaggaaggaaacctaggtttcaaacagcaaaaggatctgtgcgaata

SEQ ID NO: 375008 - DNA, 55 bp, Artificial
  Synthetic oligonucleotide
cggttaaggaattgcatagtgcagtgctcctatggatccgtcgtaagagctagct

SEQ ID NO: 375009 - DNA, 51 bp, Artificial
  Synthetic oligonucleotide
cggttaaggcgggcaacacggacacaggtggcgtttactccttggcggggg

SEQ ID NO: 375010 - DNA, 55 bp, Artificial
  Synthetic oligonucleotide
cggttacacaggtacgctccggcgtgcaagcctctcctacgggaggaagtcacat

SEQ ID NO: 375011 - DNA, 60 bp, Artificial
  Synthetic oligonucleotide
cggttacagtgtgctttcttcagatttgaagaacgccactaatgctcagcatattgcgct

SEQ ID NO: 375012 - DNA, 52 bp, Artificial
  Synthetic oligonucleotide
cggttacatggtgttcccgtccgtttacgaaggtttaactgtgagccttgta

SEQ ID NO: 375013 - DNA, 56 bp, Artificial
  Synthetic oligonucleotide
cggttaccgaacgactttgagataagcaagtgacgtagaaagtctaacacgtgtga

SEQ ID NO: 375014 - DNA, 55 bp, Artificial
  Synthetic oligonucleotide
cggttaccgtactggcaccgtgtacggtctgcatgcactgccaaaacttggaact

SEQ ID NO: 375015 - DNA, 58 bp, Artificial
  Synthetic oligonucleotide
cggttacctcagctgcctgcacccttactatcagttaatggagatgccgggttgtccc

SEQ ID NO: 375016 - DNA, 59 bp, Artificial
  Synthetic oligonucleotide
cggttacggtgctgcctacgcacatgacttggatgtcctcctcaaccaccttcaaatta

SEQ ID NO: 375017 - DNA, 55 bp, Artificial
  Synthetic oligonucleotide
cggttactccccaggcgaactcaatagagtggcgtcgtgcctcagaaaacttggg

SEQ ID NO: 375018 - DNA, 60 bp, Artificial
  Synthetic oligonucleotide
cggttactcgcgagcactgctacatcacatgccctcaaaccaatcaggcctgatcaatga

SEQ ID NO: 375019 - DNA, 55 bp, Artificial
  Synthetic oligonucleotide
cggttactgaaggatagtgaccaaatatcacaagatgcagtgttgaatgggcctg

SEQ ID NO: 375020 - DNA, 55 bp, Artificial
  Synthetic oligonucleotide
cggttactggactgcttcacacagcttatcgaggaagggacagagctgattcagg

SEQ ID NO: 375021 - DNA, 55 bp, Artificial
  Synthetic oligonucleotide
cggttagatgtgttagcgagtacgcatcaatgtgttatcgtaacgatagtgagcg

SEQ ID NO: 375022 - DNA, 60 bp, Artificial
  Synthetic oligonucleotide
cggttagcagcggggctgacacggaggatgtcgtgtgctgctcaatgtcttactcctgga

SEQ ID NO: 375023 - DNA, 60 bp, Artificial
  Synthetic oligonucleotide
cggttagcagtggggatggcacggaggatgttgtatgctgctcaatgtcttattcctgga

SEQ ID NO: 375024 - DNA, 55 bp, Artificial
  Synthetic oligonucleotide
cggttagtagtggggctgacgaagaggatgtcgtgtgctgctcaatgtcttattc

SEQ ID NO: 375025 - DNA, 55 bp, Artificial
  Synthetic oligonucleotide
cggttagttcacacggttctaggaggagtatatctgtggatttggagagtgtgag

SEQ ID NO: 375026 - DNA, 49 bp, Artificial
  Synthetic oligonucleotide
cggttagtttcgcttttagggttagtgttggtttacggcaggggcgtgg

SEQ ID NO: 375027 - DNA, 51 bp, Artificial
  Synthetic oligonucleotide
cggttatactattcccggttcagatgcaccacaatataatatcgaatctga

SEQ ID NO: 375028 - DNA, 55 bp, Artificial
  Synthetic oligonucleotide
cggttatatgtgtaagacggagcgggaggatgaagagttagtgtgcaaaattagc

SEQ ID NO: 375029 - DNA, 57 bp, Artificial
  Synthetic oligonucleotide
cggttatcaacccctcaatcccggtcatcattacgagcaactattccatcgacgaaa

SEQ ID NO: 375030 - DNA, 60 bp, Artificial
  Synthetic oligonucleotide
cggttatcagctttagagcgaataatcgctccagaaagcatggtgggagaggaggacaca

SEQ ID NO: 375031 - DNA, 55 bp, Artificial
  Synthetic oligonucleotide
cggttatgaacactaagagttactgccaccaaaagaggataatcagaccacttgt

SEQ ID NO: 375032 - DNA, 54 bp, Artificial
  Synthetic oligonucleotide
cggttatgaggaacggtcgttaatgcttacatggcaaaatacaatcgtaaaccc

SEQ ID NO: 375033 - DNA, 60 bp, Artificial
  Synthetic oligonucleotide
cggttatgccaatgtctgagatacacgagtcaattagatggacgcgtgacgccaagcaca

SEQ ID NO: 375034 - DNA, 55 bp, Artificial
  Synthetic oligonucleotide
cggttatgttctggttagttcgtgatcgtcgcccagttacaacgccttatggctt

SEQ ID NO: 375035 - DNA, 54 bp, Artificial
  Synthetic oligonucleotide
cggttattggaaaccgaaaccaggctagatggactatttgattactacattcca

SEQ ID NO: 375036 - DNA, 50 bp, Artificial
  Synthetic oligonucleotide
cggttcaacccctgcctcccctgatttaccaactttccagtttacctttc

SEQ ID NO: 375037 - DNA, 54 bp, Artificial
  Synthetic oligonucleotide
cggttcaaggagacccgtagtcgtcgggtaatcgagtagtcaactagtcgacta

SEQ ID NO: 375038 - DNA, 55 bp, Artificial
  Synthetic oligonucleotide
cggttcacagttatccgtcaggtgtcttacccagttaatacggagaagggtgatc

SEQ ID NO: 375039 - DNA, 55 bp, Artificial
  Synthetic oligonucleotide
cggttcacattccggcggttaactacaacagacatcttgtgatcccttatgttgg

SEQ ID NO: 375040 - DNA, 60 bp, Artificial
  Synthetic oligonucleotide
cggttcacccaatctacctagggtccatgcattatgacatcacttatgaaacgctgaagt

SEQ ID NO: 375041 - DNA, 54 bp, Artificial
  Synthetic oligonucleotide
cggttcaccctatcccgtggcgtaacaccagctttacctatcttccgtggtgga

SEQ ID NO: 375042 - DNA, 55 bp, Artificial
  Synthetic oligonucleotide
cggttcagacgcgatcatgtcgaccaaggctgacccgtctttgtcattggtcagg

SEQ ID NO: 375043 - DNA, 55 bp, Artificial
  Synthetic oligonucleotide
cggttcagccattcattcggctccggtcagtcaaacagttgcaatagcggcgtgg

SEQ ID NO: 375044 - DNA, 60 bp, Artificial
  Synthetic oligonucleotide
cggttcagccgcgattgatggtcttgtacaaggaagcgtacattccatattaactggtga

SEQ ID NO: 375045 - DNA, 55 bp, Artificial
  Synthetic oligonucleotide
cggttcagggagttgcacgctggcagagaaccagtttcacctgtcccccccaggt

SEQ ID NO: 375046 - DNA, 60 bp, Artificial
  Synthetic oligonucleotide
cggttcatgtccaaagccacatcgcttgaccaacaaggggatctgtagttgtggtgcatt

SEQ ID NO: 375047 - DNA, 57 bp, Artificial
  Synthetic oligonucleotide
cggttcattcactgaatgccgaaatgggtgtcgcatatatcctgggtggtgtctggg

SEQ ID NO: 375048 - DNA, 59 bp, Artificial
  Synthetic oligonucleotide
cggttcattcgtgggcacacgagtatactcgcactatccaataaaactacgtatgatac

SEQ ID NO: 375049 - DNA, 59 bp, Artificial
  Synthetic oligonucleotide
cggttcattgaaacgttatattgagatataacgaaaagtcacgtatgaaagagacatga

SEQ ID NO: 375050 - DNA, 50 bp, Artificial
  Synthetic oligonucleotide
cggttcatttcgttttgccggactttccgtatacacttgatttgactgtg

SEQ ID NO: 375051 - DNA, 60 bp, Artificial
  Synthetic oligonucleotide
cggttccaagggagatgtatttgtcataagagagccattcatctcatgctcccacttgga

SEQ ID NO: 375052 - DNA, 60 bp, Artificial
  Synthetic oligonucleotide
cggttccccagccatgcttgcttgtgcagggcactgctaaccaggtaaagtgctacagat

SEQ ID NO: 375053 - DNA, 55 bp, Artificial
  Synthetic oligonucleotide
cggttcccgctaggttctctcggacgaatgcccacgactcagtacgtacccacga

SEQ ID NO: 375054 - DNA, 55 bp, Artificial
  Synthetic oligonucleotide
cggttccgactactctcccgactgcctatgatgtttatcctttggatggtcgcca

SEQ ID NO: 375055 - DNA, 51 bp, Artificial
  Synthetic oligonucleotide
cggttccggaaacaaggctatcgatcgtttcccgttgtaaccgtgtataag

SEQ ID NO: 375056 - DNA, 51 bp, Artificial
  Synthetic oligonucleotide
cggttccggtaataagtgtaaagtagtattaggagtacctggttgcggtaa

SEQ ID NO: 375057 - DNA, 58 bp, Artificial
  Synthetic oligonucleotide
cggttcctagtacagactttatacttatcacgcatgcaggattcggaaatcaaactaa

SEQ ID NO: 375058 - DNA, 53 bp, Artificial
  Synthetic oligonucleotide
cggttcctcaacgtttacgcaagtcctcctgacttgcgtaccgtgggtcgccc

SEQ ID NO: 375059 - DNA, 55 bp, Artificial
  Synthetic oligonucleotide
cggttcctctactcggtacatcttgaaatagaggggattttcgatctcccagata

SEQ ID NO: 375060 - DNA, 53 bp, Artificial
  Synthetic oligonucleotide
cggttcctctggctcggtagtttcccaccgagcgacataccacggcttaacgg

SEQ ID NO: 375061 - DNA, 58 bp, Artificial
  Synthetic oligonucleotide
cggttcctgtcccgctgcgaaggtcatcactgttggcgttggacctatctccacgacc

SEQ ID NO: 375062 - DNA, 55 bp, Artificial
  Synthetic oligonucleotide
cggttccttgagcagcttcccgacattttaggtgcgtacccaacattggccgcac

SEQ ID NO: 375063 - DNA, 55 bp, Artificial
  Synthetic oligonucleotide
cggttcgaaacgagactacgacatgaggctggcgctgaatgggagccgcgcatgg

SEQ ID NO: 375064 - DNA, 55 bp, Artificial
  Synthetic oligonucleotide
cggttcgagagagctttaaacatttagcaggaggtgatattggtatttggagtgg

SEQ ID NO: 375065 - DNA, 60 bp, Artificial
  Synthetic oligonucleotide
cggttcgcccttcatgtatgggccttcgcgctctggcaattcgtctcatggacctggtac

SEQ ID NO: 375066 - DNA, 58 bp, Artificial
  Synthetic oligonucleotide
cggttcgggacgaattttccagagtggagtgaggatggccaaatgcaacacaaagtgc

SEQ ID NO: 375067 - DNA, 55 bp, Artificial
  Synthetic oligonucleotide
cggttcgtagatccattgactggttattcaaaggatgagagcgtgcaaactgaca

SEQ ID NO: 375068 - DNA, 55 bp, Artificial
  Synthetic oligonucleotide
cggttcgtgttttactataatgactgacggcccaagcaatgggcaagcctcgtac

SEQ ID NO: 375069 - DNA, 57 bp, Artificial
  Synthetic oligonucleotide
cggttcgttgacccattgactggctattcgaaagatgaaagcgtgcaaacggacatt

SEQ ID NO: 375070 - DNA, 55 bp, Artificial
  Synthetic oligonucleotide
cggttcgtttgaatgcaagctaccatactcacccgcctcttgcgggcatattgtg

SEQ ID NO: 375071 - DNA, 60 bp, Artificial
  Synthetic oligonucleotide
cggttctaaatgacagtccggaggcggtaaaagcagtcatgaatttatcacattcgcata

SEQ ID NO: 375072 - DNA, 55 bp, Artificial
  Synthetic oligonucleotide
cggttctatgagaatcgttgggcctagagcctgcagcaatacgtggcatggaaca

SEQ ID NO: 375073 - DNA, 55 bp, Artificial
  Synthetic oligonucleotide
cggttctcgatgattacgacgtactaatggtctatcacattaaaccatcaactgg

SEQ ID NO: 375074 - DNA, 57 bp, Artificial
  Synthetic oligonucleotide
cggttcttgataataggttagtttcagttatgcattctgttatgggagatgatgttt

SEQ ID NO: 375075 - DNA, 59 bp, Artificial
  Synthetic oligonucleotide
cggttcttgcagaaattctctttccagatggcaaatggcagacctacaaccttggacga

SEQ ID NO: 375076 - DNA, 55 bp, Artificial
  Synthetic oligonucleotide
cggttcttgcgatgatggacgccgcaaccgaatccatcgccgtctggtcagacgc

SEQ ID NO: 375077 - DNA, 55 bp, Artificial
  Synthetic oligonucleotide
cggttcttgtcaagagggcctctggcgagatgcttgctctggcagtcaggatggg

SEQ ID NO: 375078 - DNA, 55 bp, Artificial
  Synthetic oligonucleotide
cggttcttgttatttctcattctcttgcagctccagcataacagcgcatgaaata

SEQ ID NO: 375079 - DNA, 55 bp, Artificial
  Synthetic oligonucleotide
cggttctttaaatgtttaagagctgaacaagctacacaagaggtaaaggattgga

SEQ ID NO: 375080 - DNA, 60 bp, Artificial
  Synthetic oligonucleotide
cggttgaacgagctgtacgcttgaatgaacaacgcactaacgtcgcttatctactgcaac

SEQ ID NO: 375081 - DNA, 54 bp, Artificial
  Synthetic oligonucleotide
cggttgacaaagaaacagctcaaattcgtttacaaactgacaacacaaaccact

SEQ ID NO: 375082 - DNA, 59 bp, Artificial
  Synthetic oligonucleotide
cggttgacaacatgaagtaaacacggtacgatgtaccacatgaaacgacagtgagtcac

SEQ ID NO: 375083 - DNA, 60 bp, Artificial
  Synthetic oligonucleotide
cggttgagacgacttatgatgatgggtatctatgtggatcagataaagaggacgatgagt

SEQ ID NO: 375084 - DNA, 50 bp, Artificial
  Synthetic oligonucleotide
cggttgagagagtcggggctatcatgaatgagaaagctaacagatttcgt

SEQ ID NO: 375085 - DNA, 55 bp, Artificial
  Synthetic oligonucleotide
cggttgaggagctgaatgcccgttctaggcgtccaaaggtccatttctccaaagc

SEQ ID NO: 375086 - DNA, 55 bp, Artificial
  Synthetic oligonucleotide
cggttgaggctcagaacagcgttatgccgttattgcgtgctatgggcagtgatct

SEQ ID NO: 375087 - DNA, 60 bp, Artificial
  Synthetic oligonucleotide
cggttgaggtctccacataatcagcgcccacaaaaatcccatctcgaacttgctcgcgta

SEQ ID NO: 375088 - DNA, 60 bp, Artificial
  Synthetic oligonucleotide
cggttgagttctcgatagggatgcaacgcgtctgttgtgtccgagcccgcatttgtatgg

SEQ ID NO: 375089 - DNA, 54 bp, Artificial
  Synthetic oligonucleotide
cggttgatcgatcaccagtcgcatgccgtagtggagtaccacatcaccgattgt

SEQ ID NO: 375090 - DNA, 52 bp, Artificial
  Synthetic oligonucleotide
cggttgatcgattaactatgttcaccggcttgcctatcatcatacagcgata

SEQ ID NO: 375091 - DNA, 55 bp, Artificial
  Synthetic oligonucleotide
cggttgatgcagttaggtctggtgagctaacaacccagttttcaaaccatgtcac

SEQ ID NO: 375092 - DNA, 55 bp, Artificial
  Synthetic oligonucleotide
cggttgatgctggagaccttaggcaaatgatgatatttgatcatgagacctccgc

SEQ ID NO: 375093 - DNA, 55 bp, Artificial
  Synthetic oligonucleotide
cggttgattgtgtgttacgttttgagtctgaacttacagtgtggattcactctgg

SEQ ID NO: 375094 - DNA, 59 bp, Artificial
  Synthetic oligonucleotide
cggttgatttgactgtagatcaggcatggagaggaaaaggtgaaggtcttcctggaatg

SEQ ID NO: 375095 - DNA, 59 bp, Artificial
  Synthetic oligonucleotide
cggttgcaagttaggaaacttcgctatcatgcgcttctccggagaagctagcactttcc

SEQ ID NO: 375096 - DNA, 55 bp, Artificial
  Synthetic oligonucleotide
cggttgcaccagtggataacctcggagtgtaccaccccatgctccgattcctggc

SEQ ID NO: 375097 - DNA, 60 bp, Artificial
  Synthetic oligonucleotide
cggttgccaacatatggagcccagtgagcatgtcgtggggatacagcacaaccggtcatc

SEQ ID NO: 375098 - DNA, 55 bp, Artificial
  Synthetic oligonucleotide
cggttgccttcttgtgttccataccacggttctggttgctgaaatagtgcgcgcc

SEQ ID NO: 375099 - DNA, 60 bp, Artificial
  Synthetic oligonucleotide
cggttgcttggtcagcaagtgcatgtcatgatggcatgggctggctaacaatcggaattt

SEQ ID NO: 375100 - DNA, 60 bp, Artificial
  Synthetic oligonucleotide
cggttgcttggtcagcaagtgcttgccatgatggcattagttggttgacaattggtattt

SEQ ID NO: 375101 - DNA, 55 bp, Artificial
  Synthetic oligonucleotide
cggttggaaaccttatacgctgaactgtgcgttaagagtggtgagcagccgacgt

SEQ ID NO: 375102 - DNA, 59 bp, Artificial
  Synthetic oligonucleotide
cggttggaacacaggatcagctgttggagtgaacccagatttggcctggacacagattt

SEQ ID NO: 375103 - DNA, 54 bp, Artificial
  Synthetic oligonucleotide
cggttggaagatggtccgaaatgtaaggacggcaatgtctaaggattcccattg

SEQ ID NO: 375104 - DNA, 51 bp, Artificial
  Synthetic oligonucleotide
cggttggagcggcgcaagggaggtgcggtatgacccagacacagaccctca

SEQ ID NO: 375105 - DNA, 60 bp, Artificial
  Synthetic oligonucleotide
cggttggctgtattgtgacgcggatggctcgagatttgatagctctctgacaccgtacct

SEQ ID NO: 375106 - DNA, 58 bp, Artificial
  Synthetic oligonucleotide
cggttgggatatgaagatgggggggttaacgactctcgtatgagtgaggctctgatcg

SEQ ID NO: 375107 - DNA, 55 bp, Artificial
  Synthetic oligonucleotide
cggttggggactgtatgcgcccaccaagatgtatggaggcgcccgcaaacgctct

SEQ ID NO: 375108 - DNA, 59 bp, Artificial
  Synthetic oligonucleotide
cggttggtagatagcaaactcaacaggatcatttggtggcccttcaatgtcaatccacg

SEQ ID NO: 375109 - DNA, 55 bp, Artificial
  Synthetic oligonucleotide
cggttggtcaatggccagtaatgactggcggagcagtgtcattgcattcagctgg

SEQ ID NO: 375110 - DNA, 60 bp, Artificial
  Synthetic oligonucleotide
cggttggtgggcagccatttccttcctgtggttaaccacaggccatgcatattcatgagc

SEQ ID NO: 375111 - DNA, 52 bp, Artificial
  Synthetic oligonucleotide
cggttggtgtcggcgggaacgacattctcgcagcgtgtcacgcgcccgaacc

SEQ ID NO: 375112 - DNA, 53 bp, Artificial
  Synthetic oligonucleotide
cggttggttgcgcaatatcagctggtgtcaggaacaattcctactgaaagcat

SEQ ID NO: 375113 - DNA, 49 bp, Artificial
  Synthetic oligonucleotide
cggttgtaactttatgagtccggttcgtacgaaagggaagttcgttccc

SEQ ID NO: 375114 - DNA, 58 bp, Artificial
  Synthetic oligonucleotide
cggttgtaattgccaccaggtctcaaggtgatgttcctactatacttgcaacccttgc

SEQ ID NO: 375115 - DNA, 55 bp, Artificial
  Synthetic oligonucleotide
cggttgtctatactggctcactcaaagttcaacaaatgaagaactatgtggacag

SEQ ID NO: 375116 - DNA, 55 bp, Artificial
  Synthetic oligonucleotide
cggttgtgagatcaattgttgtgttctcccatgcccttcccacaattgacgtcct

SEQ ID NO: 375117 - DNA, 54 bp, Artificial
  Synthetic oligonucleotide
cggttgtggggtgaccaacaacccttcgtacgtcacgtgtgacaagtactgccc

SEQ ID NO: 375118 - DNA, 55 bp, Artificial
  Synthetic oligonucleotide
cggttgttacacaaaaccggatggtaagcaggatgtgtttgtattcagtccggcg

SEQ ID NO: 375119 - DNA, 55 bp, Artificial
  Synthetic oligonucleotide
cggttgttcgctgcctttatagaacatagagcgaatagcacctgtatccagagac

SEQ ID NO: 375120 - DNA, 57 bp, Artificial
  Synthetic oligonucleotide
cggttgttctgggtgagatctagcgaggatagcgtggaaaccctggacgacaattgt

SEQ ID NO: 375121 - DNA, 55 bp, Artificial
  Synthetic oligonucleotide
cggtttaaagcactataacgcaggcataggaacgattacgttctgttggagtaag

SEQ ID NO: 375122 - DNA, 60 bp, Artificial
  Synthetic oligonucleotide
cggtttacggcgccgcacaacacgtctgcgtcgagagaaaggcattgcggcactgatgcg

SEQ ID NO: 375123 - DNA, 58 bp, Artificial
  Synthetic oligonucleotide
cggtttagaaatcaaagcgcacagtaacgcaagcgctgcaagtggtgtgttcgttaac

SEQ ID NO: 375124 - DNA, 60 bp, Artificial
  Synthetic oligonucleotide
cggtttaggacgatacatcgctaaacaatgagtgaactcgctcatcatagttgggtagat

SEQ ID NO: 375125 - DNA, 58 bp, Artificial
  Synthetic oligonucleotide
cggtttattagcacgttataggaaccagtggcaagtctatagcagttttcacacaaca

SEQ ID NO: 375126 - DNA, 59 bp, Artificial
  Synthetic oligonucleotide
cggtttatttcatggggttacattagtgacgacacaaagaactcgaagcatacagcaga

SEQ ID NO: 375127 - DNA, 56 bp, Artificial
  Synthetic oligonucleotide
cggtttcaaattaaaggtgttgagttgaaatcaggctacaaagattggatactgtg

SEQ ID NO: 375128 - DNA, 52 bp, Artificial
  Synthetic oligonucleotide
cggtttcaggtaacggttacaggaggaccttccggatgtaaggaggccgcta

SEQ ID NO: 375129 - DNA, 60 bp, Artificial
  Synthetic oligonucleotide
cggtttccgctctacctattggactcagctctcattcttttatgacaatgcattgatgca

SEQ ID NO: 375130 - DNA, 59 bp, Artificial
  Synthetic oligonucleotide
cggtttccggagatcttgcacatggtgatttcaggatgagaagaggtgcctataccccc

SEQ ID NO: 375131 - DNA, 56 bp, Artificial
  Synthetic oligonucleotide
cggtttcgaagaatgtgaaggagatggtctgggtctgttttacgttgaagatcgtg

SEQ ID NO: 375132 - DNA, 55 bp, Artificial
  Synthetic oligonucleotide
cggtttcgaagtgcaaaggctgggcaaaccttggcttgttttcagcactctgtct

SEQ ID NO: 375133 - DNA, 55 bp, Artificial
  Synthetic oligonucleotide
cggtttcgctagtgggaccactatgccagcattgtgcgctattcattgtgtgcga

SEQ ID NO: 375134 - DNA, 60 bp, Artificial
  Synthetic oligonucleotide
cggtttctaaaccaatgcacaatgagtatctgatcgacgtcttcgaatccagcctgtcaa

SEQ ID NO: 375135 - DNA, 54 bp, Artificial
  Synthetic oligonucleotide
cggtttgaagtcaatttcaaatgctaaagatgttaagaagttatacgacatata

SEQ ID NO: 375136 - DNA, 60 bp, Artificial
  Synthetic oligonucleotide
cggtttgaggccaatgtaccaggctatcatacattgttttgcacacgagactttgctatg

SEQ ID NO: 375137 - DNA, 55 bp, Artificial
  Synthetic oligonucleotide
cggtttgatgcgttaaagcttctgaagaaagggatcgctggtgatgagttcacta

SEQ ID NO: 375138 - DNA, 55 bp, Artificial
  Synthetic oligonucleotide
cggtttgcgaatctgtgcttgcggatgcttcagaaactttattggcaaatgtgac

SEQ ID NO: 375139 - DNA, 56 bp, Artificial
  Synthetic oligonucleotide
cggtttgctgacctactggttactgtatcacttacccgagttaacgagatggtgaa

SEQ ID NO: 375140 - DNA, 55 bp, Artificial
  Synthetic oligonucleotide
cggtttgggattgcaacgattctcctttacagatttatcttgaatccattcttgg

SEQ ID NO: 375141 - DNA, 55 bp, Artificial
  Synthetic oligonucleotide
cggtttgtggaattcttagccatgcaggttttgcttgctagtgcacttgagcagg

SEQ ID NO: 375142 - DNA, 55 bp, Artificial
  Synthetic oligonucleotide
cggtttgttctcaaagtccagccgacacagagtatcaatttaaacgacctcctgg

SEQ ID NO: 375143 - DNA, 57 bp, Artificial
  Synthetic oligonucleotide
cggttttaatgaacacggattaggtccgaagtctgatggagagctttacattgtcaa

SEQ ID NO: 375144 - DNA, 55 bp, Artificial
  Synthetic oligonucleotide
cggttttcaagacgaaattggttcgcgatgaacaaattggcaggatcggagatca

SEQ ID NO: 375145 - DNA, 55 bp, Artificial
  Synthetic oligonucleotide
cggttttcacatggacctgaaaccttttgcaagaaccaatccattctcagggttg

SEQ ID NO: 375146 - DNA, 57 bp, Artificial
  Synthetic oligonucleotide
cggttttcatgaaacctaaattgaggacggcggcagaaatgccacgaactgctggtc

SEQ ID NO: 375147 - DNA, 55 bp, Artificial
  Synthetic oligonucleotide
cggttttcctaatgtgaatattaacagtacgagtttccaattatgggcattactc

SEQ ID NO: 375148 - DNA, 54 bp, Artificial
  Synthetic oligonucleotide
cggttttcggtgtatgttagctataaaatatattcaggcggttaggtccgaata

SEQ ID NO: 375149 - DNA, 58 bp, Artificial
  Synthetic oligonucleotide
cggttttctagtagtgatagcggtttattagatgcgtgcgtcgatttgatctttgacg

SEQ ID NO: 375150 - DNA, 55 bp, Artificial
  Synthetic oligonucleotide
cggttttgacggattatcaccgcaagtgtgggaagaaagctaagttcgtcgtgta

SEQ ID NO: 375151 - DNA, 55 bp, Artificial
  Synthetic oligonucleotide
cggttttgattggatcactgagtatgaagggcgcaccgcatggttcgtcccctcg

SEQ ID NO: 375152 - DNA, 55 bp, Artificial
  Synthetic oligonucleotide
cggttttgcaatcaaatagtgagtcccacctccggatctgttcccctggaactgc

SEQ ID NO: 375153 - DNA, 55 bp, Artificial
  Synthetic oligonucleotide
cggttttgcaatcatatagtgagttctacccctggacgtgttcccctggaactgc

SEQ ID NO: 375154 - DNA, 58 bp, Artificial
  Synthetic oligonucleotide
cggttttgggggccctacttgtgctgatgcttgggggcatcacttacactgatttggc

SEQ ID NO: 375155 - DNA, 56 bp, Artificial
  Synthetic oligonucleotide
cggttttgggttaatcatgaatgacattcaaactaaagttgatctggaaactaaga

SEQ ID NO: 375156 - DNA, 54 bp, Artificial
  Synthetic oligonucleotide
cggtttttacatcaggggaagccggcgttacgagatcgcaacgagtccgtgtct

SEQ ID NO: 375157 - DNA, 54 bp, Artificial
  Synthetic oligonucleotide
cggtttttgttcggcaccacaccaagtgcatggaggtaacgatcaacatttcgg

SEQ ID NO: 375158 - DNA, 53 bp, Artificial
  Synthetic oligonucleotide
cgtaaaaatgtggagagtttatgaatcccgaacaacttacgaatactctcggt

SEQ ID NO: 375159 - DNA, 55 bp, Artificial
  Synthetic oligonucleotide
cgtaaaacgaggtttctcccggtggctggtgggacaggcagtgttatatatgaag

SEQ ID NO: 375160 - DNA, 57 bp, Artificial
  Synthetic oligonucleotide
cgtaaaagggaacacattggagcctaagggtcagatgagggtatgctggaacgggca

SEQ ID NO: 375161 - DNA, 50 bp, Artificial
  Synthetic oligonucleotide
cgtaaaaggtgttgttagcggccataataagtgtttatttcgccgtacta

SEQ ID NO: 375162 - DNA, 54 bp, Artificial
  Synthetic oligonucleotide
cgtaaaagtgcaactcggaggaatctacctttgcattcgcctgccccgcgatcc

SEQ ID NO: 375163 - DNA, 60 bp, Artificial
  Synthetic oligonucleotide
cgtaaaatatcaacatacttacaaacaagagaataggcatttctgcaattcttattcaca

SEQ ID NO: 375164 - DNA, 59 bp, Artificial
  Synthetic oligonucleotide
cgtaaaatattgtcagttaatcgaacagacatacgctccagatactcttggttacgatc

SEQ ID NO: 375165 - DNA, 60 bp, Artificial
  Synthetic oligonucleotide
cgtaaacccaaaactactaacactgcacctgcacgcactttcaagcaagccactcataga

SEQ ID NO: 375166 - DNA, 50 bp, Artificial
  Synthetic oligonucleotide
cgtaaacccgcctagagtgctgcacgcggtgttggttgcaggaagtacat

SEQ ID NO: 375167 - DNA, 55 bp, Artificial
  Synthetic oligonucleotide
cgtaaacggaaattggatcggtacgttacacaaatggaaagagagcgtagatgcg

SEQ ID NO: 375168 - DNA, 56 bp, Artificial
  Synthetic oligonucleotide
cgtaaactgtactaacgtaaccaatagcactgacggtacctgtggcgtcgacaata

SEQ ID NO: 375169 - DNA, 53 bp, Artificial
  Synthetic oligonucleotide
cgtaaagaacttgataaacccacgcaagtcaatgcggtaaaccaaatttggga

SEQ ID NO: 375170 - DNA, 53 bp, Artificial
  Synthetic oligonucleotide
cgtaaagaaggacagagaattataccgcctttaagtgataggccaaaactagt

SEQ ID NO: 375171 - DNA, 55 bp, Artificial
  Synthetic oligonucleotide
cgtaaagagtacatctgtgatcgattcttcggcggactctgtgccccattagacg

SEQ ID NO: 375172 - DNA, 59 bp, Artificial
  Synthetic oligonucleotide
cgtaaagcacgcagagaaagcaagattatgccgtacatactacaaaaacgcgtcagagt

SEQ ID NO: 375173 - DNA, 60 bp, Artificial
  Synthetic oligonucleotide
cgtaaagcctactggcagtgatcatacaatggaacctggtgacaaatgaacgggctattc

SEQ ID NO: 375174 - DNA, 55 bp, Artificial
  Synthetic oligonucleotide
cgtaaagcgctgctcggaagagaggtataccgatattgaatacgattttgacttg

SEQ ID NO: 375175 - DNA, 55 bp, Artificial
  Synthetic oligonucleotide
cgtaaagcgttaggagtgttcaggtgtattggatagagtggattgagaatggaga

SEQ ID NO: 375176 - DNA, 55 bp, Artificial
  Synthetic oligonucleotide
cgtaaagcttacatcctccaccaagtggagttttacatacaggaaatctgacgcg

SEQ ID NO: 375177 - DNA, 55 bp, Artificial
  Synthetic oligonucleotide
cgtaaaggatcaaattatccggttgccaaaggatcgtacaacaatacaagcggag

SEQ ID NO: 375178 - DNA, 51 bp, Artificial
  Synthetic oligonucleotide
cgtaaaggtggcggaaagggaaaaggttccaacgatgaaggaacaaagcga

SEQ ID NO: 375179 - DNA, 55 bp, Artificial
  Synthetic oligonucleotide
cgtaaagtggtccaacgatatatagttgtcggtttcgtttaatcgcctcgcgcac

SEQ ID NO: 375180 - DNA, 49 bp, Artificial
  Synthetic oligonucleotide
cgtaaataaccgggttggttaggggtaggtctgtttctgtttggaacac

SEQ ID NO: 375181 - DNA, 55 bp, Artificial
  Synthetic oligonucleotide
cgtaaataagtatcattattcgcggaggcatatctcaggggtcgtttcgatctgc

SEQ ID NO: 375182 - DNA, 59 bp, Artificial
  Synthetic oligonucleotide
cgtaaatactcagcaaataaaacaaatgtggaacaagtcattatgcaataagttcgctg

SEQ ID NO: 375183 - DNA, 59 bp, Artificial
  Synthetic oligonucleotide
cgtaaatatataacgcctaatatcgctaagtatttaagacatgcaggacatgaagttgc

SEQ ID NO: 375184 - DNA, 55 bp, Artificial
  Synthetic oligonucleotide
cgtaaatccatggtttatgcagtctaaatgtatatagtatgaacagccacagtcc

SEQ ID NO: 375185 - DNA, 54 bp, Artificial
  Synthetic oligonucleotide
cgtaaatggtccacttatgaggaagccccctttcatcgtatagggttgaaatgg

SEQ ID NO: 375186 - DNA, 57 bp, Artificial
  Synthetic oligonucleotide
cgtaaattcggcaaacacttacgagataactgcacaagtatggacatataccgggac

SEQ ID NO: 375187 - DNA, 55 bp, Artificial
  Synthetic oligonucleotide
cgtaaattgatctggtgtgattcaggattaatgttgtgtgctattaatcgcggag

SEQ ID NO: 375188 - DNA, 52 bp, Artificial
  Synthetic oligonucleotide
cgtaaattttctaagctcctaagaagtttagaaatcgagtacgaggaaatag

SEQ ID NO: 375189 - DNA, 53 bp, Artificial
  Synthetic oligonucleotide
cgtaacaacaatccaaacccgcctagccgcaggaatggttggtggtacaaccc

SEQ ID NO: 375190 - DNA, 60 bp, Artificial
  Synthetic oligonucleotide
cgtaacaacattaaagggaacctcaaccaacttatggatatgccatgacaacattgatga

SEQ ID NO: 375191 - DNA, 50 bp, Artificial
  Synthetic oligonucleotide
cgtaacaaccgttgacctcatcattgggtacacagacagatttgtctgcg

SEQ ID NO: 375192 - DNA, 55 bp, Artificial
  Synthetic oligonucleotide
cgtaacaaggcagttgaaagctggcaagccaccaggcatggttttaaaccgggga

SEQ ID NO: 375193 - DNA, 54 bp, Artificial
  Synthetic oligonucleotide
cgtaacacggcaggtgggacttccacctattacaacttggtaggggatgtagac

SEQ ID NO: 375194 - DNA, 60 bp, Artificial
  Synthetic oligonucleotide
cgtaacactgaatggcttgctgaaaccgcatggaaatgggctaagagagttctggattgg

SEQ ID NO: 375195 - DNA, 55 bp, Artificial
  Synthetic oligonucleotide
cgtaacagagggtagcagcttagaccgtgaagcatatagtcgcggaacttcggta

SEQ ID NO: 375196 - DNA, 60 bp, Artificial
  Synthetic oligonucleotide
cgtaacaggtgcagccctgttgccgcttgtgaagggtgcattgaatctcatcacccagaa

SEQ ID NO: 375197 - DNA, 55 bp, Artificial
  Synthetic oligonucleotide
cgtaacagtaaatccaggtccgttcgcccaaaccaggtatgctccagtcaattgg

SEQ ID NO: 375198 - DNA, 52 bp, Artificial
  Synthetic oligonucleotide
cgtaacagtatgtgggagatccgcagtagtctttgacacccagcaagggtac

SEQ ID NO: 375199 - DNA, 55 bp, Artificial
  Synthetic oligonucleotide
cgtaacatggtacagggattaccagtttttcttaccccaggatcagcacaattcc

SEQ ID NO: 375200 - DNA, 56 bp, Artificial
  Synthetic oligonucleotide
cgtaacattaacaagagggcaaaacacagtcaaagtatcagggaaaggcgggcata

SEQ ID NO: 375201 - DNA, 60 bp, Artificial
  Synthetic oligonucleotide
cgtaacattgatgagagatcctcaagctttaggatctgagaggcaggctaaaattactag

SEQ ID NO: 375202 - DNA, 58 bp, Artificial
  Synthetic oligonucleotide
cgtaacatttatgagactgaattttttatgtccaggaaattacaccgatatattgata

SEQ ID NO: 375203 - DNA, 59 bp, Artificial
  Synthetic oligonucleotide
cgtaaccaacgggcaacaagatagatctttcatatatcaagaatcatttgaggagctag

SEQ ID NO: 375204 - DNA, 54 bp, Artificial
  Synthetic oligonucleotide
cgtaaccccacggccacctgtgtcttcaaagtgctggccccgtaccgcccagag

SEQ ID NO: 375205 - DNA, 55 bp, Artificial
  Synthetic oligonucleotide
cgtaaccctagtggttttatgcttacaactagattatgacgttgaggagtgcctt

SEQ ID NO: 375206 - DNA, 55 bp, Artificial
  Synthetic oligonucleotide
cgtaaccgcgctcccacattacattgcacgcaaacttgatcaggttagttacgca

SEQ ID NO: 375207 - DNA, 52 bp, Artificial
  Synthetic oligonucleotide
cgtaaccgtagggcttcagatcgttacaccccagaaaacgataaactacaac

SEQ ID NO: 375208 - DNA, 50 bp, Artificial
  Synthetic oligonucleotide
cgtaaccgtcataacattggctatgttgatgtaccaaacagtaaatggtg

SEQ ID NO: 375209 - DNA, 59 bp, Artificial
  Synthetic oligonucleotide
cgtaaccgttgaatcgtaacacgtggcactctcataagtcaggattgtttccatatgtg

SEQ ID NO: 375210 - DNA, 55 bp, Artificial
  Synthetic oligonucleotide
cgtaacctaggtgtcacactagaccagcgctggctgtaatatagcgcttatgcca

SEQ ID NO: 375211 - DNA, 57 bp, Artificial
  Synthetic oligonucleotide
cgtaacctgtacgacagattaaatttggttcgctcaaacctccttgaggctatgcga

SEQ ID NO: 375212 - DNA, 55 bp, Artificial
  Synthetic oligonucleotide
cgtaacgctgtctgaattgggacgagaatgcaaactcatagcgagatgacaggac

SEQ ID NO: 375213 - DNA, 51 bp, Artificial
  Synthetic oligonucleotide
cgtaacgcttgacacgaaagcgggcgacgcttaggctagcccacagaacga

SEQ ID NO: 375214 - DNA, 55 bp, Artificial
  Synthetic oligonucleotide
cgtaacggctacatcatgatcagatgcaattagttgcacatagcagcttctggtc

SEQ ID NO: 375215 - DNA, 54 bp, Artificial
  Synthetic oligonucleotide
cgtaacgggcaactctgcagcggaaccgactactttgggtgtccgtgtttctct

SEQ ID NO: 375216 - DNA, 54 bp, Artificial
  Synthetic oligonucleotide
cgtaacggtgagaggtaaaagccaggtctatggccgggtacgcattgacggaac

SEQ ID NO: 375217 - DNA, 53 bp, Artificial
  Synthetic oligonucleotide
cgtaacggttagcatagcgagtagcaactcagcaacgtcatgcacaatggccc

SEQ ID NO: 375218 - DNA, 56 bp, Artificial
  Synthetic oligonucleotide
cgtaacgttctaattagaataaatcaccttaacaatatgccttctttcagtgctaa

SEQ ID NO: 375219 - DNA, 55 bp, Artificial
  Synthetic oligonucleotide
cgtaacgtttaatggcgttaatattcaaggcttttccacagctagtgcggactta

SEQ ID NO: 375220 - DNA, 57 bp, Artificial
  Synthetic oligonucleotide
cgtaactcgtatggcgggcaaggctctaccaagaggcgcaaagtcgaaatattcacg

SEQ ID NO: 375221 - DNA, 55 bp, Artificial
  Synthetic oligonucleotide
cgtaactgatgccgttcataggtctagccacagaaaccaacgtaggtctaaatcc

SEQ ID NO: 375222 - DNA, 60 bp, Artificial
  Synthetic oligonucleotide
cgtaactgccaatagtacagttgttgatgttgtgcatggtcaattagaaccaactaacga

SEQ ID NO: 375223 - DNA, 55 bp, Artificial
  Synthetic oligonucleotide
cgtaactgccagtgtagcatgtctcaaagtaattcacactagccctgttgtagca

SEQ ID NO: 375224 - DNA, 59 bp, Artificial
  Synthetic oligonucleotide
cgtaacttagatccataatcatttactcacaatgtgtcatgttgttaaccctagaatta

SEQ ID NO: 375225 - DNA, 56 bp, Artificial
  Synthetic oligonucleotide
cgtaacttttcgtatctacacgtaccacctacggctttatgcgctatccaccatac

SEQ ID NO: 375226 - DNA, 55 bp, Artificial
  Synthetic oligonucleotide
cgtaagaaaatcccagtctgaatccgtgaacgagtccagactttgaagctcagga

SEQ ID NO: 375227 - DNA, 60 bp, Artificial
  Synthetic oligonucleotide
cgtaagaaaatgcaggcagagcttcagaatcttcgtgagcagaaccgtttgattagaaac

SEQ ID NO: 375228 - DNA, 55 bp, Artificial
  Synthetic oligonucleotide
cgtaagaacatcccagtcgaatcccgtgacgtagtccagactttgaagctcaggg

SEQ ID NO: 375229 - DNA, 52 bp, Artificial
  Synthetic oligonucleotide
cgtaagaaggcttggagtgacgctatggttgttctggcgtttaccgacgatg

SEQ ID NO: 375230 - DNA, 52 bp, Artificial
  Synthetic oligonucleotide
cgtaagacaattgcaaatgagtaatggccttccaattagcattggacgccct

SEQ ID NO: 375231 - DNA, 60 bp, Artificial
  Synthetic oligonucleotide
cgtaagaccagattcctccctgtagcaggtggaacgagcagtgtctatattgaagtatta

SEQ ID NO: 375232 - DNA, 54 bp, Artificial
  Synthetic oligonucleotide
cgtaagaccctttctaaataatgttggtcacatttaagacttgtttagtccaca

SEQ ID NO: 375233 - DNA, 55 bp, Artificial
  Synthetic oligonucleotide
cgtaagaccgataaacgctgccagttccacgaaataaatatctcatcttcaattc

SEQ ID NO: 375234 - DNA, 59 bp, Artificial
  Synthetic oligonucleotide
cgtaagaggttcaggaatgagaatacttgtgagaggcaactcccctgtgttcaactata

SEQ ID NO: 375235 - DNA, 59 bp, Artificial
  Synthetic oligonucleotide
cgtaagagtctttgaacttgagaaacttgtgtgaaatcaagggagtctgcaatgagctt

SEQ ID NO: 375236 - DNA, 54 bp, Artificial
  Synthetic oligonucleotide
cgtaagagtgtacttgcagagggtcactggtttaacgaagttcctaataaggta

SEQ ID NO: 375237 - DNA, 55 bp, Artificial
  Synthetic oligonucleotide
cgtaagatacaggagagaaaccgagaaaagatgcaggaatacatggtaaggttgc

SEQ ID NO: 375238 - DNA, 56 bp, Artificial
  Synthetic oligonucleotide
cgtaagatacctcttgcgggtttctgtctattgcccaaagccctatggttatagac

SEQ ID NO: 375239 - DNA, 58 bp, Artificial
  Synthetic oligonucleotide
cgtaagatcagaagcgtgcccgtagggcgctgcttgtccctccctgcgttttcaacgc

SEQ ID NO: 375240 - DNA, 55 bp, Artificial
  Synthetic oligonucleotide
cgtaagatggtatgatcgtgccttattaggaatataacagacgggtctcaccggg

SEQ ID NO: 375241 - DNA, 56 bp, Artificial
  Synthetic oligonucleotide
cgtaagattggtgaccgatcgttggtaaaagatacggctgtattaaagcacgccta

SEQ ID NO: 375242 - DNA, 55 bp, Artificial
  Synthetic oligonucleotide
cgtaagccggtattcaagccggaacgttggcttgatcaaccggagtcagatgaag

SEQ ID NO: 375243 - DNA, 55 bp, Artificial
  Synthetic oligonucleotide
cgtaagcgatcggggccgcataggtgggcacacactcgggccgtcccctattcgt

SEQ ID NO: 375244 - DNA, 55 bp, Artificial
  Synthetic oligonucleotide
cgtaagcgtactagcgacttaaagcttccagctacggatattttgtacggtccta

SEQ ID NO: 375245 - DNA, 60 bp, Artificial
  Synthetic oligonucleotide
cgtaagctagagatgacaatagatagcggttttgaggcaagtacatgcgaggtggagtct

SEQ ID NO: 375246 - DNA, 60 bp, Artificial
  Synthetic oligonucleotide
cgtaagctgattacggacgcattgcagaacggcgggattatgaacctgcctatgacgcag

SEQ ID NO: 375247 - DNA, 55 bp, Artificial
  Synthetic oligonucleotide
cgtaaggacgttccgtccgactacttcgatcgtgtcaacgaattccgagcaagcc

SEQ ID NO: 375248 - DNA, 55 bp, Artificial
  Synthetic oligonucleotide
cgtaaggcgtgggacgttctcagtgatttctgctcggcgatgcgctgtatgccgg

SEQ ID NO: 375249 - DNA, 59 bp, Artificial
  Synthetic oligonucleotide
cgtaagggtaacgtttatgagctaatggaattggcaccattcattagcgttgatggaca

SEQ ID NO: 375250 - DNA, 52 bp, Artificial
  Synthetic oligonucleotide
cgtaaggtcacaaaagacatatgagactatgcatttcctagagactgtattc

SEQ ID NO: 375251 - DNA, 59 bp, Artificial
  Synthetic oligonucleotide
cgtaagtacagaaaacctaagaagaatgcaagaggcaggcttaggcctggccaatgcaa

SEQ ID NO: 375252 - DNA, 58 bp, Artificial
  Synthetic oligonucleotide
cgtaagtacattattactgatggggaatcaactgtgcgttttcatagttgtacccatg

SEQ ID NO: 375253 - DNA, 50 bp, Artificial
  Synthetic oligonucleotide
cgtaagtccatagctatctatgagtcccatggagcacgtgtgctcacggt

SEQ ID NO: 375254 - DNA, 58 bp, Artificial
  Synthetic oligonucleotide
cgtaagtgcaattttgcaaggaagtgtgctttatatgaggaaatatacaagaaatacg

SEQ ID NO: 375255 - DNA, 54 bp, Artificial
  Synthetic oligonucleotide
cgtaagttacacacttataattggatgatgggtaccaacttgtcaagtttcggg

SEQ ID NO: 375256 - DNA, 55 bp, Artificial
  Synthetic oligonucleotide
cgtaagttccggtcacgtgcttccggtcacgtgcttccggtcatgtgacttccgg

SEQ ID NO: 375257 - DNA, 58 bp, Artificial
  Synthetic oligonucleotide
cgtaagttttgcaaataagcgtcatcctttattgatatcgcacgataagggtttgcga

SEQ ID NO: 375258 - DNA, 55 bp, Artificial
  Synthetic oligonucleotide
cgtaataatgattgtgggatgcttcttacttgccaactgagtggtaaaatgaagg

SEQ ID NO: 375259 - DNA, 52 bp, Artificial
  Synthetic oligonucleotide
cgtaataccgtcatcagtctggaatgtaggcaaatacgtgtgtgttagacca

SEQ ID NO: 375260 - DNA, 57 bp, Artificial
  Synthetic oligonucleotide
cgtaatagtttgataagacggcaatcacttttcaagcgtaatgataataaacgacga

SEQ ID NO: 375261 - DNA, 57 bp, Artificial
  Synthetic oligonucleotide
cgtaatagtttgttaagacgacagccagttgtcaagcgtaatgataacaaacgacga

SEQ ID NO: 375262 - DNA, 55 bp, Artificial
  Synthetic oligonucleotide
cgtaatcaatgtctggacatcttgcgtgagtacggaagaagtagacgaaacggat

SEQ ID NO: 375263 - DNA, 54 bp, Artificial
  Synthetic oligonucleotide
cgtaatccacttcactaacgaacgcacgacgctctctcgtaatcgactctgtgc

SEQ ID NO: 375264 - DNA, 58 bp, Artificial
  Synthetic oligonucleotide
cgtaatcgacagctgtgctaccgtaaaggaccttatctctgtcagcgttaattggaac

SEQ ID NO: 375265 - DNA, 58 bp, Artificial
  Synthetic oligonucleotide
cgtaatctaaaaacctacacaccactggctgtctagtggactctagctggtagagaaa

SEQ ID NO: 375266 - DNA, 60 bp, Artificial
  Synthetic oligonucleotide
cgtaatctatcgcttcctcacgagcggagactctcagacgttctcatacacttttgactt

SEQ ID NO: 375267 - DNA, 55 bp, Artificial
  Synthetic oligonucleotide
cgtaatctccgtaggatttgatgagtcagatgtctcagacatctattcggtatct

SEQ ID NO: 375268 - DNA, 55 bp, Artificial
  Synthetic oligonucleotide
cgtaatgaaaccgcaacgaaattgacagattctcgcattattcccgtgcagatgg

SEQ ID NO: 375269 - DNA, 56 bp, Artificial
  Synthetic oligonucleotide
cgtaatgattgacttagcaaagactgttctggaaatagagatgaaccaaagaagtg

SEQ ID NO: 375270 - DNA, 57 bp, Artificial
  Synthetic oligonucleotide
cgtaatgcactcgatggtaccactaatgaaagacttaaaggtatcaggaggaacttc

SEQ ID NO: 375271 - DNA, 59 bp, Artificial
  Synthetic oligonucleotide
cgtaatgccagtgggtgctgcggaaaaacaggtatgatccttccaggggtatggatcga

SEQ ID NO: 375272 - DNA, 60 bp, Artificial
  Synthetic oligonucleotide
cgtaatggcaaatactcatgcatttataaggatgagtactttaatgaaccagatagaagg

SEQ ID NO: 375273 - DNA, 53 bp, Artificial
  Synthetic oligonucleotide
cgtaatgtaaagaaatccgatggtactgtacaaccttttgacccgtcacgtct

SEQ ID NO: 375274 - DNA, 57 bp, Artificial
  Synthetic oligonucleotide
cgtaatgtacgatttggagacgtggaccagttataaccattatacatcgtcaaatta

SEQ ID NO: 375275 - DNA, 59 bp, Artificial
  Synthetic oligonucleotide
cgtaatgtggttgacaatatagatggtagcgatgtggaaatagtttggaaagagttgat

SEQ ID NO: 375276 - DNA, 56 bp, Artificial
  Synthetic oligonucleotide
cgtaatgtttctaatggtcagaccaaaaagactcgcgcccttgattatgaaaccac

SEQ ID NO: 375277 - DNA, 55 bp, Artificial
  Synthetic oligonucleotide
cgtaattatccccgtcgtgtcagtgggcaatttaagcgtaaattacgcccataca

SEQ ID NO: 375278 - DNA, 56 bp, Artificial
  Synthetic oligonucleotide
cgtaattatgtcgaagcgtcccgccgatatagtgatttcaactcccgcctccaaag

SEQ ID NO: 375279 - DNA, 58 bp, Artificial
  Synthetic oligonucleotide
cgtaattattcacgtaatacttcgataagacgtcaatcagttttcaagcgtaatgaca

SEQ ID NO: 375280 - DNA, 55 bp, Artificial
  Synthetic oligonucleotide
cgtaattgatagcaccaagcaaataccaaaacagctgtatgatggctatccagtc

SEQ ID NO: 375281 - DNA, 54 bp, Artificial
  Synthetic oligonucleotide
cgtaatttaatatccgattatgacaaattatttcttatgtttaaaggattgata

SEQ ID NO: 375282 - DNA, 55 bp, Artificial
  Synthetic oligonucleotide
cgtacaaacttcaacgagatagagtgtattacatgcttggtgatgcttatcaagc

SEQ ID NO: 375283 - DNA, 55 bp, Artificial
  Synthetic oligonucleotide
cgtacaaagaagtgcaaatgctttatatgtggtgaaccaggacattttgctcgag

SEQ ID NO: 375284 - DNA, 55 bp, Artificial
  Synthetic oligonucleotide
cgtacaaagcgtccatcgcgtttattagtgccatgcatgtaggctcgtcttcgca

SEQ ID NO: 375285 - DNA, 55 bp, Artificial
  Synthetic oligonucleotide
cgtacaacaatacgagcggagagcaaatgctaataatttggggagtgcaccatcc

SEQ ID NO: 375286 - DNA, 55 bp, Artificial
  Synthetic oligonucleotide
cgtacaacactttcgatagaataggtgtgcctatactgatagcgtgcgtgaccac

SEQ ID NO: 375287 - DNA, 56 bp, Artificial
  Synthetic oligonucleotide
cgtacaacccagacaacgttaactggggcaccatggatttaacacgcagcaagccg

SEQ ID NO: 375288 - DNA, 55 bp, Artificial
  Synthetic oligonucleotide
cgtacaagaaatcctagaggaaggaagaatctggattggcaatcaatggttcagg

SEQ ID NO: 375289 - DNA, 52 bp, Artificial
  Synthetic oligonucleotide
cgtacaagggaaaaaggggatacaacaattacaatcttgggaatattggacg

SEQ ID NO: 375290 - DNA, 55 bp, Artificial
  Synthetic oligonucleotide
cgtacaatatcttgatttatccaagcaatgcggctattgttcgtgacgctagatt

SEQ ID NO: 375291 - DNA, 55 bp, Artificial
  Synthetic oligonucleotide
cgtacaatccgttcactctaacaacttgcgtcttgatcgtacgaccgactagacg

SEQ ID NO: 375292 - DNA, 55 bp, Artificial
  Synthetic oligonucleotide
cgtacaatggtgagacaccgaacgcaactactggttattacactacaactaacta

SEQ ID NO: 375293 - DNA, 57 bp, Artificial
  Synthetic oligonucleotide
cgtacacaatacagaactcgcttcgtccactagtgaaaactcggttgagacccaaga

SEQ ID NO: 375294 - DNA, 60 bp, Artificial
  Synthetic oligonucleotide
cgtacacacaactctcgtcaagataagagttttccacagagcaaaacacattagagcttg

SEQ ID NO: 375295 - DNA, 53 bp, Artificial
  Synthetic oligonucleotide
cgtacacactacaaacagacgtgcactccttaccacgaactatctgcatatcg

SEQ ID NO: 375296 - DNA, 60 bp, Artificial
  Synthetic oligonucleotide
cgtacacagacttataacaactgctgggagaatctttggaagtgctgaggccggtgtaga

SEQ ID NO: 375297 - DNA, 56 bp, Artificial
  Synthetic oligonucleotide
cgtacacataatgtattcgaggtacagaagttacattgtgcaacattatttcgtcg

SEQ ID NO: 375298 - DNA, 55 bp, Artificial
  Synthetic oligonucleotide
cgtacaccaccaacttggcgataagtctggcccacagtgacagaactctatggga

SEQ ID NO: 375299 - DNA, 60 bp, Artificial
  Synthetic oligonucleotide
cgtacaccatcatatgagcaagtgacaattattgctctagaaggcaattgcatgcttgta

SEQ ID NO: 375300 - DNA, 57 bp, Artificial
  Synthetic oligonucleotide
cgtacacgaggaatgattttgataggagagagcttcctgagttacccggggtccaga

SEQ ID NO: 375301 - DNA, 56 bp, Artificial
  Synthetic oligonucleotide
cgtacacgcgcgtcggtttgtctaacactacatccgtcacgttatacccgctttca

SEQ ID NO: 375302 - DNA, 59 bp, Artificial
  Synthetic oligonucleotide
cgtacacgcgtcgaactccacaacttgattgacaacttgaacctcgcaacaaatgaaga

SEQ ID NO: 375303 - DNA, 60 bp, Artificial
  Synthetic oligonucleotide
cgtacacggtcttaggtgtatgctagccattaagtatctacaactagtcgaagatacata

SEQ ID NO: 375304 - DNA, 55 bp, Artificial
  Synthetic oligonucleotide
cgtacacggtgtctcgactgtagggactgggctacccacaacggcaggtgtgcac

SEQ ID NO: 375305 - DNA, 55 bp, Artificial
  Synthetic oligonucleotide
cgtacactcaatcatgacgggagagtcgtatggcgagagtgtcaagcaggcggtg

SEQ ID NO: 375306 - DNA, 60 bp, Artificial
  Synthetic oligonucleotide
cgtacactgtggactttccaccgataggtcctttggatccacctgtgacagtgacactga

SEQ ID NO: 375307 - DNA, 54 bp, Artificial
  Synthetic oligonucleotide
cgtacagaagcagatagaggtttttttataacgaccttgccaacacgtgtacgg

SEQ ID NO: 375308 - DNA, 60 bp, Artificial
  Synthetic oligonucleotide
cgtacagcaaagtctctatagttgctcaagacttaatgagccagatggtctcactatacc

SEQ ID NO: 375309 - DNA, 55 bp, Artificial
  Synthetic oligonucleotide
cgtacagcagccatggcattagaaggacctgggaaagaacataattgcagggtcc

SEQ ID NO: 375310 - DNA, 55 bp, Artificial
  Synthetic oligonucleotide
cgtacagcggccctgcgtaacgaaaggcggtcagacagttgattactcgcgcaaa

SEQ ID NO: 375311 - DNA, 50 bp, Artificial
  Synthetic oligonucleotide
cgtacagctaaccttgcgcttgagattgactccgctactgaggtaggtcg

SEQ ID NO: 375312 - DNA, 60 bp, Artificial
  Synthetic oligonucleotide
cgtacaggaggcagcaagcctatgagctatgacgtatggaatttcggtgacagcaacggt

SEQ ID NO: 375313 - DNA, 60 bp, Artificial
  Synthetic oligonucleotide
cgtacaggcccatgtaccgaaagcccagaatatacagaatgtatcgaagccctgatgttc

SEQ ID NO: 375314 - DNA, 56 bp, Artificial
  Synthetic oligonucleotide
cgtacaggctgtggtgaagtacgtgcgaagaatgcgtcattcgagtgttccgaccg

SEQ ID NO: 375315 - DNA, 55 bp, Artificial
  Synthetic oligonucleotide
cgtacaggctttatcaattattcttgactgaacattcatctcattgcctgactct

SEQ ID NO: 375316 - DNA, 53 bp, Artificial
  Synthetic oligonucleotide
cgtacagggagccttgaaccgagccattaccggagcccacaaggtaatccggg

SEQ ID NO: 375317 - DNA, 51 bp, Artificial
  Synthetic oligonucleotide
cgtacagtacataacaccgtatcgccactgtcgtcactagaaccacctccg

SEQ ID NO: 375318 - DNA, 59 bp, Artificial
  Synthetic oligonucleotide
cgtacagtcaatgtcagacaagctcgggatgtatctcccggatatgtccaagcagtctg

SEQ ID NO: 375319 - DNA, 58 bp, Artificial
  Synthetic oligonucleotide
cgtacagtggaacttcatgaagatgctggaaccgacgttcggggagatcactccggaa

SEQ ID NO: 375320 - DNA, 60 bp, Artificial
  Synthetic oligonucleotide
cgtacatagctgagacagcacttcgcaagttatacactgacaggggagcggagacaagtg

SEQ ID NO: 375321 - DNA, 58 bp, Artificial
  Synthetic oligonucleotide
cgtacatcaattccagagtatcccttactagctcctctgtcccgttgaagtcgaatgg

SEQ ID NO: 375322 - DNA, 50 bp, Artificial
  Synthetic oligonucleotide
cgtacatcgacgtgaaggagaaccagcctgtcgagctagagattcccttc

SEQ ID NO: 375323 - DNA, 55 bp, Artificial
  Synthetic oligonucleotide
cgtacatgagtggaagaatatcaaatccttcctaacggatcagactttctcctac

SEQ ID NO: 375324 - DNA, 57 bp, Artificial
  Synthetic oligonucleotide
cgtacatggctacgacaccgtcctctacgtgggcgctggcgatggacggacggttac

SEQ ID NO: 375325 - DNA, 60 bp, Artificial
  Synthetic oligonucleotide
cgtacatggtctacggtgcatgctcgctgtaaaatacttgcagttagttgagcagacata

SEQ ID NO: 375326 - DNA, 53 bp, Artificial
  Synthetic oligonucleotide
cgtacatgtatttctaataagtacgagcctcttagtattaattttccttccct

SEQ ID NO: 375327 - DNA, 60 bp, Artificial
  Synthetic oligonucleotide
cgtacatgtctgcaagtcagggacacttgacttgcggatcgttccaatggcttgtaataa

SEQ ID NO: 375328 - DNA, 59 bp, Artificial
  Synthetic oligonucleotide
cgtacattaacttctgatactagacttgtaggaatgttgaaatatggtggaagagtatg

SEQ ID NO: 375329 - DNA, 55 bp, Artificial
  Synthetic oligonucleotide
cgtacattgataaggaattcagcggaacgaatgaaatgaccatgacaagggaaag

SEQ ID NO: 375330 - DNA, 55 bp, Artificial
  Synthetic oligonucleotide
cgtacatttacaaatgcacaaggcgagcgcgaggcagactttataaatgtcatcg

SEQ ID NO: 375331 - DNA, 52 bp, Artificial
  Synthetic oligonucleotide
cgtacatttcagtgacggcgaaaggggggactacgtcttcctatacgccccc

SEQ ID NO: 375332 - DNA, 53 bp, Artificial
  Synthetic oligonucleotide
cgtaccaaccctgattctcgtcggatcatcgtttgtgcatgggcacctcaact

SEQ ID NO: 375333 - DNA, 55 bp, Artificial
  Synthetic oligonucleotide
cgtaccaatacaccgtgcctcaccagaactacgttgtcctgttcatctgcgagaa

SEQ ID NO: 375334 - DNA, 55 bp, Artificial
  Synthetic oligonucleotide
cgtaccaccgctagtggatttgcggtcagttttccgagcgtcgcctccttaggcg

SEQ ID NO: 375335 - DNA, 55 bp, Artificial
  Synthetic oligonucleotide
cgtaccacctacggctttatgcgctatccaccatacttggatgtacgacttacct

SEQ ID NO: 375336 - DNA, 59 bp, Artificial
  Synthetic oligonucleotide
cgtaccacggcacaatcgcgctctcagtgcaatcatgcggggccttgcttgtcatccca

SEQ ID NO: 375337 - DNA, 55 bp, Artificial
  Synthetic oligonucleotide
cgtaccactgtacatagattactcatggctatgctagatgtgcaagagcagcaaa

SEQ ID NO: 375338 - DNA, 60 bp, Artificial
  Synthetic oligonucleotide
cgtaccagcaatgtgtctatacctttaaatacaggatttgatactcctgttatgtctggc

SEQ ID NO: 375339 - DNA, 60 bp, Artificial
  Synthetic oligonucleotide
cgtaccagcagaggggacagacagggttatacaagttgtacgaagagcttgcagagctat

SEQ ID NO: 375340 - DNA, 55 bp, Artificial
  Synthetic oligonucleotide
cgtaccagtaccggagggttttctcattactcatagtgaggcagaagagatcccc

SEQ ID NO: 375341 - DNA, 58 bp, Artificial
  Synthetic oligonucleotide
cgtaccattaggacgagtacttaacaatgcaactgtttcacttcttccttatgcacca

SEQ ID NO: 375342 - DNA, 60 bp, Artificial
  Synthetic oligonucleotide
cgtacccagatgttcaatagcaaacctaatcatgaatatagcaacgtgcttaccgacagg

SEQ ID NO: 375343 - DNA, 54 bp, Artificial
  Synthetic oligonucleotide
cgtaccccgagggcagttcggtgtcggctgggccgtactccatcaaaatgggcg

SEQ ID NO: 375344 - DNA, 60 bp, Artificial
  Synthetic oligonucleotide
cgtacccgccagacatcgcactactcaagcagatgatctacctgtttctccaggttccag

SEQ ID NO: 375345 - DNA, 55 bp, Artificial
  Synthetic oligonucleotide
cgtaccgacttgaataagctacaatatacccttaacgtatcaacaatacacctac

SEQ ID NO: 375346 - DNA, 52 bp, Artificial
  Synthetic oligonucleotide
cgtaccgcctttcccggcgttaacgggacataaccacacgatggaccttcac

SEQ ID NO: 375347 - DNA, 60 bp, Artificial
  Synthetic oligonucleotide
cgtaccgctcagagtaaccgctagcatcacggacgacagtcaatcgctctgcccaattga

SEQ ID NO: 375348 - DNA, 59 bp, Artificial
  Synthetic oligonucleotide
cgtaccggagtagacctcgagacacttcggtctctggatcagcgtctaggagaaatcac

SEQ ID NO: 375349 - DNA, 60 bp, Artificial
  Synthetic oligonucleotide
cgtacctacgaagaacacaatctatggggatccagctagaccagaggattatcctcatgt

SEQ ID NO: 375350 - DNA, 50 bp, Artificial
  Synthetic oligonucleotide
cgtacctacgggaatccctggtttcccctgatgtccagtccctcccccgt

SEQ ID NO: 375351 - DNA, 55 bp, Artificial
  Synthetic oligonucleotide
cgtacctagataagaacaaagcatatcctgttgaatgttgggttcctgatcccac

SEQ ID NO: 375352 - DNA, 55 bp, Artificial
  Synthetic oligonucleotide
cgtacctaggccatcaaggattcacagctatactatttgtattatcagtcgctct

SEQ ID NO: 375353 - DNA, 60 bp, Artificial
  Synthetic oligonucleotide
cgtacctcaacgagtcttaccactggtagagatccaataaatggcccatgccatggatta

SEQ ID NO: 375354 - DNA, 51 bp, Artificial
  Synthetic oligonucleotide
cgtacctgcgtggaatggtcacacttctgtgtccccaagcgtcaagctcga

SEQ ID NO: 375355 - DNA, 55 bp, Artificial
  Synthetic oligonucleotide
cgtacctggattagacgccacggaggtgaagtaagcatgtcacctacggccagag

SEQ ID NO: 375356 - DNA, 53 bp, Artificial
  Synthetic oligonucleotide
cgtacctggtgctcctgcttgcacagcaactgtacatgagtaactcgagccaa

SEQ ID NO: 375357 - DNA, 57 bp, Artificial
  Synthetic oligonucleotide
cgtacctgtatttctcgtctgttaatgttgaatcctaaaggaattcctccagattga

SEQ ID NO: 375358 - DNA, 55 bp, Artificial
  Synthetic oligonucleotide
cgtaccttacatcgtttctaaggcgtattatccgatgttcaatagtcgagatagg

SEQ ID NO: 375359 - DNA, 52 bp, Artificial
  Synthetic oligonucleotide
cgtaccttacgactataactttgctcaaaccaaaatgccagacggaaacggg

SEQ ID NO: 375360 - DNA, 55 bp, Artificial
  Synthetic oligonucleotide
cgtacctttcggcggccgactacgcatacaccgcgtctgacgttgccgagactac

SEQ ID NO: 375361 - DNA, 56 bp, Artificial
  Synthetic oligonucleotide
cgtacgaacaatcagtgatgtggttgcgtgatggagatttccaggacgttgtcacc

SEQ ID NO: 375362 - DNA, 60 bp, Artificial
  Synthetic oligonucleotide
cgtacgaagaggacatcgaaggaaagatgaagaggtgtggcgttcagctgctcgaagatt

SEQ ID NO: 375363 - DNA, 60 bp, Artificial
  Synthetic oligonucleotide
cgtacgaagctgtatgaagctgctcatgcagatgttcgtgggtctctgaatcattttatc

SEQ ID NO: 375364 - DNA, 51 bp, Artificial
  Synthetic oligonucleotide
cgtacgacacgtctaacgtcggggtccaggcgaactcttacggccccacgt

SEQ ID NO: 375365 - DNA, 58 bp, Artificial
  Synthetic oligonucleotide
cgtacgactccgagcttaacgcgagaatacaacgcttccagtacacctgccgagaatg

SEQ ID NO: 375366 - DNA, 54 bp, Artificial
  Synthetic oligonucleotide
cgtacgactgccccatggaggtggtaaaaggggtaagcaggtgttttgctgtcg

SEQ ID NO: 375367 - DNA, 53 bp, Artificial
  Synthetic oligonucleotide
cgtacgagccagtggggaaagccggtcgttcaacaaaactgcccaagcgttaa

SEQ ID NO: 375368 - DNA, 50 bp, Artificial
  Synthetic oligonucleotide
cgtacgatggcgaattccatttccccttcggcatatcgtattttggcggc

SEQ ID NO: 375369 - DNA, 51 bp, Artificial
  Synthetic oligonucleotide
cgtacgattcaatgtaaattagtacgttcggaatccgaacatgtccgttag

SEQ ID NO: 375370 - DNA, 60 bp, Artificial
  Synthetic oligonucleotide
cgtacgcacacattctcttgccgtacatccgattctacaagatcctaatcgtactcgtag

SEQ ID NO: 375371 - DNA, 53 bp, Artificial
  Synthetic oligonucleotide
cgtacgcccagcagacaaggggcctcctagggtgtataatcaccagcctaact

SEQ ID NO: 375372 - DNA, 59 bp, Artificial
  Synthetic oligonucleotide
cgtacgcggcaaccgtgggggccatgtggtggcgcatgtaccactcgtcgtgcttgagt

SEQ ID NO: 375373 - DNA, 55 bp, Artificial
  Synthetic oligonucleotide
cgtacgcggctcagggctacaaggtgttggtactcaacccctccgtcgctgcaac

SEQ ID NO: 375374 - DNA, 55 bp, Artificial
  Synthetic oligonucleotide
cgtacgctatatcttcaagcggaacagttaccccaacggctggatggaattcaca

SEQ ID NO: 375375 - DNA, 55 bp, Artificial
  Synthetic oligonucleotide
cgtacgctccagatactgttgggtacgatcttgtacgcgatcttattggagttgt

SEQ ID NO: 375376 - DNA, 60 bp, Artificial
  Synthetic oligonucleotide
cgtacgctgcctggtgcacgcaagtgcgcgagcagtgtctcaagtccgggttcgccccca

SEQ ID NO: 375377 - DNA, 56 bp, Artificial
  Synthetic oligonucleotide
cgtacggaaacatattagaggatcgcgtgagttggcgattcggaatttgatcgtat

SEQ ID NO: 375378 - DNA, 57 bp, Artificial
  Synthetic oligonucleotide
cgtacggaaacatccgcagtttatatacccagttggtgacgtcacgaggcacgagtg

SEQ ID NO: 375379 - DNA, 55 bp, Artificial
  Synthetic oligonucleotide
cgtacggaacaatccaaatggcacgaggaaattggcaataggcaagttgattgtc

SEQ ID NO: 375380 - DNA, 59 bp, Artificial
  Synthetic oligonucleotide
cgtacggaattgctgaaaacgagaaagttgtaatgacaactcgtggcgtcagcaagata

SEQ ID NO: 375381 - DNA, 55 bp, Artificial
  Synthetic oligonucleotide
cgtacggacctcttcgccatcccaagaactctaatattggtggagagattgcttg

SEQ ID NO: 375382 - DNA, 58 bp, Artificial
  Synthetic oligonucleotide
cgtacggatgtgttgatgtccacccttcaaccattaacggtagcagcgacctcggtca

SEQ ID NO: 375383 - DNA, 55 bp, Artificial
  Synthetic oligonucleotide
cgtacggattgataggaactagtaataattgtgtggtgttaataacgggcgagtc

SEQ ID NO: 375384 - DNA, 55 bp, Artificial
  Synthetic oligonucleotide
cgtacggcattacaaatctttggatttgcaatcaaattaaatcatctggcggaag

SEQ ID NO: 375385 - DNA, 60 bp, Artificial
  Synthetic oligonucleotide
cgtacgggacgcaaatgcacacacgcaggttgattagatcgaagacagtacatccaattt

SEQ ID NO: 375386 - DNA, 55 bp, Artificial
  Synthetic oligonucleotide
cgtacggggggggcatgactaccacaaaatttactctgagaatactgtacgacga

SEQ ID NO: 375387 - DNA, 57 bp, Artificial
  Synthetic oligonucleotide
cgtacgggtacttggacgggacaactgcaatatcagcatccgcaattgagttggaga

SEQ ID NO: 375388 - DNA, 60 bp, Artificial
  Synthetic oligonucleotide
cgtacgggtggattcttctcgtgcttagccatgctgagaccacttcagtatgccaagcgt

SEQ ID NO: 375389 - DNA, 59 bp, Artificial
  Synthetic oligonucleotide
cgtacgggtggattcttttcgtgcttagctatgctgagaccactccaatacgctaagcg

SEQ ID NO: 375390 - DNA, 54 bp, Artificial
  Synthetic oligonucleotide
cgtacggtaacggttccaaatgagctccgtctgtgtcggcaacttttacgtcca

SEQ ID NO: 375391 - DNA, 52 bp, Artificial
  Synthetic oligonucleotide
cgtacggttcatcgtctacgtcgttttgttaaccgtcgctgtgcaacgcgtg

SEQ ID NO: 375392 - DNA, 55 bp, Artificial
  Synthetic oligonucleotide
cgtacgtacaatacgccggattcgtgccaaacgaaaggtgcgcgggatgtacctg

SEQ ID NO: 375393 - DNA, 56 bp, Artificial
  Synthetic oligonucleotide
cgtacgtaggattgcagggcctcgccttaacctatatagtaaggccactcaacagg

SEQ ID NO: 375394 - DNA, 55 bp, Artificial
  Synthetic oligonucleotide
cgtacgtcatggctactaaacgcgcgcacgctagcaatgaccacgaagaggacgt

SEQ ID NO: 375395 - DNA, 54 bp, Artificial
  Synthetic oligonucleotide
cgtacgtcccgttatgtgctgcgtgttatctcaagtacgtgacaaattgtattt

SEQ ID NO: 375396 - DNA, 56 bp, Artificial
  Synthetic oligonucleotide
cgtacgtgaccacgaagacggattcggatagggtgctagcccagttcgatttgtcc

SEQ ID NO: 375397 - DNA, 49 bp, Artificial
  Synthetic oligonucleotide
cgtacgttaggtacggtaaactaagagtccttcttaaattacctccacc

SEQ ID NO: 375398 - DNA, 55 bp, Artificial
  Synthetic oligonucleotide
cgtacgttcggctacgcgcctcgcaggcccattgtctggcgcgaggcgtgcagta

SEQ ID NO: 375399 - DNA, 55 bp, Artificial
  Synthetic oligonucleotide
cgtacgttgagagggcctgatgttcctaaagggtgtgaaggcccatgtaaggttc

SEQ ID NO: 375400 - DNA, 59 bp, Artificial
  Synthetic oligonucleotide
cgtacgtttatgaccatcttactccgctgcgggactgggcccacgcgagcctgcaagac

SEQ ID NO: 375401 - DNA, 55 bp, Artificial
  Synthetic oligonucleotide
cgtactaaaaggcgtatcttgaatcacctctattcgagccgaggaagtaacgtgc

SEQ ID NO: 375402 - DNA, 55 bp, Artificial
  Synthetic oligonucleotide
cgtactacaagccgatgcagtgtgtgaacgtgaccctgtgcgaaaagtgtgctcc

SEQ ID NO: 375403 - DNA, 56 bp, Artificial
  Synthetic oligonucleotide
cgtactacaagcgctatgtcagctggtgcttatggtggctacagtacttcctgacc

SEQ ID NO: 375404 - DNA, 55 bp, Artificial
  Synthetic oligonucleotide
cgtactaccaacattacccataatgtaggtccgccttcgtctacttccagcaacg

SEQ ID NO: 375405 - DNA, 50 bp, Artificial
  Synthetic oligonucleotide
cgtactacccacatatgagttgacaaagttatactaccttaaggaagtga

SEQ ID NO: 375406 - DNA, 54 bp, Artificial
  Synthetic oligonucleotide
cgtactacgtccgcatccgcgttctacgtccaacctacgacgttccagacccca

SEQ ID NO: 375407 - DNA, 55 bp, Artificial
  Synthetic oligonucleotide
cgtactacgtctgttcccatcatttcaacaggcatattagtagttctgcgcaagg

SEQ ID NO: 375408 - DNA, 55 bp, Artificial
  Synthetic oligonucleotide
cgtactacgttggacatagctcgtatatggggcttgaggagtacgtttaattggg

SEQ ID NO: 375409 - DNA, 55 bp, Artificial
  Synthetic oligonucleotide
cgtactacttaacagagtcggcaatacacgactggcgtaatatggacttatggcc

SEQ ID NO: 375410 - DNA, 52 bp, Artificial
  Synthetic oligonucleotide
cgtactagtagttacaagggttatcacctagtacttacaagcgggtcaaacc

SEQ ID NO: 375411 - DNA, 60 bp, Artificial
  Synthetic oligonucleotide
cgtactatacagtcactgttgattgcatatgtacgatagtcgacgaattgaacggtgtgg

SEQ ID NO: 375412 - DNA, 56 bp, Artificial
  Synthetic oligonucleotide
cgtactatcatactatgtcgttttgtttgaacgccgtacttgaagcactattttaa

SEQ ID NO: 375413 - DNA, 56 bp, Artificial
  Synthetic oligonucleotide
cgtactatcatactgtgtcgttttgtttgaagtccgtactcaaagcactatttaaa

SEQ ID NO: 375414 - DNA, 55 bp, Artificial
  Synthetic oligonucleotide
cgtactattgtcacctgaagaagtaagcgagacacaagggacagagaaactgacg

SEQ ID NO: 375415 - DNA, 55 bp, Artificial
  Synthetic oligonucleotide
cgtactcagcacgtgaatctggattgctactcagtacatgggtaccgaatgaact

SEQ ID NO: 375416 - DNA, 54 bp, Artificial
  Synthetic oligonucleotide
cgtactcggtcataaaaataaccaagtgagtatgcctttaagatagttttcaaa

SEQ ID NO: 375417 - DNA, 55 bp, Artificial
  Synthetic oligonucleotide
cgtactctactagtttattcgtactttgtaactaagaaaactatcgcatagaaca

SEQ ID NO: 375418 - DNA, 56 bp, Artificial
  Synthetic oligonucleotide
cgtactctcggtgtggctccggtccctggattacacccaggtgcctcgtcaactac

SEQ ID NO: 375419 - DNA, 55 bp, Artificial
  Synthetic oligonucleotide
cgtactgcacctacctgaggaggcgatgctaccaccagggtcatattcgaacaag

SEQ ID NO: 375420 - DNA, 59 bp, Artificial
  Synthetic oligonucleotide
cgtactgccctgaattgcaatgaatccctgaacaccggctttctcgcgtccctgttcta

SEQ ID NO: 375421 - DNA, 58 bp, Artificial
  Synthetic oligonucleotide
cgtactgcgtattgttatatcgtcacgtatattgtaataccggagtacgacagtagcg

SEQ ID NO: 375422 - DNA, 58 bp, Artificial
  Synthetic oligonucleotide
cgtactgctggtctacttgaaaacctcgtcgcgatgattaaaagaaacatgaacgcgc

SEQ ID NO: 375423 - DNA, 54 bp, Artificial
  Synthetic oligonucleotide
cgtactggattgggttcgacactaccccattcatgttcgatacaatggccgggg

SEQ ID NO: 375424 - DNA, 60 bp, Artificial
  Synthetic oligonucleotide
cgtactgggtggtgcaaatgagggcacgcgtacggcactctcagtggtcacctggaacca

SEQ ID NO: 375425 - DNA, 57 bp, Artificial
  Synthetic oligonucleotide
cgtactggtattgaccgcgcttactgggagcgggtctatctgaatcggtggcgtaag

SEQ ID NO: 375426 - DNA, 52 bp, Artificial
  Synthetic oligonucleotide
cgtacttacgaaaccagtgttttctaccattccagtaggtagttcagtaccc

SEQ ID NO: 375427 - DNA, 55 bp, Artificial
  Synthetic oligonucleotide
cgtacttatcatcacacaacatttggagctgactttctatatcacaggggatcca

SEQ ID NO: 375428 - DNA, 55 bp, Artificial
  Synthetic oligonucleotide
cgtacttcactggtgtatcacaataacactaaacgcataaggtttcgtggtttat

SEQ ID NO: 375429 - DNA, 60 bp, Artificial
  Synthetic oligonucleotide
cgtacttcatcagacacgctccccggtgcttggcatgtagatcggtccaggctcacgctc

SEQ ID NO: 375430 - DNA, 58 bp, Artificial
  Synthetic oligonucleotide
cgtacttccacaagtacgaccaactggaatggctcacgatcggccacctccaagcacc

SEQ ID NO: 375431 - DNA, 56 bp, Artificial
  Synthetic oligonucleotide
cgtacttctatgcaaggctccactgttgaccagagttatttaaacgagtgcggggt

SEQ ID NO: 375432 - DNA, 50 bp, Artificial
  Synthetic oligonucleotide
cgtacttcttttcgaacgcgaacggcgttaccttttcggttccatagttc

SEQ ID NO: 375433 - DNA, 60 bp, Artificial
  Synthetic oligonucleotide
cgtacttgatgccacaagactttgtagccaagtacattgctgcagttgatcatataacat

SEQ ID NO: 375434 - DNA, 55 bp, Artificial
  Synthetic oligonucleotide
cgtacttgcgggaacggatcgacctcactgatgtctacacgcagatgggcgtagc

SEQ ID NO: 375435 - DNA, 51 bp, Artificial
  Synthetic oligonucleotide
cgtacttgcttagcaagcatgggaatgtgttgttaatagagcccaccaggc

SEQ ID NO: 375436 - DNA, 57 bp, Artificial
  Synthetic oligonucleotide
cgtactttagtacttgagacttataaatcaattgacctagacaaattgaagattgtg

SEQ ID NO: 375437 - DNA, 48 bp, Artificial
  Synthetic oligonucleotide
cgtacttttcgtaagtaagtttctgtaaaagcgtttcttgttttaatt

SEQ ID NO: 375438 - DNA, 56 bp, Artificial
  Synthetic oligonucleotide
cgtagaaaattccgtttcaggacatgtctataatgccttaatttactacaggtaca

SEQ ID NO: 375439 - DNA, 55 bp, Artificial
  Synthetic oligonucleotide
cgtagaaacaacgaaggattaactccgctaggagcatacagcaagcatagacacg

SEQ ID NO: 375440 - DNA, 54 bp, Artificial
  Synthetic oligonucleotide
cgtagaaattcttggtactaccgtagtcttcaaatctggcgtcggcctaggtaa

SEQ ID NO: 375441 - DNA, 52 bp, Artificial
  Synthetic oligonucleotide
cgtagaaccttctttgttctatggaagtccatgtaagtttgcagtctaggtg

SEQ ID NO: 375442 - DNA, 55 bp, Artificial
  Synthetic oligonucleotide
cgtagaagcaagtaaagcgatcagggatcgatgtctcggaactgcaaagaatgcc

SEQ ID NO: 375443 - DNA, 57 bp, Artificial
  Synthetic oligonucleotide
cgtagaagggaggtgatcccgtatctccctgtgatcctacggatccagcggtaacaa

SEQ ID NO: 375444 - DNA, 52 bp, Artificial
  Synthetic oligonucleotide
cgtagacaacaaggctagcgatatcgatacgtataataaagacgccaaccat

SEQ ID NO: 375445 - DNA, 52 bp, Artificial
  Synthetic oligonucleotide
cgtagacaccacatataacccactcatggacaaaggaaaaggcaacaaaata

SEQ ID NO: 375446 - DNA, 60 bp, Artificial
  Synthetic oligonucleotide
cgtagacccagtcaccaagaaggagatcagaggcaagccaagactggtgttcaactacaa

SEQ ID NO: 375447 - DNA, 56 bp, Artificial
  Synthetic oligonucleotide
cgtagaccctacggtactccaatggatttcgggcaggtgttcaacatgttcgataa

SEQ ID NO: 375448 - DNA, 55 bp, Artificial
  Synthetic oligonucleotide
cgtagacgcatcgaagggcggacgtaagtcggctcggctaatcgtatacccggac

SEQ ID NO: 375449 - DNA, 60 bp, Artificial
  Synthetic oligonucleotide
cgtagactaagtactgccggtatctacttgagcccttattctgccgtcgcgcactctcat

SEQ ID NO: 375450 - DNA, 58 bp, Artificial
  Synthetic oligonucleotide
cgtagactccatttcaaagttgaggtgaaacctgcctcattctttaagaatcctcata

SEQ ID NO: 375451 - DNA, 55 bp, Artificial
  Synthetic oligonucleotide
cgtagactgggatatgttaccgttgtgcaatgtcgtaggcgcgagtgatttgcgc

SEQ ID NO: 375452 - DNA, 51 bp, Artificial
  Synthetic oligonucleotide
cgtagagacctgagattgatggccaacgccatctgttccgctgtgcctgtc

SEQ ID NO: 375453 - DNA, 53 bp, Artificial
  Synthetic oligonucleotide
cgtagagagcttacccttcttagggttgctcccggagtctccccgcctccgta

SEQ ID NO: 375454 - DNA, 55 bp, Artificial
  Synthetic oligonucleotide
cgtagagcgcgcccctaccgcattactgcttggaaccccagagtagttaggcgtg

SEQ ID NO: 375455 - DNA, 60 bp, Artificial
  Synthetic oligonucleotide
cgtagagcggcaccttaatagagcagtgcttgtcatgcaatccatcgccacagtagtggc

SEQ ID NO: 375456 - DNA, 58 bp, Artificial
  Synthetic oligonucleotide
cgtagaggcactagttaagcaaccccctgatcgctggctctccaacgcccggatgacc

SEQ ID NO: 375457 - DNA, 60 bp, Artificial
  Synthetic oligonucleotide
cgtagaggcagagtaggtagagtgaagcccgggagatattacaggagccaggaaacagca

SEQ ID NO: 375458 - DNA, 55 bp, Artificial
  Synthetic oligonucleotide
cgtagaggcggacattcaggtcaacttacataatagacgtggtcttccacacaca

SEQ ID NO: 375459 - DNA, 55 bp, Artificial
  Synthetic oligonucleotide
cgtagaggggactgagaccatcgaagggatagaaaatgcctttatagagtctgag

SEQ ID NO: 375460 - DNA, 55 bp, Artificial
  Synthetic oligonucleotide
cgtagaggtaatttcggatacacatggagttcttttactccgtcaacgagtcgat

SEQ ID NO: 375461 - DNA, 55 bp, Artificial
  Synthetic oligonucleotide
cgtagagtaagacgaccgttacgagtattaactatagcgttatgacctacatagt

SEQ ID NO: 375462 - DNA, 57 bp, Artificial
  Synthetic oligonucleotide
cgtagatactagcctgaccattcctggtgtgatgtgtgttaactttacacccacccc

SEQ ID NO: 375463 - DNA, 55 bp, Artificial
  Synthetic oligonucleotide
cgtagatccactcacaggggcgacgctagatgataacccattcacggacatcact

SEQ ID NO: 375464 - DNA, 54 bp, Artificial
  Synthetic oligonucleotide
cgtagatcctccaatactactgtggccaaacggaggcgacgggcctgaatatac

SEQ ID NO: 375465 - DNA, 57 bp, Artificial
  Synthetic oligonucleotide
cgtagatcgaagatccttgtggatactaaggtattgacgaaggttttagaagcaagc

SEQ ID NO: 375466 - DNA, 55 bp, Artificial
  Synthetic oligonucleotide
cgtagatcgaggccgaatcttcaccgacgccaacgttagttttaatgccgtcgtc

SEQ ID NO: 375467 - DNA, 60 bp, Artificial
  Synthetic oligonucleotide
cgtagatgattctgtggttgacatctggtcatataatgcacagcttctcgttttacttga

SEQ ID NO: 375468 - DNA, 51 bp, Artificial
  Synthetic oligonucleotide
cgtagatgtagtttacgtttgagttaaagaactcgttagattttacactta

SEQ ID NO: 375469 - DNA, 59 bp, Artificial
  Synthetic oligonucleotide
cgtagatgtggagcaccagcgaatcccttccgccacagctctcccggtctagagttcgg

SEQ ID NO: 375470 - DNA, 55 bp, Artificial
  Synthetic oligonucleotide
cgtagattatgcatttgagcctgaggaggatttacccgatttcattgatgacttc

SEQ ID NO: 375471 - DNA, 55 bp, Artificial
  Synthetic oligonucleotide
cgtagattcgctctctgttcaacgctgtcgagtatctgcgagtacgattgtgcgt

SEQ ID NO: 375472 - DNA, 51 bp, Artificial
  Synthetic oligonucleotide
cgtagatttcaacgtccccacttccgtcagctctccgagtccacgactgag

SEQ ID NO: 375473 - DNA, 60 bp, Artificial
  Synthetic oligonucleotide
cgtagcaaaatcatgcgcctctgtagcaatagactgcaattgcatgattctatcggtcag

SEQ ID NO: 375474 - DNA, 55 bp, Artificial
  Synthetic oligonucleotide
cgtagcaagttacaacgaagtggacacactttcaaagcttttgactgagaaggat

SEQ ID NO: 375475 - DNA, 60 bp, Artificial
  Synthetic oligonucleotide
cgtagcaatgcagcaagtgtagcaaatgaaatagcacacacaccggatttttcagaatat

SEQ ID NO: 375476 - DNA, 58 bp, Artificial
  Synthetic oligonucleotide
cgtagcacagcggggtccggggtgtggtgtcttgcgcttcgaggtgatcccctcagcg

SEQ ID NO: 375477 - DNA, 60 bp, Artificial
  Synthetic oligonucleotide
cgtagcacgccagtctactgaaactggaactgctggttcgaatccagatcccgcaaccaa

SEQ ID NO: 375478 - DNA, 60 bp, Artificial
  Synthetic oligonucleotide
cgtagcagaggaatatatctcatatggtggagaaaggaaaattctctgtatccaggcagc

SEQ ID NO: 375479 - DNA, 54 bp, Artificial
  Synthetic oligonucleotide
cgtagcagggtttagcgtcctagctgcccggacaacccgtttacctcgaaatgc

SEQ ID NO: 375480 - DNA, 60 bp, Artificial
  Synthetic oligonucleotide
cgtagcagtaatccaagtaggcggcgcgaacattctagacattacagctgatccaacaac

SEQ ID NO: 375481 - DNA, 59 bp, Artificial
  Synthetic oligonucleotide
cgtagcagttatacaggttggtggcccagatatacttgatataacagctgatccaacga

SEQ ID NO: 375482 - DNA, 59 bp, Artificial
  Synthetic oligonucleotide
cgtagcagttttttaaatcgcttgtccgctaataagcgtcatgatggcaaacgtcgagc

SEQ ID NO: 375483 - DNA, 55 bp, Artificial
  Synthetic oligonucleotide
cgtagcataagtggtgtttgcaggttctgttagaagattctgggaaagagaagac

SEQ ID NO: 375484 - DNA, 55 bp, Artificial
  Synthetic oligonucleotide
cgtagccaaggttttcgacgaacgtcaattgttaaacgacatgatggtaagcgtc

SEQ ID NO: 375485 - DNA, 54 bp, Artificial
  Synthetic oligonucleotide
cgtagccaatttagtttcgacgtggtcaacaagctcggtcacggaaattgggaa

SEQ ID NO: 375486 - DNA, 50 bp, Artificial
  Synthetic oligonucleotide
cgtagccagaatcttaaggctcatctgaccatgcagactctgctgatact

SEQ ID NO: 375487 - DNA, 55 bp, Artificial
  Synthetic oligonucleotide
cgtagccagtgggtatgacttcgaaaaagagggatactctttggtgggagtagac

SEQ ID NO: 375488 - DNA, 57 bp, Artificial
  Synthetic oligonucleotide
cgtagccatagaaatttgtggacacaaggtcataggttcagtgttagtaggacctac

SEQ ID NO: 375489 - DNA, 55 bp, Artificial
  Synthetic oligonucleotide
cgtagccattctaccaactcatgcctcaccaggagagacaatagtcattgatgga

SEQ ID NO: 375490 - DNA, 55 bp, Artificial
  Synthetic oligonucleotide
cgtagcccgcagacaacagaccggcactgccgtgcgatctgaagacaaccatcgc

SEQ ID NO: 375491 - DNA, 55 bp, Artificial
  Synthetic oligonucleotide
cgtagccgtcttccctcaactctcgctgctagcgatgaacttcaacaagtaccgc

SEQ ID NO: 375492 - DNA, 59 bp, Artificial
  Synthetic oligonucleotide
cgtagccttcgtcttctgaatctcctgcgcagaccccgcctcttcctcctaccacgata

SEQ ID NO: 375493 - DNA, 60 bp, Artificial
  Synthetic oligonucleotide
cgtagcgcaaggcacaaataaatcgcagcagtacaagttcggcacagctacatacgcgct

SEQ ID NO: 375494 - DNA, 58 bp, Artificial
  Synthetic oligonucleotide
cgtagcggctacttgagtgccagcggattacccctagtggtaacactagcctctgggc

SEQ ID NO: 375495 - DNA, 51 bp, Artificial
  Synthetic oligonucleotide
cgtagcggtatggaatcagcttgtggaccgagagtttccttgttcattggt

SEQ ID NO: 375496 - DNA, 53 bp, Artificial
  Synthetic oligonucleotide
cgtagcgtattaccggggtcttgacgtgtccgttataccaactagcggagacg

SEQ ID NO: 375497 - DNA, 56 bp, Artificial
  Synthetic oligonucleotide
cgtagctcgggttcccccactcgtaaaagcttgcgtgccggacacacgcaagtggc

SEQ ID NO: 375498 - DNA, 56 bp, Artificial
  Synthetic oligonucleotide
cgtagctgatacctcccaactcgcgaagatgtgtcgtcccgagtccgttaaccgac

SEQ ID NO: 375499 - DNA, 60 bp, Artificial
  Synthetic oligonucleotide
cgtagctgtcctgttagtggtgctaagatctctagcaaagaaagtgtcaaccagtcagag

SEQ ID NO: 375500 - DNA, 57 bp, Artificial
  Synthetic oligonucleotide
cgtagcttgtatcgaggcggttgaatcgggtctcgttacagtacactttcgatccga

SEQ ID NO: 375501 - DNA, 55 bp, Artificial
  Synthetic oligonucleotide
cgtaggaatgttacagaattggatttcttgtatttggcgttttattgttcttctg

SEQ ID NO: 375502 - DNA, 56 bp, Artificial
  Synthetic oligonucleotide
cgtaggacacgtggacggaccgaaatactcctgcatctctataaataccctaatcc

SEQ ID NO: 375503 - DNA, 55 bp, Artificial
  Synthetic oligonucleotide
cgtaggactcaatcctccagtgcccgttgcttattcgcagatcggaagcgagggg

SEQ ID NO: 375504 - DNA, 57 bp, Artificial
  Synthetic oligonucleotide
cgtaggagaagagagttgttcagggcttaccatcaatgaacaagctgtttcgaaacc

SEQ ID NO: 375505 - DNA, 54 bp, Artificial
  Synthetic oligonucleotide
cgtaggagattggactagagttacaaaagtaactactgagggtctttcgttaga

SEQ ID NO: 375506 - DNA, 58 bp, Artificial
  Synthetic oligonucleotide
cgtaggatgggtgccagctcataaaggactgggtggtaatcaagaagtagaccaccta

SEQ ID NO: 375507 - DNA, 52 bp, Artificial
  Synthetic oligonucleotide
cgtaggatttgtccagtcgcgcgtaattcataaccgtatgtctcgaactcaa

SEQ ID NO: 375508 - DNA, 55 bp, Artificial
  Synthetic oligonucleotide
cgtaggcagtaaacctaatactgcctctaagttctctgtgtccggacgcgcggct

SEQ ID NO: 375509 - DNA, 55 bp, Artificial
  Synthetic oligonucleotide
cgtaggcatcttccgggccgctgtgtgcacccggggggttgcgaaggcggtggac

SEQ ID NO: 375510 - DNA, 56 bp, Artificial
  Synthetic oligonucleotide
cgtaggcatgcaatcttgaatctgtatgcccacaatgaatggggcatactgccaga

SEQ ID NO: 375511 - DNA, 57 bp, Artificial
  Synthetic oligonucleotide
cgtaggccgcgaagtcgtcacaacagaaaaggtaactccactgattcgcattctaac

SEQ ID NO: 375512 - DNA, 50 bp, Artificial
  Synthetic oligonucleotide
cgtaggcgcgtcccctacgtctcatactcacaccccggcttctctcggtg

SEQ ID NO: 375513 - DNA, 51 bp, Artificial
  Synthetic oligonucleotide
cgtaggcggtcgccaggtaaggcgcactccacatcgcgtcaccgttccgat

SEQ ID NO: 375514 - DNA, 55 bp, Artificial
  Synthetic oligonucleotide
cgtagggaacacattagctttgtcccgtctctgaacagattgcactatgccacga

SEQ ID NO: 375515 - DNA, 60 bp, Artificial
  Synthetic oligonucleotide
cgtagggaagcgattttgtgtgaaatctgtctacgtgctgggaaagatatggatggatga

SEQ ID NO: 375516 - DNA, 55 bp, Artificial
  Synthetic oligonucleotide
cgtagggcgctgcttgaccctccctgcgttttcaacgctgcgcaggaagtggttg

SEQ ID NO: 375517 - DNA, 55 bp, Artificial
  Synthetic oligonucleotide
cgtaggggagttgcacctcaaccaacacctactagcggtagtctgggccgcaaac

SEQ ID NO: 375518 - DNA, 54 bp, Artificial
  Synthetic oligonucleotide
cgtaggggtgaattcttaggcggtataagtaatgagcttactggtctaagggga

SEQ ID NO: 375519 - DNA, 54 bp, Artificial
  Synthetic oligonucleotide
cgtagggtgctagaaacaaacaggtgtaagactaaagatcaccaattggttaaa

SEQ ID NO: 375520 - DNA, 51 bp, Artificial
  Synthetic oligonucleotide
cgtaggtaaataattaggaccccaaaggtaaatgagaccccgatacatcgg

SEQ ID NO: 375521 - DNA, 55 bp, Artificial
  Synthetic oligonucleotide
cgtaggtacaccccctacgatcctgaggaccctggacaagagactaacgtggcta

SEQ ID NO: 375522 - DNA, 60 bp, Artificial
  Synthetic oligonucleotide
cgtaggtcttgacatctgttgagctcttagctgcctgaatgtttggatggaaatgtgctg

SEQ ID NO: 375523 - DNA, 51 bp, Artificial
  Synthetic oligonucleotide
cgtaggtgaaattaactacgatatctttgaaaaggcaatcgagcgagtgat

SEQ ID NO: 375524 - DNA, 55 bp, Artificial
  Synthetic oligonucleotide
cgtaggtgatgcttccaatgagtctgctgtgttggggtccttctactcacccgtt

SEQ ID NO: 375525 - DNA, 55 bp, Artificial
  Synthetic oligonucleotide
cgtaggtgcaccaataaaccagctcatgtttaggaggataacgggttggtagtag

SEQ ID NO: 375526 - DNA, 60 bp, Artificial
  Synthetic oligonucleotide
cgtaggtgcggagagtgacctcaccataggctcggttgccactgaggatgttccacgcat

SEQ ID NO: 375527 - DNA, 59 bp, Artificial
  Synthetic oligonucleotide
cgtaggtgctttacacagggcgacaacaacgcggataatcagaccaatgatacagggag

SEQ ID NO: 375528 - DNA, 55 bp, Artificial
  Synthetic oligonucleotide
cgtaggtggtaccgcatagcaattaacgtgtcgtccattgcaaagtcgttctaac

SEQ ID NO: 375529 - DNA, 60 bp, Artificial
  Synthetic oligonucleotide
cgtaggtggtttggccgagttggatattgaatccatgtcaatacccttcatgctggcagg

SEQ ID NO: 375530 - DNA, 60 bp, Artificial
  Synthetic oligonucleotide
cgtaggtgtgaatatccatcaggacacaacaaggtaggatccctacaatatttggcactg

SEQ ID NO: 375531 - DNA, 57 bp, Artificial
  Synthetic oligonucleotide
cgtaggttgccagatgttgagtccttgtggggtaaattggtttccctgcgcatattg

SEQ ID NO: 375532 - DNA, 55 bp, Artificial
  Synthetic oligonucleotide
cgtaggttgtggttgaaccggacttcgatgtggtaaatcctggttctggtgtaca

SEQ ID NO: 375533 - DNA, 55 bp, Artificial
  Synthetic oligonucleotide
cgtaggtttcttgcacagcgcggtttagggtgcagaagcagaccccctaaacgtg

SEQ ID NO: 375534 - DNA, 54 bp, Artificial
  Synthetic oligonucleotide
cgtagtaacacttcgaaggtgtcgtacattagttatcctcctcttagtcggtcg

SEQ ID NO: 375535 - DNA, 55 bp, Artificial
  Synthetic oligonucleotide
cgtagtaacatgggatcaagacataccttgtaaacctctaccttatactaactta

SEQ ID NO: 375536 - DNA, 54 bp, Artificial
  Synthetic oligonucleotide
cgtagtaatgaacggtggtctttaccccgcatcagaaatcgacgcgcactatca

SEQ ID NO: 375537 - DNA, 52 bp, Artificial
  Synthetic oligonucleotide
cgtagtagattccatattccttgggtgataaattgtacagctccggcttccg

SEQ ID NO: 375538 - DNA, 58 bp, Artificial
  Synthetic oligonucleotide
cgtagtatatagtttatcatatagttcacatgctcactaaaatgactttaagggttaa

SEQ ID NO: 375539 - DNA, 53 bp, Artificial
  Synthetic oligonucleotide
cgtagtatttagtatttatacagtgtatctagaccgtacagaatacctatcta

SEQ ID NO: 375540 - DNA, 50 bp, Artificial
  Synthetic oligonucleotide
cgtagtatttttgttgcaccctttaggggtggtagacccattcgggttgt

SEQ ID NO: 375541 - DNA, 55 bp, Artificial
  Synthetic oligonucleotide
cgtagtcaagcctactatacattgaactcgataactcagaccccgacatcgattg

SEQ ID NO: 375542 - DNA, 54 bp, Artificial
  Synthetic oligonucleotide
cgtagtcacaatggattttgcacagctaaaaggtttttacagcgacttagctca

SEQ ID NO: 375543 - DNA, 60 bp, Artificial
  Synthetic oligonucleotide
cgtagtcatgcgtacttatcagacggaagcagacgatgacttagatgaaggcataagaat

SEQ ID NO: 375544 - DNA, 56 bp, Artificial
  Synthetic oligonucleotide
cgtagtccgcttcacggaaactcgggggcaactcatattgacacattaattggcaa

SEQ ID NO: 375545 - DNA, 58 bp, Artificial
  Synthetic oligonucleotide
cgtagtcctggaaacgctgaaattgaggacctcatctttttggccaggtctgcactta

SEQ ID NO: 375546 - DNA, 49 bp, Artificial
  Synthetic oligonucleotide
cgtagtcgttaaaaccgctaacgtaattttcaaaacccggctcgatcgt

SEQ ID NO: 375547 - DNA, 60 bp, Artificial
  Synthetic oligonucleotide
cgtagtctgagcatgacttagtgattcccctgtgcgtgaatccatgctggtacttgcagt

SEQ ID NO: 375548 - DNA, 57 bp, Artificial
  Synthetic oligonucleotide
cgtagtgacgaccaggttctgctgaacgttagtataaactaaggttatgctatagcc

SEQ ID NO: 375549 - DNA, 57 bp, Artificial
  Synthetic oligonucleotide
cgtagtgaggatatcacttaatccgacttccactccttcctctactagttggtctgg

SEQ ID NO: 375550 - DNA, 50 bp, Artificial
  Synthetic oligonucleotide
cgtagtgagtcagccgatcgctgagtaggtttctaaggtagttctcaggt

SEQ ID NO: 375551 - DNA, 60 bp, Artificial
  Synthetic oligonucleotide
cgtagtggtcctacgtggcctagcactctgagtgcctgagtggtggtcccacttggctca

SEQ ID NO: 375552 - DNA, 58 bp, Artificial
  Synthetic oligonucleotide
cgtagttactgacaattttgacgtcataagaatgactcaacctatagaacaggtttca

SEQ ID NO: 375553 - DNA, 50 bp, Artificial
  Synthetic oligonucleotide
cgtagttcggatcgctcgcggtgcgtagcgagacttgctcttgccccaca

SEQ ID NO: 375554 - DNA, 60 bp, Artificial
  Synthetic oligonucleotide
cgtagttctcatggccattgtcacgagcgcgcagaactatggagtgaatttacccattac

SEQ ID NO: 375555 - DNA, 55 bp, Artificial
  Synthetic oligonucleotide
cgtagttggaaacgtttcacagcgaagggctctgtccacacccttgattcaaggg

SEQ ID NO: 375556 - DNA, 56 bp, Artificial
  Synthetic oligonucleotide
cgtagttgtgagtaggcgaggcaaaccaaggcgtctgaagggctctcaggcgaccg

SEQ ID NO: 375557 - DNA, 55 bp, Artificial
  Synthetic oligonucleotide
cgtagtttactgtcagccctactgttagcgaaaaggcttaagcggatgcaccgca

SEQ ID NO: 375558 - DNA, 53 bp, Artificial
  Synthetic oligonucleotide
cgtagtttgaaccaggtgaatgccctatttggggatctaaaaccccatttgga

SEQ ID NO: 375559 - DNA, 53 bp, Artificial
  Synthetic oligonucleotide
cgtagtttgcttgtacctctaccaactatcccccccgatgacctggcccctaa

SEQ ID NO: 375560 - DNA, 60 bp, Artificial
  Synthetic oligonucleotide
cgtagtttgcttttcacacaaaggcttaggcatctcctatggcaggaagaagcggagaca

SEQ ID NO: 375561 - DNA, 55 bp, Artificial
  Synthetic oligonucleotide
cgtagttttagccttgacacttcttgatagtttagagacttcttctcgttgcgcc

SEQ ID NO: 375562 - DNA, 58 bp, Artificial
  Synthetic oligonucleotide
cgtataaaggggctgtcgttgacactgtcactccatccgaagtgatggctaaccaaac

SEQ ID NO: 375563 - DNA, 59 bp, Artificial
  Synthetic oligonucleotide
cgtataagctagtgttgagttgtgtgtttccatcgaaacttagtaggagtttgagcata

SEQ ID NO: 375564 - DNA, 55 bp, Artificial
  Synthetic oligonucleotide
cgtataagtataagctgtgctaagattgaaattgtcggccacgctcgccacattt

SEQ ID NO: 375565 - DNA, 60 bp, Artificial
  Synthetic oligonucleotide
cgtataagtctacgatcatcgatacattaccggccatgttcagtgatctgcccattctcg

SEQ ID NO: 375566 - DNA, 55 bp, Artificial
  Synthetic oligonucleotide
cgtataagttgtcatcatgggcgcacaagtatctagacagaatgttgggacacac

SEQ ID NO: 375567 - DNA, 55 bp, Artificial
  Synthetic oligonucleotide
cgtatacaaccgtaatgaacgattcagatccgatcatacgcggtacagtgtctga

SEQ ID NO: 375568 - DNA, 59 bp, Artificial
  Synthetic oligonucleotide
cgtatacaacggtctgtctggagatcccttctttcaaagcgttacgatgtgtatgagag

SEQ ID NO: 375569 - DNA, 60 bp, Artificial
  Synthetic oligonucleotide
cgtatacatgccgctgtgatacagtggtaagttgcgaaggctacgtagtgaagaagatca

SEQ ID NO: 375570 - DNA, 59 bp, Artificial
  Synthetic oligonucleotide
cgtataccagacttaactgatttcaattaacttgaatagccagagttgcaataacctgc

SEQ ID NO: 375571 - DNA, 55 bp, Artificial
  Synthetic oligonucleotide
cgtataccatacaagattgtagctccgtgctgcttttgtggttctaagctacggc

SEQ ID NO: 375572 - DNA, 55 bp, Artificial
  Synthetic oligonucleotide
cgtatacccggacaagcatccactccgttggccgagaattcgcaagagtatctcg

SEQ ID NO: 375573 - DNA, 55 bp, Artificial
  Synthetic oligonucleotide
cgtatacgatcagcgctaaagttacgccaacgaaaggtaatttcaatgaggtttc

SEQ ID NO: 375574 - DNA, 55 bp, Artificial
  Synthetic oligonucleotide
cgtatacgatgatgaattacaaatgcatatcttgcgtggtccgctacattttcaa

SEQ ID NO: 375575 - DNA, 55 bp, Artificial
  Synthetic oligonucleotide
cgtatacgttgcaagttacaatgaagttgaccaattgtcacgactattaactgag

SEQ ID NO: 375576 - DNA, 60 bp, Artificial
  Synthetic oligonucleotide
cgtatagaatcacaattgatatgatcagaccagcagctatgacacagtatgtacaaagac

SEQ ID NO: 375577 - DNA, 55 bp, Artificial
  Synthetic oligonucleotide
cgtatagctgaaatagcagcctcgaatcaacatattaactttctgctccgtatcg

SEQ ID NO: 375578 - DNA, 60 bp, Artificial
  Synthetic oligonucleotide
cgtataggattgttagtcgaaccaggcgtggataccattgtgtggagaggtggtcatata

SEQ ID NO: 375579 - DNA, 55 bp, Artificial
  Synthetic oligonucleotide
cgtataggggtgtcccgaggtaatttaacatagatctgagaagagatatgggccg

SEQ ID NO: 375580 - DNA, 59 bp, Artificial
  Synthetic oligonucleotide
cgtatagtagcatctttggtacttgctcggaaacacactaactgttgtacttggtctga

SEQ ID NO: 375581 - DNA, 55 bp, Artificial
  Synthetic oligonucleotide
cgtatagtcgagatgagccacctgaggacgaaggaaaccgtgcaagtgctcgacc

SEQ ID NO: 375582 - DNA, 60 bp, Artificial
  Synthetic oligonucleotide
cgtatatagcttcagagatcctacatggcacgccttgcgtacagcgattttgaatcgaac

SEQ ID NO: 375583 - DNA, 52 bp, Artificial
  Synthetic oligonucleotide
cgtatatcagttaccccagcttgggtaagtccgaacccaaccggagtaggtc

SEQ ID NO: 375584 - DNA, 54 bp, Artificial
  Synthetic oligonucleotide
cgtatatcctcgacatgcaccgaagcagcgactcattgacgctcaggaaaggtc

SEQ ID NO: 375585 - DNA, 60 bp, Artificial
  Synthetic oligonucleotide
cgtatatgatccaatagcgccagaatctttagattcaaacgttatagttcataatgtcat

SEQ ID NO: 375586 - DNA, 55 bp, Artificial
  Synthetic oligonucleotide
cgtatatggaggtccaatccatatccctgtctacggggcacgttgattgcagcgg

SEQ ID NO: 375587 - DNA, 57 bp, Artificial
  Synthetic oligonucleotide
cgtatatggtaactcctcgtaacatgtttcaacctagaaaacctcagatgagtgatt

SEQ ID NO: 375588 - DNA, 60 bp, Artificial
  Synthetic oligonucleotide
cgtatatgtccaaggcacatggtatcgaccccaacatcagaacaggggtaaggaccatca

SEQ ID NO: 375589 - DNA, 55 bp, Artificial
  Synthetic oligonucleotide
cgtatatgtcccgacagggacaaccgttggaagtgcttgtgcagattaaaagtgc

SEQ ID NO: 375590 - DNA, 53 bp, Artificial
  Synthetic oligonucleotide
cgtatattaagttgaaacgactcaggtttaagggaactgttaagattgaacga

SEQ ID NO: 375591 - DNA, 59 bp, Artificial
  Synthetic oligonucleotide
cgtatattggttgtctatctcaatcaatacaggttagcaatggatactggtttgaaatt

SEQ ID NO: 375592 - DNA, 55 bp, Artificial
  Synthetic oligonucleotide
cgtatcaaacgaagacttacatcgacgaaacaagagcaacatttgtcctctgacg

SEQ ID NO: 375593 - DNA, 58 bp, Artificial
  Synthetic oligonucleotide
cgtatcacagcgaagaccgtagactcagtgttattaaacggcgtgaaacacacgccta

SEQ ID NO: 375594 - DNA, 60 bp, Artificial
  Synthetic oligonucleotide
cgtatcacattttccacccacgagtgcttgcattctagaagtggagccagtttgggttga

SEQ ID NO: 375595 - DNA, 55 bp, Artificial
  Synthetic oligonucleotide
cgtatcaccaacggaaatggtagacgtaagtatgatgtctatgtacagcgagcca

SEQ ID NO: 375596 - DNA, 55 bp, Artificial
  Synthetic oligonucleotide
cgtatcaccagaggatctagaccgtgtgcgtactgagggaggttcactagtggag

SEQ ID NO: 375597 - DNA, 60 bp, Artificial
  Synthetic oligonucleotide
cgtatcaccatacagatgctaacaccccgatgatcggtgctctgacatatgctttggtga

SEQ ID NO: 375598 - DNA, 60 bp, Artificial
  Synthetic oligonucleotide
cgtatcaccgactgtaaggagagagtatcctcaatccgcaatcacgacccgaagagcaaa

SEQ ID NO: 375599 - DNA, 58 bp, Artificial
  Synthetic oligonucleotide
cgtatcacgcgcaactttattagcgagttgtctcctaaatggcagcaccggagtactt

SEQ ID NO: 375600 - DNA, 55 bp, Artificial
  Synthetic oligonucleotide
cgtatcagcgcacaggagtcccaatctctcttagcgctcgtcccttggccgtcgc

SEQ ID NO: 375601 - DNA, 60 bp, Artificial
  Synthetic oligonucleotide
cgtatcaggtcatctatttatttgtttgatgtcaaattcatatgttgctgatcttgattg

SEQ ID NO: 375602 - DNA, 60 bp, Artificial
  Synthetic oligonucleotide
cgtatcataatgcatcagatgataatcaggtaatgagatgcagaataatgaaggaagtag

SEQ ID NO: 375603 - DNA, 59 bp, Artificial
  Synthetic oligonucleotide
cgtatcatcttaccgacgtacacagctgcgatacacattcacggtgccccgtggggctt

SEQ ID NO: 375604 - DNA, 53 bp, Artificial
  Synthetic oligonucleotide
cgtatccacgtaatttatggaccgaccggcgaaccgttagactttcagatcgg

SEQ ID NO: 375605 - DNA, 59 bp, Artificial
  Synthetic oligonucleotide
cgtatccactgttgcacgtaaaacggtcttcgcagcaagcctgacccgtgccaagtatc

SEQ ID NO: 375606 - DNA, 60 bp, Artificial
  Synthetic oligonucleotide
cgtatccagctgcaaacttccagacaacgtgcaacatatcgcgacgtatcgtgatatggt

SEQ ID NO: 375607 - DNA, 55 bp, Artificial
  Synthetic oligonucleotide
cgtatccatctaaaacaagaactataacgaacaaccgtgttcgttcctatatcaa

SEQ ID NO: 375608 - DNA, 52 bp, Artificial
  Synthetic oligonucleotide
cgtatcccacgatgcccaatagttacgaaaagggccccctccatcccccgct

SEQ ID NO: 375609 - DNA, 59 bp, Artificial
  Synthetic oligonucleotide
cgtatcccgaaagagtgatgacaggagggggtatgtgcacatgagtaaaagccttgaca

SEQ ID NO: 375610 - DNA, 60 bp, Artificial
  Synthetic oligonucleotide
cgtatccgagtatcacttaccatgagttgatgttgtcaagagactttgcccgtcaaatta

SEQ ID NO: 375611 - DNA, 55 bp, Artificial
  Synthetic oligonucleotide
cgtatccggcaccttcacgagactcgatgtggagctcggaagtagcttgtcacca

SEQ ID NO: 375612 - DNA, 55 bp, Artificial
  Synthetic oligonucleotide
cgtatccggccgtaccattcagaacggtaagatttctaccttagcagcccaaggc

SEQ ID NO: 375613 - DNA, 55 bp, Artificial
  Synthetic oligonucleotide
cgtatcctcaacccacacacacactgggttggtgatgtgttatcttctagcttag

SEQ ID NO: 375614 - DNA, 57 bp, Artificial
  Synthetic oligonucleotide
cgtatcgaaacgcgaatgcaagattgacggtgcccattccagtggtacctgtttccc

SEQ ID NO: 375615 - DNA, 59 bp, Artificial
  Synthetic oligonucleotide
cgtatcgaccccaaataagttgctggacatcgttaaacagcgagtgtgcagtcgtgtac

SEQ ID NO: 375616 - DNA, 55 bp, Artificial
  Synthetic oligonucleotide
cgtatcgagcgaaaggatgtaggcgttagtttagaagtgacgccgcacgttatgg

SEQ ID NO: 375617 - DNA, 55 bp, Artificial
  Synthetic oligonucleotide
cgtatcgcccacacattacgtgcctgagactgacacatctcgccagatcaccact

SEQ ID NO: 375618 - DNA, 58 bp, Artificial
  Synthetic oligonucleotide
cgtatcgcgagcgctgttcatcgccgatggatggagtacagcggttctgtgggtgcgc

SEQ ID NO: 375619 - DNA, 60 bp, Artificial
  Synthetic oligonucleotide
cgtatcgcgtacctccagcatttgtccgagatgatcagccacccagtacgtctgaccatt

SEQ ID NO: 375620 - DNA, 55 bp, Artificial
  Synthetic oligonucleotide
cgtatcgctgccaccgaggggacacgcaaatccagacgaggaggtcattcgagat

SEQ ID NO: 375621 - DNA, 57 bp, Artificial
  Synthetic oligonucleotide
cgtatcgctgcttccgacacttacaattcgaggatttggtggtcaaatccgtaccca

SEQ ID NO: 375622 - DNA, 55 bp, Artificial
  Synthetic oligonucleotide
cgtatcggcacaccaagcgatattcagtcaccgtcatcgacaagaatccggacag

SEQ ID NO: 375623 - DNA, 53 bp, Artificial
  Synthetic oligonucleotide
cgtatcgtaaattgcgtgttgctcgtaaattatcctacgaccttctgttcggc

SEQ ID NO: 375624 - DNA, 54 bp, Artificial
  Synthetic oligonucleotide
cgtatcgtcactagtgccgacaagtaccgatatggtagcgactttacgaccctc

SEQ ID NO: 375625 - DNA, 55 bp, Artificial
  Synthetic oligonucleotide
cgtatctacgttggttggtttggtgtcctcatgattccttgcctcctcgcagcta

SEQ ID NO: 375626 - DNA, 59 bp, Artificial
  Synthetic oligonucleotide
cgtatctcaaaggagatgagttatcaagtgacagtggacctttactttcaatcttcgct

SEQ ID NO: 375627 - DNA, 55 bp, Artificial
  Synthetic oligonucleotide
cgtatctcagattggctaaaacaacttggactggcctgctcaccgatacatcgcc

SEQ ID NO: 375628 - DNA, 60 bp, Artificial
  Synthetic oligonucleotide
cgtatctcagctgcaatatttatattctctgccgaataacagaaaagcataagactgtag

SEQ ID NO: 375629 - DNA, 57 bp, Artificial
  Synthetic oligonucleotide
cgtatctgctgaggctccgtataacttcgaaaagaagtacgaagaactactcagaga

SEQ ID NO: 375630 - DNA, 60 bp, Artificial
  Synthetic oligonucleotide
cgtatctggagtgtgatgaggtcgtggttcatgttccctggcctcttgtcgtggttggtg

SEQ ID NO: 375631 - DNA, 56 bp, Artificial
  Synthetic oligonucleotide
cgtatctggatcacaaactaatgcctattttggatcaaaacttcgtcgaatacaag

SEQ ID NO: 375632 - DNA, 60 bp, Artificial
  Synthetic oligonucleotide
cgtatcttgtagacatcagtcgatgtcttgaagcagaaatcctgaggagtgtttagtagg

SEQ ID NO: 375633 - DNA, 53 bp, Artificial
  Synthetic oligonucleotide
cgtatctttaaacacggtctgaaaagagggccttctacggaaggagtaccaga

SEQ ID NO: 375634 - DNA, 55 bp, Artificial
  Synthetic oligonucleotide
cgtatctttgttggacgtcaagctaaccttgttcctactcgtgaccctggtacac

SEQ ID NO: 375635 - DNA, 55 bp, Artificial
  Synthetic oligonucleotide
cgtatgaacataggcagtggtcgataccaataatattatacgctgacaaattacg

SEQ ID NO: 375636 - DNA, 58 bp, Artificial
  Synthetic oligonucleotide
cgtatgaatagtcacataatataatcacattaccatcttcacatgaccctctatgagc

SEQ ID NO: 375637 - DNA, 55 bp, Artificial
  Synthetic oligonucleotide
cgtatgaatcaaaggaggattatggagtcatctttccggatgcactgtcgattgg

SEQ ID NO: 375638 - DNA, 60 bp, Artificial
  Synthetic oligonucleotide
cgtatgacacaattcatgacgtccgcgcaaaatatgttacaggtgctcggaccctgggaa

SEQ ID NO: 375639 - DNA, 55 bp, Artificial
  Synthetic oligonucleotide
cgtatgaccggtaagcgccgctccctgcggcttgtagttcccctggagatcaagc

SEQ ID NO: 375640 - DNA, 59 bp, Artificial
  Synthetic oligonucleotide
cgtatgacgttgagatgttcgagccactccccgcaaggctcaataaataagcggggagc

SEQ ID NO: 375641 - DNA, 54 bp, Artificial
  Synthetic oligonucleotide
cgtatgagaccctcccgtccatccacgtaaaatccatctggttattggcagagc

SEQ ID NO: 375642 - DNA, 58 bp, Artificial
  Synthetic oligonucleotide
cgtatgagccttaccgtgatgtcttaccaaatgcagggcagtctacttgttttgactg

SEQ ID NO: 375643 - DNA, 55 bp, Artificial
  Synthetic oligonucleotide
cgtatgatagtgtgttcctgtccggtgcttaagaacctagtgcactaacgggatc

SEQ ID NO: 375644 - DNA, 57 bp, Artificial
  Synthetic oligonucleotide
cgtatgcatgttggaaatactttgacacatacctcagaaatgccctggatgggtacc

SEQ ID NO: 375645 - DNA, 58 bp, Artificial
  Synthetic oligonucleotide
cgtatgccaaccgtgcgagtgcccccattgccctcgtcacaaacaaaaggagatcgtg

SEQ ID NO: 375646 - DNA, 55 bp, Artificial
  Synthetic oligonucleotide
cgtatgccagactttctcgtgagcttcaacttgttcgcgacgacatttctgttcg

SEQ ID NO: 375647 - DNA, 55 bp, Artificial
  Synthetic oligonucleotide
cgtatgcgcagcagacgcgaggggtgctgggcgctataattgtcagcctaaccgg

SEQ ID NO: 375648 - DNA, 58 bp, Artificial
  Synthetic oligonucleotide
cgtatgcggccaaccggtggcagcgacgcaaccccgggtggcacgtgtcagccgacga

SEQ ID NO: 375649 - DNA, 60 bp, Artificial
  Synthetic oligonucleotide
cgtatgcgtcagattttgggggaatagctactatgtcgtataaagctagcaaggcaggaa

SEQ ID NO: 375650 - DNA, 60 bp, Artificial
  Synthetic oligonucleotide
cgtatgctatatctagtcatgcaattaacaatgtatctatcagtccatcaatctcgtcag

SEQ ID NO: 375651 - DNA, 58 bp, Artificial
  Synthetic oligonucleotide
cgtatgcttcctaaaattggacagaggatgtacgtccatcactcggctatttacctcc

SEQ ID NO: 375652 - DNA, 55 bp, Artificial
  Synthetic oligonucleotide
cgtatgctttccatctggactatgaaaagtggaacaatcaccaaaggttggagtc

SEQ ID NO: 375653 - DNA, 53 bp, Artificial
  Synthetic oligonucleotide
cgtatggagaatatacgagcaggaatgtacgacgctgaggtaggatctttgcg

SEQ ID NO: 375654 - DNA, 55 bp, Artificial
  Synthetic oligonucleotide
cgtatggagagtcagttaaacaagcggttcttctcaacgtgttaggtacaggtga

SEQ ID NO: 375655 - DNA, 60 bp, Artificial
  Synthetic oligonucleotide
cgtatggagcgtggaggacccatgaaagcactgagaaggcatctcaactttcggtgtgtg

SEQ ID NO: 375656 - DNA, 55 bp, Artificial
  Synthetic oligonucleotide
cgtatggattgccagttacaacacagagtgtatccaccaacatactctctcggtg

SEQ ID NO: 375657 - DNA, 57 bp, Artificial
  Synthetic oligonucleotide
cgtatggcacgttgaacaccctgatcaacgggtcgagaagcgtgcaaacgttcttcg

SEQ ID NO: 375658 - DNA, 55 bp, Artificial
  Synthetic oligonucleotide
cgtatggcctttccattagcggtcgtggcgcagacagcaggacgctttctgcccg

SEQ ID NO: 375659 - DNA, 54 bp, Artificial
  Synthetic oligonucleotide
cgtatgggcacgcccggattacaaccctccgctgttagagtcttggaaagaccc

SEQ ID NO: 375660 - DNA, 55 bp, Artificial
  Synthetic oligonucleotide
cgtatggggggctatgtgtgccgctgctagagcggcggtgtgttggggcgatgcc

SEQ ID NO: 375661 - DNA, 55 bp, Artificial
  Synthetic oligonucleotide
cgtatggtaactgctgaagagttccaacctaaacactttgcaggccgccgccgta

SEQ ID NO: 375662 - DNA, 55 bp, Artificial
  Synthetic oligonucleotide
cgtatggtagcggtgttactgtatgttcatctcccctaatgtcaatctcactttg

SEQ ID NO: 375663 - DNA, 55 bp, Artificial
  Synthetic oligonucleotide
cgtatggtgaaaccgtaaagagagcagtcctattgaatgtgttaggggcgggaga

SEQ ID NO: 375664 - DNA, 55 bp, Artificial
  Synthetic oligonucleotide
cgtatgtaaatttctcacaccacgcagtgagtatgtagcttttgatgacgcgact

SEQ ID NO: 375665 - DNA, 58 bp, Artificial
  Synthetic oligonucleotide
cgtatgtgagattatctagtatagtatcaaattgtaatacaggcgaaatgggagttgt

SEQ ID NO: 375666 - DNA, 55 bp, Artificial
  Synthetic oligonucleotide
cgtatgtgatggaactacagcgcatcttgacatcctggggaaaggattgcagcta

SEQ ID NO: 375667 - DNA, 55 bp, Artificial
  Synthetic oligonucleotide
cgtatgttaattaaagggatctacaggccaagtgtcatgtatgaattactctctg

SEQ ID NO: 375668 - DNA, 55 bp, Artificial
  Synthetic oligonucleotide
cgtatgttacttatcctgctaaaacgcgaactggaacgaataacagagttcgttc

SEQ ID NO: 375669 - DNA, 60 bp, Artificial
  Synthetic oligonucleotide
cgtatgttcagagaaggacgtgacatcagagagttcatcgcgtatgcctcagggagacgc

SEQ ID NO: 375670 - DNA, 55 bp, Artificial
  Synthetic oligonucleotide
cgtatgttgtcactactcaatatacctcaccatctagaatcgtatcgtcaggtgc

SEQ ID NO: 375671 - DNA, 51 bp, Artificial
  Synthetic oligonucleotide
cgtattaaacaggatgttaccttctaccggtttcttggtttgattccctgc

SEQ ID NO: 375672 - DNA, 60 bp, Artificial
  Synthetic oligonucleotide
cgtattacaaatcgatcggaaatcgattatgcaaatcggacatcggaatagagaaatcga

SEQ ID NO: 375673 - DNA, 57 bp, Artificial
  Synthetic oligonucleotide
cgtattacacgtgtggtcatgttggctagaaatctttatacatgggtttgtaccgta

SEQ ID NO: 375674 - DNA, 55 bp, Artificial
  Synthetic oligonucleotide
cgtattacacgtgtggtcctggtggcttgaaatccttatacatggggttggacgg

SEQ ID NO: 375675 - DNA, 51 bp, Artificial
  Synthetic oligonucleotide
cgtattactgactgcaaagaaagagtatcctcaaaccgcaatcatgatccg

SEQ ID NO: 375676 - DNA, 60 bp, Artificial
  Synthetic oligonucleotide
cgtattatagcgtgggacggacaggctgctctacatgtgcataatccaacgcaacagaat

SEQ ID NO: 375677 - DNA, 58 bp, Artificial
  Synthetic oligonucleotide
cgtattcaacacaccacatgctaggagaacaataacccaagcacttggtttgacgaac

SEQ ID NO: 375678 - DNA, 60 bp, Artificial
  Synthetic oligonucleotide
cgtattcaacagtttgtatgcatccccacaacttgagggattttcagctgagtcaaggaa

SEQ ID NO: 375679 - DNA, 60 bp, Artificial
  Synthetic oligonucleotide
cgtattcaagcgcgtcatatctgtcgagaaagacacgatgatggtggatatagaagggtc

SEQ ID NO: 375680 - DNA, 52 bp, Artificial
  Synthetic oligonucleotide
cgtattcaatacgctaccgagtatctattaatatgtgagtctctgccgaaac

SEQ ID NO: 375681 - DNA, 59 bp, Artificial
  Synthetic oligonucleotide
cgtattcaggcgaagggtactagcttcagtacaactgttgacattccaacgacaagtga

SEQ ID NO: 375682 - DNA, 60 bp, Artificial
  Synthetic oligonucleotide
cgtattcccctattacgtcgatgttaactactggagcctcgttcatcattagcatatcaa

SEQ ID NO: 375683 - DNA, 52 bp, Artificial
  Synthetic oligonucleotide
cgtattccctcttcgcatattcgaggtgcgcaacggagccgagtgtacggaa

SEQ ID NO: 375684 - DNA, 55 bp, Artificial
  Synthetic oligonucleotide
cgtattccgcaagcgctctgctaatgaattttcagtggcttgttcgaggtgaggg

SEQ ID NO: 375685 - DNA, 56 bp, Artificial
  Synthetic oligonucleotide
cgtattcctacatctggggtgctcccagtttgaaccagtgttttcccagaatcctc

SEQ ID NO: 375686 - DNA, 51 bp, Artificial
  Synthetic oligonucleotide
cgtattcgatacctgcaacggttgtagttgtttcattcgttacgactaatt

SEQ ID NO: 375687 - DNA, 55 bp, Artificial
  Synthetic oligonucleotide
cgtattctaacgccgtaaatacgtactgcgattcggtatatagagcaggagtgcc

SEQ ID NO: 375688 - DNA, 60 bp, Artificial
  Synthetic oligonucleotide
cgtattctactgacgctgaacgtgcgctgattcgcactgaattggcggctctgttgcaag

SEQ ID NO: 375689 - DNA, 60 bp, Artificial
  Synthetic oligonucleotide
cgtattgaaaagtcatttacaagaatgagtccgcatgcatctgtcggaaagcagacaggc

SEQ ID NO: 375690 - DNA, 57 bp, Artificial
  Synthetic oligonucleotide
cgtattgaacaagggatagtaaccttctacaaaatgattactcaagctcaggcaccc

SEQ ID NO: 375691 - DNA, 55 bp, Artificial
  Synthetic oligonucleotide
cgtattgaatctgcagtttgtgaatcagtgcttgcggatgctaatgagactctat

SEQ ID NO: 375692 - DNA, 60 bp, Artificial
  Synthetic oligonucleotide
cgtattgagaggatatacgtatcctcccaagctatgccagtgattcgtcgctatgatggg

SEQ ID NO: 375693 - DNA, 55 bp, Artificial
  Synthetic oligonucleotide
cgtattgaggtccatgcgccgattacagtgaacggcgggccagaggctggcaagg

SEQ ID NO: 375694 - DNA, 60 bp, Artificial
  Synthetic oligonucleotide
cgtattgagtcggtatcggcacagacactcgaagctaggaactctcagataactgctcgg

SEQ ID NO: 375695 - DNA, 55 bp, Artificial
  Synthetic oligonucleotide
cgtattgatttggccgttgatgactttcacggtttatttggccgtgagtacgcca

SEQ ID NO: 375696 - DNA, 57 bp, Artificial
  Synthetic oligonucleotide
cgtattggagcaaggaatcagtacgattgtaatgctttccgagcggacccacaaacg

SEQ ID NO: 375697 - DNA, 55 bp, Artificial
  Synthetic oligonucleotide
cgtattggcttggttaactatgataagtactacagaacgatcagtcgcgtgctca

SEQ ID NO: 375698 - DNA, 54 bp, Artificial
  Synthetic oligonucleotide
cgtattggggatatggggttaaggggttgatccccttatcctgtgcccgccagc

SEQ ID NO: 375699 - DNA, 55 bp, Artificial
  Synthetic oligonucleotide
cgtattggggccaaggtgcacttctatcatgacctcagtcctattgcccctgcag

SEQ ID NO: 375700 - DNA, 59 bp, Artificial
  Synthetic oligonucleotide
cgtattgtaatttctttaccgtctgttgtgtctagaagtatggttgatccaagatatga

SEQ ID NO: 375701 - DNA, 55 bp, Artificial
  Synthetic oligonucleotide
cgtattgttcgaaggaaggggactttccaatatgcgcctaaaactagatatcaac

SEQ ID NO: 375702 - DNA, 58 bp, Artificial
  Synthetic oligonucleotide
cgtattgttggcatgacaacaacggaacgacgggataggagcccgaaatgagcacgga

SEQ ID NO: 375703 - DNA, 54 bp, Artificial
  Synthetic oligonucleotide
cgtatttaagtgacttaacaccattcgttggtccagtatcttacgtcggccgta

SEQ ID NO: 375704 - DNA, 50 bp, Artificial
  Synthetic oligonucleotide
cgtatttcataaaggattggtccaataaagcgctgaaagtagatctcaca

SEQ ID NO: 375705 - DNA, 58 bp, Artificial
  Synthetic oligonucleotide
cgtatttctaacaaacactcattcgtgacaaaaataataagagttgacggagatgaca

SEQ ID NO: 375706 - DNA, 55 bp, Artificial
  Synthetic oligonucleotide
cgtatttgggtgaaatgtatttttcgccggagaactattcaactgtattttgcaa

SEQ ID NO: 375707 - DNA, 59 bp, Artificial
  Synthetic oligonucleotide
cgtattttaagacgttgactgtattagacactaatgtaacatttgatcaagaatcagcg

SEQ ID NO: 375708 - DNA, 57 bp, Artificial
  Synthetic oligonucleotide
cgtattttgaatatagaaactcaccagagcgatatatgccaagatacggacttcagc

SEQ ID NO: 375709 - DNA, 55 bp, Artificial
  Synthetic oligonucleotide
cgtcaaaaaggtggaggtcctcaacaacaagaattggtcagggtacagcggagct

SEQ ID NO: 375710 - DNA, 55 bp, Artificial
  Synthetic oligonucleotide
cgtcaaaacggattccttattaaacgcaagggtgtggattataacatgcctacac

SEQ ID NO: 375711 - DNA, 55 bp, Artificial
  Synthetic oligonucleotide
cgtcaaaacggtatgcaccgcgaaattccgcatcttgtgaaactacgcgccgcaa

SEQ ID NO: 375712 - DNA, 51 bp, Artificial
  Synthetic oligonucleotide
cgtcaaaatattccgagagctaatatcccgggaaaaaaccgaaaacgcagt

SEQ ID NO: 375713 - DNA, 53 bp, Artificial
  Synthetic oligonucleotide
cgtcaaacaggaaccccattctcgacaaaagattgaacaaggccgttttcggc

SEQ ID NO: 375714 - DNA, 56 bp, Artificial
  Synthetic oligonucleotide
cgtcaaaccacacgaaaggggaataaattcaaattacctgcagtcatggaagcaag

SEQ ID NO: 375715 - DNA, 53 bp, Artificial
  Synthetic oligonucleotide
cgtcaaacccaatgaatgcggtagcggggcggctggttccgtatgttgtagat

SEQ ID NO: 375716 - DNA, 56 bp, Artificial
  Synthetic oligonucleotide
cgtcaaaccctgtgtatgctagtcttaaaatacgaatgtatttctacgattcagtt

SEQ ID NO: 375717 - DNA, 56 bp, Artificial
  Synthetic oligonucleotide
cgtcaaacgacgctaccggtaaacattgttgaagaggtccacgaagagaaatgcta

SEQ ID NO: 375718 - DNA, 53 bp, Artificial
  Synthetic oligonucleotide
cgtcaaaggcgcaactctgaggcaaatgtgcgagccattcgcacagaacgctt

SEQ ID NO: 375719 - DNA, 55 bp, Artificial
  Synthetic oligonucleotide
cgtcaaatacttgaatatcaactacaggagccccattcatgatcagaatatccac

SEQ ID NO: 375720 - DNA, 60 bp, Artificial
  Synthetic oligonucleotide
cgtcaaatggacgtatatttaggttgcacatctagttcattcgaccattatcgtttagca

SEQ ID NO: 375721 - DNA, 54 bp, Artificial
  Synthetic oligonucleotide
cgtcaacaaagaagtccgcatggagccttccttcagtcgccaattctctgattg

SEQ ID NO: 375722 - DNA, 58 bp, Artificial
  Synthetic oligonucleotide
cgtcaacaaattgctggacatgcaggatgtctaaggacaatttgccctttaccgttcc

SEQ ID NO: 375723 - DNA, 58 bp, Artificial
  Synthetic oligonucleotide
cgtcaacacggccgtgctgaaggtctgggcctgcgtagagtatcgtccgaatccaaat

SEQ ID NO: 375724 - DNA, 55 bp, Artificial
  Synthetic oligonucleotide
cgtcaaccaaccccatgtatgtttcagatactgtcacatttgttaatgtggcgac

SEQ ID NO: 375725 - DNA, 55 bp, Artificial
  Synthetic oligonucleotide
cgtcaaccagttccaaattcctcagggcggcgccaaaacttatcaagcgcggatg

SEQ ID NO: 375726 - DNA, 54 bp, Artificial
  Synthetic oligonucleotide
cgtcaaccccagacatcgaaagaatgattaagctaggtcgctcggtgcatcaga

SEQ ID NO: 375727 - DNA, 50 bp, Artificial
  Synthetic oligonucleotide
cgtcaaccccttagttgacagccccttatacgcccacatttcgatgtgtt

SEQ ID NO: 375728 - DNA, 51 bp, Artificial
  Synthetic oligonucleotide
cgtcaaccctaccttattgccaagggatcaggctttaatctgctggtctca

SEQ ID NO: 375729 - DNA, 55 bp, Artificial
  Synthetic oligonucleotide
cgtcaacctaacttggttctttattctgataatggtgtctttcgtgtaacttcca

SEQ ID NO: 375730 - DNA, 57 bp, Artificial
  Synthetic oligonucleotide
cgtcaaccttcaaccagatgattttcgaatttaatggtgcgaagtacactggtgccc

SEQ ID NO: 375731 - DNA, 59 bp, Artificial
  Synthetic oligonucleotide
cgtcaacgcatttatataaaagtaatcactcatgaagtttcttatgatccttacctgga

SEQ ID NO: 375732 - DNA, 55 bp, Artificial
  Synthetic oligonucleotide
cgtcaacgcgtcaatatcaacaaacattgcctacacaagtagtcacacaagaggg

SEQ ID NO: 375733 - DNA, 52 bp, Artificial
  Synthetic oligonucleotide
cgtcaacgtactcctaacgcgtacggaaggtaaactggtatggaagacactt

SEQ ID NO: 375734 - DNA, 57 bp, Artificial
  Synthetic oligonucleotide
cgtcaacgtcagatgttgacttaccgcactaatgtcgcttacgaaatactacctaat

SEQ ID NO: 375735 - DNA, 53 bp, Artificial
  Synthetic oligonucleotide
cgtcaacgtgagccgacagttgcaggttggtaactagcagagaagtcgcaagc

SEQ ID NO: 375736 - DNA, 55 bp, Artificial
  Synthetic oligonucleotide
cgtcaacgtggggaccagcgcgtcaaccatatgggttctttcttgaaacggagga

SEQ ID NO: 375737 - DNA, 56 bp, Artificial
  Synthetic oligonucleotide
cgtcaactaacgcagggtctatcaacgccccaaccgtgtcagatagtagggccctg

SEQ ID NO: 375738 - DNA, 55 bp, Artificial
  Synthetic oligonucleotide
cgtcaactccctcccctcacttcaagcacaagaggaggccagcgccggggagggg

SEQ ID NO: 375739 - DNA, 55 bp, Artificial
  Synthetic oligonucleotide
cgtcaactctgcgctagtacagtgtttcactctcaacgcaagaatcccgttccac

SEQ ID NO: 375740 - DNA, 57 bp, Artificial
  Synthetic oligonucleotide
cgtcaactctttctggaaaatctattggtaggaatgaattgtatgtttcaccagatg

SEQ ID NO: 375741 - DNA, 51 bp, Artificial
  Synthetic oligonucleotide
cgtcaacttccggtgacgtatttccgcttccggtcccgcgaaaattacgta

SEQ ID NO: 375742 - DNA, 55 bp, Artificial
  Synthetic oligonucleotide
cgtcaacttggcacgcgacgtcaacggttatcaacagattaacttggaagagcta

SEQ ID NO: 375743 - DNA, 55 bp, Artificial
  Synthetic oligonucleotide
cgtcaagaaataccagtcttacgttatgacaaaccagaagtaacaaaagactata

SEQ ID NO: 375744 - DNA, 55 bp, Artificial
  Synthetic oligonucleotide
cgtcaagaagacctcacaggtcaagcaatagttgacgagtatgcaaacagcgact

SEQ ID NO: 375745 - DNA, 51 bp, Artificial
  Synthetic oligonucleotide
cgtcaagaatgttgatgatcttggatgtttgtcagacgaggatggcaagga

SEQ ID NO: 375746 - DNA, 55 bp, Artificial
  Synthetic oligonucleotide
cgtcaagagcaatctaaaggatggacgtttaacatcgaagagggagctacactgg

SEQ ID NO: 375747 - DNA, 58 bp, Artificial
  Synthetic oligonucleotide
cgtcaagcactgatccgatggtttgggcccgtatctacggtgcctataatctgggccc

SEQ ID NO: 375748 - DNA, 60 bp, Artificial
  Synthetic oligonucleotide
cgtcaagccaacaatggtgaagatgcaacagccggcctgactcatattatgatttggcat

SEQ ID NO: 375749 - DNA, 55 bp, Artificial
  Synthetic oligonucleotide
cgtcaagccgctggatgacagattcgccacagccctccacttcctcaacgcaatg

SEQ ID NO: 375750 - DNA, 55 bp, Artificial
  Synthetic oligonucleotide
cgtcaagcgcctcatgagattgcgcaacccgctttgcacatgtcaatgacccaac

SEQ ID NO: 375751 - DNA, 57 bp, Artificial
  Synthetic oligonucleotide
cgtcaaggacagaagcccctatagaaccttaatgagctgtcctgttggtgaagcccc

SEQ ID NO: 375752 - DNA, 55 bp, Artificial
  Synthetic oligonucleotide
cgtcaaggatgaacgcttgccaattaggaaagtgctgcatgagcccaaaagtcgg

SEQ ID NO: 375753 - DNA, 55 bp, Artificial
  Synthetic oligonucleotide
cgtcaaggttgacatgagaatcagggacacctgcacaaaggagttctacaaagat

SEQ ID NO: 375754 - DNA, 55 bp, Artificial
  Synthetic oligonucleotide
cgtcaagtccgtcatgtgcaacgctgatgtaattatccggacaaggttctcgtgg

SEQ ID NO: 375755 - DNA, 58 bp, Artificial
  Synthetic oligonucleotide
cgtcaagtcgattctacgatttataaaaccatgcatggacattcattttcagatcaag

SEQ ID NO: 375756 - DNA, 54 bp, Artificial
  Synthetic oligonucleotide
cgtcaagttgaaggtttagcttttggttattacagtaccggcacatcttcaccc

SEQ ID NO: 375757 - DNA, 55 bp, Artificial
  Synthetic oligonucleotide
cgtcaagttgtattctgttcttgccgattgaatatagtcgctggatatgacaggt

SEQ ID NO: 375758 - DNA, 52 bp, Artificial
  Synthetic oligonucleotide
cgtcaatacatggtcttcgggaaatggcaagtcttgcatacgttcgcaatgc

SEQ ID NO: 375759 - DNA, 55 bp, Artificial
  Synthetic oligonucleotide
cgtcaatatgaccctcttctttcagcaaagtgtatgacaatatgttgtctcccag

SEQ ID NO: 375760 - DNA, 55 bp, Artificial
  Synthetic oligonucleotide
cgtcaatattaagtggaggacaattagatgcatgggagagaattcggttaaggcc

SEQ ID NO: 375761 - DNA, 55 bp, Artificial
  Synthetic oligonucleotide
cgtcaatcggatccttacgcagatccggattctgaacaatgggtggatatttctg

SEQ ID NO: 375762 - DNA, 59 bp, Artificial
  Synthetic oligonucleotide
cgtcaatgataacagtcccctccggaggaatttgcgacctaatcagcacctatgcccga

SEQ ID NO: 375763 - DNA, 55 bp, Artificial
  Synthetic oligonucleotide
cgtcaatgatgtgggagatcaatggcccggagtcggtgctagtcaacacctacca

SEQ ID NO: 375764 - DNA, 60 bp, Artificial
  Synthetic oligonucleotide
cgtcaatgatgtgggagattaacggtccagagtcagttctggtcaacacctatcagtgga

SEQ ID NO: 375765 - DNA, 59 bp, Artificial
  Synthetic oligonucleotide
cgtcaatgtacagtgggttgaacatgagttaagggattttttgacacatgagggctcgc

SEQ ID NO: 375766 - DNA, 55 bp, Artificial
  Synthetic oligonucleotide
cgtcaatgtctcgcatcttgaaatagcatcgattacgtacgtgctgtccccgttc

SEQ ID NO: 375767 - DNA, 60 bp, Artificial
  Synthetic oligonucleotide
cgtcaatttgtaatgatgaacataaagctacgatcacacgtacagcattacgatcgctta

SEQ ID NO: 375768 - DNA, 55 bp, Artificial
  Synthetic oligonucleotide
cgtcaatttgtattcgttcgtcagtttatacgaactagtagtgcgaagacccatc

SEQ ID NO: 375769 - DNA, 56 bp, Artificial
  Synthetic oligonucleotide
cgtcacaagaggagccgccctacgttgtggggcgggccgtcttgatccaacatggg

SEQ ID NO: 375770 - DNA, 60 bp, Artificial
  Synthetic oligonucleotide
cgtcacaataacgtgtcactcctggtgattcccattgcacccttggtggctccaactgga

SEQ ID NO: 375771 - DNA, 55 bp, Artificial
  Synthetic oligonucleotide
cgtcacaattggcaaatattaacctatacaacatagcagatgcgggttcacgatc

SEQ ID NO: 375772 - DNA, 59 bp, Artificial
  Synthetic oligonucleotide
cgtcacaccaacgagactctgacgtacaaggttgctctggactaccacttcgttgcctc

SEQ ID NO: 375773 - DNA, 56 bp, Artificial
  Synthetic oligonucleotide
cgtcacactccacacttagttccgtgtgcgcgcgggacccgacggactttcgttca

SEQ ID NO: 375774 - DNA, 60 bp, Artificial
  Synthetic oligonucleotide
cgtcacactgtagatactacctgaacgccacccatcgcaaccgccaagacttggcgaaca

SEQ ID NO: 375775 - DNA, 59 bp, Artificial
  Synthetic oligonucleotide
cgtcacagtcacatgacagccgccatattgggtgcggctaggcgttaccaaaaaaagcg

SEQ ID NO: 375776 - DNA, 55 bp, Artificial
  Synthetic oligonucleotide
cgtcacagttcggttgatctgatacggtaccgttatagccactgcttatagggcg

SEQ ID NO: 375777 - DNA, 55 bp, Artificial
  Synthetic oligonucleotide
cgtcacatgcatccagatgcctccgtaatgaaggttgtttcgcgtgatgtacgca

SEQ ID NO: 375778 - DNA, 55 bp, Artificial
  Synthetic oligonucleotide
cgtcaccacgcagagccccaacacgaccccaacaacactacgaagaagaggggcc

SEQ ID NO: 375779 - DNA, 55 bp, Artificial
  Synthetic oligonucleotide
cgtcaccactgaggtcacggtcagcggcaaggacaatctgacaggcggggtgctt

SEQ ID NO: 375780 - DNA, 57 bp, Artificial
  Synthetic oligonucleotide
cgtcaccactttcgtggctctctatgactacgagtcccggactgaaacggacttgtc

SEQ ID NO: 375781 - DNA, 60 bp, Artificial
  Synthetic oligonucleotide
cgtcaccattaagggggcttcagtgtcatcagtgactcccacggatctagtgggcgctta

SEQ ID NO: 375782 - DNA, 55 bp, Artificial
  Synthetic oligonucleotide
cgtcacccccccggacagtggcttatcgacgaggccggcaggtcaatacccagcc

SEQ ID NO: 375783 - DNA, 55 bp, Artificial
  Synthetic oligonucleotide
cgtcacccgccgttagtgtgtatggtgtaccgatatacgttacgttaccgccatc

SEQ ID NO: 375784 - DNA, 55 bp, Artificial
  Synthetic oligonucleotide
cgtcaccgctggattcgagcggcgcaacaacgagaccaccagcattcttgttgcg

SEQ ID NO: 375785 - DNA, 55 bp, Artificial
  Synthetic oligonucleotide
cgtcaccttaactcaattagccacgctgtctgctcttttcttcaagagctaggag

SEQ ID NO: 375786 - DNA, 55 bp, Artificial
  Synthetic oligonucleotide
cgtcacgagttggtatactcatggactcgcaagcagttatctggagggtgcaaac

SEQ ID NO: 375787 - DNA, 59 bp, Artificial
  Synthetic oligonucleotide
cgtcacgatggtccagcagattcccttcgaggaactccccatgtgcttccgccaactgg

SEQ ID NO: 375788 - DNA, 60 bp, Artificial
  Synthetic oligonucleotide
cgtcacgcagatgagagagctccctaccatggactcagcggcaatgaacgtggaggcttt

SEQ ID NO: 375789 - DNA, 50 bp, Artificial
  Synthetic oligonucleotide
cgtcacgcgcgaggctatcgctcgagtttgtcgcacacaggtatcgcccc

SEQ ID NO: 375790 - DNA, 55 bp, Artificial
  Synthetic oligonucleotide
cgtcacgtatgggcccgattgtcgtacatggcaatgccggaattggtcgcactgg

SEQ ID NO: 375791 - DNA, 55 bp, Artificial
  Synthetic oligonucleotide
cgtcacgtcatccagaggcgaacgcgatcagagtccacggtggagtcgttcttcg

SEQ ID NO: 375792 - DNA, 53 bp, Artificial
  Synthetic oligonucleotide
cgtcacgtctgacgatttgatggtgttgcagtcgaagttcccggtcgattctg

SEQ ID NO: 375793 - DNA, 55 bp, Artificial
  Synthetic oligonucleotide
cgtcactaacaacttcaacttcggataaacctggctaccggcacttgccactgcc

SEQ ID NO: 375794 - DNA, 60 bp, Artificial
  Synthetic oligonucleotide
cgtcactaagaacttgatgtctcagtgtactcaaatgctgcgtgacaccttgcgttcaga

SEQ ID NO: 375795 - DNA, 55 bp, Artificial
  Synthetic oligonucleotide
cgtcactatagatcatctgatacggtcaggtattgcttaattatatggcgcagct

SEQ ID NO: 375796 - DNA, 55 bp, Artificial
  Synthetic oligonucleotide
cgtcactcacaagtagccgaacgtctcaaggaatactattcattcggtcgagccc

SEQ ID NO: 375797 - DNA, 60 bp, Artificial
  Synthetic oligonucleotide
cgtcactcagcataaaagcaacaatcagaatgttaattgaaggactcgaagtatcatttg

SEQ ID NO: 375798 - DNA, 55 bp, Artificial
  Synthetic oligonucleotide
cgtcactctgcatgttaattggaaatactaccgtcattccagagccacgcacact

SEQ ID NO: 375799 - DNA, 60 bp, Artificial
  Synthetic oligonucleotide
cgtcactgggggcatcccttgctgtgtgctgtgaaggcggcaaagaaagtcagagaatcg

SEQ ID NO: 375800 - DNA, 56 bp, Artificial
  Synthetic oligonucleotide
cgtcactggggggaatgccgcccgaaacgcgcgtggagttgctaacctcttcacac

SEQ ID NO: 375801 - DNA, 55 bp, Artificial
  Synthetic oligonucleotide
cgtcactgtcgatcccgtaagctgtataattgctgacttagagaaagtcgaccag

SEQ ID NO: 375802 - DNA, 60 bp, Artificial
  Synthetic oligonucleotide
cgtcacttccattcgcaagtctgttagagataggaccgccaggcacttcgctcggatact

SEQ ID NO: 375803 - DNA, 53 bp, Artificial
  Synthetic oligonucleotide
cgtcacttccttgacgctttcctgggcggggaaaagggccaatataagccgga

SEQ ID NO: 375804 - DNA, 50 bp, Artificial
  Synthetic oligonucleotide
cgtcagaaaatgtaacatcaatacgaagccttggttttggcaatatcaca

SEQ ID NO: 375805 - DNA, 56 bp, Artificial
  Synthetic oligonucleotide
cgtcagaaacaccgagggtcccatcttaccgagtcacatacccggcgcccatctac

SEQ ID NO: 375806 - DNA, 55 bp, Artificial
  Synthetic oligonucleotide
cgtcagaactttgatgtcatcgtggctgagatcgaaaggcttgcttccactagtg

SEQ ID NO: 375807 - DNA, 55 bp, Artificial
  Synthetic oligonucleotide
cgtcagacacgttagcattatccgaggctgtatatcgtacaatatggaactcctc

SEQ ID NO: 375808 - DNA, 50 bp, Artificial
  Synthetic oligonucleotide
cgtcagacgaacggtgtcggcgctagcttagagggagccgctaagaggcg

SEQ ID NO: 375809 - DNA, 60 bp, Artificial
  Synthetic oligonucleotide
cgtcagacgtcgctcgcctgttgaagtcgcaattgaacaacatagaatcttcgcaatacg

SEQ ID NO: 375810 - DNA, 57 bp, Artificial
  Synthetic oligonucleotide
cgtcagactaaacgttgcatgatcgtaaaacatgcccggcttaccgtgagccgcctt

SEQ ID NO: 375811 - DNA, 55 bp, Artificial
  Synthetic oligonucleotide
cgtcagactcagttttccaggacctttgactcgagatcaaacttggagtggggtg

SEQ ID NO: 375812 - DNA, 50 bp, Artificial
  Synthetic oligonucleotide
cgtcagactttggacgcctttggatacagggcaacacctctgtctccgtt

SEQ ID NO: 375813 - DNA, 55 bp, Artificial
  Synthetic oligonucleotide
cgtcagagtatagaatgtctgcccactcactgatgaaagttctggtccaagctag

SEQ ID NO: 375814 - DNA, 60 bp, Artificial
  Synthetic oligonucleotide
cgtcagagtgaactccgcaacgtcgttcgtcagagcgtattctacgcgatccgattctat

SEQ ID NO: 375815 - DNA, 55 bp, Artificial
  Synthetic oligonucleotide
cgtcagagtggaattaccggagcggccccggggcctaattcgagcctcgcccatc

SEQ ID NO: 375816 - DNA, 60 bp, Artificial
  Synthetic oligonucleotide
cgtcagagttatcagtaatgaaggtagacatgcgacatctctcgttgatgcagagaagat

SEQ ID NO: 375817 - DNA, 60 bp, Artificial
  Synthetic oligonucleotide
cgtcagatacacgtccgacaacgtatctacagctggactagcatcacactccctaaactc

SEQ ID NO: 375818 - DNA, 60 bp, Artificial
  Synthetic oligonucleotide
cgtcagatccaggaagcacttgtgcatcagcagtgctttcttcaacccgtggttgaacat

SEQ ID NO: 375819 - DNA, 60 bp, Artificial
  Synthetic oligonucleotide
cgtcagcaagattatgttgatgtgcagttcgcggatcgtgtcacagctcactggaaacga

SEQ ID NO: 375820 - DNA, 55 bp, Artificial
  Synthetic oligonucleotide
cgtcagcaccctctcattgcagggcttcgcacattccaaatggcaactggtgcac

SEQ ID NO: 375821 - DNA, 56 bp, Artificial
  Synthetic oligonucleotide
cgtcagccaagttcacccagtcaatcccaacagaaatgattaccaaaccaatcaca

SEQ ID NO: 375822 - DNA, 54 bp, Artificial
  Synthetic oligonucleotide
cgtcagccacacaactatatcaaacatgcaaggccactggtacatgtcccccag

SEQ ID NO: 375823 - DNA, 60 bp, Artificial
  Synthetic oligonucleotide
cgtcagcccactcgttatccgtatacgcacgctcattcagtgccgcatttgggtcgcgca

SEQ ID NO: 375824 - DNA, 60 bp, Artificial
  Synthetic oligonucleotide
cgtcagcccctcgacccggctgagttgaggaagtgcgttggcatgactgtgtcctacgtg

SEQ ID NO: 375825 - DNA, 58 bp, Artificial
  Synthetic oligonucleotide
cgtcagccgtatggcttctttctcgagacagaggaggtgtatcaaccgggaagatggt

SEQ ID NO: 375826 - DNA, 60 bp, Artificial
  Synthetic oligonucleotide
cgtcagcgaaatgaccataggtacgcactcagatgacatcctatgactagcgggcgttac

SEQ ID NO: 375827 - DNA, 55 bp, Artificial
  Synthetic oligonucleotide
cgtcagcgccggctacacgcagacgccatacgactatgaagccgttggcgatgtg

SEQ ID NO: 375828 - DNA, 55 bp, Artificial
  Synthetic oligonucleotide
cgtcagcggtatatgatggagacgttgtgctagatcttgggacgggaccagaggc

SEQ ID NO: 375829 - DNA, 50 bp, Artificial
  Synthetic oligonucleotide
cgtcagcgtgcaatgacttctccgttcgcatgttgcgagatacgccacat

SEQ ID NO: 375830 - DNA, 55 bp, Artificial
  Synthetic oligonucleotide
cgtcagcgttctattacagagtttaggtgcatgttagattaggattagtatgatg

SEQ ID NO: 375831 - DNA, 55 bp, Artificial
  Synthetic oligonucleotide
cgtcagctactcgaaatggcggtatattccttccgggtcaaaggtcgccgctacg

SEQ ID NO: 375832 - DNA, 55 bp, Artificial
  Synthetic oligonucleotide
cgtcagctgacttcgaagacgaaatggtttgtaaatggctattatcatcaactcc

SEQ ID NO: 375833 - DNA, 55 bp, Artificial
  Synthetic oligonucleotide
cgtcaggaacattagtgaatgaggaaagttgaaacggagaaacccatggtcctcg

SEQ ID NO: 375834 - DNA, 55 bp, Artificial
  Synthetic oligonucleotide
cgtcaggagactggaaatctgtatccctaactatgctagagaagtttcttgcgca

SEQ ID NO: 375835 - DNA, 55 bp, Artificial
  Synthetic oligonucleotide
cgtcagggaacggactggtgatattgaggtctacggaagtgactggtggaaggcc

SEQ ID NO: 375836 - DNA, 59 bp, Artificial
  Synthetic oligonucleotide
cgtcagggcgaaccagaatcacttagcgaattgcttcgagaacgcacgaacgaaactga

SEQ ID NO: 375837 - DNA, 54 bp, Artificial
  Synthetic oligonucleotide
cgtcagggcgacgagcaacgttctttaaaatctttggacacctacaaagattac

SEQ ID NO: 375838 - DNA, 56 bp, Artificial
  Synthetic oligonucleotide
cgtcaggggctacccgctacgggcgctaactggcttagttcacggcgagtatttca

SEQ ID NO: 375839 - DNA, 52 bp, Artificial
  Synthetic oligonucleotide
cgtcaggtaccttggagtttaccaatgaaggtttcaattggactggggttac

SEQ ID NO: 375840 - DNA, 60 bp, Artificial
  Synthetic oligonucleotide
cgtcaggtatggaagatgcaccaagacacgccactcaagacgtagtcggaggtcactgac

SEQ ID NO: 375841 - DNA, 54 bp, Artificial
  Synthetic oligonucleotide
cgtcagtatttcaaacgtgatggctgaggtagaatgaccttttgccctgatttt

SEQ ID NO: 375842 - DNA, 56 bp, Artificial
  Synthetic oligonucleotide
cgtcagtcgaatgttttgccgacgaaagcttcaatttccctagtatcttacagaag

SEQ ID NO: 375843 - DNA, 55 bp, Artificial
  Synthetic oligonucleotide
cgtcagtctcgtttgtggcgtcaggcgacgctagctacctacgggtagctggctt

SEQ ID NO: 375844 - DNA, 59 bp, Artificial
  Synthetic oligonucleotide
cgtcagtctttaattcgaaatgcctaagcgggatccctcatggcgccagatggcgggaa

SEQ ID NO: 375845 - DNA, 55 bp, Artificial
  Synthetic oligonucleotide
cgtcagtgagtggggtcggtgcatatattttgagtttgggcggttgactcacttg

SEQ ID NO: 375846 - DNA, 55 bp, Artificial
  Synthetic oligonucleotide
cgtcagtgttagatacaaaattcagtgactggtgggatcgtcaaattcaaatggg

SEQ ID NO: 375847 - DNA, 53 bp, Artificial
  Synthetic oligonucleotide
cgtcagtgttttacacgtacggcagtgcaccacccaggatgtctatcccctac

SEQ ID NO: 375848 - DNA, 57 bp, Artificial
  Synthetic oligonucleotide
cgtcagtgttttggtgtttcaccgtcttcttcacctctgtgaccgccccagatctag

SEQ ID NO: 375849 - DNA, 57 bp, Artificial
  Synthetic oligonucleotide
cgtcagttaagagagaagaagaagtgcttacgggcaaccttcaaacattgagaataa

SEQ ID NO: 375850 - DNA, 55 bp, Artificial
  Synthetic oligonucleotide
cgtcagttcaagaggaacgtactctcggaaccagtaagtactcaaacgtcacagc

SEQ ID NO: 375851 - DNA, 57 bp, Artificial
  Synthetic oligonucleotide
cgtcagttcccgtagccgccaacaaagttgcaagagcgggcgttgctagcctttgcc

SEQ ID NO: 375852 - DNA, 55 bp, Artificial
  Synthetic oligonucleotide
cgtcagttggtaaacagggctaatgatctagacacggttcccgctattaaattcc

SEQ ID NO: 375853 - DNA, 53 bp, Artificial
  Synthetic oligonucleotide
cgtcagtttaaatacggtctgaaaagagggccttctacggaaggagtgccgga

SEQ ID NO: 375854 - DNA, 55 bp, Artificial
  Synthetic oligonucleotide
cgtcataaccggaaacttcgagtcctctggaccaactaatgctaactctgatcag

SEQ ID NO: 375855 - DNA, 55 bp, Artificial
  Synthetic oligonucleotide
cgtcataagaagcccagtctacattattttgccagtaattatgtctacctaggcc

SEQ ID NO: 375856 - DNA, 55 bp, Artificial
  Synthetic oligonucleotide
cgtcataagtcacgtgggaagagctgctgtgaacctggaagtagctgacccgcgt

SEQ ID NO: 375857 - DNA, 60 bp, Artificial
  Synthetic oligonucleotide
cgtcatacacttcctgggcatggtctacgtgataatataagtagcagcacttccgaatgg

SEQ ID NO: 375858 - DNA, 52 bp, Artificial
  Synthetic oligonucleotide
cgtcatacctacagcaaatcacaggtacacgtgtggatatattcgagtgttc

SEQ ID NO: 375859 - DNA, 60 bp, Artificial
  Synthetic oligonucleotide
cgtcatactacgcaaagatgtcgtgatgcgtggcttcataaccgcgaacacgatcttgaa

SEQ ID NO: 375860 - DNA, 60 bp, Artificial
  Synthetic oligonucleotide
cgtcatagacctagggagcttcatgttgaccgggctatggctgacatggttaattatggg

SEQ ID NO: 375861 - DNA, 51 bp, Artificial
  Synthetic oligonucleotide
cgtcatagtataccaccttgtcgctagtcctgagtacatactcagagtcaa

SEQ ID NO: 375862 - DNA, 59 bp, Artificial
  Synthetic oligonucleotide
cgtcatatcaggtaatgattggatgacgttggggaggatcatacctaccactcccgttc

SEQ ID NO: 375863 - DNA, 55 bp, Artificial
  Synthetic oligonucleotide
cgtcatatcctctgcgcttccacaggcgatacagtcgccatgctatgtgtgcgcg

SEQ ID NO: 375864 - DNA, 60 bp, Artificial
  Synthetic oligonucleotide
cgtcatatctcatggctatcaacctacatacgattacccctcataccccgacctcactcc

SEQ ID NO: 375865 - DNA, 60 bp, Artificial
  Synthetic oligonucleotide
cgtcatatgcgtcgcttacaaaagacgtaaccgctttcgtccatcactcacatatatctt

SEQ ID NO: 375866 - DNA, 55 bp, Artificial
  Synthetic oligonucleotide
cgtcatatttatgtggcggctcttgaacccaaaggcgctatagacggttgggcag

SEQ ID NO: 375867 - DNA, 55 bp, Artificial
  Synthetic oligonucleotide
cgtcatcaaaggctgttgcatatgccttgaaacaagtatgcagcaaggttgcaga

SEQ ID NO: 375868 - DNA, 60 bp, Artificial
  Synthetic oligonucleotide
cgtcatcaatgacgttatactccacttcgtctgagaacacctttgagttgaaatctagat

SEQ ID NO: 375869 - DNA, 55 bp, Artificial
  Synthetic oligonucleotide
cgtcatcaatgacgttgtaccaggagtcattgttgtataccttggggctcaagtc

SEQ ID NO: 375870 - DNA, 55 bp, Artificial
  Synthetic oligonucleotide
cgtcatcacaatctggtgtactccaccacttcacgtagtgcttgcctaaggcaga

SEQ ID NO: 375871 - DNA, 60 bp, Artificial
  Synthetic oligonucleotide
cgtcatcaggagaattgtggaacaattcagggacaagaagatgtacaagcttgtactatg

SEQ ID NO: 375872 - DNA, 55 bp, Artificial
  Synthetic oligonucleotide
cgtcatcaggattatcgctttgacgccatttatttctttcacctttcaccagctc

SEQ ID NO: 375873 - DNA, 60 bp, Artificial
  Synthetic oligonucleotide
cgtcatcagtaagttcagtttcgacacaaacgtcaactatcagtagaagattgagactaa

SEQ ID NO: 375874 - DNA, 60 bp, Artificial
  Synthetic oligonucleotide
cgtcatcagtgtctagaagcgcatcaataagatcaataggatcgactacatcagcatgga

SEQ ID NO: 375875 - DNA, 52 bp, Artificial
  Synthetic oligonucleotide
cgtcatcatgacgcaggcagatcatgtgtacaactacatgactcagcttacc

SEQ ID NO: 375876 - DNA, 55 bp, Artificial
  Synthetic oligonucleotide
cgtcatccgcttttaatctcaactgccaaagggttaagggttatcggcgttgata

SEQ ID NO: 375877 - DNA, 55 bp, Artificial
  Synthetic oligonucleotide
cgtcatcgaaaatcatttcggtattataccgtagctcctcatgattgtgatgacc

SEQ ID NO: 375878 - DNA, 60 bp, Artificial
  Synthetic oligonucleotide
cgtcatcgatgacgttgtaccatgcgtcgttgctgtacacctttgggcttaggtctagat

SEQ ID NO: 375879 - DNA, 51 bp, Artificial
  Synthetic oligonucleotide
cgtcatcgtgttacgagttcgtgccagatccggtaaaagttctgacgaagt

SEQ ID NO: 375880 - DNA, 55 bp, Artificial
  Synthetic oligonucleotide
cgtcatcgttcttgtttcgatgttctcttcctgggatgtcgatttatagtggttg

SEQ ID NO: 375881 - DNA, 60 bp, Artificial
  Synthetic oligonucleotide
cgtcatctaaatactgacattcctcctagaatgggatggttacgtgccattttgcgattc

SEQ ID NO: 375882 - DNA, 52 bp, Artificial
  Synthetic oligonucleotide
cgtcatctaaggctaaacgtagacgccgggcttaaggggtcttactttatat

SEQ ID NO: 375883 - DNA, 57 bp, Artificial
  Synthetic oligonucleotide
cgtcatctacctcgaccgagatgttcgttgtccagtgagatcctgagtcagctttgc

SEQ ID NO: 375884 - DNA, 51 bp, Artificial
  Synthetic oligonucleotide
cgtcatctggaagtgagggtatatttgttagtgactcgacaaatttcacgg

SEQ ID NO: 375885 - DNA, 60 bp, Artificial
  Synthetic oligonucleotide
cgtcatctgggattttgggctacaatcgtctgtcaccctcgtgataccatggatcagcaa

SEQ ID NO: 375886 - DNA, 60 bp, Artificial
  Synthetic oligonucleotide
cgtcatctgtagatgatgtagtcatggtgcttagacgctggcagattgtgggtgattttc

SEQ ID NO: 375887 - DNA, 59 bp, Artificial
  Synthetic oligonucleotide
cgtcatctttagtaagagagcactggggatatgtgaggaaatagtttttggctgagact

SEQ ID NO: 375888 - DNA, 55 bp, Artificial
  Synthetic oligonucleotide
cgtcatgaatgaaagcactatgatccggagttcatctttgagagtcccaactctc

SEQ ID NO: 375889 - DNA, 55 bp, Artificial
  Synthetic oligonucleotide
cgtcatgagcgcattcggccaggctaccatttccgttggtaacgttagggtgact

SEQ ID NO: 375890 - DNA, 60 bp, Artificial
  Synthetic oligonucleotide
cgtcatgcagtctttggtcgtgaatttcaatgatgacatgccctgtggcgttaatgggta

SEQ ID NO: 375891 - DNA, 55 bp, Artificial
  Synthetic oligonucleotide
cgtcatgcccttgcctgctacgctacactaacgtcttcaggggcaccacgtaaac

SEQ ID NO: 375892 - DNA, 55 bp, Artificial
  Synthetic oligonucleotide
cgtcatgctaaacgggtcgtatcgtgatataagagtcttggatggcaacggcgcg

SEQ ID NO: 375893 - DNA, 55 bp, Artificial
  Synthetic oligonucleotide
cgtcatgctgactccacatatacatacaccactcccagctatggtatctgccggt

SEQ ID NO: 375894 - DNA, 60 bp, Artificial
  Synthetic oligonucleotide
cgtcatgtcctcatgcttgaactcatcaaacgtggtgtcacgatacatgatagtcagtat

SEQ ID NO: 375895 - DNA, 55 bp, Artificial
  Synthetic oligonucleotide
cgtcatgtgccatgcaaccctcacccataggctgatgtctcctcatagggtgcct

SEQ ID NO: 375896 - DNA, 55 bp, Artificial
  Synthetic oligonucleotide
cgtcatgtgccatgccacgtacgtccacagaaggctgctgccccaagggagacaa

SEQ ID NO: 375897 - DNA, 60 bp, Artificial
  Synthetic oligonucleotide
cgtcatgtggcgatcgttgtgatattataacacatagcgagtcgtaggtctaccatcgcc

SEQ ID NO: 375898 - DNA, 58 bp, Artificial
  Synthetic oligonucleotide
cgtcatgttgtatggtactatggccaggtacttaaggaaaatgcggcaaagattccag

SEQ ID NO: 375899 - DNA, 50 bp, Artificial
  Synthetic oligonucleotide
cgtcattaagtaagatggcgctcaattaagttttctagtaccgcatgagg

SEQ ID NO: 375900 - DNA, 52 bp, Artificial
  Synthetic oligonucleotide
cgtcattcagctagatttgtcaccagggggaccgaacgccaatgtgatgtca

SEQ ID NO: 375901 - DNA, 53 bp, Artificial
  Synthetic oligonucleotide
cgtcattctttgggtttaaaaccgctctatatttaacggcaggatgtacttcg

SEQ ID NO: 375902 - DNA, 55 bp, Artificial
  Synthetic oligonucleotide
cgtcattgggatacaggcaatctgtcgtagatcaattgataccgttatatgcgac

SEQ ID NO: 375903 - DNA, 60 bp, Artificial
  Synthetic oligonucleotide
cgtcattgttaattgttgtgacatatacatgagtctcttcatcttaaatactgctgggaa

SEQ ID NO: 375904 - DNA, 57 bp, Artificial
  Synthetic oligonucleotide
cgtcatttccatgtaaatatgaacaacacatgagatgaatcgtcttaaatagcgtcc

SEQ ID NO: 375905 - DNA, 55 bp, Artificial
  Synthetic oligonucleotide
cgtcatttgatgtggatgcaaggttctttaacaatggctacgctaactgaggatg

SEQ ID NO: 375906 - DNA, 53 bp, Artificial
  Synthetic oligonucleotide
cgtccaaacacagggaagattgttactaacgactaaccaattccttacgtcaa

SEQ ID NO: 375907 - DNA, 55 bp, Artificial
  Synthetic oligonucleotide
cgtccaaataaacagcaagatgtcgaaatcgctaacacacaagagacgcaatgga

SEQ ID NO: 375908 - DNA, 55 bp, Artificial
  Synthetic oligonucleotide
cgtccaaatagcttacgattcaccgtccgtagtcgatggagccacgcactatggc

SEQ ID NO: 375909 - DNA, 59 bp, Artificial
  Synthetic oligonucleotide
cgtccaaatggcgctattagcccttggcaggtggaccggcacttacatctatgaccacc

SEQ ID NO: 375910 - DNA, 60 bp, Artificial
  Synthetic oligonucleotide
cgtccaacagaaaggaaacacatataaaattgttagtgcaattacatcagcaatgggctc

SEQ ID NO: 375911 - DNA, 52 bp, Artificial
  Synthetic oligonucleotide
cgtccaaccccacccccaggagggtcgcccaggaatggcgggaccccactca

SEQ ID NO: 375912 - DNA, 53 bp, Artificial
  Synthetic oligonucleotide
cgtccaagccgcggacgttaaactgtggcacggttgtgcctaggtgcaaccct

SEQ ID NO: 375913 - DNA, 55 bp, Artificial
  Synthetic oligonucleotide
cgtccaaggccttgtgctaaacgccaccatttacctggtaggctttgatgggacc

SEQ ID NO: 375914 - DNA, 58 bp, Artificial
  Synthetic oligonucleotide
cgtccaaggtaaataatatcgtcgacagaatgaatacaaatttcgagtctgtacaaca

SEQ ID NO: 375915 - DNA, 56 bp, Artificial
  Synthetic oligonucleotide
cgtccaagtctatcgagattagttaaataaacatttgaagtttcaagccgccattc

SEQ ID NO: 375916 - DNA, 58 bp, Artificial
  Synthetic oligonucleotide
cgtccaataccgaaaacctcaatgcacggtcacctgtagaggagaatgcgcgcacggt

SEQ ID NO: 375917 - DNA, 60 bp, Artificial
  Synthetic oligonucleotide
cgtccaatcatgttacgtctgacgagcttatgtacattcaacaacttgggcctcaagttg

SEQ ID NO: 375918 - DNA, 55 bp, Artificial
  Synthetic oligonucleotide
cgtccaatcttatcaggctaactgccgcagaccatatgtttgctcacaacgtgct

SEQ ID NO: 375919 - DNA, 55 bp, Artificial
  Synthetic oligonucleotide
cgtccaatgagagttcttcacgagatggctggatgtccaattcgccgagctcaaa

SEQ ID NO: 375920 - DNA, 55 bp, Artificial
  Synthetic oligonucleotide
cgtccacagcaacctctaccttgtctagaaccagcgactgggttagaggacagaa

SEQ ID NO: 375921 - DNA, 51 bp, Artificial
  Synthetic oligonucleotide
cgtccacagttaaggctaaacttctatctgtagaggaggcctgtaagctaa

SEQ ID NO: 375922 - DNA, 52 bp, Artificial
  Synthetic oligonucleotide
cgtccacctaacatgacaccagctgttaatgcactgtttccacaagcacaac

SEQ ID NO: 375923 - DNA, 60 bp, Artificial
  Synthetic oligonucleotide
cgtccacgatgcttgtaacgattcattgtccgtcattcttttgtcatgtatctctacaat

SEQ ID NO: 375924 - DNA, 60 bp, Artificial
  Synthetic oligonucleotide
cgtccactattgctactggtaccaatcttgtgctttacgctgccccgttgagccctctgc

SEQ ID NO: 375925 - DNA, 55 bp, Artificial
  Synthetic oligonucleotide
cgtccactctggacctgacgagtaccggcgtctcttcgagcctttccagggcctt

SEQ ID NO: 375926 - DNA, 53 bp, Artificial
  Synthetic oligonucleotide
cgtccactgataggttcgcagtgtggaccataaacataagggagatggcccaa

SEQ ID NO: 375927 - DNA, 54 bp, Artificial
  Synthetic oligonucleotide
cgtccagaacgcagaatcgacagcgtgcacatgaatccagacgtctacaagatc

SEQ ID NO: 375928 - DNA, 55 bp, Artificial
  Synthetic oligonucleotide
cgtccagactttgaagttcagaaaacacttgtgaatccccaacgccttccgcagg

SEQ ID NO: 375929 - DNA, 55 bp, Artificial
  Synthetic oligonucleotide
cgtccagattcggaaggttagaaaacacttgtgcattcccagagctttccgaagg

SEQ ID NO: 375930 - DNA, 59 bp, Artificial
  Synthetic oligonucleotide
cgtccagcaagcctgtaaggattcattatctgtcatccttttgtcatgaatctccacta

SEQ ID NO: 375931 - DNA, 60 bp, Artificial
  Synthetic oligonucleotide
cgtccagcacaacatagtcaatacctcgggctatgtcgtacaaggcaatggagtgttggc

SEQ ID NO: 375932 - DNA, 57 bp, Artificial
  Synthetic oligonucleotide
cgtccagcccctccccagtcctggtgaagggggactccgggatgccttgcatgctgg

SEQ ID NO: 375933 - DNA, 57 bp, Artificial
  Synthetic oligonucleotide
cgtccagcccctccccgtgtctagtgaagggagactccgggactccttgcatgctgg

SEQ ID NO: 375934 - DNA, 55 bp, Artificial
  Synthetic oligonucleotide
cgtccagcggtatcgcgaaaccatgacggcagccttcgccgaatcggttgcccag

SEQ ID NO: 375935 - DNA, 59 bp, Artificial
  Synthetic oligonucleotide
cgtccagctatgcgggagcaatttttaaggggagcggctgtatcatggacaggaattcg

SEQ ID NO: 375936 - DNA, 55 bp, Artificial
  Synthetic oligonucleotide
cgtccagggacctagtagtcagttatgttaactctcatatgggcctgaagttcag

SEQ ID NO: 375937 - DNA, 52 bp, Artificial
  Synthetic oligonucleotide
cgtccaggggtttgtaaccggaccccagcgtcacggtgacagttcgccggcc

SEQ ID NO: 375938 - DNA, 60 bp, Artificial
  Synthetic oligonucleotide
cgtccaggtatacacgccactctctgcctgagttgcagtgatgagttcccctgtgcgtga

SEQ ID NO: 375939 - DNA, 60 bp, Artificial
  Synthetic oligonucleotide
cgtccagtcacaggactgtaggcctgtaccgacattcctgactggctgtaccaagcgaca

SEQ ID NO: 375940 - DNA, 55 bp, Artificial
  Synthetic oligonucleotide
cgtccagtcgatcgtccacgggtacatcgaggctctgttgtggacgcaagcggac

SEQ ID NO: 375941 - DNA, 60 bp, Artificial
  Synthetic oligonucleotide
cgtccagtcgtctttcagctttggcaaataatcgtacttcacattgtcaatggttctgat

SEQ ID NO: 375942 - DNA, 56 bp, Artificial
  Synthetic oligonucleotide
cgtccataacccttgccaaggttggctcatggtattcagccaattacgcagaggga

SEQ ID NO: 375943 - DNA, 55 bp, Artificial
  Synthetic oligonucleotide
cgtccatgaaggccggtctatgctcgctaaacgcgatcaagctgtattagacggc

SEQ ID NO: 375944 - DNA, 55 bp, Artificial
  Synthetic oligonucleotide
cgtccatgacagataaggatgattcggtataacatacgtaatgcgattccttagc

SEQ ID NO: 375945 - DNA, 55 bp, Artificial
  Synthetic oligonucleotide
cgtccatgccgacctgaaacgacaccgttcccgcctcgtatcgcgacgtgagcaa

SEQ ID NO: 375946 - DNA, 55 bp, Artificial
  Synthetic oligonucleotide
cgtccatgtttacacccgtcgtcataggcgactggaaacttgcagccatgccaag

SEQ ID NO: 375947 - DNA, 55 bp, Artificial
  Synthetic oligonucleotide
cgtccattggagcatggagccaagagatgcagggatggagtgatgccaaggaagc

SEQ ID NO: 375948 - DNA, 55 bp, Artificial
  Synthetic oligonucleotide
cgtccattgttttcgtctagtgaaccattcttgtgcttgtaggtataatcatttg

SEQ ID NO: 375949 - DNA, 56 bp, Artificial
  Synthetic oligonucleotide
cgtcccaacacttcgtgtttacgagatcaacgtgaccaatctgcggaacgcttttc

SEQ ID NO: 375950 - DNA, 55 bp, Artificial
  Synthetic oligonucleotide
cgtcccaacattgaccatatcattatccactaggagtatagtgagcagattttcc

SEQ ID NO: 375951 - DNA, 58 bp, Artificial
  Synthetic oligonucleotide
cgtcccaaggaacacatgtgttactggtagtcttgaacgaaaaagccagatggtctga

SEQ ID NO: 375952 - DNA, 54 bp, Artificial
  Synthetic oligonucleotide
cgtcccaagtgccagttctaaacgtagcgataactcgttttgcgcggttaggtg

SEQ ID NO: 375953 - DNA, 54 bp, Artificial
  Synthetic oligonucleotide
cgtcccaccactacggtaaggcgttcgcgcccctattcacgtccaacgcgatgt

SEQ ID NO: 375954 - DNA, 58 bp, Artificial
  Synthetic oligonucleotide
cgtcccagaagctcgaatcgactccgtccagacttggtagttcaggaacgctttgtga

SEQ ID NO: 375955 - DNA, 53 bp, Artificial
  Synthetic oligonucleotide
cgtcccagagaaccccaagcaggcctaccggaaacggatgaccagaggccttt

SEQ ID NO: 375956 - DNA, 60 bp, Artificial
  Synthetic oligonucleotide
cgtcccagaggatcaagccaaggatttcacaaagatggcacgcgagatagcagtgaaaca

SEQ ID NO: 375957 - DNA, 60 bp, Artificial
  Synthetic oligonucleotide
cgtcccagatatagacgccattcgcctgctgagcagcagtgatgctctcccctgtgcgtg

SEQ ID NO: 375958 - DNA, 51 bp, Artificial
  Synthetic oligonucleotide
cgtcccagtacctcggctggtttgtacctgcggggtccgggtaccaacctg

SEQ ID NO: 375959 - DNA, 55 bp, Artificial
  Synthetic oligonucleotide
cgtcccagtcctcgagaacgaacgactaattgcatcagccgcctacccaaaaggg

SEQ ID NO: 375960 - DNA, 58 bp, Artificial
  Synthetic oligonucleotide
cgtcccatgagccgtcggataccaccccggtgtagtcatgacaccagattaccgaaca

SEQ ID NO: 375961 - DNA, 52 bp, Artificial
  Synthetic oligonucleotide
cgtcccatgggcttctgcgggtggaccaaatgaagtccccctacgaagcagc

SEQ ID NO: 375962 - DNA, 60 bp, Artificial
  Synthetic oligonucleotide
cgtcccatgtgagaatgataatggcaccttgcattgctggatacaagtaacacccaacgt

SEQ ID NO: 375963 - DNA, 58 bp, Artificial
  Synthetic oligonucleotide
cgtcccattgctaccatgccgagtgggacacaggcctaaattcaactttcaccttcac

SEQ ID NO: 375964 - DNA, 57 bp, Artificial
  Synthetic oligonucleotide
cgtccccaaaacaaaaatacagcacttggaggaatgttcctgttatgtggacactga

SEQ ID NO: 375965 - DNA, 56 bp, Artificial
  Synthetic oligonucleotide
cgtccccaacgcgcaaatgagcgacggcaattcctacctagggcttccggacgtga

SEQ ID NO: 375966 - DNA, 57 bp, Artificial
  Synthetic oligonucleotide
cgtccccacgaccgagctgagagacgagtggaaaggcctcatggagcctcgggacca

SEQ ID NO: 375967 - DNA, 53 bp, Artificial
  Synthetic oligonucleotide
cgtccccacttccgtcagctctccgagtccacgacgtagttttaccaaactcg

SEQ ID NO: 375968 - DNA, 50 bp, Artificial
  Synthetic oligonucleotide
cgtcccccgaggaagaaggtcgagtatttcgtcccctcgcccgccccttg

SEQ ID NO: 375969 - DNA, 54 bp, Artificial
  Synthetic oligonucleotide
cgtccccctcactgcggttggtacccctctctacgccactggcgagtctgccaa

SEQ ID NO: 375970 - DNA, 52 bp, Artificial
  Synthetic oligonucleotide
cgtcccccttgccagtctcgggtgggcgcttgccctcccttcgtgggggttc

SEQ ID NO: 375971 - DNA, 60 bp, Artificial
  Synthetic oligonucleotide
cgtccccgacctcctgccacgactgggacacgctgctagaatcttccagcgatacgctgt

SEQ ID NO: 375972 - DNA, 55 bp, Artificial
  Synthetic oligonucleotide
cgtccccgcgggaatgactactacgacgagccagatgattggtactcggaagggg

SEQ ID NO: 375973 - DNA, 54 bp, Artificial
  Synthetic oligonucleotide
cgtccccggggtcgtttgccattcccctgaagcatgtccatttgatccctacct

SEQ ID NO: 375974 - DNA, 55 bp, Artificial
  Synthetic oligonucleotide
cgtccccggtgtgcccataccgtctaagatatcacagtttggctacgatgttgcg

SEQ ID NO: 375975 - DNA, 50 bp, Artificial
  Synthetic oligonucleotide
cgtcccctacgtctcatactcacaccccggcttctctcggtgcagcaccc

SEQ ID NO: 375976 - DNA, 58 bp, Artificial
  Synthetic oligonucleotide
cgtcccctgcgctcagattgtacatgttccgaaaaacgtgcctcatgaacttccccga

SEQ ID NO: 375977 - DNA, 54 bp, Artificial
  Synthetic oligonucleotide
cgtcccctggaactgatatccggagttatctcttatatattactgaggctcgat

SEQ ID NO: 375978 - DNA, 53 bp, Artificial
  Synthetic oligonucleotide
cgtccccttctccgtctgccgtaccgtccgaccacggggcgcacctctcttta

SEQ ID NO: 375979 - DNA, 55 bp, Artificial
  Synthetic oligonucleotide
cgtcccgagcgcatgtgctacgaacagtggcgcgatctcgttgttctgcctcgtg

SEQ ID NO: 375980 - DNA, 50 bp, Artificial
  Synthetic oligonucleotide
cgtcccgagtactagggtcacgtgggacgcaataagcgtggtcgttggcc

SEQ ID NO: 375981 - DNA, 58 bp, Artificial
  Synthetic oligonucleotide
cgtcccgatgccgaagcttaggcgccaaccacctagggtggctgtcggcttctctatg

SEQ ID NO: 375982 - DNA, 58 bp, Artificial
  Synthetic oligonucleotide
cgtcccgcgcgacatcgctggcgactgggtgtacccaagtgacgttctccaggtatcc

SEQ ID NO: 375983 - DNA, 53 bp, Artificial
  Synthetic oligonucleotide
cgtcccgtcagcgatgaatcccgcggacgacccgtctcggggccgtttgggac

SEQ ID NO: 375984 - DNA, 57 bp, Artificial
  Synthetic oligonucleotide
cgtcccgtgctgggaccattcacgtgtgaaactgtcaaattcccctcgaagtgacta

SEQ ID NO: 375985 - DNA, 55 bp, Artificial
  Synthetic oligonucleotide
cgtccctaggcaagagctaacgccgaacctagtgcagtaaaccgcgcttgcaccc

SEQ ID NO: 375986 - DNA, 55 bp, Artificial
  Synthetic oligonucleotide
cgtccctcatctcccatggagggagggcggccgtttgcggtcggtatctcttcaa

SEQ ID NO: 375987 - DNA, 59 bp, Artificial
  Synthetic oligonucleotide
cgtccctcgatggatgcacttttggtgaggaactacgcacctgagagtaataatctggc

SEQ ID NO: 375988 - DNA, 55 bp, Artificial
  Synthetic oligonucleotide
cgtccctctcgggatgtgactacttctgcttcggacactattacggtcagaattg

SEQ ID NO: 375989 - DNA, 55 bp, Artificial
  Synthetic oligonucleotide
cgtccctgcggcgctgaatcccgcggacgacccgtctcggggtcgcttggggatc

SEQ ID NO: 375990 - DNA, 52 bp, Artificial
  Synthetic oligonucleotide
cgtccctgcgttcgttgaagtaaacgatcggattaagttgtgggcggagcac

SEQ ID NO: 375991 - DNA, 55 bp, Artificial
  Synthetic oligonucleotide
cgtccctgtcttgtatatgcactcgcgctcatctgccaacatagcatacaaagac

SEQ ID NO: 375992 - DNA, 55 bp, Artificial
  Synthetic oligonucleotide
cgtcccttaccctcgttcgacggaggtgtatgttcgatccatatttggcccaggc

SEQ ID NO: 375993 - DNA, 55 bp, Artificial
  Synthetic oligonucleotide
cgtcccttgctctgcgtaaagtccctgcaacatatgtaacaccatctcatcctcg

SEQ ID NO: 375994 - DNA, 60 bp, Artificial
  Synthetic oligonucleotide
cgtccctttcttcgtcattatatgcagtaagttctggcgtcgcgccatagccaaggagaa

SEQ ID NO: 375995 - DNA, 57 bp, Artificial
  Synthetic oligonucleotide
cgtccctttggtagctcgcatggcaactaaagcctttcctaggggcacgcacgccaa

SEQ ID NO: 375996 - DNA, 56 bp, Artificial
  Synthetic oligonucleotide
cgtccgaatccgcattcgaatgggccgggcctatagtactcctactagcccaggac

SEQ ID NO: 375997 - DNA, 55 bp, Artificial
  Synthetic oligonucleotide
cgtccgaccttggtaagatgtccaaggcgggggagggcaagcatcaagaggactt

SEQ ID NO: 375998 - DNA, 59 bp, Artificial
  Synthetic oligonucleotide
cgtccgacgagctcttagctccctgaatgttcggatggaaatgtgctgacctagttggg

SEQ ID NO: 375999 - DNA, 54 bp, Artificial
  Synthetic oligonucleotide
cgtccgacgaggttaacggtagtgctttcaaaataacacgcactgtcggagaaa

SEQ ID NO: 376000 - DNA, 60 bp, Artificial
  Synthetic oligonucleotide
cgtccgactcgtattcatatggttgaagcgttgcaatcatataacgattgagtacagtac

SEQ ID NO: 376001 - DNA, 57 bp, Artificial
  Synthetic oligonucleotide
cgtccgagttgaagggaacgctcatggcgagtcctcatatcctcgctcctatttcac

SEQ ID NO: 376002 - DNA, 58 bp, Artificial
  Synthetic oligonucleotide
cgtccgatacggctgcgtgaactggacaaactctaactttccatttcaagacttagca

SEQ ID NO: 376003 - DNA, 55 bp, Artificial
  Synthetic oligonucleotide
cgtccgatccatcctgaaatctgggctcaactttgcttcgaccatacctggcccc

SEQ ID NO: 376004 - DNA, 55 bp, Artificial
  Synthetic oligonucleotide
cgtccgatgacgcacgacgaccttcgggcgctcgttctcgataagtacgggtgtg

SEQ ID NO: 376005 - DNA, 60 bp, Artificial
  Synthetic oligonucleotide
cgtccgattatccatgctgtggcccctgactatagggttgagcagaaccccaagaggcta

SEQ ID NO: 376006 - DNA, 55 bp, Artificial
  Synthetic oligonucleotide
cgtccgcatatccaatatggaattagcgtccgttcatcggttcgctgcaatgcgt

SEQ ID NO: 376007 - DNA, 56 bp, Artificial
  Synthetic oligonucleotide
cgtccgcatcctacgcaacaagtacccacagtacctaccccacgtcacaaaatatg

SEQ ID NO: 376008 - DNA, 50 bp, Artificial
  Synthetic oligonucleotide
cgtccgccaaagataatatattacgaatatagcccgctacccgtgtcata

SEQ ID NO: 376009 - DNA, 51 bp, Artificial
  Synthetic oligonucleotide
cgtccgccagggtacttccgctaaagggaatccttacacgttccaagaagg

SEQ ID NO: 376010 - DNA, 57 bp, Artificial
  Synthetic oligonucleotide
cgtccgcccatgcttgcatctcgtccggaactttagtgaacgaggatagttgaaacg

SEQ ID NO: 376011 - DNA, 55 bp, Artificial
  Synthetic oligonucleotide
cgtccgccgagctggaactgtcggaaactaaacgtcaggaagctcaacgtgcgcg

SEQ ID NO: 376012 - DNA, 55 bp, Artificial
  Synthetic oligonucleotide
cgtccgcgacgtgatggctcttaccagcggcatgtatctcgtgcgtcaacccacc

SEQ ID NO: 376013 - DNA, 55 bp, Artificial
  Synthetic oligonucleotide
cgtccgctctttggggtgtacgatccaggggctatacgatccccgctaatctgcc

SEQ ID NO: 376014 - DNA, 58 bp, Artificial
  Synthetic oligonucleotide
cgtccgctttgagtccaagattgtggacggcggctgctttgccccatgggacctcgag

SEQ ID NO: 376015 - DNA, 53 bp, Artificial
  Synthetic oligonucleotide
cgtccggaacgaataaaaacgacgccgtatttagaaggagatgtgctttcgaa

SEQ ID NO: 376016 - DNA, 54 bp, Artificial
  Synthetic oligonucleotide
cgtccggaacgaataaagacgacgccgtatttagaaggggatgtgttatcaagc

SEQ ID NO: 376017 - DNA, 52 bp, Artificial
  Synthetic oligonucleotide
cgtccggaacgttagtgaaagaggagagtggaaacggaggagcccaaggttc

SEQ ID NO: 376018 - DNA, 56 bp, Artificial
  Synthetic oligonucleotide
cgtccggagagaataaaaacgacgccttatttagagggagatgtactgtcgagtga

SEQ ID NO: 376019 - DNA, 59 bp, Artificial
  Synthetic oligonucleotide
cgtccgggacaaaatgcgccatactgaacgtttattgagcatgcggaaagccatcttaa

SEQ ID NO: 376020 - DNA, 50 bp, Artificial
  Synthetic oligonucleotide
cgtccgtaacgtaccgtaaccgaaagtgatttggtaatacgctgagcgcc

SEQ ID NO: 376021 - DNA, 55 bp, Artificial
  Synthetic oligonucleotide
cgtccgtaagcgaaatatatacccggatctgtctgctcttaaaggcggcggttcc

SEQ ID NO: 376022 - DNA, 54 bp, Artificial
  Synthetic oligonucleotide
cgtccgtacgcgtgcttaatgttgcgccctgtagccacgatagtaaacgccgga

SEQ ID NO: 376023 - DNA, 55 bp, Artificial
  Synthetic oligonucleotide
cgtccgtagtccgatgttcctctactctctggagatctctaaaatactctctcct

SEQ ID NO: 376024 - DNA, 57 bp, Artificial
  Synthetic oligonucleotide
cgtccgtcggcggatgttgtcgttttctggcgatctcaactgcaacgctaccgggta

SEQ ID NO: 376025 - DNA, 58 bp, Artificial
  Synthetic oligonucleotide
cgtccgtcttgatcgtgatagagtacccacaatggttggagtcacccgtcagtcccga

SEQ ID NO: 376026 - DNA, 59 bp, Artificial
  Synthetic oligonucleotide
cgtccgtgacggcataagaacaaaatcgttgtctgcaggtgttcgatccgtatataaca

SEQ ID NO: 376027 - DNA, 50 bp, Artificial
  Synthetic oligonucleotide
cgtccgtgattgtgcactggtgtcgatatcgcatagcgagatgcaaaggt

SEQ ID NO: 376028 - DNA, 53 bp, Artificial
  Synthetic oligonucleotide
cgtccgtggacaagccgactgagccgggagttagtgctgagcgtttctacacc

SEQ ID NO: 376029 - DNA, 55 bp, Artificial
  Synthetic oligonucleotide
cgtccgtgggttgaaagcaatcgctggaatttgtcgaaaacgcacgagccgcaga

SEQ ID NO: 376030 - DNA, 53 bp, Artificial
  Synthetic oligonucleotide
cgtccgtgtaaaccttgtccccaaacctcagtcccgtacatcgaacccatcca

SEQ ID NO: 376031 - DNA, 55 bp, Artificial
  Synthetic oligonucleotide
cgtccgtgtgcgcgcgggaaccgatggactttcgttcacccacctacagctggac

SEQ ID NO: 376032 - DNA, 58 bp, Artificial
  Synthetic oligonucleotide
cgtccgttaagccgatgttaaacatacattttgctataaatgtcgctattgtgcctat

SEQ ID NO: 376033 - DNA, 56 bp, Artificial
  Synthetic oligonucleotide
cgtccgttagagatctcctcgacaccgcatcagctctgtatcgggaagctttagag

SEQ ID NO: 376034 - DNA, 55 bp, Artificial
  Synthetic oligonucleotide
cgtccgttagcgtcagactactcgaactcgacggatattgtctcgatctgagaca

SEQ ID NO: 376035 - DNA, 53 bp, Artificial
  Synthetic oligonucleotide
cgtccgttgccatgccagaaaggccgtaaaccacatcaactccgtgtggcaac

SEQ ID NO: 376036 - DNA, 55 bp, Artificial
  Synthetic oligonucleotide
cgtccgttgggacgcgaggaattttggtgaggccattaacacctttgctggcctc

SEQ ID NO: 376037 - DNA, 59 bp, Artificial
  Synthetic oligonucleotide
cgtcctaacgtataaacatgagccatgatagggggagtgacttaccacctgagagcatt

SEQ ID NO: 376038 - DNA, 55 bp, Artificial
  Synthetic oligonucleotide
cgtcctaagaagatcatcgttacttccaactatcaccccaacgaaatctggacgg

SEQ ID NO: 376039 - DNA, 56 bp, Artificial
  Synthetic oligonucleotide
cgtcctaagcttctggcccaagtagatttccctgtccttgttggaccgacgatgta

SEQ ID NO: 376040 - DNA, 60 bp, Artificial
  Synthetic oligonucleotide
cgtcctaatagagtgggaggcacagcgctgcaactgttattggactattgttaccgcatg

SEQ ID NO: 376041 - DNA, 55 bp, Artificial
  Synthetic oligonucleotide
cgtcctacaagacataggggacgggaagaaacaaatcgccccgcaatataggatc

SEQ ID NO: 376042 - DNA, 55 bp, Artificial
  Synthetic oligonucleotide
cgtcctaccggattgcggaatctcatagattacagacataacggtatgtgcatag

SEQ ID NO: 376043 - DNA, 55 bp, Artificial
  Synthetic oligonucleotide
cgtcctagcatctacaaatgctggctccatcaatgcgccaacagtctcggacagc

SEQ ID NO: 376044 - DNA, 57 bp, Artificial
  Synthetic oligonucleotide
cgtcctagctataaatacgagcaaattccccaacatgtatatacctgtaggtcaggt

SEQ ID NO: 376045 - DNA, 60 bp, Artificial
  Synthetic oligonucleotide
cgtcctagggccgctgctgaagacctatacaaaacatgccgcacaggggactgcctgcct

SEQ ID NO: 376046 - DNA, 60 bp, Artificial
  Synthetic oligonucleotide
cgtcctagtcacctcaaagatcttagctaagcagcagactattgctaagtctcctggacg

SEQ ID NO: 376047 - DNA, 60 bp, Artificial
  Synthetic oligonucleotide
cgtcctcagtcgctagccgctaatgcatccggacgcatcgattctattggactgtgcatg

SEQ ID NO: 376048 - DNA, 55 bp, Artificial
  Synthetic oligonucleotide
cgtcctcattaagaccgctcccatgctaaactccccaaacattgaggcgtgtggt

SEQ ID NO: 376049 - DNA, 55 bp, Artificial
  Synthetic oligonucleotide
cgtcctccacgactgatgaatcctctacagttgcttcagcccctacaagcggaag

SEQ ID NO: 376050 - DNA, 55 bp, Artificial
  Synthetic oligonucleotide
cgtcctcgcttgtacgggataggctcattttgaagtagttcctcactacttgagc

SEQ ID NO: 376051 - DNA, 59 bp, Artificial
  Synthetic oligonucleotide
cgtcctcggtgcctgccttgtagcggacgctgttctcgtccacggtgccgagatccttc

SEQ ID NO: 376052 - DNA, 54 bp, Artificial
  Synthetic oligonucleotide
cgtcctctaagactgccggatggacctccctgttcccaaaggtcaaaattctta

SEQ ID NO: 376053 - DNA, 55 bp, Artificial
  Synthetic oligonucleotide
cgtcctctgtatcagaatatacagcttctaattttcgtgagtatcttcgccacac

SEQ ID NO: 376054 - DNA, 55 bp, Artificial
  Synthetic oligonucleotide
cgtcctgaacaacaccaggccaccactgggcaactggttcggttgcacctggatg

SEQ ID NO: 376055 - DNA, 55 bp, Artificial
  Synthetic oligonucleotide
cgtcctgaatctaccaactgggtttgacaagccatacgtccgcctagaggacgag

SEQ ID NO: 376056 - DNA, 58 bp, Artificial
  Synthetic oligonucleotide
cgtcctgacagcgtccggcactctaacgtcacgctccattgagctgaacctgacgact

SEQ ID NO: 376057 - DNA, 60 bp, Artificial
  Synthetic oligonucleotide
cgtcctgacgtccgctactatggccggagccatagtcaatatggacaactcccagcgatt

SEQ ID NO: 376058 - DNA, 55 bp, Artificial
  Synthetic oligonucleotide
cgtcctgaggtgctctggaatcatcctattcagcgggttatacataatgaattgg

SEQ ID NO: 376059 - DNA, 53 bp, Artificial
  Synthetic oligonucleotide
cgtcctgccctacaaattagtggtctcgtttacgggaactcttctacgggagc

SEQ ID NO: 376060 - DNA, 55 bp, Artificial
  Synthetic oligonucleotide
cgtcctgctgacaattttcaaactcaggcctaccagacaatagggcctgagctgt

SEQ ID NO: 376061 - DNA, 50 bp, Artificial
  Synthetic oligonucleotide
cgtcctggagttgcggactaccagagacgtaggcttcgcgcccctctgcc

SEQ ID NO: 376062 - DNA, 57 bp, Artificial
  Synthetic oligonucleotide
cgtcctggtagcagtccatgtagccagtggctacctggaagcagaggtcataccaac

SEQ ID NO: 376063 - DNA, 55 bp, Artificial
  Synthetic oligonucleotide
cgtcctgtcaatgacgcctacaagtgaagctccacctgactatgaactgctgttt

SEQ ID NO: 376064 - DNA, 53 bp, Artificial
  Synthetic oligonucleotide
cgtcctgtttctaaactaccaaaaagctatgggtttgcccaaagagcggattc

SEQ ID NO: 376065 - DNA, 60 bp, Artificial
  Synthetic oligonucleotide
cgtccttatgatatggaccgtgttattcaagatgccttactgtcccgtgaggctgtgttg

SEQ ID NO: 376066 - DNA, 50 bp, Artificial
  Synthetic oligonucleotide
cgtccttcaacggaagagtgcgtgcttcagacccgcggacccgggcaact

SEQ ID NO: 376067 - DNA, 56 bp, Artificial
  Synthetic oligonucleotide
cgtccttcggaacacggttgcaggtatctagaccgggacagctccctggtatccgc

SEQ ID NO: 376068 - DNA, 55 bp, Artificial
  Synthetic oligonucleotide
cgtcctttcggtgtcaggttgttcagttgtcttatcatgttctcttgagattctg

SEQ ID NO: 376069 - DNA, 60 bp, Artificial
  Synthetic oligonucleotide
cgtcctttctactgcaccactaatagcagactcaagtcatggatcgtgtagttagcagag

SEQ ID NO: 376070 - DNA, 57 bp, Artificial
  Synthetic oligonucleotide
cgtcctttctcatataccaatagtactaggcagattaacaagaagatatacgtaaaa

SEQ ID NO: 376071 - DNA, 58 bp, Artificial
  Synthetic oligonucleotide
cgtcctttgatatgtaatcaaggacttgtttagagtttctagctggctggatattagg

SEQ ID NO: 376072 - DNA, 55 bp, Artificial
  Synthetic oligonucleotide
cgtccttttatagagtggtgatctgtgggttgtgtgtctcaatttggtccatgta

SEQ ID NO: 376073 - DNA, 53 bp, Artificial
  Synthetic oligonucleotide
cgtcgaaacgattacgtcaatgagaggcgtaatacacgtgcgtttaattcaaa

SEQ ID NO: 376074 - DNA, 51 bp, Artificial
  Synthetic oligonucleotide
cgtcgaaagaggggatcgtaccggttgcttgttcggatgggtacggcggtt

SEQ ID NO: 376075 - DNA, 54 bp, Artificial
  Synthetic oligonucleotide
cgtcgaaaggaaacacataccaagagcgtacgttcggaaaatcgatgcggaggt

SEQ ID NO: 376076 - DNA, 60 bp, Artificial
  Synthetic oligonucleotide
cgtcgaaagggtttgcttatctacgctcctgatgagcaattctcggatctgactatcttc

SEQ ID NO: 376077 - DNA, 58 bp, Artificial
  Synthetic oligonucleotide
cgtcgaaagttcgaaaaattttcatcagagccgtctgtgaacactgtacacgaagcgc

SEQ ID NO: 376078 - DNA, 59 bp, Artificial
  Synthetic oligonucleotide
cgtcgaacaacttatacagcgcgcgttcgcaatctactgaaatgccaacgtgcgaaatt

SEQ ID NO: 376079 - DNA, 55 bp, Artificial
  Synthetic oligonucleotide
cgtcgaaccacggaattgtcctgattaatgttgataatgatgaagtgatacacga

SEQ ID NO: 376080 - DNA, 50 bp, Artificial
  Synthetic oligonucleotide
cgtcgaagccaaatccctctcccataacaaggagatgcactcagctaacg

SEQ ID NO: 376081 - DNA, 60 bp, Artificial
  Synthetic oligonucleotide
cgtcgaagtaacagccagtctggcactgtgtgtacgtgagtaattcccctgtgcgtgaat

SEQ ID NO: 376082 - DNA, 59 bp, Artificial
  Synthetic oligonucleotide
cgtcgaataagctgttgcttctcaacaaggtagtgaccaacaatagttatatggtgacg

SEQ ID NO: 376083 - DNA, 55 bp, Artificial
  Synthetic oligonucleotide
cgtcgaatctgggaactcagcgttctccacttttgacctttggactcctcagttt

SEQ ID NO: 376084 - DNA, 56 bp, Artificial
  Synthetic oligonucleotide
cgtcgacacgtcattgccggttcaaaagatcaaacttaccggagcagaacatttgg

SEQ ID NO: 376085 - DNA, 60 bp, Artificial
  Synthetic oligonucleotide
cgtcgacagaaatggcgcgatatgtggtatgctggatgttcaccatcaacaatcccgctt

SEQ ID NO: 376086 - DNA, 56 bp, Artificial
  Synthetic oligonucleotide
cgtcgacagaatgaatacaaatttcgagtctgtgcaatacgaattcagtgaaatag

SEQ ID NO: 376087 - DNA, 60 bp, Artificial
  Synthetic oligonucleotide
cgtcgacccagcagtccttgtaaggcacatgacgatattaagtggacggcccaatgtata

SEQ ID NO: 376088 - DNA, 53 bp, Artificial
  Synthetic oligonucleotide
cgtcgacccgagggcaggacctgggctcagcccgggtacccttggcccctcta

SEQ ID NO: 376089 - DNA, 60 bp, Artificial
  Synthetic oligonucleotide
cgtcgacgaaactaggctcattatcgggcaactgtgcgaagggctgcacgctctacacaa

SEQ ID NO: 376090 - DNA, 58 bp, Artificial
  Synthetic oligonucleotide
cgtcgacggaataacagtttggttgaagaagcatgtaagcttcgggactgacctgata

SEQ ID NO: 376091 - DNA, 55 bp, Artificial
  Synthetic oligonucleotide
cgtcgacttcgacaatatcagattgaggcagagtgaagtgttttgtgatagagac

SEQ ID NO: 376092 - DNA, 57 bp, Artificial
  Synthetic oligonucleotide
cgtcgagattttcataagccgatcttggtattctattaatttgttcaaacatcggaa

SEQ ID NO: 376093 - DNA, 52 bp, Artificial
  Synthetic oligonucleotide
cgtcgagggacccaatgggctccaagacgccccgaaacccgacaagggagcc

SEQ ID NO: 376094 - DNA, 60 bp, Artificial
  Synthetic oligonucleotide
cgtcgagtcccccaccagtcgcgccgctgagagggatgcggttgggttcgcgtgcgcgca

SEQ ID NO: 376095 - DNA, 56 bp, Artificial
  Synthetic oligonucleotide
cgtcgagtcttataacaccgttacagtcttgggtgtttccaaatcagagggagcaa

SEQ ID NO: 376096 - DNA, 55 bp, Artificial
  Synthetic oligonucleotide
cgtcgagtgcaaggctattatcactccgaccgatcttgccgtgtccaatcccctc

SEQ ID NO: 376097 - DNA, 55 bp, Artificial
  Synthetic oligonucleotide
cgtcgagtgttcttggcgtgaagttgtgatgtctaggaaacttgtggatagggtc

SEQ ID NO: 376098 - DNA, 55 bp, Artificial
  Synthetic oligonucleotide
cgtcgataatttcagtttacctttgaattttgcgaaatgtgtcatctgatggacg

SEQ ID NO: 376099 - DNA, 57 bp, Artificial
  Synthetic oligonucleotide
cgtcgatactggtgtaactactctcgggttcaacgcctgccgtctatatagtccgga

SEQ ID NO: 376100 - DNA, 50 bp, Artificial
  Synthetic oligonucleotide
cgtcgatatgtcgtcgtgcatttgttgaagggacggcgcttgcaggttga

SEQ ID NO: 376101 - DNA, 54 bp, Artificial
  Synthetic oligonucleotide
cgtcgatcaaggaaactgaaaccttactatcgggcgctaggggattgtttcgtc

SEQ ID NO: 376102 - DNA, 56 bp, Artificial
  Synthetic oligonucleotide
cgtcgatcacattggagtcttcgaccttgtaaacaatttcccatggagtctcatcc

SEQ ID NO: 376103 - DNA, 55 bp, Artificial
  Synthetic oligonucleotide
cgtcgatcatggtgttaactgtctgggccgttgcgtcactgagtacaaggcaggc

SEQ ID NO: 376104 - DNA, 55 bp, Artificial
  Synthetic oligonucleotide
cgtcgatcatttgggacgagactcgcacgattatttgatattcatggctcgaagt

SEQ ID NO: 376105 - DNA, 56 bp, Artificial
  Synthetic oligonucleotide
cgtcgatcgatgcaggtgatcgctcgacgacgtaactatgaatattagctaacagc

SEQ ID NO: 376106 - DNA, 55 bp, Artificial
  Synthetic oligonucleotide
cgtcgatctgagtggatggggctatgatcatattgttcatgttcctaattgttcc

SEQ ID NO: 376107 - DNA, 55 bp, Artificial
  Synthetic oligonucleotide
cgtcgatctgcccgattggaaggatgctgaatgatccgcatcgaccaagaccggc

SEQ ID NO: 376108 - DNA, 57 bp, Artificial
  Synthetic oligonucleotide
cgtcgatcttgggacctaagatggttccgatcgagcaagtaccgtccgttgagcttc

SEQ ID NO: 376109 - DNA, 55 bp, Artificial
  Synthetic oligonucleotide
cgtcgatcttttgtagatattttactggcgataggaagagtttcgctaagatact

SEQ ID NO: 376110 - DNA, 55 bp, Artificial
  Synthetic oligonucleotide
cgtcgatgataccgatgccgtcaaatttcggtgttggtactcagaaagacaaagg

SEQ ID NO: 376111 - DNA, 56 bp, Artificial
  Synthetic oligonucleotide
cgtcgatgcgtcattaccggttcagaagatcaaacttaccggggcagaacacttag

SEQ ID NO: 376112 - DNA, 54 bp, Artificial
  Synthetic oligonucleotide
cgtcgattaacgcaggaacagggcttaacggcgggggtgacctgtcagcgtccc

SEQ ID NO: 376113 - DNA, 60 bp, Artificial
  Synthetic oligonucleotide
cgtcgcaaagacgatatcgatagactgcaatcggatcaaaaagttcacggcacttcaagc

SEQ ID NO: 376114 - DNA, 59 bp, Artificial
  Synthetic oligonucleotide
cgtcgcaagagccctcgcgcatggcgtgagggcccttgaggacgggataaatttcgcaa

SEQ ID NO: 376115 - DNA, 52 bp, Artificial
  Synthetic oligonucleotide
cgtcgcaagcgggactgcttaatatgtctaacgacgtaatgtcattaacttg

SEQ ID NO: 376116 - DNA, 60 bp, Artificial
  Synthetic oligonucleotide
cgtcgcaatgcacccggaaactcaggcgctcatcctcactggagaccccaaacagagcgc

SEQ ID NO: 376117 - DNA, 60 bp, Artificial
  Synthetic oligonucleotide
cgtcgcactagcctcagtgattctagtgactctagctatatcactgatttggaactgtct

SEQ ID NO: 376118 - DNA, 56 bp, Artificial
  Synthetic oligonucleotide
cgtcgcactccacacttatgtttgtgtgcgcgtgggaaccgtttaactttcgttca

SEQ ID NO: 376119 - DNA, 55 bp, Artificial
  Synthetic oligonucleotide
cgtcgcagcagcagcgagctcagaagctagtggttccggtgtatgagagagaggg

SEQ ID NO: 376120 - DNA, 60 bp, Artificial
  Synthetic oligonucleotide
cgtcgcaggtccataggctgctcactatcgcatcggtatgcccttgcacacgtgtgtgag

SEQ ID NO: 376121 - DNA, 56 bp, Artificial
  Synthetic oligonucleotide
cgtcgcatagtcaatgaaccgtcggctgccgctatttactgcgtttctaaatatcc

SEQ ID NO: 376122 - DNA, 55 bp, Artificial
  Synthetic oligonucleotide
cgtcgcatctactaacgtaataaggccggtatcagagaagagatattttcccgag

SEQ ID NO: 376123 - DNA, 58 bp, Artificial
  Synthetic oligonucleotide
cgtcgcatgaattcggcaactaagtctcatgacgaccctaagatgtcaaaccaacggt

SEQ ID NO: 376124 - DNA, 55 bp, Artificial
  Synthetic oligonucleotide
cgtcgcatgctcattcggcgggcgatatcacatctggcacgttgaacattgcgcg

SEQ ID NO: 376125 - DNA, 55 bp, Artificial
  Synthetic oligonucleotide
cgtcgccacttgattttggaacagtgtgtcacacgttaataggttattgtgtgcg

SEQ ID NO: 376126 - DNA, 55 bp, Artificial
  Synthetic oligonucleotide
cgtcgcccgctgtttcggggttgagagctcaaacgagcacgaaggttacgtgggc

SEQ ID NO: 376127 - DNA, 53 bp, Artificial
  Synthetic oligonucleotide
cgtcgcgctccactacccgtcacgcgctgccgacgaggcctgtgcgttgctag

SEQ ID NO: 376128 - DNA, 54 bp, Artificial
  Synthetic oligonucleotide
cgtcgcggacgcctacgaacgactcgacccgcacgggcggaatccgttggcgcc

SEQ ID NO: 376129 - DNA, 59 bp, Artificial
  Synthetic oligonucleotide
cgtcgcggtcgtatgaggtgacggatctgacgccgtttctgaagatcggcaaaaatgtc

SEQ ID NO: 376130 - DNA, 58 bp, Artificial
  Synthetic oligonucleotide
cgtcgcggttcacgacgataagcgcacgcacttcataggccaaaggcctacaaaacgc

SEQ ID NO: 376131 - DNA, 55 bp, Artificial
  Synthetic oligonucleotide
cgtcgcgtataatttgatgtagatcgagaaaacggtttataacagccgagaaacg

SEQ ID NO: 376132 - DNA, 56 bp, Artificial
  Synthetic oligonucleotide
cgtcgcgttgtctcggcacaccgatagtttgacttacaacgttttggccgctcgaa

SEQ ID NO: 376133 - DNA, 56 bp, Artificial
  Synthetic oligonucleotide
cgtcgctagtccatagttacattcccgctttattagttattattatctagtcttac

SEQ ID NO: 376134 - DNA, 60 bp, Artificial
  Synthetic oligonucleotide
cgtcgctatataccaagacgtctatgctgtacacgcacccacgtcgctataccaccaggc

SEQ ID NO: 376135 - DNA, 55 bp, Artificial
  Synthetic oligonucleotide
cgtcgctcagttgtcgccggaattcaccgctcgccttgttgaccgctggcgagaa

SEQ ID NO: 376136 - DNA, 60 bp, Artificial
  Synthetic oligonucleotide
cgtcgctccttagaacagagcagactaatcatgcacattgtagctacaaccgttggagag

SEQ ID NO: 376137 - DNA, 55 bp, Artificial
  Synthetic oligonucleotide
cgtcgctgtaggttcgcgctgttagactcgtcgacgcagtagcacaactgtgccc

SEQ ID NO: 376138 - DNA, 55 bp, Artificial
  Synthetic oligonucleotide
cgtcgctgtcgaaccttttaacgacgttcacgtccaacggactggtgtctataca

SEQ ID NO: 376139 - DNA, 50 bp, Artificial
  Synthetic oligonucleotide
cgtcgcttctagacgtgaagggcactctcatagtttcgttggttaagacg

SEQ ID NO: 376140 - DNA, 55 bp, Artificial
  Synthetic oligonucleotide
cgtcgcttgctgtcgtgttcatctagtcgcttccgaatgtaatctaggttctcca

SEQ ID NO: 376141 - DNA, 56 bp, Artificial
  Synthetic oligonucleotide
cgtcgcttgtttgaaaaggtgtacaatcctaagtctctgttttatgaggcttataa

SEQ ID NO: 376142 - DNA, 50 bp, Artificial
  Synthetic oligonucleotide
cgtcggaaactccatagtattgtgggtactcattccagtattagtccagg

SEQ ID NO: 376143 - DNA, 55 bp, Artificial
  Synthetic oligonucleotide
cgtcggaacatcaacactgaatcaaagatcaattccaaagatagccactaggccc

SEQ ID NO: 376144 - DNA, 57 bp, Artificial
  Synthetic oligonucleotide
cgtcggaactcgattttgccccttgaatgttaggatggaagtgggctgatcttgttg

SEQ ID NO: 376145 - DNA, 58 bp, Artificial
  Synthetic oligonucleotide
cgtcggaagcaggtaggaacctgcttacagcctgactgttcggttgagtaagacatgg

SEQ ID NO: 376146 - DNA, 55 bp, Artificial
  Synthetic oligonucleotide
cgtcggagacggaagcactgatccgagaggggctggggctatgaccgacattcga

SEQ ID NO: 376147 - DNA, 60 bp, Artificial
  Synthetic oligonucleotide
cgtcggagatcccgccttaggcctcttcgacctagccttccactgctatgacattggctc

SEQ ID NO: 376148 - DNA, 60 bp, Artificial
  Synthetic oligonucleotide
cgtcggagccttgagttgtaatcaccatatcttgtggcagtaagcctatgacataactta

SEQ ID NO: 376149 - DNA, 59 bp, Artificial
  Synthetic oligonucleotide
cgtcggagctggatttagctccctgaatgttcggatggaaatgtgctgacctggttggg

SEQ ID NO: 376150 - DNA, 54 bp, Artificial
  Synthetic oligonucleotide
cgtcggagggaccggagtattccgggaactttcaactcagcacccactgccgag

SEQ ID NO: 376151 - DNA, 51 bp, Artificial
  Synthetic oligonucleotide
cgtcggatcggccggtaagaccggaactggttagtaataactgggaattaa

SEQ ID NO: 376152 - DNA, 55 bp, Artificial
  Synthetic oligonucleotide
cgtcggattccaaagaagcctgcaccttcgtccgaacagccgattctgtcttgct

SEQ ID NO: 376153 - DNA, 55 bp, Artificial
  Synthetic oligonucleotide
cgtcggattccaaagaagcttgcaccttcgttcgtactgccgattccgtcctact

SEQ ID NO: 376154 - DNA, 58 bp, Artificial
  Synthetic oligonucleotide
cgtcggcaaagaatttcgcaggctgagagaaagcagagatttggaagggtcggtagga

SEQ ID NO: 376155 - DNA, 55 bp, Artificial
  Synthetic oligonucleotide
cgtcggcaagagcattgttgggcacacatttaaggaatggtgggatgtgcagctg

SEQ ID NO: 376156 - DNA, 60 bp, Artificial
  Synthetic oligonucleotide
cgtcggccatgtctcgtgcgctgaagtagcgcgagtcgagggggtagctgccgcgacgca

SEQ ID NO: 376157 - DNA, 55 bp, Artificial
  Synthetic oligonucleotide
cgtcggccggaggccaactgttttactcccgtccggttgtctcagccaatggcga

SEQ ID NO: 376158 - DNA, 53 bp, Artificial
  Synthetic oligonucleotide
cgtcggcctacatccagaaaggcgaagagcattggacagtcaagtagttccat

SEQ ID NO: 376159 - DNA, 60 bp, Artificial
  Synthetic oligonucleotide
cgtcggcgaactcgggagcggcgcacagctggcatggtcaacgaacctgttacaactggc

SEQ ID NO: 376160 - DNA, 55 bp, Artificial
  Synthetic oligonucleotide
cgtcggctcatggacttgcttcaacccaaatggaccctgagaagtttaccagacc

SEQ ID NO: 376161 - DNA, 55 bp, Artificial
  Synthetic oligonucleotide
cgtcggctcgaaacgtggactcgtcctcgctgagcgttaacctggtttgacacga

SEQ ID NO: 376162 - DNA, 55 bp, Artificial
  Synthetic oligonucleotide
cgtcggcttgcagattagagtgagtgcaagacaatgccacatccagggaaggttg

SEQ ID NO: 376163 - DNA, 54 bp, Artificial
  Synthetic oligonucleotide
cgtcgggccttacaccccgacttgctggacttctctaggagagtccctttccca

SEQ ID NO: 376164 - DNA, 56 bp, Artificial
  Synthetic oligonucleotide
cgtcgggccttataccccgacttgctgagcttctctaggagagcccttttcccagc

SEQ ID NO: 376165 - DNA, 60 bp, Artificial
  Synthetic oligonucleotide
cgtcgggctgcattcctatgcaataggatcccaactaccatgtgaacctgagccagacgt

SEQ ID NO: 376166 - DNA, 54 bp, Artificial
  Synthetic oligonucleotide
cgtcggggtgactggttccgctactaggacagtcccgctaacactcgaaattaa

SEQ ID NO: 376167 - DNA, 55 bp, Artificial
  Synthetic oligonucleotide
cgtcgggtacgttcatctaataaccttgatggtgatatgtggatatatggccgac

SEQ ID NO: 376168 - DNA, 51 bp, Artificial
  Synthetic oligonucleotide
cgtcgggtctacccggtgcccaacctgacgtgtgctgtcgagtgtgagctt

SEQ ID NO: 376169 - DNA, 53 bp, Artificial
  Synthetic oligonucleotide
cgtcgggtctcagcttccctgcgaccctgagcccgacactgacgtcttgatgt

SEQ ID NO: 376170 - DNA, 55 bp, Artificial
  Synthetic oligonucleotide
cgtcgggtgacggaaagtaggtccaataagactgcttgtgacgataggcgtttgg

SEQ ID NO: 376171 - DNA, 56 bp, Artificial
  Synthetic oligonucleotide
cgtcgggtggatattgtacgacgacaagtctaccgaccaaatgcaacagagaaacg

SEQ ID NO: 376172 - DNA, 54 bp, Artificial
  Synthetic oligonucleotide
cgtcggtaaaatttgtcgtaacgctccattatcatctaataaattacccagtaa

SEQ ID NO: 376173 - DNA, 51 bp, Artificial
  Synthetic oligonucleotide
cgtcggtattctaaagcatggcgggagattgtggacatatcatggtgaaac

SEQ ID NO: 376174 - DNA, 54 bp, Artificial
  Synthetic oligonucleotide
cgtcggtcaggtgactagcagccggctctacggagcgctgaaagtgctaggtcc

SEQ ID NO: 376175 - DNA, 55 bp, Artificial
  Synthetic oligonucleotide
cgtcggtccgctcgctctcctcgactctgcggtcaccgatgtctctgataactgg

SEQ ID NO: 376176 - DNA, 55 bp, Artificial
  Synthetic oligonucleotide
cgtcggtcctaggacttgcaggaacacgtggagcgggaccttccccatcaacgca

SEQ ID NO: 376177 - DNA, 59 bp, Artificial
  Synthetic oligonucleotide
cgtcggtctagccagccgtcccctgggtagtgtgctctgtctatgtacaccactactcg

SEQ ID NO: 376178 - DNA, 57 bp, Artificial
  Synthetic oligonucleotide
cgtcggtggcgctggcacttcgagaggcgcgccattgcccccaacggctcaccacga

SEQ ID NO: 376179 - DNA, 55 bp, Artificial
  Synthetic oligonucleotide
cgtcggtgtcctggacgaaacccacagttgggcgagcgacgaggacatgggaatg

SEQ ID NO: 376180 - DNA, 56 bp, Artificial
  Synthetic oligonucleotide
cgtcggtgtggctcgtttggaattgctcaaacgccgaaccgtcgtaacagtctatg

SEQ ID NO: 376181 - DNA, 48 bp, Artificial
  Synthetic oligonucleotide
cgtcggttggagtcgccgggcggataaacgggtggggtaaacccacgt

SEQ ID NO: 376182 - DNA, 56 bp, Artificial
  Synthetic oligonucleotide
cgtcggttgtcgcgtagtgtttgcgacggtaggcggtgcggtctgaattggtgctt

SEQ ID NO: 376183 - DNA, 55 bp, Artificial
  Synthetic oligonucleotide
cgtcggtttcactctgttgaccgtaagctgtgggtggttctcacccgccgcatgc

SEQ ID NO: 376184 - DNA, 55 bp, Artificial
  Synthetic oligonucleotide
cgtcggtttccgtttgactcctgatgagaaaaatgcactgaaagcgaattttccc

SEQ ID NO: 376185 - DNA, 60 bp, Artificial
  Synthetic oligonucleotide
cgtcgtaatgggctatcaaataagactcatgatgaaccgaaactgacgtcgcaacgcata

SEQ ID NO: 376186 - DNA, 57 bp, Artificial
  Synthetic oligonucleotide
cgtcgtacctgaaggggttggatctttctggacgcattggataacaacacaggatgg

SEQ ID NO: 376187 - DNA, 55 bp, Artificial
  Synthetic oligonucleotide
cgtcgtacggtgtcgttgtttcgattgtcgtccttatatcgccacttcgcgaatg

SEQ ID NO: 376188 - DNA, 55 bp, Artificial
  Synthetic oligonucleotide
cgtcgtacgtaagacggtctctacgctcgtagtagtttctgcttatattgttagg

SEQ ID NO: 376189 - DNA, 53 bp, Artificial
  Synthetic oligonucleotide
cgtcgtatccggtcgaccatataaaagaaccctagtttcaagagcttttagtg

SEQ ID NO: 376190 - DNA, 55 bp, Artificial
  Synthetic oligonucleotide
cgtcgtcaaacatattggcggcgagttagacggtagttggcttggaaatatcgct

SEQ ID NO: 376191 - DNA, 55 bp, Artificial
  Synthetic oligonucleotide
cgtcgtcagacgcttcaggggatttcctttctgcgtcgcgcaatagtcggtgatc

SEQ ID NO: 376192 - DNA, 55 bp, Artificial
  Synthetic oligonucleotide
cgtcgtcagataccatctgagtatgaaccagatgcgtcagagccgtgcatcaagt

SEQ ID NO: 376193 - DNA, 55 bp, Artificial
  Synthetic oligonucleotide
cgtcgtcagcaaacttgccttcgacaacatgcaggacaaagtcgactacgtcgaa

SEQ ID NO: 376194 - DNA, 52 bp, Artificial
  Synthetic oligonucleotide
cgtcgtcagtgggcggcgcgttagttactttagacccggacctaatggtacg

SEQ ID NO: 376195 - DNA, 55 bp, Artificial
  Synthetic oligonucleotide
cgtcgtcccctacatctcgcccagtgactaccgtgaaactcgagccattaccaac

SEQ ID NO: 376196 - DNA, 52 bp, Artificial
  Synthetic oligonucleotide
cgtcgtcctagtggtacacctatggatctccaacaagtctttaattgctatg

SEQ ID NO: 376197 - DNA, 55 bp, Artificial
  Synthetic oligonucleotide
cgtcgtcctttgtgaggcctatgatacagggtgcgcgtggtatgagctaacaccc

SEQ ID NO: 376198 - DNA, 52 bp, Artificial
  Synthetic oligonucleotide
cgtcgtcgggttaacgatggcgggcgcattcatggggggtgctagcgtctcc

SEQ ID NO: 376199 - DNA, 55 bp, Artificial
  Synthetic oligonucleotide
cgtcgtcgtctcaacttcgacagccctatggctcgccgtgcttctgccccccgga

SEQ ID NO: 376200 - DNA, 50 bp, Artificial
  Synthetic oligonucleotide
cgtcgtcgttaatcctgttgttattcacaacaacgtctgaggcagacggt

SEQ ID NO: 376201 - DNA, 60 bp, Artificial
  Synthetic oligonucleotide
cgtcgtgatgcaatgcttggtacacacgtcgtgtgggatttaggtcttcagtcatcatgt

SEQ ID NO: 376202 - DNA, 55 bp, Artificial
  Synthetic oligonucleotide
cgtcgtgcgaccttttgaccgcggtggtgcctgtcgttcttgtctcccctccttc

SEQ ID NO: 376203 - DNA, 56 bp, Artificial
  Synthetic oligonucleotide
cgtcgtggacgtgcaatacctgtacggtatagggtcagcggttgtctcctttgtag

SEQ ID NO: 376204 - DNA, 59 bp, Artificial
  Synthetic oligonucleotide
cgtcgtgtactctgtgactcataaaactattggggcaccaattcagctgtttgcacccc

SEQ ID NO: 376205 - DNA, 60 bp, Artificial
  Synthetic oligonucleotide
cgtcgtgtcgagtcgtgttgtccgcacattttgtttgcacatttctttcagtgagttaga

SEQ ID NO: 376206 - DNA, 58 bp, Artificial
  Synthetic oligonucleotide
cgtcgtgtgctgctcaatgtcttactcatggactggggcgctagtaacaccctgtgcg

SEQ ID NO: 376207 - DNA, 58 bp, Artificial
  Synthetic oligonucleotide
cgtcgtgtgttgctcaatgtcctattcttggacaggcgcgctagtcaccccatgcgcc

SEQ ID NO: 376208 - DNA, 56 bp, Artificial
  Synthetic oligonucleotide
cgtcgttaactggtacttattcacagtatggaccactattatcagatacaaagttg

SEQ ID NO: 376209 - DNA, 55 bp, Artificial
  Synthetic oligonucleotide
cgtcgttaggagatgatagtcatttgactaacccgttattgtctccgtattatcg

SEQ ID NO: 376210 - DNA, 54 bp, Artificial
  Synthetic oligonucleotide
cgtcgttattatcctcgtaactacgtacagacccgtccagttcatgttaaaaga

SEQ ID NO: 376211 - DNA, 56 bp, Artificial
  Synthetic oligonucleotide
cgtcgttcaaaagaatccactagggatcgccttgaacgactagttagtagtatagc

SEQ ID NO: 376212 - DNA, 59 bp, Artificial
  Synthetic oligonucleotide
cgtcgttcacagctatggccaattcgctagttcgctttcgcattatatccgagcagtgt

SEQ ID NO: 376213 - DNA, 55 bp, Artificial
  Synthetic oligonucleotide
cgtcgttcaccgatgacgtccttcttactaggtgctctcaagcagtctggtggcc

SEQ ID NO: 376214 - DNA, 54 bp, Artificial
  Synthetic oligonucleotide
cgtcgttcactaccagttcacggcgggtgttcctggctccggtaagtcacggtc

SEQ ID NO: 376215 - DNA, 51 bp, Artificial
  Synthetic oligonucleotide
cgtcgttcatcaacggggttgattggcacgatgtcgccaaggatcaattca

SEQ ID NO: 376216 - DNA, 55 bp, Artificial
  Synthetic oligonucleotide
cgtcgttccggtcctactcgtccactttcaggtgcccgtcttgaaatcaggaatg

SEQ ID NO: 376217 - DNA, 55 bp, Artificial
  Synthetic oligonucleotide
cgtcgttcgagtcgctcggtgctctgtcacctatcgaccacgaggtgctagctga

SEQ ID NO: 376218 - DNA, 57 bp, Artificial
  Synthetic oligonucleotide
cgtcgttgattgctcctgcatattcgtcgtaggcagattggcaacctcctctagctg

SEQ ID NO: 376219 - DNA, 58 bp, Artificial
  Synthetic oligonucleotide
cgtcgttggtgtgattaacaacgctgacgtcgggagactgattttctctggtgaggcc

SEQ ID NO: 376220 - DNA, 55 bp, Artificial
  Synthetic oligonucleotide
cgtcgtttaatcgacgaggctataacatctgtaggaggatctaaatttgaagtta

SEQ ID NO: 376221 - DNA, 60 bp, Artificial
  Synthetic oligonucleotide
cgtcgtttacttggatatctattacttgagcctcttgttgcatcatgatatctattattt

SEQ ID NO: 376222 - DNA, 60 bp, Artificial
  Synthetic oligonucleotide
cgtcgtttaggtcttcgtgtggaagattatctgtaatggcaagcaaggcacgtatcgcaa

SEQ ID NO: 376223 - DNA, 55 bp, Artificial
  Synthetic oligonucleotide
cgtcgtttcctccaaacgctagtatttagaattcatggtagttggagcgcgcgcg

SEQ ID NO: 376224 - DNA, 59 bp, Artificial
  Synthetic oligonucleotide
cgtcgtttgcagattgttggccccctcttgcagaccttccatcgatctgaaactctccc

SEQ ID NO: 376225 - DNA, 55 bp, Artificial
  Synthetic oligonucleotide
cgtcgtttggacgcctgtgttgtcgggttcctcactccatgtcctcaaccgtgtt

SEQ ID NO: 376226 - DNA, 60 bp, Artificial
  Synthetic oligonucleotide
cgtcgttttcaggcgactgttactggtggccaatatgcaagtaaggagcaagcaatagtc

SEQ ID NO: 376227 - DNA, 55 bp, Artificial
  Synthetic oligonucleotide
cgtctaaaagtttgttagatcagctacataacaccccaaatgtgcacatgcactc

SEQ ID NO: 376228 - DNA, 55 bp, Artificial
  Synthetic oligonucleotide
cgtctaaacaatttattataacgaaagttaattcagatgaccgtactatgattaa

SEQ ID NO: 376229 - DNA, 55 bp, Artificial
  Synthetic oligonucleotide
cgtctaaagcagacgaaatacaaacgagtaattcaaactcgaatttctgggctta

SEQ ID NO: 376230 - DNA, 55 bp, Artificial
  Synthetic oligonucleotide
cgtctaaatttaccttgagcactaaaagtcttaacgagcatgtatgggacgagat

SEQ ID NO: 376231 - DNA, 55 bp, Artificial
  Synthetic oligonucleotide
cgtctaaccaatatgtttccatggggattctcgttcagaccgcgtcagggtatcc

SEQ ID NO: 376232 - DNA, 54 bp, Artificial
  Synthetic oligonucleotide
cgtctaacgtatcaaccgtgcttgctcagctagctgagaaaacatttccgcagc

SEQ ID NO: 376233 - DNA, 58 bp, Artificial
  Synthetic oligonucleotide
cgtctaagacccggagactttgagtctctaagtgacaaagagaagtcacgccacatag

SEQ ID NO: 376234 - DNA, 60 bp, Artificial
  Synthetic oligonucleotide
cgtctaaggacgccccaacaaacatggatggcaccagtggtgctggtcagctggttccag

SEQ ID NO: 376235 - DNA, 55 bp, Artificial
  Synthetic oligonucleotide
cgtctaagtatcaacgtcgaggatattcacgtactcaaggttgtcgacaaacggc

SEQ ID NO: 376236 - DNA, 57 bp, Artificial
  Synthetic oligonucleotide
cgtctaattggcaaaacaaatcagcagtttgagttgatagacaatgagttcaatgag

SEQ ID NO: 376237 - DNA, 50 bp, Artificial
  Synthetic oligonucleotide
cgtctacaaacacaccgcgcaataattcgtacagttggcggcccagtgaa

SEQ ID NO: 376238 - DNA, 57 bp, Artificial
  Synthetic oligonucleotide
cgtctacaatcagtaaaaatcttagattaaaagagatgattactcaaactgaaggga

SEQ ID NO: 376239 - DNA, 55 bp, Artificial
  Synthetic oligonucleotide
cgtctacagactatgctaaggttggagaaccttacagcatcatatatgagtatac

SEQ ID NO: 376240 - DNA, 59 bp, Artificial
  Synthetic oligonucleotide
cgtctacctggctgttttgcagatctagagttgcgtgcctaactccttaccggctaaca

SEQ ID NO: 376241 - DNA, 54 bp, Artificial
  Synthetic oligonucleotide
cgtctacgacggttacagcggctgttgtaacggtaccggctgactataactcct

SEQ ID NO: 376242 - DNA, 55 bp, Artificial
  Synthetic oligonucleotide
cgtctacgtctggttgccttcttggcgattcggtgttgcaccttgataggaaccg

SEQ ID NO: 376243 - DNA, 54 bp, Artificial
  Synthetic oligonucleotide
cgtctacgtttggccagcagagagttcccgcccgagttatgtaccgggggacga

SEQ ID NO: 376244 - DNA, 55 bp, Artificial
  Synthetic oligonucleotide
cgtctactgaccgaattgctaaagaacacgacgtacagtacggtctcatctccga

SEQ ID NO: 376245 - DNA, 54 bp, Artificial
  Synthetic oligonucleotide
cgtctactgacttaaaacaacgtgtcctagttaacactgataactacgacgaaa

SEQ ID NO: 376246 - DNA, 55 bp, Artificial
  Synthetic oligonucleotide
cgtctacttggattaggctcttcaataccttccgtaccattagcgtccaaacgta

SEQ ID NO: 376247 - DNA, 55 bp, Artificial
  Synthetic oligonucleotide
cgtctagcccacgatacgggcaccctatccaatttatgtcccttaacctcccatg

SEQ ID NO: 376248 - DNA, 55 bp, Artificial
  Synthetic oligonucleotide
cgtctagctcgaagggagctcttcatgtttcgcaagtattaggaccacgtcgcgg

SEQ ID NO: 376249 - DNA, 60 bp, Artificial
  Synthetic oligonucleotide
cgtctaggcggattcgtccacccttgcagatagccacgtttgtggcagccggtcagtcta

SEQ ID NO: 376250 - DNA, 51 bp, Artificial
  Synthetic oligonucleotide
cgtctagtgggccagacccaggggggatccctggtttccttttttatttca

SEQ ID NO: 376251 - DNA, 56 bp, Artificial
  Synthetic oligonucleotide
cgtctagttggtgatcctactaccattgctagcgtttcagataagtgtttagattt

SEQ ID NO: 376252 - DNA, 53 bp, Artificial
  Synthetic oligonucleotide
cgtctagttttgaaaccttttatggacagaatgtacgcatcaccgtttccgag

SEQ ID NO: 376253 - DNA, 55 bp, Artificial
  Synthetic oligonucleotide
cgtctataacgtctgagactccaagcttgtgatgccacgtatgtgttatttgtac

SEQ ID NO: 376254 - DNA, 55 bp, Artificial
  Synthetic oligonucleotide
cgtctatactgtaaatacctacagaatagtatttaacagtctaaagccgtcacgt

SEQ ID NO: 376255 - DNA, 59 bp, Artificial
  Synthetic oligonucleotide
cgtctataggccatcagagaatctaagggggaggagttgcggtttccgcttgtcacatc

SEQ ID NO: 376256 - DNA, 53 bp, Artificial
  Synthetic oligonucleotide
cgtctatgatccaattgcaccgcagtgttcagatacgaatgtcatcgtacata

SEQ ID NO: 376257 - DNA, 55 bp, Artificial
  Synthetic oligonucleotide
cgtctatgcacgacaattctttgacgaccttccaaactatttagcagacgaagtt

SEQ ID NO: 376258 - DNA, 55 bp, Artificial
  Synthetic oligonucleotide
cgtctatgctaatacacaactggtactgcagagaccggctgtgggtacggtacac

SEQ ID NO: 376259 - DNA, 52 bp, Artificial
  Synthetic oligonucleotide
cgtctatgctcgctattttggccaaccggggcccgttttgctaccgcccctc

SEQ ID NO: 376260 - DNA, 55 bp, Artificial
  Synthetic oligonucleotide
cgtctatgcttaggactgtgggtctcgagctacctggttcgacggcccatgacga

SEQ ID NO: 376261 - DNA, 55 bp, Artificial
  Synthetic oligonucleotide
cgtctatgtcttagaaaccatcctgacaccacctggataggtgactcccgaagcg

SEQ ID NO: 376262 - DNA, 50 bp, Artificial
  Synthetic oligonucleotide
cgtctattccctgcaatcatgaaaggattgccaagatgaattggtggagg

SEQ ID NO: 376263 - DNA, 53 bp, Artificial
  Synthetic oligonucleotide
cgtctattcttagcccgacaagcgacacctccgacgacgctgtcacgaccgtg

SEQ ID NO: 376264 - DNA, 60 bp, Artificial
  Synthetic oligonucleotide
cgtctattttgtacaaaagcttatcaaggtgctgcgatgcacaacacgtgtcctctatta

SEQ ID NO: 376265 - DNA, 55 bp, Artificial
  Synthetic oligonucleotide
cgtctcaacccagtttggacctctcacctgcatgcgcctcaccggagaacctggc

SEQ ID NO: 376266 - DNA, 60 bp, Artificial
  Synthetic oligonucleotide
cgtctcaagatttagataaacatggagcgcttacaatcaacaacacagcccaaaataatg

SEQ ID NO: 376267 - DNA, 60 bp, Artificial
  Synthetic oligonucleotide
cgtctcactcctcatagccggcgatgactgtttgatcatatgcgaacggccgatgtgtga

SEQ ID NO: 376268 - DNA, 55 bp, Artificial
  Synthetic oligonucleotide
cgtctcacttcagccaattcatccccttccaaggggcgaacaccctcttcttctt

SEQ ID NO: 376269 - DNA, 55 bp, Artificial
  Synthetic oligonucleotide
cgtctcagacaatctctgcgtcctcgttagcgcaatttagacaggagcactgtgc

SEQ ID NO: 376270 - DNA, 57 bp, Artificial
  Synthetic oligonucleotide
cgtctcagacttcaagcgactccgactccagctacaacagcagccgtggctcgactc

SEQ ID NO: 376271 - DNA, 56 bp, Artificial
  Synthetic oligonucleotide
cgtctcagtaagacaaccaatttattgtattccgggaaaatgcccgatgctggtcc

SEQ ID NO: 376272 - DNA, 55 bp, Artificial
  Synthetic oligonucleotide
cgtctcatactgaatcaatttacgtaaaggcgttccttttatatggtgtaacgtg

SEQ ID NO: 376273 - DNA, 54 bp, Artificial
  Synthetic oligonucleotide
cgtctcatagtgaggttttacctcggaggattctacggacggtacacaggttta

SEQ ID NO: 376274 - DNA, 55 bp, Artificial
  Synthetic oligonucleotide
cgtctcatggtttgtcatgttcggaacagtcgtccctatatggatggtgtttgcc

SEQ ID NO: 376275 - DNA, 58 bp, Artificial
  Synthetic oligonucleotide
cgtctccacaactcgaggggttttcagctgaatcgagaaaactacttctcattgttca

SEQ ID NO: 376276 - DNA, 55 bp, Artificial
  Synthetic oligonucleotide
cgtctccatgggcaggaaaacctcgacctacgcgggctgccaagggataaccgct

SEQ ID NO: 376277 - DNA, 55 bp, Artificial
  Synthetic oligonucleotide
cgtctccccgatccacactgatgctcatcctggcattactgcagcaatcgaatca

SEQ ID NO: 376278 - DNA, 55 bp, Artificial
  Synthetic oligonucleotide
cgtctccgatatacatagggtatcagatattacatgcggatttaggggtgctcca

SEQ ID NO: 376279 - DNA, 55 bp, Artificial
  Synthetic oligonucleotide
cgtctccgctttcgagaggtgcacgatgttatggatgtagtcaagtccctgggcg

SEQ ID NO: 376280 - DNA, 55 bp, Artificial
  Synthetic oligonucleotide
cgtctccggaataaagcgcttgagcaggttctccgtggtccgcgtgtcgtttcca

SEQ ID NO: 376281 - DNA, 57 bp, Artificial
  Synthetic oligonucleotide
cgtctccgtacaggactcgctgcctatgtgcaggctaaccttgtgggcggccaagtt

SEQ ID NO: 376282 - DNA, 50 bp, Artificial
  Synthetic oligonucleotide
cgtctccgttactcagcgagctccacgcgtcttccacctcccggtacgtg

SEQ ID NO: 376283 - DNA, 55 bp, Artificial
  Synthetic oligonucleotide
cgtctcctcgttgctttcttggcggtgcggtgttgcaccttgataggaacctgag

SEQ ID NO: 376284 - DNA, 55 bp, Artificial
  Synthetic oligonucleotide
cgtctcgaaagcggtatgtacgtgccctggatgctcatgtctctactgatgtccg

SEQ ID NO: 376285 - DNA, 55 bp, Artificial
  Synthetic oligonucleotide
cgtctcgaacaacgaggtcgaagcgcagagtgtagtaatagcgattaatctccgc

SEQ ID NO: 376286 - DNA, 57 bp, Artificial
  Synthetic oligonucleotide
cgtctcgaacctataccgagttagaggtaagagtacctgatccgtagtggatcgtca

SEQ ID NO: 376287 - DNA, 58 bp, Artificial
  Synthetic oligonucleotide
cgtctcgaactaatcccacccacgagaaagtgctaaccatagtgaacgctctgttgga

SEQ ID NO: 376288 - DNA, 57 bp, Artificial
  Synthetic oligonucleotide
cgtctcgaagttatgagtgagggccctatgtgtggatatctaaccgcatattgtgcg

SEQ ID NO: 376289 - DNA, 55 bp, Artificial
  Synthetic oligonucleotide
cgtctcgaccagcgggccgacttgcttgatggacagaccaaggtgcgacgtgttg

SEQ ID NO: 376290 - DNA, 55 bp, Artificial
  Synthetic oligonucleotide
cgtctcgactgggcagaaccaaggaaaactgtatcaagggtcttggccctagagg

SEQ ID NO: 376291 - DNA, 55 bp, Artificial
  Synthetic oligonucleotide
cgtctcgatcagagcatcttcgcccgtcgagacccttccaacgtctcgatcgtgc

SEQ ID NO: 376292 - DNA, 55 bp, Artificial
  Synthetic oligonucleotide
cgtctcgcatctcgtgccgcatcttcagatatcgggaaaagattgatggagggag

SEQ ID NO: 376293 - DNA, 60 bp, Artificial
  Synthetic oligonucleotide
cgtctcgcttgttgtagactgcttgttattatcttgagctgtgtgatcgaaggaacccga

SEQ ID NO: 376294 - DNA, 58 bp, Artificial
  Synthetic oligonucleotide
cgtctcggcaaccctacgtacagctggggggagaacgatactgacgtgctgctcctta

SEQ ID NO: 376295 - DNA, 55 bp, Artificial
  Synthetic oligonucleotide
cgtctcgtaatggccctaacgtacaggagtccagttgaggaagtgcttacaagct

SEQ ID NO: 376296 - DNA, 55 bp, Artificial
  Synthetic oligonucleotide
cgtctcgtcacagcgcgttgccagcgcagccctgtaccagaacgggtctacggac

SEQ ID NO: 376297 - DNA, 57 bp, Artificial
  Synthetic oligonucleotide
cgtctctaaataattccatttggttacctgtaatgtaatactcaccagctgttgtta

SEQ ID NO: 376298 - DNA, 60 bp, Artificial
  Synthetic oligonucleotide
cgtctctatcagagagcccagcattcagctctggaatactcaaggcctaccatgaatata

SEQ ID NO: 376299 - DNA, 60 bp, Artificial
  Synthetic oligonucleotide
cgtctctcaacttcctctatgtaattggcgtctggcgtcccatatataggtaggacgcta

SEQ ID NO: 376300 - DNA, 55 bp, Artificial
  Synthetic oligonucleotide
cgtctctcacactagtgattctgtgagcctccatgtgaaagcacactgcaagcct

SEQ ID NO: 376301 - DNA, 53 bp, Artificial
  Synthetic oligonucleotide
cgtctctcctgatcggtgaaccctcccgggtgtttcctcttcctaggtccgga

SEQ ID NO: 376302 - DNA, 55 bp, Artificial
  Synthetic oligonucleotide
cgtctctcgcctgactgcggtgatgagctacagctatggagtgtgacagcccgga

SEQ ID NO: 376303 - DNA, 55 bp, Artificial
  Synthetic oligonucleotide
cgtctctctgagactctatgtaattaaatgcatttggaggatttgctaactgaga

SEQ ID NO: 376304 - DNA, 54 bp, Artificial
  Synthetic oligonucleotide
cgtctcttaaggaccgtttttatatccgccacgtgtttaaacgtgtcatgtctg

SEQ ID NO: 376305 - DNA, 58 bp, Artificial
  Synthetic oligonucleotide
cgtctcttgatcggttttgtcgccgtctcagatgggacgtttgggatggttgatggag

SEQ ID NO: 376306 - DNA, 55 bp, Artificial
  Synthetic oligonucleotide
cgtctcttgttcgcccatagagtgcagaaccttcttcctcactcaggggtctctg

SEQ ID NO: 376307 - DNA, 55 bp, Artificial
  Synthetic oligonucleotide
cgtctcttgttgctcttaattgccccttttacagacagtcacactgttagcggtg

SEQ ID NO: 376308 - DNA, 55 bp, Artificial
  Synthetic oligonucleotide
cgtctgaaaagcttagttagtgcgtcccgcactataaagatagggaccaccctcc

SEQ ID NO: 376309 - DNA, 55 bp, Artificial
  Synthetic oligonucleotide
cgtctgaaatctgcgctccgacctaaactagggacgggacaactctgcggctggg

SEQ ID NO: 376310 - DNA, 55 bp, Artificial
  Synthetic oligonucleotide
cgtctgaatgatccttgtgaagctggagacgtcgttactatcgttactttcttgg

SEQ ID NO: 376311 - DNA, 60 bp, Artificial
  Synthetic oligonucleotide
cgtctgaattcatccatcctcagaagttcgtcatgactgaatacgttcaaaagtccattg

SEQ ID NO: 376312 - DNA, 55 bp, Artificial
  Synthetic oligonucleotide
cgtctgacagtttgaatgtaaacacgtcagtagcaaatttgaaatcactggtcgc

SEQ ID NO: 376313 - DNA, 59 bp, Artificial
  Synthetic oligonucleotide
cgtctgaccaattatagtgcgcctgaggagcttagataactgtgttaagacttggtccc

SEQ ID NO: 376314 - DNA, 60 bp, Artificial
  Synthetic oligonucleotide
cgtctgacctactacactggtgccactgacagctaataacgcggtcaacaccactattct

SEQ ID NO: 376315 - DNA, 57 bp, Artificial
  Synthetic oligonucleotide
cgtctgagacgccttacaattactattaatacattcatggaccgtagtccgtattaa

SEQ ID NO: 376316 - DNA, 60 bp, Artificial
  Synthetic oligonucleotide
cgtctgagactgagattgagaggtatcttgaagcgttctacagtgacctcacggatgaag

SEQ ID NO: 376317 - DNA, 60 bp, Artificial
  Synthetic oligonucleotide
cgtctgagagaatagttatggacactattaagcgtcactttgacaccaagcgtgaactta

SEQ ID NO: 376318 - DNA, 51 bp, Artificial
  Synthetic oligonucleotide
cgtctgatataatcagttttgacaacgtctcgtttatttctcgagtcaggt

SEQ ID NO: 376319 - DNA, 55 bp, Artificial
  Synthetic oligonucleotide
cgtctgcacattcgagaccttcctcaaacttgctaaaggccttaaggcggggcac

SEQ ID NO: 376320 - DNA, 59 bp, Artificial
  Synthetic oligonucleotide
cgtctgccaacctaaatacccgggattgtccgctgaggagcagagatacctgagagagg

SEQ ID NO: 376321 - DNA, 55 bp, Artificial
  Synthetic oligonucleotide
cgtctgcctttcagagactggcggggactagagaatgggcttcaacacatctgca

SEQ ID NO: 376322 - DNA, 60 bp, Artificial
  Synthetic oligonucleotide
cgtctgcgatataacaatcaacctgtggtcgggcagacttttgagtttgatatccacgga

SEQ ID NO: 376323 - DNA, 60 bp, Artificial
  Synthetic oligonucleotide
cgtctgctatagtgtcgaaacatcctgcgcgtgttgggctgccacctaccgctagcagtg

SEQ ID NO: 376324 - DNA, 60 bp, Artificial
  Synthetic oligonucleotide
cgtctgctgactacgttacctaggtcttcttgcatccctgacagctatttccaacaggcc

SEQ ID NO: 376325 - DNA, 52 bp, Artificial
  Synthetic oligonucleotide
cgtctggagggtaaaaagattttacgttacacttaagcgttgtgttaccatc

SEQ ID NO: 376326 - DNA, 55 bp, Artificial
  Synthetic oligonucleotide
cgtctggatgtagagcacttagaaaccttgcgctttaagaacctagtaactcgcc

SEQ ID NO: 376327 - DNA, 60 bp, Artificial
  Synthetic oligonucleotide
cgtctggggtgttgcatacatttgatgaagtattcggtgcaagaatccacagccatggga

SEQ ID NO: 376328 - DNA, 60 bp, Artificial
  Synthetic oligonucleotide
cgtctggtagtcgatcgatgacatgacgtgtccgggctccgcgaggaagcaccgacgcac

SEQ ID NO: 376329 - DNA, 56 bp, Artificial
  Synthetic oligonucleotide
cgtctggtgaaaaaactaagatttggaggatcgacttgtcaaatgttgtccctgag

SEQ ID NO: 376330 - DNA, 55 bp, Artificial
  Synthetic oligonucleotide
cgtctggtgacgtgtgggaacttattggaaacaacattttgctgtaaagcatcct

SEQ ID NO: 376331 - DNA, 55 bp, Artificial
  Synthetic oligonucleotide
cgtctggtgctgatttacttcccggtgaagttgaaactatagccgaaatacatcc

SEQ ID NO: 376332 - DNA, 57 bp, Artificial
  Synthetic oligonucleotide
cgtctggttagcggttagctccttttaatgtatgggatcgaatatacaacggctcta

SEQ ID NO: 376333 - DNA, 51 bp, Artificial
  Synthetic oligonucleotide
cgtctgtatgaagggcggatgggtgtgtggaacggatcattaaaggccgag

SEQ ID NO: 376334 - DNA, 55 bp, Artificial
  Synthetic oligonucleotide
cgtctgtcagagatttgccactctgttgagttcgctactacgatggtatcggttg

SEQ ID NO: 376335 - DNA, 60 bp, Artificial
  Synthetic oligonucleotide
cgtctgtcgttcgcgtatcgtgcaccgacaattgcatccgcgttaaacacgcacaagcag

SEQ ID NO: 376336 - DNA, 59 bp, Artificial
  Synthetic oligonucleotide
cgtctgtgggggtggagtatggatctttttctcgtgagcgtataatatcgctgtcaaaa

SEQ ID NO: 376337 - DNA, 55 bp, Artificial
  Synthetic oligonucleotide
cgtctgtgtacgcgcgggaaccgacagactttcgctcaaccacctccagttggac

SEQ ID NO: 376338 - DNA, 60 bp, Artificial
  Synthetic oligonucleotide
cgtctgttctcagcagtcagaaaggggctatttatggcagcctgcattggcctatcaaag

SEQ ID NO: 376339 - DNA, 55 bp, Artificial
  Synthetic oligonucleotide
cgtctgttgtatgacagcgagatccttcttcaacacaggatcgtctttcggttta

SEQ ID NO: 376340 - DNA, 54 bp, Artificial
  Synthetic oligonucleotide
cgtcttaaagcccccttttaccatctcacccgtaattatcagccacgctccctg

SEQ ID NO: 376341 - DNA, 60 bp, Artificial
  Synthetic oligonucleotide
cgtcttaaatagtggccatatatccagatatatggtcataattcatgtacgtgtttcaat

SEQ ID NO: 376342 - DNA, 59 bp, Artificial
  Synthetic oligonucleotide
cgtcttacactgcttcgaagacctcagaccaagcgacgaagacgaaggagagaacatcg

SEQ ID NO: 376343 - DNA, 51 bp, Artificial
  Synthetic oligonucleotide
cgtcttacatcaacgggacggaatggcatgacgttgccaaggaccaattca

SEQ ID NO: 376344 - DNA, 60 bp, Artificial
  Synthetic oligonucleotide
cgtcttacggatcagccgcacaacaatcgtgatatagagcttaaccgagcgaaaagagcc

SEQ ID NO: 376345 - DNA, 55 bp, Artificial
  Synthetic oligonucleotide
cgtcttaggtcgcctgattacagttaacccaatcgtaacagaaaaagatagtcca

SEQ ID NO: 376346 - DNA, 57 bp, Artificial
  Synthetic oligonucleotide
cgtcttagtcgcctaggtcgccggggcactattgtaacacgcagtggattacaaata

SEQ ID NO: 376347 - DNA, 54 bp, Artificial
  Synthetic oligonucleotide
cgtcttatcctaaaaggccgaaaagcagaacttccaggaatgttctttgcctac

SEQ ID NO: 376348 - DNA, 60 bp, Artificial
  Synthetic oligonucleotide
cgtcttattactggcagactctcttctctctcagtgctagcctctgctaagcagtctgag

SEQ ID NO: 376349 - DNA, 59 bp, Artificial
  Synthetic oligonucleotide
cgtcttcaaggctgacgcgattgtctcttatttcgacgatgaccgacccatttgcgtta

SEQ ID NO: 376350 - DNA, 55 bp, Artificial
  Synthetic oligonucleotide
cgtcttcatgcacgacgctctcatgtacttcacccctcatcaaatcgtcgatctt

SEQ ID NO: 376351 - DNA, 53 bp, Artificial
  Synthetic oligonucleotide
cgtcttccattcgcctagcgatttcgtcttagggggttttacctcctgacgtc

SEQ ID NO: 376352 - DNA, 55 bp, Artificial
  Synthetic oligonucleotide
cgtcttcgtactcctgctctgccctggacttgaagtgcggcattggcatgaactg

SEQ ID NO: 376353 - DNA, 54 bp, Artificial
  Synthetic oligonucleotide
cgtcttcgtccttaacaacaccagaccaccgctgggcaattggttcggttgtac

SEQ ID NO: 376354 - DNA, 53 bp, Artificial
  Synthetic oligonucleotide
cgtcttctaacccgtcggtgttttacacctatggggcgcccccagcaagaata

SEQ ID NO: 376355 - DNA, 55 bp, Artificial
  Synthetic oligonucleotide
cgtcttctggtactaccacaccagctgtgttggacatcacacctaccgtggactc

SEQ ID NO: 376356 - DNA, 55 bp, Artificial
  Synthetic oligonucleotide
cgtcttgaactagtaagagctaagtttcgtttagaagcggatggagagtctaaag

SEQ ID NO: 376357 - DNA, 55 bp, Artificial
  Synthetic oligonucleotide
cgtcttgatagtatcaacgcctttgagtgctgtattggctaaacctatgccagca

SEQ ID NO: 376358 - DNA, 50 bp, Artificial
  Synthetic oligonucleotide
cgtcttgatatgatctttgatctcgaatctgaaaggagcaccgggcggat

SEQ ID NO: 376359 - DNA, 60 bp, Artificial
  Synthetic oligonucleotide
cgtcttgccgcaatcatggaacacgtgttaagacaatcatataagatcacgtgtggactt

SEQ ID NO: 376360 - DNA, 53 bp, Artificial
  Synthetic oligonucleotide
cgtcttggctatgctcatgttaacgtctgtcacgttcgtaagaacagtggtgg

SEQ ID NO: 376361 - DNA, 55 bp, Artificial
  Synthetic oligonucleotide
cgtctttactaatccgttctagccctaagctgttaagcccacgattaacgtatgc

SEQ ID NO: 376362 - DNA, 59 bp, Artificial
  Synthetic oligonucleotide
cgtctttattggcttttgaactgccagagaccttgtattgtccggattcacaataatca

SEQ ID NO: 376363 - DNA, 60 bp, Artificial
  Synthetic oligonucleotide
cgtctttcatgattgcccgaacgtcggactgcaatgtgtccatattgttccagattcggt

SEQ ID NO: 376364 - DNA, 54 bp, Artificial
  Synthetic oligonucleotide
cgtctttccctgtcggtgaagtctcccgcgcgagtcctcttcttagggccggaa

SEQ ID NO: 376365 - DNA, 59 bp, Artificial
  Synthetic oligonucleotide
cgtctttctccatataggttttgacatcagacgagcttttagctccctgaatgtttgga

SEQ ID NO: 376366 - DNA, 55 bp, Artificial
  Synthetic oligonucleotide
cgtctttgagttcttggattaggtacggctgtcggataaacgactgaccgaacga

SEQ ID NO: 376367 - DNA, 55 bp, Artificial
  Synthetic oligonucleotide
cgtctttgatttaaaggtttgatctgctttggtggatttttccaaagcagccgtg

SEQ ID NO: 376368 - DNA, 57 bp, Artificial
  Synthetic oligonucleotide
cgtctttgcgtttggatccaactgtaacatacaatcttttagttccattgtttgaga

SEQ ID NO: 376369 - DNA, 55 bp, Artificial
  Synthetic oligonucleotide
cgtctttggatagatcgctagacacggttccggaattggctccaacgctcacaag

SEQ ID NO: 376370 - DNA, 55 bp, Artificial
  Synthetic oligonucleotide
cgtctttgtgggtcccatctatgtggtggacttaattgggcctcttttattgggc

SEQ ID NO: 376371 - DNA, 57 bp, Artificial
  Synthetic oligonucleotide
cgtcttttatgaggatacctcggttgaaggtcacataaagcatgggggagcggtgtc

SEQ ID NO: 376372 - DNA, 58 bp, Artificial
  Synthetic oligonucleotide
cgtcttttctgggctgtaggatagtgaatgggcgtcagctagtcccaaaccgtgacag

SEQ ID NO: 376373 - DNA, 50 bp, Artificial
  Synthetic oligonucleotide
cgtgaaaactgactatcatagcgtaaggttaaagatcgtctacgatccaa

SEQ ID NO: 376374 - DNA, 55 bp, Artificial
  Synthetic oligonucleotide
cgtgaaacaaagcataaacctcttgggttattggtggcatcggattttgttggaa

SEQ ID NO: 376375 - DNA, 55 bp, Artificial
  Synthetic oligonucleotide
cgtgaaacaatttagcatctacactgaaaatgagtaacgcaaaactggaagagca

SEQ ID NO: 376376 - DNA, 53 bp, Artificial
  Synthetic oligonucleotide
cgtgaaacacggggtcacctccccccacatacctctaagggcttttgagccta

SEQ ID NO: 376377 - DNA, 55 bp, Artificial
  Synthetic oligonucleotide
cgtgaaacccgtagtgagcgacacactcaatatcgacagaccggttccggctacc

SEQ ID NO: 376378 - DNA, 60 bp, Artificial
  Synthetic oligonucleotide
cgtgaaacgacgagactgtggactcgttcagcatcagatgattctgtggccacgtcatct

SEQ ID NO: 376379 - DNA, 57 bp, Artificial
  Synthetic oligonucleotide
cgtgaaacgttgttagcggtgaagaaacgcaacatgaacgtgcctgagttgcagagt

SEQ ID NO: 376380 - DNA, 58 bp, Artificial
  Synthetic oligonucleotide
cgtgaaactggcgggagagccttgctatcccgggtttgaggatctcctcaggataaga

SEQ ID NO: 376381 - DNA, 56 bp, Artificial
  Synthetic oligonucleotide
cgtgaaagacgacatcggaaaaggacaaacgaaaggagccacaggctcttcgaaga

SEQ ID NO: 376382 - DNA, 55 bp, Artificial
  Synthetic oligonucleotide
cgtgaaagaggaaggtaggttgcttatctgtgtctgtcattgtctagcattgtcc

SEQ ID NO: 376383 - DNA, 54 bp, Artificial
  Synthetic oligonucleotide
cgtgaaaggttacaaatggctttctcctacagaacgccacaggaagagctcctg

SEQ ID NO: 376384 - DNA, 51 bp, Artificial
  Synthetic oligonucleotide
cgtgaaagtactccactgctagggcagcctctgccggataaataggcgccc

SEQ ID NO: 376385 - DNA, 55 bp, Artificial
  Synthetic oligonucleotide
cgtgaaatagctgtagctctccaagcggcatttgataattcccctacatctcaac

SEQ ID NO: 376386 - DNA, 55 bp, Artificial
  Synthetic oligonucleotide
cgtgaaatcgagcctcgttcgcagttgctgggcgaaaaggctttgttcacccgcg

SEQ ID NO: 376387 - DNA, 59 bp, Artificial
  Synthetic oligonucleotide
cgtgaacatgttctgtcccgaatacagcgtcgactccaagcaacctagtcgcgagaaac

SEQ ID NO: 376388 - DNA, 58 bp, Artificial
  Synthetic oligonucleotide
cgtgaaccagtctgcaggacacagggttggacccagtgtcttctggtgtaacgtgtac

SEQ ID NO: 376389 - DNA, 60 bp, Artificial
  Synthetic oligonucleotide
cgtgaaccgcattatgctttacaaaacgtttgcatcgctggtgttgacagcttgagtagc

SEQ ID NO: 376390 - DNA, 58 bp, Artificial
  Synthetic oligonucleotide
cgtgaacgctaccaaggacgagccatttctaacgtcgacgctatgtttgtattatcca

SEQ ID NO: 376391 - DNA, 56 bp, Artificial
  Synthetic oligonucleotide
cgtgaacggtatgttctgtgtctgtttaacgtggaatactgtaaagcggcgtctta

SEQ ID NO: 376392 - DNA, 57 bp, Artificial
  Synthetic oligonucleotide
cgtgaactccacaaattgggcaagtgtggaagctgtgtttacaacatgatgggcaag

SEQ ID NO: 376393 - DNA, 60 bp, Artificial
  Synthetic oligonucleotide
cgtgaactcgcatcacagtcgcacctatactggacatgaggcacgtgtgccacgtacgga

SEQ ID NO: 376394 - DNA, 59 bp, Artificial
  Synthetic oligonucleotide
cgtgaacttcgccgagaggtacgtgtcaaaatgctcgaagcacctgtcctggtcaaata

SEQ ID NO: 376395 - DNA, 55 bp, Artificial
  Synthetic oligonucleotide
cgtgaagcacatacatggattctatcatggatttgcaataataatcaacgtctgg

SEQ ID NO: 376396 - DNA, 55 bp, Artificial
  Synthetic oligonucleotide
cgtgaagcatctcagtttaactgtagcttcggtaacgtagagacagtacatgacg

SEQ ID NO: 376397 - DNA, 56 bp, Artificial
  Synthetic oligonucleotide
cgtgaagccacgtttgctgaattgtgcaaccagcttcatgatagggtgttaccgtt

SEQ ID NO: 376398 - DNA, 54 bp, Artificial
  Synthetic oligonucleotide
cgtgaagcggggttaaataagttctcaaggtttagacaatggagagaatcggaa

SEQ ID NO: 376399 - DNA, 51 bp, Artificial
  Synthetic oligonucleotide
cgtgaagcgtagttgtaaacttttgtttgacgttgctcgtttaattggttg

SEQ ID NO: 376400 - DNA, 55 bp, Artificial
  Synthetic oligonucleotide
cgtgaagctcagtgcagagcaggcacgcacctttgaggatgagatctgggagaga

SEQ ID NO: 376401 - DNA, 55 bp, Artificial
  Synthetic oligonucleotide
cgtgaagctgactacggcacactctaatgcgacgtttaccgttgaccattcgctc

SEQ ID NO: 376402 - DNA, 58 bp, Artificial
  Synthetic oligonucleotide
cgtgaaggagtggctgagcaaacggaaagattaagagacctgcggcgaaaagagaaga

SEQ ID NO: 376403 - DNA, 57 bp, Artificial
  Synthetic oligonucleotide
cgtgaaggctaaccgtgcagaggctagagccgctgttcagtctccgtttgtcaccac

SEQ ID NO: 376404 - DNA, 55 bp, Artificial
  Synthetic oligonucleotide
cgtgaaggctacgtataccgtgcaaccacaagggatgtcaatcctgcgtctcctg

SEQ ID NO: 376405 - DNA, 55 bp, Artificial
  Synthetic oligonucleotide
cgtgaaggctatctcgcagaacgagataaatatatgcgtgttgctggagttcctg

SEQ ID NO: 376406 - DNA, 55 bp, Artificial
  Synthetic oligonucleotide
cgtgaagggtaccgcgccgtaaggcgtggcgatctcaagcgcctcaggaatgtga

SEQ ID NO: 376407 - DNA, 53 bp, Artificial
  Synthetic oligonucleotide
cgtgaaggtagggaacaccttttatgagttggagagaacaggcttaaagtccg

SEQ ID NO: 376408 - DNA, 56 bp, Artificial
  Synthetic oligonucleotide
cgtgaaggtatgggcccaaaattcaacaaggccgctgcatgggttaacaggcccat

SEQ ID NO: 376409 - DNA, 51 bp, Artificial
  Synthetic oligonucleotide
cgtgaagtactgtctgatagagaactccatctgtcgtgggaggtaggcaaa

SEQ ID NO: 376410 - DNA, 55 bp, Artificial
  Synthetic oligonucleotide
cgtgaagtatgaatctcacggatggccaattgttttcaaggagttgtacggggac

SEQ ID NO: 376411 - DNA, 59 bp, Artificial
  Synthetic oligonucleotide
cgtgaagttctctcattccctagagataacctcatctggaacgtacaggttagcccaga

SEQ ID NO: 376412 - DNA, 55 bp, Artificial
  Synthetic oligonucleotide
cgtgaagttttatgtttccacgacaccacttcctggtgtgaagcctccagcaaac

SEQ ID NO: 376413 - DNA, 56 bp, Artificial
  Synthetic oligonucleotide
cgtgaatattaaagttgtctcattaacgcccgagtccatcaatgtaaaatcgaaaa

SEQ ID NO: 376414 - DNA, 55 bp, Artificial
  Synthetic oligonucleotide
cgtgaatccatagttgtgacagtcaatggagatgtatagtgaacagccgcaacgc

SEQ ID NO: 376415 - DNA, 55 bp, Artificial
  Synthetic oligonucleotide
cgtgaatccatgatctctgcagtttatgtctacgtaagctgtgcaattgcacccc

SEQ ID NO: 376416 - DNA, 55 bp, Artificial
  Synthetic oligonucleotide
cgtgaatccatgcccggtacagcctatgtgaaagtatatggagcacccgcactcc

SEQ ID NO: 376417 - DNA, 55 bp, Artificial
  Synthetic oligonucleotide
cgtgaatcctgaaactccggtttgctggaatggacaacagggagggttcgaagga

SEQ ID NO: 376418 - DNA, 52 bp, Artificial
  Synthetic oligonucleotide
cgtgaatgatgaattgttgagaacactgaacgagaagagcgaaatgaacgac

SEQ ID NO: 376419 - DNA, 60 bp, Artificial
  Synthetic oligonucleotide
cgtgaatgatttcttccgcagactgaactggctagtaaaatcagacggaaatgcatatcc

SEQ ID NO: 376420 - DNA, 56 bp, Artificial
  Synthetic oligonucleotide
cgtgaatgccggtacatctggaacacatactgtaccaagaataaaggctattacgt

SEQ ID NO: 376421 - DNA, 55 bp, Artificial
  Synthetic oligonucleotide
cgtgaatggtttgaagagtagttggtctttaggtcgtcaactggatgatatacgg

SEQ ID NO: 376422 - DNA, 55 bp, Artificial
  Synthetic oligonucleotide
cgtgaatgtcgtagatgtggctaaatgtctacacggttgaacagtttataacgcg

SEQ ID NO: 376423 - DNA, 55 bp, Artificial
  Synthetic oligonucleotide
cgtgaattgatgcgcgtggaaaatcagaattatgaagctttcaaggatatcacgc

SEQ ID NO: 376424 - DNA, 52 bp, Artificial
  Synthetic oligonucleotide
cgtgaattgggcgctaaacccgcacaaggatcagcgctacagcgcgctaatt

SEQ ID NO: 376425 - DNA, 53 bp, Artificial
  Synthetic oligonucleotide
cgtgaatttaaaactcaccggtcgacaccaactatccacgctggaatgaacac

SEQ ID NO: 376426 - DNA, 52 bp, Artificial
  Synthetic oligonucleotide
cgtgaatttccgcgttccgggtcaaagtctccgtttttattgtcaccgtcat

SEQ ID NO: 376427 - DNA, 55 bp, Artificial
  Synthetic oligonucleotide
cgtgaattttcttgtttgcaagtaaaaaggtgcctgactccgtgcctggtggccg

SEQ ID NO: 376428 - DNA, 50 bp, Artificial
  Synthetic oligonucleotide
cgtgacaacggtgagggaacacgtttctggggacctcgggacggatcggg

SEQ ID NO: 376429 - DNA, 56 bp, Artificial
  Synthetic oligonucleotide
cgtgacaagctaatatgtcacgcttggttaccgcaggttgtaaggcgagaaaatac

SEQ ID NO: 376430 - DNA, 55 bp, Artificial
  Synthetic oligonucleotide
cgtgacacacctatgatgaagcaaactcacaagttgcaaaacaatgatccagtgg

SEQ ID NO: 376431 - DNA, 55 bp, Artificial
  Synthetic oligonucleotide
cgtgacacagccatttgagccagggactaagttcacgagagatggactgagttac

SEQ ID NO: 376432 - DNA, 55 bp, Artificial
  Synthetic oligonucleotide
cgtgacacctccacgggcaacacggggcaggggtaacgatgaccatccttactgg

SEQ ID NO: 376433 - DNA, 54 bp, Artificial
  Synthetic oligonucleotide
cgtgacacggggtaatggtataacccaccgtgttggtaagcgattctgtgttaa

SEQ ID NO: 376434 - DNA, 55 bp, Artificial
  Synthetic oligonucleotide
cgtgacacgggtatcatgactgcaaacgcagaatttgtagccggatgaacacatt

SEQ ID NO: 376435 - DNA, 55 bp, Artificial
  Synthetic oligonucleotide
cgtgacagaaggccctatggtactgctatggatttcggtcaggtgtttaacatgt

SEQ ID NO: 376436 - DNA, 59 bp, Artificial
  Synthetic oligonucleotide
cgtgacagggttcctcgatgactggaacaacatgtctgagttcggaggagacctagaag

SEQ ID NO: 376437 - DNA, 55 bp, Artificial
  Synthetic oligonucleotide
cgtgacagtcctgaaggtaacagccctctccgtgcgtgctataacgcttggagat

SEQ ID NO: 376438 - DNA, 56 bp, Artificial
  Synthetic oligonucleotide
cgtgacagtggcgccgatgtgcgctgaatataatggactgcgtctagccggcaaac

SEQ ID NO: 376439 - DNA, 55 bp, Artificial
  Synthetic oligonucleotide
cgtgacagtttatagaaatgaaatatgaacagccacagggtagatcaactcgtct

SEQ ID NO: 376440 - DNA, 60 bp, Artificial
  Synthetic oligonucleotide
cgtgacatcacccagtgcacgttcctcaaacggggatttgtgctggatggtagtcttgtg

SEQ ID NO: 376441 - DNA, 59 bp, Artificial
  Synthetic oligonucleotide
cgtgacatcactaattatatgagatttgtattgttaagaagaccttggcttccacttta

SEQ ID NO: 376442 - DNA, 57 bp, Artificial
  Synthetic oligonucleotide
cgtgacatctgttagacaagaatacgcgataccagttggaccagttttcccaccagg

SEQ ID NO: 376443 - DNA, 60 bp, Artificial
  Synthetic oligonucleotide
cgtgaccactaagcgactcagctccgattgtgactgttaattactaggctgtgttacagg

SEQ ID NO: 376444 - DNA, 55 bp, Artificial
  Synthetic oligonucleotide
cgtgaccagtccaaacgaaacgaaaacgccgttacgctagcctactgggctcagc

SEQ ID NO: 376445 - DNA, 55 bp, Artificial
  Synthetic oligonucleotide
cgtgaccatgagcgctcgctgcatgtgtggaactgggctgacacgtccacgaagg

SEQ ID NO: 376446 - DNA, 55 bp, Artificial
  Synthetic oligonucleotide
cgtgacccatgagtagcggagaatacaaatgcttccatcctgcgccgtatgaacg

SEQ ID NO: 376447 - DNA, 55 bp, Artificial
  Synthetic oligonucleotide
cgtgaccccaactacacccctccttgcacaacccgcctccccatccgcattcaca

SEQ ID NO: 376448 - DNA, 56 bp, Artificial
  Synthetic oligonucleotide
cgtgaccccctctagagcacgtggacgtgcattgaagtaccccgtgtcccgtagac

SEQ ID NO: 376449 - DNA, 55 bp, Artificial
  Synthetic oligonucleotide
cgtgacccctcttgggcggctatcctacaggggctggaagaaccctactgcgcgt

SEQ ID NO: 376450 - DNA, 53 bp, Artificial
  Synthetic oligonucleotide
cgtgaccctaggtacaatgtggaagtgggacgttacttgaagccgctggagcc

SEQ ID NO: 376451 - DNA, 55 bp, Artificial
  Synthetic oligonucleotide
cgtgaccggtcagtactcttaccaccctccgcctacttggtcgttagcgctgtcc

SEQ ID NO: 376452 - DNA, 55 bp, Artificial
  Synthetic oligonucleotide
cgtgacctagccttccgtaacaagaaggttggggcctcagagattaaggacctgc

SEQ ID NO: 376453 - DNA, 52 bp, Artificial
  Synthetic oligonucleotide
cgtgacctattatttgcgaatgatagggttggccaatgctggaaaagttgat

SEQ ID NO: 376454 - DNA, 55 bp, Artificial
  Synthetic oligonucleotide
cgtgacctggaagtcttgtacacgacaggggcggtgcagtggtcctgccgcgaaa

SEQ ID NO: 376455 - DNA, 60 bp, Artificial
  Synthetic oligonucleotide
cgtgaccttagactggcggctaatgctatttgctcggcagtcccgtcacattgggttcca

SEQ ID NO: 376456 - DNA, 55 bp, Artificial
  Synthetic oligonucleotide
cgtgaccttgaaatcggtgtcttccttcggcttgcctgaacccatgtcgatttcc

SEQ ID NO: 376457 - DNA, 60 bp, Artificial
  Synthetic oligonucleotide
cgtgacgaacgttgcgagctactgatgatctccgcaacgggttgtgatatgtacagcaac

SEQ ID NO: 376458 - DNA, 50 bp, Artificial
  Synthetic oligonucleotide
cgtgacgaatacgagcagtattacgccgtgttcacagggaataacgttcg

SEQ ID NO: 376459 - DNA, 55 bp, Artificial
  Synthetic oligonucleotide
cgtgacgactgtttccgcaccgccgaacgtggtcgtggccctgtgcttcatgaag

SEQ ID NO: 376460 - DNA, 60 bp, Artificial
  Synthetic oligonucleotide
cgtgacgcaacccccactggttggggcttggcaataggccatcagcgcatgcgtggaacc

SEQ ID NO: 376461 - DNA, 55 bp, Artificial
  Synthetic oligonucleotide
cgtgacgcacccgctcccctcagtcccctgtgtaacagggagggcacttgtaacc

SEQ ID NO: 376462 - DNA, 55 bp, Artificial
  Synthetic oligonucleotide
cgtgacggaggaaaaggaaatgatacgtctgaaacattcagacctggaggaggag

SEQ ID NO: 376463 - DNA, 53 bp, Artificial
  Synthetic oligonucleotide
cgtgacggcagtccttagtgagaaattttatggtactaaggttaagacgttta

SEQ ID NO: 376464 - DNA, 54 bp, Artificial
  Synthetic oligonucleotide
cgtgacggctagtgtccagatactagaagtccgtgctgtggcactggctttgcg

SEQ ID NO: 376465 - DNA, 58 bp, Artificial
  Synthetic oligonucleotide
cgtgacgtagataatggctgtttgatgggatgggactatccaaagtgcgaccgggctt

SEQ ID NO: 376466 - DNA, 55 bp, Artificial
  Synthetic oligonucleotide
cgtgacgtattcaatcggagggtcgctccgtgtctgaacctccgtccccgctgga

SEQ ID NO: 376467 - DNA, 55 bp, Artificial
  Synthetic oligonucleotide
cgtgacgtggcccaatcagatcccgccgtttgccccacgtgcccctattggcaat

SEQ ID NO: 376468 - DNA, 56 bp, Artificial
  Synthetic oligonucleotide
cgtgactaaaccgtataggtcattgccaacaaccgcacccggttaatcagatataa

SEQ ID NO: 376469 - DNA, 58 bp, Artificial
  Synthetic oligonucleotide
cgtgactaaatcggtgagtaccttgctctcgttggttagtatgcaagtcccgctggcg

SEQ ID NO: 376470 - DNA, 55 bp, Artificial
  Synthetic oligonucleotide
cgtgactattcgagaggagttattcgaactggaggtcagaattacccgcacggac

SEQ ID NO: 376471 - DNA, 56 bp, Artificial
  Synthetic oligonucleotide
cgtgactcacgatacctactcgaatgttttcaaagtcgtaaccgtcgaacacgtca

SEQ ID NO: 376472 - DNA, 55 bp, Artificial
  Synthetic oligonucleotide
cgtgactcatacacaggaagttcctttagggtagaggaaatgttctaatctccta

SEQ ID NO: 376473 - DNA, 60 bp, Artificial
  Synthetic oligonucleotide
cgtgactcgcgccttggatgatgtgactgctaatttagatggtatgagagtcaccattac

SEQ ID NO: 376474 - DNA, 60 bp, Artificial
  Synthetic oligonucleotide
cgtgactcttgattgttgcatgtgactcttgatagcgaataccgcctgtcttttgctatg

SEQ ID NO: 376475 - DNA, 55 bp, Artificial
  Synthetic oligonucleotide
cgtgactgatatgataatgaggggattccctgaccctttgactgggcacctggcc

SEQ ID NO: 376476 - DNA, 60 bp, Artificial
  Synthetic oligonucleotide
cgtgactggttcggacagaaccttcccacgtggagctccgcatggtctgattttgagcca

SEQ ID NO: 376477 - DNA, 58 bp, Artificial
  Synthetic oligonucleotide
cgtgacttaccacgtggtgtgtacgtcacacgccgccattttcaatcacaaaatggcg

SEQ ID NO: 376478 - DNA, 60 bp, Artificial
  Synthetic oligonucleotide
cgtgacttatgtcactgcacgctatcactgatccgcgctgaccttcgttttcagattaac

SEQ ID NO: 376479 - DNA, 55 bp, Artificial
  Synthetic oligonucleotide
cgtgacttcaagacggaagttaccgtgcttactggcccttcaggtgtgggcaagt

SEQ ID NO: 376480 - DNA, 55 bp, Artificial
  Synthetic oligonucleotide
cgtgacttcgggactgagggtgtgtatgaaattgggtctatgatgcctcaagagc

SEQ ID NO: 376481 - DNA, 55 bp, Artificial
  Synthetic oligonucleotide
cgtgactttgtcatagcaaagctcggtgagtggcccagtatgcgtgatttagcgg

SEQ ID NO: 376482 - DNA, 55 bp, Artificial
  Synthetic oligonucleotide
cgtgagaactgactgccaggcgattgtgacctttcataacaagacaagcggacac

SEQ ID NO: 376483 - DNA, 50 bp, Artificial
  Synthetic oligonucleotide
cgtgagaataacgctcacctcgtttttgaaattgctaccgatcccactaa

SEQ ID NO: 376484 - DNA, 56 bp, Artificial
  Synthetic oligonucleotide
cgtgagaccgaactgacggacttaattaatagaattcgtgagaatgaagttactgt

SEQ ID NO: 376485 - DNA, 55 bp, Artificial
  Synthetic oligonucleotide
cgtgagaccgttcttcgaacggctttagttcgggaatgtgagcttgtggcccctc

SEQ ID NO: 376486 - DNA, 56 bp, Artificial
  Synthetic oligonucleotide
cgtgagagaaacttacgcacgaatgaacgctaaagtcaaagctctagtatccacag

SEQ ID NO: 376487 - DNA, 58 bp, Artificial
  Synthetic oligonucleotide
cgtgagagggttctttctgtacccagattggtggcgcaacaagaggaggtggttgtca

SEQ ID NO: 376488 - DNA, 55 bp, Artificial
  Synthetic oligonucleotide
cgtgagaggtgggttaaacgcagtaaatgactttatgatgccagcaactggactt

SEQ ID NO: 376489 - DNA, 60 bp, Artificial
  Synthetic oligonucleotide
cgtgagagttggaaacatgtgcagaattttcgacagccttttgagtagtgtcaggaacaa

SEQ ID NO: 376490 - DNA, 56 bp, Artificial
  Synthetic oligonucleotide
cgtgagatcgagagtcgtccatttagtagggtcatttggtaagaatgttaggggta

SEQ ID NO: 376491 - DNA, 51 bp, Artificial
  Synthetic oligonucleotide
cgtgagattgacacacgtgttatacccacaacattgtgcatgtgagtccgt

SEQ ID NO: 376492 - DNA, 59 bp, Artificial
  Synthetic oligonucleotide
cgtgagatttattatgaagcgtagagatgtactcccttgccaggtaggcataaatcctt

SEQ ID NO: 376493 - DNA, 55 bp, Artificial
  Synthetic oligonucleotide
cgtgagcatcatagtaacagtattagtccttgggagaggtggaaacaacgggatc

SEQ ID NO: 376494 - DNA, 55 bp, Artificial
  Synthetic oligonucleotide
cgtgagcattcctacttgattcgaggaaatgattagatgcccagcggtccacccc

SEQ ID NO: 376495 - DNA, 51 bp, Artificial
  Synthetic oligonucleotide
cgtgagcgcagagagtgatctcaccattggttcagtagccactgaggatgt

SEQ ID NO: 376496 - DNA, 59 bp, Artificial
  Synthetic oligonucleotide
cgtgagcgcgcacatcgatacttacgagctgtgcgacgatctaaccctcgccattcgtg

SEQ ID NO: 376497 - DNA, 60 bp, Artificial
  Synthetic oligonucleotide
cgtgagcgcgtccttttatcgcattttcgtattgtgttttacgatgatgctggagtgttg

SEQ ID NO: 376498 - DNA, 50 bp, Artificial
  Synthetic oligonucleotide
cgtgagctccaggtttacgagcgcggctgcaactggtacccgatcacggg

SEQ ID NO: 376499 - DNA, 60 bp, Artificial
  Synthetic oligonucleotide
cgtgagcttcgcacacaacaagctgctacgcggtactatccagaactcgggttacactgg

SEQ ID NO: 376500 - DNA, 55 bp, Artificial
  Synthetic oligonucleotide
cgtgaggaaacattgcaagagcgactgggttaaaattgcgtgtgaaacatggacc

SEQ ID NO: 376501 - DNA, 53 bp, Artificial
  Synthetic oligonucleotide
cgtgaggaacaaactgaacggctaacatctaccgccccagagcctgaagtccg

SEQ ID NO: 376502 - DNA, 60 bp, Artificial
  Synthetic oligonucleotide
cgtgaggatacaccgctatgcaccaaagtgcaagccacttctcagggatgaggtctcctt

SEQ ID NO: 376503 - DNA, 55 bp, Artificial
  Synthetic oligonucleotide
cgtgaggcaaagctaattggggatccatggttgaagacaaaagtattcctgggtc

SEQ ID NO: 376504 - DNA, 55 bp, Artificial
  Synthetic oligonucleotide
cgtgaggcaatgtagggccaaccgtcacccgatagacatagtttgtagagcacat

SEQ ID NO: 376505 - DNA, 60 bp, Artificial
  Synthetic oligonucleotide
cgtgaggccaactgtgaggtgggtggccgcatgctgcaatctcccagaggtggagacttt

SEQ ID NO: 376506 - DNA, 54 bp, Artificial
  Synthetic oligonucleotide
cgtgaggcgctacttcgtttaaaagggagccatttcgaaccattggagccgaaa

SEQ ID NO: 376507 - DNA, 55 bp, Artificial
  Synthetic oligonucleotide
cgtgaggcgtatcaatgggccagattgtatgggacttcatttgttctgctcgacc

SEQ ID NO: 376508 - DNA, 55 bp, Artificial
  Synthetic oligonucleotide
cgtgaggcgtttcgaacccatcgcccgttcagatttacttgaggcagctcctctg

SEQ ID NO: 376509 - DNA, 57 bp, Artificial
  Synthetic oligonucleotide
cgtgagggacattacgaaacactttcgtgatacagcaagaatgaagaaaggcacccc

SEQ ID NO: 376510 - DNA, 60 bp, Artificial
  Synthetic oligonucleotide
cgtgaggtgtatgctgatgattacacaatggaacatacatttggtgaagcatatactaag

SEQ ID NO: 376511 - DNA, 55 bp, Artificial
  Synthetic oligonucleotide
cgtgagtaacctgtgtcctttgcgttttgatgtgcagttagaagtagtcgattgt

SEQ ID NO: 376512 - DNA, 54 bp, Artificial
  Synthetic oligonucleotide
cgtgagtaaggactatgccgtccttaactcaactatttaccgtgttgggagaac

SEQ ID NO: 376513 - DNA, 55 bp, Artificial
  Synthetic oligonucleotide
cgtgagtaagttgaaagcaagaggtgttacgtcccctcatctttatgccatgact

SEQ ID NO: 376514 - DNA, 60 bp, Artificial
  Synthetic oligonucleotide
cgtgagtacgtctgctcctaagcatcggagtgtgtgccaactgtcgggtgaagttcgccc

SEQ ID NO: 376515 - DNA, 57 bp, Artificial
  Synthetic oligonucleotide
cgtgagtagaaatttgagattgaaagagttcacgacgcaaactgatactttaagctt

SEQ ID NO: 376516 - DNA, 55 bp, Artificial
  Synthetic oligonucleotide
cgtgagtagggccttcatctgcttgcaggcacttaccacattcgtctctgtggca

SEQ ID NO: 376517 - DNA, 60 bp, Artificial
  Synthetic oligonucleotide
cgtgagtcactctcgaggtttattcccgccatcggccctgtgcaagcaacaacttgcgag

SEQ ID NO: 376518 - DNA, 60 bp, Artificial
  Synthetic oligonucleotide
cgtgagtcgtcacttgcgatatgcatccgtcgcaccatacttctggatcgagcctacgtc

SEQ ID NO: 376519 - DNA, 55 bp, Artificial
  Synthetic oligonucleotide
cgtgagtctttaccaatctcagtagatacgatcagaggttatattggagctagaa

SEQ ID NO: 376520 - DNA, 60 bp, Artificial
  Synthetic oligonucleotide
cgtgagtgctgctgctaaagacttcctgtccaaattcggaattcagatttaagaatgcat

SEQ ID NO: 376521 - DNA, 60 bp, Artificial
  Synthetic oligonucleotide
cgtgagtgcttttgcgacattttgcgacaccacgtggccatttgaggtatatatggccga

SEQ ID NO: 376522 - DNA, 55 bp, Artificial
  Synthetic oligonucleotide
cgtgagtgggaaacttatcgtagcaattctgcgcgcgaaatggagactcagagga

SEQ ID NO: 376523 - DNA, 55 bp, Artificial
  Synthetic oligonucleotide
cgtgagtgggacatggacaagattgttccggcatacaaccgtcgagttaatgggg

SEQ ID NO: 376524 - DNA, 60 bp, Artificial
  Synthetic oligonucleotide
cgtgagttatgcctgctggcaagaggaggagtctccgacgacgaaacgtcgccacctgca

SEQ ID NO: 376525 - DNA, 52 bp, Artificial
  Synthetic oligonucleotide
cgtgagttctgtggatgggagaggtcgaataatcgacaatttgtgcagatga

SEQ ID NO: 376526 - DNA, 55 bp, Artificial
  Synthetic oligonucleotide
cgtgataaagtcgtctgattcgagagtaagttcggcgagcttcattacgataccg

SEQ ID NO: 376527 - DNA, 55 bp, Artificial
  Synthetic oligonucleotide
cgtgataagacgagtgcaaactggagggggtatagtgtgttggtgtcaaggtaca

SEQ ID NO: 376528 - DNA, 52 bp, Artificial
  Synthetic oligonucleotide
cgtgataagttgtgtttgaaaccccaccaacccctttgtggctggataagtt

SEQ ID NO: 376529 - DNA, 55 bp, Artificial
  Synthetic oligonucleotide
cgtgataatacccgtatcaccactccagactaagggaacaccttatgtgccaatc

SEQ ID NO: 376530 - DNA, 55 bp, Artificial
  Synthetic oligonucleotide
cgtgataatcaaatcaccgccgcgctattgtttaacgtggtatcgttgttccccg

SEQ ID NO: 376531 - DNA, 57 bp, Artificial
  Synthetic oligonucleotide
cgtgatacatcacggcatgtagaaataaagcccttaaggtcagacccttggacccat

SEQ ID NO: 376532 - DNA, 60 bp, Artificial
  Synthetic oligonucleotide
cgtgatacgagcaatagtgctgaaagtgcccatatcgacaggtgtcttcccgaggcttca

SEQ ID NO: 376533 - DNA, 60 bp, Artificial
  Synthetic oligonucleotide
cgtgatagaaggcccaataaggatccgctgaactttggccagatcttcactatgtacgac

SEQ ID NO: 376534 - DNA, 55 bp, Artificial
  Synthetic oligonucleotide
cgtgatagcctgtagtacgccttctcgactagtatctatagttacaccgatagag

SEQ ID NO: 376535 - DNA, 55 bp, Artificial
  Synthetic oligonucleotide
cgtgatagtaatcacgccttccctactacagcatcactgagaattttcgtcgggg

SEQ ID NO: 376536 - DNA, 52 bp, Artificial
  Synthetic oligonucleotide
cgtgatagtcagtgtgtagttcatttcactggtcgcagtgtaactatatcag

SEQ ID NO: 376537 - DNA, 56 bp, Artificial
  Synthetic oligonucleotide
cgtgatattgcacagatctaaagatgtatgagtacaattcgttacacaaacgcttg

SEQ ID NO: 376538 - DNA, 55 bp, Artificial
  Synthetic oligonucleotide
cgtgatattggtgggttgggcctcgaacactggaacccaattaatagagacacac

SEQ ID NO: 376539 - DNA, 60 bp, Artificial
  Synthetic oligonucleotide
cgtgatcagtactcgtaacaactcggctaccatgacgggtctagctgctgcaagttaaca

SEQ ID NO: 376540 - DNA, 60 bp, Artificial
  Synthetic oligonucleotide
cgtgatcatccgaggcacacttccgattccgtcagattcgtcaggggcgtgctcagtctg

SEQ ID NO: 376541 - DNA, 58 bp, Artificial
  Synthetic oligonucleotide
cgtgatccggcctcctacctgctcggggcttatccggtcctgtcctttctgcgctgtg

SEQ ID NO: 376542 - DNA, 55 bp, Artificial
  Synthetic oligonucleotide
cgtgatcgcagatgtagaatgaccttttgctcttagttttccactcccactttct

SEQ ID NO: 376543 - DNA, 55 bp, Artificial
  Synthetic oligonucleotide
cgtgatcgccaaaagtggcgtaacgtttgggatggtatggtttggtacttcatca

SEQ ID NO: 376544 - DNA, 60 bp, Artificial
  Synthetic oligonucleotide
cgtgatcgctcgagggctgttttgtgaagataacgttccagatgagcggtactggagaga

SEQ ID NO: 376545 - DNA, 57 bp, Artificial
  Synthetic oligonucleotide
cgtgatcgtgtgcaggtgttacatcgtttttcagctacagtgacgggtggacagtac

SEQ ID NO: 376546 - DNA, 60 bp, Artificial
  Synthetic oligonucleotide
cgtgatcgttatcaagtcatgcacaggttctacgcgaaggtcactggtggtcagtatgcg

SEQ ID NO: 376547 - DNA, 55 bp, Artificial
  Synthetic oligonucleotide
cgtgatcgttatcaggtcgtgcgtaagtttcatgccaccgtgaccggtggccagt

SEQ ID NO: 376548 - DNA, 59 bp, Artificial
  Synthetic oligonucleotide
cgtgatctagaccacgccgaacttgagaattactgcacctggtattcaatttataagga

SEQ ID NO: 376549 - DNA, 60 bp, Artificial
  Synthetic oligonucleotide
cgtgatgaagcatacgatctactcccctgagacaaaccttctcgtaagcattctactaaa

SEQ ID NO: 376550 - DNA, 57 bp, Artificial
  Synthetic oligonucleotide
cgtgatgagagaagaagaccagtcctattggttaggaaagacaaaccattggacggc

SEQ ID NO: 376551 - DNA, 58 bp, Artificial
  Synthetic oligonucleotide
cgtgatgagattagaaaagctatggtgcataatatgccgaccatgaatcacaacaacc

SEQ ID NO: 376552 - DNA, 55 bp, Artificial
  Synthetic oligonucleotide
cgtgatgatcttggtcagcaagtgggtcccggctatgtcatgctgagatcatctg

SEQ ID NO: 376553 - DNA, 60 bp, Artificial
  Synthetic oligonucleotide
cgtgatgattcgagccccctccagcaagactgttgactcaatttcgcccgcaggcctcct

SEQ ID NO: 376554 - DNA, 56 bp, Artificial
  Synthetic oligonucleotide
cgtgatgccccatggcgcttaatggcgggtacccctaaggtgagtcggtcctctaa

SEQ ID NO: 376555 - DNA, 55 bp, Artificial
  Synthetic oligonucleotide
cgtgatgcccgtttacccaggggagcaactcctattcttccgctcccagctaccg

SEQ ID NO: 376556 - DNA, 60 bp, Artificial
  Synthetic oligonucleotide
cgtgatgcgacagaggaacctggagatatctgcacgcacggtcgactcactgctcttgaa

SEQ ID NO: 376557 - DNA, 55 bp, Artificial
  Synthetic oligonucleotide
cgtgatgcgaccgtattataaacctctgcctagcgtcgacgtagatctgatcact

SEQ ID NO: 376558 - DNA, 55 bp, Artificial
  Synthetic oligonucleotide
cgtgatggaggaaacagctctaatgagacattcagacctggaggaggagatatga

SEQ ID NO: 376559 - DNA, 55 bp, Artificial
  Synthetic oligonucleotide
cgtgatggaggaacagagccaaatgatacagagacattcagacctggaggaggag

SEQ ID NO: 376560 - DNA, 55 bp, Artificial
  Synthetic oligonucleotide
cgtgatggaggagagacaaatgatacagatggaacagagacattcagacctggag

SEQ ID NO: 376561 - DNA, 55 bp, Artificial
  Synthetic oligonucleotide
cgtgatggagggtcagggtcaaatggcacagagacattcagacctggaggaggag

SEQ ID NO: 376562 - DNA, 60 bp, Artificial
  Synthetic oligonucleotide
cgtgatggcattcggaacaagtcgttgtccgctggagtccgatccgtctatgacaacgtg

SEQ ID NO: 376563 - DNA, 55 bp, Artificial
  Synthetic oligonucleotide
cgtgatggcgtcatgactccagctcaacagaatcaagtcgaggcattggcagatc

SEQ ID NO: 376564 - DNA, 55 bp, Artificial
  Synthetic oligonucleotide
cgtgatggtccaggtgccttcgacctctttgaggacgataatgatgggtggtacc

SEQ ID NO: 376565 - DNA, 55 bp, Artificial
  Synthetic oligonucleotide
cgtgatggtgggatactacagtcgtcaaaccccagttatccggtctgtaacgagg

SEQ ID NO: 376566 - DNA, 55 bp, Artificial
  Synthetic oligonucleotide
cgtgatggttatgttgacgcgaatctacgccccagaggagaccaacgtgagacgc

SEQ ID NO: 376567 - DNA, 54 bp, Artificial
  Synthetic oligonucleotide
cgtgatgtgaatttgattacctatactgtgacgcgaactaacgccggagatacg

SEQ ID NO: 376568 - DNA, 55 bp, Artificial
  Synthetic oligonucleotide
cgtgatgtgtcatgcaacactgacgtcacgccttctcacgccacaacgtgttccc

SEQ ID NO: 376569 - DNA, 60 bp, Artificial
  Synthetic oligonucleotide
cgtgattacaaccccatctccaataacatctgcaagctaatcaaccgttctgagggagag

SEQ ID NO: 376570 - DNA, 55 bp, Artificial
  Synthetic oligonucleotide
cgtgattacacgccacagacccaaggcacctacacgaacgggcggttcgtgtcct

SEQ ID NO: 376571 - DNA, 52 bp, Artificial
  Synthetic oligonucleotide
cgtgattacgagttcctgggtgtatcacccagggtgctccgtagacccgaac

SEQ ID NO: 376572 - DNA, 55 bp, Artificial
  Synthetic oligonucleotide
cgtgattacgatcagaccaagaacagaagtgatacttaaagatggaacctacagg

SEQ ID NO: 376573 - DNA, 53 bp, Artificial
  Synthetic oligonucleotide
cgtgattagggtggcacacttgctagacattccgcgcctcctggagctagcga

SEQ ID NO: 376574 - DNA, 50 bp, Artificial
  Synthetic oligonucleotide
cgtgattccacccacggtcctcttgtcgaaccccgtgacggacagggccc

SEQ ID NO: 376575 - DNA, 59 bp, Artificial
  Synthetic oligonucleotide
cgtgattcgtacgatccttccactcttggttacgatcttcttagcgatctcatcggagt

SEQ ID NO: 376576 - DNA, 55 bp, Artificial
  Synthetic oligonucleotide
cgtgattctcctcggcgaccccatccaaggcgagtatcactcgactcaccccagc

SEQ ID NO: 376577 - DNA, 57 bp, Artificial
  Synthetic oligonucleotide
cgtgattgacgaatcatccccgtttagcgttcctatccaaggtgtgttaaccgtgca

SEQ ID NO: 376578 - DNA, 56 bp, Artificial
  Synthetic oligonucleotide
cgtgattgatgcgaatgacctggacccgcgttttcacgattaatgatataacactg

SEQ ID NO: 376579 - DNA, 55 bp, Artificial
  Synthetic oligonucleotide
cgtgattggctcttgtcaataactcgtgacgcaaacgttgaatataagcggttgg

SEQ ID NO: 376580 - DNA, 55 bp, Artificial
  Synthetic oligonucleotide
cgtgatttaatttctgtcgtcagggccaaaagctatgtccaagcgtccggcagat

SEQ ID NO: 376581 - DNA, 60 bp, Artificial
  Synthetic oligonucleotide
cgtgatttcccatgctatagaagcatctgcgtcgggtagatgtctctcggtgttagccga

SEQ ID NO: 376582 - DNA, 59 bp, Artificial
  Synthetic oligonucleotide
cgtgatttcctaacgcgtgatcagaacctcgtgggggctagagtgcggagacctggaga

SEQ ID NO: 376583 - DNA, 55 bp, Artificial
  Synthetic oligonucleotide
cgtgatttctgtaaccatatgaagtttgttctgcttggtcgactttgctttagcc

SEQ ID NO: 376584 - DNA, 55 bp, Artificial
  Synthetic oligonucleotide
cgtgatttggatagttgctggagtgtaatgtggataggcttattatcaaagtggt

SEQ ID NO: 376585 - DNA, 60 bp, Artificial
  Synthetic oligonucleotide
cgtgatttggctcgataccaatgcaacggcgctaccttgttgctgtgggacgtacgtagc

SEQ ID NO: 376586 - DNA, 60 bp, Artificial
  Synthetic oligonucleotide
cgtgattttcgcctccttcatttcagtgtcatgtccgaagttgacaacactgatccaact

SEQ ID NO: 376587 - DNA, 54 bp, Artificial
  Synthetic oligonucleotide
cgtgattttgaaattattacaccttacttagagggaaccaacgatgatgacggg

SEQ ID NO: 376588 - DNA, 60 bp, Artificial
  Synthetic oligonucleotide
cgtgcaaaactccccaatgctagacctgctcatactcacaggggaccctaggcaatccga

SEQ ID NO: 376589 - DNA, 55 bp, Artificial
  Synthetic oligonucleotide
cgtgcaaactaagcgtggccttccgagtggcatgccctttacctcggttatcaac

SEQ ID NO: 376590 - DNA, 55 bp, Artificial
  Synthetic oligonucleotide
cgtgcaaagaccaaatagcgcaggctttaatagagctgtcgatttacatcgagcc

SEQ ID NO: 376591 - DNA, 55 bp, Artificial
  Synthetic oligonucleotide
cgtgcaaagagtcggtaagccttctgtgcgtctctcgtctctttatacggctttg

SEQ ID NO: 376592 - DNA, 60 bp, Artificial
  Synthetic oligonucleotide
cgtgcaaaggagattgtcaccccccgaaagatcatattgtgacacatccacagtatcatg

SEQ ID NO: 376593 - DNA, 55 bp, Artificial
  Synthetic oligonucleotide
cgtgcaaaggctgatcagataatggtcgcagccatcgaattggtggcggatggct

SEQ ID NO: 376594 - DNA, 56 bp, Artificial
  Synthetic oligonucleotide
cgtgcaaagttcaagataagggggtatgtacagtaaatgaagataggtggaacgta

SEQ ID NO: 376595 - DNA, 55 bp, Artificial
  Synthetic oligonucleotide
cgtgcaaccccagccaccagggagtggctcgacaaaatgtgggatagggtggaca

SEQ ID NO: 376596 - DNA, 55 bp, Artificial
  Synthetic oligonucleotide
cgtgcaactcttcgtggaaaccacgtgaggtaaatgagaccaacaggcgttgtgg

SEQ ID NO: 376597 - DNA, 50 bp, Artificial
  Synthetic oligonucleotide
cgtgcaagagtgcttggagctatcagtacttgcggcaatctaaaggagtg

SEQ ID NO: 376598 - DNA, 53 bp, Artificial
  Synthetic oligonucleotide
cgtgcaagcactgcgaaaaaatctgaagacgaactcgtagttgaccgagttcc

SEQ ID NO: 376599 - DNA, 59 bp, Artificial
  Synthetic oligonucleotide
cgtgcaagcgtggaagtccaagagatccccaatggggttctcgtatgatacccgctgct

SEQ ID NO: 376600 - DNA, 60 bp, Artificial
  Synthetic oligonucleotide
cgtgcaagctgattcgggatgtgcaattgacctacaacgacgtgaattgaaatgtggagg

SEQ ID NO: 376601 - DNA, 60 bp, Artificial
  Synthetic oligonucleotide
cgtgcaagtgaggcggacgatcgcattgttggtccaactgttaatctgttaaaatatgga

SEQ ID NO: 376602 - DNA, 55 bp, Artificial
  Synthetic oligonucleotide
cgtgcaatatacggcttgcacccaatcgatacccttggttacgggatcgaaatga

SEQ ID NO: 376603 - DNA, 55 bp, Artificial
  Synthetic oligonucleotide
cgtgcacaaggcgtgtcaggctcaagactccggcaggtggtctttgaagcggagt

SEQ ID NO: 376604 - DNA, 60 bp, Artificial
  Synthetic oligonucleotide
cgtgcacaaggtgcacagattgacacccctttcagctcattttactggctctacaaagcc

SEQ ID NO: 376605 - DNA, 55 bp, Artificial
  Synthetic oligonucleotide
cgtgcacctcgcgcgtgtacgtttcatgcaacaacccaccacccacatttattgg

SEQ ID NO: 376606 - DNA, 56 bp, Artificial
  Synthetic oligonucleotide
cgtgcacctgtggcagctcggacctttacttggtcacgaggcatgccgatgtcatt

SEQ ID NO: 376607 - DNA, 51 bp, Artificial
  Synthetic oligonucleotide
cgtgcacggtttgatggtcataccttcaaccattgcgatcccatatctgct

SEQ ID NO: 376608 - DNA, 55 bp, Artificial
  Synthetic oligonucleotide
cgtgcactagagacccaggagataaagcatcattcagagtgtgtgggaagagtta

SEQ ID NO: 376609 - DNA, 55 bp, Artificial
  Synthetic oligonucleotide
cgtgcactcaacgatcgctgaaatttaaataacctcttgcctgcatgatctcatg

SEQ ID NO: 376610 - DNA, 55 bp, Artificial
  Synthetic oligonucleotide
cgtgcactcgcgggaaccgatggactgtcgttcacccacctacagctggactcac

SEQ ID NO: 376611 - DNA, 55 bp, Artificial
  Synthetic oligonucleotide
cgtgcactgggtactactggctctattgatgtctgatgacgtcaccatttccggc

SEQ ID NO: 376612 - DNA, 55 bp, Artificial
  Synthetic oligonucleotide
cgtgcactggtatttcccttcgaactgtaagagcacatggagatgaggctcccca

SEQ ID NO: 376613 - DNA, 60 bp, Artificial
  Synthetic oligonucleotide
cgtgcacttcctgggccgggtctacgtcctgatataaagcgctgcacttccgaatggctg

SEQ ID NO: 376614 - DNA, 55 bp, Artificial
  Synthetic oligonucleotide
cgtgcagacgaacttcccttcgaactggataagaacgtggatatgcggagaccca

SEQ ID NO: 376615 - DNA, 60 bp, Artificial
  Synthetic oligonucleotide
cgtgcagagcgacgataccagaggatggtgaccattacgtggttgtgaggggtgcaatca

SEQ ID NO: 376616 - DNA, 51 bp, Artificial
  Synthetic oligonucleotide
cgtgcagcaatcctacaccaggacggctgttcagtctcttgctaacgcaac

SEQ ID NO: 376617 - DNA, 60 bp, Artificial
  Synthetic oligonucleotide
cgtgcagcatcacatatgccagtatcttaagcatactggagggtcttgcaaattgcagct

SEQ ID NO: 376618 - DNA, 55 bp, Artificial
  Synthetic oligonucleotide
cgtgcagccattaatagtaacaagttaggaacacgatgtggttctcttaactggg

SEQ ID NO: 376619 - DNA, 55 bp, Artificial
  Synthetic oligonucleotide
cgtgcaggtatgacccataaatttgataaggccgctgcttgggttaacaggccca

SEQ ID NO: 376620 - DNA, 58 bp, Artificial
  Synthetic oligonucleotide
cgtgcaggtttaggatctattggattaccaggccccacgaaatcagtgccaggtaata

SEQ ID NO: 376621 - DNA, 51 bp, Artificial
  Synthetic oligonucleotide
cgtgcagtccaacggttagcccattgggcaacgtgcagtgcagcatagagg

SEQ ID NO: 376622 - DNA, 60 bp, Artificial
  Synthetic oligonucleotide
cgtgcagtggacctactcataggcctattagtgttcagcattactgcgtacaccataggt

SEQ ID NO: 376623 - DNA, 57 bp, Artificial
  Synthetic oligonucleotide
cgtgcagttatacttcccctcgaattggataagcacgtggagatgagggttcccatt

SEQ ID NO: 376624 - DNA, 55 bp, Artificial
  Synthetic oligonucleotide
cgtgcagttgtcacgcaaggtcccaacactgaatttgcattatcattactcagaa

SEQ ID NO: 376625 - DNA, 52 bp, Artificial
  Synthetic oligonucleotide
cgtgcatagaatagttctagagcaacgtgagagtaagatggtagctagggtg

SEQ ID NO: 376626 - DNA, 55 bp, Artificial
  Synthetic oligonucleotide
cgtgcatcaacaacaagaggggtacaatccgtaaactttgcaaactccgacaccc

SEQ ID NO: 376627 - DNA, 60 bp, Artificial
  Synthetic oligonucleotide
cgtgcatcgctgagcacacgcagcggcgcacgtgtaggtgctagagtgcatttctttaca

SEQ ID NO: 376628 - DNA, 60 bp, Artificial
  Synthetic oligonucleotide
cgtgcatctgcaacacaattatataaaacatgtaaacaagcaggtacgtgccctcctgat

SEQ ID NO: 376629 - DNA, 55 bp, Artificial
  Synthetic oligonucleotide
cgtgcatctgcaactgacctctatcgtacatgtaaacaatcaggcacatgtcccc

SEQ ID NO: 376630 - DNA, 57 bp, Artificial
  Synthetic oligonucleotide
cgtgcatgagcacacaatagccgaaaagcgcatcgctacacacttcgcgagccacgt

SEQ ID NO: 376631 - DNA, 60 bp, Artificial
  Synthetic oligonucleotide
cgtgcatgcaccaatgtacgcaaattcgctggcgtccagcggaggttcagtgctgtcgct

SEQ ID NO: 376632 - DNA, 56 bp, Artificial
  Synthetic oligonucleotide
cgtgcatgcatgttagtgcggaaagccgccgggggtcattatgcccaaatggtcct

SEQ ID NO: 376633 - DNA, 60 bp, Artificial
  Synthetic oligonucleotide
cgtgcatggttctccgtggcattgtgggcgggaagtatgttcaggcagcgctcttacgat

SEQ ID NO: 376634 - DNA, 55 bp, Artificial
  Synthetic oligonucleotide
cgtgcatgtatatttcccttcgaattgtatgagcacatggagatgaggctcccca

SEQ ID NO: 376635 - DNA, 59 bp, Artificial
  Synthetic oligonucleotide
cgtgcattacagcaaagtgtcgagtaatttgaaacgaatagcgacgtgccaagtgtacg

SEQ ID NO: 376636 - DNA, 55 bp, Artificial
  Synthetic oligonucleotide
cgtgcattcagacgagttataagtacctcatcattcaaaatacaacatgggagga

SEQ ID NO: 376637 - DNA, 60 bp, Artificial
  Synthetic oligonucleotide
cgtgcattgcagttggcctagtaacactatacctaggagtcatggttcaggcggattcag

SEQ ID NO: 376638 - DNA, 55 bp, Artificial
  Synthetic oligonucleotide
cgtgccaagatggactcatctaggacaatcgggttatacttcgattctgccctac

SEQ ID NO: 376639 - DNA, 55 bp, Artificial
  Synthetic oligonucleotide
cgtgccaatgtagaaccccaatggcatgcttactctcctcataattagcataggg

SEQ ID NO: 376640 - DNA, 55 bp, Artificial
  Synthetic oligonucleotide
cgtgccaccaattgcgcggcagaagctacgcgaagccgcaaatgcaccctccaca

SEQ ID NO: 376641 - DNA, 59 bp, Artificial
  Synthetic oligonucleotide
cgtgccaccccgactccaataggtttgattgcccgtgattcaccacatgtactagtggc

SEQ ID NO: 376642 - DNA, 55 bp, Artificial
  Synthetic oligonucleotide
cgtgccacgaccgacttccccagaggcacatttaccgagagttcgtgtgcctaga

SEQ ID NO: 376643 - DNA, 60 bp, Artificial
  Synthetic oligonucleotide
cgtgccacttggatacgtgataagtcttcaagggaggtgagggccatagagttgtgcaca

SEQ ID NO: 376644 - DNA, 60 bp, Artificial
  Synthetic oligonucleotide
cgtgccagaggatagtaccactggctgaccctaccagcgtttgcgagttggtatgcgtgg

SEQ ID NO: 376645 - DNA, 58 bp, Artificial
  Synthetic oligonucleotide
cgtgccagcgtcaaccagggtggttcaacagggatttctgggactgcttgtttagcta

SEQ ID NO: 376646 - DNA, 57 bp, Artificial
  Synthetic oligonucleotide
cgtgccaggtcccatcgcccgaattctttacagaattggacggggtgcgcctacata

SEQ ID NO: 376647 - DNA, 60 bp, Artificial
  Synthetic oligonucleotide
cgtgccagttgtggtcgctacacaagctgcatttctttgcttcgtgtacgggcttcccat

SEQ ID NO: 376648 - DNA, 60 bp, Artificial
  Synthetic oligonucleotide
cgtgccataactctatcagtgagataccacgcttgtggaccttatgctcacacagccatc

SEQ ID NO: 376649 - DNA, 57 bp, Artificial
  Synthetic oligonucleotide
cgtgccatagtagccagcaatgccgttgcaacaaatgaggacctcagtaagattgag

SEQ ID NO: 376650 - DNA, 60 bp, Artificial
  Synthetic oligonucleotide
cgtgccatatggtatatgtggctgggagcgcggtatcttgagtttgaggccctgggattc

SEQ ID NO: 376651 - DNA, 55 bp, Artificial
  Synthetic oligonucleotide
cgtgcccaaacacccgccgtaccaccacaagcagggatccagcgcatcttatcgt

SEQ ID NO: 376652 - DNA, 55 bp, Artificial
  Synthetic oligonucleotide
cgtgcccactctgcgcatcaagtaactaactgcaatggcgtcacctgaaggtaca

SEQ ID NO: 376653 - DNA, 59 bp, Artificial
  Synthetic oligonucleotide
cgtgccccagtcaccaagctaaacgccagacatccagtgcgatacgctaccgtgatcgg

SEQ ID NO: 376654 - DNA, 57 bp, Artificial
  Synthetic oligonucleotide
cgtgccccccttcgttctccaagcccatcatgttcaccgtcgtctggactccggcca

SEQ ID NO: 376655 - DNA, 55 bp, Artificial
  Synthetic oligonucleotide
cgtgcccctgcggtgctagcattgcgggccatgttaagaacgggactatgaaaat

SEQ ID NO: 376656 - DNA, 59 bp, Artificial
  Synthetic oligonucleotide
cgtgcccgttgggcgttgcttgacactccctgcattttcaactctgcgcaggaagtggt

SEQ ID NO: 376657 - DNA, 55 bp, Artificial
  Synthetic oligonucleotide
cgtgccctggaattctagctggagtaataaatctcaggaggacatttggagcaac

SEQ ID NO: 376658 - DNA, 53 bp, Artificial
  Synthetic oligonucleotide
cgtgccctggactccatgaagggcaagtggcacgcggagcgcgacaagcgtcg

SEQ ID NO: 376659 - DNA, 55 bp, Artificial
  Synthetic oligonucleotide
cgtgccgagctctactgtcccaggcctctgctgacagtggaagtgttgtcgcagg

SEQ ID NO: 376660 - DNA, 60 bp, Artificial
  Synthetic oligonucleotide
cgtgccgatcgaagatggttactatccattagccatcgagatagccacacttgttgagca

SEQ ID NO: 376661 - DNA, 60 bp, Artificial
  Synthetic oligonucleotide
cgtgccgattgggacaccggagacggaaatgcaatcatgttgcccaatactctatcgcca

SEQ ID NO: 376662 - DNA, 55 bp, Artificial
  Synthetic oligonucleotide
cgtgccgcgcaacagcgcgccctcgttgaatttgaattgccgctgacccagcatc

SEQ ID NO: 376663 - DNA, 55 bp, Artificial
  Synthetic oligonucleotide
cgtgccgcgtcttggtcagtggccaagcttaattgatgttgcaactgaatgttac

SEQ ID NO: 376664 - DNA, 55 bp, Artificial
  Synthetic oligonucleotide
cgtgccgctgggcttattggacggtaccaagaggtatttggagatcggtactacc

SEQ ID NO: 376665 - DNA, 55 bp, Artificial
  Synthetic oligonucleotide
cgtgccggtaagttgctcaaaagtttaatggatggaatgacggggatagtgtcac

SEQ ID NO: 376666 - DNA, 55 bp, Artificial
  Synthetic oligonucleotide
cgtgccggtttgactgtggattggactatgtttccgttggtgggtaatgctccgg

SEQ ID NO: 376667 - DNA, 59 bp, Artificial
  Synthetic oligonucleotide
cgtgccgtcaccaaaagtgtatccaaagtgtgagacaaaaccaggaatctatcgaatca

SEQ ID NO: 376668 - DNA, 55 bp, Artificial
  Synthetic oligonucleotide
cgtgccgttgctagtaacacaaggatttacccgagtgttggtaatgttaggtata

SEQ ID NO: 376669 - DNA, 55 bp, Artificial
  Synthetic oligonucleotide
cgtgcctaccaatgggattgggatttaataatcgtctaatgggcttcggtcgtcc

SEQ ID NO: 376670 - DNA, 55 bp, Artificial
  Synthetic oligonucleotide
cgtgcctcattgatctcttgcaaacgtgcaactaagatttcaaccgacttaacag

SEQ ID NO: 376671 - DNA, 60 bp, Artificial
  Synthetic oligonucleotide
cgtgcctcctgtcttgtcttactcgagcgaacccacaactccgtcctgctgagctcacag

SEQ ID NO: 376672 - DNA, 55 bp, Artificial
  Synthetic oligonucleotide
cgtgcctcttacggaactccttaaatggagcctcgcagtggggtactatcctaca

SEQ ID NO: 376673 - DNA, 60 bp, Artificial
  Synthetic oligonucleotide
cgtgcctgaataccgtcgtgacctagttgattgcgatcgtaaggatcactacgtcactgg

SEQ ID NO: 376674 - DNA, 60 bp, Artificial
  Synthetic oligonucleotide
cgtgcctgaatattagatgtttcggtgacccactgcaactaaggtactattctgctgaag

SEQ ID NO: 376675 - DNA, 57 bp, Artificial
  Synthetic oligonucleotide
cgtgccttaatgttaccaatctagcatcgggactaaccggagtgagactaattccgc

SEQ ID NO: 376676 - DNA, 60 bp, Artificial
  Synthetic oligonucleotide
cgtgccttcctttgacatgagtaatgagggatcttatttcttcggagacaatgcagagga

SEQ ID NO: 376677 - DNA, 57 bp, Artificial
  Synthetic oligonucleotide
cgtgcctttgattgtaaggagtgccaaaacaaaaacaactactgcgtatgggtatca

SEQ ID NO: 376678 - DNA, 59 bp, Artificial
  Synthetic oligonucleotide
cgtgcgaactctttcgggttggcgctctgcgtcgtcttgtagtcggttatcacgatggc

SEQ ID NO: 376679 - DNA, 55 bp, Artificial
  Synthetic oligonucleotide
cgtgcgaagtacctagcatcgctaggctatgaccgtgacaagcattacctaacgc

SEQ ID NO: 376680 - DNA, 52 bp, Artificial
  Synthetic oligonucleotide
cgtgcgaattaagccatggataattaaggaaaatttcgatgtaaattacgtt

SEQ ID NO: 376681 - DNA, 55 bp, Artificial
  Synthetic oligonucleotide
cgtgcgacaagtgctggtccacttttgtgaggggatgcgttcgcaattttccaca

SEQ ID NO: 376682 - DNA, 58 bp, Artificial
  Synthetic oligonucleotide
cgtgcgacccatagttcaccaaacatggctcaggtcccggctaacggtgctccgtatg

SEQ ID NO: 376683 - DNA, 55 bp, Artificial
  Synthetic oligonucleotide
cgtgcgacgtgacaccgctgccgctctggcgccttctgaactacccgacacctat

SEQ ID NO: 376684 - DNA, 55 bp, Artificial
  Synthetic oligonucleotide
cgtgcgacgttcagtccgatatcggagaaagtaccgtttgaccacattattcgcg

SEQ ID NO: 376685 - DNA, 55 bp, Artificial
  Synthetic oligonucleotide
cgtgcgagaatatatcagtgcttgaaggagcaaaatcacagttactcgagttcag

SEQ ID NO: 376686 - DNA, 55 bp, Artificial
  Synthetic oligonucleotide
cgtgcgagagagttgggaacgagttagtagccgtgcaagatgccctgcaggaacc

SEQ ID NO: 376687 - DNA, 54 bp, Artificial
  Synthetic oligonucleotide
cgtgcgaggaagaaagcgccgtgttgtgagcagacgacgttggatgcgggacgt

SEQ ID NO: 376688 - DNA, 59 bp, Artificial
  Synthetic oligonucleotide
cgtgcgaggcccggggcgggtgccgagactcctgcgaagcagcgagaggcgagtcaagg

SEQ ID NO: 376689 - DNA, 51 bp, Artificial
  Synthetic oligonucleotide
cgtgcgatcagtggatggattcttaacacttatctgggtcgacctgaggag

SEQ ID NO: 376690 - DNA, 52 bp, Artificial
  Synthetic oligonucleotide
cgtgcgattagtgagcggattcttgacacttgcctgggacgacttacggagc

SEQ ID NO: 376691 - DNA, 51 bp, Artificial
  Synthetic oligonucleotide
cgtgcgattagtgagcgggttcttagcgcttgtgtgggacgatctacggag

SEQ ID NO: 376692 - DNA, 55 bp, Artificial
  Synthetic oligonucleotide
cgtgcgcaaccatcgaaatgcaaacaatggttaacagcaagcgggcacgccgtga

SEQ ID NO: 376693 - DNA, 60 bp, Artificial
  Synthetic oligonucleotide
cgtgcgcactgtcgttctcttcggataaggaacgttatcggttcgagtcagcataacaga

SEQ ID NO: 376694 - DNA, 60 bp, Artificial
  Synthetic oligonucleotide
cgtgcgcagatatgaaatcaaaactgtgaaatccgagtgcagtagcgtcgacactttcgt

SEQ ID NO: 376695 - DNA, 55 bp, Artificial
  Synthetic oligonucleotide
cgtgcgcataattgtgaagaacaaacaccttctcaagtcggacgtgcttcaagtg

SEQ ID NO: 376696 - DNA, 57 bp, Artificial
  Synthetic oligonucleotide
cgtgcgccggcggggtgatagcaggggcagtctgctttcgccccggcccatttccta

SEQ ID NO: 376697 - DNA, 55 bp, Artificial
  Synthetic oligonucleotide
cgtgcgccgtcgaaccgacttgcaacgcttcgtgcagctcaacggctatcaacag

SEQ ID NO: 376698 - DNA, 57 bp, Artificial
  Synthetic oligonucleotide
cgtgcgcctccctacgtcccagtttccggtgcctggtttgacctcactcagtatcca

SEQ ID NO: 376699 - DNA, 55 bp, Artificial
  Synthetic oligonucleotide
cgtgcgctccaataccggtcgcccgggagtcagacaggtcatctacgtattcacg

SEQ ID NO: 376700 - DNA, 55 bp, Artificial
  Synthetic oligonucleotide
cgtgcgctttaaacgcaccagcgagtattcagcagtttgaacatgttgttccgct

SEQ ID NO: 376701 - DNA, 55 bp, Artificial
  Synthetic oligonucleotide
cgtgcggaacaccccgctgtaagaacgtacgcctctgttcacgcgttgatggggt

SEQ ID NO: 376702 - DNA, 58 bp, Artificial
  Synthetic oligonucleotide
cgtgcggatttccgacttgtaatgcacgagacagatgaagttcgttctaaacaaatta

SEQ ID NO: 376703 - DNA, 58 bp, Artificial
  Synthetic oligonucleotide
cgtgcggcctttgagaaggctcgcgctgagcagacctcccgggtccgtcccgtggtga

SEQ ID NO: 376704 - DNA, 56 bp, Artificial
  Synthetic oligonucleotide
cgtgcggcgcatatatacgcccagaaggttttcccccggattggatttgacaacca

SEQ ID NO: 376705 - DNA, 57 bp, Artificial
  Synthetic oligonucleotide
cgtgcggcttcgccgacctcatggggtacataccgctcgtcggcgcccctcttggag

SEQ ID NO: 376706 - DNA, 59 bp, Artificial
  Synthetic oligonucleotide
cgtgcggggcgacagtacacaccacttgattatgcgaggcaggccaccatagggacatt

SEQ ID NO: 376707 - DNA, 52 bp, Artificial
  Synthetic oligonucleotide
cgtgcgggggccccccctgtaacatcgggggggttggcaacaagactctgac

SEQ ID NO: 376708 - DNA, 55 bp, Artificial
  Synthetic oligonucleotide
cgtgcggtactgtgcccgcgtcacaggtgtgtggtccggtatattgcttcacccc

SEQ ID NO: 376709 - DNA, 55 bp, Artificial
  Synthetic oligonucleotide
cgtgcggtcagagtgggatatcccaaagtctgagatccaagatatcgccatgtca

SEQ ID NO: 376710 - DNA, 60 bp, Artificial
  Synthetic oligonucleotide
cgtgcggtgatgagttcccctgtgcgtgaatccatgtcccgtgcagccgatgtgtaagta

SEQ ID NO: 376711 - DNA, 51 bp, Artificial
  Synthetic oligonucleotide
cgtgcgtccagctgtgctgccttgtcctccgtttgccatacttcggtacgc

SEQ ID NO: 376712 - DNA, 55 bp, Artificial
  Synthetic oligonucleotide
cgtgcgtgcttaccttgaaacaattattggtacacaccgttctcctgtgctcact

SEQ ID NO: 376713 - DNA, 55 bp, Artificial
  Synthetic oligonucleotide
cgtgcgtggataacgcacattctgtacggttaagccctctaaatagtgctagcgc

SEQ ID NO: 376714 - DNA, 55 bp, Artificial
  Synthetic oligonucleotide
cgtgcgtgtcggcctaatttagttatgtcccgagggatgagagcgtcccaactct

SEQ ID NO: 376715 - DNA, 59 bp, Artificial
  Synthetic oligonucleotide
cgtgcgttgcgcacgacgttcaagtatccgaaggaggtgtttggctggtacaagagcgc

SEQ ID NO: 376716 - DNA, 54 bp, Artificial
  Synthetic oligonucleotide
cgtgcgtttaatgcccatttaccttgggcaatcaaacttaagaacgatgggtgg

SEQ ID NO: 376717 - DNA, 60 bp, Artificial
  Synthetic oligonucleotide
cgtgcgttttctttgtttgcgtcttagtgtagatatggacaaatctggatctcccaatgc

SEQ ID NO: 376718 - DNA, 55 bp, Artificial
  Synthetic oligonucleotide
cgtgctaatcgaaaacgacagaacattagacctgcatgatgccaatgttaggaac

SEQ ID NO: 376719 - DNA, 57 bp, Artificial
  Synthetic oligonucleotide
cgtgctaatggtaattgacaacaatgatgaaagttcaattagagcactaattggaga

SEQ ID NO: 376720 - DNA, 55 bp, Artificial
  Synthetic oligonucleotide
cgtgctacattaacaacactaatgagagaccctcaggcagtaggatcagaacgac

SEQ ID NO: 376721 - DNA, 55 bp, Artificial
  Synthetic oligonucleotide
cgtgctacgctgacaacactaatgagagatcctcaggctgttggatcagaacgac

SEQ ID NO: 376722 - DNA, 60 bp, Artificial
  Synthetic oligonucleotide
cgtgctactatggaacaacgcgcgctcgatatgtacgacgaggtgattttatcacggccg

SEQ ID NO: 376723 - DNA, 60 bp, Artificial
  Synthetic oligonucleotide
cgtgctagcaggcgagtctcatatgctgcgagggtagcccatgtagccaagtcgaaggtg

SEQ ID NO: 376724 - DNA, 60 bp, Artificial
  Synthetic oligonucleotide
cgtgctagccatcatcagcggtatcgttgttctgtaccgcattgctctgctagcgtcccc

SEQ ID NO: 376725 - DNA, 55 bp, Artificial
  Synthetic oligonucleotide
cgtgctaggaccatccctgcagaggtcctctatctggcccaacgacgagaggtgg

SEQ ID NO: 376726 - DNA, 55 bp, Artificial
  Synthetic oligonucleotide
cgtgctagggtctttagcatctgatatcacccacatcttaaggggagagaagtac

SEQ ID NO: 376727 - DNA, 60 bp, Artificial
  Synthetic oligonucleotide
cgtgctagttctgactatatgagttacagaaggacatcacaattaactgtctcggcacac

SEQ ID NO: 376728 - DNA, 55 bp, Artificial
  Synthetic oligonucleotide
cgtgctatcccgcggccacgggagctttcgcctatgggagtccgggtctcacttt

SEQ ID NO: 376729 - DNA, 58 bp, Artificial
  Synthetic oligonucleotide
cgtgctatgtcagttttaataccgaccgagacgcgtgcctactgtgagcagtttggtt

SEQ ID NO: 376730 - DNA, 60 bp, Artificial
  Synthetic oligonucleotide
cgtgctattgcaacaccagggatgcatatcagagggtttgtatacttcgtagaaacactg

SEQ ID NO: 376731 - DNA, 53 bp, Artificial
  Synthetic oligonucleotide
cgtgctatttgcaaacaatacgtgggaagtttgattacctaaatagttgcaat

SEQ ID NO: 376732 - DNA, 55 bp, Artificial
  Synthetic oligonucleotide
cgtgctcaaatatcactatacttgctgtgctctcaatcgttggtctcggtgttgg

SEQ ID NO: 376733 - DNA, 55 bp, Artificial
  Synthetic oligonucleotide
cgtgctcaatcgaacccgaataagggtaagactctcgtgaagggaggtccatccg

SEQ ID NO: 376734 - DNA, 60 bp, Artificial
  Synthetic oligonucleotide
cgtgctcagcttaaccagtggtatgtatctagtcagaccaccgaccatgtccgtgctcag

SEQ ID NO: 376735 - DNA, 55 bp, Artificial
  Synthetic oligonucleotide
cgtgctcattatcatcacgagcatcaaagctgtgtacaatttcgccacttgcggg

SEQ ID NO: 376736 - DNA, 58 bp, Artificial
  Synthetic oligonucleotide
cgtgctccaatttattgacgcgcaaccaaactctcaactactcgtcaacaaaatcaac

SEQ ID NO: 376737 - DNA, 59 bp, Artificial
  Synthetic oligonucleotide
cgtgctcccctccttgagttaactgggctcattgagcggcgcgttaccctgcgcaaggc

SEQ ID NO: 376738 - DNA, 55 bp, Artificial
  Synthetic oligonucleotide
cgtgctcctagccgctggattctcagaaccaggtgactgtggtggcattttaagg

SEQ ID NO: 376739 - DNA, 56 bp, Artificial
  Synthetic oligonucleotide
cgtgctcctgaatccactcgccccctccgggacgcggttgcttcagtgcgtagacg

SEQ ID NO: 376740 - DNA, 56 bp, Artificial
  Synthetic oligonucleotide
cgtgctcgggacgggacatgggctttttaaatgggccgagagagcttgaacagttc

SEQ ID NO: 376741 - DNA, 51 bp, Artificial
  Synthetic oligonucleotide
cgtgctctacatcagaccttcccgaacccaagctctatttcgtccgcttgt

SEQ ID NO: 376742 - DNA, 50 bp, Artificial
  Synthetic oligonucleotide
cgtgctctaggtgacgtagaagtcctcatcttcattccaaaatttggttg

SEQ ID NO: 376743 - DNA, 55 bp, Artificial
  Synthetic oligonucleotide
cgtgctctatcgggtcggcgcgccgtggccagcgcaagacctcggtcggcccctt

SEQ ID NO: 376744 - DNA, 55 bp, Artificial
  Synthetic oligonucleotide
cgtgctctcacatcagacgataaggttagtctgatatacacaacagagggtaagg

SEQ ID NO: 376745 - DNA, 60 bp, Artificial
  Synthetic oligonucleotide
cgtgctctcacttggaatgcaggactttctttctgactcaaggggccttgttgaatgaca

SEQ ID NO: 376746 - DNA, 50 bp, Artificial
  Synthetic oligonucleotide
cgtgctctcgttgtgccatttgatgtggcataatgggcgtgacgtgtata

SEQ ID NO: 376747 - DNA, 60 bp, Artificial
  Synthetic oligonucleotide
cgtgctctttctgttgagcatgagcgttggtataccggtcgtgttgagaccgacgtctac

SEQ ID NO: 376748 - DNA, 55 bp, Artificial
  Synthetic oligonucleotide
cgtgctgaagagctgcatcatggtgccatgttctataagcatcacttgtagaagt

SEQ ID NO: 376749 - DNA, 60 bp, Artificial
  Synthetic oligonucleotide
cgtgctgaatgttccaggacctggtgcgtacagaattcaggatgggcaagatatcattag

SEQ ID NO: 376750 - DNA, 60 bp, Artificial
  Synthetic oligonucleotide
cgtgctgacgactagctgcggtaataccctcacatgttacttgaaagcctctgcagcctg

SEQ ID NO: 376751 - DNA, 55 bp, Artificial
  Synthetic oligonucleotide
cgtgctgacgaggcccttgcctcacacgatcgtgcccagctcaaacctcggtttg

SEQ ID NO: 376752 - DNA, 60 bp, Artificial
  Synthetic oligonucleotide
cgtgctgatgctactggttggtgcgcgtcacgacgcaaagggttacttgttcacgctcct

SEQ ID NO: 376753 - DNA, 55 bp, Artificial
  Synthetic oligonucleotide
cgtgctgcagccaaaggacttaagtgggcggctgatcgtgagattatggggtagg

SEQ ID NO: 376754 - DNA, 60 bp, Artificial
  Synthetic oligonucleotide
cgtgctgcctgtagctccatcgtggggatgtagctccatcgtggggatgtagctccatcg

SEQ ID NO: 376755 - DNA, 60 bp, Artificial
  Synthetic oligonucleotide
cgtgctgctgtctccattgcccaaggcataaacaggcgtcgatcatggacctaccggccc

SEQ ID NO: 376756 - DNA, 58 bp, Artificial
  Synthetic oligonucleotide
cgtgctgcttacgcttggctcaaaatccaactcgggtcgtcaatccttggcgacttgg

SEQ ID NO: 376757 - DNA, 60 bp, Artificial
  Synthetic oligonucleotide
cgtgctggtgacatcatggtgcgcctctcccctgagccagacttggctcgagtagtgatg

SEQ ID NO: 376758 - DNA, 55 bp, Artificial
  Synthetic oligonucleotide
cgtgctgtgttaggaatggtctgccgtcctgttccaaaattttgaaatacagggg

SEQ ID NO: 376759 - DNA, 55 bp, Artificial
  Synthetic oligonucleotide
cgtgcttagccatgctgagaccacttcagtatgccaagcgtgaacgcttgcttgg

SEQ ID NO: 376760 - DNA, 55 bp, Artificial
  Synthetic oligonucleotide
cgtgcttagctatgctgagaccactccaatacgctaagcgtgaacgcctgcttgg

SEQ ID NO: 376761 - DNA, 60 bp, Artificial
  Synthetic oligonucleotide
cgtgcttcaacaagcgagacgccaccgggtaggagtatatctctggaagactcacataga

SEQ ID NO: 376762 - DNA, 55 bp, Artificial
  Synthetic oligonucleotide
cgtgcttcggtacatcaagaggggccggttgcgggctaagaggataggccgtggg

SEQ ID NO: 376763 - DNA, 55 bp, Artificial
  Synthetic oligonucleotide
cgtgcttctccccgctctgcacctaaacgccctgctactaaaagctctaaacacg

SEQ ID NO: 376764 - DNA, 55 bp, Artificial
  Synthetic oligonucleotide
cgtgcttgacaactgcgctgacatcagctgtgacgctttcatagcgcccgctgca

SEQ ID NO: 376765 - DNA, 55 bp, Artificial
  Synthetic oligonucleotide
cgtgcttgggcgccaagaatggagcagttgtgggaccctttgcagaacccactcc

SEQ ID NO: 376766 - DNA, 59 bp, Artificial
  Synthetic oligonucleotide
cgtgcttgtggaactggggcattacgtgtacaccttgcactactatgacccccaaatca

SEQ ID NO: 376767 - DNA, 60 bp, Artificial
  Synthetic oligonucleotide
cgtgctttgactgaggaggtgcgcggattaatgggtgcatgtgattaccgcccagccaga

SEQ ID NO: 376768 - DNA, 55 bp, Artificial
  Synthetic oligonucleotide
cgtgctttgttagcaaaagaaattaggtgtggacatttaaaagctgaccttccag

SEQ ID NO: 376769 - DNA, 59 bp, Artificial
  Synthetic oligonucleotide
cgtggaaacagaatgctgtgttgtacctatggttgatcacccaaggataccgagtctcc

SEQ ID NO: 376770 - DNA, 58 bp, Artificial
  Synthetic oligonucleotide
cgtggaaacggcaaactgctacgaagagacacgactggaagcgtcgatcgacaaatac

SEQ ID NO: 376771 - DNA, 55 bp, Artificial
  Synthetic oligonucleotide
cgtggaacaactcgggaacgcctttggctccggtttcactaaccagatctgtgaa

SEQ ID NO: 376772 - DNA, 55 bp, Artificial
  Synthetic oligonucleotide
cgtggaacaacttggaaatgccttcggttcaggattcaccaatcaaatctgcgag

SEQ ID NO: 376773 - DNA, 55 bp, Artificial
  Synthetic oligonucleotide
cgtggaacgaaggtatggggcaaggaagttcaggctaaagttgtcgacgacagcg

SEQ ID NO: 376774 - DNA, 57 bp, Artificial
  Synthetic oligonucleotide
cgtggaacgtaggaatctcaaacaggtgcagaggacgttacctgagtatttcctgaa

SEQ ID NO: 376775 - DNA, 53 bp, Artificial
  Synthetic oligonucleotide
cgtggaagacgccaacctatccccaaggcgcgtcgacccgagggaaggtcctg

SEQ ID NO: 376776 - DNA, 60 bp, Artificial
  Synthetic oligonucleotide
cgtggaagcgtgctactcgtgcaacatgaagacaactctcacgccgggtatgccagctgc

SEQ ID NO: 376777 - DNA, 60 bp, Artificial
  Synthetic oligonucleotide
cgtggaaggttatcataatttagcgaagattccagaatcggatatggttgatgtgcctaa

SEQ ID NO: 376778 - DNA, 57 bp, Artificial
  Synthetic oligonucleotide
cgtggaataggaagagataggtttcggacaaaaattgaggacgcattgacattacga

SEQ ID NO: 376779 - DNA, 55 bp, Artificial
  Synthetic oligonucleotide
cgtggaatcaatgatcgtaacttttggagaggcgaaaatggacggagaacaagaa

SEQ ID NO: 376780 - DNA, 55 bp, Artificial
  Synthetic oligonucleotide
cgtggaatccacattgtttcctgttacattgagggagaagctggaaccagaacct

SEQ ID NO: 376781 - DNA, 55 bp, Artificial
  Synthetic oligonucleotide
cgtggaatctattgcggaaattagccctgtgcccgatgttgcgtccgtggacgcc

SEQ ID NO: 376782 - DNA, 55 bp, Artificial
  Synthetic oligonucleotide
cgtggacaacacgctcatggtcatattagcagtcaactactcactcaggaagagc

SEQ ID NO: 376783 - DNA, 60 bp, Artificial
  Synthetic oligonucleotide
cgtggacagagtactcagtgggatcaagcagcagtgttatattcaaactacatagttaat

SEQ ID NO: 376784 - DNA, 60 bp, Artificial
  Synthetic oligonucleotide
cgtggacagtgatgacaatttagtcaatattattgccagaattgatcctgcacgcatagc

SEQ ID NO: 376785 - DNA, 55 bp, Artificial
  Synthetic oligonucleotide
cgtggacccgctcagcaagaggcagaatattatccctccaactaacgcagcagtc

SEQ ID NO: 376786 - DNA, 53 bp, Artificial
  Synthetic oligonucleotide
cgtggacctaagggacaagttttctgcagatttagaccagtttcccctgggtc

SEQ ID NO: 376787 - DNA, 58 bp, Artificial
  Synthetic oligonucleotide
cgtggacctttcgtttaagcgagacgacgtcacgcactcatatcaggtgtatggttcg

SEQ ID NO: 376788 - DNA, 50 bp, Artificial
  Synthetic oligonucleotide
cgtggacgcaagaaccgtttgactcaccttgtatatgctctggatgtgtc

SEQ ID NO: 376789 - DNA, 51 bp, Artificial
  Synthetic oligonucleotide
cgtggacgcacagctttacgtgaggcgtgacgcagtctggcgctccaaagg

SEQ ID NO: 376790 - DNA, 57 bp, Artificial
  Synthetic oligonucleotide
cgtggacgtgcaatacctgtacggtatagggtcagcggttgtctcctacgcgattaa

SEQ ID NO: 376791 - DNA, 55 bp, Artificial
  Synthetic oligonucleotide
cgtggacgtgtacaaggattcctttatggctaccggtttcgccaagcctctgagc

SEQ ID NO: 376792 - DNA, 58 bp, Artificial
  Synthetic oligonucleotide
cgtggactatattggatgtgttggacaccataaatttcgagagtactggtaatctaat

SEQ ID NO: 376793 - DNA, 57 bp, Artificial
  Synthetic oligonucleotide
cgtggactattgacacaatgggttttgtccaacaaaggcgcaagctggagttgttta

SEQ ID NO: 376794 - DNA, 55 bp, Artificial
  Synthetic oligonucleotide
cgtggactctattgagcgcgccaggaaggcagctcaagcttgcctaagcatgggt

SEQ ID NO: 376795 - DNA, 50 bp, Artificial
  Synthetic oligonucleotide
cgtggactgtcaacaccgagtctcgccccatcaccagagagacccagcct

SEQ ID NO: 376796 - DNA, 51 bp, Artificial
  Synthetic oligonucleotide
cgtggagaaggatacgcttatggacgacgtggaaggctccacaacgctctc

SEQ ID NO: 376797 - DNA, 55 bp, Artificial
  Synthetic oligonucleotide
cgtggagatgctacgacaaactttactcgtgctactgagttaggcgacgacgtaa

SEQ ID NO: 376798 - DNA, 60 bp, Artificial
  Synthetic oligonucleotide
cgtggagcggctatgatggcatagagtatcattgcaactacctacgacacgatgatgaat

SEQ ID NO: 376799 - DNA, 60 bp, Artificial
  Synthetic oligonucleotide
cgtggagtgtggcccagatatgatccaagtgtcattgaatgctggtgctagaggtgatgg

SEQ ID NO: 376800 - DNA, 55 bp, Artificial
  Synthetic oligonucleotide
cgtggagttaaaccgatccgtacaactaagataatcgcgagaatacaatcggagg

SEQ ID NO: 376801 - DNA, 56 bp, Artificial
  Synthetic oligonucleotide
cgtggataatcattcttaagacacatttctccattcgtaaatcttttcacgttaaa

SEQ ID NO: 376802 - DNA, 55 bp, Artificial
  Synthetic oligonucleotide
cgtggatacggtatgacgtagtgatttatacgtccgtcgtgactgtcggtctgag

SEQ ID NO: 376803 - DNA, 52 bp, Artificial
  Synthetic oligonucleotide
cgtggatagacctgttcccgcgactataacctttcatgcaaaagggattact

SEQ ID NO: 376804 - DNA, 57 bp, Artificial
  Synthetic oligonucleotide
cgtggatatatgcaaggcagcaatgggcataagaatcagttcatccttcagtttcgg

SEQ ID NO: 376805 - DNA, 58 bp, Artificial
  Synthetic oligonucleotide
cgtggatcccgaaactgcaaaatttaggattccaaggaaggcagcttcagtatgatcc

SEQ ID NO: 376806 - DNA, 54 bp, Artificial
  Synthetic oligonucleotide
cgtggatggccgcgccccccgctttatggtggccccccccacgtggagatgtcc

SEQ ID NO: 376807 - DNA, 55 bp, Artificial
  Synthetic oligonucleotide
cgtggatgtacgaagctctgacaggaaacttacaggcagtggcagcaatgaagag

SEQ ID NO: 376808 - DNA, 50 bp, Artificial
  Synthetic oligonucleotide
cgtggattactgcggtcgtaacggcgctgacagctggtacgtcgtgtgct

SEQ ID NO: 376809 - DNA, 55 bp, Artificial
  Synthetic oligonucleotide
cgtggattcacgtaacgtctcatacaataaagtgaacgtcagctacggagagcga

SEQ ID NO: 376810 - DNA, 59 bp, Artificial
  Synthetic oligonucleotide
cgtggattgcccaatggtacgcaattaattagcgtatcagtagtataggggctattcca

SEQ ID NO: 376811 - DNA, 58 bp, Artificial
  Synthetic oligonucleotide
cgtggattttttgtatcaagctcaagtttattgaggtcgatgtaatcaaggctttctg

SEQ ID NO: 376812 - DNA, 55 bp, Artificial
  Synthetic oligonucleotide
cgtggcaacccctgatgaaatcttcaatgaggaacgctggacgaagaacgtgaag

SEQ ID NO: 376813 - DNA, 55 bp, Artificial
  Synthetic oligonucleotide
cgtggcaaccctgaccagaatcttgaaaccctacaggccttcccgccatcttgcc

SEQ ID NO: 376814 - DNA, 52 bp, Artificial
  Synthetic oligonucleotide
cgtggcaacgggcaatctgtactatagcgcaacggttgaaggttacgaggtt

SEQ ID NO: 376815 - DNA, 60 bp, Artificial
  Synthetic oligonucleotide
cgtggcaagtacgagcaaagtattcaaattttgctatccagcgagaagagccaggtataa

SEQ ID NO: 376816 - DNA, 55 bp, Artificial
  Synthetic oligonucleotide
cgtggcaatgtccaaagtgcaaacctagacacgcaaagaaagttatcgaatctcg

SEQ ID NO: 376817 - DNA, 55 bp, Artificial
  Synthetic oligonucleotide
cgtggcacaattcgtactcgcagtggcttgcgaataggtggacatgttcattact

SEQ ID NO: 376818 - DNA, 49 bp, Artificial
  Synthetic oligonucleotide
cgtggcacccctaaaaaaaactgcttagttttttggggtcctcctaata

SEQ ID NO: 376819 - DNA, 55 bp, Artificial
  Synthetic oligonucleotide
cgtggcactaacaatgaatctaaggctttgaaatttgatgtcaaagtaccatcag

SEQ ID NO: 376820 - DNA, 55 bp, Artificial
  Synthetic oligonucleotide
cgtggcactatcaacaacaatgttgatacgcttgatgcattcccaccctcttgcc

SEQ ID NO: 376821 - DNA, 60 bp, Artificial
  Synthetic oligonucleotide
cgtggcacttccatttacgcgtatcttgctcgcgagcaagaggtcctagccttccttgtg

SEQ ID NO: 376822 - DNA, 55 bp, Artificial
  Synthetic oligonucleotide
cgtggcagttgggatcacatttcaccttgagctagggccagagattgtggctctg

SEQ ID NO: 376823 - DNA, 59 bp, Artificial
  Synthetic oligonucleotide
cgtggcatattggactagcggttagaggagacccctcccatcaccaacaaaacgcagca

SEQ ID NO: 376824 - DNA, 55 bp, Artificial
  Synthetic oligonucleotide
cgtggcatcgagcctcaggcaacttggggccccacccttgagagcctggagacat

SEQ ID NO: 376825 - DNA, 55 bp, Artificial
  Synthetic oligonucleotide
cgtggcatgcctggcactttatgtgtaccaaccactcatcaacccttttgaaacc

SEQ ID NO: 376826 - DNA, 58 bp, Artificial
  Synthetic oligonucleotide
cgtggcattattgtaaataagaggctcactaccggtagtagctcttctcaaaactcta

SEQ ID NO: 376827 - DNA, 56 bp, Artificial
  Synthetic oligonucleotide
cgtggccaattggagagtcacccaaaggagtagaggaaggatccatcgggaaagta

SEQ ID NO: 376828 - DNA, 55 bp, Artificial
  Synthetic oligonucleotide
cgtggccatgttgataacacccaaccccacaatcgaaaacaatggcggtggcttc

SEQ ID NO: 376829 - DNA, 55 bp, Artificial
  Synthetic oligonucleotide
cgtggcccactctgaaggcaaggccgcagtaatgaccatggcctacgggatgcgt

SEQ ID NO: 376830 - DNA, 55 bp, Artificial
  Synthetic oligonucleotide
cgtggcccgagagctgcatccggattactacaagaactgctgacaccaagacttc

SEQ ID NO: 376831 - DNA, 56 bp, Artificial
  Synthetic oligonucleotide
cgtggccctctactatgggaggcgcgttgatctttctgtacgccgcactttgggta

SEQ ID NO: 376832 - DNA, 56 bp, Artificial
  Synthetic oligonucleotide
cgtggccgacaactcgaaagatgttgtcgctgctatgtaccccgaggcgtttaagg

SEQ ID NO: 376833 - DNA, 55 bp, Artificial
  Synthetic oligonucleotide
cgtggccggtgaccgtacattcgatgattggactattacagtaatgaacgacgat

SEQ ID NO: 376834 - DNA, 54 bp, Artificial
  Synthetic oligonucleotide
cgtggccgtgactcttatcagttccgggtcaattaaatgtgattcggggtttta

SEQ ID NO: 376835 - DNA, 55 bp, Artificial
  Synthetic oligonucleotide
cgtggcctgagacgcacaccttgtggggcgatggaatcctcgagagtgacctgat

SEQ ID NO: 376836 - DNA, 55 bp, Artificial
  Synthetic oligonucleotide
cgtggccttatcttcggaaaatttgcaccgctgaccaacgggcatgtcgcattta

SEQ ID NO: 376837 - DNA, 55 bp, Artificial
  Synthetic oligonucleotide
cgtggcgagggcttccctgccctcgtgcccattctacgcatcctggcgggagtgt

SEQ ID NO: 376838 - DNA, 56 bp, Artificial
  Synthetic oligonucleotide
cgtggcgagtccctaggggagttgtcagaatacgccgaagcacacaaatttaaggc

SEQ ID NO: 376839 - DNA, 50 bp, Artificial
  Synthetic oligonucleotide
cgtggcgcatatctggtgtttgcacgaatgcagctccacaatgggtataa

SEQ ID NO: 376840 - DNA, 57 bp, Artificial
  Synthetic oligonucleotide
cgtggcggaatgttcaatctttcgtcgagtcaattcgttcgagagtagttgtgaacg

SEQ ID NO: 376841 - DNA, 60 bp, Artificial
  Synthetic oligonucleotide
cgtggcggaattcagctgtatacactgactatgtaggaggagctttcatgggggataaca

SEQ ID NO: 376842 - DNA, 53 bp, Artificial
  Synthetic oligonucleotide
cgtggcggccactaggtctggtaacacagtcattgccgccactcacggagaac

SEQ ID NO: 376843 - DNA, 56 bp, Artificial
  Synthetic oligonucleotide
cgtggcgtatgaacctgaccgatctgggggacaccaactcccgtcgccaaggggca

SEQ ID NO: 376844 - DNA, 55 bp, Artificial
  Synthetic oligonucleotide
cgtggcgtgcagacgtacacgtacatccgaccgctaacacccacgtacagctccg

SEQ ID NO: 376845 - DNA, 53 bp, Artificial
  Synthetic oligonucleotide
cgtggcgttagccccagcaccatgatacattccaagttagaagtaaagaaggg

SEQ ID NO: 376846 - DNA, 56 bp, Artificial
  Synthetic oligonucleotide
cgtggcgttcttgggttaacaacggaacactcattgctagagcgtgaatacggtgg

SEQ ID NO: 376847 - DNA, 56 bp, Artificial
  Synthetic oligonucleotide
cgtggctaacgcgaacgctcagtaccccatagcaaagtttaactttgacaatgatt

SEQ ID NO: 376848 - DNA, 55 bp, Artificial
  Synthetic oligonucleotide
cgtggctatacaagttcccaagcgttggccgcattacctacaatgttgcaagcgt

SEQ ID NO: 376849 - DNA, 55 bp, Artificial
  Synthetic oligonucleotide
cgtggctcgaccacagactcctttggcggaaggctacatggtaggcgacgcggtt

SEQ ID NO: 376850 - DNA, 55 bp, Artificial
  Synthetic oligonucleotide
cgtggctctggacaagttgtgacttatgctttaaataccttaacaaacatcaaag

SEQ ID NO: 376851 - DNA, 60 bp, Artificial
  Synthetic oligonucleotide
cgtggctgacaccatacgcagtggcccaagtaactccgaaagtgtgccagccctgacggc

SEQ ID NO: 376852 - DNA, 53 bp, Artificial
  Synthetic oligonucleotide
cgtggctggaaattgggaaggtacgggaaacgtgagtgtgaaagaaagagtag

SEQ ID NO: 376853 - DNA, 55 bp, Artificial
  Synthetic oligonucleotide
cgtggctggtcgaaccagtgcagccacaaaagaattaagggagtataaagaacac

SEQ ID NO: 376854 - DNA, 60 bp, Artificial
  Synthetic oligonucleotide
cgtggcttactactctgacgcgcagcctcgtcaaattctcctgcccgttggcactgtctg

SEQ ID NO: 376855 - DNA, 55 bp, Artificial
  Synthetic oligonucleotide
cgtggcttcaccacgcacgatcagtactatcagttaaccactcttgaatatgctc

SEQ ID NO: 376856 - DNA, 55 bp, Artificial
  Synthetic oligonucleotide
cgtggcttcggggactctgtggaagaggccctatcggaggcacgtgaacacctca

SEQ ID NO: 376857 - DNA, 55 bp, Artificial
  Synthetic oligonucleotide
cgtggcttgcccgtactgccgattgatgcgtacgtcttgccgacgcgctttcacg

SEQ ID NO: 376858 - DNA, 58 bp, Artificial
  Synthetic oligonucleotide
cgtggctttgacgagggttcgcatgacgatcactcggtgttctcccgaaactgcctac

SEQ ID NO: 376859 - DNA, 59 bp, Artificial
  Synthetic oligonucleotide
cgtggctttgttaaacggtaggcagtctgattatgacaattatggttggccagtgttca

SEQ ID NO: 376860 - DNA, 57 bp, Artificial
  Synthetic oligonucleotide
cgtgggaaagacggctcccgcctagttgatgcgcgaacacgaacttcatacctacga

SEQ ID NO: 376861 - DNA, 55 bp, Artificial
  Synthetic oligonucleotide
cgtgggaaagtcacttcaatcagttagttcaagaaatacaggaagacttggaagg

SEQ ID NO: 376862 - DNA, 60 bp, Artificial
  Synthetic oligonucleotide
cgtgggaacgcgcaaagaatagtatatgatgatgagttacagatgcatatactgcgtggg

SEQ ID NO: 376863 - DNA, 60 bp, Artificial
  Synthetic oligonucleotide
cgtgggaagactgtaactctgatccgttgttgaggactgcagtagacagtgtgttgaagc

SEQ ID NO: 376864 - DNA, 55 bp, Artificial
  Synthetic oligonucleotide
cgtgggaaggggtggaggcaattataagaatcctacaacaactactgtttgttca

SEQ ID NO: 376865 - DNA, 59 bp, Artificial
  Synthetic oligonucleotide
cgtgggaagtgcgcgatgttgttaccgctgcccaaaagcgggccatcgtggccgtgata

SEQ ID NO: 376866 - DNA, 53 bp, Artificial
  Synthetic oligonucleotide
cgtgggaataatttatatagaacgtttccagttattttctctactgaaggtaa

SEQ ID NO: 376867 - DNA, 57 bp, Artificial
  Synthetic oligonucleotide
cgtgggaatgggggcaaaactggaacactagtggaacagtactgcaagaggtgttca

SEQ ID NO: 376868 - DNA, 55 bp, Artificial
  Synthetic oligonucleotide
cgtgggacagttcataagctaattaccacaatgttaaatgtgcatgagcaacaga

SEQ ID NO: 376869 - DNA, 55 bp, Artificial
  Synthetic oligonucleotide
cgtgggagaagaatacgctccaactacaggaatgccccatctccaaggtttctgt

SEQ ID NO: 376870 - DNA, 60 bp, Artificial
  Synthetic oligonucleotide
cgtgggagacagctagacacactccagttaactcctggctaggcaacatcattatgtatg

SEQ ID NO: 376871 - DNA, 55 bp, Artificial
  Synthetic oligonucleotide
cgtgggagacctaaggaggataaagtgtggtggaccagtaatagtatagtatcga

SEQ ID NO: 376872 - DNA, 58 bp, Artificial
  Synthetic oligonucleotide
cgtgggattcgcagcgttagcgctggacgtgcgttgtatatcccaccctatgaacttt

SEQ ID NO: 376873 - DNA, 55 bp, Artificial
  Synthetic oligonucleotide
cgtgggcaacgtcaggctcgtcttcctccaagtgaggaatgtttgctccgtggcg

SEQ ID NO: 376874 - DNA, 60 bp, Artificial
  Synthetic oligonucleotide
cgtgggcacaatcaacgctctcctggcgagaatcgccgctgcacgctccctggtgcatcg

SEQ ID NO: 376875 - DNA, 55 bp, Artificial
  Synthetic oligonucleotide
cgtgggcaccaggtatctaaaccatctcctggtaagctttatgcgtatatctatg

SEQ ID NO: 376876 - DNA, 59 bp, Artificial
  Synthetic oligonucleotide
cgtgggcatcaacgagtacagcctcgccaattgtggtgatgactgtgtgctaattgtcg

SEQ ID NO: 376877 - DNA, 59 bp, Artificial
  Synthetic oligonucleotide
cgtgggcgagcggtgcctctggtgacgcagtaggtcccacttgaacagtagaatggaaa

SEQ ID NO: 376878 - DNA, 51 bp, Artificial
  Synthetic oligonucleotide
cgtgggcgccctacgtcggactatgggacctctgacgcggtctcgctgcgt

SEQ ID NO: 376879 - DNA, 60 bp, Artificial
  Synthetic oligonucleotide
cgtgggcgtttacaactcagtgctgacgtacgctccatcgtaaccttgatgatacttgag

SEQ ID NO: 376880 - DNA, 59 bp, Artificial
  Synthetic oligonucleotide
cgtgggctccctacagtgttatccggttccagccaaccatcgttgtcgatgctatggtg

SEQ ID NO: 376881 - DNA, 55 bp, Artificial
  Synthetic oligonucleotide
cgtgggcttgtacgggaatggagtcatcttgggcaacggctcgtatgtcagtgcc

SEQ ID NO: 376882 - DNA, 60 bp, Artificial
  Synthetic oligonucleotide
cgtggggaacatcctgatctggtggtcataccatcagggcgccctgagaaacagcgtcag

SEQ ID NO: 376883 - DNA, 60 bp, Artificial
  Synthetic oligonucleotide
cgtggggaagtcagctagatttagcgtgccatacttaggaattgcttctgcttacaactg

SEQ ID NO: 376884 - DNA, 56 bp, Artificial
  Synthetic oligonucleotide
cgtggggaccaataaatagacttactcaccaagtttggatccacaaacatgtggga

SEQ ID NO: 376885 - DNA, 57 bp, Artificial
  Synthetic oligonucleotide
cgtggggactacgtaccccaatgataaagatgtgggatccattgttgaatgactttc

SEQ ID NO: 376886 - DNA, 55 bp, Artificial
  Synthetic oligonucleotide
cgtggggccgagtgctggtgtaaggattacgtgttggaccctaaggggcttcagc

SEQ ID NO: 376887 - DNA, 60 bp, Artificial
  Synthetic oligonucleotide
cgtggggcttatcttgggatttcagcgttacgcaactctgatgtgctaacagcagtatca

SEQ ID NO: 376888 - DNA, 55 bp, Artificial
  Synthetic oligonucleotide
cgtggggcttattgagatttccgctcgtaatttgggattaggaacttgcgtctca

SEQ ID NO: 376889 - DNA, 55 bp, Artificial
  Synthetic oligonucleotide
cgtggggctttcaaaggagtgttatacgacgcacggatgaagcttggtaggtctg

SEQ ID NO: 376890 - DNA, 51 bp, Artificial
  Synthetic oligonucleotide
cgtggggggggggacggagaggccgaggccacaggtaaccaggaaacgcaa

SEQ ID NO: 376891 - DNA, 58 bp, Artificial
  Synthetic oligonucleotide
cgtggggggggttgagcacaggctcacggctgcgtgcaacttcactcgcggggatcgt

SEQ ID NO: 376892 - DNA, 52 bp, Artificial
  Synthetic oligonucleotide
cgtgggggttcccggggtccgtaagacaaaccgaagtgatgcgagaagcacc

SEQ ID NO: 376893 - DNA, 54 bp, Artificial
  Synthetic oligonucleotide
cgtggggtcaagtaaccgtaacaagtaagtatagtggagtacaatacaggactc

SEQ ID NO: 376894 - DNA, 55 bp, Artificial
  Synthetic oligonucleotide
cgtgggtacaagggaatctggcgaggagacggcattatgcaaaccatctgcccat

SEQ ID NO: 376895 - DNA, 55 bp, Artificial
  Synthetic oligonucleotide
cgtgggtagagagcatgatggggacggactccgactacgaggcattcgacagatc

SEQ ID NO: 376896 - DNA, 60 bp, Artificial
  Synthetic oligonucleotide
cgtgggtgacatatgtggcggcctgttcttgctcggacaagtcgtcatgatcaggccccg

SEQ ID NO: 376897 - DNA, 52 bp, Artificial
  Synthetic oligonucleotide
cgtgggtgatgagaaatatgtgccaattgaaaaatttaacaaggtcaatgta

SEQ ID NO: 376898 - DNA, 55 bp, Artificial
  Synthetic oligonucleotide
cgtgggtgcatacaattgccctagagagacgcaaagatattgcatcccgattacg

SEQ ID NO: 376899 - DNA, 57 bp, Artificial
  Synthetic oligonucleotide
cgtgggtggatactacttccagggtgcgcacaactccttcaacaagaatgttcgtgg

SEQ ID NO: 376900 - DNA, 55 bp, Artificial
  Synthetic oligonucleotide
cgtgggtggtccctctaagacgtggcgcactctggaaccgcgctgggaggttatt

SEQ ID NO: 376901 - DNA, 53 bp, Artificial
  Synthetic oligonucleotide
cgtgggttatcctatgttccacggcgttataatccacgtaattatggttttaa

SEQ ID NO: 376902 - DNA, 58 bp, Artificial
  Synthetic oligonucleotide
cgtgggttcaacaggctttaatttgaaatgcctaagcgggatccctcatggcgccaga

SEQ ID NO: 376903 - DNA, 55 bp, Artificial
  Synthetic oligonucleotide
cgtgggttggatcgaactgcggtggtgttagagactatattatccaggagttgcc

SEQ ID NO: 376904 - DNA, 55 bp, Artificial
  Synthetic oligonucleotide
cgtgggtttggacacagttcagctccgggtggagaccatttggctgacgtcccag

SEQ ID NO: 376905 - DNA, 59 bp, Artificial
  Synthetic oligonucleotide
cgtggtaaatgagtgattcatcgtcccatctgacgaaacccgaactaggcttatgccag

SEQ ID NO: 376906 - DNA, 54 bp, Artificial
  Synthetic oligonucleotide
cgtggtaaggatgtttacgagccttatatggactgtttacgtccaataacccac

SEQ ID NO: 376907 - DNA, 50 bp, Artificial
  Synthetic oligonucleotide
cgtggtaatcaacttaccttggatagcggtttctgctacagcaggttccc

SEQ ID NO: 376908 - DNA, 58 bp, Artificial
  Synthetic oligonucleotide
cgtggtaatgggctcacacatcgtgttggaaagaggttttgtgtaaagtctgtgtatg

SEQ ID NO: 376909 - DNA, 51 bp, Artificial
  Synthetic oligonucleotide
cgtggtacccggaggaaaaccgaatcgtgacgataaaggggacaaccgaga

SEQ ID NO: 376910 - DNA, 55 bp, Artificial
  Synthetic oligonucleotide
cgtggtaccttctacgcttacaaagacccatacctgatctacaaggaagaggtag

SEQ ID NO: 376911 - DNA, 53 bp, Artificial
  Synthetic oligonucleotide
cgtggtagaaaatccgctaacttagccgtagtaagagaaactaaaatggaggc

SEQ ID NO: 376912 - DNA, 57 bp, Artificial
  Synthetic oligonucleotide
cgtggtaggataaaaaaggatcagtcaaatagagaatatgatgagagacgaacacat

SEQ ID NO: 376913 - DNA, 55 bp, Artificial
  Synthetic oligonucleotide
cgtggtagttgttgcacatattaattctgtcgtcaacatgtcgagtgctcattat

SEQ ID NO: 376914 - DNA, 55 bp, Artificial
  Synthetic oligonucleotide
cgtggtatggatttgtctcatgtcctccctccagatgcttcttcctactcgccaa

SEQ ID NO: 376915 - DNA, 60 bp, Artificial
  Synthetic oligonucleotide
cgtggtattaatggcgatggtcgttcaagggattacatcaaattgcttcatttatcagcc

SEQ ID NO: 376916 - DNA, 57 bp, Artificial
  Synthetic oligonucleotide
cgtggtattaatggtaacgcaatcaagctcacactagcgcaacgcaagcgtgcttgt

SEQ ID NO: 376917 - DNA, 60 bp, Artificial
  Synthetic oligonucleotide
cgtggtattgcacattggagtggttcagccgtcattgatccattaagattgttggactca

SEQ ID NO: 376918 - DNA, 54 bp, Artificial
  Synthetic oligonucleotide
cgtggtcaaaaggaaacgatggaatggacttagtgagatacttcggctgcatag

SEQ ID NO: 376919 - DNA, 60 bp, Artificial
  Synthetic oligonucleotide
cgtggtcaccaatggctctggtgggcaagccattggtggttcccgcactgtggaaataga

SEQ ID NO: 376920 - DNA, 55 bp, Artificial
  Synthetic oligonucleotide
cgtggtcaccacagacatttcagagatgggcgccaatttggatgtccatcgagtg

SEQ ID NO: 376921 - DNA, 60 bp, Artificial
  Synthetic oligonucleotide
cgtggtcatgacgcaagcatgccggacggccttccacatatacaagcggaacgtggaagg

SEQ ID NO: 376922 - DNA, 55 bp, Artificial
  Synthetic oligonucleotide
cgtggtcattatttcactccacgacgatattacacacggaacactgtgtctaatc

SEQ ID NO: 376923 - DNA, 57 bp, Artificial
  Synthetic oligonucleotide
cgtggtccatgatcttgaaactcaggggatttgctacctcccaagtaaagacgccat

SEQ ID NO: 376924 - DNA, 55 bp, Artificial
  Synthetic oligonucleotide
cgtggtcccgatggtgatggctctggctaagggtgatcttactccgcttcgcgcg

SEQ ID NO: 376925 - DNA, 58 bp, Artificial
  Synthetic oligonucleotide
cgtggtccctaacagactcctcaggaaaggacatgccaggaggttattgtcttgaaga

SEQ ID NO: 376926 - DNA, 57 bp, Artificial
  Synthetic oligonucleotide
cgtggtccctcaggaatggcctctccaggtgcttggtaatcttgaaatagaggggat

SEQ ID NO: 376927 - DNA, 53 bp, Artificial
  Synthetic oligonucleotide
cgtggtcctattcaaaattggtcgtttttcatgtccctagagatgtttaaacg

SEQ ID NO: 376928 - DNA, 54 bp, Artificial
  Synthetic oligonucleotide
cgtggtcgcagcattgtttcttatacctaggatcattcatgtacctaactcggt

SEQ ID NO: 376929 - DNA, 54 bp, Artificial
  Synthetic oligonucleotide
cgtggtcggagtccacgttggtggttctaagttaaataactggaacttggctgc

SEQ ID NO: 376930 - DNA, 55 bp, Artificial
  Synthetic oligonucleotide
cgtggtcgtagctctacacaacgacggatttattcacggcgtacagctgttaagc

SEQ ID NO: 376931 - DNA, 57 bp, Artificial
  Synthetic oligonucleotide
cgtggtctccacccttcctcaggccgtgatgggcccctcatacggattccagtactc

SEQ ID NO: 376932 - DNA, 55 bp, Artificial
  Synthetic oligonucleotide
cgtggtctgttgtaaatcacttataatacgtggacaatggatgtttgatagtgac

SEQ ID NO: 376933 - DNA, 55 bp, Artificial
  Synthetic oligonucleotide
cgtggtgaaaattataacggctatggtttccgtttatctctgcgttctgattacg

SEQ ID NO: 376934 - DNA, 57 bp, Artificial
  Synthetic oligonucleotide
cgtggtgaaacggcgatggttgttcaacatggagaccgacgggcggattggctcgga

SEQ ID NO: 376935 - DNA, 55 bp, Artificial
  Synthetic oligonucleotide
cgtggtgacaatcgtatcgatattatgccgccagatgtaaacgcaacaatcagtt

SEQ ID NO: 376936 - DNA, 55 bp, Artificial
  Synthetic oligonucleotide
cgtggtgactggtggtacggttggaactcatgttgctctggatgcggaaacacga

SEQ ID NO: 376937 - DNA, 55 bp, Artificial
  Synthetic oligonucleotide
cgtggtgccagaaattttccctggatggtccctccctgtgcaacgactacacttc

SEQ ID NO: 376938 - DNA, 55 bp, Artificial
  Synthetic oligonucleotide
cgtggtgcccacaacctcgactgcgtgtcaaaagaaggagccactctcttccccg

SEQ ID NO: 376939 - DNA, 55 bp, Artificial
  Synthetic oligonucleotide
cgtggtgccggtcggcagcggtgtcgtatctgaatgttggttcgtacggggcgtt

SEQ ID NO: 376940 - DNA, 58 bp, Artificial
  Synthetic oligonucleotide
cgtggtgcgtacccaaagatccagactgtgagccgcgtactccgctctctgttctggg

SEQ ID NO: 376941 - DNA, 55 bp, Artificial
  Synthetic oligonucleotide
cgtggtggcacaatgagcaaagacttggtacaccctagtctgatccgagcgggga

SEQ ID NO: 376942 - DNA, 60 bp, Artificial
  Synthetic oligonucleotide
cgtggtgggtccggtgcgagatggagctgcgccacccgagccatgcttcctagtcgctaa

SEQ ID NO: 376943 - DNA, 55 bp, Artificial
  Synthetic oligonucleotide
cgtggtgggtccggtggtgtttagtttaatagcggcgcgagtttcttgcatgttc

SEQ ID NO: 376944 - DNA, 55 bp, Artificial
  Synthetic oligonucleotide
cgtggtggtatgcgaattgaacgtaactcgaaggtccgagaggtaaacttggcca

SEQ ID NO: 376945 - DNA, 59 bp, Artificial
  Synthetic oligonucleotide
cgtggtggtgcgttagttattgatgtgtttatgacttattatgatgttcattataaccg

SEQ ID NO: 376946 - DNA, 50 bp, Artificial
  Synthetic oligonucleotide
cgtggtgtaacccaacttgcgccccaatcagaccctatcctacagtcgaa

SEQ ID NO: 376947 - DNA, 55 bp, Artificial
  Synthetic oligonucleotide
cgtggtgtcttcgacaaagcgcaatctaacactgcgtgatttattatgttctgga

SEQ ID NO: 376948 - DNA, 55 bp, Artificial
  Synthetic oligonucleotide
cgtggtgtgcatgaatcgtatagattaaccctactcacccgaatctcggatgaat

SEQ ID NO: 376949 - DNA, 55 bp, Artificial
  Synthetic oligonucleotide
cgtggtgttagtgtgttgtgggatcgtgtttatcgtgttaatcgtggcacacagc

SEQ ID NO: 376950 - DNA, 55 bp, Artificial
  Synthetic oligonucleotide
cgtggtgttcgccgaagcttcgtggataggattttgatggtgtagaccttcgccc

SEQ ID NO: 376951 - DNA, 58 bp, Artificial
  Synthetic oligonucleotide
cgtggttaataagttcttaacaactgttatagatcctgataagttgtgcatgtttcca

SEQ ID NO: 376952 - DNA, 53 bp, Artificial
  Synthetic oligonucleotide
cgtggttacgaacagtatgtgaactctgctgcatggtacggcgaccaggctaa

SEQ ID NO: 376953 - DNA, 60 bp, Artificial
  Synthetic oligonucleotide
cgtggttataggagttttactcagttcagagcactaccatctgttcgctctgctgatata

SEQ ID NO: 376954 - DNA, 60 bp, Artificial
  Synthetic oligonucleotide
cgtggttatctaggtttgcctgagtatgcagatgatggaggaattaatgcaatcgacttt

SEQ ID NO: 376955 - DNA, 50 bp, Artificial
  Synthetic oligonucleotide
cgtggttatggggtttttccacttctgtttcaaaaacctccctctagggc

SEQ ID NO: 376956 - DNA, 56 bp, Artificial
  Synthetic oligonucleotide
cgtggttcatcctttattcaacggcggtatcattcacgtaataatgtgtttaagcg

SEQ ID NO: 376957 - DNA, 51 bp, Artificial
  Synthetic oligonucleotide
cgtggttctgggagtgattattacttgcatccctctttatccctcaaacgt

SEQ ID NO: 376958 - DNA, 55 bp, Artificial
  Synthetic oligonucleotide
cgtggttctggttttgtcacaactgcagctgagattacccatggccgagcggagg

SEQ ID NO: 376959 - DNA, 55 bp, Artificial
  Synthetic oligonucleotide
cgtggttgaaggtaacctcgcactgtctatcgcgaatgatctattatccgcgcta

SEQ ID NO: 376960 - DNA, 60 bp, Artificial
  Synthetic oligonucleotide
cgtggttgacacctagatgcatggtccattacccctatagactgtggcactacccgtgta

SEQ ID NO: 376961 - DNA, 57 bp, Artificial
  Synthetic oligonucleotide
cgtggttgactccgacactttcaccgcagccctccggtctggctactccaccacaaa

SEQ ID NO: 376962 - DNA, 60 bp, Artificial
  Synthetic oligonucleotide
cgtggttgactgtgctccgagtgaagctctgatcgttgcagatcagagattgtttgtgag

SEQ ID NO: 376963 - DNA, 60 bp, Artificial
  Synthetic oligonucleotide
cgtggttgatggcgttaatcataagctggatgtcacaacagcaacgtgtactattagaaa

SEQ ID NO: 376964 - DNA, 60 bp, Artificial
  Synthetic oligonucleotide
cgtggttgattgttgttcatatggatataagtggagatatttatggttgatagtgacatt

SEQ ID NO: 376965 - DNA, 51 bp, Artificial
  Synthetic oligonucleotide
cgtggttggggctggtggtcacgcatttcactcaggcgttgtttgtggacg

SEQ ID NO: 376966 - DNA, 55 bp, Artificial
  Synthetic oligonucleotide
cgtggttgtgtggatcaatatgctggaaaacgataccacacccgttacgcccgac

SEQ ID NO: 376967 - DNA, 57 bp, Artificial
  Synthetic oligonucleotide
cgtggttgtgtgtgctaccgacgcccttatgactggttacacgggcgattttgactc

SEQ ID NO: 376968 - DNA, 55 bp, Artificial
  Synthetic oligonucleotide
cgtggtttatgcttggttcctcctttggtgattgaaactgctgcaaggactcgaa

SEQ ID NO: 376969 - DNA, 55 bp, Artificial
  Synthetic oligonucleotide
cgtggtttcggatttcccagttaaatagtcgctggatgtcgatacatccgtttcc

SEQ ID NO: 376970 - DNA, 58 bp, Artificial
  Synthetic oligonucleotide
cgtggtttggttggagccgatggctttgaacaagataatcgcaccatttctaagaatg

SEQ ID NO: 376971 - DNA, 50 bp, Artificial
  Synthetic oligonucleotide
cgtggttttgttgcgcacgtcgaacctgattctgacagaaatggccgtgg

SEQ ID NO: 376972 - DNA, 57 bp, Artificial
  Synthetic oligonucleotide
cgtgtaaaaaatgtaaactatgcggattagtttaccatcccttcactgagtgcggca

SEQ ID NO: 376973 - DNA, 55 bp, Artificial
  Synthetic oligonucleotide
cgtgtaaacaggtatggtaaaactggcacccttaaattgcgcagtggtacccagc

SEQ ID NO: 376974 - DNA, 55 bp, Artificial
  Synthetic oligonucleotide
cgtgtaaagcgcgacgtgaatgtttaacaccgtatgccctagccccgaatgccgt

SEQ ID NO: 376975 - DNA, 58 bp, Artificial
  Synthetic oligonucleotide
cgtgtaaattccaataaacagcgaaagaaacatggaattgaacgtaggtgcaatgaca

SEQ ID NO: 376976 - DNA, 51 bp, Artificial
  Synthetic oligonucleotide
cgtgtaacagatagacgagcaaaattagtctcatcactacatgcgttactt

SEQ ID NO: 376977 - DNA, 50 bp, Artificial
  Synthetic oligonucleotide
cgtgtaaccccaatctccggagaagtagcggtgcgcggacccaaaccacg

SEQ ID NO: 376978 - DNA, 55 bp, Artificial
  Synthetic oligonucleotide
cgtgtaaggctactgtggaagtagacggacacgggattgcttgggtgatagctag

SEQ ID NO: 376979 - DNA, 57 bp, Artificial
  Synthetic oligonucleotide
cgtgtaaggtccaatcttttgatgctaagaacgatattggtcacatggggaaggtat

SEQ ID NO: 376980 - DNA, 58 bp, Artificial
  Synthetic oligonucleotide
cgtgtaatggtgtctatgctaacattagcaagaacgccttattagtttattattgttg

SEQ ID NO: 376981 - DNA, 55 bp, Artificial
  Synthetic oligonucleotide
cgtgtaattttcgtttctctccctccaatgcgcatgtgttcaatgggacacgcgg

SEQ ID NO: 376982 - DNA, 58 bp, Artificial
  Synthetic oligonucleotide
cgtgtacacgcaccctcagttgtctcctctcccgggccctctcgaatccatgttcgtg

SEQ ID NO: 376983 - DNA, 59 bp, Artificial
  Synthetic oligonucleotide
cgtgtacataatatacataagaacgatcagttgcccaggaaacagctctaacaacgtta

SEQ ID NO: 376984 - DNA, 53 bp, Artificial
  Synthetic oligonucleotide
cgtgtacatccaaacacgcacaaataacggtcaggttctcacgacagtaggtt

SEQ ID NO: 376985 - DNA, 56 bp, Artificial
  Synthetic oligonucleotide
cgtgtacccaaccttccagctaatgtagcatgggtcggtcgccaaatagtcttatt

SEQ ID NO: 376986 - DNA, 52 bp, Artificial
  Synthetic oligonucleotide
cgtgtacgaggcttttacgcccagaggttacctttaatggtgtcccaattac

SEQ ID NO: 376987 - DNA, 55 bp, Artificial
  Synthetic oligonucleotide
cgtgtacgctgaccagtgatggtgttctctaagttatgactcatagtgattcccc

SEQ ID NO: 376988 - DNA, 55 bp, Artificial
  Synthetic oligonucleotide
cgtgtactaacaacgaattccacatttaaagtttttgattcagaggatttcatta

SEQ ID NO: 376989 - DNA, 60 bp, Artificial
  Synthetic oligonucleotide
cgtgtactgatgatcgtcccaagtattcaagatgtggagacatgcaagcgacatgcagca

SEQ ID NO: 376990 - DNA, 55 bp, Artificial
  Synthetic oligonucleotide
cgtgtactgctgagatgggagctgacgaaggcgcaacgcagcgctctgcttaggc

SEQ ID NO: 376991 - DNA, 55 bp, Artificial
  Synthetic oligonucleotide
cgtgtacttctataaatgctactggaaacgaaactaatgctactggaaacggaat

SEQ ID NO: 376992 - DNA, 55 bp, Artificial
  Synthetic oligonucleotide
cgtgtagaagctctggctatgatcaaagactgtgagctgtctattgacattagat

SEQ ID NO: 376993 - DNA, 56 bp, Artificial
  Synthetic oligonucleotide
cgtgtagattcggacgcttttgggaaatgggtaaccatgatggtatcgaatagtac

SEQ ID NO: 376994 - DNA, 59 bp, Artificial
  Synthetic oligonucleotide
cgtgtagcgacataaatgcgtcggagcagcttacggctgttacaacgaataacacttac

SEQ ID NO: 376995 - DNA, 55 bp, Artificial
  Synthetic oligonucleotide
cgtgtagcgccctttgcccgcccacgacttgaaacactcatacaggcgccacgag

SEQ ID NO: 376996 - DNA, 55 bp, Artificial
  Synthetic oligonucleotide
cgtgtagctcttgcaacgtgtcctactgcagatgagacggctctccaactgatcg

SEQ ID NO: 376997 - DNA, 55 bp, Artificial
  Synthetic oligonucleotide
cgtgtaggggtgtcccgatgtaatataacatagctatgtgaagagatatgggccg

SEQ ID NO: 376998 - DNA, 55 bp, Artificial
  Synthetic oligonucleotide
cgtgtagtaacacacaggacagagtatgtgtctgtgcatacggatactactgcga

SEQ ID NO: 376999 - DNA, 55 bp, Artificial
  Synthetic oligonucleotide
cgtgtagtaacgactagagtaaatacgacctagtgatacattggggctgatcgtc

SEQ ID NO: 377000 - DNA, 58 bp, Artificial
  Synthetic oligonucleotide
cgtgtagtcgtgcacacccgtccatcctcgaccgtacatggccacgccaaccactatt

SEQ ID NO: 377001 - DNA, 55 bp, Artificial
  Synthetic oligonucleotide
cgtgtagtgtattatttccgttgcgcacgcaatgtaaaccttctggtagacgatt

SEQ ID NO: 377002 - DNA, 53 bp, Artificial
  Synthetic oligonucleotide
cgtgtagttagggtacacgtaaaaagagccctacagcggttaagctaccgcta

SEQ ID NO: 377003 - DNA, 60 bp, Artificial
  Synthetic oligonucleotide
cgtgtatacagagtaggacggatcctcgatacacgcacggagcggatccattaacggatg

SEQ ID NO: 377004 - DNA, 57 bp, Artificial
  Synthetic oligonucleotide
cgtgtatcaatgtgttccttaaacagacaactaataacattgactggatttttcggc

SEQ ID NO: 377005 - DNA, 55 bp, Artificial
  Synthetic oligonucleotide
cgtgtatcagcacgttcagtagcgagatgcatatccttgtctaaatcattctatg

SEQ ID NO: 377006 - DNA, 60 bp, Artificial
  Synthetic oligonucleotide
cgtgtatccacgacacgtaataagatacctgatggattctgctctgttgatggcgtgccg

SEQ ID NO: 377007 - DNA, 55 bp, Artificial
  Synthetic oligonucleotide
cgtgtatgcccaaacttggagcatagtgcgcaaacgccatatgcaggtggagatc

SEQ ID NO: 377008 - DNA, 57 bp, Artificial
  Synthetic oligonucleotide
cgtgtatggcatgcctaggttgaaggaaaacgtccgtcaccggtatcgcgtgattgg

SEQ ID NO: 377009 - DNA, 60 bp, Artificial
  Synthetic oligonucleotide
cgtgtattactcgacatgaccttgaaacacacagttcactttgagcggccgaacgattgc

SEQ ID NO: 377010 - DNA, 60 bp, Artificial
  Synthetic oligonucleotide
cgtgtattctgacttaatccaactgtccaagaaacccctgacagtcctacacatgctctc

SEQ ID NO: 377011 - DNA, 55 bp, Artificial
  Synthetic oligonucleotide
cgtgtattgactaacgaaagacgtggatatttataagccataacgatgagtctac

SEQ ID NO: 377012 - DNA, 54 bp, Artificial
  Synthetic oligonucleotide
cgtgtatttaacagagttaatacaggttttacgtgtacggaaacatgccaaagc

SEQ ID NO: 377013 - DNA, 60 bp, Artificial
  Synthetic oligonucleotide
cgtgtcaaaacttttgaattgttcatccttcatcttgatagcatcaaggagggtcacact

SEQ ID NO: 377014 - DNA, 55 bp, Artificial
  Synthetic oligonucleotide
cgtgtcaaagctgtatggtttaccagcagcgaacccaaacggcgggaaggagtac

SEQ ID NO: 377015 - DNA, 60 bp, Artificial
  Synthetic oligonucleotide
cgtgtcaagcttgactaatgatttcacgaattacgtttacaacgataagatgaatgtagc

SEQ ID NO: 377016 - DNA, 55 bp, Artificial
  Synthetic oligonucleotide
cgtgtcaaggatccccgtctgcgtgcggataggtatttgcatttcttgcgtactg

SEQ ID NO: 377017 - DNA, 55 bp, Artificial
  Synthetic oligonucleotide
cgtgtcaatcagtacttagacagcacatatttagcaagtttcagagagcaacttt

SEQ ID NO: 377018 - DNA, 55 bp, Artificial
  Synthetic oligonucleotide
cgtgtcacacacgggagactcactcagcctacacatcaaggcgcattgcccgcca

SEQ ID NO: 377019 - DNA, 60 bp, Artificial
  Synthetic oligonucleotide
cgtgtcacatcagacagatagtcaacacgtggcacaaggttggaaaatacgtatatttgc

SEQ ID NO: 377020 - DNA, 60 bp, Artificial
  Synthetic oligonucleotide
cgtgtcactccaagcgctctcaaacagagggggcgcgcgtataatgttggtctggctatg

SEQ ID NO: 377021 - DNA, 57 bp, Artificial
  Synthetic oligonucleotide
cgtgtcactcctctatcccaacgcaaggatagaggttgaggtccgccctattgggcg

SEQ ID NO: 377022 - DNA, 60 bp, Artificial
  Synthetic oligonucleotide
cgtgtcagcctgcaatgactttagtgtaagactactgagggatacaacgcacatagcaca

SEQ ID NO: 377023 - DNA, 55 bp, Artificial
  Synthetic oligonucleotide
cgtgtcaggaaacagttgagggaaaatgcagaagaggatggaacagggtgttttg

SEQ ID NO: 377024 - DNA, 55 bp, Artificial
  Synthetic oligonucleotide
cgtgtcagttgaagcacttaagtacgagcatgaattttatctgagagactacccg

SEQ ID NO: 377025 - DNA, 60 bp, Artificial
  Synthetic oligonucleotide
cgtgtcatcgtgttgtgtgttacgatgatgctggcgtgatggaaggatacggacccacat

SEQ ID NO: 377026 - DNA, 60 bp, Artificial
  Synthetic oligonucleotide
cgtgtcatctgcaggagatactaaggtatcgcaatttagatttaataagcgattgagcac

SEQ ID NO: 377027 - DNA, 57 bp, Artificial
  Synthetic oligonucleotide
cgtgtcattacagcagtgcgtgatactcatttaaaacacgtgtgtccacgtttttgg

SEQ ID NO: 377028 - DNA, 58 bp, Artificial
  Synthetic oligonucleotide
cgtgtcattgtgcgatttcttccgtcaatgtggtatgtcgacgtgggaatacgttaat

SEQ ID NO: 377029 - DNA, 55 bp, Artificial
  Synthetic oligonucleotide
cgtgtccatcactccactcgattcaccggttcacagtgaaaatgcatccccacat

SEQ ID NO: 377030 - DNA, 60 bp, Artificial
  Synthetic oligonucleotide
cgtgtcccacaaacagatatattgtatgcgttaatgcaaacgaatcgaacgagccctctg

SEQ ID NO: 377031 - DNA, 51 bp, Artificial
  Synthetic oligonucleotide
cgtgtcccgaacgggttggtaggtcgtgttcttagggccgcccttgcgacc

SEQ ID NO: 377032 - DNA, 55 bp, Artificial
  Synthetic oligonucleotide
cgtgtcccgaccctccgacgtgtgtcccacgtagccgtctgacgaccgaccgatc

SEQ ID NO: 377033 - DNA, 55 bp, Artificial
  Synthetic oligonucleotide
cgtgtcccgagtggtgcgaaaacgatagaatggtgcgcaattctgaccgaaacgc

SEQ ID NO: 377034 - DNA, 50 bp, Artificial
  Synthetic oligonucleotide
cgtgtccctattctgccagatggtctctagtgtcgacttcgtgccaccaa

SEQ ID NO: 377035 - DNA, 52 bp, Artificial
  Synthetic oligonucleotide
cgtgtccgatgggacatttggtttggtcgacggggttgttgggggttcaatc

SEQ ID NO: 377036 - DNA, 50 bp, Artificial
  Synthetic oligonucleotide
cgtgtccggtaaaatagaactcaacgaacccttcgtaaaggtttacatgg

SEQ ID NO: 377037 - DNA, 53 bp, Artificial
  Synthetic oligonucleotide
cgtgtccgttgtacgtaaacgacttagcaaccgtctttaatctagacgataac

SEQ ID NO: 377038 - DNA, 55 bp, Artificial
  Synthetic oligonucleotide
cgtgtcctcacatattcaagatggggacatgtgtgatatagggtttggggcaatc

SEQ ID NO: 377039 - DNA, 60 bp, Artificial
  Synthetic oligonucleotide
cgtgtcctgacatggctccatgcgacagcatgggggggtccagagtcagtcccctcttta

SEQ ID NO: 377040 - DNA, 51 bp, Artificial
  Synthetic oligonucleotide
cgtgtcctggctccctacggggatttccggaggcacgaaggctctatccta

SEQ ID NO: 377041 - DNA, 53 bp, Artificial
  Synthetic oligonucleotide
cgtgtcgaatcttctgtgttaagggttcggaatcctacacttcacgagacagc

SEQ ID NO: 377042 - DNA, 55 bp, Artificial
  Synthetic oligonucleotide
cgtgtcgaccagcaagcatttgctgttgggcgcatacctcaattcgggcgcttgc

SEQ ID NO: 377043 - DNA, 59 bp, Artificial
  Synthetic oligonucleotide
cgtgtcgagtcgtgttgtccgcacatttgagtcgtgctgtccgcacattttatctatta

SEQ ID NO: 377044 - DNA, 59 bp, Artificial
  Synthetic oligonucleotide
cgtgtcgatttgacacctcataacccattgctggtgtgtcggtctgcgacgattgcagg

SEQ ID NO: 377045 - DNA, 60 bp, Artificial
  Synthetic oligonucleotide
cgtgtcgcactgatgttggaagagcttcaattccactgcgtgatgaatccattgaaatct

SEQ ID NO: 377046 - DNA, 55 bp, Artificial
  Synthetic oligonucleotide
cgtgtcgcgagcccgaccccgcttcttactcctttgcctactcctactcagcgta

SEQ ID NO: 377047 - DNA, 53 bp, Artificial
  Synthetic oligonucleotide
cgtgtcgcgtgcccgaccccgcttgttactctttagcctactcctactttccg

SEQ ID NO: 377048 - DNA, 60 bp, Artificial
  Synthetic oligonucleotide
cgtgtcgctactcatctactgttgttgattgtggttggtagtcattggaaaggtgcctgt

SEQ ID NO: 377049 - DNA, 57 bp, Artificial
  Synthetic oligonucleotide
cgtgtcggagttatgtacagagttttcagcaatcggacgtaagatgatggatacaca

SEQ ID NO: 377050 - DNA, 60 bp, Artificial
  Synthetic oligonucleotide
cgtgtcggcaacactacaagcctcactgatattcgaatcgaccacaccggaacagttgcc

SEQ ID NO: 377051 - DNA, 55 bp, Artificial
  Synthetic oligonucleotide
cgtgtcggctcagccataacaatagactcgtctcagggagctaccttgacatcgg

SEQ ID NO: 377052 - DNA, 58 bp, Artificial
  Synthetic oligonucleotide
cgtgtcggtaagtcggcgattgagcggcttgtggagaacatgtcccctgaggacgttc

SEQ ID NO: 377053 - DNA, 55 bp, Artificial
  Synthetic oligonucleotide
cgtgtcgtactggattgagagtcgctacaatgacacgtggaaacgtgagagggct

SEQ ID NO: 377054 - DNA, 55 bp, Artificial
  Synthetic oligonucleotide
cgtgtcgtagcgcattatcgaataggtggcactttcgtcgaattcacaagggaag

SEQ ID NO: 377055 - DNA, 57 bp, Artificial
  Synthetic oligonucleotide
cgtgtcgtcacagtctaacgtaattttagcacacgtaattagtgccgacgtactgtc

SEQ ID NO: 377056 - DNA, 55 bp, Artificial
  Synthetic oligonucleotide
cgtgtcgtccattatacgaagttatacatttgacgttgccaaatggaagatcatg

SEQ ID NO: 377057 - DNA, 60 bp, Artificial
  Synthetic oligonucleotide
cgtgtcgtggctaatgaagctggtgttaatgatgcggggttcatcgttcctaatgcggcg

SEQ ID NO: 377058 - DNA, 50 bp, Artificial
  Synthetic oligonucleotide
cgtgtcgtgtgagctcgtggcgcgcaagagattcatcgggtttgcggatg

SEQ ID NO: 377059 - DNA, 59 bp, Artificial
  Synthetic oligonucleotide
cgtgtcgttagtcgattggcagcctcctctagcacttctaccgtcgatctggaattccc

SEQ ID NO: 377060 - DNA, 60 bp, Artificial
  Synthetic oligonucleotide
cgtgtcgtttctggacgtgtctcagtatgttgtaggcacgctgtggaggccttgaggcgt

SEQ ID NO: 377061 - DNA, 60 bp, Artificial
  Synthetic oligonucleotide
cgtgtctaaagtcgatctagctgctatgtttgagtccaacagtaacaaaaactcatagca

SEQ ID NO: 377062 - DNA, 57 bp, Artificial
  Synthetic oligonucleotide
cgtgtctacctatccgcctcaccctctggtgtagacgtccgccttccgccgattgtc

SEQ ID NO: 377063 - DNA, 55 bp, Artificial
  Synthetic oligonucleotide
cgtgtctaggcggagacgcggtaagggtggagctgttgacgatgcaggtaaacct

SEQ ID NO: 377064 - DNA, 60 bp, Artificial
  Synthetic oligonucleotide
cgtgtctatggacggcatgacgggcggggtgaagaactctgctatcgcaattattcaggg

SEQ ID NO: 377065 - DNA, 55 bp, Artificial
  Synthetic oligonucleotide
cgtgtctcaacgggaagagttcgccctcattaaaaggcgccttgtcaaacttggc

SEQ ID NO: 377066 - DNA, 55 bp, Artificial
  Synthetic oligonucleotide
cgtgtctcagactctaactagacaggcagaggttagggctagtagacaacttgct

SEQ ID NO: 377067 - DNA, 55 bp, Artificial
  Synthetic oligonucleotide
cgtgtctcagcttatcttgtttgcaaacgatgagttggaatctgacattaagcac

SEQ ID NO: 377068 - DNA, 55 bp, Artificial
  Synthetic oligonucleotide
cgtgtctccgtgacggtacttatcgggtcagcgtcttttgagatttctgttcgta

SEQ ID NO: 377069 - DNA, 55 bp, Artificial
  Synthetic oligonucleotide
cgtgtctcgacggcaccctagactattactcgccggaaaagattgcgggacgccg

SEQ ID NO: 377070 - DNA, 55 bp, Artificial
  Synthetic oligonucleotide
cgtgtctgatgttccatgtgccgttgcagttccgcggacactatcgcgtggaacg

SEQ ID NO: 377071 - DNA, 53 bp, Artificial
  Synthetic oligonucleotide
cgtgtctgcaacggctcattcgggcgcagttgggggggtttcttcattgtgcg

SEQ ID NO: 377072 - DNA, 60 bp, Artificial
  Synthetic oligonucleotide
cgtgtctggatccgttcgattgaacttgatcaaaggaagcctcttgtgatattcacgagg

SEQ ID NO: 377073 - DNA, 55 bp, Artificial
  Synthetic oligonucleotide
cgtgtctgtaaagtcacctgataatccgacgggccctatcatggctttggatgct

SEQ ID NO: 377074 - DNA, 56 bp, Artificial
  Synthetic oligonucleotide
cgtgtcttatcggctttgaagccgaatgtttttgttaatacacgtatgacttccga

SEQ ID NO: 377075 - DNA, 54 bp, Artificial
  Synthetic oligonucleotide
cgtgtcttcgtggtttgtctggtcaaccaccgcggtctcagtggtgtacggtac

SEQ ID NO: 377076 - DNA, 55 bp, Artificial
  Synthetic oligonucleotide
cgtgtgaaaagcgcatactctagaataggtagtagattacgtagtggtgtgtcgt

SEQ ID NO: 377077 - DNA, 55 bp, Artificial
  Synthetic oligonucleotide
cgtgtgaaaagtgagatgatcgttaggatcggtcacgtagacgaatccgtctaga

SEQ ID NO: 377078 - DNA, 55 bp, Artificial
  Synthetic oligonucleotide
cgtgtgaactttcaaaagactgttagactgcccaaaggtgttcgtgttggcagcg

SEQ ID NO: 377079 - DNA, 55 bp, Artificial
  Synthetic oligonucleotide
cgtgtgaagccattaactcgtacagttttagcaccagagtctttggcgtgttgat

SEQ ID NO: 377080 - DNA, 53 bp, Artificial
  Synthetic oligonucleotide
cgtgtgaagtaggtttagtagacccgccgccgttttgattgacggtaacgtga

SEQ ID NO: 377081 - DNA, 57 bp, Artificial
  Synthetic oligonucleotide
cgtgtgacgagttttgaaatgaattttgacggtacacttgggaacctgatgagtgat

SEQ ID NO: 377082 - DNA, 55 bp, Artificial
  Synthetic oligonucleotide
cgtgtgacgctttgagtaacttatctccgtggctacattttggtcatgtatccgc

SEQ ID NO: 377083 - DNA, 59 bp, Artificial
  Synthetic oligonucleotide
cgtgtgagggctgacggtcctgagggcactggtccctgtgccgcgttacaagatattcg

SEQ ID NO: 377084 - DNA, 60 bp, Artificial
  Synthetic oligonucleotide
cgtgtgatagcgggtaatggcatgtggttcaacagccagaatcaattgcaacttgatcta

SEQ ID NO: 377085 - DNA, 59 bp, Artificial
  Synthetic oligonucleotide
cgtgtgatatcttgtgatttttactagtgacactgtaaactagaactttacctgattca

SEQ ID NO: 377086 - DNA, 57 bp, Artificial
  Synthetic oligonucleotide
cgtgtgattgaagctagtagtgttaatgatacagtagcctttagaatgatttatggc

SEQ ID NO: 377087 - DNA, 51 bp, Artificial
  Synthetic oligonucleotide
cgtgtgcaaaggttccgtggtgcggagcaacagataaagtttgtctgtcaa

SEQ ID NO: 377088 - DNA, 55 bp, Artificial
  Synthetic oligonucleotide
cgtgtgcaacgttctacaccgacaacctataacttgtagacttgtactacgaacg

SEQ ID NO: 377089 - DNA, 55 bp, Artificial
  Synthetic oligonucleotide
cgtgtgcacccggggggttgcgaaggcggtggacttcatacccgtcgagtctatg

SEQ ID NO: 377090 - DNA, 55 bp, Artificial
  Synthetic oligonucleotide
cgtgtgcccgcccgaaatcattcgacactgtgtttggttcccgtccttgaaggac

SEQ ID NO: 377091 - DNA, 55 bp, Artificial
  Synthetic oligonucleotide
cgtgtgccggagactttgccttccacaaagagggtgctttcttcctgtatgaccg

SEQ ID NO: 377092 - DNA, 55 bp, Artificial
  Synthetic oligonucleotide
cgtgtgcctccagtcgccctagctactcatctaccaccttctcggacaccccgag

SEQ ID NO: 377093 - DNA, 60 bp, Artificial
  Synthetic oligonucleotide
cgtgtgcgatacttccctccccactcacgtctgctatgatgacacctatcatcaagtttt

SEQ ID NO: 377094 - DNA, 58 bp, Artificial
  Synthetic oligonucleotide
cgtgtgcgctatgtggtttggcaacgggaacttgctccggaaactgggcgtgtacaca

SEQ ID NO: 377095 - DNA, 58 bp, Artificial
  Synthetic oligonucleotide
cgtgtgctacgtggtcgtagtgagtgggagaaatatggagcggggataattcacaacc

SEQ ID NO: 377096 - DNA, 55 bp, Artificial
  Synthetic oligonucleotide
cgtgtgctataagtctgacgtaagtcgagcttgcaacatgggtctatgcctggat

SEQ ID NO: 377097 - DNA, 60 bp, Artificial
  Synthetic oligonucleotide
cgtgtgctgctcaatgtcttatacttggacaggcgcacttgttaccccgtgtgccgcgga

SEQ ID NO: 377098 - DNA, 58 bp, Artificial
  Synthetic oligonucleotide
cgtgtgctgctcaatgtcttattcctggacaggtgcactcgttaccccgtgcgctgcg

SEQ ID NO: 377099 - DNA, 59 bp, Artificial
  Synthetic oligonucleotide
cgtgtgctggagtcacgtcctttgggattacactaaggatagtgtgttttgcagttcga

SEQ ID NO: 377100 - DNA, 50 bp, Artificial
  Synthetic oligonucleotide
cgtgtgctgggccaaagcactggtcccgatattacgcacggccggaatta

SEQ ID NO: 377101 - DNA, 60 bp, Artificial
  Synthetic oligonucleotide
cgtgtgctgtcagtatcaccaaaatattcggatcttctaacttatgttgattgctacgtc

SEQ ID NO: 377102 - DNA, 59 bp, Artificial
  Synthetic oligonucleotide
cgtgtggaaaccctataaatcatttactgacagacattctaatcgtctgtagattccaa

SEQ ID NO: 377103 - DNA, 51 bp, Artificial
  Synthetic oligonucleotide
cgtgtggaaagaccttttggagacaagtgtaacaccaatagacccttccct

SEQ ID NO: 377104 - DNA, 58 bp, Artificial
  Synthetic oligonucleotide
cgtgtggaagacccggaggtatcgagaacggaagcgctatcgcagtactcattccgtc

SEQ ID NO: 377105 - DNA, 57 bp, Artificial
  Synthetic oligonucleotide
cgtgtggacgaccaacgtactaagtatgtggtcgcacataagttggcttcctactgc

SEQ ID NO: 377106 - DNA, 55 bp, Artificial
  Synthetic oligonucleotide
cgtgtggccaacaacccaagcaaggaaatccagatgtaccgcattcgatccatgg

SEQ ID NO: 377107 - DNA, 55 bp, Artificial
  Synthetic oligonucleotide
cgtgtggctccaattgaatggacgacggcgtaaaatagcacattacgcccgtttc

SEQ ID NO: 377108 - DNA, 55 bp, Artificial
  Synthetic oligonucleotide
cgtgtggctgcttcaccacggaccaatcccaaaaggattgcaggttgaccatatc

SEQ ID NO: 377109 - DNA, 55 bp, Artificial
  Synthetic oligonucleotide
cgtgtgggatgtggactactcagccttcgatgcaaaccactgcagcgatgcgatg

SEQ ID NO: 377110 - DNA, 51 bp, Artificial
  Synthetic oligonucleotide
cgtgtgggggccccccgtgcaacatcggggggacgggcaacaacaccttaa

SEQ ID NO: 377111 - DNA, 51 bp, Artificial
  Synthetic oligonucleotide
cgtgtgggggccccccgtgtaacatcgggggggtcggcaataacaccctga

SEQ ID NO: 377112 - DNA, 57 bp, Artificial
  Synthetic oligonucleotide
cgtgtggggttccgcttcttggtttgcctccaccagtggtcgcgactcgaagataga

SEQ ID NO: 377113 - DNA, 55 bp, Artificial
  Synthetic oligonucleotide
cgtgtggtcaacctgtccaccccgtcatcttggatgactctcgacactgctccgt

SEQ ID NO: 377114 - DNA, 52 bp, Artificial
  Synthetic oligonucleotide
cgtgtggtctcgtgagtcgcgcattgcagctattctcgattctttgttatcc

SEQ ID NO: 377115 - DNA, 60 bp, Artificial
  Synthetic oligonucleotide
cgtgtggtgtcacaacagaccgcatagctggacactactatcacattcgtgagggagtca

SEQ ID NO: 377116 - DNA, 55 bp, Artificial
  Synthetic oligonucleotide
cgtgtggtgtctatcttgcaatgggacagagcagaacaacctgaacaccgactag

SEQ ID NO: 377117 - DNA, 53 bp, Artificial
  Synthetic oligonucleotide
cgtgtggtgtttttattaatgtacaatgagtcaatatatgatgacttcatgca

SEQ ID NO: 377118 - DNA, 57 bp, Artificial
  Synthetic oligonucleotide
cgtgtggttgggaaaattaccggtaaggcaccatctacagaatcttctgacacagtc

SEQ ID NO: 377119 - DNA, 58 bp, Artificial
  Synthetic oligonucleotide
cgtgtgtagtaattggcaagcacggttttgttctaagaataacaactacgctcatatc

SEQ ID NO: 377120 - DNA, 55 bp, Artificial
  Synthetic oligonucleotide
cgtgtgtcacccagacagttgactttagccttgaccccactttcactattgagac

SEQ ID NO: 377121 - DNA, 58 bp, Artificial
  Synthetic oligonucleotide
cgtgtgtcacccagacggtcgacttcagccttgaccctaccttcaccattgagacaac

SEQ ID NO: 377122 - DNA, 60 bp, Artificial
  Synthetic oligonucleotide
cgtgtgtcagtgatgacatcagacttcacagggttagtccagttggaaagaccccgcctg

SEQ ID NO: 377123 - DNA, 55 bp, Artificial
  Synthetic oligonucleotide
cgtgtgtcatgcgcaattgcgagccgttttgcacacgggccccgaccttgtacgc

SEQ ID NO: 377124 - DNA, 60 bp, Artificial
  Synthetic oligonucleotide
cgtgtgtccttctcttttgacaccgctggggggcgatgtgatctttctcacatgccaggg

SEQ ID NO: 377125 - DNA, 57 bp, Artificial
  Synthetic oligonucleotide
cgtgtgtcggtatcttaatgtttaagattgtatcaatgacacttataggacctatgc

SEQ ID NO: 377126 - DNA, 55 bp, Artificial
  Synthetic oligonucleotide
cgtgtgtctaccagtaagcgagagttcgctggtagaccgagttccgtttctgacg

SEQ ID NO: 377127 - DNA, 58 bp, Artificial
  Synthetic oligonucleotide
cgtgtgtgcctatagagtcattcgacccctttcacgagctttcgtcctatttctctag

SEQ ID NO: 377128 - DNA, 55 bp, Artificial
  Synthetic oligonucleotide
cgtgtgtgcgggcactttagtcagtgtccgcggcgttcttttgaacgtgagtgtg

SEQ ID NO: 377129 - DNA, 55 bp, Artificial
  Synthetic oligonucleotide
cgtgtgtgcttgaaaatcaaatcaagcggaaatggagagttctgggcaaggtctg

SEQ ID NO: 377130 - DNA, 60 bp, Artificial
  Synthetic oligonucleotide
cgtgtgtgtaaatgctaaagatcatgaaaagggcctgctcgctcgttgtaacgtatctgg

SEQ ID NO: 377131 - DNA, 55 bp, Artificial
  Synthetic oligonucleotide
cgtgtgttctcgtggccctatcagctcttcggtttggtcacgcacggttgaaccc

SEQ ID NO: 377132 - DNA, 55 bp, Artificial
  Synthetic oligonucleotide
cgtgtgttgaacgcccaccttgatgatcgtctacctaacgtaggcggtcgccagg

SEQ ID NO: 377133 - DNA, 50 bp, Artificial
  Synthetic oligonucleotide
cgtgtgttgcagtacaacagccacctgcgttactccatgaatttgcctgg

SEQ ID NO: 377134 - DNA, 58 bp, Artificial
  Synthetic oligonucleotide
cgtgtgttgtccgttgagaaagatagtgtaatggtcgacctggaaggatcaacaacgc

SEQ ID NO: 377135 - DNA, 54 bp, Artificial
  Synthetic oligonucleotide
cgtgtgttgttcttatagacgaataggtagtgctatgaatcctcgcagtaaaat

SEQ ID NO: 377136 - DNA, 56 bp, Artificial
  Synthetic oligonucleotide
cgtgtgtttccaacacgcagttctttgcagattcgccccatatatgaggtacattg

SEQ ID NO: 377137 - DNA, 55 bp, Artificial
  Synthetic oligonucleotide
cgtgtgtttgcataaagggagagtgttattgggtaatgacggacggtccagcgaa

SEQ ID NO: 377138 - DNA, 54 bp, Artificial
  Synthetic oligonucleotide
cgtgttaactgctgggcagcatttagggatctcgatagagactcatgtaacggc

SEQ ID NO: 377139 - DNA, 55 bp, Artificial
  Synthetic oligonucleotide
cgtgttaataatcatgttgtgtacaatcaccaagaagctgggaagtacgagaatc

SEQ ID NO: 377140 - DNA, 55 bp, Artificial
  Synthetic oligonucleotide
cgtgttaatcatgatagcggcttccgatacttataagggtcgtatatggtggagt

SEQ ID NO: 377141 - DNA, 56 bp, Artificial
  Synthetic oligonucleotide
cgtgttaatggtaggcgtcgtgttagtaacccaaacaggtcaagtgacgatagcaa

SEQ ID NO: 377142 - DNA, 51 bp, Artificial
  Synthetic oligonucleotide
cgtgttacgacatagaaacgcattcggacggacaacgattttcatcggcta

SEQ ID NO: 377143 - DNA, 55 bp, Artificial
  Synthetic oligonucleotide
cgtgttagaccaacttgtgatgctgaatcacctgggtctagaacacttccgccta

SEQ ID NO: 377144 - DNA, 57 bp, Artificial
  Synthetic oligonucleotide
cgtgttagcagatttggaagacgtggaactatccaaactagaagtggggcaactata

SEQ ID NO: 377145 - DNA, 58 bp, Artificial
  Synthetic oligonucleotide
cgtgttaggagaatcacgtcctgtggcaggacccaagtcttagaacttgatcggacgc

SEQ ID NO: 377146 - DNA, 53 bp, Artificial
  Synthetic oligonucleotide
cgtgttaggtgcaggagatgagataccagacccactaagtcctggcgagcgcg

SEQ ID NO: 377147 - DNA, 54 bp, Artificial
  Synthetic oligonucleotide
cgtgttcatgccgatatgaacatagatggttcgactccaaagaccgaaggagtg

SEQ ID NO: 377148 - DNA, 52 bp, Artificial
  Synthetic oligonucleotide
cgtgttcccgtcgtgggacggctgcttatcccttgcttggcgccggtatata

SEQ ID NO: 377149 - DNA, 59 bp, Artificial
  Synthetic oligonucleotide
cgtgttcgtccgcatgtggctagtgcacctaagcgtgttagcgcgccaacctgtgacgc

SEQ ID NO: 377150 - DNA, 60 bp, Artificial
  Synthetic oligonucleotide
cgtgttgaagaacagcctcagctgaactacgatagaatcgtcctccttcaacctggacat

SEQ ID NO: 377151 - DNA, 55 bp, Artificial
  Synthetic oligonucleotide
cgtgttgatccgagcacgaactctagtatcggacaatacacgcgcgagagcttgg

SEQ ID NO: 377152 - DNA, 59 bp, Artificial
  Synthetic oligonucleotide
cgtgttgatttgcaacgtagagtgacgtttgattttatctgtcgtccgtaatatctgga

SEQ ID NO: 377153 - DNA, 57 bp, Artificial
  Synthetic oligonucleotide
cgtgttgcccccaaacgttgaccgtgtcactcctctgacgcttgcctcccgcgtggc

SEQ ID NO: 377154 - DNA, 55 bp, Artificial
  Synthetic oligonucleotide
cgtgttgccgaagtttcattccggcagtacaaaagtgagacgcccattgagaact

SEQ ID NO: 377155 - DNA, 55 bp, Artificial
  Synthetic oligonucleotide
cgtgttgccttacctgtaagcgattgttatgtgtcatacataatgccaattgctg

SEQ ID NO: 377156 - DNA, 55 bp, Artificial
  Synthetic oligonucleotide
cgtgttgccttatcgtcagacgcaattagtattcggctgcgtctgatgcaatggg

SEQ ID NO: 377157 - DNA, 55 bp, Artificial
  Synthetic oligonucleotide
cgtgttgcgtgtgctaacaaccttcgcgtcgtacccaataagggcaaatggtttg

SEQ ID NO: 377158 - DNA, 58 bp, Artificial
  Synthetic oligonucleotide
cgtgttgctagtaacgcaattagcttaactagttgcaggaatgtgtaaaaatggcgta

SEQ ID NO: 377159 - DNA, 55 bp, Artificial
  Synthetic oligonucleotide
cgtgttggaaacataattggtggaatctatcaaacgttatctggtcacacgactg

SEQ ID NO: 377160 - DNA, 59 bp, Artificial
  Synthetic oligonucleotide
cgtgttggaagtcttcggaagcatgcgagtgcttttgacttttttggagcaatgttgga

SEQ ID NO: 377161 - DNA, 58 bp, Artificial
  Synthetic oligonucleotide
cgtgttggagtttcccgcaacacatccggcgcagctggtcagacactctttagaaact

SEQ ID NO: 377162 - DNA, 53 bp, Artificial
  Synthetic oligonucleotide
cgtgttggccaaagggctaccttgcgtacccgtagtggcaaacaaatcggggc

SEQ ID NO: 377163 - DNA, 55 bp, Artificial
  Synthetic oligonucleotide
cgtgttgggagtagccgcactagggatcaaaaacattggaaacaaagaatactta

SEQ ID NO: 377164 - DNA, 54 bp, Artificial
  Synthetic oligonucleotide
cgtgttgggcgaaacctgcggggaatcataaacgggaacgcgcggcatggttct

SEQ ID NO: 377165 - DNA, 55 bp, Artificial
  Synthetic oligonucleotide
cgtgttggtgatgggaagagccatccggtcgtatgccaggtctgaagctgctccc

SEQ ID NO: 377166 - DNA, 55 bp, Artificial
  Synthetic oligonucleotide
cgtgttggttggactgacgaactcgttaaagacttaatcaaatctgagggtagtg

SEQ ID NO: 377167 - DNA, 55 bp, Artificial
  Synthetic oligonucleotide
cgtgttggtttatctttcatgtttgtcgtcttaggtgtatgggttgcttgtcaag

SEQ ID NO: 377168 - DNA, 55 bp, Artificial
  Synthetic oligonucleotide
cgtgttgtcagtgctcttacaattatgatcagaaacaactcagacctacctacag

SEQ ID NO: 377169 - DNA, 52 bp, Artificial
  Synthetic oligonucleotide
cgtgttgtccgatcgcacatcgcgtcagaaggggtcttggcacctgatggta

SEQ ID NO: 377170 - DNA, 60 bp, Artificial
  Synthetic oligonucleotide
cgtgttgtccgcacatttgagtcgtgttgtccgcacatatatatttatttcgttgtacag

SEQ ID NO: 377171 - DNA, 55 bp, Artificial
  Synthetic oligonucleotide
cgtgttgtcgtaacaacaacccaaacagcgcctattccacagccaaacgtaccac

SEQ ID NO: 377172 - DNA, 55 bp, Artificial
  Synthetic oligonucleotide
cgtgttgtgatcgcaatctgaccactgacgtgaggttgggtgcgaaactgtccga

SEQ ID NO: 377173 - DNA, 60 bp, Artificial
  Synthetic oligonucleotide
cgtgttgtggtgacgtatgagggtgataccagtgctggctataaccatgatgtttctaac

SEQ ID NO: 377174 - DNA, 55 bp, Artificial
  Synthetic oligonucleotide
cgtgttgtttactattttcaggatatgtggaagcggttgtgtatgatctatacgc

SEQ ID NO: 377175 - DNA, 56 bp, Artificial
  Synthetic oligonucleotide
cgtgtttaatggtttacatgtgcgggtatgtattggatttgatcctttttacactc

SEQ ID NO: 377176 - DNA, 60 bp, Artificial
  Synthetic oligonucleotide
cgtgtttagagagcctcgatatcgttcgtattgagcccaggcgggaggcgcgagtgcaat

SEQ ID NO: 377177 - DNA, 59 bp, Artificial
  Synthetic oligonucleotide
cgtgtttcatcccgagtctcttggtcataatgccattagtaggtcaagcacccaacgta

SEQ ID NO: 377178 - DNA, 57 bp, Artificial
  Synthetic oligonucleotide
cgtgtttccggggcgactggttacttgtcgctgctgggcctgaggagtggtgttgag

SEQ ID NO: 377179 - DNA, 55 bp, Artificial
  Synthetic oligonucleotide
cgtgtttctgggaagattgcaaacgggggtactccaattgcgaatctaccctcaa

SEQ ID NO: 377180 - DNA, 56 bp, Artificial
  Synthetic oligonucleotide
cgtgtttgagtctcagaactcttcgggacaaacagccgtccaggcaaacgtaatta

SEQ ID NO: 377181 - DNA, 53 bp, Artificial
  Synthetic oligonucleotide
cgtgtttgatggtagcaaagagccagctgtgttatcagataaagacccacgcc

SEQ ID NO: 377182 - DNA, 54 bp, Artificial
  Synthetic oligonucleotide
cgtgtttgcaaacggttttgttgtcgttcgaacgccaaacacgcaattgaatta

SEQ ID NO: 377183 - DNA, 56 bp, Artificial
  Synthetic oligonucleotide
cgtgtttggtggtacactgacaagttggaacaagtccggcctgatttccttgccca

SEQ ID NO: 377184 - DNA, 55 bp, Artificial
  Synthetic oligonucleotide
cgtgtttggtgttgaatggtctctcgtggtgcttggttatcttgaaatagagggg

SEQ ID NO: 377185 - DNA, 56 bp, Artificial
  Synthetic oligonucleotide
cgtgtttgtatcgttgttcgaggcatggtttgtacgtatgttaccgctcattaaac

SEQ ID NO: 377186 - DNA, 55 bp, Artificial
  Synthetic oligonucleotide
cgtgtttgtgaagcgtggtaactttactgctcggtttcctatttcggcagtcagg

SEQ ID NO: 377187 - DNA, 55 bp, Artificial
  Synthetic oligonucleotide
cgtgtttgtgtgattaactatcagcattttcctaatcttggcagtggctgagtac

SEQ ID NO: 377188 - DNA, 54 bp, Artificial
  Synthetic oligonucleotide
cgtgtttgtgttggtatcgatcccctggtaactcgatggacccgagacggggta

SEQ ID NO: 377189 - DNA, 57 bp, Artificial
  Synthetic oligonucleotide
cgtgttttcctggggatcaacagttggaacaactattgaaatggcaattatccaaca

SEQ ID NO: 377190 - DNA, 52 bp, Artificial
  Synthetic oligonucleotide
cgtgttttgccgttccagtattagtaaccgttaacgacaccggcacttttga

SEQ ID NO: 377191 - DNA, 47 bp, Artificial
  Synthetic oligonucleotide
cgttaaaaaaatgttcctggtagttaaacggaacgatttagggtttc

SEQ ID NO: 377192 - DNA, 55 bp, Artificial
  Synthetic oligonucleotide
cgttaaaacgccgaatgtgctgacgtttggtgagtcgactggttgcaccttcaag

SEQ ID NO: 377193 - DNA, 55 bp, Artificial
  Synthetic oligonucleotide
cgttaaaatgatacgggttgatggagatgacaattatgctatagtacgctttcct

SEQ ID NO: 377194 - DNA, 54 bp, Artificial
  Synthetic oligonucleotide
cgttaaaatgtggggagtaggcgcagaacaaattactgtgttaacgtcgggagc

SEQ ID NO: 377195 - DNA, 55 bp, Artificial
  Synthetic oligonucleotide
cgttaaacagtactctgacctaaaatttgagacatgggatccgctagacacgcca

SEQ ID NO: 377196 - DNA, 55 bp, Artificial
  Synthetic oligonucleotide
cgttaaacccctggaagagcacatatcaggcagttttgcgtgctgaaccccatcg

SEQ ID NO: 377197 - DNA, 51 bp, Artificial
  Synthetic oligonucleotide
cgttaaaccgagcccattacccacctgggcaaacaacgcccacgtacggtc

SEQ ID NO: 377198 - DNA, 60 bp, Artificial
  Synthetic oligonucleotide
cgttaaagagggctatttaccgatatggcagctgactggaaatgagagtctgaatgattt

SEQ ID NO: 377199 - DNA, 58 bp, Artificial
  Synthetic oligonucleotide
cgttaaagtaccacatctcacatttggcgtgttaaatatttctgaacaaatgctacca

SEQ ID NO: 377200 - DNA, 60 bp, Artificial
  Synthetic oligonucleotide
cgttaaagtcaaacgcgcaaaggatcgtttatgatgatgaattacagatgcatatactaa

SEQ ID NO: 377201 - DNA, 56 bp, Artificial
  Synthetic oligonucleotide
cgttaaagtcgcgcgatattttgtcagaacgctttgtgtttgtaccgttagatatc

SEQ ID NO: 377202 - DNA, 53 bp, Artificial
  Synthetic oligonucleotide
cgttaaagttcggttgcaaggtattaggagatcgtttagacgtaccactcttc

SEQ ID NO: 377203 - DNA, 52 bp, Artificial
  Synthetic oligonucleotide
cgttaaatataaatctaacgagccatatacccttttaaatattaactggttc

SEQ ID NO: 377204 - DNA, 55 bp, Artificial
  Synthetic oligonucleotide
cgttaaatcctattgctccaggcaattttcagattaatgtaccaccatggtactc

SEQ ID NO: 377205 - DNA, 56 bp, Artificial
  Synthetic oligonucleotide
cgttaaattcaattaaagttactcaatctgacgttgcgaatgtactctcaaaagta

SEQ ID NO: 377206 - DNA, 55 bp, Artificial
  Synthetic oligonucleotide
cgttaaattctctgtcgacgcggagataagagagatctacaatgaggagtgcccc

SEQ ID NO: 377207 - DNA, 55 bp, Artificial
  Synthetic oligonucleotide
cgttaaatttctcagaatcggctgcatctacaggattatctttccaagcaatacc

SEQ ID NO: 377208 - DNA, 58 bp, Artificial
  Synthetic oligonucleotide
cgttaaatttggtcccagtatatcacagtgttctgcactcaagagtggaattttcaag

SEQ ID NO: 377209 - DNA, 55 bp, Artificial
  Synthetic oligonucleotide
cgttaacaacggccattgcgcaaaacgcgcatttagatgatttcgggttatcggc

SEQ ID NO: 377210 - DNA, 60 bp, Artificial
  Synthetic oligonucleotide
cgttaacaagaacacactgcaagcaaggcaacagacagtgtcagcactggaggataaact

SEQ ID NO: 377211 - DNA, 58 bp, Artificial
  Synthetic oligonucleotide
cgttaacatgaaaagacttctgacgtccactaatttgatggatatagaaggagcgaaa

SEQ ID NO: 377212 - DNA, 55 bp, Artificial
  Synthetic oligonucleotide
cgttaacccactgattaataacagcaggaacgttattaaacgatgatagtgggaa

SEQ ID NO: 377213 - DNA, 55 bp, Artificial
  Synthetic oligonucleotide
cgttaacctggtagtcacgaaagataactcggctcgatttgcgtctgaacttagt

SEQ ID NO: 377214 - DNA, 54 bp, Artificial
  Synthetic oligonucleotide
cgttaacgcagagaataacgacgactggaccgtttgccattttaactggttcaa

SEQ ID NO: 377215 - DNA, 54 bp, Artificial
  Synthetic oligonucleotide
cgttaacgctcgtgactttgtgtactgcctaacaagatacaacctagattgtag

SEQ ID NO: 377216 - DNA, 56 bp, Artificial
  Synthetic oligonucleotide
cgttaacggcatgcgaatctaagagtttcgatgatgcatatcgtgcagctatggac

SEQ ID NO: 377217 - DNA, 59 bp, Artificial
  Synthetic oligonucleotide
cgttaactcaacagtcctcggcggcgttgcctgacgacttacagaagatattattcagc

SEQ ID NO: 377218 - DNA, 52 bp, Artificial
  Synthetic oligonucleotide
cgttaagagcggaaacaaagccaaatcgttaagagcggtaccaaacgaagag

SEQ ID NO: 377219 - DNA, 55 bp, Artificial
  Synthetic oligonucleotide
cgttaagcgcacgatagaaagccttattgaacggggcacgattgcttctcctcaa

SEQ ID NO: 377220 - DNA, 60 bp, Artificial
  Synthetic oligonucleotide
cgttaaggaagtaatgacgacagctgccaagctagcacaatcgaagaaatctccgattgg

SEQ ID NO: 377221 - DNA, 55 bp, Artificial
  Synthetic oligonucleotide
cgttaaggtagggaaccctcgagatgacttaaggatggtcactgtggctgactac

SEQ ID NO: 377222 - DNA, 51 bp, Artificial
  Synthetic oligonucleotide
cgttaagtacactaaacaacgttaggctagacgatgagtatttagacatcc

SEQ ID NO: 377223 - DNA, 60 bp, Artificial
  Synthetic oligonucleotide
cgttaagtagtgtgcgtttagattgtcgcagctatgaagtccacatatctgttattcgcg

SEQ ID NO: 377224 - DNA, 57 bp, Artificial
  Synthetic oligonucleotide
cgttaagtcgttgtattttgtgggcaagatttggatggatgagaacatcaaggttaa

SEQ ID NO: 377225 - DNA, 50 bp, Artificial
  Synthetic oligonucleotide
cgttaataactagatgagcaccttcacctgagaaaggaccactctgagca

SEQ ID NO: 377226 - DNA, 60 bp, Artificial
  Synthetic oligonucleotide
cgttaataagccagatagggtctttgagagagctgggttagatccggagagacacatcaa

SEQ ID NO: 377227 - DNA, 57 bp, Artificial
  Synthetic oligonucleotide
cgttaatagagaaacgaccatccctgggcatatttgcagtcgtttttgctgtatacc

SEQ ID NO: 377228 - DNA, 58 bp, Artificial
  Synthetic oligonucleotide
cgttaatatcttacgaatggttacttcgctttctcttggtaatgctttcatatctgaa

SEQ ID NO: 377229 - DNA, 53 bp, Artificial
  Synthetic oligonucleotide
cgttaatgcaaacccccgagcgctccataagctcaaaagctcggctagcgggg

SEQ ID NO: 377230 - DNA, 59 bp, Artificial
  Synthetic oligonucleotide
cgttaatgcagttatctagacaacaatttccgactatgccagttgattataaaagatca

SEQ ID NO: 377231 - DNA, 55 bp, Artificial
  Synthetic oligonucleotide
cgttaatgcgtctgcattaatccaggtcgcttccggtacgatacgcttacccaac

SEQ ID NO: 377232 - DNA, 56 bp, Artificial
  Synthetic oligonucleotide
cgttaatggaggttcctgacgacagaacaattatttgggcgtatggcccagatgga

SEQ ID NO: 377233 - DNA, 53 bp, Artificial
  Synthetic oligonucleotide
cgttaatgggatataagcacgtccaaccgtaccagctttcatgtttttagcaa

SEQ ID NO: 377234 - DNA, 59 bp, Artificial
  Synthetic oligonucleotide
cgttaattatcaatggctatcgcaggaaacatcatggtaggtggccaaatgtggatagt

SEQ ID NO: 377235 - DNA, 60 bp, Artificial
  Synthetic oligonucleotide
cgttaattggcgagaggtgcgggttggtattatagagcactccgctactatactgtcgca

SEQ ID NO: 377236 - DNA, 53 bp, Artificial
  Synthetic oligonucleotide
cgttaattttcgaccactcagagtgttcagctcggaatttagtgtctaatcca

SEQ ID NO: 377237 - DNA, 55 bp, Artificial
  Synthetic oligonucleotide
cgttacaagagatcatgcagaaggttagacaagtacaggcggattacctagcagc

SEQ ID NO: 377238 - DNA, 58 bp, Artificial
  Synthetic oligonucleotide
cgttacaagattttaatcatgattattcaaaatcttggacatttggcgacaaatggga

SEQ ID NO: 377239 - DNA, 60 bp, Artificial
  Synthetic oligonucleotide
cgttacaagctacgattcagacaatggctggatcaagtagcaaacagacgaactctacgc

SEQ ID NO: 377240 - DNA, 58 bp, Artificial
  Synthetic oligonucleotide
cgttacaagttcttaactggccataatccacacgagaagcatctaaacgagtatacgc

SEQ ID NO: 377241 - DNA, 59 bp, Artificial
  Synthetic oligonucleotide
cgttacagcaacgggtaacggtctgtatcatactaatccagggtatgagatgttggcac

SEQ ID NO: 377242 - DNA, 50 bp, Artificial
  Synthetic oligonucleotide
cgttacaggcggtaatgaacttgagcacctatgcttttctgcctcgggta

SEQ ID NO: 377243 - DNA, 57 bp, Artificial
  Synthetic oligonucleotide
cgttacagttagacatgtcagaattagcagatttgatacttaatgagtggttatgta

SEQ ID NO: 377244 - DNA, 55 bp, Artificial
  Synthetic oligonucleotide
cgttacatataccaaagatcgctataagaaactacagtctgagttagactcgtct

SEQ ID NO: 377245 - DNA, 54 bp, Artificial
  Synthetic oligonucleotide
cgttacatcatttgttgacgtcgttaacaaggtttttgagctctgtactgatta

SEQ ID NO: 377246 - DNA, 60 bp, Artificial
  Synthetic oligonucleotide
cgttacatgctattgggaatgtgattacgagcctgtgctgcttgttcgtaactgagtctt

SEQ ID NO: 377247 - DNA, 56 bp, Artificial
  Synthetic oligonucleotide
cgttaccacatccaaataagatgggatctccggatcacatcgcctgttaatatcat

SEQ ID NO: 377248 - DNA, 51 bp, Artificial
  Synthetic oligonucleotide
cgttaccacatcgggaacctacactactatagtttccggtactgttactac

SEQ ID NO: 377249 - DNA, 56 bp, Artificial
  Synthetic oligonucleotide
cgttaccagcagtggtgcttctgctctcacatttacccttaactccactggtgtgc

SEQ ID NO: 377250 - DNA, 53 bp, Artificial
  Synthetic oligonucleotide
cgttaccaggtacgacttagaagacctcttcaaaccttccatcaccccagaaa

SEQ ID NO: 377251 - DNA, 55 bp, Artificial
  Synthetic oligonucleotide
cgttacccagatctactgtcatgctcaatggatcttaccgtgatatccgaattct

SEQ ID NO: 377252 - DNA, 55 bp, Artificial
  Synthetic oligonucleotide
cgttacccgactaactacttcgagaaacccagtagcactatgaaagttgcgaggc

SEQ ID NO: 377253 - DNA, 54 bp, Artificial
  Synthetic oligonucleotide
cgttacccgtggtaatgggctgacccatcgtgttggtaagaggttttgtatcaa

SEQ ID NO: 377254 - DNA, 55 bp, Artificial
  Synthetic oligonucleotide
cgttaccctgcgcagtcagcaccatgttgtttgggaggtgtcttatgatacatga

SEQ ID NO: 377255 - DNA, 55 bp, Artificial
  Synthetic oligonucleotide
cgttaccgctcccgacctggtgcctctgtttgagaacacacacgttagttacgcc

SEQ ID NO: 377256 - DNA, 54 bp, Artificial
  Synthetic oligonucleotide
cgttaccggagccgtttctttgtaggctttatctggtgcatattactggtttta

SEQ ID NO: 377257 - DNA, 54 bp, Artificial
  Synthetic oligonucleotide
cgttaccgtgaagagcccgaacgtggtatggtacggggacttggccagcagtcc

SEQ ID NO: 377258 - DNA, 60 bp, Artificial
  Synthetic oligonucleotide
cgttaccgttgctctatcatatctagtgtattttgaacggctgagatcaaaatatgaatt

SEQ ID NO: 377259 - DNA, 55 bp, Artificial
  Synthetic oligonucleotide
cgttacctattcttagaacatacaggcattgatccacgctctgctcatgtatggg

SEQ ID NO: 377260 - DNA, 55 bp, Artificial
  Synthetic oligonucleotide
cgttacctgccatgacatcaatcattggagggacctttggacccggtgcagccag

SEQ ID NO: 377261 - DNA, 56 bp, Artificial
  Synthetic oligonucleotide
cgttaccttgtccatgccaactccaccagtcgccatgtactccccgtggtcccgaa

SEQ ID NO: 377262 - DNA, 53 bp, Artificial
  Synthetic oligonucleotide
cgttacgaaccatgtttacgtatatctttagctttccgaaaacagaattcaaa

SEQ ID NO: 377263 - DNA, 55 bp, Artificial
  Synthetic oligonucleotide
cgttacgactaatacgtgtactattaggaattgcaagaaattaggaccaagagag

SEQ ID NO: 377264 - DNA, 60 bp, Artificial
  Synthetic oligonucleotide
cgttacgagtgaaacggatgatgataacaggccagccagctggcatataatcaatcgctg

SEQ ID NO: 377265 - DNA, 55 bp, Artificial
  Synthetic oligonucleotide
cgttacgatactatagtgtctatgctgatgatccagatgacatgattgccactgg

SEQ ID NO: 377266 - DNA, 54 bp, Artificial
  Synthetic oligonucleotide
cgttacgattgttaactaaagcgtgtggcatattagcagggtctaaacccttaa

SEQ ID NO: 377267 - DNA, 54 bp, Artificial
  Synthetic oligonucleotide
cgttacgcgaacgtaatggtacagaggcctttagacgacaaatcttacgtcaag

SEQ ID NO: 377268 - DNA, 52 bp, Artificial
  Synthetic oligonucleotide
cgttacgcgtttgaatttcccgcccgcgaaaagtactataaatctcgcggga

SEQ ID NO: 377269 - DNA, 50 bp, Artificial
  Synthetic oligonucleotide
cgttacgcgtttgaatttcccgctgagcggaagtactataaagcgcgcgg

SEQ ID NO: 377270 - DNA, 55 bp, Artificial
  Synthetic oligonucleotide
cgttacggatcaatacgtgcgtgttcttcataaactctgacacagcggtcaggtt

SEQ ID NO: 377271 - DNA, 56 bp, Artificial
  Synthetic oligonucleotide
cgttacggctcgcccacggtgccagcttctcaccccccaccctgcgccaagtgccc

SEQ ID NO: 377272 - DNA, 55 bp, Artificial
  Synthetic oligonucleotide
cgttacgtattgagtctgcagtttgtgaatcagtgcttgcggatgcaactgaaac

SEQ ID NO: 377273 - DNA, 60 bp, Artificial
  Synthetic oligonucleotide
cgttactatcgggtaacagcaagcatgtccggaggattaatcagctaatacgcgagagca

SEQ ID NO: 377274 - DNA, 58 bp, Artificial
  Synthetic oligonucleotide
cgttactcaagttgttaacggtgtcgagctgcctgtttccgcatggaaggcttatgcc

SEQ ID NO: 377275 - DNA, 50 bp, Artificial
  Synthetic oligonucleotide
cgttactcgcggtaacggtattacccaccgtgtcgggaagcggttttgtg

SEQ ID NO: 377276 - DNA, 56 bp, Artificial
  Synthetic oligonucleotide
cgttactggaacccctgaagctaatgtccaaatcggaggagtttcgagtatgcgta

SEQ ID NO: 377277 - DNA, 55 bp, Artificial
  Synthetic oligonucleotide
cgttactgttacacatgctcaagacatactggagaagacacacaacgggaagctc

SEQ ID NO: 377278 - DNA, 55 bp, Artificial
  Synthetic oligonucleotide
cgttacttcaaggggtcaatcctacctgaagtcatgattgagtcaatctgtacaa

SEQ ID NO: 377279 - DNA, 50 bp, Artificial
  Synthetic oligonucleotide
cgttacttgcaaggctcagttcttatccggaatgtcctccctgaattcga

SEQ ID NO: 377280 - DNA, 54 bp, Artificial
  Synthetic oligonucleotide
cgttactttgaggagaccgttaatggtcaacttgcgttgcgtaaagatacaccc

SEQ ID NO: 377281 - DNA, 60 bp, Artificial
  Synthetic oligonucleotide
cgttagaactgccagcatctgatctacggctaattttgtgctcttgctgttcacactcat

SEQ ID NO: 377282 - DNA, 51 bp, Artificial
  Synthetic oligonucleotide
cgttagaaggatttgtcgttaattaatgtcggacaaagggtattgaccagt

SEQ ID NO: 377283 - DNA, 55 bp, Artificial
  Synthetic oligonucleotide
cgttagaataccagagctcatcgggtatgcacggcatgtagactatacattaggg

SEQ ID NO: 377284 - DNA, 59 bp, Artificial
  Synthetic oligonucleotide
cgttagacccaaacatcatggacgtagccgccgccacctgtatgctgttgtttagacca

SEQ ID NO: 377285 - DNA, 58 bp, Artificial
  Synthetic oligonucleotide
cgttagagatgcatcccgtgagggagaaggatgcctggcttagtacgttcgtgaaggc

SEQ ID NO: 377286 - DNA, 53 bp, Artificial
  Synthetic oligonucleotide
cgttagagtatagtgttccaaaattgacagccctttacgcaaagggtgaccgt

SEQ ID NO: 377287 - DNA, 57 bp, Artificial
  Synthetic oligonucleotide
cgttagagtatgttttgtcgtttagatctaaatggccgcaaagataattatgaggac

SEQ ID NO: 377288 - DNA, 60 bp, Artificial
  Synthetic oligonucleotide
cgttagatccgtcaatggtcgctcagtgtttactgaaggacgcattgatgcaatcaaagt

SEQ ID NO: 377289 - DNA, 55 bp, Artificial
  Synthetic oligonucleotide
cgttagatgagaagactaaagcgttaaagcagttagcaatgagcatgaatcacgc

SEQ ID NO: 377290 - DNA, 60 bp, Artificial
  Synthetic oligonucleotide
cgttagcaaaagctcatcataacagagaaacatctccgactacgttgcatgtcatttcag

SEQ ID NO: 377291 - DNA, 55 bp, Artificial
  Synthetic oligonucleotide
cgttagcaacgatcgatttacccatcgcatcgtaatacttcttcttaccatggtg

SEQ ID NO: 377292 - DNA, 55 bp, Artificial
  Synthetic oligonucleotide
cgttagcagctacgttaggtccaccgccccctaggagggacatagggttgagaca

SEQ ID NO: 377293 - DNA, 55 bp, Artificial
  Synthetic oligonucleotide
cgttagcatgatttcccaaggccagcgaatggaagaagagattccgcaagtgttc

SEQ ID NO: 377294 - DNA, 60 bp, Artificial
  Synthetic oligonucleotide
cgttagccgcgaatttgaatgatgtagtatgcagtggaggttcttacagttttgcgttgc

SEQ ID NO: 377295 - DNA, 55 bp, Artificial
  Synthetic oligonucleotide
cgttagcgatcgttttggtcagtattcatttgtcaatgaaggcatgcgagagacc

SEQ ID NO: 377296 - DNA, 60 bp, Artificial
  Synthetic oligonucleotide
cgttagcgatgccagagggctacccccctcatggtttcccatgaagtgtggcagcgtagc

SEQ ID NO: 377297 - DNA, 50 bp, Artificial
  Synthetic oligonucleotide
cgttagcgccccctcgcaacgtgcgcgtaactggctgctaccagtgcggt

SEQ ID NO: 377298 - DNA, 57 bp, Artificial
  Synthetic oligonucleotide
cgttagcggatgttgcggggaatcaatcacgattttcccaccaggggcatgggtcga

SEQ ID NO: 377299 - DNA, 55 bp, Artificial
  Synthetic oligonucleotide
cgttagcggcctagcgcggtatctaggattcgtgtcaacaagtagtgagagtagc

SEQ ID NO: 377300 - DNA, 58 bp, Artificial
  Synthetic oligonucleotide
cgttagcgggatacagtatctcgctggcctttccacattgcctgggaatccagcagtt

SEQ ID NO: 377301 - DNA, 52 bp, Artificial
  Synthetic oligonucleotide
cgttagcggggggactgccgctcaggccacgagtggtttcgtctgactcttc

SEQ ID NO: 377302 - DNA, 59 bp, Artificial
  Synthetic oligonucleotide
cgttagctcagagacttagtgcgcacaaagtttatttgtcccaattccgagaaatgtca

SEQ ID NO: 377303 - DNA, 55 bp, Artificial
  Synthetic oligonucleotide
cgttagctgtacggtctaacatatctactaagccaagacccatacgaccagtctg

SEQ ID NO: 377304 - DNA, 60 bp, Artificial
  Synthetic oligonucleotide
cgttagcttcaggaggcgtatatcattttgcgatgggattcgctccaggccgattatggt

SEQ ID NO: 377305 - DNA, 57 bp, Artificial
  Synthetic oligonucleotide
cgttaggaagagtccatattcccttgaattgaacccaattacaaattgacatagatg

SEQ ID NO: 377306 - DNA, 51 bp, Artificial
  Synthetic oligonucleotide
cgttaggcaggtggaggtgttgctacctctatcgtcaccatttttcgaacg

SEQ ID NO: 377307 - DNA, 56 bp, Artificial
  Synthetic oligonucleotide
cgttaggcatagtcatccaatatcaaggcctgaaaaagcgaacgtaacctttctaa

SEQ ID NO: 377308 - DNA, 57 bp, Artificial
  Synthetic oligonucleotide
cgttaggccagttttctggtcgtgttcaacagacctatagacattctgtgccgcgtt

SEQ ID NO: 377309 - DNA, 55 bp, Artificial
  Synthetic oligonucleotide
cgttaggctgcaacaggaaaatcttgctctcaaggacacgattgcggatattcag

SEQ ID NO: 377310 - DNA, 58 bp, Artificial
  Synthetic oligonucleotide
cgttagtaagtattatttctcgcgtagacacgttagcggaatagtgtctatatgtgtc

SEQ ID NO: 377311 - DNA, 60 bp, Artificial
  Synthetic oligonucleotide
cgttagtcatagagccctggattcaaggaaagatcagtggtgtaccgccaccatcttcag

SEQ ID NO: 377312 - DNA, 58 bp, Artificial
  Synthetic oligonucleotide
cgttagtcctgtagcaatcggatttgacatgaaaaggttcgaccaacatgtatcctcc

SEQ ID NO: 377313 - DNA, 55 bp, Artificial
  Synthetic oligonucleotide
cgttagtgacctgaaacaatatgatagtgatgaaccggagcccaaatcgctagca

SEQ ID NO: 377314 - DNA, 58 bp, Artificial
  Synthetic oligonucleotide
cgttagtggtaacccacgagcggagagctcttacggaggagctctccgtcgatggcga

SEQ ID NO: 377315 - DNA, 55 bp, Artificial
  Synthetic oligonucleotide
cgttagtggtgccgtggatctcctctggtcactttagaggtgttactgccgacga

SEQ ID NO: 377316 - DNA, 55 bp, Artificial
  Synthetic oligonucleotide
cgttagtgtcttcactacatgctagatcgcgactaagtcgatctaggtggaagta

SEQ ID NO: 377317 - DNA, 55 bp, Artificial
  Synthetic oligonucleotide
cgttagttatgtgtgggtttcgctaagtcgaaccacgtgtgatgtgtattcgcag

SEQ ID NO: 377318 - DNA, 57 bp, Artificial
  Synthetic oligonucleotide
cgttataaatctatcgttacctatatagtatacctgtttactgtagttgatactgac

SEQ ID NO: 377319 - DNA, 60 bp, Artificial
  Synthetic oligonucleotide
cgttataatacaagtgataactcaagaggaatgaattatgagactgcaatgtttaacaag

SEQ ID NO: 377320 - DNA, 55 bp, Artificial
  Synthetic oligonucleotide
cgttataccaagcgtcgttgctgtagactttgggacttaggtctagatggccaca

SEQ ID NO: 377321 - DNA, 55 bp, Artificial
  Synthetic oligonucleotide
cgttatactactgatatgtacaacaccctacggagttcgatcctcgatactgccc

SEQ ID NO: 377322 - DNA, 55 bp, Artificial
  Synthetic oligonucleotide
cgttatactcaacctcgttagagtacactgaagaattgaaatccaggtgtccact

SEQ ID NO: 377323 - DNA, 55 bp, Artificial
  Synthetic oligonucleotide
cgttatactccacttcgttcgaatagactcttgggttgaagtccagatgtccact

SEQ ID NO: 377324 - DNA, 55 bp, Artificial
  Synthetic oligonucleotide
cgttatagactcatttggatctctcaccacaggttaccatgtgttaaaggctggg

SEQ ID NO: 377325 - DNA, 55 bp, Artificial
  Synthetic oligonucleotide
cgttatagattccttcggatctttgacagttgggtatcacgtcttgaaagctggt

SEQ ID NO: 377326 - DNA, 54 bp, Artificial
  Synthetic oligonucleotide
cgttatagctgtccctaaggtctctgcaaatcagtatagatgcttccgcttaca

SEQ ID NO: 377327 - DNA, 60 bp, Artificial
  Synthetic oligonucleotide
cgttatagttgcattttctcgcgcatatgcgtgctcacactctttaacgcgattcgaata

SEQ ID NO: 377328 - DNA, 58 bp, Artificial
  Synthetic oligonucleotide
cgttatatcgtttagtagtggacaaaaatgatattacagacgtatcaattgcaatgca

SEQ ID NO: 377329 - DNA, 55 bp, Artificial
  Synthetic oligonucleotide
cgttatatgattattatggggccgagattgagggattcaaaaaagggacaaacgc

SEQ ID NO: 377330 - DNA, 55 bp, Artificial
  Synthetic oligonucleotide
cgttatatgtctcaattcttacgacgtattacgcctaaagcttctcaaatgggag

SEQ ID NO: 377331 - DNA, 55 bp, Artificial
  Synthetic oligonucleotide
cgttatcactcaaacaggttgattcagagtgctgttcttatttgcccattgtctg

SEQ ID NO: 377332 - DNA, 55 bp, Artificial
  Synthetic oligonucleotide
cgttatcagttagcgaccggagttgtctatcgcgacatatcgtgactatcgcgac

SEQ ID NO: 377333 - DNA, 55 bp, Artificial
  Synthetic oligonucleotide
cgttatcatatagtaattggaacaataacgacgtcccagatctgtatgtcctcat

SEQ ID NO: 377334 - DNA, 55 bp, Artificial
  Synthetic oligonucleotide
cgttatcggtctgttcatgcaccgctctgcggtaggtactgttaagctgcgtgac

SEQ ID NO: 377335 - DNA, 55 bp, Artificial
  Synthetic oligonucleotide
cgttatcgtctgcttgggaccgttaaactgtacgtaacgacggatgaagctgagg

SEQ ID NO: 377336 - DNA, 57 bp, Artificial
  Synthetic oligonucleotide
cgttatctcttttgatatggcagtggaatttctgcaagataaagcgttaaagttctg

SEQ ID NO: 377337 - DNA, 60 bp, Artificial
  Synthetic oligonucleotide
cgttatgacacttctgatagaatgaagttacatagggcctctgggctatgtcctggttac

SEQ ID NO: 377338 - DNA, 57 bp, Artificial
  Synthetic oligonucleotide
cgttatgactcctgaaattttctttgattccttaatgatggaaagttttcacgatga

SEQ ID NO: 377339 - DNA, 50 bp, Artificial
  Synthetic oligonucleotide
cgttatgatgtcgtatttggtgttgaatggcctctcgtggtgcttgatta

SEQ ID NO: 377340 - DNA, 58 bp, Artificial
  Synthetic oligonucleotide
cgttatgccatatgtgagaaattgctttatagggtagaaaatggcataccttctgggt

SEQ ID NO: 377341 - DNA, 55 bp, Artificial
  Synthetic oligonucleotide
cgttatgcttttgatttctacgagatcacatcacgtacaactgcccgtgctaagg

SEQ ID NO: 377342 - DNA, 58 bp, Artificial
  Synthetic oligonucleotide
cgttatggaaatgaacccagcgctaaaacagtatggttcgtttgctggcgctagtgaa

SEQ ID NO: 377343 - DNA, 60 bp, Artificial
  Synthetic oligonucleotide
cgttatggctacgtgaaagccaggccactgctggttttgacgtcacctatactctgccag

SEQ ID NO: 377344 - DNA, 55 bp, Artificial
  Synthetic oligonucleotide
cgttatggggcataataatgccatttcgagcttcatcacgtacccctccctcggg

SEQ ID NO: 377345 - DNA, 59 bp, Artificial
  Synthetic oligonucleotide
cgttatggtaactgacgatgaacgttctaggatcgccagcttttataatgtcgagagcc

SEQ ID NO: 377346 - DNA, 55 bp, Artificial
  Synthetic oligonucleotide
cgttatggtcttatgcctctcttctatgacatcaaagacgtcatgttagactggc

SEQ ID NO: 377347 - DNA, 60 bp, Artificial
  Synthetic oligonucleotide
cgttatgtttatcctatgtgcgagcatggtatcaaggcctcatactgtatggcccttaat

SEQ ID NO: 377348 - DNA, 57 bp, Artificial
  Synthetic oligonucleotide
cgttattcacagctcccgccgctctacgataccacaaagatctatctgatcgataac

SEQ ID NO: 377349 - DNA, 55 bp, Artificial
  Synthetic oligonucleotide
cgttattggtagctaccgatcctgactctaaagctatagaacgatgtaacgaacg

SEQ ID NO: 377350 - DNA, 55 bp, Artificial
  Synthetic oligonucleotide
cgttatttaagcgcaatagtgcaccaataggtatgcgtagcccagaagaaacccc

SEQ ID NO: 377351 - DNA, 55 bp, Artificial
  Synthetic oligonucleotide
cgttcaaaatgtctgttacagtcaagagagtcattgatgattcactcatcacccc

SEQ ID NO: 377352 - DNA, 55 bp, Artificial
  Synthetic oligonucleotide
cgttcaaaccagttaagaatccagaaccaaaaggttatgtgctgagcgtatctgg

SEQ ID NO: 377353 - DNA, 54 bp, Artificial
  Synthetic oligonucleotide
cgttcaacccagacccgttgttttggactggtgaccgttgacaaatagtatgct

SEQ ID NO: 377354 - DNA, 54 bp, Artificial
  Synthetic oligonucleotide
cgttcaactccggttgaacccgtcgcctaagttcgactccactgtgtgggtgtc

SEQ ID NO: 377355 - DNA, 57 bp, Artificial
  Synthetic oligonucleotide
cgttcaagagagattagaatcgttatttaaattgtcccctctatgtggaacacctca

SEQ ID NO: 377356 - DNA, 55 bp, Artificial
  Synthetic oligonucleotide
cgttcaagatggacacaatcgttgcgcgagcgctcactgtaatgagatcatgtgt

SEQ ID NO: 377357 - DNA, 60 bp, Artificial
  Synthetic oligonucleotide
cgttcaagcccctcccgtcgcgccagtgtctgttcctggtgcgtccgctgtcactgctag

SEQ ID NO: 377358 - DNA, 56 bp, Artificial
  Synthetic oligonucleotide
cgttcaagcgtcgttcggtcaccatggacaaacacatggtccgcaccattcaatcc

SEQ ID NO: 377359 - DNA, 59 bp, Artificial
  Synthetic oligonucleotide
cgttcaaggacgttgaccgtgagtcatgtaatggcgtctacgctaacattagcaagaac

SEQ ID NO: 377360 - DNA, 55 bp, Artificial
  Synthetic oligonucleotide
cgttcaagtctaagggtaacatctcattgattagagctaacggttcattcttagg

SEQ ID NO: 377361 - DNA, 57 bp, Artificial
  Synthetic oligonucleotide
cgttcaagtctcgtgacgcgggttttaaattgctccacggtaatctgaaatatgatc

SEQ ID NO: 377362 - DNA, 60 bp, Artificial
  Synthetic oligonucleotide
cgttcacaacccaacagcagcgaacgcaatgattcagattcaagtcgtgttctatgtctc

SEQ ID NO: 377363 - DNA, 60 bp, Artificial
  Synthetic oligonucleotide
cgttcacaatgcatcagtcacactagatagggtatttagtgttagcacgtccagggggta

SEQ ID NO: 377364 - DNA, 55 bp, Artificial
  Synthetic oligonucleotide
cgttcacaatgcgtcgcaaggatttggaccatcccaactatcgcagcatgccgtg

SEQ ID NO: 377365 - DNA, 55 bp, Artificial
  Synthetic oligonucleotide
cgttcacagccggcaagttggtcttcgccgctgtgccacctcacttcccggttga

SEQ ID NO: 377366 - DNA, 58 bp, Artificial
  Synthetic oligonucleotide
cgttcacattgaataggtcgcaacctcagcatgataatctgatgggtacaatgtggtt

SEQ ID NO: 377367 - DNA, 55 bp, Artificial
  Synthetic oligonucleotide
cgttcacattgtcagccgggagtaacgcccaacgtgcaacgggtggttcttcgta

SEQ ID NO: 377368 - DNA, 58 bp, Artificial
  Synthetic oligonucleotide
cgttcaccaatgccatccttcttactcggcgccctaaaacagtcaggcggtcagttga

SEQ ID NO: 377369 - DNA, 50 bp, Artificial
  Synthetic oligonucleotide
cgttcaccaatgtctctagccactttggcactaatagagatcattcgctt

SEQ ID NO: 377370 - DNA, 60 bp, Artificial
  Synthetic oligonucleotide
cgttcacccacctacagctggactcacagcaccgcgtggccattttagctgaactgtgcg

SEQ ID NO: 377371 - DNA, 55 bp, Artificial
  Synthetic oligonucleotide
cgttcacgtgcatgcctacggaaaacgtctacgcaaacgcttcatggcgcataga

SEQ ID NO: 377372 - DNA, 55 bp, Artificial
  Synthetic oligonucleotide
cgttcactgcgtcattgcgcgctattttgaacggtcgcctgtgacttatgtttca

SEQ ID NO: 377373 - DNA, 55 bp, Artificial
  Synthetic oligonucleotide
cgttcactgggcttgagcgggaagtccccgtattcatcaaatgcagtcggccacg

SEQ ID NO: 377374 - DNA, 55 bp, Artificial
  Synthetic oligonucleotide
cgttcacttctgaggaacagtccagaatctcagcccaagctgtgttaactctagc

SEQ ID NO: 377375 - DNA, 58 bp, Artificial
  Synthetic oligonucleotide
cgttcagaacagatagttagtcggtataattactcacgtaagcacatttgtggaattg

SEQ ID NO: 377376 - DNA, 60 bp, Artificial
  Synthetic oligonucleotide
cgttcagaggattgtcaactgatagaaaaatggatgaagtctcacatgttggaatttaat

SEQ ID NO: 377377 - DNA, 55 bp, Artificial
  Synthetic oligonucleotide
cgttcagagtagtgccgttccattctgtaccagacaggctagggttcgctagaac

SEQ ID NO: 377378 - DNA, 55 bp, Artificial
  Synthetic oligonucleotide
cgttcagccgataggaagagtgcatggagtaaatcccctccatatattgggtgcg

SEQ ID NO: 377379 - DNA, 60 bp, Artificial
  Synthetic oligonucleotide
cgttcagctcccccggaatttacatacaatccagctcagaatcggatcgctctaacagac

SEQ ID NO: 377380 - DNA, 55 bp, Artificial
  Synthetic oligonucleotide
cgttcagggttctggatcacatctgagattgaaatatgctagcgtgagcgggcta

SEQ ID NO: 377381 - DNA, 55 bp, Artificial
  Synthetic oligonucleotide
cgttcagtaatccgtcgttaatggtgaaagagtctgtgcaagatacggtaacgat

SEQ ID NO: 377382 - DNA, 60 bp, Artificial
  Synthetic oligonucleotide
cgttcagtacttcgcacactactgcaggaagtacgctccactatatgctgctgaggctaa

SEQ ID NO: 377383 - DNA, 55 bp, Artificial
  Synthetic oligonucleotide
cgttcagtccagaatatacggagcactaagttaccgacttgactgtctaacagca

SEQ ID NO: 377384 - DNA, 60 bp, Artificial
  Synthetic oligonucleotide
cgttcagtgggatcatcagtttcagcgtggacagatgtctcaacacaagttactgacatt

SEQ ID NO: 377385 - DNA, 56 bp, Artificial
  Synthetic oligonucleotide
cgttcagttgttggtgagggagcgtatgacggtaacgttaagcgcaccactgcccg

SEQ ID NO: 377386 - DNA, 55 bp, Artificial
  Synthetic oligonucleotide
cgttcagtttacttagacctcggagttcactcgaacgaagagattatggttcgtg

SEQ ID NO: 377387 - DNA, 53 bp, Artificial
  Synthetic oligonucleotide
cgttcataacactcaaacctttaaaatagatcactttattatctttactggtt

SEQ ID NO: 377388 - DNA, 57 bp, Artificial
  Synthetic oligonucleotide
cgttcataacagagtggcgctccttcacgacacccttcactttctcagcccaaggca

SEQ ID NO: 377389 - DNA, 60 bp, Artificial
  Synthetic oligonucleotide
cgttcataagtcatagggctctgaacgaatggtcatactacagtgtcaacattaatagaa

SEQ ID NO: 377390 - DNA, 55 bp, Artificial
  Synthetic oligonucleotide
cgttcatcactactgctcggagcacgtacgttggtggttgcagtgttatttggaa

SEQ ID NO: 377391 - DNA, 58 bp, Artificial
  Synthetic oligonucleotide
cgttcatcagatttctttggcgagactctgtgtcgcttaaattctccgcgggtaataa

SEQ ID NO: 377392 - DNA, 60 bp, Artificial
  Synthetic oligonucleotide
cgttcatcagtatgttccctgccatgggagatggatttgatcatttaactcctgatcttg

SEQ ID NO: 377393 - DNA, 60 bp, Artificial
  Synthetic oligonucleotide
cgttcatcattcaaaaagctattatattttccagtcaatgtcgtataagagaagcttgaa

SEQ ID NO: 377394 - DNA, 55 bp, Artificial
  Synthetic oligonucleotide
cgttcatccgtggacgttatgtgtaaggacagagtgtcaatcacacctccaccgt

SEQ ID NO: 377395 - DNA, 57 bp, Artificial
  Synthetic oligonucleotide
cgttcatcgtcctagaccgcgagtggtatggatttacggtccggctggatctggaaa

SEQ ID NO: 377396 - DNA, 60 bp, Artificial
  Synthetic oligonucleotide
cgttcatgaggctcaaggtgtgtcagtagatcacgctgttttggtgagacttaaatccac

SEQ ID NO: 377397 - DNA, 55 bp, Artificial
  Synthetic oligonucleotide
cgttcatgcaattggacctgacagaggaagaggtcagacctcatacaaccagctg

SEQ ID NO: 377398 - DNA, 56 bp, Artificial
  Synthetic oligonucleotide
cgttcatggaattcaggacatgaatgggtcacggattttaaagggaagactgtttg

SEQ ID NO: 377399 - DNA, 59 bp, Artificial
  Synthetic oligonucleotide
cgttcatggtcagagaccaagaccgcaacagttgggacataactataggctacaaattc

SEQ ID NO: 377400 - DNA, 57 bp, Artificial
  Synthetic oligonucleotide
cgttcatgttaattggtcattacgtccatatggtagttacgacgtgatagaaggagt

SEQ ID NO: 377401 - DNA, 58 bp, Artificial
  Synthetic oligonucleotide
cgttcattaagcagttccgccggtggatgcgtgctgaaacgaggtagcgtccgtgccc

SEQ ID NO: 377402 - DNA, 60 bp, Artificial
  Synthetic oligonucleotide
cgttcattataataagaataatcctagagcttataatggatcctccagcaataatacatt

SEQ ID NO: 377403 - DNA, 55 bp, Artificial
  Synthetic oligonucleotide
cgttccaatccttggtgcctaaagctgccagaggtcaagacagtggatttgtgag

SEQ ID NO: 377404 - DNA, 55 bp, Artificial
  Synthetic oligonucleotide
cgttccacatccgagggccgaacatcgagtccatggggttcgtaacgtacgactc

SEQ ID NO: 377405 - DNA, 55 bp, Artificial
  Synthetic oligonucleotide
cgttccacgcatcgtttgttttctcgttcgtaccacagatagcgcagagtccggt

SEQ ID NO: 377406 - DNA, 60 bp, Artificial
  Synthetic oligonucleotide
cgttccactccatcataaatcctgacctcctcaacctgagcatcctcaccctccattttc

SEQ ID NO: 377407 - DNA, 52 bp, Artificial
  Synthetic oligonucleotide
cgttccactcgtccagattaagtgtagacctttacgttaataacaagaaggt

SEQ ID NO: 377408 - DNA, 60 bp, Artificial
  Synthetic oligonucleotide
cgttccagaagctcgaatcgatgtcgtccagacttggaaggtcatgtaagccttgtggag

SEQ ID NO: 377409 - DNA, 60 bp, Artificial
  Synthetic oligonucleotide
cgttccagacctctgcaccaagatcgttaagatcctgttggcctcctctagcactccttc

SEQ ID NO: 377410 - DNA, 51 bp, Artificial
  Synthetic oligonucleotide
cgttccagacgaagtacttccaaaccagtactgaccgcagccacttaaatg

SEQ ID NO: 377411 - DNA, 55 bp, Artificial
  Synthetic oligonucleotide
cgttccagatccattgcgcgaggttcagcggttaggaactaagaaaatcccctat

SEQ ID NO: 377412 - DNA, 55 bp, Artificial
  Synthetic oligonucleotide
cgttccagccttctaaggacggcttcccgaattatgatacggcaacgcacaagct

SEQ ID NO: 377413 - DNA, 59 bp, Artificial
  Synthetic oligonucleotide
cgttccagtgacgtcacagccgccattttaagtagctgacgtcaaggattgacgtgaag

SEQ ID NO: 377414 - DNA, 56 bp, Artificial
  Synthetic oligonucleotide
cgttccagtgacgtcacggcggccattttgagtaaggcggggcaaggccgacacta

SEQ ID NO: 377415 - DNA, 54 bp, Artificial
  Synthetic oligonucleotide
cgttccatagtcctaagtaaacaaggaaaggacaactggacggatgtttgatta

SEQ ID NO: 377416 - DNA, 59 bp, Artificial
  Synthetic oligonucleotide
cgttccatcgatacagtgtcgtcgttgccaatgtctataacacgccggagactaaacta

SEQ ID NO: 377417 - DNA, 51 bp, Artificial
  Synthetic oligonucleotide
cgttccatttagtaactactgggcccaacgcgagtttctttttagtcggcc

SEQ ID NO: 377418 - DNA, 54 bp, Artificial
  Synthetic oligonucleotide
cgttcccctctcgaataaatggtttcttgaggcggatttgagtaagtttgataa

SEQ ID NO: 377419 - DNA, 55 bp, Artificial
  Synthetic oligonucleotide
cgttcccctgaaaggtcaggatgttgacggtgtggtgtcactgccccgtacaggt

SEQ ID NO: 377420 - DNA, 60 bp, Artificial
  Synthetic oligonucleotide
cgttcccgacattgtcttttctgtactcgatgctttacatcctcataagcttgatgtacg

SEQ ID NO: 377421 - DNA, 54 bp, Artificial
  Synthetic oligonucleotide
cgttcccgagattggttacttcattattttcgccgctgttttctctatgttggt

SEQ ID NO: 377422 - DNA, 57 bp, Artificial
  Synthetic oligonucleotide
cgttcccgctcgttgccacgcttcccagggattcgagtcgggtcctggacatcctgc

SEQ ID NO: 377423 - DNA, 54 bp, Artificial
  Synthetic oligonucleotide
cgttcccgggtccgggaagtctggaattattaagagtgcagtcacaaagaaaga

SEQ ID NO: 377424 - DNA, 60 bp, Artificial
  Synthetic oligonucleotide
cgttcccggtgctagctatcgttccgattggaacatgatcgctcacgcactcccgtctga

SEQ ID NO: 377425 - DNA, 52 bp, Artificial
  Synthetic oligonucleotide
cgttcccgtacaggggggtacgtcacgcgtacaggggggtacgtcacagcca

SEQ ID NO: 377426 - DNA, 55 bp, Artificial
  Synthetic oligonucleotide
cgttccctcaacaaagccaaatccgaatcaaggttgctcttcattggtttggatc

SEQ ID NO: 377427 - DNA, 57 bp, Artificial
  Synthetic oligonucleotide
cgttccctgacatcacggccatatacaccaattgcgagacgtgtagcaaagttcata

SEQ ID NO: 377428 - DNA, 55 bp, Artificial
  Synthetic oligonucleotide
cgttccctgggcctataagcaacaacccagaccaagatcatctggaggatgatcc

SEQ ID NO: 377429 - DNA, 58 bp, Artificial
  Synthetic oligonucleotide
cgttccgaaaacaacaactacggatcgcacaagcaacggtcagcgttgacacagcgta

SEQ ID NO: 377430 - DNA, 50 bp, Artificial
  Synthetic oligonucleotide
cgttccgagaaaacagctttcagttacaaaacagctttcagttacataac

SEQ ID NO: 377431 - DNA, 55 bp, Artificial
  Synthetic oligonucleotide
cgttccgctgagtaaccggagatcttaggagacgtgtcccgcggggtggatacat

SEQ ID NO: 377432 - DNA, 58 bp, Artificial
  Synthetic oligonucleotide
cgttccggctcgcatgaaaactctaactcagctactgagggttctactataaactaca

SEQ ID NO: 377433 - DNA, 53 bp, Artificial
  Synthetic oligonucleotide
cgttccgttcggagtaaacgtcacttgggggagtgagttgcacgtaatcccga

SEQ ID NO: 377434 - DNA, 53 bp, Artificial
  Synthetic oligonucleotide
cgttccgttgatattaacgtccattatagagtcgttagtaaacttacccgcta

SEQ ID NO: 377435 - DNA, 55 bp, Artificial
  Synthetic oligonucleotide
cgttcctaaagatactcttgaaggcactaggcttgcgcgtattgatttgcgcgca

SEQ ID NO: 377436 - DNA, 55 bp, Artificial
  Synthetic oligonucleotide
cgttcctaacatcatcgagctcaggcaaagacttcgaagacgcagccatcgcaac

SEQ ID NO: 377437 - DNA, 56 bp, Artificial
  Synthetic oligonucleotide
cgttcctataccgagggaacggccatttcgcttgcctggatcaagcctccctgtaa

SEQ ID NO: 377438 - DNA, 52 bp, Artificial
  Synthetic oligonucleotide
cgttcctatccccgcgccaaactacaagttcgcgttgtggagagtgtccgcc

SEQ ID NO: 377439 - DNA, 55 bp, Artificial
  Synthetic oligonucleotide
cgttcctattgcgttggagtatttggatgggttttccgcagttatgttgtccgcg

SEQ ID NO: 377440 - DNA, 55 bp, Artificial
  Synthetic oligonucleotide
cgttcctcaagctgagaagatagcactaggtaatagtttagcttcaagtgacaca

SEQ ID NO: 377441 - DNA, 53 bp, Artificial
  Synthetic oligonucleotide
cgttcctcgaacgcgtaatcccatgagtctcgttgaagactagttacgcaata

SEQ ID NO: 377442 - DNA, 55 bp, Artificial
  Synthetic oligonucleotide
cgttcctgattctgatcgacctccacaagtattatggcaatctgcgcttaggtcg

SEQ ID NO: 377443 - DNA, 60 bp, Artificial
  Synthetic oligonucleotide
cgttcctgcaccggacaattctattcaggatacttatcgctacattgattctttagccac

SEQ ID NO: 377444 - DNA, 54 bp, Artificial
  Synthetic oligonucleotide
cgttcctgctgttacagggcctgacatagcatttcccactgcccctagtgtccc

SEQ ID NO: 377445 - DNA, 59 bp, Artificial
  Synthetic oligonucleotide
cgttcctggtctcctgttgtaggccaattggtccaggagagggtggctaggcctgcatc

SEQ ID NO: 377446 - DNA, 56 bp, Artificial
  Synthetic oligonucleotide
cgttccttctgaaagccagctcacactcagtgatagagttctaaatctagttgctc

SEQ ID NO: 377447 - DNA, 51 bp, Artificial
  Synthetic oligonucleotide
cgttccttgcggtccgcagtgcggatagccacagtgtactcatgggcatac

SEQ ID NO: 377448 - DNA, 53 bp, Artificial
  Synthetic oligonucleotide
cgttccttgtcgtttactgacgttaccgcttacgtctacatctacgttaagta

SEQ ID NO: 377449 - DNA, 55 bp, Artificial
  Synthetic oligonucleotide
cgttcctttggcattgaagggaacttggtttctgtactcaatcacagcatggtcg

SEQ ID NO: 377450 - DNA, 55 bp, Artificial
  Synthetic oligonucleotide
cgttcgaaatcagacctagaatatcgctacaagcaagtgcagcacgagaagccgt

SEQ ID NO: 377451 - DNA, 54 bp, Artificial
  Synthetic oligonucleotide
cgttcgaacctaaagagacgatattgagaaaattagaggatattaaaccagaac

SEQ ID NO: 377452 - DNA, 50 bp, Artificial
  Synthetic oligonucleotide
cgttcgaatacctggcagacaggctgcgcgtcaagtgcacgctacccacc

SEQ ID NO: 377453 - DNA, 60 bp, Artificial
  Synthetic oligonucleotide
cgttcgacgcctcccgccagtctatgggggccgggtcacatagcctcacttatgagctca

SEQ ID NO: 377454 - DNA, 55 bp, Artificial
  Synthetic oligonucleotide
cgttcgagaagaagcatgatgtgggtcatactggtacattattatgtgtgtccga

SEQ ID NO: 377455 - DNA, 59 bp, Artificial
  Synthetic oligonucleotide
cgttcgagatgttaaggtcttgaattatttatttggtgctcgcatggttccaatgtcta

SEQ ID NO: 377456 - DNA, 55 bp, Artificial
  Synthetic oligonucleotide
cgttcgatcacatttatcctactggttcagcgacatactgtcctggtgcaatcgc

SEQ ID NO: 377457 - DNA, 53 bp, Artificial
  Synthetic oligonucleotide
cgttcgatgtgcagaaatttgcggatttagtgactgattctccagtgatctca

SEQ ID NO: 377458 - DNA, 55 bp, Artificial
  Synthetic oligonucleotide
cgttcgcaacatatcacctaataacgtttgtggtatgacacgcaactcactcgga

SEQ ID NO: 377459 - DNA, 55 bp, Artificial
  Synthetic oligonucleotide
cgttcgcatccagtatctgttcttccgactcaccaacaacttcgtaactgttttc

SEQ ID NO: 377460 - DNA, 55 bp, Artificial
  Synthetic oligonucleotide
cgttcgcatttagcacacgttaatatagacctgttctgtaacgactggaaaaccc

SEQ ID NO: 377461 - DNA, 56 bp, Artificial
  Synthetic oligonucleotide
cgttcgcctgaggttttggtgacctaactacggaagggaggtgtagctgcgatgct

SEQ ID NO: 377462 - DNA, 55 bp, Artificial
  Synthetic oligonucleotide
cgttcgcgacgatatcaagatggctcaatctaacatttattctgacatgattgac

SEQ ID NO: 377463 - DNA, 57 bp, Artificial
  Synthetic oligonucleotide
cgttcgcgggaacaataccctcgtgaacgatttggcaagaagacgcatgtacgatat

SEQ ID NO: 377464 - DNA, 55 bp, Artificial
  Synthetic oligonucleotide
cgttcgcggtgtagtgtttaatgcatgccatcgcgagcggtctcagctgatcttc

SEQ ID NO: 377465 - DNA, 52 bp, Artificial
  Synthetic oligonucleotide
cgttcgctaaataggacacagactcaatcaacatttgacgcgaaggtgtcag

SEQ ID NO: 377466 - DNA, 55 bp, Artificial
  Synthetic oligonucleotide
cgttcgctctgcttgggttctacaggcaccgaaggagtctctgcgaggcttctgg

SEQ ID NO: 377467 - DNA, 55 bp, Artificial
  Synthetic oligonucleotide
cgttcggaaggttccaatttgcaccgaatcttgtgcggattaaacaaccgctcat

SEQ ID NO: 377468 - DNA, 55 bp, Artificial
  Synthetic oligonucleotide
cgttcggaatccacgcattctcgttgtatctggtctacaagttcgcgagaatcgt

SEQ ID NO: 377469 - DNA, 55 bp, Artificial
  Synthetic oligonucleotide
cgttcggacatagaagcacggatctacctgttgtcaattcaccgggaacagatcc

SEQ ID NO: 377470 - DNA, 55 bp, Artificial
  Synthetic oligonucleotide
cgttcggatgaagagaaagaggggtgaccgcatcccgaagggatgtgttggaccc

SEQ ID NO: 377471 - DNA, 60 bp, Artificial
  Synthetic oligonucleotide
cgttcgggaagccggcatcctcatatcagcggcactcctgactctctgggacaacggagc

SEQ ID NO: 377472 - DNA, 55 bp, Artificial
  Synthetic oligonucleotide
cgttcgggatctcatttccgtgttgaggtgcaaggattatgttcaagcgtcctgc

SEQ ID NO: 377473 - DNA, 59 bp, Artificial
  Synthetic oligonucleotide
cgttcggggactaaatgcatcgctcccgcagtatttacactgagtttcacattccacta

SEQ ID NO: 377474 - DNA, 55 bp, Artificial
  Synthetic oligonucleotide
cgttcggggtatcaagaagccgcaaagttaggctctttgacgaccacgaccaagc

SEQ ID NO: 377475 - DNA, 57 bp, Artificial
  Synthetic oligonucleotide
cgttcggtcctttcgtccatagtaatagcctcgtaataacaatgcgcccatagtaca

SEQ ID NO: 377476 - DNA, 53 bp, Artificial
  Synthetic oligonucleotide
cgttcgtaaacacgctggtaccgattattcggatgtggggggttgtccgctgt

SEQ ID NO: 377477 - DNA, 55 bp, Artificial
  Synthetic oligonucleotide
cgttcgtaaactttaggatgcagatggaagaagacaggtttccaacaacagtggc

SEQ ID NO: 377478 - DNA, 57 bp, Artificial
  Synthetic oligonucleotide
cgttcgtattgactcagctctttacccgacctacgccctgaagttcgacacgatgtg

SEQ ID NO: 377479 - DNA, 56 bp, Artificial
  Synthetic oligonucleotide
cgttcgtcacaaaaacctgccgcaggagataaagccatggcgcgtttaaccacgat

SEQ ID NO: 377480 - DNA, 57 bp, Artificial
  Synthetic oligonucleotide
cgttcgtcaccggtatcgcgtgattgggacgtcgaaattatatataacgaccgatga

SEQ ID NO: 377481 - DNA, 55 bp, Artificial
  Synthetic oligonucleotide
cgttcgtcttatggttgtgggtttcatgttgggaatctactgtacgcagaacgcg

SEQ ID NO: 377482 - DNA, 52 bp, Artificial
  Synthetic oligonucleotide
cgttcgtgaggctagccgcccgaaccctgtttcctactttgcgtccccgaaa

SEQ ID NO: 377483 - DNA, 54 bp, Artificial
  Synthetic oligonucleotide
cgttcgtgcaccggtacgacaagccctcgtacgatgaggaggtgtgccagaaaa

SEQ ID NO: 377484 - DNA, 54 bp, Artificial
  Synthetic oligonucleotide
cgttcgtgtgcttttaagaaactagatacaaagttcgcgtctacgtcgtttgta

SEQ ID NO: 377485 - DNA, 52 bp, Artificial
  Synthetic oligonucleotide
cgttcgttggtgtgccctaccctacgtatgccactaacttcggtgctggtag

SEQ ID NO: 377486 - DNA, 57 bp, Artificial
  Synthetic oligonucleotide
cgttctagaattttccatcgaaccaaagttatactgtgattataatgttgtgctaat

SEQ ID NO: 377487 - DNA, 51 bp, Artificial
  Synthetic oligonucleotide
cgttctagagtctcttaaacgcgatcttgagaatggctacctgacccctta

SEQ ID NO: 377488 - DNA, 55 bp, Artificial
  Synthetic oligonucleotide
cgttctagccacttttaccgcctaggcgtagggtcgtacgctgcccgagtccagc

SEQ ID NO: 377489 - DNA, 55 bp, Artificial
  Synthetic oligonucleotide
cgttctaggcgcactagttattctttagcgctagtggcgcactacgagttatctt

SEQ ID NO: 377490 - DNA, 56 bp, Artificial
  Synthetic oligonucleotide
cgttctagtgttggacgatccagggttgacgtattttccgtgtaatttgcacgcta

SEQ ID NO: 377491 - DNA, 55 bp, Artificial
  Synthetic oligonucleotide
cgttctatattatctaagcgtgcggaccctgttgtagaattaatgttgcatgcgt

SEQ ID NO: 377492 - DNA, 54 bp, Artificial
  Synthetic oligonucleotide
cgttctatgcaacaggtgacataataggagatataagacaagcatattgtgtgg

SEQ ID NO: 377493 - DNA, 53 bp, Artificial
  Synthetic oligonucleotide
cgttctatggcgggaacctccaaggttagtcgaaacgccaattattctcctgg

SEQ ID NO: 377494 - DNA, 58 bp, Artificial
  Synthetic oligonucleotide
cgttctattgagaagattgcattaaataaaactcgatcatttacagcagctcccattg

SEQ ID NO: 377495 - DNA, 59 bp, Artificial
  Synthetic oligonucleotide
cgttctcaccgcgcacgtatcgaaagggctactgcgttcgatcgtatgggatattaata

SEQ ID NO: 377496 - DNA, 53 bp, Artificial
  Synthetic oligonucleotide
cgttctcatgtgccttcaaatatgcctcaagactttcgttcagaatttctgag

SEQ ID NO: 377497 - DNA, 55 bp, Artificial
  Synthetic oligonucleotide
cgttctccaagcccatcatgttcaccgtcgtctggactccggccactctgtcccc

SEQ ID NO: 377498 - DNA, 60 bp, Artificial
  Synthetic oligonucleotide
cgttctccgactatcgctgatttcaaacagtgtcagtgcctttgtgtatcatagtgttac

SEQ ID NO: 377499 - DNA, 52 bp, Artificial
  Synthetic oligonucleotide
cgttctcgggaacgcggccggtaatgctacttcttccggtatttcccgagga

SEQ ID NO: 377500 - DNA, 59 bp, Artificial
  Synthetic oligonucleotide
cgttctcgttcagtactacaatccagatggccctgttcagtataacctcactgtcttgg

SEQ ID NO: 377501 - DNA, 55 bp, Artificial
  Synthetic oligonucleotide
cgttctctctaaatatactgcggagagatcaagagggcagacttcctttaggaac

SEQ ID NO: 377502 - DNA, 59 bp, Artificial
  Synthetic oligonucleotide
cgttctcttgattggtctaaggtcactctggacgggcgaccacttaccaccatacagca

SEQ ID NO: 377503 - DNA, 55 bp, Artificial
  Synthetic oligonucleotide
cgttctgactcttgacgaagaaacaaggctacgatgctcatgccaagatcccatc

SEQ ID NO: 377504 - DNA, 55 bp, Artificial
  Synthetic oligonucleotide
cgttctgatgattcttcgtcatctaaaactaggtccaagaggtcggaggggacca

SEQ ID NO: 377505 - DNA, 57 bp, Artificial
  Synthetic oligonucleotide
cgttctgcagccgcttcggctaataatgaaagtaagttttgtttaccagagacgcaa

SEQ ID NO: 377506 - DNA, 54 bp, Artificial
  Synthetic oligonucleotide
cgttctgcgcgcctggcgaagaaaggtgttggtcacggtcgcgacgtaagccat

SEQ ID NO: 377507 - DNA, 54 bp, Artificial
  Synthetic oligonucleotide
cgttctggaatatagtccgatcctttttatccgctactccttttcagaagtaac

SEQ ID NO: 377508 - DNA, 55 bp, Artificial
  Synthetic oligonucleotide
cgttctgtagaactcgttcacggcttcgtaaggacagcaccccttttctactgga

SEQ ID NO: 377509 - DNA, 60 bp, Artificial
  Synthetic oligonucleotide
cgttctgtatgggctatttgtggctttccgtgacacgaacttagagcggcttggcacatc

SEQ ID NO: 377510 - DNA, 55 bp, Artificial
  Synthetic oligonucleotide
cgttctgtggctaatagtgacctatatagttctaacagagcaactcgctgccggt

SEQ ID NO: 377511 - DNA, 54 bp, Artificial
  Synthetic oligonucleotide
cgttctgtgtgaagaacgaaccactagaattccaactactacccccaacaccga

SEQ ID NO: 377512 - DNA, 55 bp, Artificial
  Synthetic oligonucleotide
cgttctgttcctcgtcaaggaactctttataggaggaacgtggtcctggattgca

SEQ ID NO: 377513 - DNA, 55 bp, Artificial
  Synthetic oligonucleotide
cgttctgttttccataggtctgttgatgggagtgcttttattgatgctatggacg

SEQ ID NO: 377514 - DNA, 55 bp, Artificial
  Synthetic oligonucleotide
cgttcttagaaggacagcaacaggcttgggaaacaaaacgcaatacaggaactac

SEQ ID NO: 377515 - DNA, 55 bp, Artificial
  Synthetic oligonucleotide
cgttcttccactcctttgaccggtttgcagaagtttgggctctggactactcctg

SEQ ID NO: 377516 - DNA, 56 bp, Artificial
  Synthetic oligonucleotide
cgttcttctagaataggcttttctgtgttattaattactcgttatatgacagggtc

SEQ ID NO: 377517 - DNA, 50 bp, Artificial
  Synthetic oligonucleotide
cgttcttgctggcaactgtccatttgacatgagtagaaaatccgtagcgt

SEQ ID NO: 377518 - DNA, 55 bp, Artificial
  Synthetic oligonucleotide
cgttcttggactcggctcgcgatagcgcccacgttatcagggacgattctcggcc

SEQ ID NO: 377519 - DNA, 53 bp, Artificial
  Synthetic oligonucleotide
cgttcttggttgtgcccctaaagagggtcatgctaaattccctgggtttgagt

SEQ ID NO: 377520 - DNA, 55 bp, Artificial
  Synthetic oligonucleotide
cgttctttaagccttcgtgaggtggtattgcctctggcggtggcgggtggttgcg

SEQ ID NO: 377521 - DNA, 57 bp, Artificial
  Synthetic oligonucleotide
cgttctttgtctggtggatccttgatgttgagtatgtttggaccacctgggaaggta

SEQ ID NO: 377522 - DNA, 60 bp, Artificial
  Synthetic oligonucleotide
cgttgaaatcctgggagccttacagaggacgcacatctcgaaactcaattgagtctagaa

SEQ ID NO: 377523 - DNA, 57 bp, Artificial
  Synthetic oligonucleotide
cgttgaaattggagtgacacggagagaggtccatatatactacttagaaaaggccaa

SEQ ID NO: 377524 - DNA, 55 bp, Artificial
  Synthetic oligonucleotide
cgttgaaccagaggaattgaatcttagtaagtttatgatggttcttccgggtgca

SEQ ID NO: 377525 - DNA, 55 bp, Artificial
  Synthetic oligonucleotide
cgttgaaccagttgaaattgaatcgtggggatgtaaccacacatggttgagtagg

SEQ ID NO: 377526 - DNA, 55 bp, Artificial
  Synthetic oligonucleotide
cgttgaaccattccgcacaaattagaccgggtaatcgtagcttattcgttatgcc

SEQ ID NO: 377527 - DNA, 57 bp, Artificial
  Synthetic oligonucleotide
cgttgaaccattgcaatttcgggttgtgtgtgatccctatagtcccccttgactaca

SEQ ID NO: 377528 - DNA, 57 bp, Artificial
  Synthetic oligonucleotide
cgttgaacctcccacgtcgctgtacgcctccatagacccgcgtactcgcaaggttca

SEQ ID NO: 377529 - DNA, 54 bp, Artificial
  Synthetic oligonucleotide
cgttgaacgggcaaatcgcctcctcaaagacaaaattcgtgtccttggagaggg

SEQ ID NO: 377530 - DNA, 58 bp, Artificial
  Synthetic oligonucleotide
cgttgaactgtagtgggtcgtaggcgactacgaacggacgtatctattcatcattgta

SEQ ID NO: 377531 - DNA, 54 bp, Artificial
  Synthetic oligonucleotide
cgttgaagggtcgtttcataatgcgcacgttgacaaaaaacacgttgaaagaca

SEQ ID NO: 377532 - DNA, 56 bp, Artificial
  Synthetic oligonucleotide
cgttgaagttggaccgcagagcggagccacgtatgagtttcaaattcgaagggtta

SEQ ID NO: 377533 - DNA, 60 bp, Artificial
  Synthetic oligonucleotide
cgttgaataatgaattagaggtcacatttgccactacaagactccctgcactagagtagc

SEQ ID NO: 377534 - DNA, 55 bp, Artificial
  Synthetic oligonucleotide
cgttgaatttatccccaacttgaatgttagttgcttacttcaggctggtttacca

SEQ ID NO: 377535 - DNA, 60 bp, Artificial
  Synthetic oligonucleotide
cgttgaatttggatgccatgcttcaaggcctcatggatttacatctcaaggcaaattact

SEQ ID NO: 377536 - DNA, 53 bp, Artificial
  Synthetic oligonucleotide
cgttgacaacccgttcgttgaacggtagattacgaccatccacccgttgcgag

SEQ ID NO: 377537 - DNA, 54 bp, Artificial
  Synthetic oligonucleotide
cgttgacacactcttcgcgagcggcaacgccggtttgggtttccttgaccctac

SEQ ID NO: 377538 - DNA, 60 bp, Artificial
  Synthetic oligonucleotide
cgttgacaccgtgcacttgcggcagctcggacctttacttggtcacgagacatgctgatg

SEQ ID NO: 377539 - DNA, 58 bp, Artificial
  Synthetic oligonucleotide
cgttgaccaacttatatgtaagagcaatcctacaaaagtaagcagatctactgggaaa

SEQ ID NO: 377540 - DNA, 60 bp, Artificial
  Synthetic oligonucleotide
cgttgacgcctctgagggtgacttctcatacctcactagcaacacctgggacacgcttag

SEQ ID NO: 377541 - DNA, 52 bp, Artificial
  Synthetic oligonucleotide
cgttgactgcggcgtaccgaggaatagaatgcgtgagtcgtcatccggggtg

SEQ ID NO: 377542 - DNA, 55 bp, Artificial
  Synthetic oligonucleotide
cgttgacttcacatcagcgatattgagaaggttaattggaaggctgccgaacttc

SEQ ID NO: 377543 - DNA, 54 bp, Artificial
  Synthetic oligonucleotide
cgttgacttcagcttggaccccaccttctccatagagactacaaccgttcctca

SEQ ID NO: 377544 - DNA, 55 bp, Artificial
  Synthetic oligonucleotide
cgttgactttgtcaacgagttaactacgatgtcggccctaggacatctatcgagc

SEQ ID NO: 377545 - DNA, 54 bp, Artificial
  Synthetic oligonucleotide
cgttgagaccccggcgtcgtaagtcgccggtttcgccggatctcgcatatcccc

SEQ ID NO: 377546 - DNA, 55 bp, Artificial
  Synthetic oligonucleotide
cgttgagagcagtgcgttgctggtgctgttgaccgcttgtctggccttgggcttc

SEQ ID NO: 377547 - DNA, 55 bp, Artificial
  Synthetic oligonucleotide
cgttgagagggatcccacgtcagttcatcccagacccttttgtcaacctggagac

SEQ ID NO: 377548 - DNA, 60 bp, Artificial
  Synthetic oligonucleotide
cgttgagatcgtcgaagatgctaagattaaagctatcttggaagccattaacgtaactga

SEQ ID NO: 377549 - DNA, 55 bp, Artificial
  Synthetic oligonucleotide
cgttgagcagtgtaagacgtgggtcgagaccaccaatgtgaacgctgataaggga

SEQ ID NO: 377550 - DNA, 54 bp, Artificial
  Synthetic oligonucleotide
cgttgaggagtatctgggtgacctgaagtccttagagaacctgcaagaagctat

SEQ ID NO: 377551 - DNA, 55 bp, Artificial
  Synthetic oligonucleotide
cgttgagtctcctttcgagatctacggcaaattccgggaggcgaactctgaggag

SEQ ID NO: 377552 - DNA, 60 bp, Artificial
  Synthetic oligonucleotide
cgttgagttctagtaagcacaatgcaatggctccgccatacgacgtttgaagtgcaacga

SEQ ID NO: 377553 - DNA, 55 bp, Artificial
  Synthetic oligonucleotide
cgttgatacatcgaccttaccagtcgtgagagaactgatactgccgtccaaggaa

SEQ ID NO: 377554 - DNA, 55 bp, Artificial
  Synthetic oligonucleotide
cgttgatacttccgaaagagtcaaaagacttttctcagtagtgttcaagaaatcg

SEQ ID NO: 377555 - DNA, 54 bp, Artificial
  Synthetic oligonucleotide
cgttgataggaacttcgattggtaatcattattacctgccgtctttacggtttc

SEQ ID NO: 377556 - DNA, 58 bp, Artificial
  Synthetic oligonucleotide
cgttgatattcacgtcgatggtaaatatcataccccttctcggttagtatacttgatc

SEQ ID NO: 377557 - DNA, 57 bp, Artificial
  Synthetic oligonucleotide
cgttgatccgggtaatcttatgtctcagacggtcgtatggaaaaacgatacacaata

SEQ ID NO: 377558 - DNA, 55 bp, Artificial
  Synthetic oligonucleotide
cgttgatcgggcgaacaagattttctctaggggtggacagacggcgaatcagctg

SEQ ID NO: 377559 - DNA, 57 bp, Artificial
  Synthetic oligonucleotide
cgttgatgcacatttgtgtcgctaaccctgtaatagagtttccacggaatagggtct

SEQ ID NO: 377560 - DNA, 59 bp, Artificial
  Synthetic oligonucleotide
cgttgatgcctcgatccaaaacccatctcaatcggtgaccgcagttctagatcctaaaa

SEQ ID NO: 377561 - DNA, 55 bp, Artificial
  Synthetic oligonucleotide
cgttgatgcctttggatgcatggattcaatctaagcagctttcacttttctcgcc

SEQ ID NO: 377562 - DNA, 55 bp, Artificial
  Synthetic oligonucleotide
cgttgatgtccaatacctttacggtgtcggctcagctgtggtgtcctgggctctt

SEQ ID NO: 377563 - DNA, 55 bp, Artificial
  Synthetic oligonucleotide
cgttgatgtgcgacaatcagttggatacgaacggaaatttcgtgtggggcgaacg

SEQ ID NO: 377564 - DNA, 55 bp, Artificial
  Synthetic oligonucleotide
cgttgatgttaggaagttatgcgctgagagagcgtgcaataccctacctagcgcg

SEQ ID NO: 377565 - DNA, 60 bp, Artificial
  Synthetic oligonucleotide
cgttgattcgtaatcattgcaggctagtactagtcagatttgcaacacgtgtattccact

SEQ ID NO: 377566 - DNA, 55 bp, Artificial
  Synthetic oligonucleotide
cgttgattgtagtatcttacaacggatcctctgcctggggaggacgtattaccgg

SEQ ID NO: 377567 - DNA, 55 bp, Artificial
  Synthetic oligonucleotide
cgttgcaaacggagccttggtacgaatacgcagcccctcggcgtcagaggcgttc

SEQ ID NO: 377568 - DNA, 52 bp, Artificial
  Synthetic oligonucleotide
cgttgcaaagttaactgggttacttccacctggaactttgaccgaagttgtg

SEQ ID NO: 377569 - DNA, 55 bp, Artificial
  Synthetic oligonucleotide
cgttgcaagttatagtgaagtggataacttgagtaaaatgttgacggacaagggt

SEQ ID NO: 377570 - DNA, 54 bp, Artificial
  Synthetic oligonucleotide
cgttgcacacgacactaaaaagacagcgatgactgataaatgtatcatcgtttg

SEQ ID NO: 377571 - DNA, 58 bp, Artificial
  Synthetic oligonucleotide
cgttgcacccttcttaaaaacgatatacacaaatagttctcagtatcatactgtagac

SEQ ID NO: 377572 - DNA, 51 bp, Artificial
  Synthetic oligonucleotide
cgttgcagctaataaggattttcagatccaacagtggtacggacctgtgga

SEQ ID NO: 377573 - DNA, 55 bp, Artificial
  Synthetic oligonucleotide
cgttgcagttgtggccacgctttcaattctgtactgataaacttgtggatgagcc

SEQ ID NO: 377574 - DNA, 55 bp, Artificial
  Synthetic oligonucleotide
cgttgcataagtattgccacatagtcatcgttacataagggtcagaggctgcttg

SEQ ID NO: 377575 - DNA, 55 bp, Artificial
  Synthetic oligonucleotide
cgttgcatatctggagagctgtcactcgttttccttgtccgacgtccgacgtacc

SEQ ID NO: 377576 - DNA, 55 bp, Artificial
  Synthetic oligonucleotide
cgttgcattatagaactgtggccagttccgtgcataccgcccaggtgcaaggcac

SEQ ID NO: 377577 - DNA, 60 bp, Artificial
  Synthetic oligonucleotide
cgttgccaacgctgagctaccacgcatgctagtggaccacaagacgaagataatccacgt

SEQ ID NO: 377578 - DNA, 55 bp, Artificial
  Synthetic oligonucleotide
cgttgccaatgcatgtttgcaaccgtttaacgtgcatatgctcgcgttaagacat

SEQ ID NO: 377579 - DNA, 58 bp, Artificial
  Synthetic oligonucleotide
cgttgccagcggaatgcagacatccatgggtcgggattaagcacccgcccgacggaaa

SEQ ID NO: 377580 - DNA, 55 bp, Artificial
  Synthetic oligonucleotide
cgttgccatcttggcaaacatcaattccatgggaaagctatccacagagactagc

SEQ ID NO: 377581 - DNA, 55 bp, Artificial
  Synthetic oligonucleotide
cgttgcccaacaccccaatgggaaaacatgacatggcatacatgggaacggcagg

SEQ ID NO: 377582 - DNA, 51 bp, Artificial
  Synthetic oligonucleotide
cgttgcccgaacgaaaggtttttattaaggttacttgattgtaaagcttga

SEQ ID NO: 377583 - DNA, 57 bp, Artificial
  Synthetic oligonucleotide
cgttgcccttgagtacatcgatcggctaaaaggctttaccataaatccatcgatatt

SEQ ID NO: 377584 - DNA, 55 bp, Artificial
  Synthetic oligonucleotide
cgttgccgacatagggagcgcaccagcgagaagagtcggggcacccgataatgtc

SEQ ID NO: 377585 - DNA, 55 bp, Artificial
  Synthetic oligonucleotide
cgttgccgcggatcggggaggcacctgtggtgcggaagtcttacagctcacagtg

SEQ ID NO: 377586 - DNA, 55 bp, Artificial
  Synthetic oligonucleotide
cgttgccgctggtagtcataagagacgacaacgggaagctgttgaacgttctccg

SEQ ID NO: 377587 - DNA, 50 bp, Artificial
  Synthetic oligonucleotide
cgttgccgcttagcgacgagtcaaacacggtcaacgaaaaatatgctgtt

SEQ ID NO: 377588 - DNA, 55 bp, Artificial
  Synthetic oligonucleotide
cgttgcctcctacagtcgctacagcagatcgagagcatgattgaagccgagtcct

SEQ ID NO: 377589 - DNA, 60 bp, Artificial
  Synthetic oligonucleotide
cgttgcgatcgcttagtgttacttcaaagctccacgatgttgcacgctttgcggtcttta

SEQ ID NO: 377590 - DNA, 56 bp, Artificial
  Synthetic oligonucleotide
cgttgcgattgttggctttgaatcgattgatgttaagttgaagaaattaactccgt

SEQ ID NO: 377591 - DNA, 55 bp, Artificial
  Synthetic oligonucleotide
cgttgcgcaggtgacgactgcgggttttgcgcgcaacggatcgaacaggctgagt

SEQ ID NO: 377592 - DNA, 55 bp, Artificial
  Synthetic oligonucleotide
cgttgcgcatcgtcgatttgtcccctgtagccgtgcagcagagcgggactgtgac

SEQ ID NO: 377593 - DNA, 55 bp, Artificial
  Synthetic oligonucleotide
cgttgcgccatttataggtggtcgtcctattcgagttttgctatttccagacacc

SEQ ID NO: 377594 - DNA, 58 bp, Artificial
  Synthetic oligonucleotide
cgttgcgccctttcttaaaacgatatacacaaatagttctcagtatcacactgtcgat

SEQ ID NO: 377595 - DNA, 55 bp, Artificial
  Synthetic oligonucleotide
cgttgcgcctttgtaagcctaaagtctgactctcttgccatgtcatttcatcccc

SEQ ID NO: 377596 - DNA, 58 bp, Artificial
  Synthetic oligonucleotide
cgttgcgcggtgtgtctagacgccgaacggcaaataatgtttgagccctgtcgacacg

SEQ ID NO: 377597 - DNA, 54 bp, Artificial
  Synthetic oligonucleotide
cgttgcgctgtgctcgaggttgatggcaaggcttttgaagcccatgtcggcccc

SEQ ID NO: 377598 - DNA, 53 bp, Artificial
  Synthetic oligonucleotide
cgttgctaaacagcaacgtcaaagaaccgcgcgcagatctgctgcgtgcaaaa

SEQ ID NO: 377599 - DNA, 55 bp, Artificial
  Synthetic oligonucleotide
cgttgctaagtatgcgtttgaaaatgtgggatccactgttaaatgagttccccga

SEQ ID NO: 377600 - DNA, 60 bp, Artificial
  Synthetic oligonucleotide
cgttgctacaacacctttggcaacatagttctgtcatctcaaattgatgctgccaggcta

SEQ ID NO: 377601 - DNA, 57 bp, Artificial
  Synthetic oligonucleotide
cgttgctattggcgttcatggtgtttgtaggaacgatacagtaacaacaactggcag

SEQ ID NO: 377602 - DNA, 57 bp, Artificial
  Synthetic oligonucleotide
cgttgctcactgtgtcccactgctcccggcttcccaaaagtcaacttcgtcgcctgg

SEQ ID NO: 377603 - DNA, 60 bp, Artificial
  Synthetic oligonucleotide
cgttgctcgtcgtgacatttctactgtcgcagacggggatattccactggactttagtgc

SEQ ID NO: 377604 - DNA, 59 bp, Artificial
  Synthetic oligonucleotide
cgttgctctctaatgcaatcgtcgccgctttcctgtccaacgtgccttatgcgcatgca

SEQ ID NO: 377605 - DNA, 59 bp, Artificial
  Synthetic oligonucleotide
cgttgctctggctaaacgtaatggaggaatacaatggatggatgtatcagagggaaccg

SEQ ID NO: 377606 - DNA, 53 bp, Artificial
  Synthetic oligonucleotide
cgttgctgcagcgtgcaggcgagatagctgcacaggacccaggaatggcgggg

SEQ ID NO: 377607 - DNA, 58 bp, Artificial
  Synthetic oligonucleotide
cgttgctgtagacctttggactaaggtctaaatgaccacacagataattgtgtggacc

SEQ ID NO: 377608 - DNA, 53 bp, Artificial
  Synthetic oligonucleotide
cgttgcttgaattcccaccagtccaggacatcggtgcacgtgttaaggaccaa

SEQ ID NO: 377609 - DNA, 53 bp, Artificial
  Synthetic oligonucleotide
cgttgctttcaagtttgtcgtgtaaaactacggtgttaacgggtgtcacaggc

SEQ ID NO: 377610 - DNA, 55 bp, Artificial
  Synthetic oligonucleotide
cgttggaatcacccacgggtacgcacactccgagctcgaccaagtcaatgctgcc

SEQ ID NO: 377611 - DNA, 52 bp, Artificial
  Synthetic oligonucleotide
cgttggaatgagtattcgagtgcgtatttaccgcgagtacaaatggatactg

SEQ ID NO: 377612 - DNA, 55 bp, Artificial
  Synthetic oligonucleotide
cgttggagcatctagtgcaactgagaacatgtaagaccacacatctctggatcgc

SEQ ID NO: 377613 - DNA, 55 bp, Artificial
  Synthetic oligonucleotide
cgttggaggaaattcagcacccatatatgtaccaacacttgatgatttcaggtca

SEQ ID NO: 377614 - DNA, 59 bp, Artificial
  Synthetic oligonucleotide
cgttggaggcagataggagactgaatcaatttcacgactcttttatgtacgtccattgt

SEQ ID NO: 377615 - DNA, 55 bp, Artificial
  Synthetic oligonucleotide
cgttggatatgttattcatagctgtatgtgtacccggaacttagcgttatggtca

SEQ ID NO: 377616 - DNA, 58 bp, Artificial
  Synthetic oligonucleotide
cgttggatcgagaaatcgaacggttgaagcaaaacgttcgagcagacttgctcgatta

SEQ ID NO: 377617 - DNA, 54 bp, Artificial
  Synthetic oligonucleotide
cgttggatgttcgaccgactagaactgagaaggacaagagtttcggtcaaaggt

SEQ ID NO: 377618 - DNA, 57 bp, Artificial
  Synthetic oligonucleotide
cgttggcaaatacacttgttattactgaaatttgataagcgtatatttagaccgcgc

SEQ ID NO: 377619 - DNA, 56 bp, Artificial
  Synthetic oligonucleotide
cgttggcaagtataatcgacggtatgcttgtcttggctactcttcgtttcttcccg

SEQ ID NO: 377620 - DNA, 55 bp, Artificial
  Synthetic oligonucleotide
cgttggcagataggtacgttaccaccagagaggaattcgcgtctatagattcgga

SEQ ID NO: 377621 - DNA, 60 bp, Artificial
  Synthetic oligonucleotide
cgttggcagggggtcagggatgtaagcgcagactaccaagcacaccaggcagcgctaccg

SEQ ID NO: 377622 - DNA, 55 bp, Artificial
  Synthetic oligonucleotide
cgttggcatccactgtgcatcatatgatggcgtagcagctgaacgtggatttatc

SEQ ID NO: 377623 - DNA, 55 bp, Artificial
  Synthetic oligonucleotide
cgttggcgctttggatctggaagtagtagcggcgttcgtgcattgtgaggtttgg

SEQ ID NO: 377624 - DNA, 55 bp, Artificial
  Synthetic oligonucleotide
cgttggcggcctgcccatggagaaatccatgggacgctctaatcctgacatggtg

SEQ ID NO: 377625 - DNA, 55 bp, Artificial
  Synthetic oligonucleotide
cgttggcgggttgaacggactcgagactcctacttctcgcagctactaccagtcg

SEQ ID NO: 377626 - DNA, 56 bp, Artificial
  Synthetic oligonucleotide
cgttggcgtgacgtacggttacgctgtggccgaggacgcggtatctgggcctaaca

SEQ ID NO: 377627 - DNA, 53 bp, Artificial
  Synthetic oligonucleotide
cgttggctaaagtcggaagcgaatacggcgacctatttgtcaaaaagttacca

SEQ ID NO: 377628 - DNA, 55 bp, Artificial
  Synthetic oligonucleotide
cgttggctcaacgagttctacttgggatgaattgcttgctaggttgttaccgcgc

SEQ ID NO: 377629 - DNA, 60 bp, Artificial
  Synthetic oligonucleotide
cgttggcttcaatattgctagttggtctccacaatgtcatcgccgtggacacaacagtta

SEQ ID NO: 377630 - DNA, 54 bp, Artificial
  Synthetic oligonucleotide
cgttgggagtcggaggagcgtggtttcaagcctacttaaatggaatggttcaag

SEQ ID NO: 377631 - DNA, 55 bp, Artificial
  Synthetic oligonucleotide
cgttgggatcgcccagattggggacaatccgttcctgataaggcatcaaagcacg

SEQ ID NO: 377632 - DNA, 55 bp, Artificial
  Synthetic oligonucleotide
cgttgggcgacatgaccctaaacgccttggctagaattacggccgaggagcgtaa

SEQ ID NO: 377633 - DNA, 55 bp, Artificial
  Synthetic oligonucleotide
cgttgggctcaatgctgcgagaatgccattaatgtatctaagatgaaaggcgtga

SEQ ID NO: 377634 - DNA, 55 bp, Artificial
  Synthetic oligonucleotide
cgttgggctcaattcatttgtagtcgggtctcagcttccttgtgaccctgagccc

SEQ ID NO: 377635 - DNA, 52 bp, Artificial
  Synthetic oligonucleotide
cgttggggctcgagaggctggtgacacgtgcgacgaatcggacgatagctaa

SEQ ID NO: 377636 - DNA, 50 bp, Artificial
  Synthetic oligonucleotide
cgttggggtgtttaggttttgtaattgggaaagtgcctcttctttagtaa

SEQ ID NO: 377637 - DNA, 54 bp, Artificial
  Synthetic oligonucleotide
cgttgggtaagactctacccaatcgtagcaggtcatatattaagttgaaacggt

SEQ ID NO: 377638 - DNA, 55 bp, Artificial
  Synthetic oligonucleotide
cgttgggttgtgatttggaggcggtacttacgatttgtgcggtagtaatgatgct

SEQ ID NO: 377639 - DNA, 58 bp, Artificial
  Synthetic oligonucleotide
cgttgggtttaccctccattgtcataatgacgcacttcggctgatgaggtattataat

SEQ ID NO: 377640 - DNA, 57 bp, Artificial
  Synthetic oligonucleotide
cgttggtaaagtctagcgttagtgcctaccggagtgacatgattgatccttttcagt

SEQ ID NO: 377641 - DNA, 55 bp, Artificial
  Synthetic oligonucleotide
cgttggtagttgtaagcagttaccagatggccgaatggtttaggggaatagccga

SEQ ID NO: 377642 - DNA, 53 bp, Artificial
  Synthetic oligonucleotide
cgttggtattataccaaacgtcacttcattatccctcgttacttccaaaactg

SEQ ID NO: 377643 - DNA, 56 bp, Artificial
  Synthetic oligonucleotide
cgttggtccattgaagttaactaactatggtattccagctggtagtggaattacta

SEQ ID NO: 377644 - DNA, 55 bp, Artificial
  Synthetic oligonucleotide
cgttggtcccgacaaccgtgaacgcatcaacctttccaagagaggtctcgccttc

SEQ ID NO: 377645 - DNA, 60 bp, Artificial
  Synthetic oligonucleotide
cgttggtgagtcaaattaatggattgccagcgcgtgtatcaacattggaatcggcgaaga

SEQ ID NO: 377646 - DNA, 55 bp, Artificial
  Synthetic oligonucleotide
cgttggtgatgaaggctgaacagccgcaacccttccacactatcctagtcctcgg

SEQ ID NO: 377647 - DNA, 52 bp, Artificial
  Synthetic oligonucleotide
cgttggtggcaccaagtacgacaattcttacaccggtttcccgggtatccta

SEQ ID NO: 377648 - DNA, 55 bp, Artificial
  Synthetic oligonucleotide
cgttggtgggcaggacttattcacgagtgttatcaccacaagggcactaactctc

SEQ ID NO: 377649 - DNA, 55 bp, Artificial
  Synthetic oligonucleotide
cgttggtgtagcagtttgaaccaagctaggacgtgaatcaccatgacgagatacc

SEQ ID NO: 377650 - DNA, 56 bp, Artificial
  Synthetic oligonucleotide
cgttggtttcgggataaacactcgtttatggtatctgtgcggtgaccatgttcttc

SEQ ID NO: 377651 - DNA, 58 bp, Artificial
  Synthetic oligonucleotide
cgttgtaaacgcaagtccgagccaattctggcgagctgcgattaaggtttcaccagaa

SEQ ID NO: 377652 - DNA, 55 bp, Artificial
  Synthetic oligonucleotide
cgttgtaaaggactttgaagctagagattttgtggtggattttgaactcgatgac

SEQ ID NO: 377653 - DNA, 54 bp, Artificial
  Synthetic oligonucleotide
cgttgtaagtactgtagcgaaagttgctatgcctatcttaagtgtagcagcacc

SEQ ID NO: 377654 - DNA, 55 bp, Artificial
  Synthetic oligonucleotide
cgttgtaatgccagcccatggtccagcaaagagcatagagtatgatgccgttgcg

SEQ ID NO: 377655 - DNA, 55 bp, Artificial
  Synthetic oligonucleotide
cgttgtaccacacatcgttattgtacacctttgggcttaggtctagatgtccaca

SEQ ID NO: 377656 - DNA, 55 bp, Artificial
  Synthetic oligonucleotide
cgttgtaccacgcatcgttgctgtatatctttggactcaggtcaaggtgaccaca

SEQ ID NO: 377657 - DNA, 55 bp, Artificial
  Synthetic oligonucleotide
cgttgtaccaggcatcatttgaatatatcttgggactcagatctaaatggccgca

SEQ ID NO: 377658 - DNA, 55 bp, Artificial
  Synthetic oligonucleotide
cgttgtaccaggcttcattggagtagacctttgggcttagatcaagatggccaca

SEQ ID NO: 377659 - DNA, 56 bp, Artificial
  Synthetic oligonucleotide
cgttgtagtctacgacgattttggacagatgagagattcaacatctaatcccaatc

SEQ ID NO: 377660 - DNA, 55 bp, Artificial
  Synthetic oligonucleotide
cgttgtatcaagagaacagagcgggtcatcactggtgaaacctcaatgccagccg

SEQ ID NO: 377661 - DNA, 55 bp, Artificial
  Synthetic oligonucleotide
cgttgtatgagttatttcttctgactcagggcagtattttggccacacctgggct

SEQ ID NO: 377662 - DNA, 55 bp, Artificial
  Synthetic oligonucleotide
cgttgtatgctggctataaaatatctgcagctcttagaagaggagtacgagccca

SEQ ID NO: 377663 - DNA, 58 bp, Artificial
  Synthetic oligonucleotide
cgttgtatgctggtctcagtgttacagcaacccctttgattatatagtagtcgtaagg

SEQ ID NO: 377664 - DNA, 54 bp, Artificial
  Synthetic oligonucleotide
cgttgtatgttagccgtaaagtatttacagttagtagagtctacgtattcccca

SEQ ID NO: 377665 - DNA, 55 bp, Artificial
  Synthetic oligonucleotide
cgttgtattattatcaacagacggacgaggcgaataaatggatatccatgggaga

SEQ ID NO: 377666 - DNA, 55 bp, Artificial
  Synthetic oligonucleotide
cgttgtcacaagaaatagatgtgtcccaacttatagacctagcaacactaccgct

SEQ ID NO: 377667 - DNA, 57 bp, Artificial
  Synthetic oligonucleotide
cgttgtcactctggacttgggaaaccgagtctcccggctctagtgcggttgtgggca

SEQ ID NO: 377668 - DNA, 56 bp, Artificial
  Synthetic oligonucleotide
cgttgtcagtggtctagtgggggcggccgtcggaagcataggcctgggtaagatac

SEQ ID NO: 377669 - DNA, 55 bp, Artificial
  Synthetic oligonucleotide
cgttgtcatatatgaaggaaggagtttcaactggcaaatcccaatctttcaacgt

SEQ ID NO: 377670 - DNA, 55 bp, Artificial
  Synthetic oligonucleotide
cgttgtccacgtttgtaacatatcctagctatgttaagtctgttcccaatcgcac

SEQ ID NO: 377671 - DNA, 54 bp, Artificial
  Synthetic oligonucleotide
cgttgtcccaggggtggggggagttcatctgttgcaacaaccaggaaacgtgtg

SEQ ID NO: 377672 - DNA, 54 bp, Artificial
  Synthetic oligonucleotide
cgttgtcccggcgaaagtgtcctttgtggactacgttcaaggaccctgatcagg

SEQ ID NO: 377673 - DNA, 60 bp, Artificial
  Synthetic oligonucleotide
cgttgtccgtgccattgatatctgctcctaagcctacgaaaatttcgatcaattctattg

SEQ ID NO: 377674 - DNA, 60 bp, Artificial
  Synthetic oligonucleotide
cgttgtcctgactaattcattcagctgacccattgacattgtgatgttggactcctctct

SEQ ID NO: 377675 - DNA, 55 bp, Artificial
  Synthetic oligonucleotide
cgttgtcgaagtccgttgtggttgtcgatgggcccattctcatggactgtgaacg

SEQ ID NO: 377676 - DNA, 60 bp, Artificial
  Synthetic oligonucleotide
cgttgtcgggattacatcaagctgcaaagtatgtctgtctcgggagtgatacatgcgaag

SEQ ID NO: 377677 - DNA, 55 bp, Artificial
  Synthetic oligonucleotide
cgttgtctaaagaactgttgatggcaatcgaagctattcatgccgcgtcttctct

SEQ ID NO: 377678 - DNA, 55 bp, Artificial
  Synthetic oligonucleotide
cgttgtctatgagtttacaacaaggtccactgagtctatagagtctctactgaga

SEQ ID NO: 377679 - DNA, 55 bp, Artificial
  Synthetic oligonucleotide
cgttgtctcaaccacatacggctaagttcaagttctctctgacaggacccgtcgg

SEQ ID NO: 377680 - DNA, 55 bp, Artificial
  Synthetic oligonucleotide
cgttgtctcagaaggcttccctcgattctccgacgttcaccggtgtaccgaaatg

SEQ ID NO: 377681 - DNA, 54 bp, Artificial
  Synthetic oligonucleotide
cgttgtctctcggaaagtaacgatgggttgcctcttaggggtccatcgggttgc

SEQ ID NO: 377682 - DNA, 55 bp, Artificial
  Synthetic oligonucleotide
cgttgtctgagagataaattactgttagcgctcttgatgattgacgcaatactct

SEQ ID NO: 377683 - DNA, 55 bp, Artificial
  Synthetic oligonucleotide
cgttgtgaaactcccatcatcagagcataattgactagattgcacagtgcacttc

SEQ ID NO: 377684 - DNA, 56 bp, Artificial
  Synthetic oligonucleotide
cgttgtgcatatggtgcggactcttcctttgggaagtcacgaccctaatttcggtc

SEQ ID NO: 377685 - DNA, 55 bp, Artificial
  Synthetic oligonucleotide
cgttgtgcctaacctattcagttcgcgataggggtgtaacgcctcagctaagtca

SEQ ID NO: 377686 - DNA, 54 bp, Artificial
  Synthetic oligonucleotide
cgttgtggaatgggaaacgccggttatttaggacgacattcgatgcctacctac

SEQ ID NO: 377687 - DNA, 55 bp, Artificial
  Synthetic oligonucleotide
cgttgtggcaccagatgtatcgggtcaacgatatcgctggcgatcaagtcaccgc

SEQ ID NO: 377688 - DNA, 60 bp, Artificial
  Synthetic oligonucleotide
cgttgtggttgatcgtaaaccccacttgagcccgacaggatgtcttcatacatttgatga

SEQ ID NO: 377689 - DNA, 55 bp, Artificial
  Synthetic oligonucleotide
cgttgtgtgcgccgttcaggccagtgaaggagaaaccacgcttgaaggcggtgac

SEQ ID NO: 377690 - DNA, 55 bp, Artificial
  Synthetic oligonucleotide
cgttgttatcaatgtcattcgggcgaattgtatcgcgtgacttcggactctgacg

SEQ ID NO: 377691 - DNA, 55 bp, Artificial
  Synthetic oligonucleotide
cgttgttatccgttcccaacatctctatatccattgtttcagtattgcgaagtgc

SEQ ID NO: 377692 - DNA, 55 bp, Artificial
  Synthetic oligonucleotide
cgttgttattccattagcgacttgacaccaggatatagaggagaaaacgcacgag

SEQ ID NO: 377693 - DNA, 60 bp, Artificial
  Synthetic oligonucleotide
cgttgttcaaacaactccctgacaattgcaaactcagtgcctcaaagtagtcctctatca

SEQ ID NO: 377694 - DNA, 53 bp, Artificial
  Synthetic oligonucleotide
cgttgttcatacaacgaaaatggcgagtaaatggaattggtctggtacgaaag

SEQ ID NO: 377695 - DNA, 55 bp, Artificial
  Synthetic oligonucleotide
cgttgttcctgacgacgcagatcactggtcctggcttcgaaggcgcgagtcgcgt

SEQ ID NO: 377696 - DNA, 54 bp, Artificial
  Synthetic oligonucleotide
cgttgttcgaggcatggtttgtacgtatgttaccgctcattaaactaggtaaac

SEQ ID NO: 377697 - DNA, 57 bp, Artificial
  Synthetic oligonucleotide
cgttgttgtaccgggagttctccatacggaaccatgcaagggtgttgcttggtctga

SEQ ID NO: 377698 - DNA, 60 bp, Artificial
  Synthetic oligonucleotide
cgttgttgtcgcctgagatgcacgacatctggatgaccacgttctgtccgatcccgatgc

SEQ ID NO: 377699 - DNA, 60 bp, Artificial
  Synthetic oligonucleotide
cgtttaaaggattcgtatatgtagttgtagtggtggccgcttgtgcaggagagctgctgt

SEQ ID NO: 377700 - DNA, 55 bp, Artificial
  Synthetic oligonucleotide
cgtttaaagtacacacccataaatcttcagaacaacatccctttcgcactggatt

SEQ ID NO: 377701 - DNA, 58 bp, Artificial
  Synthetic oligonucleotide
cgtttaacgcctcagcggcagcgtcgttagctgtctggcaacctcctctagaacttct

SEQ ID NO: 377702 - DNA, 54 bp, Artificial
  Synthetic oligonucleotide
cgtttaagaccgatgcgccgggtgtacgggtgtataatgttagtgtaacgggca

SEQ ID NO: 377703 - DNA, 54 bp, Artificial
  Synthetic oligonucleotide
cgtttaaggctaaccttacgactaactttagtcgattaatgctaacgcaatgac

SEQ ID NO: 377704 - DNA, 58 bp, Artificial
  Synthetic oligonucleotide
cgtttaaggtcaattctgtcaatacctaatggtatctgtcattcaacggcgagttgta

SEQ ID NO: 377705 - DNA, 55 bp, Artificial
  Synthetic oligonucleotide
cgtttaatcacgtgattttagtacgattgagtaagccgaccaatttattgtattc

SEQ ID NO: 377706 - DNA, 52 bp, Artificial
  Synthetic oligonucleotide
cgtttaatgatatttcgacacaaacgtctacaattactaaaaaacttagatt

SEQ ID NO: 377707 - DNA, 56 bp, Artificial
  Synthetic oligonucleotide
cgtttaattcttcaggcataatactggtatatacgtccgttaataatataatagtg

SEQ ID NO: 377708 - DNA, 55 bp, Artificial
  Synthetic oligonucleotide
cgtttaattggcccatggacattgtaatgttcgactccgctctccgggctcccac

SEQ ID NO: 377709 - DNA, 57 bp, Artificial
  Synthetic oligonucleotide
cgtttacacagcacggaccgttgctgtcagatacaaaactctacggagtaatgaagt

SEQ ID NO: 377710 - DNA, 55 bp, Artificial
  Synthetic oligonucleotide
cgtttacagcgtctttcatcaacgggatcgaatggcatgacgttgccgaggacca

SEQ ID NO: 377711 - DNA, 57 bp, Artificial
  Synthetic oligonucleotide
cgtttacataggcctgctttaacatccaggcgtggtactgttcgctttagtagatta

SEQ ID NO: 377712 - DNA, 60 bp, Artificial
  Synthetic oligonucleotide
cgtttacatgttgggatcagccccatcttattggatatatgatattaaacagtattcgga

SEQ ID NO: 377713 - DNA, 55 bp, Artificial
  Synthetic oligonucleotide
cgtttaccctaaatttgcattgtcattacaaagcaagaatttagataaaacatta

SEQ ID NO: 377714 - DNA, 52 bp, Artificial
  Synthetic oligonucleotide
cgtttaccgtaccttataagacaaaacttgctgaaccattaaatcaaaccga

SEQ ID NO: 377715 - DNA, 58 bp, Artificial
  Synthetic oligonucleotide
cgtttacgccaactccctgcatgtgagtgacaaacctttcccgggagcaactcatgtg

SEQ ID NO: 377716 - DNA, 55 bp, Artificial
  Synthetic oligonucleotide
cgtttacgctaaactgcgctcaatacatcgcacccacggtaccctccggaatagg

SEQ ID NO: 377717 - DNA, 55 bp, Artificial
  Synthetic oligonucleotide
cgtttactaagagtcgaacacaaccgtcgatgcaaaacatgcctcccactctatg

SEQ ID NO: 377718 - DNA, 56 bp, Artificial
  Synthetic oligonucleotide
cgtttactgtggttcgttaccgtggcttgcccgtactgccgattgatgcgtacgtc

SEQ ID NO: 377719 - DNA, 58 bp, Artificial
  Synthetic oligonucleotide
cgtttagaaggcatgttgactaaacttgagtaccgattgactccctctggcaactctc

SEQ ID NO: 377720 - DNA, 60 bp, Artificial
  Synthetic oligonucleotide
cgtttagaaggcatgttgactaatattgagtaccgagtgactcgccttggcaactctctc

SEQ ID NO: 377721 - DNA, 57 bp, Artificial
  Synthetic oligonucleotide
cgtttagactaccacgccgctgagacttcctttcgtgacgaaaggaagcacgtgaga

SEQ ID NO: 377722 - DNA, 58 bp, Artificial
  Synthetic oligonucleotide
cgtttagagggtggcattgacttggtcaatcgggtctcagatacttctcccctgtata

SEQ ID NO: 377723 - DNA, 55 bp, Artificial
  Synthetic oligonucleotide
cgtttagaggtgggctaaacaggatcgtggagtggataatggctccggaagaacc

SEQ ID NO: 377724 - DNA, 55 bp, Artificial
  Synthetic oligonucleotide
cgtttagatacgcagtatttctttgttcctcttcgacttatatggtcgaatttcc

SEQ ID NO: 377725 - DNA, 58 bp, Artificial
  Synthetic oligonucleotide
cgtttagatggattagacctgaatacatctcctggttatccgtactgtacgcagggag

SEQ ID NO: 377726 - DNA, 55 bp, Artificial
  Synthetic oligonucleotide
cgtttagcgattgatagttgtattgaatttgttgcgcgagctgtcgctcaaagtc

SEQ ID NO: 377727 - DNA, 57 bp, Artificial
  Synthetic oligonucleotide
cgtttaggcacctatctaacgcgatggctggcgtcccgagaatcacgtaccgagtcc

SEQ ID NO: 377728 - DNA, 55 bp, Artificial
  Synthetic oligonucleotide
cgtttaggtccacaacgatcaggactgttctttattcactccggttatatcttag

SEQ ID NO: 377729 - DNA, 57 bp, Artificial
  Synthetic oligonucleotide
cgtttagtcccaacggaggtgtacgacgctctgttcacttacacaagagccgtcaga

SEQ ID NO: 377730 - DNA, 55 bp, Artificial
  Synthetic oligonucleotide
cgtttagtcgctttgagcagacataagtcgaagttaatcatcagggccgacgcgg

SEQ ID NO: 377731 - DNA, 55 bp, Artificial
  Synthetic oligonucleotide
cgtttataacgatatacagggcggttgaagatttggcctctggaaggaagtggag

SEQ ID NO: 377732 - DNA, 53 bp, Artificial
  Synthetic oligonucleotide
cgtttataataatccaaaagtcgcaattgtagagttactggataataaagaag

SEQ ID NO: 377733 - DNA, 60 bp, Artificial
  Synthetic oligonucleotide
cgtttatagatctacgccacttccattgtgcagaggagcaaggaatcactgattacatac

SEQ ID NO: 377734 - DNA, 60 bp, Artificial
  Synthetic oligonucleotide
cgtttatccagcattcggaatgcaaagaatgcactataggaacggtgatcctcagactcc

SEQ ID NO: 377735 - DNA, 57 bp, Artificial
  Synthetic oligonucleotide
cgtttatcgtttaagggaaccgttaagattgaacgtgtgcatgctgacgtgaacatg

SEQ ID NO: 377736 - DNA, 52 bp, Artificial
  Synthetic oligonucleotide
cgtttatcgttttaaaggtttcgccctttcactctccagtgttgagttcttc

SEQ ID NO: 377737 - DNA, 58 bp, Artificial
  Synthetic oligonucleotide
cgtttatcttgccagggctcaactttccagaaagcactcctaattagccctcatagat

SEQ ID NO: 377738 - DNA, 59 bp, Artificial
  Synthetic oligonucleotide
cgtttatgatccaattgcgccacaatgttctgagccgaacgtagttgtgtacaacgttc

SEQ ID NO: 377739 - DNA, 57 bp, Artificial
  Synthetic oligonucleotide
cgtttatgcctagaatcctgtgaattgtccaaatttaatgtagaatgtgaattgggc

SEQ ID NO: 377740 - DNA, 60 bp, Artificial
  Synthetic oligonucleotide
cgtttatgcgtcggagttatcagtgatgaaggtagacatgcgacatctttcgttgatgca

SEQ ID NO: 377741 - DNA, 54 bp, Artificial
  Synthetic oligonucleotide
cgtttatgctggccgctaaatagttaattttacacgtggtacagtctagtttgt

SEQ ID NO: 377742 - DNA, 55 bp, Artificial
  Synthetic oligonucleotide
cgtttatggcaagttatgtacaacggcagtccggtagctcacttccatgacggca

SEQ ID NO: 377743 - DNA, 55 bp, Artificial
  Synthetic oligonucleotide
cgtttatgtcactcaaaagtgccttaaatgtggcttcttgtttaacgatcgcctt

SEQ ID NO: 377744 - DNA, 58 bp, Artificial
  Synthetic oligonucleotide
cgtttattcgtgcagacgtatttcccctcgaattgaataagcacgtggagatgagggc

SEQ ID NO: 377745 - DNA, 59 bp, Artificial
  Synthetic oligonucleotide
cgtttattgggacctgttgtctatactcgataacgcaatgatcaattttcatacaacta

SEQ ID NO: 377746 - DNA, 55 bp, Artificial
  Synthetic oligonucleotide
cgtttcaacttggtgaaatgaatcggggaatgggtccttatttatagcagagtcc

SEQ ID NO: 377747 - DNA, 55 bp, Artificial
  Synthetic oligonucleotide
cgtttcaatgcactacaagagaatctcatggacatttatgagtcaggtcgagacg

SEQ ID NO: 377748 - DNA, 59 bp, Artificial
  Synthetic oligonucleotide
cgtttcacactacgtaacagagggtagcagcttagaccgtgaagcatatagtcgcggaa

SEQ ID NO: 377749 - DNA, 57 bp, Artificial
  Synthetic oligonucleotide
cgtttcaccgacaggtaggattgtcggaggtagtccaacatctatagacgagattcc

SEQ ID NO: 377750 - DNA, 55 bp, Artificial
  Synthetic oligonucleotide
cgtttcatgactggatcaccgatcaagagacagcatatgaatcagccgaacagcg

SEQ ID NO: 377751 - DNA, 52 bp, Artificial
  Synthetic oligonucleotide
cgtttcatgagaatgctccctcaagcttagataacgctccttcggctataag

SEQ ID NO: 377752 - DNA, 59 bp, Artificial
  Synthetic oligonucleotide
cgtttcattgaggtacgagccattgtgaaccagccaacactgcggtaaagaatgccttc

SEQ ID NO: 377753 - DNA, 56 bp, Artificial
  Synthetic oligonucleotide
cgtttccaaaaatacccctgtctttgtgcctggtaggcgcgtgagagtggactgaa

SEQ ID NO: 377754 - DNA, 51 bp, Artificial
  Synthetic oligonucleotide
cgtttccaaggcgtagaccaggaggggcagattaaccttaacgggtatgta

SEQ ID NO: 377755 - DNA, 55 bp, Artificial
  Synthetic oligonucleotide
cgtttccaccgccctcaacacaatcgctggagagctcagggttgggatccacggc

SEQ ID NO: 377756 - DNA, 50 bp, Artificial
  Synthetic oligonucleotide
cgtttccgcgagccattgcggtcaaccaaggagcgggcgattgttccccc

SEQ ID NO: 377757 - DNA, 56 bp, Artificial
  Synthetic oligonucleotide
cgtttcgaacgcgatgaagttagtttatgacacagacctacaaatgcactgtttac

SEQ ID NO: 377758 - DNA, 59 bp, Artificial
  Synthetic oligonucleotide
cgtttcgaaggtacgtcgacgactgaacttcgacagcccatatactcgccgtgctgctg

SEQ ID NO: 377759 - DNA, 60 bp, Artificial
  Synthetic oligonucleotide
cgtttcgactctaccgcacaaccaggcagccgtgtcatctgtcaaacacaagctgtgggc

SEQ ID NO: 377760 - DNA, 60 bp, Artificial
  Synthetic oligonucleotide
cgtttcgagcccgatctgcttgctttcgagattcctcggccgctcgctgggctgcctcgg

SEQ ID NO: 377761 - DNA, 56 bp, Artificial
  Synthetic oligonucleotide
cgtttcgcaagcgttaccttcctgacggtactcctggtggtatcagttctgagcta

SEQ ID NO: 377762 - DNA, 54 bp, Artificial
  Synthetic oligonucleotide
cgtttcgctacactagcacgtaataaagctaaacatttaacagttggtactggt

SEQ ID NO: 377763 - DNA, 54 bp, Artificial
  Synthetic oligonucleotide
cgtttcggatcgccctctttccacatatcgccagaccaaaacgcgtaagacggg

SEQ ID NO: 377764 - DNA, 58 bp, Artificial
  Synthetic oligonucleotide
cgtttcggttgaggcatattgacttggtcaatcggtactcaaccaacttggctatgca

SEQ ID NO: 377765 - DNA, 52 bp, Artificial
  Synthetic oligonucleotide
cgtttcgtgtattgtaacccgggttttgtaattgcggtttgtcagattctgg

SEQ ID NO: 377766 - DNA, 55 bp, Artificial
  Synthetic oligonucleotide
cgtttcgttgacctttcgtggttactaggtgtgcacttcttcatgaaaggcgtgc

SEQ ID NO: 377767 - DNA, 52 bp, Artificial
  Synthetic oligonucleotide
cgtttcgtttgaactgaagtcatcataccccacaaccaacggactatagggg

SEQ ID NO: 377768 - DNA, 59 bp, Artificial
  Synthetic oligonucleotide
cgtttctaatgtacgcataatcggaatgggagacagagcagtcgagcctaacattaggg

SEQ ID NO: 377769 - DNA, 56 bp, Artificial
  Synthetic oligonucleotide
cgtttctacctgacggcgttaatagcttgccaacatatgcggagttattcggaccg

SEQ ID NO: 377770 - DNA, 55 bp, Artificial
  Synthetic oligonucleotide
cgtttctaggaagtctgacaatgtaaaggttatgtagtcagaattccaaattact

SEQ ID NO: 377771 - DNA, 53 bp, Artificial
  Synthetic oligonucleotide
cgtttctcaagggtcggagttcgtttgcgaggagacgtagggctaataaacta

SEQ ID NO: 377772 - DNA, 55 bp, Artificial
  Synthetic oligonucleotide
cgtttctcatagcgttctccattgtgggagcatcgcagcaatacttcggggagac

SEQ ID NO: 377773 - DNA, 57 bp, Artificial
  Synthetic oligonucleotide
cgtttctcatggctcagtttactagtgccatttgttcagtggttcgccgggctttcc

SEQ ID NO: 377774 - DNA, 55 bp, Artificial
  Synthetic oligonucleotide
cgtttctccaccctggacagtcatgcaagcaattgtgagagctggcatagaacca

SEQ ID NO: 377775 - DNA, 60 bp, Artificial
  Synthetic oligonucleotide
cgtttctctgggcacagttgtgcatccctctggcagcgcttatcattctgttccgctgct

SEQ ID NO: 377776 - DNA, 55 bp, Artificial
  Synthetic oligonucleotide
cgtttctcttgatccatcagatgttccacgtactccagaagagtgatggacagaa

SEQ ID NO: 377777 - DNA, 55 bp, Artificial
  Synthetic oligonucleotide
cgtttctgatcgtacgacactgcggagcatcatagacgatcatctgagaggtatg

SEQ ID NO: 377778 - DNA, 59 bp, Artificial
  Synthetic oligonucleotide
cgtttctggatttacagtagtatcaatgtaggtcgtcagcactggcccttgaactgaac

SEQ ID NO: 377779 - DNA, 55 bp, Artificial
  Synthetic oligonucleotide
cgtttctgtcccagatagatagatccccaaagttcaacagccgtctgtacggtag

SEQ ID NO: 377780 - DNA, 60 bp, Artificial
  Synthetic oligonucleotide
cgtttctgtgtatagactgtttgagattggcgcttggccgactcattgtcttaccatagg

SEQ ID NO: 377781 - DNA, 53 bp, Artificial
  Synthetic oligonucleotide
cgtttcttagggttttaatgtgatgatttgtaaggctgagttttaaggtttga

SEQ ID NO: 377782 - DNA, 54 bp, Artificial
  Synthetic oligonucleotide
cgtttctttgtctatagtaagacacctggtagtgactatgtgtgtggtacaggc

SEQ ID NO: 377783 - DNA, 57 bp, Artificial
  Synthetic oligonucleotide
cgtttcttttccctttgtatcgacatgatggcggcgtctaaggtgtatagagtttgc

SEQ ID NO: 377784 - DNA, 57 bp, Artificial
  Synthetic oligonucleotide
cgtttgaaaaatcgagaacggttcgaaacgagactacgacatgaggctggcgctgaa

SEQ ID NO: 377785 - DNA, 55 bp, Artificial
  Synthetic oligonucleotide
cgtttgaaaacatgcgtcttctggggagatatgagatccccaacaactgctgacc

SEQ ID NO: 377786 - DNA, 56 bp, Artificial
  Synthetic oligonucleotide
cgtttgaaagggaccgcctgccaagtccatacgtgggagacagctttgaggaagat

SEQ ID NO: 377787 - DNA, 55 bp, Artificial
  Synthetic oligonucleotide
cgtttgaacagcgtcatgatatctctcatactgggaaggtgatgtgcatctccga

SEQ ID NO: 377788 - DNA, 52 bp, Artificial
  Synthetic oligonucleotide
cgtttgaaggcaccaaggaaccagcggtcctcagaaacggggatccacggct

SEQ ID NO: 377789 - DNA, 60 bp, Artificial
  Synthetic oligonucleotide
cgtttgaatacatctcttgaagaggaggcatttcacaagcaagttgcagactctcagtgg

SEQ ID NO: 377790 - DNA, 52 bp, Artificial
  Synthetic oligonucleotide
cgtttgaccaatgactcgaatgggaatgcgcaaaccctttacggggttggtt

SEQ ID NO: 377791 - DNA, 60 bp, Artificial
  Synthetic oligonucleotide
cgtttgacccgggctactgctgcgaaagtgattctgaggccatccactctgactacagcg

SEQ ID NO: 377792 - DNA, 57 bp, Artificial
  Synthetic oligonucleotide
cgtttgacgatttggtcaagtgcgttgaaccattcgctagacgcagtttttcaatac

SEQ ID NO: 377793 - DNA, 55 bp, Artificial
  Synthetic oligonucleotide
cgtttgacggcacgcgtgttgactgtgagcaaacgttgatagaccgcataagttt

SEQ ID NO: 377794 - DNA, 55 bp, Artificial
  Synthetic oligonucleotide
cgtttgagaagacccgggaattgaagtctaagtgtccactcaggtagttatgtgg

SEQ ID NO: 377795 - DNA, 60 bp, Artificial
  Synthetic oligonucleotide
cgtttgagagagcaaccgttatggcagcgttcagtgggaacaatgaaggacgaacatcag

SEQ ID NO: 377796 - DNA, 55 bp, Artificial
  Synthetic oligonucleotide
cgtttgaggaaataccctttgatgtacagaaattcgcggatttagtgactgactc

SEQ ID NO: 377797 - DNA, 59 bp, Artificial
  Synthetic oligonucleotide
cgtttgattcttagcacaaatggtaatatctgtcgagctattaacttgttaactcacga

SEQ ID NO: 377798 - DNA, 55 bp, Artificial
  Synthetic oligonucleotide
cgtttgattcttcagtcactgttcttggtcatgagacgtgtagtattggtcatgc

SEQ ID NO: 377799 - DNA, 56 bp, Artificial
  Synthetic oligonucleotide
cgtttgcaagcaaggcgttgtggatagaggatggggaaacggatgcggactgtttg

SEQ ID NO: 377800 - DNA, 51 bp, Artificial
  Synthetic oligonucleotide
cgtttgcaagcttgtccgtcccctacaggcaacacacggcaagggtgcaag

SEQ ID NO: 377801 - DNA, 60 bp, Artificial
  Synthetic oligonucleotide
cgtttgcacgggacgcgctagccatgcctgagtgtcagtcgtggggagtgtgacccattt

SEQ ID NO: 377802 - DNA, 55 bp, Artificial
  Synthetic oligonucleotide
cgtttgcagacgtattaccagtgtttgaaaagtacaaagcatatgactgtcatgt

SEQ ID NO: 377803 - DNA, 57 bp, Artificial
  Synthetic oligonucleotide
cgtttgcagcggtgactgtggccctcttggacaatgttaaaagtcgtaaaagtgtca

SEQ ID NO: 377804 - DNA, 59 bp, Artificial
  Synthetic oligonucleotide
cgtttgcaggttttacacaggttcagtgcaactgttactggtggacaatatgcgtctaa

SEQ ID NO: 377805 - DNA, 55 bp, Artificial
  Synthetic oligonucleotide
cgtttgcatcaatgggtcttgtacagtagtaatgactgatggaagtgcctcaggg

SEQ ID NO: 377806 - DNA, 55 bp, Artificial
  Synthetic oligonucleotide
cgtttgcatctgacaccttgtagtataacttccaaggaattgggtcttttagcga

SEQ ID NO: 377807 - DNA, 52 bp, Artificial
  Synthetic oligonucleotide
cgtttgcgaacccactagagctgcaaccgttaatgtcaccagcggtatctcg

SEQ ID NO: 377808 - DNA, 55 bp, Artificial
  Synthetic oligonucleotide
cgtttgcggagattgcatatacactgtgccaagcttcagctaataggccctggga

SEQ ID NO: 377809 - DNA, 54 bp, Artificial
  Synthetic oligonucleotide
cgtttgcgttagaaacaaaataaggcgaccgcctgtaaatgcgccctgccgagg

SEQ ID NO: 377810 - DNA, 56 bp, Artificial
  Synthetic oligonucleotide
cgtttgctactacagacccggtccttgtggtacggtgtctgtcttcatgtcggacg

SEQ ID NO: 377811 - DNA, 55 bp, Artificial
  Synthetic oligonucleotide
cgtttgctgttgcccaactcttgagtgctccttgctctggtttatctaaccagag

SEQ ID NO: 377812 - DNA, 54 bp, Artificial
  Synthetic oligonucleotide
cgtttgcttcggatagcaaccgcagcgacagttttgagagagacaatctttcgc

SEQ ID NO: 377813 - DNA, 59 bp, Artificial
  Synthetic oligonucleotide
cgtttggaaaatgcgctattccgacttaccgactgtgagacaatgcgaattcatacact

SEQ ID NO: 377814 - DNA, 53 bp, Artificial
  Synthetic oligonucleotide
cgtttggaaacatcaccaactgtgacaagacaggtgaagctgggcacacactg

SEQ ID NO: 377815 - DNA, 55 bp, Artificial
  Synthetic oligonucleotide
cgtttggaaggctctttgtaccaacttactcaggccttgttagttctgctgtggc

SEQ ID NO: 377816 - DNA, 56 bp, Artificial
  Synthetic oligonucleotide
cgtttggacaatcacgaatgtttatcccacacattacacttagttttagcaacaaa

SEQ ID NO: 377817 - DNA, 55 bp, Artificial
  Synthetic oligonucleotide
cgtttggagagcttttaggatgggaaattgtgcgaaccaaaaagctagcggatgg

SEQ ID NO: 377818 - DNA, 60 bp, Artificial
  Synthetic oligonucleotide
cgtttggcaagattggatatgtgtcctaaaggagatttgcgcgcaattttgcatcagact

SEQ ID NO: 377819 - DNA, 59 bp, Artificial
  Synthetic oligonucleotide
cgtttggcagctcgaaggcgcagtgctccatactcctggatgtgtcccctgtgagaaga

SEQ ID NO: 377820 - DNA, 50 bp, Artificial
  Synthetic oligonucleotide
cgtttggccagttaacacgctgcccggtcttcctcgcgattatttctcca

SEQ ID NO: 377821 - DNA, 55 bp, Artificial
  Synthetic oligonucleotide
cgtttggccctgtcgatcacactgttttgtttaatgctagccggttataccaagg

SEQ ID NO: 377822 - DNA, 57 bp, Artificial
  Synthetic oligonucleotide
cgtttggcggggtaaccaacactgcagcgcaaggctacccggtgcctctgctttatg

SEQ ID NO: 377823 - DNA, 52 bp, Artificial
  Synthetic oligonucleotide
cgtttggcgtggggtggccgaaggaagggactctagactttagggtggtagc

SEQ ID NO: 377824 - DNA, 57 bp, Artificial
  Synthetic oligonucleotide
cgtttgggtggcatttttgtaataaaggctgtgtacaccgattggagctctctcaaa

SEQ ID NO: 377825 - DNA, 55 bp, Artificial
  Synthetic oligonucleotide
cgtttgggtgtggttcctttaggtcataaggtgaatctgaaatagtgagtatggg

SEQ ID NO: 377826 - DNA, 54 bp, Artificial
  Synthetic oligonucleotide
cgtttggtacgccgtgtccctaacctacgccgtgctgctaacggtgctacctat

SEQ ID NO: 377827 - DNA, 53 bp, Artificial
  Synthetic oligonucleotide
cgtttggtctagtcagtttgaatgcgaagaaccaccgaaaccgaaatttatac

SEQ ID NO: 377828 - DNA, 56 bp, Artificial
  Synthetic oligonucleotide
cgtttggttaaacgtaagcatgtccttgctgttaatgtatcccgtgacatagttgg

SEQ ID NO: 377829 - DNA, 55 bp, Artificial
  Synthetic oligonucleotide
cgtttggtttgggcctgtacaggagttgaagtaggtcgtggtcagccattaggag

SEQ ID NO: 377830 - DNA, 57 bp, Artificial
  Synthetic oligonucleotide
cgtttgtactctacaactccggttatgtgcaatgcgtttccacttccaatgcgtttc

SEQ ID NO: 377831 - DNA, 56 bp, Artificial
  Synthetic oligonucleotide
cgtttgtagaaaaagcaaacacagcactagccacacaagaccctaaatactttaga

SEQ ID NO: 377832 - DNA, 55 bp, Artificial
  Synthetic oligonucleotide
cgtttgtatcgctaaccctgtagtatagtttccatggaatggggtctttaagcga

SEQ ID NO: 377833 - DNA, 60 bp, Artificial
  Synthetic oligonucleotide
cgtttgtctagaacaatgatgcatagtgcgttgctaaaggaatctaaagctcgatccttg

SEQ ID NO: 377834 - DNA, 56 bp, Artificial
  Synthetic oligonucleotide
cgtttgtgaccttcttggttccttctcccgtggctctgacgaggggaacaggcaca

SEQ ID NO: 377835 - DNA, 52 bp, Artificial
  Synthetic oligonucleotide
cgtttgtggagaaactgagtattccgcgtggtaaacacgatgtgggtgaaaa

SEQ ID NO: 377836 - DNA, 59 bp, Artificial
  Synthetic oligonucleotide
cgtttgtggatagaataacgttcactgcgtcattgcgcgctattttgaacggtcgcctg

SEQ ID NO: 377837 - DNA, 58 bp, Artificial
  Synthetic oligonucleotide
cgttttaaaggaacaatcaagattgaccgtgttcatgctgaggtgaatatggacggta

SEQ ID NO: 377838 - DNA, 56 bp, Artificial
  Synthetic oligonucleotide
cgttttaacgaaggaagtttggtgccgtcagaatggatagtgtatcacgatcaatt

SEQ ID NO: 377839 - DNA, 60 bp, Artificial
  Synthetic oligonucleotide
cgttttaagctaatgcatgcagtgggaattaatgttcagagtacagagtggacgctttta

SEQ ID NO: 377840 - DNA, 51 bp, Artificial
  Synthetic oligonucleotide
cgttttacaaagagcaaatcgcatttgggcagtcaaggatgtttattcctc

SEQ ID NO: 377841 - DNA, 55 bp, Artificial
  Synthetic oligonucleotide
cgttttactatctttactcagagtcgtgtattgtcaagttttgaacctcgctcag

SEQ ID NO: 377842 - DNA, 53 bp, Artificial
  Synthetic oligonucleotide
cgttttacttgttccgttcgctactctttccggtccttgcttgttgagcaagt

SEQ ID NO: 377843 - DNA, 54 bp, Artificial
  Synthetic oligonucleotide
cgttttagataaagcgcttaagcctggcggtacaatctggtctgctattaagaa

SEQ ID NO: 377844 - DNA, 55 bp, Artificial
  Synthetic oligonucleotide
cgttttagtccaatatgggatggcagtcctgacgccccgaggataggttagggag

SEQ ID NO: 377845 - DNA, 54 bp, Artificial
  Synthetic oligonucleotide
cgttttagttgttggtcatcgtttaaggacgttgaccgtgaatcgtgtaatggc

SEQ ID NO: 377846 - DNA, 52 bp, Artificial
  Synthetic oligonucleotide
cgttttataagcccgtaataacctacaacatgtttggggaacccaatcctca

SEQ ID NO: 377847 - DNA, 60 bp, Artificial
  Synthetic oligonucleotide
cgttttatcgctttcagcgccaacttgtgttcgggcaacacgcatatctcgagcgcgccc

SEQ ID NO: 377848 - DNA, 52 bp, Artificial
  Synthetic oligonucleotide
cgttttatgaaggacttgcattttaccgggacaaacggtgttggtgaggtag

SEQ ID NO: 377849 - DNA, 55 bp, Artificial
  Synthetic oligonucleotide
cgttttatgatctactagaaggagtggacgatctaccaactgtcagcactatcgg

SEQ ID NO: 377850 - DNA, 51 bp, Artificial
  Synthetic oligonucleotide
cgttttattatggtcaacgacgaattgtttaataacgtggccactcaacga

SEQ ID NO: 377851 - DNA, 57 bp, Artificial
  Synthetic oligonucleotide
cgttttattggattacgcgtagagtcatctttgatgcgggtgcggaatcctcgcgtg

SEQ ID NO: 377852 - DNA, 54 bp, Artificial
  Synthetic oligonucleotide
cgttttatttttaatagcccgattggtgcatttgctcgtgtaggccctcctact

SEQ ID NO: 377853 - DNA, 58 bp, Artificial
  Synthetic oligonucleotide
cgttttcaagttttgcacaagttctacgccaaggttacaggtggacaatatgcaagca

SEQ ID NO: 377854 - DNA, 56 bp, Artificial
  Synthetic oligonucleotide
cgttttcaatagttcactagctctttctccaagtggttggatcccttacgttgaga

SEQ ID NO: 377855 - DNA, 54 bp, Artificial
  Synthetic oligonucleotide
cgttttcaccaagtccaggggacaggcccaaagtgaatggtcaggccgggagga

SEQ ID NO: 377856 - DNA, 54 bp, Artificial
  Synthetic oligonucleotide
cgttttcccatagcggacgatacgtcgcgttcgatcaaccagggttctttcggc

SEQ ID NO: 377857 - DNA, 55 bp, Artificial
  Synthetic oligonucleotide
cgttttccgcgtcaatctaatgaacttatccaaatagcgtgtggtaaaggttatc

SEQ ID NO: 377858 - DNA, 54 bp, Artificial
  Synthetic oligonucleotide
cgttttcgacctcgtcctcggaccctatcaccttcactaccctgacggtagtga

SEQ ID NO: 377859 - DNA, 57 bp, Artificial
  Synthetic oligonucleotide
cgttttcgagctagctctaaaccgtattccattggcccaactgacgtcatattaggc

SEQ ID NO: 377860 - DNA, 55 bp, Artificial
  Synthetic oligonucleotide
cgttttctgaaaggtaccgcggatccttctcacactcttgaaaatttgcctggta

SEQ ID NO: 377861 - DNA, 55 bp, Artificial
  Synthetic oligonucleotide
cgttttgcacatcttggtttcgctgatgcatatgactccgtgatatggtatgggg

SEQ ID NO: 377862 - DNA, 59 bp, Artificial
  Synthetic oligonucleotide
cgttttggaggagccatgttggcttggtcaatcggtactcaacaaacttggctatgcaa

SEQ ID NO: 377863 - DNA, 60 bp, Artificial
  Synthetic oligonucleotide
cgttttggaggagccattgacttggtcaatcggtactcagctctagtcttatgtcaattg

SEQ ID NO: 377864 - DNA, 60 bp, Artificial
  Synthetic oligonucleotide
cgttttggcatcaaccaatgcgggatctattaacgctccaactgtgtcagacagcagggc

SEQ ID NO: 377865 - DNA, 55 bp, Artificial
  Synthetic oligonucleotide
cgttttggtatcggggtctctcaactctctcattgaatcggtgtactggagtctc

SEQ ID NO: 377866 - DNA, 55 bp, Artificial
  Synthetic oligonucleotide
cgttttgtggtatcagaggaagagcggtgatgtaacgacattcattggaaacacg

SEQ ID NO: 377867 - DNA, 57 bp, Artificial
  Synthetic oligonucleotide
cgttttgtttcattcacattaaacatagcattcgaggctcacctaaggcggagaatt

SEQ ID NO: 377868 - DNA, 52 bp, Artificial
  Synthetic oligonucleotide
cgttttgtttcgtattggtatacgtttgagaaggtggaggttggtcgggcga

SEQ ID NO: 377869 - DNA, 53 bp, Artificial
  Synthetic oligonucleotide
cgttttgtttgaacgccgtacttgaagcactattttaagttgtatacgaaatc

SEQ ID NO: 377870 - DNA, 53 bp, Artificial
  Synthetic oligonucleotide
cgtttttaactacgcctacacgtttagtaacatatgacaaccctgcctttgaa

SEQ ID NO: 377871 - DNA, 57 bp, Artificial
  Synthetic oligonucleotide
cgtttttccagagcttgtaccccgggtgcacaaccacctcagggtgcgtcgcatcca

SEQ ID NO: 377872 - DNA, 60 bp, Artificial
  Synthetic oligonucleotide
cgtttttggatactgacaacaggagtgtggcatacactaaaacaagcgtcagctatggag

SEQ ID NO: 377873 - DNA, 53 bp, Artificial
  Synthetic oligonucleotide
cgtttttgggtgagcgggaaagatgggttacaggttctataaaagcaccacac

SEQ ID NO: 377874 - DNA, 54 bp, Artificial
  Synthetic oligonucleotide
cgttttttactgaccgctccggttatgattttaaatcacgatcaaattgcggct

SEQ ID NO: 377875 - DNA, 54 bp, Artificial
  Synthetic oligonucleotide
cgttttttaggttgttgaggatatacaggtccaccaattacgtcttcaattaca

SEQ ID NO: 377876 - DNA, 54 bp, Artificial
  Synthetic oligonucleotide
ctaaaaaagaggtctctattaaaaccacacttaaagagctggtacataagagag

SEQ ID NO: 377877 - DNA, 51 bp, Artificial
  Synthetic oligonucleotide
ctaaaaacttagtgttaggttcggggaaagaggtctactgtgtgtttcgaa

SEQ ID NO: 377878 - DNA, 58 bp, Artificial
  Synthetic oligonucleotide
ctaaaaatagatgtctttcatcttacagcaaacctgaagtttgtacttctcctgagaa

SEQ ID NO: 377879 - DNA, 55 bp, Artificial
  Synthetic oligonucleotide
ctaaaacagcctgcgggttgtacccgcccgcagggcccactgggcgctagtactc

SEQ ID NO: 377880 - DNA, 52 bp, Artificial
  Synthetic oligonucleotide
ctaaaaccatgtgtaaagttaacccctctctgcgtcactttaaattgtaaaa

SEQ ID NO: 377881 - DNA, 51 bp, Artificial
  Synthetic oligonucleotide
ctaaaaccggaaggcgcttggtttcgtatcaattgggtatgatcaaataaa

SEQ ID NO: 377882 - DNA, 55 bp, Artificial
  Synthetic oligonucleotide
ctaaaacctcaaacagcaaatcctacatcaaactccattttggtatccccttcaa

SEQ ID NO: 377883 - DNA, 55 bp, Artificial
  Synthetic oligonucleotide
ctaaaacgaaagtatttcagttcacaagaggttttgcagcttagcccacgactgc

SEQ ID NO: 377884 - DNA, 60 bp, Artificial
  Synthetic oligonucleotide
ctaaaactaagcattgaagacccgagtcatgagggagaggggataccgctatacgatgca

SEQ ID NO: 377885 - DNA, 56 bp, Artificial
  Synthetic oligonucleotide
ctaaaactcagacgactattgtggtttcacatttcctgtcttactttcggaagaga

SEQ ID NO: 377886 - DNA, 55 bp, Artificial
  Synthetic oligonucleotide
ctaaaactcgaagtccattcgagtcaaggaggcttcgtgcccctcaggtagctcg

SEQ ID NO: 377887 - DNA, 55 bp, Artificial
  Synthetic oligonucleotide
ctaaaactgattatgcctgctaggttttatcctaactctaccaaatatttgcccc

SEQ ID NO: 377888 - DNA, 60 bp, Artificial
  Synthetic oligonucleotide
ctaaaactgctatgcgatttaaagtgccattaagccagcagccacaaattcatatttacg

SEQ ID NO: 377889 - DNA, 58 bp, Artificial
  Synthetic oligonucleotide
ctaaaagaatgcttatgtacaacttccccacgagagcaggtcaatgtggcggagtact

SEQ ID NO: 377890 - DNA, 55 bp, Artificial
  Synthetic oligonucleotide
ctaaaagaccttcgaggagctgtgaaatacagggattaaccatctaaagctgaag

SEQ ID NO: 377891 - DNA, 50 bp, Artificial
  Synthetic oligonucleotide
ctaaaagagcactttaagaataagccaataatctttgaaccaccctcagg

SEQ ID NO: 377892 - DNA, 55 bp, Artificial
  Synthetic oligonucleotide
ctaaaagagccagtacatggagtgtactatgacccatcaaaagacttagtagcag

SEQ ID NO: 377893 - DNA, 55 bp, Artificial
  Synthetic oligonucleotide
ctaaaagagttgtttagtagtcttattccatgtcgatcattagctccgccattac

SEQ ID NO: 377894 - DNA, 60 bp, Artificial
  Synthetic oligonucleotide
ctaaaagatggtccagagcgtgtcattctagccggaccgatgccagtgactgtggctagt

SEQ ID NO: 377895 - DNA, 54 bp, Artificial
  Synthetic oligonucleotide
ctaaaagatttgtttcgtattggtatcgtgttgagaaaataacaacgaagcacc

SEQ ID NO: 377896 - DNA, 58 bp, Artificial
  Synthetic oligonucleotide
ctaaaagctccgcttctaggcatgcttgcttccgtacagggacaccaattggggactc

SEQ ID NO: 377897 - DNA, 55 bp, Artificial
  Synthetic oligonucleotide
ctaaaagctctctttctgcccaaaagactcagtataatccactgtccaggacatc

SEQ ID NO: 377898 - DNA, 53 bp, Artificial
  Synthetic oligonucleotide
ctaaaaggaaataaccgatgaatatgatgaaccgccccgggtttcctggagag

SEQ ID NO: 377899 - DNA, 51 bp, Artificial
  Synthetic oligonucleotide
ctaaaaggtcaattagcttgttacgtaatgatggtaaacgtcgagtggata

SEQ ID NO: 377900 - DNA, 58 bp, Artificial
  Synthetic oligonucleotide
ctaaaagtcccgaatgcggaaacagataaccagtccggtccaattgagcatcaggtga

SEQ ID NO: 377901 - DNA, 57 bp, Artificial
  Synthetic oligonucleotide
ctaaaatacgattaactggttagatctgctgaactcttattagccttcgaactcttg

SEQ ID NO: 377902 - DNA, 57 bp, Artificial
  Synthetic oligonucleotide
ctaaaatagttgtggcagtgctactgtttgctgtccatactgtccaaaaaagtacct

SEQ ID NO: 377903 - DNA, 60 bp, Artificial
  Synthetic oligonucleotide
ctaaaatcaatcgtcaggagatcgagggagtgaaattagactctagtgggaatgtgtata

SEQ ID NO: 377904 - DNA, 60 bp, Artificial
  Synthetic oligonucleotide
ctaaaatggcatgtcctagcaatcgaggcatcttaaggaattggtataacccagtagcag

SEQ ID NO: 377905 - DNA, 55 bp, Artificial
  Synthetic oligonucleotide
ctaaaattgatcattcaagtggaacacacacgagtttcgacaaaatttaaactta

SEQ ID NO: 377906 - DNA, 57 bp, Artificial
  Synthetic oligonucleotide
ctaaaattgttgtcagtgttatagatagtattaagcgtggtttgtgtatgcttttat

SEQ ID NO: 377907 - DNA, 57 bp, Artificial
  Synthetic oligonucleotide
ctaaacaaagccacagagtgcctaaagatgaacactaacgaagctttagagtatttc

SEQ ID NO: 377908 - DNA, 55 bp, Artificial
  Synthetic oligonucleotide
ctaaacacgtacgcgaaattgttaatgaatacggtcgtgggtagaagaacaatca

SEQ ID NO: 377909 - DNA, 49 bp, Artificial
  Synthetic oligonucleotide
ctaaacagtgtccgattactaatgggggggggtccggggggggcttgcc

SEQ ID NO: 377910 - DNA, 55 bp, Artificial
  Synthetic oligonucleotide
ctaaacagtttactggtgaacgggttgtccatccagcttacggctaaaatggtca

SEQ ID NO: 377911 - DNA, 54 bp, Artificial
  Synthetic oligonucleotide
ctaaacatataacggcatttaaggggcaactggacggcatataggccagtacat

SEQ ID NO: 377912 - DNA, 57 bp, Artificial
  Synthetic oligonucleotide
ctaaacatgggttcgcaggtgtctacacagcgctccggttctcacgaaaactcaaac

SEQ ID NO: 377913 - DNA, 55 bp, Artificial
  Synthetic oligonucleotide
ctaaacattgaggctgaggtatcctccgggtgaaatgacgaggcttttgaccact

SEQ ID NO: 377914 - DNA, 59 bp, Artificial
  Synthetic oligonucleotide
ctaaacatttgccgtacaattgttgttatcatgtctgtggttcaatgccttctgggtcc

SEQ ID NO: 377915 - DNA, 58 bp, Artificial
  Synthetic oligonucleotide
ctaaaccaactagcaggccgcatgattccgaaagggactgtaacatggtcaggcaaat

SEQ ID NO: 377916 - DNA, 58 bp, Artificial
  Synthetic oligonucleotide
ctaaaccaattagcaggccgcatgatcccaaaagggactgtcacatggtcgggcaagt

SEQ ID NO: 377917 - DNA, 59 bp, Artificial
  Synthetic oligonucleotide
ctaaaccacaaaacaggcatattctcacccatcttcttaagcagacagagactagcccc

SEQ ID NO: 377918 - DNA, 54 bp, Artificial
  Synthetic oligonucleotide
ctaaaccacttgaagaccaaccagtggtctacagaattgatggagtgtatccac

SEQ ID NO: 377919 - DNA, 56 bp, Artificial
  Synthetic oligonucleotide
ctaaaccaggcaagaagaggtctttgcccaggttctatgtcgaggccaatccggac

SEQ ID NO: 377920 - DNA, 60 bp, Artificial
  Synthetic oligonucleotide
ctaaaccatgcgagcaaagatggtttctatcgttcattgcgagaatgttgaatggaaaaa

SEQ ID NO: 377921 - DNA, 52 bp, Artificial
  Synthetic oligonucleotide
ctaaacccaagccaccagtacttagggaggtgagggctcaaggtcccttgat

SEQ ID NO: 377922 - DNA, 57 bp, Artificial
  Synthetic oligonucleotide
ctaaacccagaaatgggggatccagatgataaccttaggggctatagtcagcaccta

SEQ ID NO: 377923 - DNA, 54 bp, Artificial
  Synthetic oligonucleotide
ctaaacccattactggttgcgaacgggttgtccatccagcttacggctaaaatg

SEQ ID NO: 377924 - DNA, 56 bp, Artificial
  Synthetic oligonucleotide
ctaaacccgatccggcacctagggtcattcagcctaggtcgccgaggtataatgtg

SEQ ID NO: 377925 - DNA, 50 bp, Artificial
  Synthetic oligonucleotide
ctaaacccgtgatggcggtgcggtatagatcctcagattcagctttctcc

SEQ ID NO: 377926 - DNA, 58 bp, Artificial
  Synthetic oligonucleotide
ctaaaccggatggaagtttgctcaaggtgtctaagtccgaccacgtaatgaggatgca

SEQ ID NO: 377927 - DNA, 55 bp, Artificial
  Synthetic oligonucleotide
ctaaacctcatcttaattctggtcgtccatatagtcttaaggcactaccgcgaca

SEQ ID NO: 377928 - DNA, 55 bp, Artificial
  Synthetic oligonucleotide
ctaaacctggcagatgaggctggagcttccccactggtaacagtgttccagcctg

SEQ ID NO: 377929 - DNA, 55 bp, Artificial
  Synthetic oligonucleotide
ctaaacgctgggcaatgtcgtatgtagatatatctgcttgaagaagtagggcaac

SEQ ID NO: 377930 - DNA, 55 bp, Artificial
  Synthetic oligonucleotide
ctaaacggtattcttcgcactaccaaatagtgaataccgctcattaaatgatgcg

SEQ ID NO: 377931 - DNA, 56 bp, Artificial
  Synthetic oligonucleotide
ctaaacgttacgatacacgtagtatcattccctgaacgagctagccagccaggcat

SEQ ID NO: 377932 - DNA, 51 bp, Artificial
  Synthetic oligonucleotide
ctaaactaagatacttccaccgaggccccacacatggcgacttcttcctca

SEQ ID NO: 377933 - DNA, 55 bp, Artificial
  Synthetic oligonucleotide
ctaaactacccctgaaataaaacagacaggcgcgtgggagtgcgctgttaaagta

SEQ ID NO: 377934 - DNA, 51 bp, Artificial
  Synthetic oligonucleotide
ctaaactactcacagagcgacagttttcagtcacaaaggtcgatggacgga

SEQ ID NO: 377935 - DNA, 58 bp, Artificial
  Synthetic oligonucleotide
ctaaactagaagttataaatcacgctattaaaaatggctcatggataagcttattctg

SEQ ID NO: 377936 - DNA, 50 bp, Artificial
  Synthetic oligonucleotide
ctaaactataatgccaaatcttgtaaaaagtagggtgtaaccgaaaacgg

SEQ ID NO: 377937 - DNA, 60 bp, Artificial
  Synthetic oligonucleotide
ctaaactcaccaaacatagaggcttgcgggtatagcgatagagtactgcaattaacactg

SEQ ID NO: 377938 - DNA, 56 bp, Artificial
  Synthetic oligonucleotide
ctaaactcatagcttaattgacagtatacctccatcataattagccaagggtactg

SEQ ID NO: 377939 - DNA, 59 bp, Artificial
  Synthetic oligonucleotide
ctaaactgtatcatatcgggtgaggatgtaccacctccggaatctgatagtccctctat

SEQ ID NO: 377940 - DNA, 60 bp, Artificial
  Synthetic oligonucleotide
ctaaacttaatctggttgctgacattatgctcggctagtccagtgtttcagcggtgtttc

SEQ ID NO: 377941 - DNA, 55 bp, Artificial
  Synthetic oligonucleotide
ctaaacttcaagttggatagctaccctatcagcgttagggtcgggaccatgtgca

SEQ ID NO: 377942 - DNA, 58 bp, Artificial
  Synthetic oligonucleotide
ctaaacttggtcgaactgatagggacgatcccatggtttgtcgtcttacaagcagtgc

SEQ ID NO: 377943 - DNA, 55 bp, Artificial
  Synthetic oligonucleotide
ctaaagaaactgtgggaacaaacccattccaaggctggattgctggtttctgacg

SEQ ID NO: 377944 - DNA, 55 bp, Artificial
  Synthetic oligonucleotide
ctaaagaaacttggtctatttgctgcaccggtattaacacaaggtcatacagggt

SEQ ID NO: 377945 - DNA, 60 bp, Artificial
  Synthetic oligonucleotide
ctaaagaactgtctgtgtacacatacagtgaggacatgatgcagatggctaaagggctaa

SEQ ID NO: 377946 - DNA, 60 bp, Artificial
  Synthetic oligonucleotide
ctaaagaataatgttgtgaatcagtgcaagaaggtagtcacgacattgcagacaagaggc

SEQ ID NO: 377947 - DNA, 55 bp, Artificial
  Synthetic oligonucleotide
ctaaagaattctttggcgagcccatagactcaatcgccatccaccgggcaggaga

SEQ ID NO: 377948 - DNA, 51 bp, Artificial
  Synthetic oligonucleotide
ctaaagacatctaacgactgctcgataattccaagatttcctgcaagtgcc

SEQ ID NO: 377949 - DNA, 54 bp, Artificial
  Synthetic oligonucleotide
ctaaagacccggcccagcagaaaacacagggtggtcgtcagggtaggcgcccca

SEQ ID NO: 377950 - DNA, 50 bp, Artificial
  Synthetic oligonucleotide
ctaaagacgccccgcgtacctcacgtggaacccaaggtccccgaataccg

SEQ ID NO: 377951 - DNA, 55 bp, Artificial
  Synthetic oligonucleotide
ctaaagacgctcctcgaaagggccccggatgaccgcactatcttctgggtttatg

SEQ ID NO: 377952 - DNA, 55 bp, Artificial
  Synthetic oligonucleotide
ctaaagactcttaagaaaagaccagtctgaggccgtaaggtcgtccagaccttga

SEQ ID NO: 377953 - DNA, 52 bp, Artificial
  Synthetic oligonucleotide
ctaaagacttttgcgttatggtccaaattgtcccccgggtgtactactatcc

SEQ ID NO: 377954 - DNA, 57 bp, Artificial
  Synthetic oligonucleotide
ctaaagagaaatcataaccctttggaggagatctcctttttctagcctgatcaattc

SEQ ID NO: 377955 - DNA, 58 bp, Artificial
  Synthetic oligonucleotide
ctaaagagcactagaaacgaagctataagagcattttcctgtgttgactgggttcacc

SEQ ID NO: 377956 - DNA, 55 bp, Artificial
  Synthetic oligonucleotide
ctaaagagcgtattttagaagctgtaggggttcgcaaatctaaagatagaaaaca

SEQ ID NO: 377957 - DNA, 51 bp, Artificial
  Synthetic oligonucleotide
ctaaagaggagagcaaagcagaaggatcaaaggatggtgaggggacgcaat

SEQ ID NO: 377958 - DNA, 60 bp, Artificial
  Synthetic oligonucleotide
ctaaagagtagatcaatgggaagcatcctcattggtttctcatttgaaactgaccctgat

SEQ ID NO: 377959 - DNA, 55 bp, Artificial
  Synthetic oligonucleotide
ctaaagagtgtcaaacctgaggctataagggttttctcttgtgttgactgggttc

SEQ ID NO: 377960 - DNA, 59 bp, Artificial
  Synthetic oligonucleotide
ctaaagagttgcacgaattaatgatacaaaccgctagagatataggggcagaaataatc

SEQ ID NO: 377961 - DNA, 53 bp, Artificial
  Synthetic oligonucleotide
ctaaagatctccatagtgctactattcacgaatttatagctgcaaatctctat

SEQ ID NO: 377962 - DNA, 58 bp, Artificial
  Synthetic oligonucleotide
ctaaagatgaaccatttctaacgtcaacattatgtttgtactatccaactgaggctag

SEQ ID NO: 377963 - DNA, 58 bp, Artificial
  Synthetic oligonucleotide
ctaaagatgacccttaccagagacttgtttattgcaaatctgaatgcttaggtcaaac

SEQ ID NO: 377964 - DNA, 60 bp, Artificial
  Synthetic oligonucleotide
ctaaagatgcagatgtggatagacgcgtacatactgcagtgggatctggatcaggcgcaa

SEQ ID NO: 377965 - DNA, 59 bp, Artificial
  Synthetic oligonucleotide
ctaaagatgctgaaagaggcaaactaaaaagaagagcaattgccaccgctgggatacaa

SEQ ID NO: 377966 - DNA, 57 bp, Artificial
  Synthetic oligonucleotide
ctaaagatggtcgcatggtttatgaggctggtagcggaattaacgtaatgactaaag

SEQ ID NO: 377967 - DNA, 56 bp, Artificial
  Synthetic oligonucleotide
ctaaagcacagggcacccacgcaaataaaatgtccaccgttgctaataacaaccaa

SEQ ID NO: 377968 - DNA, 57 bp, Artificial
  Synthetic oligonucleotide
ctaaagcacatggtgtcgaccctaacatcagaactggggtaaggactatcaccacgg

SEQ ID NO: 377969 - DNA, 60 bp, Artificial
  Synthetic oligonucleotide
ctaaagcagccagaggtcaatatagcgggtttgtgagaacactattccagcaaatgcgtg

SEQ ID NO: 377970 - DNA, 55 bp, Artificial
  Synthetic oligonucleotide
ctaaagccaagtcgaaatcaagctctgctcaatcaatgcagacaggaatttgaag

SEQ ID NO: 377971 - DNA, 56 bp, Artificial
  Synthetic oligonucleotide
ctaaagccatgtgtgaagttaaccccgctctgtgttaggttaaattgtactaatgc

SEQ ID NO: 377972 - DNA, 57 bp, Artificial
  Synthetic oligonucleotide
ctaaagcccaagatctcgggaccatcccgggtgattgtgggtgcccctatgtctata

SEQ ID NO: 377973 - DNA, 55 bp, Artificial
  Synthetic oligonucleotide
ctaaagcccacactgcatgggccaacgcccctgctgtacaggctaggagccgttc

SEQ ID NO: 377974 - DNA, 60 bp, Artificial
  Synthetic oligonucleotide
ctaaagccccattttaggctgctcactgaagcatagttgaaatcgtgtggcagaacctga

SEQ ID NO: 377975 - DNA, 60 bp, Artificial
  Synthetic oligonucleotide
ctaaagccctaacagacatagtaccactaactacagaggcagagttagaattagcagaga

SEQ ID NO: 377976 - DNA, 55 bp, Artificial
  Synthetic oligonucleotide
ctaaagcctacgctgcacgggcccacacccttgctgtataggctaggagccgtcc

SEQ ID NO: 377977 - DNA, 56 bp, Artificial
  Synthetic oligonucleotide
ctaaagcgcggaacgtcccgcggaaatccgctagcgcggataaagaggacgattga

SEQ ID NO: 377978 - DNA, 54 bp, Artificial
  Synthetic oligonucleotide
ctaaagcgtctgtaaagtttgggaaagccatgtgtctagccgttccagtctcta

SEQ ID NO: 377979 - DNA, 55 bp, Artificial
  Synthetic oligonucleotide
ctaaagctaagaaagcgttcaaacttccttaccaacgtgaaccacttgactggca

SEQ ID NO: 377980 - DNA, 60 bp, Artificial
  Synthetic oligonucleotide
ctaaagctgatcagataatggtcgcagctattgagttggtggcggatggtttcgcttcag

SEQ ID NO: 377981 - DNA, 54 bp, Artificial
  Synthetic oligonucleotide
ctaaagctggaatagtggagtttaaaacaagggcggagaacgtggtgaccacaa

SEQ ID NO: 377982 - DNA, 56 bp, Artificial
  Synthetic oligonucleotide
ctaaagctggtaaaggacttcttgaaggtacgttgcaggctggcacttctgccgtt

SEQ ID NO: 377983 - DNA, 59 bp, Artificial
  Synthetic oligonucleotide
ctaaagcttgctaccgggctcagaaatgtccctgcgattgctacaagaggcctgtttgg

SEQ ID NO: 377984 - DNA, 60 bp, Artificial
  Synthetic oligonucleotide
ctaaaggaatcaagcgctaggacgttattatccagcggttatgagctggaatatcagaag

SEQ ID NO: 377985 - DNA, 54 bp, Artificial
  Synthetic oligonucleotide
ctaaaggacccaaccatcagaacccctttgagactcttcccggacacgcccaga

SEQ ID NO: 377986 - DNA, 55 bp, Artificial
  Synthetic oligonucleotide
ctaaaggcacattaacagcttggctcacagaaatgagagatcgacctgaatttaa

SEQ ID NO: 377987 - DNA, 59 bp, Artificial
  Synthetic oligonucleotide
ctaaaggcagatcaacacgtgcggccatccgttataatattaccggatggccgcgagat

SEQ ID NO: 377988 - DNA, 56 bp, Artificial
  Synthetic oligonucleotide
ctaaaggcggtgggggaatggtcagtggttcgtggtatttggatgtggaagctgaa

SEQ ID NO: 377989 - DNA, 55 bp, Artificial
  Synthetic oligonucleotide
ctaaaggctaaaagtctctacctaggacaccaaggggcaaaattggccatccgca

SEQ ID NO: 377990 - DNA, 57 bp, Artificial
  Synthetic oligonucleotide
ctaaagggagcgatgcggagaatgagaagtattgcagtaaagagggggacgtaatac

SEQ ID NO: 377991 - DNA, 53 bp, Artificial
  Synthetic oligonucleotide
ctaaaggggtgtttgtgtctaaggggtggtttcagaacttgtaacctcatgct

SEQ ID NO: 377992 - DNA, 55 bp, Artificial
  Synthetic oligonucleotide
ctaaagggtggccaactggatcagtttactttaaggagtataccgacatcgcttc

SEQ ID NO: 377993 - DNA, 55 bp, Artificial
  Synthetic oligonucleotide
ctaaaggtaacgacatgatttacactcgtcgtgcccttgtgatgcacccttacgg

SEQ ID NO: 377994 - DNA, 52 bp, Artificial
  Synthetic oligonucleotide
ctaaaggtagggttgaaggaaggagaatacccagggccaggagtcaacccta

SEQ ID NO: 377995 - DNA, 59 bp, Artificial
  Synthetic oligonucleotide
ctaaaggtcaagcacttctgtctccccggtcaacgctgatatgctccgccagggcaaaa

SEQ ID NO: 377996 - DNA, 57 bp, Artificial
  Synthetic oligonucleotide
ctaaaggtcaagcacttctgtttccccggtcaagattgatacgctctaccagggcga

SEQ ID NO: 377997 - DNA, 52 bp, Artificial
  Synthetic oligonucleotide
ctaaaggtcgcgaaagctacaataagggcgttgggtttggcccatcggtaac

SEQ ID NO: 377998 - DNA, 60 bp, Artificial
  Synthetic oligonucleotide
ctaaaggtggacgcagatctgaaagcattcctgggcgcagaaggcagaccccttcatgga

SEQ ID NO: 377999 - DNA, 56 bp, Artificial
  Synthetic oligonucleotide
ctaaaggtgttaccgctgcatgctcttatcacgggggaagcagtttttatcggaat

SEQ ID NO: 378000 - DNA, 55 bp, Artificial
  Synthetic oligonucleotide
ctaaagtaaaggtttgtacgatttccaagtgccgcacatggtggtccccagtgac

SEQ ID NO: 378001 - DNA, 55 bp, Artificial
  Synthetic oligonucleotide
ctaaagtacaaaattgatccgagaaggcacagaattttatttgctggagacgaca

SEQ ID NO: 378002 - DNA, 57 bp, Artificial
  Synthetic oligonucleotide
ctaaagtatctcctaatcagtacagggtttttaggctgcaattgcctgaccctaaca

SEQ ID NO: 378003 - DNA, 54 bp, Artificial
  Synthetic oligonucleotide
ctaaagtcaacttgaacaaggccttcatattaactatgacatggcctcgttctc

SEQ ID NO: 378004 - DNA, 55 bp, Artificial
  Synthetic oligonucleotide
ctaaagtcacaaaatggcggcgcggcagggacacaaaatggcggcgtagcggggg

SEQ ID NO: 378005 - DNA, 54 bp, Artificial
  Synthetic oligonucleotide
ctaaagtcatacatgacattggaaatcctaagggtatacgttgtgctgttacca

SEQ ID NO: 378006 - DNA, 55 bp, Artificial
  Synthetic oligonucleotide
ctaaagtgaagagatctgtcacatctcgcgctatcactactgtgacattggttga

SEQ ID NO: 378007 - DNA, 55 bp, Artificial
  Synthetic oligonucleotide
ctaaagtgaagagatctgtcacgtcccgttctattgctagcgtgacattggttga

SEQ ID NO: 378008 - DNA, 50 bp, Artificial
  Synthetic oligonucleotide
ctaaagtgacattagtgcgtacattaatcctactaagctccttacaggcc

SEQ ID NO: 378009 - DNA, 55 bp, Artificial
  Synthetic oligonucleotide
ctaaagtgacgcttgctaggctagtatgactcatttaagtttccagtagaatagt

SEQ ID NO: 378010 - DNA, 54 bp, Artificial
  Synthetic oligonucleotide
ctaaagtgtggccacgctgcttcaccaccataaaatcctacatgtctgaggaaa

SEQ ID NO: 378011 - DNA, 52 bp, Artificial
  Synthetic oligonucleotide
ctaaagtgttttacgtacggacttccagttataaccaacaacgtgtctacaa

SEQ ID NO: 378012 - DNA, 58 bp, Artificial
  Synthetic oligonucleotide
ctaaagttagatacagtgtggatacggtggtttcagaacttgtcagggaatatagcaa

SEQ ID NO: 378013 - DNA, 57 bp, Artificial
  Synthetic oligonucleotide
ctaaagttgtatgctctatttggtgcccggatacccaacatcagtcgacacccgccc

SEQ ID NO: 378014 - DNA, 55 bp, Artificial
  Synthetic oligonucleotide
ctaaataagtcgaacgttcatgtttagagcatcatggagatgcgttgcgtttgtg

SEQ ID NO: 378015 - DNA, 60 bp, Artificial
  Synthetic oligonucleotide
ctaaataatgtcagccaatcaattgcaagactggaagactcggtagtgacgcatggagta

SEQ ID NO: 378016 - DNA, 56 bp, Artificial
  Synthetic oligonucleotide
ctaaatacacttaagaaacgccaggtctgaggacgtaaacgagtccagatccggca

SEQ ID NO: 378017 - DNA, 60 bp, Artificial
  Synthetic oligonucleotide
ctaaatacggtacgaagattgatgtttacagagatgaggttccagctcagatcatcgagg

SEQ ID NO: 378018 - DNA, 55 bp, Artificial
  Synthetic oligonucleotide
ctaaatactcggtgtatgatgacgttggtcctggattgcagaggaagattgttgg

SEQ ID NO: 378019 - DNA, 60 bp, Artificial
  Synthetic oligonucleotide
ctaaataggccaacaggattaacactgcctgccagtttggaacaggctatgcgcaaagga

SEQ ID NO: 378020 - DNA, 55 bp, Artificial
  Synthetic oligonucleotide
ctaaatatagcctgttgcagaaaatgatggcttacgacggcttcaatggctctca

SEQ ID NO: 378021 - DNA, 58 bp, Artificial
  Synthetic oligonucleotide
ctaaatatgggcactcaagaaaacctaggaattttctattgtgccaaatcagcctaca

SEQ ID NO: 378022 - DNA, 55 bp, Artificial
  Synthetic oligonucleotide
ctaaatcaggagactttccagatctacagttctattacgatgtatgcctccctgg

SEQ ID NO: 378023 - DNA, 54 bp, Artificial
  Synthetic oligonucleotide
ctaaatcagtagtagcacctgatgaactaggattctgagggtctgcagattgtg

SEQ ID NO: 378024 - DNA, 60 bp, Artificial
  Synthetic oligonucleotide
ctaaatcatttgaggtccttaaataagctttcccatcacactctgcatattctctaggca

SEQ ID NO: 378025 - DNA, 58 bp, Artificial
  Synthetic oligonucleotide
ctaaatccccagatgtactccctacccttactgagctattttgcgatgaagtgttgga

SEQ ID NO: 378026 - DNA, 54 bp, Artificial
  Synthetic oligonucleotide
ctaaatccgcccactaattcatcaagggggacttattccactatggcattgact

SEQ ID NO: 378027 - DNA, 55 bp, Artificial
  Synthetic oligonucleotide
ctaaatcgaatccagacaggaattggattctgaactctggctctttaaagattga

SEQ ID NO: 378028 - DNA, 55 bp, Artificial
  Synthetic oligonucleotide
ctaaatcgtggaggatcccaggctttctggtctcaaacagaactccacgtccagg

SEQ ID NO: 378029 - DNA, 58 bp, Artificial
  Synthetic oligonucleotide
ctaaatcttgcataggtgaagcataacttgtatcagatgtcaaaggtaacagatctgc

SEQ ID NO: 378030 - DNA, 55 bp, Artificial
  Synthetic oligonucleotide
ctaaatgaagttcaggagcaaggattgagcgaaaggtggatgcttgattcgctga

SEQ ID NO: 378031 - DNA, 60 bp, Artificial
  Synthetic oligonucleotide
ctaaatgcccgtgtcaaagagatgcatgaacaagaacgtaatggcactttggtgttctag

SEQ ID NO: 378032 - DNA, 60 bp, Artificial
  Synthetic oligonucleotide
ctaaatgcgacccaccctcgtgctggcgcattttatagaagggttatgattgttgaagca

SEQ ID NO: 378033 - DNA, 55 bp, Artificial
  Synthetic oligonucleotide
ctaaatgcgacgatacgacgccttgatgcttgtcagaatctcacgcccgcagata

SEQ ID NO: 378034 - DNA, 55 bp, Artificial
  Synthetic oligonucleotide
ctaaatgcggttaagaaaagaccagtcggagggcgtgaaatcgtccagattcgga

SEQ ID NO: 378035 - DNA, 59 bp, Artificial
  Synthetic oligonucleotide
ctaaatgctatccgaaagcatcaaactccgggctccagctaattaacattacccagcac

SEQ ID NO: 378036 - DNA, 60 bp, Artificial
  Synthetic oligonucleotide
ctaaatgctgttggattcaaggcgctgttaatccagagggataggagtggaacgatgatc

SEQ ID NO: 378037 - DNA, 60 bp, Artificial
  Synthetic oligonucleotide
ctaaatggacgtaatttctgcgcaggtgagacggtactccatagatccgttcacaatgga

SEQ ID NO: 378038 - DNA, 59 bp, Artificial
  Synthetic oligonucleotide
ctaaatggagtcacgtgaccccctctagagcacgtgcacgtgcattgaagtaccccgtg

SEQ ID NO: 378039 - DNA, 52 bp, Artificial
  Synthetic oligonucleotide
ctaaatggatcactacttgcgacttccgctggtatggaccaaaatatataac

SEQ ID NO: 378040 - DNA, 58 bp, Artificial
  Synthetic oligonucleotide
ctaaatgtctacccttgcttgcaacttgcgtttctaactcaattgcgtacaaaccgca

SEQ ID NO: 378041 - DNA, 60 bp, Artificial
  Synthetic oligonucleotide
ctaaatgtgtgcgttttggtttctctgcgcgatacaaaatttgtctgaaaagcgcatgag

SEQ ID NO: 378042 - DNA, 52 bp, Artificial
  Synthetic oligonucleotide
ctaaattaccaggatatgtaatattagaccaagattttatatttccagatcc

SEQ ID NO: 378043 - DNA, 55 bp, Artificial
  Synthetic oligonucleotide
ctaaattatgaacaccgcttttatgcagttttagcacctaaggcacagctagggg

SEQ ID NO: 378044 - DNA, 59 bp, Artificial
  Synthetic oligonucleotide
ctaaattcagttgaactcacggtacaactagcgatgttggcttctaggttgatcagaac

SEQ ID NO: 378045 - DNA, 55 bp, Artificial
  Synthetic oligonucleotide
ctaaattcatcaacgaaagttgatcatcgaatgaaggagcttcaaaaaaaacctt

SEQ ID NO: 378046 - DNA, 51 bp, Artificial
  Synthetic oligonucleotide
ctaaattgcactgatgtgaagaatgttactaataccaagacaaaggatact

SEQ ID NO: 378047 - DNA, 58 bp, Artificial
  Synthetic oligonucleotide
ctaaattgccacctggttacattgaagcctatttgttccaccatgccaacactgaact

SEQ ID NO: 378048 - DNA, 57 bp, Artificial
  Synthetic oligonucleotide
ctaaattgggcagcacaaatctacccaggaataaagaccaaacacttatgtagacta

SEQ ID NO: 378049 - DNA, 52 bp, Artificial
  Synthetic oligonucleotide
ctaaattgtactaatgccaagggcaatttcactagccaaagcagcactgagc

SEQ ID NO: 378050 - DNA, 54 bp, Artificial
  Synthetic oligonucleotide
ctaaatttgaagtcaacccgaacccaaattctagcactggattgcgtaaccatt

SEQ ID NO: 378051 - DNA, 54 bp, Artificial
  Synthetic oligonucleotide
ctaaattttcctattagtccagttgaggtagtaaaagtgcagctaaaagaagga

SEQ ID NO: 378052 - DNA, 55 bp, Artificial
  Synthetic oligonucleotide
ctaaattttggtacattaatcacactggttttaacgtccattcattgccaaggtg

SEQ ID NO: 378053 - DNA, 50 bp, Artificial
  Synthetic oligonucleotide
ctaacaaaagagagcatcccttttatttggactgaggaacatcagcaggc

SEQ ID NO: 378054 - DNA, 60 bp, Artificial
  Synthetic oligonucleotide
ctaacaaacttctgtcatcaggaatgccaagtcactgagactgaatgcctctgtccttac

SEQ ID NO: 378055 - DNA, 57 bp, Artificial
  Synthetic oligonucleotide
ctaacaaagcaggtatagcatttattaccaagagttgcatggcttagataatcatgc

SEQ ID NO: 378056 - DNA, 55 bp, Artificial
  Synthetic oligonucleotide
ctaacaaagcttacttcctcaacagacaaaagcaagttgatgagtctcaagttcc

SEQ ID NO: 378057 - DNA, 60 bp, Artificial
  Synthetic oligonucleotide
ctaacaaatcatactactcaaacagatgtaaatttcgttcaatgccttgctattgcttca

SEQ ID NO: 378058 - DNA, 60 bp, Artificial
  Synthetic oligonucleotide
ctaacaaattcgctgcaatatgcactcacttggaagtctgtttcatgtattcagatttcc

SEQ ID NO: 378059 - DNA, 56 bp, Artificial
  Synthetic oligonucleotide
ctaacaacaattgtctttacaacaccctcaggaggggacccagaaattacaatgca

SEQ ID NO: 378060 - DNA, 60 bp, Artificial
  Synthetic oligonucleotide
ctaacaacgaactcgtctgtcaagcttgagtctgaacgttgatgtgactcaacaaggtct

SEQ ID NO: 378061 - DNA, 60 bp, Artificial
  Synthetic oligonucleotide
ctaacaactatggagtgaagggatttggattcagacaaggcaatagtgtatgggcaggga

SEQ ID NO: 378062 - DNA, 57 bp, Artificial
  Synthetic oligonucleotide
ctaacaagaactgcaagaggcgaaacagtcgaaattgaaccggtagtgacaaagcaa

SEQ ID NO: 378063 - DNA, 60 bp, Artificial
  Synthetic oligonucleotide
ctaacaagcactgagaagcataatatttgggcatcacaagcctgtgttcctacagacccc

SEQ ID NO: 378064 - DNA, 59 bp, Artificial
  Synthetic oligonucleotide
ctaacaagggatgtgatccataaggttctatcataagggatctcgcatgggtccataag

SEQ ID NO: 378065 - DNA, 52 bp, Artificial
  Synthetic oligonucleotide
ctaacaaggtaaataatttgtccccgataggtaattttgtccccgatacatc

SEQ ID NO: 378066 - DNA, 60 bp, Artificial
  Synthetic oligonucleotide
ctaacaagtgcgattcattcatggatccacagagtgcatactttactttgccgcgggtac

SEQ ID NO: 378067 - DNA, 59 bp, Artificial
  Synthetic oligonucleotide
ctaacaagttggtcgccatactagagtatgcccggatcccacataagtacattctcgag

SEQ ID NO: 378068 - DNA, 55 bp, Artificial
  Synthetic oligonucleotide
ctaacaatagggtgtatttcagcaaacataacgcccattggttctctttcatagt

SEQ ID NO: 378069 - DNA, 55 bp, Artificial
  Synthetic oligonucleotide
ctaacaatctgcatgcatgttacacagtgcatagagtaccggggccactacactg

SEQ ID NO: 378070 - DNA, 52 bp, Artificial
  Synthetic oligonucleotide
ctaacaatgatgaccgtctgtgcatattcgccgctccacccaaactctgcat

SEQ ID NO: 378071 - DNA, 60 bp, Artificial
  Synthetic oligonucleotide
ctaacaatgtgggatccattgttgaacgactttcccaaatcagtgcatggattccggtgc

SEQ ID NO: 378072 - DNA, 50 bp, Artificial
  Synthetic oligonucleotide
ctaacaatgttcagtacataatacagtgcattggatcaagaacttaccag

SEQ ID NO: 378073 - DNA, 54 bp, Artificial
  Synthetic oligonucleotide
ctaacacaatcgatttaaacgtaccttacatcgtttctaaggcgtattatccga

SEQ ID NO: 378074 - DNA, 59 bp, Artificial
  Synthetic oligonucleotide
ctaacacacaaactatgtcttacttagacagcatccaaatcccttcctggaagatagac

SEQ ID NO: 378075 - DNA, 55 bp, Artificial
  Synthetic oligonucleotide
ctaacacacaaccaagtggaccaattcacactactaaaccaactgcactgtcagc

SEQ ID NO: 378076 - DNA, 58 bp, Artificial
  Synthetic oligonucleotide
ctaacacacggccatgtttgaggatccagcaacacgaccccggaccctgcacgaattg

SEQ ID NO: 378077 - DNA, 60 bp, Artificial
  Synthetic oligonucleotide
ctaacacagtatcagtgtcaacaggatatatgactatttagcctaatgattgaactagat

SEQ ID NO: 378078 - DNA, 55 bp, Artificial
  Synthetic oligonucleotide
ctaacacagtgtacaggcggtgtgcacgtgatgacttcactgagggcgggtttat

SEQ ID NO: 378079 - DNA, 60 bp, Artificial
  Synthetic oligonucleotide
ctaacacatgcagagagcttgttattaacactcttgttaaccagggcatcagtagggagc

SEQ ID NO: 378080 - DNA, 60 bp, Artificial
  Synthetic oligonucleotide
ctaacacatggttgtccaacacattaacaaccatggctgttgtcttatcatcttataatt

SEQ ID NO: 378081 - DNA, 58 bp, Artificial
  Synthetic oligonucleotide
ctaacaccgttatgttctggatagtgagggatagacgtcctagtggcacccctagtga

SEQ ID NO: 378082 - DNA, 57 bp, Artificial
  Synthetic oligonucleotide
ctaacacgcttgaaccacctggagcggaagtttactaagaggctggcgatgggctta

SEQ ID NO: 378083 - DNA, 55 bp, Artificial
  Synthetic oligonucleotide
ctaacactgaagacagctggttcgtacatgatttctgcggttgatgcttcctcgc

SEQ ID NO: 378084 - DNA, 60 bp, Artificial
  Synthetic oligonucleotide
ctaacactgagatcaacacttatttactatgcacttggcagctcgattcgaagcaatctg

SEQ ID NO: 378085 - DNA, 55 bp, Artificial
  Synthetic oligonucleotide
ctaacactgggtatactggaggtgctgtcataatagacccagcagacttccatcc

SEQ ID NO: 378086 - DNA, 55 bp, Artificial
  Synthetic oligonucleotide
ctaacagaacaaggtcttagctgcaatgacgctcccaaacatgaaaccaaagagg

SEQ ID NO: 378087 - DNA, 55 bp, Artificial
  Synthetic oligonucleotide
ctaacagacccatgaccccgcatgcttctcttcccgaaagaccaacagggtaccg

SEQ ID NO: 378088 - DNA, 54 bp, Artificial
  Synthetic oligonucleotide
ctaacagacgaagacgttcatgttaacgtaacactaatattctcagcagcacaa

SEQ ID NO: 378089 - DNA, 55 bp, Artificial
  Synthetic oligonucleotide
ctaacagatcggataccattggatgagttaacagcgaatggtccgatcatcctcg

SEQ ID NO: 378090 - DNA, 60 bp, Artificial
  Synthetic oligonucleotide
ctaacagatgagtcatcagactcagaaaagaatggtcttagtccagatttgcaacaagtt

SEQ ID NO: 378091 - DNA, 55 bp, Artificial
  Synthetic oligonucleotide
ctaacagatttgctttgcaggaccccactatatatgaccctgaccgtgagcgctt

SEQ ID NO: 378092 - DNA, 54 bp, Artificial
  Synthetic oligonucleotide
ctaacagcgttatgttctggttagttagggaccggagaccgtatggcactccta

SEQ ID NO: 378093 - DNA, 53 bp, Artificial
  Synthetic oligonucleotide
ctaacagcttagtgggtagggataagtgggttatatcttaagtataacgtagg

SEQ ID NO: 378094 - DNA, 55 bp, Artificial
  Synthetic oligonucleotide
ctaacaggcgttttagttgttggtctacgtttaaggatcttgatcgtgattcgtg

SEQ ID NO: 378095 - DNA, 60 bp, Artificial
  Synthetic oligonucleotide
ctaacagggggcacagatgtgttctatacacgcgcgtatgtacatgcggagaatcacaaa

SEQ ID NO: 378096 - DNA, 58 bp, Artificial
  Synthetic oligonucleotide
ctaacaggtttccaatcaggcgtaagtatgttggtgggcatactagaccatctgttag

SEQ ID NO: 378097 - DNA, 55 bp, Artificial
  Synthetic oligonucleotide
ctaacagtctttcaccctgaaaccagaaatgccgagcttccacgtattttagttg

SEQ ID NO: 378098 - DNA, 55 bp, Artificial
  Synthetic oligonucleotide
ctaacagtgcgagaacgaagaaggtggcttacagtagaattccgcgctctgtgcg

SEQ ID NO: 378099 - DNA, 59 bp, Artificial
  Synthetic oligonucleotide
ctaacagtggctgataacacgcgtggtacacctttgaccattaatgtgggtccaaatga

SEQ ID NO: 378100 - DNA, 58 bp, Artificial
  Synthetic oligonucleotide
ctaacataagcaagaacgccctgttagtttattactgttggatgtcggatattatgtc

SEQ ID NO: 378101 - DNA, 58 bp, Artificial
  Synthetic oligonucleotide
ctaacatactcactggaacaactaagcattggtcatgacaactacccactataggatt

SEQ ID NO: 378102 - DNA, 60 bp, Artificial
  Synthetic oligonucleotide
ctaacatagacatgaacgccagagtagttatcagaagcccctacactacacctcaaatga

SEQ ID NO: 378103 - DNA, 60 bp, Artificial
  Synthetic oligonucleotide
ctaacatctctcggtctgaatgctgtagcctactacagaggcttagacgtttcggtgatt

SEQ ID NO: 378104 - DNA, 55 bp, Artificial
  Synthetic oligonucleotide
ctaacatctgacagcgttggttggtttcattctggtttagacgacggtcctcgac

SEQ ID NO: 378105 - DNA, 60 bp, Artificial
  Synthetic oligonucleotide
ctaacatgaacgccgaccgcaccttatccgacgagcagtacgattggatcgtggcgtatg

SEQ ID NO: 378106 - DNA, 60 bp, Artificial
  Synthetic oligonucleotide
ctaacatgacagtgtgtgcgcctactacacaatcccctcctgctgctacatatactagta

SEQ ID NO: 378107 - DNA, 54 bp, Artificial
  Synthetic oligonucleotide
ctaacatgactaatccccctttagacttagattgttcgggaatacctggaactc

SEQ ID NO: 378108 - DNA, 51 bp, Artificial
  Synthetic oligonucleotide
ctaacatgcaatgataccgataataagatccaaggttattatatatgcctt

SEQ ID NO: 378109 - DNA, 55 bp, Artificial
  Synthetic oligonucleotide
ctaacatggggaagcgtgagtaccgtgagctgcaagcagcctatgtgagggcagc

SEQ ID NO: 378110 - DNA, 52 bp, Artificial
  Synthetic oligonucleotide
ctaacatggggatcatgcataaacacaaccaagtttactacagcaaccacag

SEQ ID NO: 378111 - DNA, 53 bp, Artificial
  Synthetic oligonucleotide
ctaacatggttcgtgcaaaacgtactaaacgtgcctctgttacagatatatac

SEQ ID NO: 378112 - DNA, 60 bp, Artificial
  Synthetic oligonucleotide
ctaacatgtccgatgcgactagtgatgttatgaaacgtactttaactggcggtgatagta

SEQ ID NO: 378113 - DNA, 55 bp, Artificial
  Synthetic oligonucleotide
ctaacattaattgcgattgtatgccccacaatggcccaaaccatccctctattgc

SEQ ID NO: 378114 - DNA, 52 bp, Artificial
  Synthetic oligonucleotide
ctaacattagaactggggcaaggaccatcactacaggcgcccccatcacgta

SEQ ID NO: 378115 - DNA, 60 bp, Artificial
  Synthetic oligonucleotide
ctaacattctttccctcgtatgaaatgcgtgataataaggttgaggaggatgtgcacgcg

SEQ ID NO: 378116 - DNA, 57 bp, Artificial
  Synthetic oligonucleotide
ctaacatttattgccaggtgtggactaaccgttttgggtcacattgttcatgtttca

SEQ ID NO: 378117 - DNA, 60 bp, Artificial
  Synthetic oligonucleotide
ctaaccaaagttgcagatgacgcatctaatgtgctaggaccaaactgttatgctacaaca

SEQ ID NO: 378118 - DNA, 60 bp, Artificial
  Synthetic oligonucleotide
ctaaccaacagagagcatctgcaggacaaatcagcgtacagcccacgttctcagtgcaga

SEQ ID NO: 378119 - DNA, 53 bp, Artificial
  Synthetic oligonucleotide
ctaaccaagagattaccattttcaacgagagtcaaccgataagaaaaagtaaa

SEQ ID NO: 378120 - DNA, 60 bp, Artificial
  Synthetic oligonucleotide
ctaaccaagtggatgattcttgctgcagaacttaaatgttttggaaacacagctgtcgca

SEQ ID NO: 378121 - DNA, 55 bp, Artificial
  Synthetic oligonucleotide
ctaaccaattccttacgtcaacctcagctgatgaccgtaatctgtttaatcagtt

SEQ ID NO: 378122 - DNA, 51 bp, Artificial
  Synthetic oligonucleotide
ctaaccagtgcgctaaatggatatgtcagtacttctgatctcggagacgaa

SEQ ID NO: 378123 - DNA, 56 bp, Artificial
  Synthetic oligonucleotide
ctaaccagttctgtgataactaattatgctatgtttagatgtgaggacgtactcag

SEQ ID NO: 378124 - DNA, 56 bp, Artificial
  Synthetic oligonucleotide
ctaaccataatggatctccatcccgggtcaggaaagacgcggaaataccttccagc

SEQ ID NO: 378125 - DNA, 55 bp, Artificial
  Synthetic oligonucleotide
ctaacccaggtgacagctttacgagatgcctccaccaaccggtaggtaaggtgga

SEQ ID NO: 378126 - DNA, 56 bp, Artificial
  Synthetic oligonucleotide
ctaacccatacgctcaaacggtcgaggcggctaatgacctagaggggttcggcata

SEQ ID NO: 378127 - DNA, 53 bp, Artificial
  Synthetic oligonucleotide
ctaaccccaagaagcttaaagtacgccctgtcaacaacgcccctatgattttc

SEQ ID NO: 378128 - DNA, 57 bp, Artificial
  Synthetic oligonucleotide
ctaacccccgctgatgggtggaagcatgtccgcctttcgaagcgatccgcgcaaggg

SEQ ID NO: 378129 - DNA, 55 bp, Artificial
  Synthetic oligonucleotide
ctaaccccgccagggagcgagctaagctctttaacgctcaagcttttgggagacc

SEQ ID NO: 378130 - DNA, 54 bp, Artificial
  Synthetic oligonucleotide
ctaaccccggcagcaaggagaggcctagcagctgccgcccaacgagtatccgaa

SEQ ID NO: 378131 - DNA, 54 bp, Artificial
  Synthetic oligonucleotide
ctaacccctctctgtgttactttagactgtgctaatataaccaacaatgttact

SEQ ID NO: 378132 - DNA, 53 bp, Artificial
  Synthetic oligonucleotide
ctaacccctctgtttacaatacaacctctggattagtcccccctgagcctaac

SEQ ID NO: 378133 - DNA, 54 bp, Artificial
  Synthetic oligonucleotide
ctaacccgactagggcgggtaagtcaactactactcgtagcgaccgtcatagtc

SEQ ID NO: 378134 - DNA, 60 bp, Artificial
  Synthetic oligonucleotide
ctaaccctcagatgctgcatataagcagctgcttcgcgcctgtactgggtctctcctggt

SEQ ID NO: 378135 - DNA, 58 bp, Artificial
  Synthetic oligonucleotide
ctaaccgagagccgcttaagctttaagtatatatattacgatatcccatgctttatgt

SEQ ID NO: 378136 - DNA, 55 bp, Artificial
  Synthetic oligonucleotide
ctaaccgatacaagtcgccccaatgatcccataaatggggactgtgatgctccaa

SEQ ID NO: 378137 - DNA, 59 bp, Artificial
  Synthetic oligonucleotide
ctaaccgctcacgaaggaatgtcagaagacgcgctaaccgtcgtagacagactcggcca

SEQ ID NO: 378138 - DNA, 57 bp, Artificial
  Synthetic oligonucleotide
ctaacctaaaaacggacaacaccctcattagagcgctctagaaagaccctgcagtga

SEQ ID NO: 378139 - DNA, 56 bp, Artificial
  Synthetic oligonucleotide
ctaacctactggaggactggaatattgggttatccccgccagtggccaccagccta

SEQ ID NO: 378140 - DNA, 55 bp, Artificial
  Synthetic oligonucleotide
ctaacctcagaccaggcaaccccagtatgcaaaggtaatgagtggtgcaactcct

SEQ ID NO: 378141 - DNA, 56 bp, Artificial
  Synthetic oligonucleotide
ctaacctctaataatagacttgtaggaatgctaaaatacggtggaagagtatggac

SEQ ID NO: 378142 - DNA, 55 bp, Artificial
  Synthetic oligonucleotide
ctaacctgcttgataagtgtgattacctgagtaatagactaatttcgtcctggta

SEQ ID NO: 378143 - DNA, 55 bp, Artificial
  Synthetic oligonucleotide
ctaacctgtggaaatctactaatgtgggaggctgtaactgtaaaaacagaggtta

SEQ ID NO: 378144 - DNA, 55 bp, Artificial
  Synthetic oligonucleotide
ctaacgaacactcattgtgtaaacttccaagttttaggaagtgactataacgaca

SEQ ID NO: 378145 - DNA, 51 bp, Artificial
  Synthetic oligonucleotide
ctaacgaagctaagagtcgtatgatcggtcatcatcgcattatgctatgca

SEQ ID NO: 378146 - DNA, 59 bp, Artificial
  Synthetic oligonucleotide
ctaacgacgaggctggcaatcagccaattgaactggcgactcggtccgtggtaggatcg

SEQ ID NO: 378147 - DNA, 58 bp, Artificial
  Synthetic oligonucleotide
ctaacgaggagaatagggacgaaccgactgttgtgatcgttggtcctaatgacgcaca

SEQ ID NO: 378148 - DNA, 55 bp, Artificial
  Synthetic oligonucleotide
ctaacgaggtgtccattggaacgaatgtgtattctcaagactggagtaaaactgt

SEQ ID NO: 378149 - DNA, 57 bp, Artificial
  Synthetic oligonucleotide
ctaacgataaacgttttaggatcgccagcttttataatgtcgagagcctctcccgca

SEQ ID NO: 378150 - DNA, 60 bp, Artificial
  Synthetic oligonucleotide
ctaacgatcatcctctggtattcttctcacccagtgcgctccgttgggcaattgaccatg

SEQ ID NO: 378151 - DNA, 55 bp, Artificial
  Synthetic oligonucleotide
ctaacgattaagagccgcaggcccgtcaagatggacggctagatcagatgtcccg

SEQ ID NO: 378152 - DNA, 60 bp, Artificial
  Synthetic oligonucleotide
ctaacgcacgagcccacattgtcttacctgtccttgagtcaccttccactatgatactta

SEQ ID NO: 378153 - DNA, 55 bp, Artificial
  Synthetic oligonucleotide
ctaacgcagattatcggtcatttgttattattcaaggcgctaatactgacatcgt

SEQ ID NO: 378154 - DNA, 58 bp, Artificial
  Synthetic oligonucleotide
ctaacgcagcatggaacaagattggtagagaggtaactcagaggattgatgacggaag

SEQ ID NO: 378155 - DNA, 58 bp, Artificial
  Synthetic oligonucleotide
ctaacgccaaacgaatcctctcgtgtgttagcatggtatattccttcctcgtactgga

SEQ ID NO: 378156 - DNA, 60 bp, Artificial
  Synthetic oligonucleotide
ctaacgccttcggatctgatcaccgagtggcgagcccatatgatagcaactgactgctcc

SEQ ID NO: 378157 - DNA, 51 bp, Artificial
  Synthetic oligonucleotide
ctaacgcggtctttgcgataaaagacagtgcttgataattcacttaaatcg

SEQ ID NO: 378158 - DNA, 51 bp, Artificial
  Synthetic oligonucleotide
ctaacgctacgtccgttcatcccttacgggacgcatgactcctaagcatgg

SEQ ID NO: 378159 - DNA, 55 bp, Artificial
  Synthetic oligonucleotide
ctaacgctagggctggcgctaacgctagggctggcgcactatctactagcaccgg

SEQ ID NO: 378160 - DNA, 55 bp, Artificial
  Synthetic oligonucleotide
ctaacgctcgttcttcacccagaattagcgttcctgttgccggtcccatcacccc

SEQ ID NO: 378161 - DNA, 58 bp, Artificial
  Synthetic oligonucleotide
ctaacgcttactcacacttctacgacggttattccactgtgcccctgaagacaggcac

SEQ ID NO: 378162 - DNA, 55 bp, Artificial
  Synthetic oligonucleotide
ctaacggagcaatcggacaaaatttgtacacgcgttatcgtgcaatttcgatccg

SEQ ID NO: 378163 - DNA, 60 bp, Artificial
  Synthetic oligonucleotide
ctaacggattctttatccgatgcagcttcatctatcgcaagaagtacatcaatacgatca

SEQ ID NO: 378164 - DNA, 55 bp, Artificial
  Synthetic oligonucleotide
ctaacggcacagtgaaggaccgaagtccatataggactttcatgagtgtcaaagt

SEQ ID NO: 378165 - DNA, 53 bp, Artificial
  Synthetic oligonucleotide
ctaacggccggatcggttcagatactcccccgtccaacgtggcttggccaccc

SEQ ID NO: 378166 - DNA, 57 bp, Artificial
  Synthetic oligonucleotide
ctaacggccggatcggttcagatgttcctccggccaataccgcttggccgccttgca

SEQ ID NO: 378167 - DNA, 55 bp, Artificial
  Synthetic oligonucleotide
ctaacggcctgttggcaaggttctttcgtataaatcgtgtggccgcgcacttcgc

SEQ ID NO: 378168 - DNA, 60 bp, Artificial
  Synthetic oligonucleotide
ctaacggctgagcatagagcaatgatacagaatgctttggatggatcgatcattgaaaat

SEQ ID NO: 378169 - DNA, 60 bp, Artificial
  Synthetic oligonucleotide
ctaacgggtgtgaagccaaatattggacaaggtgtgaagagccccgtgtgctcatcttga

SEQ ID NO: 378170 - DNA, 51 bp, Artificial
  Synthetic oligonucleotide
ctaacggtcgctccgaccctattggtccccttattacctatccccagtaat

SEQ ID NO: 378171 - DNA, 60 bp, Artificial
  Synthetic oligonucleotide
ctaacggttcattcttaggagtcatgcgtaaccgtcataacattggctatgttgatataa

SEQ ID NO: 378172 - DNA, 55 bp, Artificial
  Synthetic oligonucleotide
ctaacggttgaagttacggcggggaagaatacgatacctcaagattcaattgtca

SEQ ID NO: 378173 - DNA, 55 bp, Artificial
  Synthetic oligonucleotide
ctaacgtatatcaaagaacacccatttaaagctgtagctggagtaatgatagcag

SEQ ID NO: 378174 - DNA, 56 bp, Artificial
  Synthetic oligonucleotide
ctaacgtcaacagacatacacggccctacacggtaaccgactcgcccacaagctag

SEQ ID NO: 378175 - DNA, 55 bp, Artificial
  Synthetic oligonucleotide
ctaacgtcctcagctcttttatcccgacaaacaactcaaacaatgaactagtccc

SEQ ID NO: 378176 - DNA, 53 bp, Artificial
  Synthetic oligonucleotide
ctaacgtcgtccgtgtgtgggagatgaccaccttccgggggatcgaaacccag

SEQ ID NO: 378177 - DNA, 51 bp, Artificial
  Synthetic oligonucleotide
ctaacgtgaaggtactttcttttattcctaaaatttaagatggctacttac

SEQ ID NO: 378178 - DNA, 60 bp, Artificial
  Synthetic oligonucleotide
ctaacgttggtggttgcagcaactgctagcggaaacatcacagtagccggcaattcaaca

SEQ ID NO: 378179 - DNA, 58 bp, Artificial
  Synthetic oligonucleotide
ctaacgtttggtacgtgaacactctcacacctctatattccaatgatggtctctttaa

SEQ ID NO: 378180 - DNA, 56 bp, Artificial
  Synthetic oligonucleotide
ctaactaaatcccaagcacccatgtctggtttacagagtatgttactaagggcaat

SEQ ID NO: 378181 - DNA, 51 bp, Artificial
  Synthetic oligonucleotide
ctaactaagggtgtaggtcaaccctctgaaggggtgtagtcgtactcgatc

SEQ ID NO: 378182 - DNA, 58 bp, Artificial
  Synthetic oligonucleotide
ctaactaatacgatgacagcgccatttgcaattacagccacagtaccggccacattta

SEQ ID NO: 378183 - DNA, 55 bp, Artificial
  Synthetic oligonucleotide
ctaactagacacaaggtcaccttccgctacgagcactgtggtgtattgaacggcg

SEQ ID NO: 378184 - DNA, 57 bp, Artificial
  Synthetic oligonucleotide
ctaactagacgaaaaacatatcaactttcttgcagagcttttagtgatacgaccagg

SEQ ID NO: 378185 - DNA, 55 bp, Artificial
  Synthetic oligonucleotide
ctaactagatcaaagaagcttccaaagaaggaagctatccagttaaaaagtgctt

SEQ ID NO: 378186 - DNA, 60 bp, Artificial
  Synthetic oligonucleotide
ctaactatacttcatggagctaggaacaatttggcacaatccatgataacattcaataca

SEQ ID NO: 378187 - DNA, 56 bp, Artificial
  Synthetic oligonucleotide
ctaactattcaccatctagagaggataatttacaacgtgtgtttacagtagcttcc

SEQ ID NO: 378188 - DNA, 53 bp, Artificial
  Synthetic oligonucleotide
ctaactcaaaggatcacgacaacgggaccgttcgcgattttaacgggctcgac

SEQ ID NO: 378189 - DNA, 55 bp, Artificial
  Synthetic oligonucleotide
ctaactcaacagtccacagaaagcctcacactctaccccgcatccttggtgagct

SEQ ID NO: 378190 - DNA, 54 bp, Artificial
  Synthetic oligonucleotide
ctaactcagaaacttcacaaggttatcgacagggtggaaactcgattagggcta

SEQ ID NO: 378191 - DNA, 55 bp, Artificial
  Synthetic oligonucleotide
ctaactcatgcgtgattgctcatgtacgaaataaatgagccgtttggaactcgat

SEQ ID NO: 378192 - DNA, 55 bp, Artificial
  Synthetic oligonucleotide
ctaactccagtggattcggtcaggtcacgattacgctgactgacacaccttacga

SEQ ID NO: 378193 - DNA, 60 bp, Artificial
  Synthetic oligonucleotide
ctaactccctaatgactctaagagcctctgacttactgcctgagttaagtgctgcggcgt

SEQ ID NO: 378194 - DNA, 54 bp, Artificial
  Synthetic oligonucleotide
ctaactccctaattacattaagagcctccgacttacttcctgtgttaattgctt

SEQ ID NO: 378195 - DNA, 58 bp, Artificial
  Synthetic oligonucleotide
ctaactccctacagactgtaagggcctttgacttacagccaacgataagtgctgcggc

SEQ ID NO: 378196 - DNA, 55 bp, Artificial
  Synthetic oligonucleotide
ctaactccttttacaggatcctcaaggactctggccaatggtaatcaagctggtg

SEQ ID NO: 378197 - DNA, 58 bp, Artificial
  Synthetic oligonucleotide
ctaactctcgtcatacaccaataactttcatcaatacgtatggatttgtttatgctcg

SEQ ID NO: 378198 - DNA, 60 bp, Artificial
  Synthetic oligonucleotide
ctaactctgaccgttattatagactatgtaatgagttggcacaagtgctaactgaggtgg

SEQ ID NO: 378199 - DNA, 50 bp, Artificial
  Synthetic oligonucleotide
ctaactgagaccacaaatcagaaggctgagttacacgcaattcagttagc

SEQ ID NO: 378200 - DNA, 58 bp, Artificial
  Synthetic oligonucleotide
ctaactgagattccatatatgaataattggccgcgcagcggaactgggttcaacaatt

SEQ ID NO: 378201 - DNA, 60 bp, Artificial
  Synthetic oligonucleotide
ctaactgcctctatgtttgaagcgaattacatattcactgctcatctagtagatagacag

SEQ ID NO: 378202 - DNA, 55 bp, Artificial
  Synthetic oligonucleotide
ctaactgcctgtcaaggagtaggtggaccaggccagaaagctagactaatggcag

SEQ ID NO: 378203 - DNA, 53 bp, Artificial
  Synthetic oligonucleotide
ctaactgcggagcacacccccacaaaccagcgggtagggggtcgaaacgggca

SEQ ID NO: 378204 - DNA, 55 bp, Artificial
  Synthetic oligonucleotide
ctaactgcggagcaggtgctcacagaccagtgagtagcctgtcgtaacgggcaac

SEQ ID NO: 378205 - DNA, 60 bp, Artificial
  Synthetic oligonucleotide
ctaactggacagatagagctatagaagtagtgcaaagagttggtagggctattctcaata

SEQ ID NO: 378206 - DNA, 53 bp, Artificial
  Synthetic oligonucleotide
ctaactggattggggtttagcaatcttctaacgggttttggtcttccgactga

SEQ ID NO: 378207 - DNA, 50 bp, Artificial
  Synthetic oligonucleotide
ctaactggcgacaacatagcttatgaacataggcagtgggcggtcccagt

SEQ ID NO: 378208 - DNA, 55 bp, Artificial
  Synthetic oligonucleotide
ctaactgggaagtacataacataggccatttagtagactctgcaggaagtctaac

SEQ ID NO: 378209 - DNA, 55 bp, Artificial
  Synthetic oligonucleotide
ctaactgggaggcaggacccagattaaaacctggtgtgccatgtaaatatatttg

SEQ ID NO: 378210 - DNA, 55 bp, Artificial
  Synthetic oligonucleotide
ctaactgtagtgccgaacgatatgtttataagggagtcgttagttgcatgtcaac

SEQ ID NO: 378211 - DNA, 60 bp, Artificial
  Synthetic oligonucleotide
ctaactgtatagcattcataggtgaaggagcagggaatttattgttgcgcacagtagtgg

SEQ ID NO: 378212 - DNA, 60 bp, Artificial
  Synthetic oligonucleotide
ctaactgtatataagcagtcactctggtcggttactcactctgctttcatttctgagttt

SEQ ID NO: 378213 - DNA, 55 bp, Artificial
  Synthetic oligonucleotide
ctaactgtcagagcagcccatgggatctgagtgtcccaataaggcagtgggcaga

SEQ ID NO: 378214 - DNA, 55 bp, Artificial
  Synthetic oligonucleotide
ctaactgtcatttctctagttttcggtgcacttagtctgggtttagcgtgttacc

SEQ ID NO: 378215 - DNA, 58 bp, Artificial
  Synthetic oligonucleotide
ctaactgtgctgtgtgaaggtacactgcaatggacccctcaggtatacacggggaggg

SEQ ID NO: 378216 - DNA, 60 bp, Artificial
  Synthetic oligonucleotide
ctaactgtggaactaatataacctgcactaaggtcctcagaatgcattgctctatcaaca

SEQ ID NO: 378217 - DNA, 52 bp, Artificial
  Synthetic oligonucleotide
ctaacttacacggagcagcataagctaaaggacctggccttatcactctttg

SEQ ID NO: 378218 - DNA, 56 bp, Artificial
  Synthetic oligonucleotide
ctaacttactagagggttctatttcttacagtgagctgcgtcctgacactcgttat

SEQ ID NO: 378219 - DNA, 55 bp, Artificial
  Synthetic oligonucleotide
ctaacttagccctgatcaaaacagttttgtcacgtatagcgaataaatattcgtt

SEQ ID NO: 378220 - DNA, 53 bp, Artificial
  Synthetic oligonucleotide
ctaacttagtcagcgctggtatcactaagggcatcggagctttaactagtggt

SEQ ID NO: 378221 - DNA, 52 bp, Artificial
  Synthetic oligonucleotide
ctaacttcaaaactttacaacaggacaaatcaggtgtgcctttagacattgt

SEQ ID NO: 378222 - DNA, 51 bp, Artificial
  Synthetic oligonucleotide
ctaacttcaacgctatgtttatactatccaacagaagctaaaaatgagatt

SEQ ID NO: 378223 - DNA, 53 bp, Artificial
  Synthetic oligonucleotide
ctaacttccgagccgacagggtaatagacccaagacggtgtctgaaaccggta

SEQ ID NO: 378224 - DNA, 59 bp, Artificial
  Synthetic oligonucleotide
ctaacttcgtttccatggctgctcgcctgtgttgccaactggattcttcgcgggacgtc

SEQ ID NO: 378225 - DNA, 53 bp, Artificial
  Synthetic oligonucleotide
ctaacttctcacttaggattatgaaagaccgcccggaaatggctcagtctgct

SEQ ID NO: 378226 - DNA, 55 bp, Artificial
  Synthetic oligonucleotide
ctaacttgtcagaagttatcagatcaaaacacgagctgcttactagtcatccctg

SEQ ID NO: 378227 - DNA, 53 bp, Artificial
  Synthetic oligonucleotide
ctaactttttatagacgtaccatacacgctgaccgtttgttatttgaccgtcg

SEQ ID NO: 378228 - DNA, 57 bp, Artificial
  Synthetic oligonucleotide
ctaagaaatacgagccaggaaccctagggttcgagctgtgctccgaaataattcgca

SEQ ID NO: 378229 - DNA, 60 bp, Artificial
  Synthetic oligonucleotide
ctaagaaatgcaggaatagttgttggacaaatgttaatgttagtcaatgacagacttcta

SEQ ID NO: 378230 - DNA, 54 bp, Artificial
  Synthetic oligonucleotide
ctaagaaatggtggtatagacatcactatgaaagcaggcacccaagagtaagtt

SEQ ID NO: 378231 - DNA, 60 bp, Artificial
  Synthetic oligonucleotide
ctaagaacataaagatagacgaggatgctattttagaggaagatgaattatacgagaaga

SEQ ID NO: 378232 - DNA, 58 bp, Artificial
  Synthetic oligonucleotide
ctaagaaccgaccgtggcctatctataacgctatcgaactccagcctcgcaagtttga

SEQ ID NO: 378233 - DNA, 60 bp, Artificial
  Synthetic oligonucleotide
ctaagaacctgattgtcactgagagtggtgccccaccgaccgacttgcaaaagatggtca

SEQ ID NO: 378234 - DNA, 60 bp, Artificial
  Synthetic oligonucleotide
ctaagaacgagatgcaaatatacggggatatacccattaaggtatggtgttgcttcatca

SEQ ID NO: 378235 - DNA, 55 bp, Artificial
  Synthetic oligonucleotide
ctaagaactagggtgtccagactatatggtttaccggctgcaaatcctaacaacg

SEQ ID NO: 378236 - DNA, 52 bp, Artificial
  Synthetic oligonucleotide
ctaagaactcaaccgacgatccgagtaatggtcatctggtgttgggtgagcg

SEQ ID NO: 378237 - DNA, 54 bp, Artificial
  Synthetic oligonucleotide
ctaagaacttggaacctcgctggaaaggaccctacaccgtcctgctgaccaccc

SEQ ID NO: 378238 - DNA, 57 bp, Artificial
  Synthetic oligonucleotide
ctaagaagaactctagggagaactctagtgagtattatagattaataaattgtaata

SEQ ID NO: 378239 - DNA, 54 bp, Artificial
  Synthetic oligonucleotide
ctaagaagatcgaaggactgaaaacagggtccgaacccaagaagcctattgaac

SEQ ID NO: 378240 - DNA, 60 bp, Artificial
  Synthetic oligonucleotide
ctaagaagcatagttacgtgtgtggacaacgacattaggtcatcgaaatagctattatgt

SEQ ID NO: 378241 - DNA, 58 bp, Artificial
  Synthetic oligonucleotide
ctaagaagcatgtggaggacagattagaagagttccccaatcaagttcaggtcggaag

SEQ ID NO: 378242 - DNA, 60 bp, Artificial
  Synthetic oligonucleotide
ctaagaagtgtggtgtcagcactatactggtacaaaggcagtatggactcatctgtgtat

SEQ ID NO: 378243 - DNA, 57 bp, Artificial
  Synthetic oligonucleotide
ctaagaagtttgttgcaaatcagtccattagcttggttaagatgtgtttaccaagac

SEQ ID NO: 378244 - DNA, 59 bp, Artificial
  Synthetic oligonucleotide
ctaagaataccaactcatagacacattgttggtgaaggatgtccaaaaccacatagact

SEQ ID NO: 378245 - DNA, 57 bp, Artificial
  Synthetic oligonucleotide
ctaagaatcacactaatacggtcatgttctacctagtccgtgatagaagaccttttg

SEQ ID NO: 378246 - DNA, 59 bp, Artificial
  Synthetic oligonucleotide
ctaagaatcacttcggtggatgtcccgactcaagtaaatcgaacgtcatggctgtaagc

SEQ ID NO: 378247 - DNA, 59 bp, Artificial
  Synthetic oligonucleotide
ctaagaatccctgctcttttctctaactgtgactgtgtcaagtttcccatgtacatcct

SEQ ID NO: 378248 - DNA, 60 bp, Artificial
  Synthetic oligonucleotide
ctaagacagaagataaggttacgtctttactcagttcgagtcaagatgtgatagatagga

SEQ ID NO: 378249 - DNA, 55 bp, Artificial
  Synthetic oligonucleotide
ctaagacatatgcttgcagagctacctgttcaataagcttagaacgagacaccgg

SEQ ID NO: 378250 - DNA, 57 bp, Artificial
  Synthetic oligonucleotide
ctaagaccatgatttacgtagggtcttccggtacgcatgcagataaccaaccttcca

SEQ ID NO: 378251 - DNA, 54 bp, Artificial
  Synthetic oligonucleotide
ctaagacgaatgttactcgagctagattctggaccgtattggacgatgagcgca

SEQ ID NO: 378252 - DNA, 50 bp, Artificial
  Synthetic oligonucleotide
ctaagactataagactaagacaatggaacccacggactacaagactgtgt

SEQ ID NO: 378253 - DNA, 55 bp, Artificial
  Synthetic oligonucleotide
ctaagactcatccgccttctacaccagacaagtgagtatggagcctggtaggaat

SEQ ID NO: 378254 - DNA, 52 bp, Artificial
  Synthetic oligonucleotide
ctaagactgtcaatccaaacccatttgttgtcctacagtatgttggtgatct

SEQ ID NO: 378255 - DNA, 55 bp, Artificial
  Synthetic oligonucleotide
ctaagacttatcaaacctgggtggacacagtgcgtgccaaggccaagaccagggg

SEQ ID NO: 378256 - DNA, 60 bp, Artificial
  Synthetic oligonucleotide
ctaagagaacacccaagacacaagatttcaaatctgtggttgcaagaccatatgaggcaa

SEQ ID NO: 378257 - DNA, 57 bp, Artificial
  Synthetic oligonucleotide
ctaagagaaccgaaatgaacaaaggctcactaatcgcatgtaagggtgaaatccgtg

SEQ ID NO: 378258 - DNA, 54 bp, Artificial
  Synthetic oligonucleotide
ctaagagaagaccaacggaaagtgttccgagagctggtcaagagacttgacatg

SEQ ID NO: 378259 - DNA, 55 bp, Artificial
  Synthetic oligonucleotide
ctaagagagttggtagatgaacataagatgaaggcattatgtggcggatcaggtc

SEQ ID NO: 378260 - DNA, 51 bp, Artificial
  Synthetic oligonucleotide
ctaagagatgatacttagactgctgtcatgaaagcctttgcagcagactcc

SEQ ID NO: 378261 - DNA, 60 bp, Artificial
  Synthetic oligonucleotide
ctaagagcctccgacttactgcctgagttaagagctgcggcgtaagcgtcattggctgac

SEQ ID NO: 378262 - DNA, 60 bp, Artificial
  Synthetic oligonucleotide
ctaagagcgcctgaaattcgatcatttggtagatatttgccaattgatgaagatgagtat

SEQ ID NO: 378263 - DNA, 60 bp, Artificial
  Synthetic oligonucleotide
ctaagagctatgccaaatttatcaagcaatacgggaggaaataccagatagatgccagag

SEQ ID NO: 378264 - DNA, 55 bp, Artificial
  Synthetic oligonucleotide
ctaagaggaaccgttccattctcaataccagccagagggggattcttgaggatga

SEQ ID NO: 378265 - DNA, 54 bp, Artificial
  Synthetic oligonucleotide
ctaagaggagtgagagtcagcaagatgggagtggacgagtactctagcactgaa

SEQ ID NO: 378266 - DNA, 59 bp, Artificial
  Synthetic oligonucleotide
ctaagaggcgcgtcggagtgcgcctataaagttaacattctctctcctcttttgatctc

SEQ ID NO: 378267 - DNA, 55 bp, Artificial
  Synthetic oligonucleotide
ctaagagtaccatgattagaaggaatgtaccaacttatactgcttacgcgagtga

SEQ ID NO: 378268 - DNA, 54 bp, Artificial
  Synthetic oligonucleotide
ctaagagtcttgcggtcagtaaaactcctgctccgtgttcttttcggggaagct

SEQ ID NO: 378269 - DNA, 58 bp, Artificial
  Synthetic oligonucleotide
ctaagagtgctcgccttaagcgcgttcctgtccagactatctttcagggtactagtaa

SEQ ID NO: 378270 - DNA, 60 bp, Artificial
  Synthetic oligonucleotide
ctaagatcttctagtgatacgcctttgtgttcacacatcatgaggaacgttgagctagat

SEQ ID NO: 378271 - DNA, 57 bp, Artificial
  Synthetic oligonucleotide
ctaagattaaagcagacgcgactaagaacgtctttcgtagagagcttatagctttaa

SEQ ID NO: 378272 - DNA, 55 bp, Artificial
  Synthetic oligonucleotide
ctaagattattatattaaccccatgcctggtctccgttagttgaaggcaacttgc

SEQ ID NO: 378273 - DNA, 55 bp, Artificial
  Synthetic oligonucleotide
ctaagattgccatcatatagcttttggattggccatccggtgatatttcgagcta

SEQ ID NO: 378274 - DNA, 55 bp, Artificial
  Synthetic oligonucleotide
ctaagattgttatcatatagctattggattggccatccggtgaactctagagata

SEQ ID NO: 378275 - DNA, 60 bp, Artificial
  Synthetic oligonucleotide
ctaagatttacgtgtataggatccaacgatagctacatagctgagctgacaacagacggc

SEQ ID NO: 378276 - DNA, 57 bp, Artificial
  Synthetic oligonucleotide
ctaagcaaaattgaccttcgggtccccgaccatatggaatcaccatgtgggtcacag

SEQ ID NO: 378277 - DNA, 55 bp, Artificial
  Synthetic oligonucleotide
ctaagcaatcacttgccattagaatttaccaagtagtggctgaggctagtataaa

SEQ ID NO: 378278 - DNA, 50 bp, Artificial
  Synthetic oligonucleotide
ctaagcagactccacgcgggtgtccgatatgcgagattagacatacgcgt

SEQ ID NO: 378279 - DNA, 55 bp, Artificial
  Synthetic oligonucleotide
ctaagcagccagaactggagttccccgagaacggcagcggtgaccccaccgttga

SEQ ID NO: 378280 - DNA, 60 bp, Artificial
  Synthetic oligonucleotide
ctaagcagctgatatcatggagaaagtgagcgtcaatttttttcgaggtaggtgtcttta

SEQ ID NO: 378281 - DNA, 57 bp, Artificial
  Synthetic oligonucleotide
ctaagcagggaattagctaaaacggcactcattagactaggaataagctttatagac

SEQ ID NO: 378282 - DNA, 54 bp, Artificial
  Synthetic oligonucleotide
ctaagcagttcatccgtgaccctatgggttacttcgataataaaccaaaacctc

SEQ ID NO: 378283 - DNA, 58 bp, Artificial
  Synthetic oligonucleotide
ctaagcatttgaagtttgatatggcccttatgggcagttctgcgttttgggagactcc

SEQ ID NO: 378284 - DNA, 55 bp, Artificial
  Synthetic oligonucleotide
ctaagccacctgctaggcctcgccgtaggcgcaataatcgggctagcaattttaa

SEQ ID NO: 378285 - DNA, 60 bp, Artificial
  Synthetic oligonucleotide
ctaagccactgcacatgcttcaaaacggacaggctaggcagtcccctgactttgacccca

SEQ ID NO: 378286 - DNA, 60 bp, Artificial
  Synthetic oligonucleotide
ctaagcccatccagagagttgagccttgcacaacttgtataaccaaatgcgagcctcatg

SEQ ID NO: 378287 - DNA, 53 bp, Artificial
  Synthetic oligonucleotide
ctaagccccgaaatgtctggttccgccggctccacttccaaaaggaggagcgg

SEQ ID NO: 378288 - DNA, 57 bp, Artificial
  Synthetic oligonucleotide
ctaagcctgggcaagttttacgcgcgcaagatttacaagacgccgtacgtgcccata

SEQ ID NO: 378289 - DNA, 55 bp, Artificial
  Synthetic oligonucleotide
ctaagcctttgaaaagaaagcctcacacggaaaccttgtatgtatacctcgtgaa

SEQ ID NO: 378290 - DNA, 59 bp, Artificial
  Synthetic oligonucleotide
ctaagccttttcaaaatatctcgagaatagcaattggagattgccccaagtatgtcaaa

SEQ ID NO: 378291 - DNA, 60 bp, Artificial
  Synthetic oligonucleotide
ctaagcgactttgttcaagtgcggtgccagccgccaggcggcacttgagtattggagcgt

SEQ ID NO: 378292 - DNA, 60 bp, Artificial
  Synthetic oligonucleotide
ctaagcgagcaaacggcctacacggatgttataggccaacgcatggttgcattctatagc

SEQ ID NO: 378293 - DNA, 55 bp, Artificial
  Synthetic oligonucleotide
ctaagcgccacaaggccgttattggagacttcgcggtaacaatgggagatcctct

SEQ ID NO: 378294 - DNA, 60 bp, Artificial
  Synthetic oligonucleotide
ctaagcgcgatgccccatggcgccacatgtctagtacagttaagattagccggggtgtta

SEQ ID NO: 378295 - DNA, 60 bp, Artificial
  Synthetic oligonucleotide
ctaagcgcgatggctcttggcgctctatggagggaatttcaaaagtgaaacgtactctga

SEQ ID NO: 378296 - DNA, 55 bp, Artificial
  Synthetic oligonucleotide
ctaagcgggatgccccatggcgtttaatgtcgggtactcctaaggttagtcgctc

SEQ ID NO: 378297 - DNA, 55 bp, Artificial
  Synthetic oligonucleotide
ctaagcgggtcgtccggttccctagtgcgtatcgttgatgaccaatttgacaaac

SEQ ID NO: 378298 - DNA, 55 bp, Artificial
  Synthetic oligonucleotide
ctaagctactgtcccagggggggagggccgccatttgtggcaggtacctcttcaa

SEQ ID NO: 378299 - DNA, 59 bp, Artificial
  Synthetic oligonucleotide
ctaagctactgtctcagggggggagggctgccacatgtggtagatacctcttcaactgg

SEQ ID NO: 378300 - DNA, 60 bp, Artificial
  Synthetic oligonucleotide
ctaagctatcatgccggcgtaatcaagatattggtgtactacgccatggtcgcttaacta

SEQ ID NO: 378301 - DNA, 60 bp, Artificial
  Synthetic oligonucleotide
ctaagctcaacagagctcatagccatcttattggcacctgataaagccatcctactggca

SEQ ID NO: 378302 - DNA, 60 bp, Artificial
  Synthetic oligonucleotide
ctaagctgactaggaaacaacatgtcatgttagatactctacagagatgtcaggaagagt

SEQ ID NO: 378303 - DNA, 60 bp, Artificial
  Synthetic oligonucleotide
ctaagctgcgggaggcgaatgatcggtgcggccagataaatagagaaggtttcttacatg

SEQ ID NO: 378304 - DNA, 60 bp, Artificial
  Synthetic oligonucleotide
ctaagctgtagcatagttgctagaccttcacaaccacctgtccactggccattggcgtct

SEQ ID NO: 378305 - DNA, 57 bp, Artificial
  Synthetic oligonucleotide
ctaagcttcctggagaaacaaatggaacacctcagagttgctgattcaaaaacccaa

SEQ ID NO: 378306 - DNA, 51 bp, Artificial
  Synthetic oligonucleotide
ctaagctttcaggtaatggtcagtcactatttagtgttaaccttacttcta

SEQ ID NO: 378307 - DNA, 54 bp, Artificial
  Synthetic oligonucleotide
ctaagcttttcagtcgagaaaaaaactgtaggccgaaagtgcaactggtaacac

SEQ ID NO: 378308 - DNA, 50 bp, Artificial
  Synthetic oligonucleotide
ctaaggaaacatgctattgcgtgtccaagcgaatcacatgggtcgctccg

SEQ ID NO: 378309 - DNA, 58 bp, Artificial
  Synthetic oligonucleotide
ctaaggaaattcacgacgattcactcaaccttccagattcttatatgaagttaattga

SEQ ID NO: 378310 - DNA, 57 bp, Artificial
  Synthetic oligonucleotide
ctaaggaacaagctataatcaggaaattttatcgtgttaacaattatgtggtgtata

SEQ ID NO: 378311 - DNA, 57 bp, Artificial
  Synthetic oligonucleotide
ctaaggaacatcccatccattcaatccagaggtttgtttggagcaattgccggtttc

SEQ ID NO: 378312 - DNA, 51 bp, Artificial
  Synthetic oligonucleotide
ctaaggaactagtcgacaaagatgggacaaacctggaactgactctcttga

SEQ ID NO: 378313 - DNA, 60 bp, Artificial
  Synthetic oligonucleotide
ctaaggacaatgcgattagaataggggaggatgcccacatccttgtcacgagagaaccat

SEQ ID NO: 378314 - DNA, 60 bp, Artificial
  Synthetic oligonucleotide
ctaaggacacagtgatgagagaacacaacaaatggatccttaggaaagtaaagcatcagg

SEQ ID NO: 378315 - DNA, 55 bp, Artificial
  Synthetic oligonucleotide
ctaaggacatggcacggattagggaattctcagcaggagatttgttttggaaggg

SEQ ID NO: 378316 - DNA, 58 bp, Artificial
  Synthetic oligonucleotide
ctaaggaccccagccagcgccggcacagcctggagccacccgacagcacccaccacgg

SEQ ID NO: 378317 - DNA, 57 bp, Artificial
  Synthetic oligonucleotide
ctaaggacgacctggccgcaatcgagccaaaacctgcttcggcaaatgttccaaaca

SEQ ID NO: 378318 - DNA, 56 bp, Artificial
  Synthetic oligonucleotide
ctaaggactcaactggtgctaacgggtacgggcctttacaaatgtatgcagcaaat

SEQ ID NO: 378319 - DNA, 58 bp, Artificial
  Synthetic oligonucleotide
ctaaggactgctgtaggtcaagtgtcaagacccatgtttttgtatgtaaggacaaatg

SEQ ID NO: 378320 - DNA, 59 bp, Artificial
  Synthetic oligonucleotide
ctaaggagcacagacaaacagtggttagtatagtggatgaaataggtgacatagttagg

SEQ ID NO: 378321 - DNA, 60 bp, Artificial
  Synthetic oligonucleotide
ctaaggagtcaaaaggtataagagaccatgcaagggatgctggctgtacccttgttgatc

SEQ ID NO: 378322 - DNA, 58 bp, Artificial
  Synthetic oligonucleotide
ctaaggatgataggcaggacacctcatttgatcctaaacaggttcaaatgtttattat

SEQ ID NO: 378323 - DNA, 54 bp, Artificial
  Synthetic oligonucleotide
ctaaggatgggtttttcacttatctggttggttttatacgcgataaactggcat

SEQ ID NO: 378324 - DNA, 55 bp, Artificial
  Synthetic oligonucleotide
ctaaggcactgaatagatcattattttattagtacttaacccttgttagctgttg

SEQ ID NO: 378325 - DNA, 56 bp, Artificial
  Synthetic oligonucleotide
ctaaggccccctcttggttccatctcattttcccgaactcgctgttgacgtgcgcc

SEQ ID NO: 378326 - DNA, 55 bp, Artificial
  Synthetic oligonucleotide
ctaaggccgaacgactcaatcaactttgagagtactgggaactttatagctcccg

SEQ ID NO: 378327 - DNA, 60 bp, Artificial
  Synthetic oligonucleotide
ctaaggcctagtacaagaggaaggagccaatctggagtttgctgctgtaatgtgccccca

SEQ ID NO: 378328 - DNA, 60 bp, Artificial
  Synthetic oligonucleotide
ctaaggctatggaacagatggctggatcaagtgagcaagctgcggaggccatggagattg

SEQ ID NO: 378329 - DNA, 52 bp, Artificial
  Synthetic oligonucleotide
ctaaggctcagcggcctactttatgaggccgtgaatctagtggtccacggcc

SEQ ID NO: 378330 - DNA, 55 bp, Artificial
  Synthetic oligonucleotide
ctaagggaaattatgtttcccatgtgaatcttgctgaggttgcacgactctccgg

SEQ ID NO: 378331 - DNA, 51 bp, Artificial
  Synthetic oligonucleotide
ctaagggatgcttgtattttaccctataccccctaataaccccttatcgat

SEQ ID NO: 378332 - DNA, 60 bp, Artificial
  Synthetic oligonucleotide
ctaagggccaggaagtggatccaacgtcagggactcaatgagacagttaaccatatcatc

SEQ ID NO: 378333 - DNA, 55 bp, Artificial
  Synthetic oligonucleotide
ctaagggcgaatccagcacactggcggtacaggccagacaattattgtctggtat

SEQ ID NO: 378334 - DNA, 60 bp, Artificial
  Synthetic oligonucleotide
ctaagggtcgagcagagctggagacgtggcccaagtgtctgtttcgatatctcagtggac

SEQ ID NO: 378335 - DNA, 55 bp, Artificial
  Synthetic oligonucleotide
ctaagggtgcgatcgtagatttagcgagaccatttccatcaggtgattaccagtt

SEQ ID NO: 378336 - DNA, 52 bp, Artificial
  Synthetic oligonucleotide
ctaaggtcacgaatcttaaccctgaagtaaaatttactcaaggtgataaaat

SEQ ID NO: 378337 - DNA, 58 bp, Artificial
  Synthetic oligonucleotide
ctaaggtcactcttgatggccgcccacttactaccattcagcagtactctaagacctt

SEQ ID NO: 378338 - DNA, 51 bp, Artificial
  Synthetic oligonucleotide
ctaaggtccccaccactctcgtatctatccttcatgatacccgattgcctg

SEQ ID NO: 378339 - DNA, 54 bp, Artificial
  Synthetic oligonucleotide
ctaaggtccgggagtccatgtgcgctcctaaggtgttagatttccaaacaataa

SEQ ID NO: 378340 - DNA, 60 bp, Artificial
  Synthetic oligonucleotide
ctaaggtcgatcatcatggaggcagtagacaccgccccactcgacggctatttagccgac

SEQ ID NO: 378341 - DNA, 57 bp, Artificial
  Synthetic oligonucleotide
ctaaggtctagatgcccacacaaatagttatgtggccctagagacctagcccacatt

SEQ ID NO: 378342 - DNA, 55 bp, Artificial
  Synthetic oligonucleotide
ctaaggtcttgggtctgtacgctgatttgacgcaaggtgtgctcggctatctccc

SEQ ID NO: 378343 - DNA, 60 bp, Artificial
  Synthetic oligonucleotide
ctaaggtggtcagcacggatgaatatgtaactcgcaccagcatttactatcacgccgcca

SEQ ID NO: 378344 - DNA, 59 bp, Artificial
  Synthetic oligonucleotide
ctaaggtgtatgcggggtcactgtttgagtcagattgtgattggctggtgaatgcctct

SEQ ID NO: 378345 - DNA, 52 bp, Artificial
  Synthetic oligonucleotide
ctaaggttatggatttttttcaaacttcgcgccatccataaaacgccgaacg

SEQ ID NO: 378346 - DNA, 55 bp, Artificial
  Synthetic oligonucleotide
ctaaggttgagaatttcagagtggttggaacacgtataggcgcgttgagcagagc

SEQ ID NO: 378347 - DNA, 55 bp, Artificial
  Synthetic oligonucleotide
ctaaggttgtaagtcatgtggaaactgttctgaataagaaggatgttactggcgc

SEQ ID NO: 378348 - DNA, 55 bp, Artificial
  Synthetic oligonucleotide
ctaagtaagctcttatccgataagggttacttagtcaccaaaatcgatgggagaa

SEQ ID NO: 378349 - DNA, 55 bp, Artificial
  Synthetic oligonucleotide
ctaagtacaggattggtttcccgcacttagcgcatttgtcgctctgcactagtcg

SEQ ID NO: 378350 - DNA, 57 bp, Artificial
  Synthetic oligonucleotide
ctaagtacagttttaggtgtctcaatcctgaaccttggacagaagagatacaccaaa

SEQ ID NO: 378351 - DNA, 53 bp, Artificial
  Synthetic oligonucleotide
ctaagtacatgttaactaattgtttaaacctagctaaataagtcgacccagaa

SEQ ID NO: 378352 - DNA, 57 bp, Artificial
  Synthetic oligonucleotide
ctaagtacggtcttaggagtctcaatcctgaatcttgggcaaaagagatacaccaaa

SEQ ID NO: 378353 - DNA, 56 bp, Artificial
  Synthetic oligonucleotide
ctaagtacggttttgggagtctcaatcctaaatctaggacagaagagatacaccaa

SEQ ID NO: 378354 - DNA, 60 bp, Artificial
  Synthetic oligonucleotide
ctaagtagtgtgtgctcatctgttcagtaactctggtgtctagagatccctcagactaaa

SEQ ID NO: 378355 - DNA, 55 bp, Artificial
  Synthetic oligonucleotide
ctaagtatacaaacaataacagggtatggaagagcatgggtagttaataaatcta

SEQ ID NO: 378356 - DNA, 60 bp, Artificial
  Synthetic oligonucleotide
ctaagtatgagaatcatacggagaatgctttgttgttgtatatggcatgtacacatgcat

SEQ ID NO: 378357 - DNA, 55 bp, Artificial
  Synthetic oligonucleotide
ctaagtatttaggactgtacagagcctttagcactacgtggtcttgggtggctgg

SEQ ID NO: 378358 - DNA, 57 bp, Artificial
  Synthetic oligonucleotide
ctaagtcaacggactatgtcgcttgatttcgtaactaccaactatatgtcactaatt

SEQ ID NO: 378359 - DNA, 60 bp, Artificial
  Synthetic oligonucleotide
ctaagtcctgagtacaggacagtcgtcagtagttcgacgtgagcagaagcccacctcgag

SEQ ID NO: 378360 - DNA, 60 bp, Artificial
  Synthetic oligonucleotide
ctaagtcgctgagcaattgagacaagcgactggctctggacgaatcacaaattagcaaac

SEQ ID NO: 378361 - DNA, 60 bp, Artificial
  Synthetic oligonucleotide
ctaagtcggacctaggtcgacaccactgcgtgcgcgcagatgatgccgtgtgtgtcagac

SEQ ID NO: 378362 - DNA, 53 bp, Artificial
  Synthetic oligonucleotide
ctaagtcgtttagattaatggttgctaagtatgaggcattcgtaccttacgat

SEQ ID NO: 378363 - DNA, 60 bp, Artificial
  Synthetic oligonucleotide
ctaagtctattaccaagtccgttatgtcggcagtaaatgctggcattgagtgtacggatg

SEQ ID NO: 378364 - DNA, 54 bp, Artificial
  Synthetic oligonucleotide
ctaagtctatttcataaaacgacgtcgcttgtggtatggtctgtttattaaagt

SEQ ID NO: 378365 - DNA, 54 bp, Artificial
  Synthetic oligonucleotide
ctaagtctgagtcccaggcaaagggccggactcccagcgtggcccaacctctgc

SEQ ID NO: 378366 - DNA, 60 bp, Artificial
  Synthetic oligonucleotide
ctaagtgaatttgatggacaagtcattgctaatatacttgccagtgaactaagttctgtg

SEQ ID NO: 378367 - DNA, 50 bp, Artificial
  Synthetic oligonucleotide
ctaagtgagttggttaaaaaacgtctagtgggccaaacccaggggggatc

SEQ ID NO: 378368 - DNA, 55 bp, Artificial
  Synthetic oligonucleotide
ctaagtgataacccatgtaaggtagaccttcatacacagtctatagagggtgcat

SEQ ID NO: 378369 - DNA, 60 bp, Artificial
  Synthetic oligonucleotide
ctaagtgcctcattgtcagctacggtctcaaacctctgtaaagtgcttagggatgttcac

SEQ ID NO: 378370 - DNA, 60 bp, Artificial
  Synthetic oligonucleotide
ctaagtgcggatagtagcgctgagacaaccactcaatcagatgcaagttactcttacaaa

SEQ ID NO: 378371 - DNA, 55 bp, Artificial
  Synthetic oligonucleotide
ctaagtgggtgcgggatataattgtgcaacaattgggacaatggccaacgatgac

SEQ ID NO: 378372 - DNA, 55 bp, Artificial
  Synthetic oligonucleotide
ctaagtgtatccccgtaatcgtcgggctataccgggagcagacactatccgttcc

SEQ ID NO: 378373 - DNA, 59 bp, Artificial
  Synthetic oligonucleotide
ctaagttacacatctgttgttgggaatggactacagatgttagcgggctttacaggtgc

SEQ ID NO: 378374 - DNA, 51 bp, Artificial
  Synthetic oligonucleotide
ctaagttaccgtactttgttgttcggggaagaaagaatgggaagctcgtta

SEQ ID NO: 378375 - DNA, 60 bp, Artificial
  Synthetic oligonucleotide
ctaagttagcaccagaagatagtaatgctgtggcctggcttgcccataataatcaggcca

SEQ ID NO: 378376 - DNA, 60 bp, Artificial
  Synthetic oligonucleotide
ctaagttcactcctaaaaaatgatgtgccactagccggcccactaatagctggaggcatg

SEQ ID NO: 378377 - DNA, 51 bp, Artificial
  Synthetic oligonucleotide
ctaagttcgcatacagtgtgctggcacaacacaggaatttctctttttggg

SEQ ID NO: 378378 - DNA, 51 bp, Artificial
  Synthetic oligonucleotide
ctaagttcttctatagaaagaagacgcctgttaagacgaaaagacacattc

SEQ ID NO: 378379 - DNA, 56 bp, Artificial
  Synthetic oligonucleotide
ctaagttgaaagtgggagtaggtaaactcgagcctatgaccaagaagacccacata

SEQ ID NO: 378380 - DNA, 55 bp, Artificial
  Synthetic oligonucleotide
ctaagttgattattgcactacagcttgaccattggtcactcaggtaatcagctgc

SEQ ID NO: 378381 - DNA, 53 bp, Artificial
  Synthetic oligonucleotide
ctaagttgccatactttgttgttcggggaaggaataatgagaagctcgtcaac

SEQ ID NO: 378382 - DNA, 55 bp, Artificial
  Synthetic oligonucleotide
ctaagttgctgtcccagggggggagggccgccacttgcggcaaatacctcttcaa

SEQ ID NO: 378383 - DNA, 50 bp, Artificial
  Synthetic oligonucleotide
ctaagttggaggaacttagaaaaactcgtgctattcagacagaacgtaat

SEQ ID NO: 378384 - DNA, 54 bp, Artificial
  Synthetic oligonucleotide
ctaagttgtgggagaagtcgtccaagggatggtactggaagttcccggatgtgt

SEQ ID NO: 378385 - DNA, 57 bp, Artificial
  Synthetic oligonucleotide
ctaagtttcacttcatacttataaacttactaagaagttgctatacatcctacacta

SEQ ID NO: 378386 - DNA, 58 bp, Artificial
  Synthetic oligonucleotide
ctaagtttggttctttccttggttctttgtatgtctcagcacgctgtggctcccacat

SEQ ID NO: 378387 - DNA, 50 bp, Artificial
  Synthetic oligonucleotide
ctaagttttgtaatggtacctttgcaaatagctagcatagtaggactaat

SEQ ID NO: 378388 - DNA, 54 bp, Artificial
  Synthetic oligonucleotide
ctaataaaacaataagatttcaaccatcctcaggaggggacctagaaattacaa

SEQ ID NO: 378389 - DNA, 55 bp, Artificial
  Synthetic oligonucleotide
ctaataaattgcaatgtgtcaaccataacgcaggcttgtccaaaggtatcttggg

SEQ ID NO: 378390 - DNA, 59 bp, Artificial
  Synthetic oligonucleotide
ctaataacaatgcttcggcagtggtctggtacaatggaagaccagtcaccgaaattgcc

SEQ ID NO: 378391 - DNA, 55 bp, Artificial
  Synthetic oligonucleotide
ctaataacgtggaagatgcaccgcctctaatggaggaagctaaaggcgcctcggg

SEQ ID NO: 378392 - DNA, 60 bp, Artificial
  Synthetic oligonucleotide
ctaataagaatgatgatgtctcttggacgagcaacagtatagtcacattctgtgggctaa

SEQ ID NO: 378393 - DNA, 51 bp, Artificial
  Synthetic oligonucleotide
ctaataagactatgacactaacgcctcgcggcgttaatcctacgaacgggg

SEQ ID NO: 378394 - DNA, 59 bp, Artificial
  Synthetic oligonucleotide
ctaataagccaaaatagcggagggatggtgctaaagcttcacatctacggtgaggctta

SEQ ID NO: 378395 - DNA, 54 bp, Artificial
  Synthetic oligonucleotide
ctaataagctgcattagtagccaatggcaggtagtttacatctcttacttggtg

SEQ ID NO: 378396 - DNA, 55 bp, Artificial
  Synthetic oligonucleotide
ctaataaggctcaagattgtcatgtttcttatgacagagccatagcagtagaggt

SEQ ID NO: 378397 - DNA, 60 bp, Artificial
  Synthetic oligonucleotide
ctaataaggttagaggcattcctagaccctcgtatgtacgagtgtgcagactattacaca

SEQ ID NO: 378398 - DNA, 55 bp, Artificial
  Synthetic oligonucleotide
ctaataatgattgggtccaatgcaactgacaggatgggaatgggcgtcacctacc

SEQ ID NO: 378399 - DNA, 60 bp, Artificial
  Synthetic oligonucleotide
ctaataatgtgactgttactaatatgaatgctactaataccactggtaatagtagtgtgg

SEQ ID NO: 378400 - DNA, 60 bp, Artificial
  Synthetic oligonucleotide
ctaataattccagcacaatcataactccatatattaattgccagcctatggataatatgc

SEQ ID NO: 378401 - DNA, 56 bp, Artificial
  Synthetic oligonucleotide
ctaataattgtgggagacgacaaattggaaccgcatacgcgttcagaacaaatagt

SEQ ID NO: 378402 - DNA, 58 bp, Artificial
  Synthetic oligonucleotide
ctaataccaactgtacttctggaggcccatgattctccagccttaatttctattgggc

SEQ ID NO: 378403 - DNA, 55 bp, Artificial
  Synthetic oligonucleotide
ctaataccactataaatggtatggcaccaacggtgcgcatagatgccggttctcc

SEQ ID NO: 378404 - DNA, 56 bp, Artificial
  Synthetic oligonucleotide
ctaataccatagaaagtgatcgttccaagtctggtcataaactatcactagtcaac

SEQ ID NO: 378405 - DNA, 55 bp, Artificial
  Synthetic oligonucleotide
ctaataccatcacagagaaagaggtatgcccaaaattaagggaatacaggaattg

SEQ ID NO: 378406 - DNA, 59 bp, Artificial
  Synthetic oligonucleotide
ctaataccatgctaaatgccataggaggacatcaaggggctttacaagtgctaaaagaa

SEQ ID NO: 378407 - DNA, 52 bp, Artificial
  Synthetic oligonucleotide
ctaataccatttataacaagattaagggatataatcccgtaattatttaggt

SEQ ID NO: 378408 - DNA, 57 bp, Artificial
  Synthetic oligonucleotide
ctaatacggcgtatactgcgaaccggtctccgcctagcaacacgacgtctgaaccgc

SEQ ID NO: 378409 - DNA, 59 bp, Artificial
  Synthetic oligonucleotide
ctaatactagatccgaaaatcaacgtaacgataggagaacctgccaatataacatgcac

SEQ ID NO: 378410 - DNA, 55 bp, Artificial
  Synthetic oligonucleotide
ctaatactatagaggtcttcagatcgaacggtttaacggctaatgaatcgggaag

SEQ ID NO: 378411 - DNA, 51 bp, Artificial
  Synthetic oligonucleotide
ctaatactggattagtcagacacaagagagactttggtatatctgctataa

SEQ ID NO: 378412 - DNA, 55 bp, Artificial
  Synthetic oligonucleotide
ctaatacttacgttattgcgactggatctccgctttataactcggcaccatcaca

SEQ ID NO: 378413 - DNA, 55 bp, Artificial
  Synthetic oligonucleotide
ctaatagaaaccaatgttcctgtgacacatgccaaagagttgctccacacagagc

SEQ ID NO: 378414 - DNA, 58 bp, Artificial
  Synthetic oligonucleotide
ctaatagaaccagatacccaacttgcagcgcggatgatggttgcgcagtggtacttga

SEQ ID NO: 378415 - DNA, 59 bp, Artificial
  Synthetic oligonucleotide
ctaatagaattcaatcaaacgagtacgagatcaatcgtgaaatttctaataggcgtcag

SEQ ID NO: 378416 - DNA, 60 bp, Artificial
  Synthetic oligonucleotide
ctaatagatcaactttggcgaaactggtgtcatctccaatgtcaatcttagtcgctttag

SEQ ID NO: 378417 - DNA, 55 bp, Artificial
  Synthetic oligonucleotide
ctaatagattccgtccattccaacatgaggattacccatgtcgaagacaacaaag

SEQ ID NO: 378418 - DNA, 54 bp, Artificial
  Synthetic oligonucleotide
ctaataggaataactacattaagtatagccctcaatatctatctaatcataaac

SEQ ID NO: 378419 - DNA, 51 bp, Artificial
  Synthetic oligonucleotide
ctaataggcaatcgctcctaaaactagttgagatgcaaggaccaaaaggac

SEQ ID NO: 378420 - DNA, 57 bp, Artificial
  Synthetic oligonucleotide
ctaatagggaaactagaatagggaaagcagggtatgttactgacagaggaaggcaga

SEQ ID NO: 378421 - DNA, 59 bp, Artificial
  Synthetic oligonucleotide
ctaataggtgaaggaccatgtgaaccaggtgattgtggtgggaaattattatgcaaaca

SEQ ID NO: 378422 - DNA, 57 bp, Artificial
  Synthetic oligonucleotide
ctaataggtgtacatcagaaaattcctacacaagcctttgaggtttcagttcgactc

SEQ ID NO: 378423 - DNA, 51 bp, Artificial
  Synthetic oligonucleotide
ctaatagtgtaaagtctattggttgtgaaacggcgtctgcagaagtgtcta

SEQ ID NO: 378424 - DNA, 55 bp, Artificial
  Synthetic oligonucleotide
ctaatagttgaacttgaaaaaagtgttcctacattagttggcattgaatgtccca

SEQ ID NO: 378425 - DNA, 59 bp, Artificial
  Synthetic oligonucleotide
ctaatagttgctccagtgtgtcctctttagttagaggacagcgaggatatgtaaggaaa

SEQ ID NO: 378426 - DNA, 60 bp, Artificial
  Synthetic oligonucleotide
ctaatagtttacaaagtatcactgaacagtcaacttggacagatgcactaaaagcaatag

SEQ ID NO: 378427 - DNA, 60 bp, Artificial
  Synthetic oligonucleotide
ctaatatcatgagcacggagtctagcaactatgctcaataccgtgtacagggcctaactg

SEQ ID NO: 378428 - DNA, 60 bp, Artificial
  Synthetic oligonucleotide
ctaatatctgaatgtggaggcatatgtttatgaactctagaataatccagttttttattc

SEQ ID NO: 378429 - DNA, 55 bp, Artificial
  Synthetic oligonucleotide
ctaatatgactgacaagactccagttcattcgtgggaagacataccttacctagg

SEQ ID NO: 378430 - DNA, 58 bp, Artificial
  Synthetic oligonucleotide
ctaatatggaaccattttcggatggatgggcgctacttggttatctcgggctaatgga

SEQ ID NO: 378431 - DNA, 55 bp, Artificial
  Synthetic oligonucleotide
ctaatatgggcctaaagttcaggcagctcttgtggtttcacgtttcttgtcttac

SEQ ID NO: 378432 - DNA, 52 bp, Artificial
  Synthetic oligonucleotide
ctaatatggtattggccactatcagcacagtactattcttcactttcataac

SEQ ID NO: 378433 - DNA, 55 bp, Artificial
  Synthetic oligonucleotide
ctaatatttaccgctttatgtgatgtctttagatttccagtgtgggcttcccacc

SEQ ID NO: 378434 - DNA, 55 bp, Artificial
  Synthetic oligonucleotide
ctaatcaacaagcagaattggaagcatttctcatggcattgacagactcagggcc

SEQ ID NO: 378435 - DNA, 60 bp, Artificial
  Synthetic oligonucleotide
ctaatcaacagttcctgcatacacgcatgcacattcaatgatatgaatttgatgggttgg

SEQ ID NO: 378436 - DNA, 60 bp, Artificial
  Synthetic oligonucleotide
ctaatcaaggtgcgctacgtcctgagttagcattcgatcacgatcacatcatccggtgtt

SEQ ID NO: 378437 - DNA, 60 bp, Artificial
  Synthetic oligonucleotide
ctaatcaatacttcatccagttcctcagtggatatccctccatcagaagtctttgtacta

SEQ ID NO: 378438 - DNA, 57 bp, Artificial
  Synthetic oligonucleotide
ctaatcacagttcttagtaaggctgtttgagtaacggtttaatcgtagaagtgcata

SEQ ID NO: 378439 - DNA, 52 bp, Artificial
  Synthetic oligonucleotide
ctaatcaccagtagatcaaatcagtgcaccattatcataacaggcgaatcag

SEQ ID NO: 378440 - DNA, 60 bp, Artificial
  Synthetic oligonucleotide
ctaatcaggcatgaaaacagaatggtgctagctagcactacagctaaggctatggaacag

SEQ ID NO: 378441 - DNA, 60 bp, Artificial
  Synthetic oligonucleotide
ctaatcaggcatgagaacagaatggtaatagccagcactacagctaaggctatggagcaa

SEQ ID NO: 378442 - DNA, 55 bp, Artificial
  Synthetic oligonucleotide
ctaatcaggtcatgttcttcttggtccgtgatagaaggccctatggaaacagccc

SEQ ID NO: 378443 - DNA, 55 bp, Artificial
  Synthetic oligonucleotide
ctaatcagtgatttgaacgtgataaacttcttaccgctgttgtttctagtgcagg

SEQ ID NO: 378444 - DNA, 60 bp, Artificial
  Synthetic oligonucleotide
ctaatcataaattatacagtggccaaataaatgacttagggtcattcagtcaaatgtgtg

SEQ ID NO: 378445 - DNA, 55 bp, Artificial
  Synthetic oligonucleotide
ctaatcatcaggacgcttttactgaaaacctacaagggcatagatttagatcatc

SEQ ID NO: 378446 - DNA, 60 bp, Artificial
  Synthetic oligonucleotide
ctaatcatcgatggggagatgttaggtttctgcgtctagtgtggtcagctcctacgcttg

SEQ ID NO: 378447 - DNA, 60 bp, Artificial
  Synthetic oligonucleotide
ctaatcatctcatgttcatgtcctacttttcaagcctccaagctgtgccttgggtggctt

SEQ ID NO: 378448 - DNA, 56 bp, Artificial
  Synthetic oligonucleotide
ctaatccaaatgccaaaggatttcccagtgttcccacagaaacttagattcaggga

SEQ ID NO: 378449 - DNA, 55 bp, Artificial
  Synthetic oligonucleotide
ctaatccccagttagtggattcgggaagtgcttgacatcgatacactccatgtaa

SEQ ID NO: 378450 - DNA, 54 bp, Artificial
  Synthetic oligonucleotide
ctaatcccgtggacccctgcggcctccactttcagtggaacgtcgtagccctcc

SEQ ID NO: 378451 - DNA, 56 bp, Artificial
  Synthetic oligonucleotide
ctaatcctatcgaaattgtttcattattagtgtaccctattaaagctaactgcacc

SEQ ID NO: 378452 - DNA, 55 bp, Artificial
  Synthetic oligonucleotide
ctaatcgggcaactacccgcctcgtattcactcctaagctaccttcacgttgccg

SEQ ID NO: 378453 - DNA, 60 bp, Artificial
  Synthetic oligonucleotide
ctaatcgtggtgctatgcgtgtcgttcagcaggcactaacttgacgactaagcatgaagg

SEQ ID NO: 378454 - DNA, 55 bp, Artificial
  Synthetic oligonucleotide
ctaatcgtttgtttgcttggatgcgagaacatggatatctgatcaatcgtaaggg

SEQ ID NO: 378455 - DNA, 56 bp, Artificial
  Synthetic oligonucleotide
ctaatctacattcatataagcggggttatctctaacagtgatttaatgtcaccacc

SEQ ID NO: 378456 - DNA, 53 bp, Artificial
  Synthetic oligonucleotide
ctaatctatcgaggtattttaatacttgggtcttaaataccctcaagaaacgc

SEQ ID NO: 378457 - DNA, 55 bp, Artificial
  Synthetic oligonucleotide
ctaatctattggttaggggagatacatacacagcagggataagttttacccaggg

SEQ ID NO: 378458 - DNA, 55 bp, Artificial
  Synthetic oligonucleotide
ctaatctcagtatcaggggatctaaattcacaaacaagaacccaggaacccctaa

SEQ ID NO: 378459 - DNA, 60 bp, Artificial
  Synthetic oligonucleotide
ctaatctcgacggcagagtctccgggtggatgcaacgaaacatagcccagaaagctatgg

SEQ ID NO: 378460 - DNA, 59 bp, Artificial
  Synthetic oligonucleotide
ctaatctcgagatccaatgccctctgggggctaattgatcccttgttccctgtcatggg

SEQ ID NO: 378461 - DNA, 60 bp, Artificial
  Synthetic oligonucleotide
ctaatctctccgcatcgcaattgcgcgtcatcccgaatgacgagaagggcaaatggttcc

SEQ ID NO: 378462 - DNA, 57 bp, Artificial
  Synthetic oligonucleotide
ctaatctgatctcctggtgcggtttaaatttggtcgattcagctcctaaaggattgt

SEQ ID NO: 378463 - DNA, 52 bp, Artificial
  Synthetic oligonucleotide
ctaatctggtgtgcattgcgtcaggattgacacacaaggatgatggggcagg

SEQ ID NO: 378464 - DNA, 57 bp, Artificial
  Synthetic oligonucleotide
ctaatctggtgttgtactttagatggctggggccccaacgcctcatgttcctcgtgt

SEQ ID NO: 378465 - DNA, 57 bp, Artificial
  Synthetic oligonucleotide
ctaatcttaggctaaatgaaaattttcgatatagtatgcttttacctgaattctcta

SEQ ID NO: 378466 - DNA, 55 bp, Artificial
  Synthetic oligonucleotide
ctaatcttggtaaggattggggccaaaagtgggatggtataaagggattcgcatc

SEQ ID NO: 378467 - DNA, 55 bp, Artificial
  Synthetic oligonucleotide
ctaatcttgtcttgtatgccgccccgctgagccccttgctcccgcttcaggatgg

SEQ ID NO: 378468 - DNA, 58 bp, Artificial
  Synthetic oligonucleotide
ctaatgaaattgaagggtatataaacaaagtatatagtataacctatgctgacgatcc

SEQ ID NO: 378469 - DNA, 55 bp, Artificial
  Synthetic oligonucleotide
ctaatgaactcctctttagtgctgtgaaagcttaccagcctatcattcacactac

SEQ ID NO: 378470 - DNA, 58 bp, Artificial
  Synthetic oligonucleotide
ctaatgaagaggcaaagatgattagccaatcattgcatgaaaatcagcttggtcctga

SEQ ID NO: 378471 - DNA, 59 bp, Artificial
  Synthetic oligonucleotide
ctaatgaagagtagctcagtaatccctcattttaagaatgaggtttcgggtgatacgca

SEQ ID NO: 378472 - DNA, 60 bp, Artificial
  Synthetic oligonucleotide
ctaatgaaggagaacactcatctaggtggtagggatgttgatgctagcaaaaccccatat

SEQ ID NO: 378473 - DNA, 52 bp, Artificial
  Synthetic oligonucleotide
ctaatgaattacaggacaaagtacccagaaggtactataactccaaaaaacc

SEQ ID NO: 378474 - DNA, 60 bp, Artificial
  Synthetic oligonucleotide
ctaatgacgattatcagacaccaatagctaattccgtgacagtgagacaggatttagaaa

SEQ ID NO: 378475 - DNA, 60 bp, Artificial
  Synthetic oligonucleotide
ctaatgagatcggcgccagacctaataagtattggccaattgtcgtaggtgtaattgcaa

SEQ ID NO: 378476 - DNA, 58 bp, Artificial
  Synthetic oligonucleotide
ctaatgagcattccttattgtaattacacaaagttttggtatgtaaatcacaccctga

SEQ ID NO: 378477 - DNA, 55 bp, Artificial
  Synthetic oligonucleotide
ctaatgagccatctctcggttaacgttacaggaactaatctggcaagataccacg

SEQ ID NO: 378478 - DNA, 55 bp, Artificial
  Synthetic oligonucleotide
ctaatgagctgccatagtatcagacccactgcctctgggtccagtctgcagcgag

SEQ ID NO: 378479 - DNA, 60 bp, Artificial
  Synthetic oligonucleotide
ctaatgaggcaatgcaactataaatatacgtatgaatagtcacgtaatgtaactaataaa

SEQ ID NO: 378480 - DNA, 60 bp, Artificial
  Synthetic oligonucleotide
ctaatgaggcacatggggagacacacgtttgccaggttacacgtggagacatccctgccg

SEQ ID NO: 378481 - DNA, 60 bp, Artificial
  Synthetic oligonucleotide
ctaatgaggggtggaatgcatccgaggacgctcttaccgcagtaatcactgccgcctatc

SEQ ID NO: 378482 - DNA, 58 bp, Artificial
  Synthetic oligonucleotide
ctaatgatgtaatacgttgttctaatataacagggtcgaattttgaactatcttcatc

SEQ ID NO: 378483 - DNA, 59 bp, Artificial
  Synthetic oligonucleotide
ctaatgatgtagttcataaatgcggattgacgttagccaggttaaacggtgaagtgcca

SEQ ID NO: 378484 - DNA, 57 bp, Artificial
  Synthetic oligonucleotide
ctaatgattgttttaaaacattaattgccgctatgcttagtcaacgtactatgtctt

SEQ ID NO: 378485 - DNA, 56 bp, Artificial
  Synthetic oligonucleotide
ctaatgcaaaggaagatactaccggtagtaatactaccagtgataatagtgtcagt

SEQ ID NO: 378486 - DNA, 59 bp, Artificial
  Synthetic oligonucleotide
ctaatgcagacaatgtatgtcccaccagggatagacccacccaagacaaagaccgataa

SEQ ID NO: 378487 - DNA, 52 bp, Artificial
  Synthetic oligonucleotide
ctaatgccaccccggtgactgacgggcgctccgtcttggccacgactatgcc

SEQ ID NO: 378488 - DNA, 55 bp, Artificial
  Synthetic oligonucleotide
ctaatgcctggaatgctagtgtcaccggtgagaagcgcgccttttccttatcgag

SEQ ID NO: 378489 - DNA, 52 bp, Artificial
  Synthetic oligonucleotide
ctaatgcgatgtccactatcgttgagagtaccactaacactcagagccccgc

SEQ ID NO: 378490 - DNA, 60 bp, Artificial
  Synthetic oligonucleotide
ctaatgctaaataacttccattcgaaagctattgtagatgatctatgcaacacagtctta

SEQ ID NO: 378491 - DNA, 55 bp, Artificial
  Synthetic oligonucleotide
ctaatgctaaatagcaaatcaagaatagcgttgtacggccaaagtcgccacactc

SEQ ID NO: 378492 - DNA, 55 bp, Artificial
  Synthetic oligonucleotide
ctaatgctagtatagtaacaggagacacaccagaatggatagcaaggcaaacaat

SEQ ID NO: 378493 - DNA, 57 bp, Artificial
  Synthetic oligonucleotide
ctaatgctcagggaaaggtccgcgctagggatggacgatgaggacgtggccagatac

SEQ ID NO: 378494 - DNA, 57 bp, Artificial
  Synthetic oligonucleotide
ctaatggaaactgtgacgcaccaataacaggaggaaacccagatcctggagtcaagg

SEQ ID NO: 378495 - DNA, 55 bp, Artificial
  Synthetic oligonucleotide
ctaatggaagaagtctgttacgacgactccatcttagacctcctgcaacctgtct

SEQ ID NO: 378496 - DNA, 54 bp, Artificial
  Synthetic oligonucleotide
ctaatggaattggcaccattcattagcgttgatggacatctgctgcataaatac

SEQ ID NO: 378497 - DNA, 60 bp, Artificial
  Synthetic oligonucleotide
ctaatggacaagcatagccttgcggacatcatttaggcaattgggtatttgcgtgactag

SEQ ID NO: 378498 - DNA, 55 bp, Artificial
  Synthetic oligonucleotide
ctaatggatatccctattcctcctgccatcttagatattagagcgcaacgtttca

SEQ ID NO: 378499 - DNA, 52 bp, Artificial
  Synthetic oligonucleotide
ctaatgggcaaacttgtcgagtcttctcaatgggaagaagacctttaccaaa

SEQ ID NO: 378500 - DNA, 57 bp, Artificial
  Synthetic oligonucleotide
ctaatgggcttcggtcgtccaacagaccaaaaatcaacgcattcaggtgtgaaatcc

SEQ ID NO: 378501 - DNA, 59 bp, Artificial
  Synthetic oligonucleotide
ctaatggtgatcatagcttttaactatacgttactatcgtgtggtgttgacttggagaa

SEQ ID NO: 378502 - DNA, 55 bp, Artificial
  Synthetic oligonucleotide
ctaatggtgatgagactttcaggcctggaggaggagatatgagggacaactggag

SEQ ID NO: 378503 - DNA, 57 bp, Artificial
  Synthetic oligonucleotide
ctaatggttcaattttacctccatctgttacgcctgataaaaaatttgccgatgctg

SEQ ID NO: 378504 - DNA, 53 bp, Artificial
  Synthetic oligonucleotide
ctaatgtaaacacgtttgagcaagttacagcatctgaacagttagcaattata

SEQ ID NO: 378505 - DNA, 55 bp, Artificial
  Synthetic oligonucleotide
ctaatgtaagcaccacaagcaccattaaagatgtgaggacactggtatcctacgt

SEQ ID NO: 378506 - DNA, 60 bp, Artificial
  Synthetic oligonucleotide
ctaatgtaatttggaatgttccaagatgtcatatagcaaatctaatcacaaatgtcgcgt

SEQ ID NO: 378507 - DNA, 60 bp, Artificial
  Synthetic oligonucleotide
ctaatgtgaagaatctatatgaaaaggtcaaatcacaactacgagacaatgctaacgatc

SEQ ID NO: 378508 - DNA, 60 bp, Artificial
  Synthetic oligonucleotide
ctaatgtgaatgctactagtagtactaatgcaactaatgtgaatgctactagtagtccta

SEQ ID NO: 378509 - DNA, 60 bp, Artificial
  Synthetic oligonucleotide
ctaatgtgctgggcgttacagctacgcctgaccgctcagatatgcggaatttaggatcgt

SEQ ID NO: 378510 - DNA, 50 bp, Artificial
  Synthetic oligonucleotide
ctaatgtgtgtagcttgtcataaacgctagggtagcgtctattgtatgaa

SEQ ID NO: 378511 - DNA, 56 bp, Artificial
  Synthetic oligonucleotide
ctaatgttcgacgttgcgaatatttttagactactcctggtggctaggaagaatct

SEQ ID NO: 378512 - DNA, 59 bp, Artificial
  Synthetic oligonucleotide
ctaatgttcgctcctgctgcgttgggtcctccttgtagtgggatccatccggttctgac

SEQ ID NO: 378513 - DNA, 55 bp, Artificial
  Synthetic oligonucleotide
ctaatgttctagccatcttgcaaaattatgtgtttggcgatagacagattgctag

SEQ ID NO: 378514 - DNA, 59 bp, Artificial
  Synthetic oligonucleotide
ctaatgttgttgctggaaaggacaaaacttcagtgacattggccggcaattcatctctt

SEQ ID NO: 378515 - DNA, 53 bp, Artificial
  Synthetic oligonucleotide
ctaattaactaccttttaaatggcacccacttcgacaaaactcattattgtgg

SEQ ID NO: 378516 - DNA, 60 bp, Artificial
  Synthetic oligonucleotide
ctaattaagaatgcttgctttgatgcttatgaccaaagacagcatgttcagcttagagat

SEQ ID NO: 378517 - DNA, 58 bp, Artificial
  Synthetic oligonucleotide
ctaattacattgtttattgacacaacgcctaaattggacagatatctaagtacattgt

SEQ ID NO: 378518 - DNA, 60 bp, Artificial
  Synthetic oligonucleotide
ctaattagcttgtccaaagatgcgtactctgtcggcccttggaatagcattaaccacgca

SEQ ID NO: 378519 - DNA, 59 bp, Artificial
  Synthetic oligonucleotide
ctaattatatcttgttcatgtcctactgggcaagcctccaacctgtgccttgggtggct

SEQ ID NO: 378520 - DNA, 56 bp, Artificial
  Synthetic oligonucleotide
ctaattattcacgtggcacgggtatgggccctaaattcgataaggccgctgcgtgg

SEQ ID NO: 378521 - DNA, 52 bp, Artificial
  Synthetic oligonucleotide
ctaattcataacattttctattaccatatgcatttgctgatccttcgatgaa

SEQ ID NO: 378522 - DNA, 55 bp, Artificial
  Synthetic oligonucleotide
ctaattcccaccagtggaactgataccattgtaaccaaacctaagagcagaattt

SEQ ID NO: 378523 - DNA, 51 bp, Artificial
  Synthetic oligonucleotide
ctaattcgaaactaggtggtaacccctcgctattattcggaataggacact

SEQ ID NO: 378524 - DNA, 57 bp, Artificial
  Synthetic oligonucleotide
ctaattcgcggcgcgtaccctaagatccagacagcgagccgtgtttttcgctccctg

SEQ ID NO: 378525 - DNA, 59 bp, Artificial
  Synthetic oligonucleotide
ctaattcgtctcccaataatttaggaccattgggactgatcgacatcatctttttgatc

SEQ ID NO: 378526 - DNA, 55 bp, Artificial
  Synthetic oligonucleotide
ctaattcgttcaactgtgacattgacatggtgatgttcgattgcgaccgttgtat

SEQ ID NO: 378527 - DNA, 52 bp, Artificial
  Synthetic oligonucleotide
ctaattctatagccaatctagcattaattaaaacagtactgtcacgcatagc

SEQ ID NO: 378528 - DNA, 55 bp, Artificial
  Synthetic oligonucleotide
ctaattctcagtttcgccttgtaactggtgatacctgcgtttataacggttcgcc

SEQ ID NO: 378529 - DNA, 50 bp, Artificial
  Synthetic oligonucleotide
ctaattctcatactacctacttatgagttaacaaagttatactaccttaa

SEQ ID NO: 378530 - DNA, 56 bp, Artificial
  Synthetic oligonucleotide
ctaattctcatactgcccacttatgagctaacaaaattgtactaccttaaggaagt

SEQ ID NO: 378531 - DNA, 56 bp, Artificial
  Synthetic oligonucleotide
ctaattctgtaacatgcacattctctaggcagtttttaattccatatgacccagag

SEQ ID NO: 378532 - DNA, 53 bp, Artificial
  Synthetic oligonucleotide
ctaattcttcgcaaccccaccaagaagttggtgtaacacaaaagtctagaacc

SEQ ID NO: 378533 - DNA, 55 bp, Artificial
  Synthetic oligonucleotide
ctaattgatttcttcattacaacaatctacctcattgtccctatccccttcccta

SEQ ID NO: 378534 - DNA, 55 bp, Artificial
  Synthetic oligonucleotide
ctaattgcattgagcactgctaataggtttgtatcacgttaaagatttggagtgt

SEQ ID NO: 378535 - DNA, 60 bp, Artificial
  Synthetic oligonucleotide
ctaattggcggaatgttaagagagagaagaacatttgaagacacccgcatacaactgata

SEQ ID NO: 378536 - DNA, 58 bp, Artificial
  Synthetic oligonucleotide
ctaattgggccaaagtcatcttagtcctattcctctttgcaggggttgacgctgagac

SEQ ID NO: 378537 - DNA, 55 bp, Artificial
  Synthetic oligonucleotide
ctaattggtgaaggcccatgtaaaccaggtgactgtggaggtaaattactttgca

SEQ ID NO: 378538 - DNA, 53 bp, Artificial
  Synthetic oligonucleotide
ctaattgtgagagggcttcttctttagttagagagcatttgggataagtgagg

SEQ ID NO: 378539 - DNA, 50 bp, Artificial
  Synthetic oligonucleotide
ctaatttacaatgtggaggaaatagactttagacctacctccacaacttg

SEQ ID NO: 378540 - DNA, 55 bp, Artificial
  Synthetic oligonucleotide
ctaatttagcgttcgtgatagccatcggtgctacaattggagctgcagccgtacc

SEQ ID NO: 378541 - DNA, 55 bp, Artificial
  Synthetic oligonucleotide
ctaatttatctttgttatcacccatttgaacgagtccttggccctcttcaatacg

SEQ ID NO: 378542 - DNA, 58 bp, Artificial
  Synthetic oligonucleotide
ctaatttcaccaaaagatgtagaaaacgatctaaagcatattggcttcgattctgtaa

SEQ ID NO: 378543 - DNA, 56 bp, Artificial
  Synthetic oligonucleotide
ctaatttcatattacatggaattccaacattcgctaactcttggtgacgctctttg

SEQ ID NO: 378544 - DNA, 58 bp, Artificial
  Synthetic oligonucleotide
ctaatttcgccacgcggtatctttcatactggaaggatctcgggaagaacggatcaga

SEQ ID NO: 378545 - DNA, 59 bp, Artificial
  Synthetic oligonucleotide
ctaatttctctggtatttggtctgggaccactgtgagtctagagtcgttcatcaagttc

SEQ ID NO: 378546 - DNA, 58 bp, Artificial
  Synthetic oligonucleotide
ctaatttgaagaccaatagtacgagtagtaatgctactaataccaatagtactgctac

SEQ ID NO: 378547 - DNA, 60 bp, Artificial
  Synthetic oligonucleotide
ctaatttggagctagaggactctgaagcagaggagatggtatataggtacagacttgccc

SEQ ID NO: 378548 - DNA, 55 bp, Artificial
  Synthetic oligonucleotide
ctaatttggctattctgtcgtcaatcgcagacttgtccaacactccgccggcaag

SEQ ID NO: 378549 - DNA, 55 bp, Artificial
  Synthetic oligonucleotide
ctaattttacattcgaaacatgggatccattggatactccgtattctacaacgca

SEQ ID NO: 378550 - DNA, 57 bp, Artificial
  Synthetic oligonucleotide
ctaattttccattgttaggtcatttaccaattaatagacccatctttgatgataaga

SEQ ID NO: 378551 - DNA, 54 bp, Artificial
  Synthetic oligonucleotide
ctacaaaagcggtacgctacagccgctacccactaaaagcctgaccacttacgg

SEQ ID NO: 378552 - DNA, 58 bp, Artificial
  Synthetic oligonucleotide
ctacaaaagggagtagtaatatttaatgagcttgaaggaggatatcagctttctccaa

SEQ ID NO: 378553 - DNA, 60 bp, Artificial
  Synthetic oligonucleotide
ctacaaaagtctcaggatagcgaggatgctatgtaaatctaagggctcatcccttgttat

SEQ ID NO: 378554 - DNA, 55 bp, Artificial
  Synthetic oligonucleotide
ctacaaacaacagatctcctggttcaatagttcctgacatgctatctccgcgcac

SEQ ID NO: 378555 - DNA, 60 bp, Artificial
  Synthetic oligonucleotide
ctacaaacactgtgattaagattgcgctgaccaggaggccccttggcatcaagaggctga

SEQ ID NO: 378556 - DNA, 53 bp, Artificial
  Synthetic oligonucleotide
ctacaaacaggaatcctagactaacaccatttaaaccaggttttgaacaacaa

SEQ ID NO: 378557 - DNA, 55 bp, Artificial
  Synthetic oligonucleotide
ctacaaacccctcccacgctaggagcgtctgccatggacacagcgccttttggcg

SEQ ID NO: 378558 - DNA, 55 bp, Artificial
  Synthetic oligonucleotide
ctacaaaccgtctgaagtcactattgtgaacgggttggtcatccagctaacggct

SEQ ID NO: 378559 - DNA, 58 bp, Artificial
  Synthetic oligonucleotide
ctacaaactcttggtgataaggcggtttgtagacatggagtgagagttacaacgcgag

SEQ ID NO: 378560 - DNA, 52 bp, Artificial
  Synthetic oligonucleotide
ctacaaactgtctgaagtcgctaaacgttttaaacggtgaacgggttgtcca

SEQ ID NO: 378561 - DNA, 58 bp, Artificial
  Synthetic oligonucleotide
ctacaaactgtgactggtgtgagcgctgttgctcaagtgggatataggttttttagtg

SEQ ID NO: 378562 - DNA, 54 bp, Artificial
  Synthetic oligonucleotide
ctacaaagactgctgacaccgagttttctacaagggactttccgctggggactt

SEQ ID NO: 378563 - DNA, 60 bp, Artificial
  Synthetic oligonucleotide
ctacaaaggagaagtgtagacaatacgtcttacactgactctctttctgacatgttcaat

SEQ ID NO: 378564 - DNA, 60 bp, Artificial
  Synthetic oligonucleotide
ctacaaaggagtaagctgttccattggtagcaacagagtagggatcataaagcagctgaa

SEQ ID NO: 378565 - DNA, 55 bp, Artificial
  Synthetic oligonucleotide
ctacaaaggtaaaccacatgactctcatgttcgtattgaacgcaggaagcacctg

SEQ ID NO: 378566 - DNA, 60 bp, Artificial
  Synthetic oligonucleotide
ctacaaaggtacagccagaggagaccggcaacaggattgatcccaatgtcactaatgcag

SEQ ID NO: 378567 - DNA, 51 bp, Artificial
  Synthetic oligonucleotide
ctacaaaggttagcacaaagagaattagaagccttaaactgcgaagatcct

SEQ ID NO: 378568 - DNA, 58 bp, Artificial
  Synthetic oligonucleotide
ctacaaagtagatttgcacacacaatctatagacggtgcatggggttctggggtaggt

SEQ ID NO: 378569 - DNA, 55 bp, Artificial
  Synthetic oligonucleotide
ctacaaataagctctatgatgcttgaagctgccttagctctgcttactctgacct

SEQ ID NO: 378570 - DNA, 53 bp, Artificial
  Synthetic oligonucleotide
ctacaaatattaccctgaagatcctgagattttccttgcaagcttggttgagg

SEQ ID NO: 378571 - DNA, 60 bp, Artificial
  Synthetic oligonucleotide
ctacaaatgcacatactgagagggcccctacacttccagcggcgcgctatattgggtgcg

SEQ ID NO: 378572 - DNA, 57 bp, Artificial
  Synthetic oligonucleotide
ctacaaattcaccatataaagtatttgacgatgttgattttgtacaaacgtataaca

SEQ ID NO: 378573 - DNA, 59 bp, Artificial
  Synthetic oligonucleotide
ctacaaattcataatccgacccaacaaaatgctatggtgcaaattcaggtggtattcta

SEQ ID NO: 378574 - DNA, 54 bp, Artificial
  Synthetic oligonucleotide
ctacaaatttccttcctaacatggccagtctggagagaaagggaactcccttta

SEQ ID NO: 378575 - DNA, 60 bp, Artificial
  Synthetic oligonucleotide
ctacaacaccacttacagacttggctctagtgcttacatggcatatcgatagaaacttgt

SEQ ID NO: 378576 - DNA, 56 bp, Artificial
  Synthetic oligonucleotide
ctacaacatagttttgaggatagtacctttgaattatcacaaatggtgcaatgggc

SEQ ID NO: 378577 - DNA, 57 bp, Artificial
  Synthetic oligonucleotide
ctacaaccggttttgaactccgtctctacggaatcttgccagtgcttgagagataaa

SEQ ID NO: 378578 - DNA, 55 bp, Artificial
  Synthetic oligonucleotide
ctacaacgaagagaggtatacaagtttttatttacagatttacgaatagtatata

SEQ ID NO: 378579 - DNA, 55 bp, Artificial
  Synthetic oligonucleotide
ctacaacgagcccagattcgatcgaaactagtactagtgcttatcagtttgatac

SEQ ID NO: 378580 - DNA, 55 bp, Artificial
  Synthetic oligonucleotide
ctacaacgcaagttgaagcatttgcctcatcatagatgtaatcaacagattcgcc

SEQ ID NO: 378581 - DNA, 56 bp, Artificial
  Synthetic oligonucleotide
ctacaacgctaacaagagccaccaccggaaagttgtcaagccgatctttgggtgaa

SEQ ID NO: 378582 - DNA, 60 bp, Artificial
  Synthetic oligonucleotide
ctacaacggcgctggtactagcccagctgctcagggtcccgcaagccctcttggacatga

SEQ ID NO: 378583 - DNA, 60 bp, Artificial
  Synthetic oligonucleotide
ctacaactgcggtctgccacgacatgatagggaatggctccccgtcattgagggagattg

SEQ ID NO: 378584 - DNA, 54 bp, Artificial
  Synthetic oligonucleotide
ctacaactgcgtccgcataatagtcaagaataagcatctgctcaagtcggacat

SEQ ID NO: 378585 - DNA, 53 bp, Artificial
  Synthetic oligonucleotide
ctacaacttgcctcctgactctctcgctgtctacagaatcactgattctgctt

SEQ ID NO: 378586 - DNA, 55 bp, Artificial
  Synthetic oligonucleotide
ctacaactttgccggggtcaggacaattcttgaccacagatgacaggcaatcccc

SEQ ID NO: 378587 - DNA, 58 bp, Artificial
  Synthetic oligonucleotide
ctacaactttgctagaaaaacaccatacaacaactgtacacatgaacaactgtggatt

SEQ ID NO: 378588 - DNA, 60 bp, Artificial
  Synthetic oligonucleotide
ctacaagaaagctaatactgcatagggtactacaataatttgcaacagcagacactctat

SEQ ID NO: 378589 - DNA, 60 bp, Artificial
  Synthetic oligonucleotide
ctacaagaatggatttaagatctttagatgtgtggcatggaaccataggattagacttga

SEQ ID NO: 378590 - DNA, 55 bp, Artificial
  Synthetic oligonucleotide
ctacaagatatcgggtcaaacactccactatgtgccggaatctcatcacgccggc

SEQ ID NO: 378591 - DNA, 55 bp, Artificial
  Synthetic oligonucleotide
ctacaagattctgaattagctggattgttatcaatgtcgtccgcttcaaatggtg

SEQ ID NO: 378592 - DNA, 58 bp, Artificial
  Synthetic oligonucleotide
ctacaagcctccattttactatgcaaccgatatcggttgcctttgacacacctaacat

SEQ ID NO: 378593 - DNA, 55 bp, Artificial
  Synthetic oligonucleotide
ctacaagctctgaccgcctacttaacctatttgggtgctaaagtaggtcaagtta

SEQ ID NO: 378594 - DNA, 55 bp, Artificial
  Synthetic oligonucleotide
ctacaagctggatatgttgtgtctctaaagaagtctgaaataggccaaagaactg

SEQ ID NO: 378595 - DNA, 59 bp, Artificial
  Synthetic oligonucleotide
ctacaaggacccgaagagtgccgtgtggaggctactcgaccagcggaccaagctcagag

SEQ ID NO: 378596 - DNA, 54 bp, Artificial
  Synthetic oligonucleotide
ctacaaggatgacatctatagagtggagggtggcatgccatctggtatctgtgg

SEQ ID NO: 378597 - DNA, 52 bp, Artificial
  Synthetic oligonucleotide
ctacaagggactttccgctggggactttccaggggaggcgtggactgggcgg

SEQ ID NO: 378598 - DNA, 55 bp, Artificial
  Synthetic oligonucleotide
ctacaagggagtatcctggagtccatttaggaagtctgcctcaatgagcaaccta

SEQ ID NO: 378599 - DNA, 55 bp, Artificial
  Synthetic oligonucleotide
ctacaagtctctttaggcccttttaggacaccatgggcaaaatcggccatccgaa

SEQ ID NO: 378600 - DNA, 56 bp, Artificial
  Synthetic oligonucleotide
ctacaagtgagcagagtgaaattgcgcgcggagcagtccagggtttgctaaagtta

SEQ ID NO: 378601 - DNA, 60 bp, Artificial
  Synthetic oligonucleotide
ctacaagtgtacaggggaacactgcaattgtacagacaaggagctttgcaataagactgc

SEQ ID NO: 378602 - DNA, 50 bp, Artificial
  Synthetic oligonucleotide
ctacaagtgtgaccttgaagttaccgttagtgctatgggagcaggcaccg

SEQ ID NO: 378603 - DNA, 60 bp, Artificial
  Synthetic oligonucleotide
ctacaagttcgatcagatgctcctgactgcccagaacctaccggccagctacaactactg

SEQ ID NO: 378604 - DNA, 57 bp, Artificial
  Synthetic oligonucleotide
ctacaagttgccccgagggtacctcgacctagccatccactccgactcgtccatcga

SEQ ID NO: 378605 - DNA, 60 bp, Artificial
  Synthetic oligonucleotide
ctacaataaccgatggggacacgtcatttcaacagcagaaggcatgtgcggctgtattgt

SEQ ID NO: 378606 - DNA, 56 bp, Artificial
  Synthetic oligonucleotide
ctacaatatacctgaacgactggttgtatcggttaagtgtggtaaggcatgggaaa

SEQ ID NO: 378607 - DNA, 60 bp, Artificial
  Synthetic oligonucleotide
ctacaatcaccaggaagctggcaagtacgagaatcatacggagaatgcgttactattgta

SEQ ID NO: 378608 - DNA, 60 bp, Artificial
  Synthetic oligonucleotide
ctacaatcgaggatcttgttcatacttttggatatccatcgtgtcttggagcccttataa

SEQ ID NO: 378609 - DNA, 55 bp, Artificial
  Synthetic oligonucleotide
ctacaatcgcccgaatggaggtagatcttacaaaggggagtcaattggtctatat

SEQ ID NO: 378610 - DNA, 53 bp, Artificial
  Synthetic oligonucleotide
ctacaatgaagtggatcagttgtcgaagatgttacttgatagagggcatatgg

SEQ ID NO: 378611 - DNA, 58 bp, Artificial
  Synthetic oligonucleotide
ctacaatgcacttgttggaaacaatattcttaatgaaaaattgcgattattacacgag

SEQ ID NO: 378612 - DNA, 55 bp, Artificial
  Synthetic oligonucleotide
ctacaatgctaaaccggcacttggcacactcgaccgcaagtcagaggactatgcc

SEQ ID NO: 378613 - DNA, 55 bp, Artificial
  Synthetic oligonucleotide
ctacaatggataatccgggcaatttttccacttctgtcggaaatggtatcgtggt

SEQ ID NO: 378614 - DNA, 55 bp, Artificial
  Synthetic oligonucleotide
ctacaatggatagatatttaggtatactcaacgctaagtctaaagaggtcactgg

SEQ ID NO: 378615 - DNA, 54 bp, Artificial
  Synthetic oligonucleotide
ctacaatgtgcgtacctcataatatgcgtgttttgcactatggtgctggttctg

SEQ ID NO: 378616 - DNA, 58 bp, Artificial
  Synthetic oligonucleotide
ctacaattattgtaagagtgtgtaatgtctagtctacccctgaacactcctatataag

SEQ ID NO: 378617 - DNA, 59 bp, Artificial
  Synthetic oligonucleotide
ctacaattcgtctgacaactaatacgtgcaacactactctgacatatgatatgttcgaa

SEQ ID NO: 378618 - DNA, 60 bp, Artificial
  Synthetic oligonucleotide
ctacaattggggaaatgtaacatcaccggatggctcttgggaaatccagaatgcgactca

SEQ ID NO: 378619 - DNA, 53 bp, Artificial
  Synthetic oligonucleotide
ctacacaaaattgccacctggattaatagagagtgtagtcatgcatcaccaga

SEQ ID NO: 378620 - DNA, 60 bp, Artificial
  Synthetic oligonucleotide
ctacacaagagctgaagataaattgtggagtgatattacagacatgatggaggtcatgga

SEQ ID NO: 378621 - DNA, 60 bp, Artificial
  Synthetic oligonucleotide
ctacacacactggtcaggttccatcaggatctctctaatgtatacaggtcctgcactgtc

SEQ ID NO: 378622 - DNA, 60 bp, Artificial
  Synthetic oligonucleotide
ctacacacgtggtggttctgctgataatgtcagttatcagtacataggttgtttagggaa

SEQ ID NO: 378623 - DNA, 56 bp, Artificial
  Synthetic oligonucleotide
ctacacagacctgctataacgtctcgacgtggtcttgtacggtttagtagaattgg

SEQ ID NO: 378624 - DNA, 60 bp, Artificial
  Synthetic oligonucleotide
ctacacagatgaaccagaaattgcaaatccagaaatgctacccacctatgatgtgcccga

SEQ ID NO: 378625 - DNA, 60 bp, Artificial
  Synthetic oligonucleotide
ctacacagcaaagtaccccaattcatctgatctcgataggctggcccagagtcatccgat

SEQ ID NO: 378626 - DNA, 60 bp, Artificial
  Synthetic oligonucleotide
ctacacagttgatgaaaatacacagggacttgcattcgtacccttgcatgaagagcaagc

SEQ ID NO: 378627 - DNA, 55 bp, Artificial
  Synthetic oligonucleotide
ctacacataccaactaaactcgaacaacctccactacacccccgaagggcatcac

SEQ ID NO: 378628 - DNA, 58 bp, Artificial
  Synthetic oligonucleotide
ctacacatagactaccctctctacaccccgccatatatactctgaagtacttcgggga

SEQ ID NO: 378629 - DNA, 57 bp, Artificial
  Synthetic oligonucleotide
ctacacatcatatcagcataataggtatagtaatgtgtgtagtgatgttactcgtgg

SEQ ID NO: 378630 - DNA, 55 bp, Artificial
  Synthetic oligonucleotide
ctacaccaataggctacagtaacgaaagcccatatggtcaagaacaagtgacaac

SEQ ID NO: 378631 - DNA, 60 bp, Artificial
  Synthetic oligonucleotide
ctacaccaatcgctgattccatccaaccgactgttacagatagtggatctggttgttgtt

SEQ ID NO: 378632 - DNA, 53 bp, Artificial
  Synthetic oligonucleotide
ctacaccagcagatgttagactacaatagttctgtagcgtctaaccgttgtct

SEQ ID NO: 378633 - DNA, 59 bp, Artificial
  Synthetic oligonucleotide
ctacaccagttgcaagggtccaaggcacggatgaatatgttgaacgcaccaacatttat

SEQ ID NO: 378634 - DNA, 56 bp, Artificial
  Synthetic oligonucleotide
ctacacccgatatctttccctgatctaaggtactatccttggacaaagaacgtatc

SEQ ID NO: 378635 - DNA, 53 bp, Artificial
  Synthetic oligonucleotide
ctacaccctcgcaccggtaagcctctgggtaaatacccgcgagtgaagtaccc

SEQ ID NO: 378636 - DNA, 60 bp, Artificial
  Synthetic oligonucleotide
ctacaccctgagacactgagtcgcgtgtacaagattatgatcgatttcaagccgtgtagg

SEQ ID NO: 378637 - DNA, 55 bp, Artificial
  Synthetic oligonucleotide
ctacaccctgcaggtggtagacatggtggctagtcaatggctcaccccgagtgac

SEQ ID NO: 378638 - DNA, 60 bp, Artificial
  Synthetic oligonucleotide
ctacaccctgctaaccagcatggagtagaagactcggagagacaagtgttagtgtggagg

SEQ ID NO: 378639 - DNA, 58 bp, Artificial
  Synthetic oligonucleotide
ctacacccttaaatcaattcgagagcctcgaattgctcgcttcttggcaaccttgtgt

SEQ ID NO: 378640 - DNA, 57 bp, Artificial
  Synthetic oligonucleotide
ctacaccgcactgcccctaaaggagatcaaaaggaacggcaacatcgtagtggagaa

SEQ ID NO: 378641 - DNA, 55 bp, Artificial
  Synthetic oligonucleotide
ctacaccgcctgttgaggaacgttttatcgtttataccggtgtagcgcacactac

SEQ ID NO: 378642 - DNA, 60 bp, Artificial
  Synthetic oligonucleotide
ctacaccgctcaaaatataggatcagctgcagttcagggttatcaggcagtgtcatcagc

SEQ ID NO: 378643 - DNA, 60 bp, Artificial
  Synthetic oligonucleotide
ctacaccgttgtcccaattgatgatgtgtgggacgacagcataatgctgtcacaggaccc

SEQ ID NO: 378644 - DNA, 54 bp, Artificial
  Synthetic oligonucleotide
ctacacctaaaactatgactgagggtatgactgggatttgaacgggtttgacta

SEQ ID NO: 378645 - DNA, 56 bp, Artificial
  Synthetic oligonucleotide
ctacacctccggttggtgccaagcctgctctttgtataccgacaagttgtaggatt

SEQ ID NO: 378646 - DNA, 60 bp, Artificial
  Synthetic oligonucleotide
ctacacctcgccctctcagattacctgatgggcctccttgtgctcagcgatcaaaattct

SEQ ID NO: 378647 - DNA, 60 bp, Artificial
  Synthetic oligonucleotide
ctacaccttcctgggtgtgttccatgcgtcaccgctggaaatacatcacagtgttgggtc

SEQ ID NO: 378648 - DNA, 55 bp, Artificial
  Synthetic oligonucleotide
ctacacgacagaggaaatggtggcgttaatcaagcagtcttaccgtcttaaacaa

SEQ ID NO: 378649 - DNA, 60 bp, Artificial
  Synthetic oligonucleotide
ctacacgacctggacactgtggactcgcggagaagcagcattgtggacctgtcaacccac

SEQ ID NO: 378650 - DNA, 55 bp, Artificial
  Synthetic oligonucleotide
ctacacgattacagggcgttacgcaaaggctggcgtcattgagatggaacacaaa

SEQ ID NO: 378651 - DNA, 54 bp, Artificial
  Synthetic oligonucleotide
ctacacgccccgcaattgtgcttctgaagacccctggcgttgccagtagagtac

SEQ ID NO: 378652 - DNA, 58 bp, Artificial
  Synthetic oligonucleotide
ctacacgcctagactactaacacaacttacgaacgccaaatagttagtcatcatcctg

SEQ ID NO: 378653 - DNA, 55 bp, Artificial
  Synthetic oligonucleotide
ctacacgctccggggtgtgttccttgcgttcgtgagggcaacgcctcgaggtgtt

SEQ ID NO: 378654 - DNA, 55 bp, Artificial
  Synthetic oligonucleotide
ctacacgcttgataagacttactccatctaatacaacgagtgcaattgtaccatc

SEQ ID NO: 378655 - DNA, 60 bp, Artificial
  Synthetic oligonucleotide
ctacacggatgcctatgtcgagaatcgtaacatttccacaactcacacagagcacactcc

SEQ ID NO: 378656 - DNA, 60 bp, Artificial
  Synthetic oligonucleotide
ctacacgtgatgcctggagggacgctaacttccgtagactatgctggactgacgagggat

SEQ ID NO: 378657 - DNA, 56 bp, Artificial
  Synthetic oligonucleotide
ctacacgtggcggccatccgttataatattaccggatggccgcgcgatttttcacc

SEQ ID NO: 378658 - DNA, 55 bp, Artificial
  Synthetic oligonucleotide
ctacactaacggactcattgtctgatgccgcttcttcagtatcaagaggatcatc

SEQ ID NO: 378659 - DNA, 55 bp, Artificial
  Synthetic oligonucleotide
ctacactaatcacattagtgggtatcgcttatgcagggattgcaaccacttgggg

SEQ ID NO: 378660 - DNA, 55 bp, Artificial
  Synthetic oligonucleotide
ctacactcgcttggcattaactgctaggcgtgaaacaacccttggtgatactgag

SEQ ID NO: 378661 - DNA, 54 bp, Artificial
  Synthetic oligonucleotide
ctacactctccggggtgtgtcccttgcgttcacgagggtaacgcctcgaaatgt

SEQ ID NO: 378662 - DNA, 60 bp, Artificial
  Synthetic oligonucleotide
ctacactctctttattgcgagtgctgagttggtagttttgctctaaactatctgaggtcg

SEQ ID NO: 378663 - DNA, 56 bp, Artificial
  Synthetic oligonucleotide
ctacactgaaggcggtttactcagaaaggccacaagatacgtttcaatggttccac

SEQ ID NO: 378664 - DNA, 60 bp, Artificial
  Synthetic oligonucleotide
ctacactgcccgcaaccgtctggcgcattagtccaaacgttgcgaatcactagtgctggg

SEQ ID NO: 378665 - DNA, 51 bp, Artificial
  Synthetic oligonucleotide
ctacactgctaaatttggacgcaaattatgttgaaaatgcgagagcaacta

SEQ ID NO: 378666 - DNA, 55 bp, Artificial
  Synthetic oligonucleotide
ctacactgggttacctaacaagagaccaaacgttcctaccatcaggacagctaaa

SEQ ID NO: 378667 - DNA, 55 bp, Artificial
  Synthetic oligonucleotide
ctacactggtaaacccaagcgaacaaggctggaatattcttaactggattagtgg

SEQ ID NO: 378668 - DNA, 55 bp, Artificial
  Synthetic oligonucleotide
ctacacttacgggtcgtaatggccgcgcagcggcagacaccacattctcggtagc

SEQ ID NO: 378669 - DNA, 54 bp, Artificial
  Synthetic oligonucleotide
ctacacttactccttcaacgacccctgtctttttgccaaggacgctactcccta

SEQ ID NO: 378670 - DNA, 54 bp, Artificial
  Synthetic oligonucleotide
ctacacttcaaggggaaatatggccacaaccagttaataatccataaaataggg

SEQ ID NO: 378671 - DNA, 59 bp, Artificial
  Synthetic oligonucleotide
ctacacttcatgacattcgaagaacttgccaacctcttcgaaacgagcccgaagcttga

SEQ ID NO: 378672 - DNA, 55 bp, Artificial
  Synthetic oligonucleotide
ctacacttgcacacaggctcatcttgctgtataagacctgtcgaatcttgtgtag

SEQ ID NO: 378673 - DNA, 55 bp, Artificial
  Synthetic oligonucleotide
ctacagaaaattttacccagtaatatgtgaaaaacccaccacaatatggattgaa

SEQ ID NO: 378674 - DNA, 52 bp, Artificial
  Synthetic oligonucleotide
ctacagaacagaagggcacttcatgacgttcactcgtgaaacagctgcgagt

SEQ ID NO: 378675 - DNA, 53 bp, Artificial
  Synthetic oligonucleotide
ctacagaaccgaagaggcctagatttgctcttcctaaaagagggaggtctctg

SEQ ID NO: 378676 - DNA, 58 bp, Artificial
  Synthetic oligonucleotide
ctacagaagcagcatttcaagcccactacaaagtatgccaagtcactcatagatttcg

SEQ ID NO: 378677 - DNA, 60 bp, Artificial
  Synthetic oligonucleotide
ctacagaatcaaagcctggcacaaaccagttcctgaccacagacgacggagttgcagcac

SEQ ID NO: 378678 - DNA, 55 bp, Artificial
  Synthetic oligonucleotide
ctacagacagcttaataataagcttcgcattggagcagatggaatcagatggaaa

SEQ ID NO: 378679 - DNA, 55 bp, Artificial
  Synthetic oligonucleotide
ctacagaccagctgaacattctgacacactcctgtgtgacattggagaagcttca

SEQ ID NO: 378680 - DNA, 59 bp, Artificial
  Synthetic oligonucleotide
ctacagaccgggcttgatggctatgtctacgtgccgggtaccgtatttgcatttgccga

SEQ ID NO: 378681 - DNA, 55 bp, Artificial
  Synthetic oligonucleotide
ctacagacgtggccgtgcgacgacccaacgcggttgctatgtacgacgtccagtc

SEQ ID NO: 378682 - DNA, 55 bp, Artificial
  Synthetic oligonucleotide
ctacagactgtggcataccagcttacgtgcctgtggttataacagtgaatgacac

SEQ ID NO: 378683 - DNA, 58 bp, Artificial
  Synthetic oligonucleotide
ctacagagactatgttactaaggctctccacgaccccggactcagtaaagaggtcaga

SEQ ID NO: 378684 - DNA, 60 bp, Artificial
  Synthetic oligonucleotide
ctacagagagtaacgctaggtcattctcgatgctacttaacacgggagcgactccagaag

SEQ ID NO: 378685 - DNA, 53 bp, Artificial
  Synthetic oligonucleotide
ctacagagcgtgaaaatttgctacggcttagttgtgagcgcttgtatgaaggc

SEQ ID NO: 378686 - DNA, 54 bp, Artificial
  Synthetic oligonucleotide
ctacagaggcggacctaagcccccggctacatgccataacaatttcaccgcccc

SEQ ID NO: 378687 - DNA, 51 bp, Artificial
  Synthetic oligonucleotide
ctacagaggctgccttcctttcattcgcatatgggttgccagtcacaacac

SEQ ID NO: 378688 - DNA, 56 bp, Artificial
  Synthetic oligonucleotide
ctacagagggtggttggccacagttaccgctcttgttgaggtttattccagcttgt

SEQ ID NO: 378689 - DNA, 55 bp, Artificial
  Synthetic oligonucleotide
ctacagagttggtggcacaaacgagtctgttgctggtatggccccaaggtgtagt

SEQ ID NO: 378690 - DNA, 55 bp, Artificial
  Synthetic oligonucleotide
ctacagatatattcgctcattagctacgagatgtcctccagaagaatctgaaacg

SEQ ID NO: 378691 - DNA, 57 bp, Artificial
  Synthetic oligonucleotide
ctacagatcaataagtaaagaaggaggttacttttcacctaaaatactgcaagcata

SEQ ID NO: 378692 - DNA, 55 bp, Artificial
  Synthetic oligonucleotide
ctacagatcatgcatagaacatatgcaggcactatggccttagtagtcttcaggg

SEQ ID NO: 378693 - DNA, 56 bp, Artificial
  Synthetic oligonucleotide
ctacagatgaaagaagaactgcattacaaaggttagcacaaagagaattagaagcc

SEQ ID NO: 378694 - DNA, 60 bp, Artificial
  Synthetic oligonucleotide
ctacagatgcgccggttagctacggcgttgcagaaagagatcggagaaagaacacatgca

SEQ ID NO: 378695 - DNA, 55 bp, Artificial
  Synthetic oligonucleotide
ctacagattcttttcaccactgaggaacgggaaagaattctcctggaggcccgca

SEQ ID NO: 378696 - DNA, 55 bp, Artificial
  Synthetic oligonucleotide
ctacagattgatcatgttccgttgtgcgttagaactcaagcatgtatcgggaaca

SEQ ID NO: 378697 - DNA, 53 bp, Artificial
  Synthetic oligonucleotide
ctacagattgttcataagagaggagcgaggattataaagttcacagataagcg

SEQ ID NO: 378698 - DNA, 55 bp, Artificial
  Synthetic oligonucleotide
ctacagcagatgctgttgggcacattacaagttgtgtgccccggctgtgcacggc

SEQ ID NO: 378699 - DNA, 60 bp, Artificial
  Synthetic oligonucleotide
ctacagcagccctagtggtatcgcagttactccggatcccacaagccgtcgtggacatgg

SEQ ID NO: 378700 - DNA, 60 bp, Artificial
  Synthetic oligonucleotide
ctacagcagcttatggtggacgcagtggcccttgtgtgtccaggctgtgcataacatggc

SEQ ID NO: 378701 - DNA, 60 bp, Artificial
  Synthetic oligonucleotide
ctacagcaggacggagggcgatacgtcggactgagagaacggcacggagagcaaatcgcg

SEQ ID NO: 378702 - DNA, 60 bp, Artificial
  Synthetic oligonucleotide
ctacagcatatggaagttcctaggccagggatcaaatccaaggcacagctgtgacctact

SEQ ID NO: 378703 - DNA, 60 bp, Artificial
  Synthetic oligonucleotide
ctacagcatattaataatctttacactgtctacagtgcaacctcaggtagctgcattcat

SEQ ID NO: 378704 - DNA, 60 bp, Artificial
  Synthetic oligonucleotide
ctacagcattggccaacaccatagaagtgttcagatcaaacggcctcatggcaaatgaat

SEQ ID NO: 378705 - DNA, 55 bp, Artificial
  Synthetic oligonucleotide
ctacagcctacaacaaagcgccgttcacgaggcttgcgcttccctacactgcacc

SEQ ID NO: 378706 - DNA, 58 bp, Artificial
  Synthetic oligonucleotide
ctacagcctcaaccttacatgtccatggacagttggtatgaccaaattttacagaggt

SEQ ID NO: 378707 - DNA, 60 bp, Artificial
  Synthetic oligonucleotide
ctacagcgaactaaaaatgctctaccaaaatgaacatacaatgcctatatggggagctat

SEQ ID NO: 378708 - DNA, 53 bp, Artificial
  Synthetic oligonucleotide
ctacagcggcctctcaggccgcgaggcgaagatcacatcagggtagcgaatgg

SEQ ID NO: 378709 - DNA, 51 bp, Artificial
  Synthetic oligonucleotide
ctacagcggccttacttagccctaggcctcttgcctgcctcaagggttcct

SEQ ID NO: 378710 - DNA, 56 bp, Artificial
  Synthetic oligonucleotide
ctacagcgtatttcacggcgccaaccggagatccacattggaaggaggtggctcgc

SEQ ID NO: 378711 - DNA, 56 bp, Artificial
  Synthetic oligonucleotide
ctacagcgtcttttgacgtagaccgccgtgtgctgaccctaccgaactgggaccgc

SEQ ID NO: 378712 - DNA, 56 bp, Artificial
  Synthetic oligonucleotide
ctacaggaacaaccccgtgtaattgctcacgatcacgaacattacccaggtggttc

SEQ ID NO: 378713 - DNA, 53 bp, Artificial
  Synthetic oligonucleotide
ctacaggaaccttttcatagagtacggtaaggcacttgggagtacgtcttccg

SEQ ID NO: 378714 - DNA, 55 bp, Artificial
  Synthetic oligonucleotide
ctacaggaatgtgggaagtacatgttaataaagatactgtctttacccctgttac

SEQ ID NO: 378715 - DNA, 60 bp, Artificial
  Synthetic oligonucleotide
ctacaggagaaatgctgtttctacgccaataaatctggaatcgtcagagataaaatcaag

SEQ ID NO: 378716 - DNA, 60 bp, Artificial
  Synthetic oligonucleotide
ctacaggagcttcattcatgatcaacatatccactagttcagtcatttcctcgtgactga

SEQ ID NO: 378717 - DNA, 59 bp, Artificial
  Synthetic oligonucleotide
ctacaggatgtacgagcgcgcgggaggtcatgtcaaactcccagtgttgaaagaggtta

SEQ ID NO: 378718 - DNA, 55 bp, Artificial
  Synthetic oligonucleotide
ctacaggcatgtgcaaacctaagccagacacccctcaatattgcggcacttctgc

SEQ ID NO: 378719 - DNA, 53 bp, Artificial
  Synthetic oligonucleotide
ctacaggcccggataccacacccaaacggcaggaccctggcacctaggaaaat

SEQ ID NO: 378720 - DNA, 60 bp, Artificial
  Synthetic oligonucleotide
ctacaggccttcccgccatcttgccagattagtgcttaccaccagttggcagaggagcta

SEQ ID NO: 378721 - DNA, 55 bp, Artificial
  Synthetic oligonucleotide
ctacaggcgttgtggtttgtactggtgacgaaactcagtgttacggtacatgggt

SEQ ID NO: 378722 - DNA, 55 bp, Artificial
  Synthetic oligonucleotide
ctacaggggagaccccgacgacatttaccagcttaggttcagactctaaggtcca

SEQ ID NO: 378723 - DNA, 57 bp, Artificial
  Synthetic oligonucleotide
ctacaggggggcgtcagccaagttcacccagtcaatcccaacagaaatgattaccaa

SEQ ID NO: 378724 - DNA, 51 bp, Artificial
  Synthetic oligonucleotide
ctacaggggtaccatataacccacaaagtcaaggggtagtagaaagcaaaa

SEQ ID NO: 378725 - DNA, 55 bp, Artificial
  Synthetic oligonucleotide
ctacaggtacgcgatatcatcaaccaatgagatagggccgctaggggctgaaggt

SEQ ID NO: 378726 - DNA, 60 bp, Artificial
  Synthetic oligonucleotide
ctacaggtatggagcctgctgaatgtgagtcccgtttgagaggacacgcccgcaccatgc

SEQ ID NO: 378727 - DNA, 60 bp, Artificial
  Synthetic oligonucleotide
ctacaggtggatagtactagtgttccaggccctgatgtgatcccgtgttgtgattgcact

SEQ ID NO: 378728 - DNA, 52 bp, Artificial
  Synthetic oligonucleotide
ctacaggttccctaaggaccaggaatgtatttcgggctaccgatggactcgt

SEQ ID NO: 378729 - DNA, 55 bp, Artificial
  Synthetic oligonucleotide
ctacaggttctgtgccgtatttgagacgagagtattccatatctaggaacatccc

SEQ ID NO: 378730 - DNA, 55 bp, Artificial
  Synthetic oligonucleotide
ctacaggtttcttttaatcatggttgtactgtcaccattccttaatgcgccaaac

SEQ ID NO: 378731 - DNA, 60 bp, Artificial
  Synthetic oligonucleotide
ctacagtaccagctccgaacagattaagctaccacagacaatacaaacagctgtcaccgc

SEQ ID NO: 378732 - DNA, 59 bp, Artificial
  Synthetic oligonucleotide
ctacagtgagagaacgggagttaccgaaatcagcatgagcgccgagttcttagaaggaa

SEQ ID NO: 378733 - DNA, 60 bp, Artificial
  Synthetic oligonucleotide
ctacagtgaggcggtagttgttgtcaacacctcgtattacccgcagctgttcatgccagt

SEQ ID NO: 378734 - DNA, 58 bp, Artificial
  Synthetic oligonucleotide
ctacagtgccaaagagggggtctccggcctacctgagctatccaccgtcaggcagccg

SEQ ID NO: 378735 - DNA, 60 bp, Artificial
  Synthetic oligonucleotide
ctacagtgccctgttggaactacatagatgacaatttaagaaatgcattggatggaaatt

SEQ ID NO: 378736 - DNA, 55 bp, Artificial
  Synthetic oligonucleotide
ctacagtggggcacttcttttcaagagcggggttggtgggagtgattgacctccc

SEQ ID NO: 378737 - DNA, 60 bp, Artificial
  Synthetic oligonucleotide
ctacagtggtgcgaagctccgtacttacacgcgggctgtggagagtctgcatatcacacc

SEQ ID NO: 378738 - DNA, 56 bp, Artificial
  Synthetic oligonucleotide
ctacagttaggctacgagcgtacatgaacaccccggggcttcccgtgtgtcaggac

SEQ ID NO: 378739 - DNA, 51 bp, Artificial
  Synthetic oligonucleotide
ctacagttgtggacaacacacttatggtcgtgatgtcagtttactactcgt

SEQ ID NO: 378740 - DNA, 59 bp, Artificial
  Synthetic oligonucleotide
ctacagtttctacagaacagaatgctcctgatcctcaagttggaattaccactattaag

SEQ ID NO: 378741 - DNA, 57 bp, Artificial
  Synthetic oligonucleotide
ctacataaaatcaggagagcagggtatgacacttacgtattcaggggggctagttaa

SEQ ID NO: 378742 - DNA, 59 bp, Artificial
  Synthetic oligonucleotide
ctacataaaggataagagagctggtgtaagcatgcccataagctttcaacgtcgtacgg

SEQ ID NO: 378743 - DNA, 56 bp, Artificial
  Synthetic oligonucleotide
ctacataacattctcaataccattaatgactgggctatcgcaaggtttcactttgc

SEQ ID NO: 378744 - DNA, 56 bp, Artificial
  Synthetic oligonucleotide
ctacatacaatagtacatacaatgatacatcaaattcaaccatcacaatcccatgc

SEQ ID NO: 378745 - DNA, 55 bp, Artificial
  Synthetic oligonucleotide
ctacataccaattgaaatagcaatcaaagtcaccaacggtgccaacaaccactgg

SEQ ID NO: 378746 - DNA, 55 bp, Artificial
  Synthetic oligonucleotide
ctacatacgcttctactgggtacactgagcctagtgtgtcctctgtgcgcgccca

SEQ ID NO: 378747 - DNA, 56 bp, Artificial
  Synthetic oligonucleotide
ctacatacggagatccgtatatggtattcgttacgtacaggacgtaacccagtcaa

SEQ ID NO: 378748 - DNA, 59 bp, Artificial
  Synthetic oligonucleotide
ctacatagtgactgtacaacgaacaggaccttttgaagttgacagagactcatacctaa

SEQ ID NO: 378749 - DNA, 54 bp, Artificial
  Synthetic oligonucleotide
ctacatcaaggtgaaagccgcttgcgatcgggtggggttgaagaacgtatccct

SEQ ID NO: 378750 - DNA, 60 bp, Artificial
  Synthetic oligonucleotide
ctacatcagaaataacccataataacacatggtacagaggcaatgcatacaatgacaaaa

SEQ ID NO: 378751 - DNA, 60 bp, Artificial
  Synthetic oligonucleotide
ctacatcagtttcagaaatgactagttcattgtcagacgcagcatcatcagcatcaagaa

SEQ ID NO: 378752 - DNA, 55 bp, Artificial
  Synthetic oligonucleotide
ctacatccaaaaataatgctaagaggggtaatattactgactttaatttggtaga

SEQ ID NO: 378753 - DNA, 55 bp, Artificial
  Synthetic oligonucleotide
ctacatccacccggtcatggatccagacacttacgaacaatcagttatgtggctg

SEQ ID NO: 378754 - DNA, 60 bp, Artificial
  Synthetic oligonucleotide
ctacatccgtcttacgaactcgatctcagaaaagtgggtgactctgaaatgcatactgtg

SEQ ID NO: 378755 - DNA, 55 bp, Artificial
  Synthetic oligonucleotide
ctacatcgatacgatcagtaggcagtaatacaacgatgcgaatcagtactgccat

SEQ ID NO: 378756 - DNA, 54 bp, Artificial
  Synthetic oligonucleotide
ctacatcgtcacgccctactggccacctgtccagagcatcagatcacctaggac

SEQ ID NO: 378757 - DNA, 58 bp, Artificial
  Synthetic oligonucleotide
ctacatcgtcgcgacgtcagacgtgttctaaagtaagtgatatcattttcgtataatt

SEQ ID NO: 378758 - DNA, 59 bp, Artificial
  Synthetic oligonucleotide
ctacatcgtctattatgttataccaggcgtcattgctgtaaaccctaggacttaggtca

SEQ ID NO: 378759 - DNA, 59 bp, Artificial
  Synthetic oligonucleotide
ctacatcgtgacactgcggagggtggttcaaaatgccgtaccaaccgcttgacatgccg

SEQ ID NO: 378760 - DNA, 58 bp, Artificial
  Synthetic oligonucleotide
ctacatctacaatacgaccccctgtatctgttgatactgtagggcccctagactcttc

SEQ ID NO: 378761 - DNA, 57 bp, Artificial
  Synthetic oligonucleotide
ctacatctgcctggactatttcgggaagtgccggtctaacgacatctgcaccttctg

SEQ ID NO: 378762 - DNA, 60 bp, Artificial
  Synthetic oligonucleotide
ctacatcttcggacccgaatataagcagcatgaccttccgccaagtgtgtgaggcatttg

SEQ ID NO: 378763 - DNA, 60 bp, Artificial
  Synthetic oligonucleotide
ctacatgaaccacttcaatagtggctgagatgaatggacgttctgcaataaaggtatcgt

SEQ ID NO: 378764 - DNA, 54 bp, Artificial
  Synthetic oligonucleotide
ctacatgaagttacactcaggacttcacaaccctgtcacatcgtggacgggcac

SEQ ID NO: 378765 - DNA, 51 bp, Artificial
  Synthetic oligonucleotide
ctacatgacatgccggctatcccggaaggacgcagaactcaaaacattcgt

SEQ ID NO: 378766 - DNA, 55 bp, Artificial
  Synthetic oligonucleotide
ctacatgatattccagttaacgatctccttaatcgtgccatcgaactttgtgcct

SEQ ID NO: 378767 - DNA, 50 bp, Artificial
  Synthetic oligonucleotide
ctacatgatctgtcctgcaagtttctccctttatatgctagtgaagcaaa

SEQ ID NO: 378768 - DNA, 55 bp, Artificial
  Synthetic oligonucleotide
ctacatgcaccctgctgtgctgacagctggtaggatcagcgaaatgggtgtctgc

SEQ ID NO: 378769 - DNA, 55 bp, Artificial
  Synthetic oligonucleotide
ctacatgcagattccctaggaggtggcggtaagtggctttcgtcgcctcgtcggg

SEQ ID NO: 378770 - DNA, 58 bp, Artificial
  Synthetic oligonucleotide
ctacatgctttccacccgtgggagacagactgtcaaagacaacaaggggactagaata

SEQ ID NO: 378771 - DNA, 60 bp, Artificial
  Synthetic oligonucleotide
ctacatggacaagcaaagatatattagaagtactagccatgatgcctggaaatagggcgc

SEQ ID NO: 378772 - DNA, 50 bp, Artificial
  Synthetic oligonucleotide
ctacatgggagtggtacaccaattggatttcacagcccagcggagtccct

SEQ ID NO: 378773 - DNA, 55 bp, Artificial
  Synthetic oligonucleotide
ctacatgggtgggtgcaaatttggaagatccagcatccagggacctagtagtcgg

SEQ ID NO: 378774 - DNA, 55 bp, Artificial
  Synthetic oligonucleotide
ctacatggtactttaaattatacgtgtacaattcagctacggatacgtggacggg

SEQ ID NO: 378775 - DNA, 56 bp, Artificial
  Synthetic oligonucleotide
ctacatggtcccagaagccaccaccgagtcgatccaaacggcccgaaacaacgctg

SEQ ID NO: 378776 - DNA, 55 bp, Artificial
  Synthetic oligonucleotide
ctacatggtgggtgtctatactcttctagcaatggaaggtcgactcgagaaaagc

SEQ ID NO: 378777 - DNA, 51 bp, Artificial
  Synthetic oligonucleotide
ctacatggtggtaatctgacacataagccatgataaagtaccttaagttct

SEQ ID NO: 378778 - DNA, 59 bp, Artificial
  Synthetic oligonucleotide
ctacatgtacaattaggaactgtaaaaagttgggacctagagagaatgttgcagtgata

SEQ ID NO: 378779 - DNA, 57 bp, Artificial
  Synthetic oligonucleotide
ctacatgtactattagaaactgtaagaaattaggaccacgggagaatgttgcagtta

SEQ ID NO: 378780 - DNA, 60 bp, Artificial
  Synthetic oligonucleotide
ctacatgtctgacacgctccattttatgtctcactcggagcttatccatatcttcgccga

SEQ ID NO: 378781 - DNA, 60 bp, Artificial
  Synthetic oligonucleotide
ctacatgtgagggcagttatggcacggcataacgctcacatgcgcccgtgtcgctgtcgt

SEQ ID NO: 378782 - DNA, 55 bp, Artificial
  Synthetic oligonucleotide
ctacatgtgttatacctgaacatccgctatatccaatatttggaggagcaaagac

SEQ ID NO: 378783 - DNA, 54 bp, Artificial
  Synthetic oligonucleotide
ctacattaccagtggccaagccgaaaggtgcctttcctgtcacacaaagagagt

SEQ ID NO: 378784 - DNA, 50 bp, Artificial
  Synthetic oligonucleotide
ctacattaggttacagacatcatctcagtacggtttggaccccgcaggta

SEQ ID NO: 378785 - DNA, 59 bp, Artificial
  Synthetic oligonucleotide
ctacattcaacagtgcgatacctaagagcaccaattacgaaagggcactgggtggaaca

SEQ ID NO: 378786 - DNA, 55 bp, Artificial
  Synthetic oligonucleotide
ctacattcatcaattatccccaactgtgtaagactcagcccaatcgtagtaggtc

SEQ ID NO: 378787 - DNA, 58 bp, Artificial
  Synthetic oligonucleotide
ctacattcctgaaagaataagaaatgacgttaattatatactcaatatggatagaaat

SEQ ID NO: 378788 - DNA, 60 bp, Artificial
  Synthetic oligonucleotide
ctacattcgtcatgtgttgaagagagttatctccgttgagaaggacactatgatgctgga

SEQ ID NO: 378789 - DNA, 60 bp, Artificial
  Synthetic oligonucleotide
ctacattcgtcatgtgtttaagcgcgtgttgtccgtcgagaaggacactttgatggtaga

SEQ ID NO: 378790 - DNA, 58 bp, Artificial
  Synthetic oligonucleotide
ctacattgccgttccacaatgtaagtaagtatgcatttggaaactgcccaaaatatgt

SEQ ID NO: 378791 - DNA, 55 bp, Artificial
  Synthetic oligonucleotide
ctacattgcgggagacaaggtattgtctgcatgtggaaactccggatacgacgtg

SEQ ID NO: 378792 - DNA, 60 bp, Artificial
  Synthetic oligonucleotide
ctacattgcgtggcgtcacatcatgcaaacgagtcattttttatggggttcgatcttgag

SEQ ID NO: 378793 - DNA, 50 bp, Artificial
  Synthetic oligonucleotide
ctacattggaaaacgggaggaccaatggtgcggaagccttattggttacc

SEQ ID NO: 378794 - DNA, 58 bp, Artificial
  Synthetic oligonucleotide
ctacattggctcaagatcccaagttcaagggagggcttgggacaacaccactgtggat

SEQ ID NO: 378795 - DNA, 55 bp, Artificial
  Synthetic oligonucleotide
ctacattgtagaaacaccaaatcccgagaatggaacatgttacccagggtatttc

SEQ ID NO: 378796 - DNA, 54 bp, Artificial
  Synthetic oligonucleotide
ctacattgttccacccgacccttcaaccccaattccagagccccctctactgaa

SEQ ID NO: 378797 - DNA, 56 bp, Artificial
  Synthetic oligonucleotide
ctacatttaaagtgtttgattcggaagactttattatagaatatgggacaactgac

SEQ ID NO: 378798 - DNA, 55 bp, Artificial
  Synthetic oligonucleotide
ctacatttccagcgacgcgcgatattaggcgcgctcaaattcggagtgaaggtgc

SEQ ID NO: 378799 - DNA, 55 bp, Artificial
  Synthetic oligonucleotide
ctaccaaacagatgtagccccaaacttagcattagtccaaggtggaccatatgca

SEQ ID NO: 378800 - DNA, 51 bp, Artificial
  Synthetic oligonucleotide
ctaccaaagagacgaaatcctttatcggtaaattttccgataaagttagag

SEQ ID NO: 378801 - DNA, 60 bp, Artificial
  Synthetic oligonucleotide
ctaccaaaggattcagatctttccagacacgatctggaatgtgtcttacagtggaacaag

SEQ ID NO: 378802 - DNA, 60 bp, Artificial
  Synthetic oligonucleotide
ctaccaaatacagcaaatgatgtagtgtgtgcaatcttactactcggtgaagtactatgg

SEQ ID NO: 378803 - DNA, 51 bp, Artificial
  Synthetic oligonucleotide
ctaccaaatcagatgtgcccattgatattagtcaatccacatgtaaatatc

SEQ ID NO: 378804 - DNA, 55 bp, Artificial
  Synthetic oligonucleotide
ctaccaaccagaaagcagagttagaggccattctgttagccttaagagactctgg

SEQ ID NO: 378805 - DNA, 55 bp, Artificial
  Synthetic oligonucleotide
ctaccaacgtgaatatattaactctcctgcacattataaactgccattaacgcgc

SEQ ID NO: 378806 - DNA, 56 bp, Artificial
  Synthetic oligonucleotide
ctaccaactggagcacgtttaagttcgcgatgcatacggttaaaaattgggtcaga

SEQ ID NO: 378807 - DNA, 53 bp, Artificial
  Synthetic oligonucleotide
ctaccaacttttaatacaccaccaattccagtagataacttacctactccact

SEQ ID NO: 378808 - DNA, 60 bp, Artificial
  Synthetic oligonucleotide
ctaccaagcaggcgtcggagtgatgtatgagaacgtgttccacactctctggcacacgac

SEQ ID NO: 378809 - DNA, 55 bp, Artificial
  Synthetic oligonucleotide
ctaccaagccaaattcgagtccgtaggatggtctgcaacagcctgccatgatggg

SEQ ID NO: 378810 - DNA, 60 bp, Artificial
  Synthetic oligonucleotide
ctaccaagctagatatggtacactatcagcgcgcaattttgatactattagactctcatt

SEQ ID NO: 378811 - DNA, 59 bp, Artificial
  Synthetic oligonucleotide
ctaccaaggaaaagagcgggtgttagtcgtgactgggaagtacctgctgcattagagca

SEQ ID NO: 378812 - DNA, 58 bp, Artificial
  Synthetic oligonucleotide
ctaccaaggcaggctgtgtaatcccctgaatccgtttgtcagtcataaggaaattgag

SEQ ID NO: 378813 - DNA, 55 bp, Artificial
  Synthetic oligonucleotide
ctaccaagtcagtgagacctgggcttggtcagtattcgtggtcgtttgacctagg

SEQ ID NO: 378814 - DNA, 55 bp, Artificial
  Synthetic oligonucleotide
ctaccaatagtgtgactccttacctgctatccaaattcagatctccccacccagg

SEQ ID NO: 378815 - DNA, 50 bp, Artificial
  Synthetic oligonucleotide
ctaccaatcatatttaagaaggactcagtcaatgggaattcaactggacc

SEQ ID NO: 378816 - DNA, 57 bp, Artificial
  Synthetic oligonucleotide
ctaccaatcatatttacggcgaacacaatctatgggaatacaactggaccaaaagat

SEQ ID NO: 378817 - DNA, 59 bp, Artificial
  Synthetic oligonucleotide
ctaccaatccgttggtgccttcggacaccgtgcaaacgcgccatgtcatccagaaacga

SEQ ID NO: 378818 - DNA, 60 bp, Artificial
  Synthetic oligonucleotide
ctaccaatcgattatcaggatcgcgcctgatattttgtgaacatgtccgttactctttcc

SEQ ID NO: 378819 - DNA, 57 bp, Artificial
  Synthetic oligonucleotide
ctaccaatcggatgatcaactagttaaaagaacatggagatctttctttaggttctc

SEQ ID NO: 378820 - DNA, 59 bp, Artificial
  Synthetic oligonucleotide
ctaccaatcgtcgttgtttgggcaatgcacgttctccaacggtgcctctatggggcaca

SEQ ID NO: 378821 - DNA, 60 bp, Artificial
  Synthetic oligonucleotide
ctaccaatgatagtagaaatgagacagtgatggcgatcggagaaataaaaaactgctctt

SEQ ID NO: 378822 - DNA, 54 bp, Artificial
  Synthetic oligonucleotide
ctaccaatgggggggactgtcactaggcccactgggggtgtaatagacacttta

SEQ ID NO: 378823 - DNA, 55 bp, Artificial
  Synthetic oligonucleotide
ctaccacaaaggaactcccttaggagtaaccgccactctccgtgtgaacatgccc

SEQ ID NO: 378824 - DNA, 60 bp, Artificial
  Synthetic oligonucleotide
ctaccacaaatgtgatgatgagtgcatggagagcgtgaagaatggcacatatgactatcc

SEQ ID NO: 378825 - DNA, 55 bp, Artificial
  Synthetic oligonucleotide
ctaccacaagtgtgacaatgaatgcatggaaagtgtaagaaatggaacgtatgac

SEQ ID NO: 378826 - DNA, 60 bp, Artificial
  Synthetic oligonucleotide
ctaccacacatgatagcaaacgttgaacgggaccagaaaatatgtgcgcagctaggactg

SEQ ID NO: 378827 - DNA, 57 bp, Artificial
  Synthetic oligonucleotide
ctaccacagaggtgccaatcacactaaccattgccccacttaactcggagtttagtg

SEQ ID NO: 378828 - DNA, 60 bp, Artificial
  Synthetic oligonucleotide
ctaccacagaggtgccaatcacactgaccattgcaccacttaattcggaattcagcggcc

SEQ ID NO: 378829 - DNA, 55 bp, Artificial
  Synthetic oligonucleotide
ctaccacatgagtacacaattgggctaaaggacgagttaaggcccgtggagaagg

SEQ ID NO: 378830 - DNA, 60 bp, Artificial
  Synthetic oligonucleotide
ctaccaccaacccactaatcaggcatgagaacagaatggtactagccagcactacagcta

SEQ ID NO: 378831 - DNA, 56 bp, Artificial
  Synthetic oligonucleotide
ctaccaccaagggctggagtgggacccctttatatgttggcaacaacattgttgga

SEQ ID NO: 378832 - DNA, 55 bp, Artificial
  Synthetic oligonucleotide
ctaccaccagcacagagtgactttgagtatgcaccaacagtgtggggtcctgaag

SEQ ID NO: 378833 - DNA, 59 bp, Artificial
  Synthetic oligonucleotide
ctaccaccccccttgcacgggctgcgtgggagacagctagacacactccagtcaactcc

SEQ ID NO: 378834 - DNA, 58 bp, Artificial
  Synthetic oligonucleotide
ctaccaccttactctcagctgcgtaggtcttggttagatatgttttaggcggcgtgaa

SEQ ID NO: 378835 - DNA, 55 bp, Artificial
  Synthetic oligonucleotide
ctaccaccttctcagccagtggctaaaatactgcctactgatgaatacgttgtgg

SEQ ID NO: 378836 - DNA, 59 bp, Artificial
  Synthetic oligonucleotide
ctaccacgggcggtatgtcttaagtagcatttacgctgtctgcgccctggctgcgttaa

SEQ ID NO: 378837 - DNA, 55 bp, Artificial
  Synthetic oligonucleotide
ctaccacgtacatctcatgtgtcaaagatcgagaccaaggcatctacactggtac

SEQ ID NO: 378838 - DNA, 60 bp, Artificial
  Synthetic oligonucleotide
ctaccactgaatgtattgtgcccatggccgatttgcctgataaagggatgcattttaaat

SEQ ID NO: 378839 - DNA, 59 bp, Artificial
  Synthetic oligonucleotide
ctaccactgtccagtttgctttctgacaaaaggcttaggcatttcctatggcaggaaga

SEQ ID NO: 378840 - DNA, 55 bp, Artificial
  Synthetic oligonucleotide
ctaccacttggttgaaccgtctgctaaccacacttccccggtcttcttgcattcc

SEQ ID NO: 378841 - DNA, 60 bp, Artificial
  Synthetic oligonucleotide
ctaccacttgtgtggatcccgttgtagctatttcgggccacacgcatgctagtgccgcta

SEQ ID NO: 378842 - DNA, 59 bp, Artificial
  Synthetic oligonucleotide
ctaccagaggagcaggttcaagcgagacatttgttttctcaaaagacaatctcgcggga

SEQ ID NO: 378843 - DNA, 55 bp, Artificial
  Synthetic oligonucleotide
ctaccagatttaggttgataagttgtaacacctcaactattacccaagcctgtcc

SEQ ID NO: 378844 - DNA, 60 bp, Artificial
  Synthetic oligonucleotide
ctaccagatttgtatgattacaaggagaacagattcatcgaaattggagtgacaaggaga

SEQ ID NO: 378845 - DNA, 51 bp, Artificial
  Synthetic oligonucleotide
ctaccagcattggacttcacattctatttgaccaacatggtgtcttacaaa

SEQ ID NO: 378846 - DNA, 55 bp, Artificial
  Synthetic oligonucleotide
ctaccagccactgatgcagacaggatgtacatagctaaagaaggattttgttatc

SEQ ID NO: 378847 - DNA, 52 bp, Artificial
  Synthetic oligonucleotide
ctaccagcctacctcagcctataccatatactcatatagcctatagctatac

SEQ ID NO: 378848 - DNA, 54 bp, Artificial
  Synthetic oligonucleotide
ctaccagcgggcgggctccctacggggcagtccgcccttggccaacttatcgag

SEQ ID NO: 378849 - DNA, 60 bp, Artificial
  Synthetic oligonucleotide
ctaccagctaatctattgagtgacgaagatttgtcacaagaggcggagcaggaatcagac

SEQ ID NO: 378850 - DNA, 50 bp, Artificial
  Synthetic oligonucleotide
ctaccaggaacaactggaccggccggtggtaccccacccttaccaggtcg

SEQ ID NO: 378851 - DNA, 51 bp, Artificial
  Synthetic oligonucleotide
ctaccaggacctagtaagaggttttcccgaggagattgtgtctaacccgta

SEQ ID NO: 378852 - DNA, 55 bp, Artificial
  Synthetic oligonucleotide
ctaccagggaatcccagactacataaccaatctaggcagagcatttggcacaggc

SEQ ID NO: 378853 - DNA, 60 bp, Artificial
  Synthetic oligonucleotide
ctaccagtatggtggtagtgaatatacaccacagcccaaatggagtggctccactatgat

SEQ ID NO: 378854 - DNA, 60 bp, Artificial
  Synthetic oligonucleotide
ctaccagtcaatttgcaaatcccaaaatgtgcctgaagagcactttgtgtggcctcagtc

SEQ ID NO: 378855 - DNA, 60 bp, Artificial
  Synthetic oligonucleotide
ctaccagtgatgagggatgagatcaaatacatggtatatcaagtggagaggggacaggag

SEQ ID NO: 378856 - DNA, 60 bp, Artificial
  Synthetic oligonucleotide
ctaccagtgccacacagccctaagcgcattcgttgttgtaacattggtagtgctagttgt

SEQ ID NO: 378857 - DNA, 55 bp, Artificial
  Synthetic oligonucleotide
ctaccatacactacactaatattaactactacaaggatgccgcctcaaactcggc

SEQ ID NO: 378858 - DNA, 60 bp, Artificial
  Synthetic oligonucleotide
ctaccatactacaaatggcgggatctgcgctcgttattaatcgagcggtcaagcgtatgt

SEQ ID NO: 378859 - DNA, 55 bp, Artificial
  Synthetic oligonucleotide
ctaccatagtgacgcgtttcttagatcgcatatgcgctagaaagttttcccacac

SEQ ID NO: 378860 - DNA, 59 bp, Artificial
  Synthetic oligonucleotide
ctaccatatgataacttgccccgcccaggtgccgactggcgatcgtacccctctatgtg

SEQ ID NO: 378861 - DNA, 60 bp, Artificial
  Synthetic oligonucleotide
ctaccatattatcatgacagagttctttataggacaaatccagttgagtcatggttatcg

SEQ ID NO: 378862 - DNA, 60 bp, Artificial
  Synthetic oligonucleotide
ctaccatcaatatgatgtgggaagtcgcagagtctagccgtgtggcaatcacaggtcaaa

SEQ ID NO: 378863 - DNA, 58 bp, Artificial
  Synthetic oligonucleotide
ctaccatgaaagccgatgaaatcacacctggacggttccggacaattgcttgtggtct

SEQ ID NO: 378864 - DNA, 51 bp, Artificial
  Synthetic oligonucleotide
ctaccatgatttggaagatgtcaccataattggccgtggtggcgtgaaacg

SEQ ID NO: 378865 - DNA, 55 bp, Artificial
  Synthetic oligonucleotide
ctaccatgcatatagcgaccgtctgcttactgtcggtcacccctactttaatgtc

SEQ ID NO: 378866 - DNA, 55 bp, Artificial
  Synthetic oligonucleotide
ctaccatgccaaagtggttaaggttgccaggccctcaccccaagggggatgtgta

SEQ ID NO: 378867 - DNA, 58 bp, Artificial
  Synthetic oligonucleotide
ctaccatgcctacatcccgtaagcctcatagttaaaaccagtgtccaaagcctcatac

SEQ ID NO: 378868 - DNA, 59 bp, Artificial
  Synthetic oligonucleotide
ctaccatgcgaacaattcaaccgacactgttgacacagtactcgaaaagaacgtgacag

SEQ ID NO: 378869 - DNA, 58 bp, Artificial
  Synthetic oligonucleotide
ctaccatggaagttatgaagttaaagcaacaggatcagccagttccatggttaacgga

SEQ ID NO: 378870 - DNA, 60 bp, Artificial
  Synthetic oligonucleotide
ctaccatggatgcggacactgagcgtgtaatcaagcttcatgttgatttgatcaaaaacc

SEQ ID NO: 378871 - DNA, 60 bp, Artificial
  Synthetic oligonucleotide
ctaccattacggcctatatgtggagcgaggtcttatacttggtgtgcacaaaccaccagc

SEQ ID NO: 378872 - DNA, 58 bp, Artificial
  Synthetic oligonucleotide
ctaccattagaacaagttacgggagattctacgggatgcagtcagcggaagtcaccaa

SEQ ID NO: 378873 - DNA, 55 bp, Artificial
  Synthetic oligonucleotide
ctaccattttgaacttgactgggtccatgagtttatcttcatcacgattcacgtg

SEQ ID NO: 378874 - DNA, 55 bp, Artificial
  Synthetic oligonucleotide
ctacccaagaggcagcaaatatatgcgttgcttatggctgctggcctgcaaagct

SEQ ID NO: 378875 - DNA, 55 bp, Artificial
  Synthetic oligonucleotide
ctacccaagttaccaattcctgagaaatatctcaggatgcccatttcctatgaaa

SEQ ID NO: 378876 - DNA, 55 bp, Artificial
  Synthetic oligonucleotide
ctacccaattaatgtcacacctcatgactggtatgagatacaagagagtgaatat

SEQ ID NO: 378877 - DNA, 60 bp, Artificial
  Synthetic oligonucleotide
ctacccaattgcgtaaatgcacagatcctggtgtagatggaggcaaggcgatgtatatag

SEQ ID NO: 378878 - DNA, 59 bp, Artificial
  Synthetic oligonucleotide
ctacccacaattacaaggcagcaccggagcctctgaaccaattgatttcgcatttccaa

SEQ ID NO: 378879 - DNA, 55 bp, Artificial
  Synthetic oligonucleotide
ctacccacctagtcggtagcactattagaccccttcgattcatagacgatcgccc

SEQ ID NO: 378880 - DNA, 55 bp, Artificial
  Synthetic oligonucleotide
ctacccacctcggatcactgaactggagctcgaccctccttagtaagggaaccga

SEQ ID NO: 378881 - DNA, 56 bp, Artificial
  Synthetic oligonucleotide
ctacccactcctactttcaacgtgaaggctacgatagtgccagggcgggtactgcc

SEQ ID NO: 378882 - DNA, 52 bp, Artificial
  Synthetic oligonucleotide
ctacccactctgggtggaggtgaaaggtgggagcattcctatgctggcgaca

SEQ ID NO: 378883 - DNA, 54 bp, Artificial
  Synthetic oligonucleotide
ctacccacttaccgagacccacaatacgcctaccaaatgaagctgggggaccaa

SEQ ID NO: 378884 - DNA, 56 bp, Artificial
  Synthetic oligonucleotide
ctacccaggaaaagccaaccaacctcgatctcttgtagatctgttctctaaacgaa

SEQ ID NO: 378885 - DNA, 55 bp, Artificial
  Synthetic oligonucleotide
ctacccaggaaaggcgactgcaggagtggcaaccatttaggcccggttagcggga

SEQ ID NO: 378886 - DNA, 59 bp, Artificial
  Synthetic oligonucleotide
ctacccatacaaaaggaaacatgggagacatggtggatggactattggcaagctacctg

SEQ ID NO: 378887 - DNA, 56 bp, Artificial
  Synthetic oligonucleotide
ctacccatacaaatggcaagtgaacgctgaagcccccttctccaccgattcctatt

SEQ ID NO: 378888 - DNA, 55 bp, Artificial
  Synthetic oligonucleotide
ctacccatgattaaggatcttctatgggaattctatcatcttaatcaccctccgt

SEQ ID NO: 378889 - DNA, 60 bp, Artificial
  Synthetic oligonucleotide
ctacccattcgatgtgccagattatcaaagtctgagaagcatacttgccaacaatgggaa

SEQ ID NO: 378890 - DNA, 55 bp, Artificial
  Synthetic oligonucleotide
ctaccccaaaaccgttcatcagggatgaggtgtcctttagcgtgggcctcactcc

SEQ ID NO: 378891 - DNA, 60 bp, Artificial
  Synthetic oligonucleotide
ctaccccagcatcagtcatcacctgcctaacgtcaagccttcaatcatttgcagagggga

SEQ ID NO: 378892 - DNA, 60 bp, Artificial
  Synthetic oligonucleotide
ctaccccaggctcactggtcatctgtaagtatatctgtttgtatccataccgattacatt

SEQ ID NO: 378893 - DNA, 52 bp, Artificial
  Synthetic oligonucleotide
ctaccccccaaaaccttgcggtattgtgcccgcaaagaacgtgtgtggtccg

SEQ ID NO: 378894 - DNA, 58 bp, Artificial
  Synthetic oligonucleotide
ctaccccccactcgtaacttagaaggcttctcacactcgatcaatagtaggtgtggca

SEQ ID NO: 378895 - DNA, 54 bp, Artificial
  Synthetic oligonucleotide
ctaccccccgttcctgcgacaggaaccctcaccaccctctatgagggaaatgcc

SEQ ID NO: 378896 - DNA, 53 bp, Artificial
  Synthetic oligonucleotide
ctacccccgggtactccctcgtccgctagtgatgcttgggtgttcccgccgcc

SEQ ID NO: 378897 - DNA, 53 bp, Artificial
  Synthetic oligonucleotide
ctaccccgatgagcttaatccattttctgaaaatggtttctggagccgcttta

SEQ ID NO: 378898 - DNA, 53 bp, Artificial
  Synthetic oligonucleotide
ctaccccgatgtcgaatgttcggaggagactgaccttcgacaccccgctttcc

SEQ ID NO: 378899 - DNA, 60 bp, Artificial
  Synthetic oligonucleotide
ctacccctccaccagactgcataaatgatttactgcaggctgtcgattctcaggaggtta

SEQ ID NO: 378900 - DNA, 55 bp, Artificial
  Synthetic oligonucleotide
ctacccctgctgagaacccactcactcacagctgttggacattgctattggtgcc

SEQ ID NO: 378901 - DNA, 55 bp, Artificial
  Synthetic oligonucleotide
ctacccctttttagggagctaagttggcagctacattactctaaactgtctgaag

SEQ ID NO: 378902 - DNA, 55 bp, Artificial
  Synthetic oligonucleotide
ctacccgaagatgttttgctaatagaggactcggagattcttcgtacaccacccc

SEQ ID NO: 378903 - DNA, 59 bp, Artificial
  Synthetic oligonucleotide
ctacccgagtggcacttcaggatctcctattgtcaacaggaacggagaggtgattgggc

SEQ ID NO: 378904 - DNA, 59 bp, Artificial
  Synthetic oligonucleotide
ctacccgcagcgagaccattgacagatttggccagcgggtggataaagaacaagtatcc

SEQ ID NO: 378905 - DNA, 59 bp, Artificial
  Synthetic oligonucleotide
ctacccgcagttttcgcatgtgctcgcatttttgaagcgatatcgtgaactgatgcgag

SEQ ID NO: 378906 - DNA, 57 bp, Artificial
  Synthetic oligonucleotide
ctacccggcaacagacgacttgctccttctctctgagcccccgccctatccggcggc

SEQ ID NO: 378907 - DNA, 60 bp, Artificial
  Synthetic oligonucleotide
ctacccgggaggaggctctggagtgcctgatgggggagcttggactatgaagcggctgaa

SEQ ID NO: 378908 - DNA, 57 bp, Artificial
  Synthetic oligonucleotide
ctacccggtcagtttctcaaaacccagcttgatctttgtagaggccagcgagtatta

SEQ ID NO: 378909 - DNA, 51 bp, Artificial
  Synthetic oligonucleotide
ctacccggttcggctgcgttatgcggtggggccttcccccttgggaactgg

SEQ ID NO: 378910 - DNA, 58 bp, Artificial
  Synthetic oligonucleotide
ctacccgtcttacggcagcgcgtgagttacagctcgtggctggggaggttgttgtagc

SEQ ID NO: 378911 - DNA, 56 bp, Artificial
  Synthetic oligonucleotide
ctaccctaagaatggtacatacaaatacaatggtaattcaagcttacccatcacac

SEQ ID NO: 378912 - DNA, 55 bp, Artificial
  Synthetic oligonucleotide
ctaccctatgaatacctccagcttcgctggctcaatctctgtgcagcttgacctc

SEQ ID NO: 378913 - DNA, 55 bp, Artificial
  Synthetic oligonucleotide
ctaccctatggacgactgttattggtggtattcaatctgtatggggcggagtaac

SEQ ID NO: 378914 - DNA, 58 bp, Artificial
  Synthetic oligonucleotide
ctaccctcaaagctgtgtctggaaggcgcgtggtaatgcgctgaaaaaggtgaccttc

SEQ ID NO: 378915 - DNA, 55 bp, Artificial
  Synthetic oligonucleotide
ctaccctcgccatcccggtgaatagagccaaaatgctctacaagcttatacatgg

SEQ ID NO: 378916 - DNA, 55 bp, Artificial
  Synthetic oligonucleotide
ctaccctctgactttgtccccctctcctaccgcgagtgccctcccccactgtgga

SEQ ID NO: 378917 - DNA, 55 bp, Artificial
  Synthetic oligonucleotide
ctaccctgttgggccagttgtgcgggtactacactcaatggtcaggatcactgga

SEQ ID NO: 378918 - DNA, 60 bp, Artificial
  Synthetic oligonucleotide
ctaccgaaacggtcgacacaattctagagcggaatgtcactgtgacccatgccaaggaca

SEQ ID NO: 378919 - DNA, 55 bp, Artificial
  Synthetic oligonucleotide
ctaccgaaagggcggccatgtagaggtggaattccctgggagcgcccactgcaac

SEQ ID NO: 378920 - DNA, 50 bp, Artificial
  Synthetic oligonucleotide
ctaccgaaatcatcatgcagccctggtttatcaaagcaaagaacgaccaa

SEQ ID NO: 378921 - DNA, 53 bp, Artificial
  Synthetic oligonucleotide
ctaccgaacccaaaggaagattacctagtacgatacttgttcagaggaatagg

SEQ ID NO: 378922 - DNA, 58 bp, Artificial
  Synthetic oligonucleotide
ctaccgagccagtacaaggctgtaggaactgccagtatcaccgggataagtccggaga

SEQ ID NO: 378923 - DNA, 56 bp, Artificial
  Synthetic oligonucleotide
ctaccgagttcctttcagcggttgggttgatgtttgccattgtgggaggtctagcc

SEQ ID NO: 378924 - DNA, 59 bp, Artificial
  Synthetic oligonucleotide
ctaccgcaactggctatcggtcctctcacactccgactccgagccggtactcagcccac

SEQ ID NO: 378925 - DNA, 57 bp, Artificial
  Synthetic oligonucleotide
ctaccgcacacgcaaggtgatgtatggtaaccctgttcgtaattagtgtgtacgccc

SEQ ID NO: 378926 - DNA, 55 bp, Artificial
  Synthetic oligonucleotide
ctaccgcactgtcaagaccagggactgcagggaaatagaatgcatgcctccgcgc

SEQ ID NO: 378927 - DNA, 57 bp, Artificial
  Synthetic oligonucleotide
ctaccgcagctggtatctgtcctacaactatggcgaccctgaaaaaggagtccgttc

SEQ ID NO: 378928 - DNA, 57 bp, Artificial
  Synthetic oligonucleotide
ctaccgcaggtgattcgaatgtttgtaaaagtgtctgaaacgtatgacctgtctacc

SEQ ID NO: 378929 - DNA, 55 bp, Artificial
  Synthetic oligonucleotide
ctaccgcatctacagtcccggtttgctgtggggacatcgccagattggagtgggg

SEQ ID NO: 378930 - DNA, 55 bp, Artificial
  Synthetic oligonucleotide
ctaccgcattaccgattgcagacttcagtcatggatcgtgtagttagcagagtcg

SEQ ID NO: 378931 - DNA, 53 bp, Artificial
  Synthetic oligonucleotide
ctaccgccctagtgctcctccttaactttcaggctacctacggtgtcgtgggg

SEQ ID NO: 378932 - DNA, 56 bp, Artificial
  Synthetic oligonucleotide
ctaccgcctcattgcaggttacatctccttcattgccggtttctgttccgttaaat

SEQ ID NO: 378933 - DNA, 50 bp, Artificial
  Synthetic oligonucleotide
ctaccgcgaccttttggagcacgtccaggctctcaggcgactcgtagccg

SEQ ID NO: 378934 - DNA, 51 bp, Artificial
  Synthetic oligonucleotide
ctaccgctaaaacccctcaccaaaacagggtgaccacttccggttgcccta

SEQ ID NO: 378935 - DNA, 60 bp, Artificial
  Synthetic oligonucleotide
ctaccgctcccgttctctcttgcctcatcaacaaaatgcatttgaacgttatgctactaa

SEQ ID NO: 378936 - DNA, 55 bp, Artificial
  Synthetic oligonucleotide
ctaccgctgagaagttcttacccgctgttatgacctcggtcaagacggtacgaat

SEQ ID NO: 378937 - DNA, 55 bp, Artificial
  Synthetic oligonucleotide
ctaccgcttgtttacgtctcgatagttgcagcaatttcgccggaatcaaagatcg

SEQ ID NO: 378938 - DNA, 54 bp, Artificial
  Synthetic oligonucleotide
ctaccggaacggacgtctaatcaggtggcaactacggttacaagcctatcaacc

SEQ ID NO: 378939 - DNA, 58 bp, Artificial
  Synthetic oligonucleotide
ctaccggaagggtataggcttgtgcggcttttcgcagagacgtgtgtgtgagggcaaa

SEQ ID NO: 378940 - DNA, 53 bp, Artificial
  Synthetic oligonucleotide
ctaccggaagtagagcccgattctccaattattttaccaaacggcacactggc

SEQ ID NO: 378941 - DNA, 58 bp, Artificial
  Synthetic oligonucleotide
ctaccggagacgtcatctgttctccgtgtggtcccggaacatattctcacaccgtctc

SEQ ID NO: 378942 - DNA, 54 bp, Artificial
  Synthetic oligonucleotide
ctaccggcggggcaatcacctactccacgtacgggaaatttctcgcggatggag

SEQ ID NO: 378943 - DNA, 57 bp, Artificial
  Synthetic oligonucleotide
ctaccggggagtcagcagaccctgtcaccaccaccgtagagaactacggcggtgaga

SEQ ID NO: 378944 - DNA, 55 bp, Artificial
  Synthetic oligonucleotide
ctaccggtacatcaactggtgggaaagactacttagcagatcttgacgacatcac

SEQ ID NO: 378945 - DNA, 60 bp, Artificial
  Synthetic oligonucleotide
ctaccgtaagcagtgatggcggtacggaggacgtcgtgtgctgctcgatgtcctactcgt

SEQ ID NO: 378946 - DNA, 57 bp, Artificial
  Synthetic oligonucleotide
ctaccgtcgttatgagtcatgcgtattggtctgcgaactttcgtagtaaacctaaca

SEQ ID NO: 378947 - DNA, 57 bp, Artificial
  Synthetic oligonucleotide
ctaccgtcttgcctgttattggtgcctctcctcagagcaatcaggttaatgccatga

SEQ ID NO: 378948 - DNA, 60 bp, Artificial
  Synthetic oligonucleotide
ctaccgtgagcgaggaggctagtgaggacgtcgtctgttgctcgatgtcctacacatgga

SEQ ID NO: 378949 - DNA, 60 bp, Artificial
  Synthetic oligonucleotide
ctaccgtggctgcctgtcgcgatgcttacaactggaaggtgtctggagacccgaggtatg

SEQ ID NO: 378950 - DNA, 56 bp, Artificial
  Synthetic oligonucleotide
ctaccgtggtttagtctataattatgacttccctgaatacggcgcaatgaaacctg

SEQ ID NO: 378951 - DNA, 58 bp, Artificial
  Synthetic oligonucleotide
ctaccgtgttagtggttagatcaatgttttcgtgtaacatgcatgttacctagtgaag

SEQ ID NO: 378952 - DNA, 59 bp, Artificial
  Synthetic oligonucleotide
ctaccgttacggatttgtggccaatttcagcatggaactgcccagctttggagtgtctg

SEQ ID NO: 378953 - DNA, 55 bp, Artificial
  Synthetic oligonucleotide
ctaccgttcgtagccgccaatatgttaaacggacaaattcctgtgttggttgtga

SEQ ID NO: 378954 - DNA, 57 bp, Artificial
  Synthetic oligonucleotide
ctaccgttctgaaagtgttactccattaccagagttcgaccttgaccatgatagaac

SEQ ID NO: 378955 - DNA, 60 bp, Artificial
  Synthetic oligonucleotide
ctacctaaagatatggtcatgacgatggataaggctagagttatcatgtctatcaattca

SEQ ID NO: 378956 - DNA, 54 bp, Artificial
  Synthetic oligonucleotide
ctacctaaagatctccaaattttcccaaatttactatctgatatccctggaaac

SEQ ID NO: 378957 - DNA, 58 bp, Artificial
  Synthetic oligonucleotide
ctacctaaatatctagtatcctggaggaaactggtatatcgtgacatttgcgagaagg

SEQ ID NO: 378958 - DNA, 58 bp, Artificial
  Synthetic oligonucleotide
ctacctaagccccgttgcctgtatctcgaaggtaacggggcttcgcgcatatgccaca

SEQ ID NO: 378959 - DNA, 60 bp, Artificial
  Synthetic oligonucleotide
ctacctaataagagcactgacactgaacacaatgacagaagacgcagaaagaggcgaatt

SEQ ID NO: 378960 - DNA, 60 bp, Artificial
  Synthetic oligonucleotide
ctacctaatttgtctcgcaatgtgctctccaggagtgcttattgctctgttcaatagtgg

SEQ ID NO: 378961 - DNA, 59 bp, Artificial
  Synthetic oligonucleotide
ctacctacctccgcactctgtccgatcgcttggacatcgagggcttccgtatctcggag

SEQ ID NO: 378962 - DNA, 58 bp, Artificial
  Synthetic oligonucleotide
ctacctacgactcggccatgttcagatggattgacagcgtttttggtttttacatcaa

SEQ ID NO: 378963 - DNA, 60 bp, Artificial
  Synthetic oligonucleotide
ctacctactaaagttgcaggagttcaatgcgctgcgttctggcacagagcctacaatttg

SEQ ID NO: 378964 - DNA, 60 bp, Artificial
  Synthetic oligonucleotide
ctacctactacgatgcaacatctcagctgacggtcgtaatgcaacaaaagctgtgcaatc

SEQ ID NO: 378965 - DNA, 59 bp, Artificial
  Synthetic oligonucleotide
ctacctactccaggcgaataaaatccggctaccagatggatcgatctactgcgtggacg

SEQ ID NO: 378966 - DNA, 56 bp, Artificial
  Synthetic oligonucleotide
ctacctactcgtcagaactccgtttcgctggggtggtatgaccaaccagtgggagc

SEQ ID NO: 378967 - DNA, 54 bp, Artificial
  Synthetic oligonucleotide
ctacctagttgcttaccaggctacggtctgtgccagggctaaagcccccccacc

SEQ ID NO: 378968 - DNA, 54 bp, Artificial
  Synthetic oligonucleotide
ctacctataactggggtgacaatgacacggatgtcttcgtccttaataacacta

SEQ ID NO: 378969 - DNA, 59 bp, Artificial
  Synthetic oligonucleotide
ctacctatacaagtcttctgacttgcaccaacagttggacttcacgataccacaatcct

SEQ ID NO: 378970 - DNA, 59 bp, Artificial
  Synthetic oligonucleotide
ctacctatataagtcttcagacttacaccgacagttggacaccatgataccacaatcct

SEQ ID NO: 378971 - DNA, 57 bp, Artificial
  Synthetic oligonucleotide
ctacctatgcctgtggaggcttatcacaccacggagatcgattttagaatgtttgac

SEQ ID NO: 378972 - DNA, 55 bp, Artificial
  Synthetic oligonucleotide
ctacctattcatcctgcttgctttgtgtcgaccatcactgaggacacttcttccg

SEQ ID NO: 378973 - DNA, 55 bp, Artificial
  Synthetic oligonucleotide
ctacctcaaaatctcagcccacgtgcgaagcattgttaatgaatacggtcgtggg

SEQ ID NO: 378974 - DNA, 60 bp, Artificial
  Synthetic oligonucleotide
ctacctcacaggcacgcacaggattcgctgaggaaggcgctaaggccgtgtatgaccgtc

SEQ ID NO: 378975 - DNA, 53 bp, Artificial
  Synthetic oligonucleotide
ctacctcagataatcccagattgactagacgagtgtatttcagattagattgg

SEQ ID NO: 378976 - DNA, 58 bp, Artificial
  Synthetic oligonucleotide
ctacctcagcgctacaagccagaaaggaccctccaaaaccttgagcgtgagtacacgc

SEQ ID NO: 378977 - DNA, 54 bp, Artificial
  Synthetic oligonucleotide
ctacctcatccactacccttttcccttaaatactacctcagaaattctacctca

SEQ ID NO: 378978 - DNA, 55 bp, Artificial
  Synthetic oligonucleotide
ctacctcatgttaccacactacactcattttaacagcactttagctggaaggaaa

SEQ ID NO: 378979 - DNA, 60 bp, Artificial
  Synthetic oligonucleotide
ctacctccaatcattcagagactccatggcctcagcgcattctcactccacagctactct

SEQ ID NO: 378980 - DNA, 49 bp, Artificial
  Synthetic oligonucleotide
ctacctcctttaccctaaccccctcctgactatgccccttccccaaccc

SEQ ID NO: 378981 - DNA, 55 bp, Artificial
  Synthetic oligonucleotide
ctacctcctttgaggaatgcttatgcgcctcggggtttatggaggggaccttcca

SEQ ID NO: 378982 - DNA, 58 bp, Artificial
  Synthetic oligonucleotide
ctacctcgaacatcgagcctccctagttcttgtcgcggacccgaggcggctcctgcga

SEQ ID NO: 378983 - DNA, 58 bp, Artificial
  Synthetic oligonucleotide
ctacctcgcaggcattccccctccgcacaggaggaaacggacagcttcaatactggcc

SEQ ID NO: 378984 - DNA, 58 bp, Artificial
  Synthetic oligonucleotide
ctacctctgttagtctttgaaaatccctcgggctctcagacatggcttctgaaaggtc

SEQ ID NO: 378985 - DNA, 54 bp, Artificial
  Synthetic oligonucleotide
ctacctgaagtcactaaacgcttatgcggtgaacgggttgtccatccagctaag

SEQ ID NO: 378986 - DNA, 60 bp, Artificial
  Synthetic oligonucleotide
ctacctgacgaaagcccgactagcgatgagtggcggttacatcacgatgcgtatgatccg

SEQ ID NO: 378987 - DNA, 50 bp, Artificial
  Synthetic oligonucleotide
ctacctgacggatggatatactgtagcgcagatggcagtagatttgatag

SEQ ID NO: 378988 - DNA, 53 bp, Artificial
  Synthetic oligonucleotide
ctacctgagaatcaagttaattaagtttcaaataggtggagaacttcttacct

SEQ ID NO: 378989 - DNA, 60 bp, Artificial
  Synthetic oligonucleotide
ctacctgagagtcctccggcccctgaatgcggctaatcccaaccacggagcaaatgctca

SEQ ID NO: 378990 - DNA, 55 bp, Artificial
  Synthetic oligonucleotide
ctacctgcaactttatgttggaacagtagccagatagttcccttcttagggattg

SEQ ID NO: 378991 - DNA, 54 bp, Artificial
  Synthetic oligonucleotide
ctacctgggatgcgcctgccatacagagtatgatacccgtgacgggcattcgtt

SEQ ID NO: 378992 - DNA, 51 bp, Artificial
  Synthetic oligonucleotide
ctacctgggggtgtctacagagggcaatgctagagtgagacattgctcttc

SEQ ID NO: 378993 - DNA, 52 bp, Artificial
  Synthetic oligonucleotide
ctacctgtcacgacacaaggggtcactacaaacatactatctcagtgcacag

SEQ ID NO: 378994 - DNA, 55 bp, Artificial
  Synthetic oligonucleotide
ctacctgttaacaggccgattgattggaaagtctgtcaacgaattgttggtcttt

SEQ ID NO: 378995 - DNA, 55 bp, Artificial
  Synthetic oligonucleotide
ctacctgttactgtccggacaatctcagatgcttcattggtacacgacatgctca

SEQ ID NO: 378996 - DNA, 54 bp, Artificial
  Synthetic oligonucleotide
ctacctgttgaggaagatcaaaacaaccttcccgcgcctcaaaatccctctgat

SEQ ID NO: 378997 - DNA, 55 bp, Artificial
  Synthetic oligonucleotide
ctaccttataaaactgggaaggttcagattcatggagagcagggctctatgtgac

SEQ ID NO: 378998 - DNA, 56 bp, Artificial
  Synthetic oligonucleotide
ctaccttatagcgtaatccgtgactacgggctcctcgcagaggcctccccggatgg

SEQ ID NO: 378999 - DNA, 55 bp, Artificial
  Synthetic oligonucleotide
ctaccttatgtcagctttacatagcaggggataaggtcctagcatcgtgtggcaa

SEQ ID NO: 379000 - DNA, 55 bp, Artificial
  Synthetic oligonucleotide
ctaccttcatcatcgacggcccaaataccccagaatgctctgatgaccaaagagc

SEQ ID NO: 379001 - DNA, 54 bp, Artificial
  Synthetic oligonucleotide
ctaccttcgaacgtggattatgtaacgggaatattaactgacgaggataggaac

SEQ ID NO: 379002 - DNA, 60 bp, Artificial
  Synthetic oligonucleotide
ctaccttgctgacactggatcgccaatcggcttctgtccttcgtggtactgaattgcctt

SEQ ID NO: 379003 - DNA, 60 bp, Artificial
  Synthetic oligonucleotide
ctaccttggagaatgaatatgtggagttagaatagcatttacaggaaagccatatcattg

SEQ ID NO: 379004 - DNA, 60 bp, Artificial
  Synthetic oligonucleotide
ctaccttggatggaccatatcaaccaacttcattcaatccgccaatcaactattggctgc

SEQ ID NO: 379005 - DNA, 55 bp, Artificial
  Synthetic oligonucleotide
ctacctttacaatggcctctccttgtgcccagttcagaccctgtcattgccacgc

SEQ ID NO: 379006 - DNA, 54 bp, Artificial
  Synthetic oligonucleotide
ctacctttagtggatgtaattaacaaatcgatagttggcatacacagtctagct

SEQ ID NO: 379007 - DNA, 58 bp, Artificial
  Synthetic oligonucleotide
ctacctttgaaatagcatggctccaccgcaaacagaagggcagactccccactcccac

SEQ ID NO: 379008 - DNA, 54 bp, Artificial
  Synthetic oligonucleotide
ctacctttgtattcacaagttctggcaagatgtaccgaaagcggtctggtaaaa

SEQ ID NO: 379009 - DNA, 55 bp, Artificial
  Synthetic oligonucleotide
ctacgaaacttggagaggcttcggtctcgaagagcggtaatgtaccctctgcgcc

SEQ ID NO: 379010 - DNA, 60 bp, Artificial
  Synthetic oligonucleotide
ctacgaaagccaaaaggcgtatatcgccctcgggctcaggctcacagcacttaactgtga

SEQ ID NO: 379011 - DNA, 52 bp, Artificial
  Synthetic oligonucleotide
ctacgaacactgaaggtaccgtcggaagtaaccttatagaaaccattcggaa

SEQ ID NO: 379012 - DNA, 55 bp, Artificial
  Synthetic oligonucleotide
ctacgaaccatgtcgtcgtactactctattaagcgagtgagtccccacctcatag

SEQ ID NO: 379013 - DNA, 52 bp, Artificial
  Synthetic oligonucleotide
ctacgaactacaccgtcattaacggtgttactcttcaagctggtgagagtct

SEQ ID NO: 379014 - DNA, 55 bp, Artificial
  Synthetic oligonucleotide
ctacgaaggactttcaaggaacttctctatcctctacaggtccttggagacagag

SEQ ID NO: 379015 - DNA, 56 bp, Artificial
  Synthetic oligonucleotide
ctacgaataccacctaggtttatttagtcccatattcataggacccaccagaagca

SEQ ID NO: 379016 - DNA, 56 bp, Artificial
  Synthetic oligonucleotide
ctacgaatgaacaaaccaaacttactgagcccgttcctgaacgagcgaatgagcct

SEQ ID NO: 379017 - DNA, 59 bp, Artificial
  Synthetic oligonucleotide
ctacgaatgctttaacagttgcacaacactcacagtctttagttaaacctatgcgagac

SEQ ID NO: 379018 - DNA, 56 bp, Artificial
  Synthetic oligonucleotide
ctacgacaaatccaacggtctctataagggccgtgtcaatgtccttgtttctggat

SEQ ID NO: 379019 - DNA, 57 bp, Artificial
  Synthetic oligonucleotide
ctacgacatgtactattcgaaattgtaagaaattaggtccaagagaaaatgtagctg

SEQ ID NO: 379020 - DNA, 54 bp, Artificial
  Synthetic oligonucleotide
ctacgacatttgaatcacagacaaagactgtaaacctacgtgggacctgtatcc

SEQ ID NO: 379021 - DNA, 55 bp, Artificial
  Synthetic oligonucleotide
ctacgaccgatcgtcccatctcgcaaacacctagtactcaagatgaacaccgctc

SEQ ID NO: 379022 - DNA, 52 bp, Artificial
  Synthetic oligonucleotide
ctacgaccgattttcggtggaaaactacctccaacgaaggaccaattcgcaa

SEQ ID NO: 379023 - DNA, 57 bp, Artificial
  Synthetic oligonucleotide
ctacgacgacctcctaggcaattctttatgggcgacgcctcaccatccccgtacgca

SEQ ID NO: 379024 - DNA, 55 bp, Artificial
  Synthetic oligonucleotide
ctacgacgtgtgccttaagaaatggttagtgaaacctctatccaaaggacacgct

SEQ ID NO: 379025 - DNA, 50 bp, Artificial
  Synthetic oligonucleotide
ctacgacgttggagtcttcgacccggtacattattttccaaggggagggg

SEQ ID NO: 379026 - DNA, 60 bp, Artificial
  Synthetic oligonucleotide
ctacgactaagtctggctgcgtactgcgacgccgttgacggaaactgaagtactatctca

SEQ ID NO: 379027 - DNA, 55 bp, Artificial
  Synthetic oligonucleotide
ctacgactaatgcgtgccagagtaccagaagtcgttgtaaacgcaagtccgagcc

SEQ ID NO: 379028 - DNA, 59 bp, Artificial
  Synthetic oligonucleotide
ctacgactcaaccgcgcacctaattgcgacgccgttgatgggaattgtaggataatctc

SEQ ID NO: 379029 - DNA, 55 bp, Artificial
  Synthetic oligonucleotide
ctacgacttgagctacttcgaaaggctcttcccaactagggtattcaaaagcgtg

SEQ ID NO: 379030 - DNA, 55 bp, Artificial
  Synthetic oligonucleotide
ctacgactttattgacggtcaatcaccatacacagaagaactagaccccacagac

SEQ ID NO: 379031 - DNA, 55 bp, Artificial
  Synthetic oligonucleotide
ctacgagaagtaaagcgcatctgtgacttaaacgtgatcaactttctgccgttac

SEQ ID NO: 379032 - DNA, 60 bp, Artificial
  Synthetic oligonucleotide
ctacgagatcgtgtccccgagattgccaagacggcaatcttatgcacgcatcttcggtcg

SEQ ID NO: 379033 - DNA, 55 bp, Artificial
  Synthetic oligonucleotide
ctacgagcaagtacttctgttaccccggtgaagttgcatagactgtacccacggt

SEQ ID NO: 379034 - DNA, 55 bp, Artificial
  Synthetic oligonucleotide
ctacgagcgggctatgctaaacacgccaccaacggaagaccgaccgacaaaagtg

SEQ ID NO: 379035 - DNA, 55 bp, Artificial
  Synthetic oligonucleotide
ctacgagctgatcccaaacccagaactcctcaagaacatggtgacacgctatggc

SEQ ID NO: 379036 - DNA, 60 bp, Artificial
  Synthetic oligonucleotide
ctacgaggaatgatgggatcgtggttcctaggttgcttgacattactcttcgagcgtatg

SEQ ID NO: 379037 - DNA, 55 bp, Artificial
  Synthetic oligonucleotide
ctacgaggtcatgggttcattttcataagtacacacaagagtgtgcagctggctg

SEQ ID NO: 379038 - DNA, 60 bp, Artificial
  Synthetic oligonucleotide
ctacgaggtgaccagatggtgtgtccgcaccaatggagtgacgtcgccgaagtgtcacta

SEQ ID NO: 379039 - DNA, 60 bp, Artificial
  Synthetic oligonucleotide
ctacgagtacagattgcagtttaaatcaacgtatgattatttatatctgccatctgaagt

SEQ ID NO: 379040 - DNA, 55 bp, Artificial
  Synthetic oligonucleotide
ctacgagttctttggtctgaacgccggtggatacacgcttggcgttcgcggtcgc

SEQ ID NO: 379041 - DNA, 60 bp, Artificial
  Synthetic oligonucleotide
ctacgatacttagaaccaatatatgttgaatacacagacgagttgtttagagcattagac

SEQ ID NO: 379042 - DNA, 60 bp, Artificial
  Synthetic oligonucleotide
ctacgatagtcgacgacgtaactcaatgatgaatcacttcactactgaaaacagctgccg

SEQ ID NO: 379043 - DNA, 60 bp, Artificial
  Synthetic oligonucleotide
ctacgatatttccttttcggatctgcgtggaaacgctcagagaattgtttatgacgatga

SEQ ID NO: 379044 - DNA, 50 bp, Artificial
  Synthetic oligonucleotide
ctacgatatttcgtcgaacgaatagttaggagacagtcatggcgcaagta

SEQ ID NO: 379045 - DNA, 55 bp, Artificial
  Synthetic oligonucleotide
ctacgatctgttaacattatctacagcacaaatggcaacaatcatgtttggagct

SEQ ID NO: 379046 - DNA, 55 bp, Artificial
  Synthetic oligonucleotide
ctacgattacagtacccgtggcgttaattggaacctgttgcctgtactctattac

SEQ ID NO: 379047 - DNA, 54 bp, Artificial
  Synthetic oligonucleotide
ctacgattacgccacttttcatcgtaccctgcttcacaaacccggtttatcaag

SEQ ID NO: 379048 - DNA, 51 bp, Artificial
  Synthetic oligonucleotide
ctacgcaaacagcccatctaagatccgtgacgtaaaccctgctgtccttga

SEQ ID NO: 379049 - DNA, 55 bp, Artificial
  Synthetic oligonucleotide
ctacgcaaagcctagtatcgcctttgatgtattaagactggtcgttccctgcata

SEQ ID NO: 379050 - DNA, 55 bp, Artificial
  Synthetic oligonucleotide
ctacgcaaagcctattagcgttctggaagttcactggctggtcgttccgctagac

SEQ ID NO: 379051 - DNA, 58 bp, Artificial
  Synthetic oligonucleotide
ctacgcaacggctagtaatatcatgtaacttttagggtgttcgatcaggtgagtgtac

SEQ ID NO: 379052 - DNA, 55 bp, Artificial
  Synthetic oligonucleotide
ctacgcacaccatgtcaattcatcatcccttactacctctcagggcgtcgaagcg

SEQ ID NO: 379053 - DNA, 58 bp, Artificial
  Synthetic oligonucleotide
ctacgcacctaggccttgctccgacgttcgtgcgagatcggtgtgcgggcccgtctac

SEQ ID NO: 379054 - DNA, 56 bp, Artificial
  Synthetic oligonucleotide
ctacgcacttaaattcgtgagaaagctagctgttacgaaagtttacgatacatcct

SEQ ID NO: 379055 - DNA, 55 bp, Artificial
  Synthetic oligonucleotide
ctacgcacttaacaagaagtgccacgcaccgagatactgatgtctcggaacccgc

SEQ ID NO: 379056 - DNA, 55 bp, Artificial
  Synthetic oligonucleotide
ctacgcagcctcccgaccggctgtcatgaatgtcagagcatacacaataggcggg

SEQ ID NO: 379057 - DNA, 60 bp, Artificial
  Synthetic oligonucleotide
ctacgcagtactacagattggaatcagcaatggagatatgcctttaatggataatcacca

SEQ ID NO: 379058 - DNA, 58 bp, Artificial
  Synthetic oligonucleotide
ctacgcagtcggtaagagcggcgacgataccttctacggccatacctcgccattgtaa

SEQ ID NO: 379059 - DNA, 60 bp, Artificial
  Synthetic oligonucleotide
ctacgcatccgccggacaagatataatgttccactcattctgccaagatgtgtataacat

SEQ ID NO: 379060 - DNA, 58 bp, Artificial
  Synthetic oligonucleotide
ctacgcattgctgcacgctccgtcacctacacaccgattcttgatgacattactgatt

SEQ ID NO: 379061 - DNA, 55 bp, Artificial
  Synthetic oligonucleotide
ctacgccagcgtgagggccgctattgggtctgttgtcaacaccagaggcctgctg

SEQ ID NO: 379062 - DNA, 60 bp, Artificial
  Synthetic oligonucleotide
ctacgccgcgcaatagttggtgatcagtttggctggtatggtcgcctagaccgtgccagt

SEQ ID NO: 379063 - DNA, 59 bp, Artificial
  Synthetic oligonucleotide
ctacgccgtcagtataatttgtctacgtctccactcacatccactattgctaccgggac

SEQ ID NO: 379064 - DNA, 60 bp, Artificial
  Synthetic oligonucleotide
ctacgcgactgcatcagtagcgtggcctcttatatcccacttcaagtttcagttgctgtg

SEQ ID NO: 379065 - DNA, 58 bp, Artificial
  Synthetic oligonucleotide
ctacgcgagaagctacagtagtgcaattgtatcccccactcaacgcatggacgccctc

SEQ ID NO: 379066 - DNA, 55 bp, Artificial
  Synthetic oligonucleotide
ctacgcgccattgacaccaggagaaaagctgcaactgcttctggacaatagctgc

SEQ ID NO: 379067 - DNA, 60 bp, Artificial
  Synthetic oligonucleotide
ctacgcgcctcagccgtgcggtactgtgcccgcgtcacaggtgtgtggtccggtatattg

SEQ ID NO: 379068 - DNA, 50 bp, Artificial
  Synthetic oligonucleotide
ctacgcggacaagttcgcggagaatcacgacccgttggggcgcattcacc

SEQ ID NO: 379069 - DNA, 53 bp, Artificial
  Synthetic oligonucleotide
ctacgcgtcataaccaggaatgtgtcgaacagttcgaatctcatatcttcggt

SEQ ID NO: 379070 - DNA, 57 bp, Artificial
  Synthetic oligonucleotide
ctacgcgtgtatagtagtgtgtcagagccatattggcgactattcagacctattttg

SEQ ID NO: 379071 - DNA, 55 bp, Artificial
  Synthetic oligonucleotide
ctacgctaaaactactgctaaaggaaacagtgttgcgcttaattacacccacgta

SEQ ID NO: 379072 - DNA, 59 bp, Artificial
  Synthetic oligonucleotide
ctacgctacacgcctgcagtattcacgtcgtagtgcgttcgtggtccgaagtgttattg

SEQ ID NO: 379073 - DNA, 60 bp, Artificial
  Synthetic oligonucleotide
ctacgctacatggagggtgaacacaagcaactggcggctacaataatgcagaaggcatac

SEQ ID NO: 379074 - DNA, 55 bp, Artificial
  Synthetic oligonucleotide
ctacgctaccttgaagagtaacgcacagcggatagtttatgatgatgagttgcag

SEQ ID NO: 379075 - DNA, 51 bp, Artificial
  Synthetic oligonucleotide
ctacgctagtggtgaagtggctagccttcggaggtgagtcggtgtcagatc

SEQ ID NO: 379076 - DNA, 56 bp, Artificial
  Synthetic oligonucleotide
ctacgctagttgctgataacgactggttcactcctacggttatggatgagtctaca

SEQ ID NO: 379077 - DNA, 59 bp, Artificial
  Synthetic oligonucleotide
ctacgctcactcaaaattgatgttaggacactacgaagacgtggtgtatcaatccttcc

SEQ ID NO: 379078 - DNA, 60 bp, Artificial
  Synthetic oligonucleotide
ctacgctcgacagtgagttgctctcattagccctagcaatcaaggactccggattggtaa

SEQ ID NO: 379079 - DNA, 58 bp, Artificial
  Synthetic oligonucleotide
ctacgctgctattaaatttataagttggtcccgtacattctccatattctattgctcc

SEQ ID NO: 379080 - DNA, 55 bp, Artificial
  Synthetic oligonucleotide
ctacgctgtaatttacacaagtgtgtacgggcgcacacctaaatgcgagacctcg

SEQ ID NO: 379081 - DNA, 55 bp, Artificial
  Synthetic oligonucleotide
ctacgctttcaaagccagtactctccagcatgttccgtggtacatgccaacgcac

SEQ ID NO: 379082 - DNA, 55 bp, Artificial
  Synthetic oligonucleotide
ctacggaaaacgttagtgcgatccagttgttgtaaaagtggatcgtgtggtcctg

SEQ ID NO: 379083 - DNA, 52 bp, Artificial
  Synthetic oligonucleotide
ctacggaaacggtggagcggacaaacatccccaaaatttgctctaaagggaa

SEQ ID NO: 379084 - DNA, 56 bp, Artificial
  Synthetic oligonucleotide
ctacggaaattttcaaatggaggagccacgcaccttggtggagctttgcgaccgtc

SEQ ID NO: 379085 - DNA, 57 bp, Artificial
  Synthetic oligonucleotide
ctacggaacagacgctattagcttcaaatgcttatccggagtttgagatttccttta

SEQ ID NO: 379086 - DNA, 52 bp, Artificial
  Synthetic oligonucleotide
ctacggaacgtacggatcagatcgaaattgccaaaacgtagtacggttaaaa

SEQ ID NO: 379087 - DNA, 56 bp, Artificial
  Synthetic oligonucleotide
ctacggacgaaagcaccgttcacaaccgctcctaccgggacgcactcgactggctc

SEQ ID NO: 379088 - DNA, 57 bp, Artificial
  Synthetic oligonucleotide
ctacggacgcctgatgttcctagaggctgtgagggtccctgtaaggtccaatcctac

SEQ ID NO: 379089 - DNA, 59 bp, Artificial
  Synthetic oligonucleotide
ctacggacgctacagctgtggacaagcctactcgccctgacgtgtcagtgaataggttc

SEQ ID NO: 379090 - DNA, 55 bp, Artificial
  Synthetic oligonucleotide
ctacggactaaacgcaggacgagggcacccgattaagattaatgaacgcaaagca

SEQ ID NO: 379091 - DNA, 60 bp, Artificial
  Synthetic oligonucleotide
ctacggactgcaataggccaaatgtcaaggcccatattcctgtatgtgaggaccaatggt

SEQ ID NO: 379092 - DNA, 55 bp, Artificial
  Synthetic oligonucleotide
ctacggagactggtccctacttctatcaagatctgaactctgtgaagatctatgg

SEQ ID NO: 379093 - DNA, 50 bp, Artificial
  Synthetic oligonucleotide
ctacggagatatttgtacacaaccagaattgtatgtaccatgttatagtc

SEQ ID NO: 379094 - DNA, 60 bp, Artificial
  Synthetic oligonucleotide
ctacggagatgagaagttgtgcactcattatcgtccagcatgactccacctgtcggacag

SEQ ID NO: 379095 - DNA, 56 bp, Artificial
  Synthetic oligonucleotide
ctacggaggacattaacatggatgttcaggattgtagacttaagttcgggaagact

SEQ ID NO: 379096 - DNA, 55 bp, Artificial
  Synthetic oligonucleotide
ctacggatccctccattgttactctgttggaggaatctagtgtaattgattcggg

SEQ ID NO: 379097 - DNA, 55 bp, Artificial
  Synthetic oligonucleotide
ctacggatgaagtaaatgaatcaaggtagagtgaacactgccgtagggtttaccc

SEQ ID NO: 379098 - DNA, 60 bp, Artificial
  Synthetic oligonucleotide
ctacggatgccacatccatcttaggcatcggcaccgtcctagaccaagcagagaccgcgg

SEQ ID NO: 379099 - DNA, 58 bp, Artificial
  Synthetic oligonucleotide
ctacggatggagaaccggactccacacattgaaacagaagaagttgtcagcccagaac

SEQ ID NO: 379100 - DNA, 57 bp, Artificial
  Synthetic oligonucleotide
ctacggattccaatactcaccagggcagcgggttgagttcctcgtgaaagcgtggaa

SEQ ID NO: 379101 - DNA, 55 bp, Artificial
  Synthetic oligonucleotide
ctacggcaagaatttgttaaggatcaacgatcatttgccttctatccccccaaaa

SEQ ID NO: 379102 - DNA, 53 bp, Artificial
  Synthetic oligonucleotide
ctacggcaccacgtcggcttttgcaccatccctggcatcgtcaaattgatcac

SEQ ID NO: 379103 - DNA, 55 bp, Artificial
  Synthetic oligonucleotide
ctacggcccactactccctgtttggttagagattgtgtgccgggtgtgtgctacc

SEQ ID NO: 379104 - DNA, 52 bp, Artificial
  Synthetic oligonucleotide
ctacggcctgtaacccggtactccagggccctaaactaacatattctccggc

SEQ ID NO: 379105 - DNA, 60 bp, Artificial
  Synthetic oligonucleotide
ctacggctaaggctatggagcagatggctggatcgagtgagcaagcagcggaagccatgg

SEQ ID NO: 379106 - DNA, 56 bp, Artificial
  Synthetic oligonucleotide
ctacgggacgtgaatccacggtgatcaatacgaatttgtggttcgattacccagcc

SEQ ID NO: 379107 - DNA, 58 bp, Artificial
  Synthetic oligonucleotide
ctacgggagcggcaatcagagcgttttccgatatggtaaatgaggatcctacaaagaa

SEQ ID NO: 379108 - DNA, 53 bp, Artificial
  Synthetic oligonucleotide
ctacgggaggaggtatcattcagggtaggactccacgagtacccggtcgggtc

SEQ ID NO: 379109 - DNA, 60 bp, Artificial
  Synthetic oligonucleotide
ctacgggatcggttgtcttggcgcatgatccagacgctagtgatgctaaccctgataacg

SEQ ID NO: 379110 - DNA, 57 bp, Artificial
  Synthetic oligonucleotide
ctacgggccaccggggtgtggcaagagtagatgggccaatgaacagcctgggactaa

SEQ ID NO: 379111 - DNA, 57 bp, Artificial
  Synthetic oligonucleotide
ctacgggctcccacactaccctataggcaagtgcatcctaacaaatgaaacaggtta

SEQ ID NO: 379112 - DNA, 55 bp, Artificial
  Synthetic oligonucleotide
ctacggggactactattggaagtgggttaaccagcatagcggcaagtatgaaccg

SEQ ID NO: 379113 - DNA, 55 bp, Artificial
  Synthetic oligonucleotide
ctacggggatgatgagatagtctccacagatttggaatttgaccccgcccggctc

SEQ ID NO: 379114 - DNA, 60 bp, Artificial
  Synthetic oligonucleotide
ctacgggggcataccaaaactgcacctagattgggcagcgcgcgctagcgcgcgctgcca

SEQ ID NO: 379115 - DNA, 51 bp, Artificial
  Synthetic oligonucleotide
ctacgggtactactacgacggaaagaccccttcctccggaacctcattcca

SEQ ID NO: 379116 - DNA, 53 bp, Artificial
  Synthetic oligonucleotide
ctacgggtggggccggagacaggttacacacaacttcttgatcgccccgtggg

SEQ ID NO: 379117 - DNA, 51 bp, Artificial
  Synthetic oligonucleotide
ctacgggtgttgtagtgtttaagatacacaaatggttgaaacaacgcctac

SEQ ID NO: 379118 - DNA, 55 bp, Artificial
  Synthetic oligonucleotide
ctacggtaagtacagcactaataggaggtaacacaatacgtatcaactgtccgat

SEQ ID NO: 379119 - DNA, 60 bp, Artificial
  Synthetic oligonucleotide
ctacggtacactggcaaggggatgcgagcgcaaacgcgcagccgacctgtgttatggtga

SEQ ID NO: 379120 - DNA, 53 bp, Artificial
  Synthetic oligonucleotide
ctacggtactaaaccaaaacaagacgacaattggacctcaacagcacctattt

SEQ ID NO: 379121 - DNA, 53 bp, Artificial
  Synthetic oligonucleotide
ctacggtatggtgtacaacccacccagaacaaactaccctgggcggttcacaa

SEQ ID NO: 379122 - DNA, 60 bp, Artificial
  Synthetic oligonucleotide
ctacggtcgcgtcaatctttgtgcgtatggtcagaaagcagcggatccttctattatagg

SEQ ID NO: 379123 - DNA, 55 bp, Artificial
  Synthetic oligonucleotide
ctacggtcggttccttgccaatcctaggcagatgctacgaggtgttcccgtggtc

SEQ ID NO: 379124 - DNA, 58 bp, Artificial
  Synthetic oligonucleotide
ctacggtctcctccgcgtggcagactacggtgttggggccgcttcgtgcgagtcgctc

SEQ ID NO: 379125 - DNA, 53 bp, Artificial
  Synthetic oligonucleotide
ctacggtgaaagtattggaacgagcctagagctagaagaaaataaaaaagtcg

SEQ ID NO: 379126 - DNA, 56 bp, Artificial
  Synthetic oligonucleotide
ctacggtgaattttaagtcaatagcctcttataagcacgaaggttacaagtcgtca

SEQ ID NO: 379127 - DNA, 60 bp, Artificial
  Synthetic oligonucleotide
ctacggtgagttgatgtgccaggggaacccagcgacggatagcatgtaccagtctatact

SEQ ID NO: 379128 - DNA, 57 bp, Artificial
  Synthetic oligonucleotide
ctacggtgcgtctgtggggatgtttacgaggatcacgagcccaaagacctctcggtc

SEQ ID NO: 379129 - DNA, 55 bp, Artificial
  Synthetic oligonucleotide
ctacggtggccctggctctggtaagtctgtgctagctggtttgctggctcgtgca

SEQ ID NO: 379130 - DNA, 58 bp, Artificial
  Synthetic oligonucleotide
ctacggtgtaagagttatgtcgaagcgaccaggagatataataatctcaacacccgta

SEQ ID NO: 379131 - DNA, 55 bp, Artificial
  Synthetic oligonucleotide
ctacggttatacgggccaactgcctccacagaggaagttaggaaccagcgtagaa

SEQ ID NO: 379132 - DNA, 55 bp, Artificial
  Synthetic oligonucleotide
ctacgtacagttggggggaaaatgagacggacgtgctgctacttaacaacacgcg

SEQ ID NO: 379133 - DNA, 60 bp, Artificial
  Synthetic oligonucleotide
ctacgtatggtcaggctggacttggtaattgggcatatgctaacccgactgcatgggccc

SEQ ID NO: 379134 - DNA, 53 bp, Artificial
  Synthetic oligonucleotide
ctacgtatgtccccgggatggccggaccctttcagaagctagaaggtgcgggg

SEQ ID NO: 379135 - DNA, 57 bp, Artificial
  Synthetic oligonucleotide
ctacgtattctcctgatacggtcggaggtgaatttgtgaaggatttaatctgcctgt

SEQ ID NO: 379136 - DNA, 59 bp, Artificial
  Synthetic oligonucleotide
ctacgtatttgttattaacaactgcaccggaataatgctccattattcagctattgtgt

SEQ ID NO: 379137 - DNA, 60 bp, Artificial
  Synthetic oligonucleotide
ctacgtcaacaatcatgcgtttcacacacctgcatttgataaacgtgcatttgctaagct

SEQ ID NO: 379138 - DNA, 55 bp, Artificial
  Synthetic oligonucleotide
ctacgtcacaagtcacgtggcaggggaggagtcacaacccggaagttctgctctg

SEQ ID NO: 379139 - DNA, 59 bp, Artificial
  Synthetic oligonucleotide
ctacgtcactatgaacaccacgcgttcaaaaccattgctaaatgctttggggagatcac

SEQ ID NO: 379140 - DNA, 55 bp, Artificial
  Synthetic oligonucleotide
ctacgtcataagtcacgtgactgggtcctgctacgtcatatgcggaagtaggccc

SEQ ID NO: 379141 - DNA, 56 bp, Artificial
  Synthetic oligonucleotide
ctacgtcatcaatgacgttataccaggcctcgttactgtacacctttggactaagg

SEQ ID NO: 379142 - DNA, 58 bp, Artificial
  Synthetic oligonucleotide
ctacgtcatcaatgacgttgtaccacacatcgttattgtacacctttgggcttaggtc

SEQ ID NO: 379143 - DNA, 50 bp, Artificial
  Synthetic oligonucleotide
ctacgtcatttagaggtactggttactattctaattctatctataatgat

SEQ ID NO: 379144 - DNA, 55 bp, Artificial
  Synthetic oligonucleotide
ctacgtccattcttcacctggatttccagcaaaacgcggcgaggctacgctccga

SEQ ID NO: 379145 - DNA, 60 bp, Artificial
  Synthetic oligonucleotide
ctacgtccgagtccgcatctacatgagacataccgattgtacttcttgaggcccaagact

SEQ ID NO: 379146 - DNA, 56 bp, Artificial
  Synthetic oligonucleotide
ctacgtccgcgccgtcagaaccctccgcgtcaccgacccagctgacttcgtccgga

SEQ ID NO: 379147 - DNA, 53 bp, Artificial
  Synthetic oligonucleotide
ctacgtcctccacataccgcccaccccgttctacggggataatccaggactcg

SEQ ID NO: 379148 - DNA, 58 bp, Artificial
  Synthetic oligonucleotide
ctacgtcgagagtgtttggtccaataaacatgtgcttctaaaccctgattacatgaac

SEQ ID NO: 379149 - DNA, 55 bp, Artificial
  Synthetic oligonucleotide
ctacgtcggacccgacaaccgtgaacgcatcaacctttctaagagaggtcttgcc

SEQ ID NO: 379150 - DNA, 51 bp, Artificial
  Synthetic oligonucleotide
ctacgtcgggcttgttactcctggtaaccccatgctccaccattggataaa

SEQ ID NO: 379151 - DNA, 56 bp, Artificial
  Synthetic oligonucleotide
ctacgtcgtacttcgtctattacaaagtcgagacgcaaagccattgtattaattaa

SEQ ID NO: 379152 - DNA, 60 bp, Artificial
  Synthetic oligonucleotide
ctacgtgaaagtaatgacatgtaagtcatgcgggtcggagaagcgcgttcaggacagcaa

SEQ ID NO: 379153 - DNA, 55 bp, Artificial
  Synthetic oligonucleotide
ctacgtgattctgagttagctggattactatcaatgtcatcagcctcaaacggtg

SEQ ID NO: 379154 - DNA, 57 bp, Artificial
  Synthetic oligonucleotide
ctacgtgcaaatggctgtcatcaagttaggggcggtcactggtacctatgtttataa

SEQ ID NO: 379155 - DNA, 59 bp, Artificial
  Synthetic oligonucleotide
ctacgtgcacttcctgggctgggtcttcgaatctatataaccaagtgcacttccgaatg

SEQ ID NO: 379156 - DNA, 53 bp, Artificial
  Synthetic oligonucleotide
ctacgtgcgagtccttctaacaaattttatctcgggtttcttcggcttctttc

SEQ ID NO: 379157 - DNA, 52 bp, Artificial
  Synthetic oligonucleotide
ctacgtgctatagagtgcgtgcgcttagcgctcgtcagacataaatgtgcgt

SEQ ID NO: 379158 - DNA, 55 bp, Artificial
  Synthetic oligonucleotide
ctacgtgtacaaaagcttgggggtcgttgtacctcgcgcgctgtccagtaaaaca

SEQ ID NO: 379159 - DNA, 54 bp, Artificial
  Synthetic oligonucleotide
ctacgtgtgcactctcagttgactttccttggcctagtcgatagtccatttaat

SEQ ID NO: 379160 - DNA, 59 bp, Artificial
  Synthetic oligonucleotide
ctacgttacgcatggacttgatttggctcaatctggcaactatgtacgtcaagtaaaag

SEQ ID NO: 379161 - DNA, 60 bp, Artificial
  Synthetic oligonucleotide
ctacgttagagcacacgagcagatacatatgcactggaatcctgacagataccagcaggc

SEQ ID NO: 379162 - DNA, 55 bp, Artificial
  Synthetic oligonucleotide
ctacgttcactggtaggcctggagtagccggtgatctaggagtatggacattttc

SEQ ID NO: 379163 - DNA, 60 bp, Artificial
  Synthetic oligonucleotide
ctacgttgaggtcgtgcgcgttaatgaccaccactacatagtgggggccactgctgacaa

SEQ ID NO: 379164 - DNA, 57 bp, Artificial
  Synthetic oligonucleotide
ctacgttggatatcagaccgacacaaactcagaagggccatagtttcggtcagaggt

SEQ ID NO: 379165 - DNA, 58 bp, Artificial
  Synthetic oligonucleotide
ctacgtttatcttccgtatgtaaatacatgtgagtctagagtcccgtgtgagttgtaa

SEQ ID NO: 379166 - DNA, 55 bp, Artificial
  Synthetic oligonucleotide
ctacgtttgatgcgcgactatacagcggttaaagttgaagaagttgtttgcgaag

SEQ ID NO: 379167 - DNA, 59 bp, Artificial
  Synthetic oligonucleotide
ctacgtttgtatcatttgatcttgattatgttggatgaataatagtaagtttcaaataa

SEQ ID NO: 379168 - DNA, 52 bp, Artificial
  Synthetic oligonucleotide
ctacgtttttggtgtcagggatatccctaatagataccgcgctggtggaaaa

SEQ ID NO: 379169 - DNA, 50 bp, Artificial
  Synthetic oligonucleotide
ctactaaaaacagttcgtgttgactcgacatctctcaaaaacgcagttag

SEQ ID NO: 379170 - DNA, 55 bp, Artificial
  Synthetic oligonucleotide
ctactaaaacaacgtgggattacatcgatgcgtatctaagaaatgcgctggacgg

SEQ ID NO: 379171 - DNA, 60 bp, Artificial
  Synthetic oligonucleotide
ctactaaaaggtatgaactgcaatgtgtaggtgcgtgtgagcgtgttgcttttgtctcta

SEQ ID NO: 379172 - DNA, 59 bp, Artificial
  Synthetic oligonucleotide
ctactaaaagtgtactggatgctcttaatccgccaaacgaagcgctattcgactcgaga

SEQ ID NO: 379173 - DNA, 52 bp, Artificial
  Synthetic oligonucleotide
ctactaaattgacgctttcaaaacctaaccctgggtactctgggttcgtgta

SEQ ID NO: 379174 - DNA, 55 bp, Artificial
  Synthetic oligonucleotide
ctactaacagcgtgaaacgctccttgtacgctagaggtgaaacgactccggagag

SEQ ID NO: 379175 - DNA, 54 bp, Artificial
  Synthetic oligonucleotide
ctactaactgcttgtctcgagttgaatgtagttgtgcgcagaactgtgggctct

SEQ ID NO: 379176 - DNA, 55 bp, Artificial
  Synthetic oligonucleotide
ctactaatcagctctgcattcgtttatgacctagatgagactcttgctcactacg

SEQ ID NO: 379177 - DNA, 60 bp, Artificial
  Synthetic oligonucleotide
ctactaatgctgattgtgcctggctagaagcacaagagaacgaggaggtgggttttccag

SEQ ID NO: 379178 - DNA, 58 bp, Artificial
  Synthetic oligonucleotide
ctactacacaccaaaactgctattgttaaacaggacgaccctaacaagatgcgcacca

SEQ ID NO: 379179 - DNA, 52 bp, Artificial
  Synthetic oligonucleotide
ctactacacaggattttaccaatcctttttcggaaggtggtggggagtctac

SEQ ID NO: 379180 - DNA, 55 bp, Artificial
  Synthetic oligonucleotide
ctactacaccggtagtatataccgtctttacaccgtatgttatatcgtagtatac

SEQ ID NO: 379181 - DNA, 50 bp, Artificial
  Synthetic oligonucleotide
ctactacacgattgagtaccctcgagattctcggggtatgcgagttgacg

SEQ ID NO: 379182 - DNA, 55 bp, Artificial
  Synthetic oligonucleotide
ctactacccagactcttagccctgcatcgtcaattttgggtaaactgcggccaag

SEQ ID NO: 379183 - DNA, 52 bp, Artificial
  Synthetic oligonucleotide
ctactaccggtgacgggccctatctttactaaaggttgggaggacttatgga

SEQ ID NO: 379184 - DNA, 53 bp, Artificial
  Synthetic oligonucleotide
ctactaccgttacaatagagttactgttttagatgtctgtcaggcgcaattcg

SEQ ID NO: 379185 - DNA, 55 bp, Artificial
  Synthetic oligonucleotide
ctactacgcgtccgggcagaacatgcgcgacgccgggattgataccgccgggcaa

SEQ ID NO: 379186 - DNA, 58 bp, Artificial
  Synthetic oligonucleotide
ctactacggaagacgccgcagaatgtgccgttcctgtcagttaccacccatactgttg

SEQ ID NO: 379187 - DNA, 60 bp, Artificial
  Synthetic oligonucleotide
ctactacggggcatcttacgcattgtgcagggtaccaacatgatgagatcatcctacacg

SEQ ID NO: 379188 - DNA, 58 bp, Artificial
  Synthetic oligonucleotide
ctactacgtttcttggcaatcttgtgttggaccttgattggtacttgaatagagaggc

SEQ ID NO: 379189 - DNA, 55 bp, Artificial
  Synthetic oligonucleotide
ctactactagtccggttgtacattctgtgaaggcaattaaagtgtcaggggccgg

SEQ ID NO: 379190 - DNA, 59 bp, Artificial
  Synthetic oligonucleotide
ctactactcatacgcttctgtcgtttgacgacctcgaatttctcttgcacaagaaggac

SEQ ID NO: 379191 - DNA, 58 bp, Artificial
  Synthetic oligonucleotide
ctactactcttgcaattttgcccttatctgtttctgttttgtcctacctggattctgc

SEQ ID NO: 379192 - DNA, 60 bp, Artificial
  Synthetic oligonucleotide
ctactactgcaccatggccggtgctggacgcatttactattctcgctttggtgacgaggc

SEQ ID NO: 379193 - DNA, 58 bp, Artificial
  Synthetic oligonucleotide
ctactactgcaggaatgcggtgtccagaacacacaggttcgtttagaaaaatctgcgg

SEQ ID NO: 379194 - DNA, 55 bp, Artificial
  Synthetic oligonucleotide
ctactacttacggaataactctccttgaataaccaaccagataggtacctgacac

SEQ ID NO: 379195 - DNA, 52 bp, Artificial
  Synthetic oligonucleotide
ctactacttctctgatttggaaattgtcgtgcgacacgacggcaatctgact

SEQ ID NO: 379196 - DNA, 53 bp, Artificial
  Synthetic oligonucleotide
ctactactttgggtctgtgcactatactcctttgttgacatcaagctggaaca

SEQ ID NO: 379197 - DNA, 59 bp, Artificial
  Synthetic oligonucleotide
ctactagacagaggacacattgtaaccaaagtggatggaagaaccatgaagaatggtaa

SEQ ID NO: 379198 - DNA, 60 bp, Artificial
  Synthetic oligonucleotide
ctactagagctaggggtgacaaagacaagatatctgaagatctcaagattagtttacaga

SEQ ID NO: 379199 - DNA, 60 bp, Artificial
  Synthetic oligonucleotide
ctactagatggaaagatatctctgataagattaccttcctcaaatgagccatcttacctg

SEQ ID NO: 379200 - DNA, 57 bp, Artificial
  Synthetic oligonucleotide
ctactagcacgactacatttagaacgaccaattatccgggctttacatcgatgttcg

SEQ ID NO: 379201 - DNA, 54 bp, Artificial
  Synthetic oligonucleotide
ctactaggggagttccgccacgagtataagcgcctggagccttagttacggtcc

SEQ ID NO: 379202 - DNA, 57 bp, Artificial
  Synthetic oligonucleotide
ctactagtacccttcaggaacaaatagcatggatgacaaataacccacctgtcccag

SEQ ID NO: 379203 - DNA, 55 bp, Artificial
  Synthetic oligonucleotide
ctactagtgcaggatacccctatgttgccctcggtataaagaagagggacatcct

SEQ ID NO: 379204 - DNA, 54 bp, Artificial
  Synthetic oligonucleotide
ctactagtggcaaaaacacccatacacatgaagtgcatagcactctcttatgga

SEQ ID NO: 379205 - DNA, 57 bp, Artificial
  Synthetic oligonucleotide
ctactataatttgtaccattctaaacccataatatacatgctcggttcagctccatc

SEQ ID NO: 379206 - DNA, 58 bp, Artificial
  Synthetic oligonucleotide
ctactataggtcaattagccgattttgattttatcgatttaccggctattgatcaata

SEQ ID NO: 379207 - DNA, 53 bp, Artificial
  Synthetic oligonucleotide
ctactatattttgctaggcaaaatggtgtgacacgacttggataccaagttgt

SEQ ID NO: 379208 - DNA, 60 bp, Artificial
  Synthetic oligonucleotide
ctactatattttgctaggcaacatggtatcagcagggttggatatcaacctgtgcctgta

SEQ ID NO: 379209 - DNA, 55 bp, Artificial
  Synthetic oligonucleotide
ctactatcatcggtatcccctaacgacatctataggagtgtccatttgtgtctcg

SEQ ID NO: 379210 - DNA, 53 bp, Artificial
  Synthetic oligonucleotide
ctactatccatgtcgtcagcatcaaatggtgaatctagacaattaaagtttgg

SEQ ID NO: 379211 - DNA, 55 bp, Artificial
  Synthetic oligonucleotide
ctactatcggtgcgtatgcatcatctcctgatgccgtccgtggtaactcctttgc

SEQ ID NO: 379212 - DNA, 53 bp, Artificial
  Synthetic oligonucleotide
ctactatgagatcaccagtgttcactgacaactcaacaccccctgcggtgcct

SEQ ID NO: 379213 - DNA, 53 bp, Artificial
  Synthetic oligonucleotide
ctactatgcattatgcggttatgggggcacccaagtctcacggcaactcaggc

SEQ ID NO: 379214 - DNA, 60 bp, Artificial
  Synthetic oligonucleotide
ctactatgccatgatggacgctgcctatctgtgcagtcttccgctggacatggtgcaagc

SEQ ID NO: 379215 - DNA, 55 bp, Artificial
  Synthetic oligonucleotide
ctactatggtgtcagcactcccgaaagcagtctatgagcttaagatggaatgtcc

SEQ ID NO: 379216 - DNA, 59 bp, Artificial
  Synthetic oligonucleotide
ctactattaataaatacggtatgcctagacataacattcgatacagatacgaatgggaa

SEQ ID NO: 379217 - DNA, 55 bp, Artificial
  Synthetic oligonucleotide
ctactattgatcttttctagatcgacaattgctactgctactatatcgtagcgca

SEQ ID NO: 379218 - DNA, 55 bp, Artificial
  Synthetic oligonucleotide
ctactattgtacagccaacccccccagttgaggctgggggacgtattataatatc

SEQ ID NO: 379219 - DNA, 55 bp, Artificial
  Synthetic oligonucleotide
ctactatttatgatatattcatgtccatgttaacgaggtttgctacgacaggacc

SEQ ID NO: 379220 - DNA, 56 bp, Artificial
  Synthetic oligonucleotide
ctactcaaacagatgtaaatttcgttcaatgccttgctattgcttcattgctgtac

SEQ ID NO: 379221 - DNA, 55 bp, Artificial
  Synthetic oligonucleotide
ctactcaacagcattgactacggactcaacaacatacccaaatctacccagcgat

SEQ ID NO: 379222 - DNA, 52 bp, Artificial
  Synthetic oligonucleotide
ctactcaacagcgttccctcagactcaggtagaaactctgagtgcagatcag

SEQ ID NO: 379223 - DNA, 60 bp, Artificial
  Synthetic oligonucleotide
ctactcaaccgagcaggcccaatgaccttaaagatgagactagggaatcatctcaagtgg

SEQ ID NO: 379224 - DNA, 55 bp, Artificial
  Synthetic oligonucleotide
ctactcaagcagatgatctacctgtttctccaggttccagaggccaacgagggcc

SEQ ID NO: 379225 - DNA, 55 bp, Artificial
  Synthetic oligonucleotide
ctactcaagccaacgattctgaataacaaagtacataatcctttattgtcgggac

SEQ ID NO: 379226 - DNA, 60 bp, Artificial
  Synthetic oligonucleotide
ctactcacagtcttcgcagctactatcatatggtgataccaatcgatatttgaatcagtc

SEQ ID NO: 379227 - DNA, 59 bp, Artificial
  Synthetic oligonucleotide
ctactcacattaccgacgaatgctcaagtagataccgactgtatagacgtacattttct

SEQ ID NO: 379228 - DNA, 58 bp, Artificial
  Synthetic oligonucleotide
ctactcacgccaaacatgtgggatcctttactgaacgagtttcgcgagaccgtacatg

SEQ ID NO: 379229 - DNA, 54 bp, Artificial
  Synthetic oligonucleotide
ctactcactacgcaagttcctccagctagctgggcaaaactcggatactcctac

SEQ ID NO: 379230 - DNA, 59 bp, Artificial
  Synthetic oligonucleotide
ctactcagaaggtaattgggagttattctttgagttagtgcacacaactgtgttggcta

SEQ ID NO: 379231 - DNA, 60 bp, Artificial
  Synthetic oligonucleotide
ctactcagacactcagccctgcatcatcaattttgggtaaactgcgcccgagtaactcgg

SEQ ID NO: 379232 - DNA, 60 bp, Artificial
  Synthetic oligonucleotide
ctactcagggtatgatgctagcctcagtccggtgtggtttagagctctggagacagtgct

SEQ ID NO: 379233 - DNA, 60 bp, Artificial
  Synthetic oligonucleotide
ctactcatgtgtgttgtacacccggccctggtttttgacatcaccaagctgctcctggcc

SEQ ID NO: 379234 - DNA, 52 bp, Artificial
  Synthetic oligonucleotide
ctactcattcctgaatgcaaggaaactaggggaagatgtacccacgtacatt

SEQ ID NO: 379235 - DNA, 60 bp, Artificial
  Synthetic oligonucleotide
ctactccaagacccagtgtacgtcgaaggctcaacttcgacagcccatctgcaacaccga

SEQ ID NO: 379236 - DNA, 52 bp, Artificial
  Synthetic oligonucleotide
ctactccaagataacagtgacatcaaggtagtaccaaggaggaaagtaaaaa

SEQ ID NO: 379237 - DNA, 55 bp, Artificial
  Synthetic oligonucleotide
ctactccaccaacatgggcaatgggaactgggacaagcacactcaatggatgtcc

SEQ ID NO: 379238 - DNA, 56 bp, Artificial
  Synthetic oligonucleotide
ctactccaccaaggagaagtagcactcctttacaaagacttagacaagctgtaagg

SEQ ID NO: 379239 - DNA, 55 bp, Artificial
  Synthetic oligonucleotide
ctactccaccaggaagagagtgtgagttttccacgcaacatccagtcgatattca

SEQ ID NO: 379240 - DNA, 55 bp, Artificial
  Synthetic oligonucleotide
ctactccacctgtctcccctctaagagactctcatcctcaggccatgcagtggaa

SEQ ID NO: 379241 - DNA, 55 bp, Artificial
  Synthetic oligonucleotide
ctactccaccttcccatcaagccagtccgcccaccactgcatcatttctctgcgc

SEQ ID NO: 379242 - DNA, 56 bp, Artificial
  Synthetic oligonucleotide
ctactccatcctctgttggagaaggcttcgtgtgggtaaagtggttccctgttgga

SEQ ID NO: 379243 - DNA, 55 bp, Artificial
  Synthetic oligonucleotide
ctactcccgcctccaaggtacgtcgccggctgaacttcgacagcccatatgtcag

SEQ ID NO: 379244 - DNA, 55 bp, Artificial
  Synthetic oligonucleotide
ctactcccggcggaaacgcacccaccaccaaagatatcttcgcatactcggacgc

SEQ ID NO: 379245 - DNA, 60 bp, Artificial
  Synthetic oligonucleotide
ctactccctagagttttgcagaggcctatgaaacctgaagatatgcaactctgaaaggct

SEQ ID NO: 379246 - DNA, 60 bp, Artificial
  Synthetic oligonucleotide
ctactccggacaactgaacaggctcctagccatgaaaggagttgccactggcaggaatcc

SEQ ID NO: 379247 - DNA, 58 bp, Artificial
  Synthetic oligonucleotide
ctactccgtgaaacgcatcaaaaaactaccgcgctatgtgatagagtacgagtccacc

SEQ ID NO: 379248 - DNA, 53 bp, Artificial
  Synthetic oligonucleotide
ctactcctactttctgtaggggtaggcatcttccttcttcccgctcggtaagg

SEQ ID NO: 379249 - DNA, 52 bp, Artificial
  Synthetic oligonucleotide
ctactcctgcttactgcaggggtaggcatctacctcctccccaaccgatgaa

SEQ ID NO: 379250 - DNA, 55 bp, Artificial
  Synthetic oligonucleotide
ctactcctggaaacccgggcggagaaccagcacatacaaagagaaggcggaagcc

SEQ ID NO: 379251 - DNA, 50 bp, Artificial
  Synthetic oligonucleotide
ctactcgatgctgagcctgggcaagttttacgcgcgcaaaatctaccgca

SEQ ID NO: 379252 - DNA, 57 bp, Artificial
  Synthetic oligonucleotide
ctactcgattctaggtgataaagaattagacttctacttaccagaccataacttagc

SEQ ID NO: 379253 - DNA, 55 bp, Artificial
  Synthetic oligonucleotide
ctactcgcacggccagagacctggacatagaaaaaacccgctaccggagtagcgg

SEQ ID NO: 379254 - DNA, 52 bp, Artificial
  Synthetic oligonucleotide
ctactcgctaccggaggacataatcatgaaagatgtagatgaagatagcgac

SEQ ID NO: 379255 - DNA, 55 bp, Artificial
  Synthetic oligonucleotide
ctactcgggcggcacagtaagcatcacgacagccgatgatgcgctacgccctctc

SEQ ID NO: 379256 - DNA, 55 bp, Artificial
  Synthetic oligonucleotide
ctactcgtcaagcacacccattgcccggcatatgaagccgacatatcgggtttcg

SEQ ID NO: 379257 - DNA, 55 bp, Artificial
  Synthetic oligonucleotide
ctactcgtttagcaccatccacaattgggttactaagagggaaacgtgttctagc

SEQ ID NO: 379258 - DNA, 60 bp, Artificial
  Synthetic oligonucleotide
ctactcgtttggagtataagcaatagacctcatgatgtctaactcatgcgtgattgctca

SEQ ID NO: 379259 - DNA, 55 bp, Artificial
  Synthetic oligonucleotide
ctactctaaattctggtatctggaacatgcaaagactggtgagaccagtgttccc

SEQ ID NO: 379260 - DNA, 55 bp, Artificial
  Synthetic oligonucleotide
ctactctaactgactccctgtcagatgcagcgtcatcagtgtctagaagcgcatc

SEQ ID NO: 379261 - DNA, 51 bp, Artificial
  Synthetic oligonucleotide
ctactctacgcacccgccctagctaccccggagtttaccccgcccgcgttc

SEQ ID NO: 379262 - DNA, 60 bp, Artificial
  Synthetic oligonucleotide
ctactctagctagcagtgtcaaatcattcagctacctgagaggggcccctataactctct

SEQ ID NO: 379263 - DNA, 56 bp, Artificial
  Synthetic oligonucleotide
ctactctcaagcctgcgcttcactggataaaacaacatccagtggcagccctcatc

SEQ ID NO: 379264 - DNA, 55 bp, Artificial
  Synthetic oligonucleotide
ctactctcagaggccacaatggcttccctaatctcccatgggttgcctgtgtccg

SEQ ID NO: 379265 - DNA, 60 bp, Artificial
  Synthetic oligonucleotide
ctactctcccacgacatgcatcttctaacccctggtctcgtttcacatctctctgctaag

SEQ ID NO: 379266 - DNA, 60 bp, Artificial
  Synthetic oligonucleotide
ctactctctaccctgcgtgggagtgtgcagaattcacaccgatgggctcggtgtccacgg

SEQ ID NO: 379267 - DNA, 58 bp, Artificial
  Synthetic oligonucleotide
ctactctctggaacgagtggacttctgccaaacgagacccgtctatgatgggaagaaa

SEQ ID NO: 379268 - DNA, 60 bp, Artificial
  Synthetic oligonucleotide
ctactctgacattatatacaaccctttcacagacaaaggcacaggcaacgtaatctggat

SEQ ID NO: 379269 - DNA, 55 bp, Artificial
  Synthetic oligonucleotide
ctactctgacccctgtgctatacagtgcccttacctgggatgccagtcgtggacg

SEQ ID NO: 379270 - DNA, 60 bp, Artificial
  Synthetic oligonucleotide
ctactctgatcaatgccgagcgcacagatcgaactctccgcctcctcgaaacttttcctt

SEQ ID NO: 379271 - DNA, 55 bp, Artificial
  Synthetic oligonucleotide
ctactctgggagtgatggcccttgcaaaattccgattgtctccgttgcgagtctc

SEQ ID NO: 379272 - DNA, 55 bp, Artificial
  Synthetic oligonucleotide
ctactctgttattcccggatttctagtagttgcaagtgagacgaacgatcttcgg

SEQ ID NO: 379273 - DNA, 50 bp, Artificial
  Synthetic oligonucleotide
ctactcttacctccaactccgctggcttaatatgctggcagcctgatagt

SEQ ID NO: 379274 - DNA, 55 bp, Artificial
  Synthetic oligonucleotide
ctactcttgttgtaagcaagggtggtcagaggaggatattcaggagaggttagtg

SEQ ID NO: 379275 - DNA, 60 bp, Artificial
  Synthetic oligonucleotide
ctactgaaacgatgttggctaatgtaacggctgtgagacaggaatacgcagtgccagttg

SEQ ID NO: 379276 - DNA, 60 bp, Artificial
  Synthetic oligonucleotide
ctactgaaatcagatcagaattttatgcgatattggatatatgggatattagtactatta

SEQ ID NO: 379277 - DNA, 55 bp, Artificial
  Synthetic oligonucleotide
ctactgaacaaatatgccctacatccttccatcgcgcctacccccggctatcgtg

SEQ ID NO: 379278 - DNA, 54 bp, Artificial
  Synthetic oligonucleotide
ctactgacctcactagggatcccaataaccggcaccggacaaggaaacttcacg

SEQ ID NO: 379279 - DNA, 55 bp, Artificial
  Synthetic oligonucleotide
ctactgacgaagaacgtgcgctgattcgtactgagttagcggctctcctcgcgga

SEQ ID NO: 379280 - DNA, 50 bp, Artificial
  Synthetic oligonucleotide
ctactgacgatggtcaaccagcatattacaacagcaatatactgggtagg

SEQ ID NO: 379281 - DNA, 60 bp, Artificial
  Synthetic oligonucleotide
ctactgacgtggctatggatggttcgattcccaacacggagggagtgttctcattgatca

SEQ ID NO: 379282 - DNA, 55 bp, Artificial
  Synthetic oligonucleotide
ctactgagacgaaattgccgtgagtcgtttattaaggtaaacacttggcagggta

SEQ ID NO: 379283 - DNA, 55 bp, Artificial
  Synthetic oligonucleotide
ctactgagctggttcagagttccccaacaggtagaatatgcgacagtcctcaccg

SEQ ID NO: 379284 - DNA, 59 bp, Artificial
  Synthetic oligonucleotide
ctactgatctaccgtccggtgtcccatgggcacgtgcgatactccagttcttaggtgcg

SEQ ID NO: 379285 - DNA, 60 bp, Artificial
  Synthetic oligonucleotide
ctactgatgctcttaatcatgcattatacgttgttgataaggctcttgcacaacatggtt

SEQ ID NO: 379286 - DNA, 58 bp, Artificial
  Synthetic oligonucleotide
ctactgatggggaatcaactatgcgtttttatagtcgtacccatgtctgtgatatcca

SEQ ID NO: 379287 - DNA, 50 bp, Artificial
  Synthetic oligonucleotide
ctactgattatatagtggcattatacgctttgtctaacgattttaattca

SEQ ID NO: 379288 - DNA, 52 bp, Artificial
  Synthetic oligonucleotide
ctactgattcggtgccagacggtgctatcgtagacgagtacaattataaagc

SEQ ID NO: 379289 - DNA, 55 bp, Artificial
  Synthetic oligonucleotide
ctactgcaccccatctgccagcatggaatggaagatgcacatggagaagtcttgg

SEQ ID NO: 379290 - DNA, 51 bp, Artificial
  Synthetic oligonucleotide
ctactgcacgcccgcctgtggtaattgaacctgtaggtgcaggcgagccct

SEQ ID NO: 379291 - DNA, 60 bp, Artificial
  Synthetic oligonucleotide
ctactgcagaagccaagaatctcacagcaaatttagacctagatataatcacaccagtga

SEQ ID NO: 379292 - DNA, 55 bp, Artificial
  Synthetic oligonucleotide
ctactgcattaaccgaactagacaacaatgcagtaggggtaaattttccgcgttc

SEQ ID NO: 379293 - DNA, 57 bp, Artificial
  Synthetic oligonucleotide
ctactgcccaaccattaatcccgtttctagatatattcggatcggtaaacgcttgca

SEQ ID NO: 379294 - DNA, 55 bp, Artificial
  Synthetic oligonucleotide
ctactgcctacaagcgtgggcaagacaacgcccgcaaaacgatttctgttggcaa

SEQ ID NO: 379295 - DNA, 55 bp, Artificial
  Synthetic oligonucleotide
ctactgcgacgaaataacgatctattcaaccacacacaaagccaaacacgactgt

SEQ ID NO: 379296 - DNA, 60 bp, Artificial
  Synthetic oligonucleotide
ctactgcggctctgtgatggttgcagatgctggagtttggaaaggcatttgtggcattca

SEQ ID NO: 379297 - DNA, 60 bp, Artificial
  Synthetic oligonucleotide
ctactgcggtgcaccaatcttaggtccagggagtgccccaaagctcagcaccaagactaa

SEQ ID NO: 379298 - DNA, 60 bp, Artificial
  Synthetic oligonucleotide
ctactgctactgcacacagtgccaactccacagaaaactctcaaacttttaagaggtatg

SEQ ID NO: 379299 - DNA, 59 bp, Artificial
  Synthetic oligonucleotide
ctactgctcagtccactatgaaagcagaagaacttacaccaggccggtttcgtacaata

SEQ ID NO: 379300 - DNA, 60 bp, Artificial
  Synthetic oligonucleotide
ctactgctggtgacagttattggcattcctcccataggcttcaaaatgactattgtgata

SEQ ID NO: 379301 - DNA, 55 bp, Artificial
  Synthetic oligonucleotide
ctactggagaccagaacaaccaatcagttcctagctgtctcaaagggaaactgct

SEQ ID NO: 379302 - DNA, 60 bp, Artificial
  Synthetic oligonucleotide
ctactggcacagtgcatacacctatgtcagatacaaccccatgtcagacaaaggcatagg

SEQ ID NO: 379303 - DNA, 60 bp, Artificial
  Synthetic oligonucleotide
ctactggcattatgtttgagctgagccgatgtgttatgacgctcgcatatgctgagagag

SEQ ID NO: 379304 - DNA, 55 bp, Artificial
  Synthetic oligonucleotide
ctactggcccagcttatgaggatccctgctactctcggtgagttgctcgccgggg

SEQ ID NO: 379305 - DNA, 60 bp, Artificial
  Synthetic oligonucleotide
ctactggccgcacgacctggagcattcatgctagcggagcttggatgaccacagaggaca

SEQ ID NO: 379306 - DNA, 55 bp, Artificial
  Synthetic oligonucleotide
ctactggctcaccagtcgttaggcaggtggaggtgttgctacctctatcgtcacc

SEQ ID NO: 379307 - DNA, 60 bp, Artificial
  Synthetic oligonucleotide
ctactggctccgataatacagatcgaaccaaactcgttttcgcaacatacgatctcgctc

SEQ ID NO: 379308 - DNA, 59 bp, Artificial
  Synthetic oligonucleotide
ctactgggagtgcgggattccgagtgtccttttatctattactcgtgttgtgagatatg

SEQ ID NO: 379309 - DNA, 60 bp, Artificial
  Synthetic oligonucleotide
ctactgggtacactgagcctagtgtgtcctctgtgcgcgcccaaaacgtaacgacatggc

SEQ ID NO: 379310 - DNA, 57 bp, Artificial
  Synthetic oligonucleotide
ctactggtatcagatgggggtccaaacctatacaacatcagaaacctacacatcccg

SEQ ID NO: 379311 - DNA, 55 bp, Artificial
  Synthetic oligonucleotide
ctactggtggtcgagaggacaatcaaccccagcaacgtactcagcttcccctggc

SEQ ID NO: 379312 - DNA, 56 bp, Artificial
  Synthetic oligonucleotide
ctactggttggtgaatatatttgcactagggaatgggttgggtgggccatttatcc

SEQ ID NO: 379313 - DNA, 60 bp, Artificial
  Synthetic oligonucleotide
ctactggttgtacctgacactgaagatgtggagttcgttgagaacgataatgttatcgtc

SEQ ID NO: 379314 - DNA, 55 bp, Artificial
  Synthetic oligonucleotide
ctactggtttcagatagctgctcaatggtactcaaatacgaacacaaaagcagtt

SEQ ID NO: 379315 - DNA, 55 bp, Artificial
  Synthetic oligonucleotide
ctactgtactcaattctgtggtgaatcaattggcttgctatactgtgttggccac

SEQ ID NO: 379316 - DNA, 55 bp, Artificial
  Synthetic oligonucleotide
ctactgtagaacctgtgctagatggtccataccaaccaacttcgtttaaacctcc

SEQ ID NO: 379317 - DNA, 55 bp, Artificial
  Synthetic oligonucleotide
ctactgtcagttcgcgtgtgggtttaataaacttgcgtgcggctatcacgcaagg

SEQ ID NO: 379318 - DNA, 60 bp, Artificial
  Synthetic oligonucleotide
ctactgtcatcctacaacccagctacaatcctttctgatcaggtcgacagcagacgggca

SEQ ID NO: 379319 - DNA, 60 bp, Artificial
  Synthetic oligonucleotide
ctactgtccaaggacccagagtccaggactgcggtgagagggctgctagcatcactaacg

SEQ ID NO: 379320 - DNA, 55 bp, Artificial
  Synthetic oligonucleotide
ctactgtccattcctactcagctgacatactggggcatggactcaagggtgaccg

SEQ ID NO: 379321 - DNA, 55 bp, Artificial
  Synthetic oligonucleotide
ctactgtccttttagatgagaatggagtgggccctctatgcaaaggagacggcct

SEQ ID NO: 379322 - DNA, 55 bp, Artificial
  Synthetic oligonucleotide
ctactgtcgctgagcttcagcgccttaaaatgaaggtaggtaaaacccgggagtc

SEQ ID NO: 379323 - DNA, 56 bp, Artificial
  Synthetic oligonucleotide
ctactgtctattcagtgaaccaactgaaccattagtattactatgtttttagggtg

SEQ ID NO: 379324 - DNA, 60 bp, Artificial
  Synthetic oligonucleotide
ctactgtgaagaacgacatgagggatggctttcaagttatcaagaagtggtccgcaactg

SEQ ID NO: 379325 - DNA, 55 bp, Artificial
  Synthetic oligonucleotide
ctactgtgatacagcgaagctgttcaatagcacgtggatttggaatagtactcgg

SEQ ID NO: 379326 - DNA, 55 bp, Artificial
  Synthetic oligonucleotide
ctactgtgcaccacctctgcaccccacgccgaccacgcctaaccatggcgttagt

SEQ ID NO: 379327 - DNA, 60 bp, Artificial
  Synthetic oligonucleotide
ctactgtgccttggaatgctagttggagtaataaatctcatgatttcatttgggaaaaca

SEQ ID NO: 379328 - DNA, 55 bp, Artificial
  Synthetic oligonucleotide
ctactgttaaagtaccagtcctcgcctatggtggggaggcttccgggctcctaca

SEQ ID NO: 379329 - DNA, 56 bp, Artificial
  Synthetic oligonucleotide
ctactgttaacggtaggttcagatacaggtcggagttatatcgggaacgtgatgta

SEQ ID NO: 379330 - DNA, 60 bp, Artificial
  Synthetic oligonucleotide
ctactgttcgtgtgctcaagaacggtactcttacgtaccgatacaagactgatgcccaga

SEQ ID NO: 379331 - DNA, 55 bp, Artificial
  Synthetic oligonucleotide
ctactgttggaataacaacgtagaccatgccagaattaagagggcaggtaactct

SEQ ID NO: 379332 - DNA, 55 bp, Artificial
  Synthetic oligonucleotide
ctacttaactcataccaaccaacagttgctttagacaacgttgggcctgtatacc

SEQ ID NO: 379333 - DNA, 54 bp, Artificial
  Synthetic oligonucleotide
ctacttaagggaagcggcgaaccgcaaacagttgcggcccaggtgtggggagac

SEQ ID NO: 379334 - DNA, 55 bp, Artificial
  Synthetic oligonucleotide
ctacttaataacacggatcgatgacgtgtcagtcatgtgtgtttgttaccggccc

SEQ ID NO: 379335 - DNA, 57 bp, Artificial
  Synthetic oligonucleotide
ctacttacacctggggggagaatgagtctgatgtcttccttctaaactcgaccagac

SEQ ID NO: 379336 - DNA, 53 bp, Artificial
  Synthetic oligonucleotide
ctacttacatatcctttcccaatcttggtaagacagaaccgaaccggtctagg

SEQ ID NO: 379337 - DNA, 57 bp, Artificial
  Synthetic oligonucleotide
ctacttagcgctaatgtttcccggacagattatacttgatctcaaaatcgatcccgg

SEQ ID NO: 379338 - DNA, 55 bp, Artificial
  Synthetic oligonucleotide
ctacttagtaatgaaccgtatctgatggtgattgcactgatgtcaccaagcgtac

SEQ ID NO: 379339 - DNA, 55 bp, Artificial
  Synthetic oligonucleotide
ctacttagttgacccagtaggtaccatcctcgcgtttcaacctgacacctaccta

SEQ ID NO: 379340 - DNA, 60 bp, Artificial
  Synthetic oligonucleotide
ctacttataaaaacaggactccgatagttattgaggcacaaacatcaggagataatatga

SEQ ID NO: 379341 - DNA, 56 bp, Artificial
  Synthetic oligonucleotide
ctacttatagcgagaatttttgagttctgcgatcaacccactaaagaaatagaacg

SEQ ID NO: 379342 - DNA, 58 bp, Artificial
  Synthetic oligonucleotide
ctacttatcacctcctcacttggacggaggctcttccggttaacagcttcactgttga

SEQ ID NO: 379343 - DNA, 60 bp, Artificial
  Synthetic oligonucleotide
ctacttcacagcagaagtgtcccattgcagggccactgagtacataatgaagggagtgta

SEQ ID NO: 379344 - DNA, 60 bp, Artificial
  Synthetic oligonucleotide
ctacttccatgtctcaggacggatctaacgcgttctgtcctaagcatcccaaagtgaaga

SEQ ID NO: 379345 - DNA, 60 bp, Artificial
  Synthetic oligonucleotide
ctacttccattttaacatgtctagtgcaatgtatgaaacaattatcaaatcgaagtcctc

SEQ ID NO: 379346 - DNA, 55 bp, Artificial
  Synthetic oligonucleotide
ctacttcgggaaacctagtaccatcatgaagattgcaaagcgtttcgctcagcac

SEQ ID NO: 379347 - DNA, 54 bp, Artificial
  Synthetic oligonucleotide
ctacttcgtaggtattttacacagccccaaggtaagattgagttagtggagaaa

SEQ ID NO: 379348 - DNA, 55 bp, Artificial
  Synthetic oligonucleotide
ctacttcgtcaaggagtgagatgccgacctacttcgggagcgacccgattgacga

SEQ ID NO: 379349 - DNA, 60 bp, Artificial
  Synthetic oligonucleotide
ctacttgaacgccactcatcgcaatccacgcaatttggctaatgcgctaggcatctactc

SEQ ID NO: 379350 - DNA, 59 bp, Artificial
  Synthetic oligonucleotide
ctacttgacactacacagttgcaagtagctaatagtttaatgaatggtgtcacccttag

SEQ ID NO: 379351 - DNA, 60 bp, Artificial
  Synthetic oligonucleotide
ctacttgcaacgggattagaagacagccagttgtatcagagacagaagacctatagcaca

SEQ ID NO: 379352 - DNA, 57 bp, Artificial
  Synthetic oligonucleotide
ctacttgcgcagcccgaacaacctaaccaatcacctagccttcaatcacttcctaaa

SEQ ID NO: 379353 - DNA, 60 bp, Artificial
  Synthetic oligonucleotide
ctacttgcgcctataaagcccaactgtctgtgacccttcacaacgatttctagatgattc

SEQ ID NO: 379354 - DNA, 52 bp, Artificial
  Synthetic oligonucleotide
ctacttgctattaaataaaagcctatgcagtgttgagggatgggttgtaata

SEQ ID NO: 379355 - DNA, 56 bp, Artificial
  Synthetic oligonucleotide
ctacttgctattaccgtgtacaaataaatgcgcgcttttactgggtctagtaatgg

SEQ ID NO: 379356 - DNA, 56 bp, Artificial
  Synthetic oligonucleotide
ctacttgctttagctaaaaaggactcaagtaccaatataattgctgtaactcctaa

SEQ ID NO: 379357 - DNA, 58 bp, Artificial
  Synthetic oligonucleotide
ctacttggggaggtgagatcgaagaatctttgattcttgcattggaattttccttcga

SEQ ID NO: 379358 - DNA, 55 bp, Artificial
  Synthetic oligonucleotide
ctacttggtacgtcttgaaatagaggggatttggtgtctcccagatatagacgcc

SEQ ID NO: 379359 - DNA, 60 bp, Artificial
  Synthetic oligonucleotide
ctacttggtgcaactaatacgattcctgaacagactctcaacctcgatatctcgtttaca

SEQ ID NO: 379360 - DNA, 55 bp, Artificial
  Synthetic oligonucleotide
ctacttggttgaatgcaccacccttagatgacttgactgatactggaccacgtgg

SEQ ID NO: 379361 - DNA, 60 bp, Artificial
  Synthetic oligonucleotide
ctacttgtccacgctgtgaaggtactggtattgagcgcatatcagaggagaccttgtacc

SEQ ID NO: 379362 - DNA, 56 bp, Artificial
  Synthetic oligonucleotide
ctacttgtgatgcggaatcacctgggtctaatacactcccccctaatcgattaagg

SEQ ID NO: 379363 - DNA, 57 bp, Artificial
  Synthetic oligonucleotide
ctacttgttgttatgcgtactcctacaatggacgtcgccagtgtaaaggagtttaca

SEQ ID NO: 379364 - DNA, 60 bp, Artificial
  Synthetic oligonucleotide
ctactttacagacacacaaggtcagatcacactatcaaagaaaaccagtgaatgtggatt

SEQ ID NO: 379365 - DNA, 55 bp, Artificial
  Synthetic oligonucleotide
ctactttacatcgctagatcgacacaaaatctactttacatcgctagatcgacac

SEQ ID NO: 379366 - DNA, 54 bp, Artificial
  Synthetic oligonucleotide
ctactttacttactcgggtagcattccctacctggattcaactttctatcttag

SEQ ID NO: 379367 - DNA, 55 bp, Artificial
  Synthetic oligonucleotide
ctactttagaaccagttaggtcttggatcgctgcattaatttctgtatgcgagaa

SEQ ID NO: 379368 - DNA, 57 bp, Artificial
  Synthetic oligonucleotide
ctactttagcggatgtgtatactgttcttcgacccgaattcgcgatacacggcgtaa

SEQ ID NO: 379369 - DNA, 50 bp, Artificial
  Synthetic oligonucleotide
ctactttcctcactgtgattggtttcgtccttaccatcatagccgtggcg

SEQ ID NO: 379370 - DNA, 57 bp, Artificial
  Synthetic oligonucleotide
ctactttctgtatttcgcaagaggtttgcatccccacttttgctcacctcttacctc

SEQ ID NO: 379371 - DNA, 59 bp, Artificial
  Synthetic oligonucleotide
ctactttgaagctgtggatccagctgattcatatgaaaaacacgtaacacgctttaatc

SEQ ID NO: 379372 - DNA, 52 bp, Artificial
  Synthetic oligonucleotide
ctactttgattggatgcagagtgaagccatggaactggagggtgcaaaagac

SEQ ID NO: 379373 - DNA, 60 bp, Artificial
  Synthetic oligonucleotide
ctactttgcgagccttttgccgtgcttacgcacctatagtctggaactacatgattggga

SEQ ID NO: 379374 - DNA, 55 bp, Artificial
  Synthetic oligonucleotide
ctactttgtaattcttaggcaaaggctacatgacattggtcatcacctcaaggca

SEQ ID NO: 379375 - DNA, 51 bp, Artificial
  Synthetic oligonucleotide
ctactttgtatttagtgctgtagttaggatcgtttacacgctaaggggaac

SEQ ID NO: 379376 - DNA, 52 bp, Artificial
  Synthetic oligonucleotide
ctactttgtctataattttcaaggggaaagggtgtcaaccaccgagactggg

SEQ ID NO: 379377 - DNA, 55 bp, Artificial
  Synthetic oligonucleotide
ctactttgtgtaaccccacatcattcaacgcaacgctgaatcaattttgtccgtc

SEQ ID NO: 379378 - DNA, 49 bp, Artificial
  Synthetic oligonucleotide
ctacttttctacccttcctttttactttgtcggaaacattagtgttagg

SEQ ID NO: 379379 - DNA, 55 bp, Artificial
  Synthetic oligonucleotide
ctacttttcttcattgggcgaatatacagatggtcgggtcagtggatatgaaggc

SEQ ID NO: 379380 - DNA, 57 bp, Artificial
  Synthetic oligonucleotide
ctacttttggaagttatcaggcctaaaactaccagacgatctcttagagtatgctag

SEQ ID NO: 379381 - DNA, 55 bp, Artificial
  Synthetic oligonucleotide
ctagaaaacacttgtgtatccccaacgctttcctcaggttgtaattgaactgtat

SEQ ID NO: 379382 - DNA, 57 bp, Artificial
  Synthetic oligonucleotide
ctagaaaacagtactatgtgaactttgaaaaagacgctcgcaaatactctagtactg

SEQ ID NO: 379383 - DNA, 60 bp, Artificial
  Synthetic oligonucleotide
ctagaaaacattgtagaggggctgtctggacatgctcaacctcagacgatgctagaaagt

SEQ ID NO: 379384 - DNA, 58 bp, Artificial
  Synthetic oligonucleotide
ctagaaaaggttgaggctaacaaaacacgcacttttacagctgctcctatggacacat

SEQ ID NO: 379385 - DNA, 59 bp, Artificial
  Synthetic oligonucleotide
ctagaaaagtgggagattgatctgagagtggctcaaacgttgctgcctacgaacgttcc

SEQ ID NO: 379386 - DNA, 53 bp, Artificial
  Synthetic oligonucleotide
ctagaaaatatttttgtaggaggggctgggttaggggatacaggcggagagaa

SEQ ID NO: 379387 - DNA, 60 bp, Artificial
  Synthetic oligonucleotide
ctagaaaatggaatcaaggtcattttgtaacgaaatttgccctcatgctctgcgaattca

SEQ ID NO: 379388 - DNA, 55 bp, Artificial
  Synthetic oligonucleotide
ctagaaactctgtccatgtatgcggcccgctaaatataggtgcatttcgcgattc

SEQ ID NO: 379389 - DNA, 54 bp, Artificial
  Synthetic oligonucleotide
ctagaaactggttaaacgaagcattagataatttaggtcaaacgtggtcaccaa

SEQ ID NO: 379390 - DNA, 55 bp, Artificial
  Synthetic oligonucleotide
ctagaaagagagttggtccgcaaaacgaggttcctcccagtagctggtggaacaa

SEQ ID NO: 379391 - DNA, 59 bp, Artificial
  Synthetic oligonucleotide
ctagaaatgtcgtacctttatcattaacctcaagaacagttatacataagagagcacaa

SEQ ID NO: 379392 - DNA, 59 bp, Artificial
  Synthetic oligonucleotide
ctagaaattccccactggcaacagtgttctagcctgcgtggctgcctgcgtaccccctg

SEQ ID NO: 379393 - DNA, 55 bp, Artificial
  Synthetic oligonucleotide
ctagaaatttaacggagtgctatgcagtaaggaagtatccattacgatgtttcga

SEQ ID NO: 379394 - DNA, 55 bp, Artificial
  Synthetic oligonucleotide
ctagaacaaagtggtttgccagtaggtggaaacgagaagaaggccaaactgtcaa

SEQ ID NO: 379395 - DNA, 54 bp, Artificial
  Synthetic oligonucleotide
ctagaacacgtgtatcaaaactgtatggtttaccagcggcgaacccaaacggcg

SEQ ID NO: 379396 - DNA, 55 bp, Artificial
  Synthetic oligonucleotide
ctagaacagatacaactatcaagctcagatagtgaattggatgacacttgtgaag

SEQ ID NO: 379397 - DNA, 54 bp, Artificial
  Synthetic oligonucleotide
ctagaacattccgaatcggacgatttccacctgaaaaggtgagacctttgggtc

SEQ ID NO: 379398 - DNA, 59 bp, Artificial
  Synthetic oligonucleotide
ctagaaccacagttagattagatgaggatgtgaataaacttagaatgatgctgtcgtct

SEQ ID NO: 379399 - DNA, 55 bp, Artificial
  Synthetic oligonucleotide
ctagaaccctctatagaactattaatcttgttcctacacgtggcggccatccgaa

SEQ ID NO: 379400 - DNA, 55 bp, Artificial
  Synthetic oligonucleotide
ctagaaccgaacccaaaattcctgctggagtcgaatttggaccggaagctctcac

SEQ ID NO: 379401 - DNA, 60 bp, Artificial
  Synthetic oligonucleotide
ctagaaccgtgtggcactacattgaacaaaagattttgcctaatatcacatcatacatgc

SEQ ID NO: 379402 - DNA, 55 bp, Artificial
  Synthetic oligonucleotide
ctagaacctccacgtgagcggaggtgcgtacctgctaattttccattgttaggtc

SEQ ID NO: 379403 - DNA, 57 bp, Artificial
  Synthetic oligonucleotide
ctagaacggaacgtcactgtgacccatgccaaggacatcctcgagaaaacccataac

SEQ ID NO: 379404 - DNA, 57 bp, Artificial
  Synthetic oligonucleotide
ctagaacggtcagaataacaggagctcctgtaaagaagaggtcaggggttagcaaga

SEQ ID NO: 379405 - DNA, 55 bp, Artificial
  Synthetic oligonucleotide
ctagaacgtttgctgtgtatgttacgcaacaataattcgtgcgactcgaaactct

SEQ ID NO: 379406 - DNA, 59 bp, Artificial
  Synthetic oligonucleotide
ctagaactcgatacagaactcactgctgtggttggcgcccaaattcataaaacggatcg

SEQ ID NO: 379407 - DNA, 55 bp, Artificial
  Synthetic oligonucleotide
ctagaactctcttggcatcacggaatctccacacaaattccgaatcatcactcct

SEQ ID NO: 379408 - DNA, 60 bp, Artificial
  Synthetic oligonucleotide
ctagaacttttgactcaagatcaagcttggaatggggtgtgatggtctacgattattctg

SEQ ID NO: 379409 - DNA, 58 bp, Artificial
  Synthetic oligonucleotide
ctagaagaacatcccagtgctggaaaggatcccaagaaaactggaggacctatatata

SEQ ID NO: 379410 - DNA, 55 bp, Artificial
  Synthetic oligonucleotide
ctagaagacagatgattgattttcaggaagggaaaatacttgacccagaactcca

SEQ ID NO: 379411 - DNA, 56 bp, Artificial
  Synthetic oligonucleotide
ctagaagataagaaccattagcttgtttaatgaatgttaaaacgactgacttgtag

SEQ ID NO: 379412 - DNA, 60 bp, Artificial
  Synthetic oligonucleotide
ctagaagatagttatcggccctgaccaggtacgaggcgaatctagcaactctggataata

SEQ ID NO: 379413 - DNA, 55 bp, Artificial
  Synthetic oligonucleotide
ctagaagatgaagatgatccttttgacgagaaagcgtggataaaagctaatccag

SEQ ID NO: 379414 - DNA, 60 bp, Artificial
  Synthetic oligonucleotide
ctagaagcagaagtaatcccagcagaaacaggacaagacacagcctacttcatactaaag

SEQ ID NO: 379415 - DNA, 55 bp, Artificial
  Synthetic oligonucleotide
ctagaagcatttataagcaaaattcccgcgttagcgacaaaaggtggagcttggg

SEQ ID NO: 379416 - DNA, 60 bp, Artificial
  Synthetic oligonucleotide
ctagaagctcctccagaaattgaccgtgtcgttcagtacacatatgaaattgcacgactt

SEQ ID NO: 379417 - DNA, 59 bp, Artificial
  Synthetic oligonucleotide
ctagaaggagagagatgggtgcgagagcgtcaatattaaccgggggaaaattggatgca

SEQ ID NO: 379418 - DNA, 56 bp, Artificial
  Synthetic oligonucleotide
ctagaaggagtcaacaaaccataatcccgaatattggatccagaccttgggtcagg

SEQ ID NO: 379419 - DNA, 59 bp, Artificial
  Synthetic oligonucleotide
ctagaaggagttgattcaagaagaggtttgactgatcaaagttatattcaatgactgtt

SEQ ID NO: 379420 - DNA, 60 bp, Artificial
  Synthetic oligonucleotide
ctagaagtagtacccccaaagcttttgcaagagcttatgctcgtgctcgtgatctttata

SEQ ID NO: 379421 - DNA, 58 bp, Artificial
  Synthetic oligonucleotide
ctagaagtttataaataccagtgtcgagttagatgttcagacaacaaatggctaggta

SEQ ID NO: 379422 - DNA, 57 bp, Artificial
  Synthetic oligonucleotide
ctagaatagctacacaggtacaaatcttaaagctagaaaatgggagcaagtaaagag

SEQ ID NO: 379423 - DNA, 55 bp, Artificial
  Synthetic oligonucleotide
ctagaatagtaccaaacggttctagaaaactcgctattggtaagctcatagtccc

SEQ ID NO: 379424 - DNA, 57 bp, Artificial
  Synthetic oligonucleotide
ctagaatataaagacgtcactgaaaacgcaactttactgtctatactatcgtattcg

SEQ ID NO: 379425 - DNA, 60 bp, Artificial
  Synthetic oligonucleotide
ctagaatatgacctttctgatgactgttgtcagtcaccattgtgccacatcctgttatca

SEQ ID NO: 379426 - DNA, 60 bp, Artificial
  Synthetic oligonucleotide
ctagaatcaagcttaaggatgactcatgcatggaggaccggaatgggataaaacaacaca

SEQ ID NO: 379427 - DNA, 60 bp, Artificial
  Synthetic oligonucleotide
ctagaatctcacaaaaaaagctgtccacatggacagtgtccatactgtctcaacccaact

SEQ ID NO: 379428 - DNA, 60 bp, Artificial
  Synthetic oligonucleotide
ctagaatgaagcaagaggcttttgctgatgtcggcaaccgttgcatgacttatgccggtt

SEQ ID NO: 379429 - DNA, 56 bp, Artificial
  Synthetic oligonucleotide
ctagaatgagcggtacctggtgtccacccgtccacaatgtcccggggctggaacga

SEQ ID NO: 379430 - DNA, 56 bp, Artificial
  Synthetic oligonucleotide
ctagaatgcttaagtacaactacccaacaaaatcagggtattgtggtgggattcta

SEQ ID NO: 379431 - DNA, 58 bp, Artificial
  Synthetic oligonucleotide
ctagaattcgaccagtggctagagacgtcacaggacctaaagaaggcattcaactacg

SEQ ID NO: 379432 - DNA, 54 bp, Artificial
  Synthetic oligonucleotide
ctagaattttggctagacgtcactctggctaggggtaggcttacgtcgggttat

SEQ ID NO: 379433 - DNA, 55 bp, Artificial
  Synthetic oligonucleotide
ctagacaaaaggcctcccacacaaatgatataagacaactagcagaagtaatcca

SEQ ID NO: 379434 - DNA, 53 bp, Artificial
  Synthetic oligonucleotide
ctagacaaacgggtacagttaagggcttaagtagtacataagccccagccacg

SEQ ID NO: 379435 - DNA, 55 bp, Artificial
  Synthetic oligonucleotide
ctagacaaaggcgtcaatagactgttaactaacagttatagtatcaaacgcaatg

SEQ ID NO: 379436 - DNA, 60 bp, Artificial
  Synthetic oligonucleotide
ctagacaaatggataaccgagaagcatgccaacgataacttcgctcaagctcttaaggct

SEQ ID NO: 379437 - DNA, 59 bp, Artificial
  Synthetic oligonucleotide
ctagacaagagaaagcgtctagaggtaaagggcattgacgtcacagggttcctggatga

SEQ ID NO: 379438 - DNA, 53 bp, Artificial
  Synthetic oligonucleotide
ctagacaataaccaggatgggtaaagtctttaaaatgatcgaggggaaaatta

SEQ ID NO: 379439 - DNA, 54 bp, Artificial
  Synthetic oligonucleotide
ctagacacaccgaacgaatatattcttgggataaatattccaaacataaccggg

SEQ ID NO: 379440 - DNA, 60 bp, Artificial
  Synthetic oligonucleotide
ctagacacactccagtcaattcctggctaggcaacatcattatgtatgcgcccaccctat

SEQ ID NO: 379441 - DNA, 59 bp, Artificial
  Synthetic oligonucleotide
ctagacaccgcctcagctctgtatcgggaggccttagagtctccggaacattgttcacc

SEQ ID NO: 379442 - DNA, 53 bp, Artificial
  Synthetic oligonucleotide
ctagacactgcgataaatcccgatgatagaccgctatcagagattccaactga

SEQ ID NO: 379443 - DNA, 55 bp, Artificial
  Synthetic oligonucleotide
ctagacagtccgtctacatctccacaacaacgccgtcacattgaaggcgagttgc

SEQ ID NO: 379444 - DNA, 55 bp, Artificial
  Synthetic oligonucleotide
ctagacagtgttaacggtgtgttaagtgacttacaagacgctattgataagggtc

SEQ ID NO: 379445 - DNA, 51 bp, Artificial
  Synthetic oligonucleotide
ctagacataacattctgcgagcacgaaatgaatttagttgtgaggaaacca

SEQ ID NO: 379446 - DNA, 55 bp, Artificial
  Synthetic oligonucleotide
ctagacatcactattcctagaattcaaaatcccttgatctcaggccttaggacat

SEQ ID NO: 379447 - DNA, 60 bp, Artificial
  Synthetic oligonucleotide
ctagacatctttgaagacctcaaaagaaggtaccctgagctatctgtggacaatgaagat

SEQ ID NO: 379448 - DNA, 55 bp, Artificial
  Synthetic oligonucleotide
ctagacatgtgattaacaccaatactgtatctgaatctagcgtagaggcattcta

SEQ ID NO: 379449 - DNA, 59 bp, Artificial
  Synthetic oligonucleotide
ctagaccaaaggataatcatcctctacatgctccattggggaaaagaagcagtaaacca

SEQ ID NO: 379450 - DNA, 60 bp, Artificial
  Synthetic oligonucleotide
ctagaccaatatgcaaatcatatgggtatttctagaagatcgcatcaaattagattctca

SEQ ID NO: 379451 - DNA, 58 bp, Artificial
  Synthetic oligonucleotide
ctagaccaccgctgggcaattggttcggttgtacctggatgaactcaactggattcac

SEQ ID NO: 379452 - DNA, 60 bp, Artificial
  Synthetic oligonucleotide
ctagaccacctgctggaatataacccaccacaagatgacatttcaaatgttatagcaaca

SEQ ID NO: 379453 - DNA, 55 bp, Artificial
  Synthetic oligonucleotide
ctagaccaggccctcctgacgtacacaacaactggccgccgcagtgcactgtacc

SEQ ID NO: 379454 - DNA, 55 bp, Artificial
  Synthetic oligonucleotide
ctagaccatactaggtgaagttgtgggaagcttcgaaaataattcccgtgggcaa

SEQ ID NO: 379455 - DNA, 57 bp, Artificial
  Synthetic oligonucleotide
ctagaccatctgttaggcgaagattgtcatatgagccagtggagagacctttggtcc

SEQ ID NO: 379456 - DNA, 59 bp, Artificial
  Synthetic oligonucleotide
ctagaccgagacacccccctctgcacggatgaaaccatgtacaccgctctctctcgggc

SEQ ID NO: 379457 - DNA, 55 bp, Artificial
  Synthetic oligonucleotide
ctagaccgtacgtacgtcattcgcagtctcacacggtacggagaggacgtgtcgt

SEQ ID NO: 379458 - DNA, 55 bp, Artificial
  Synthetic oligonucleotide
ctagacctagctctgttgcctctacagtctccacccgctcaaccttggttagcgg

SEQ ID NO: 379459 - DNA, 56 bp, Artificial
  Synthetic oligonucleotide
ctagacctccggtcagtggaaccaggtatgctagagttccaggtgttcccgacgag

SEQ ID NO: 379460 - DNA, 55 bp, Artificial
  Synthetic oligonucleotide
ctagaccttcacaaccacctgtccactggccattggcgtctgaaatggatcagcc

SEQ ID NO: 379461 - DNA, 55 bp, Artificial
  Synthetic oligonucleotide
ctagacgaaataggtttagacgccattttcgcagaagaacttaccgaagacgctg

SEQ ID NO: 379462 - DNA, 58 bp, Artificial
  Synthetic oligonucleotide
ctagacgagaacagtgttatgctaggcattactttgttagagggggtgctgtagggga

SEQ ID NO: 379463 - DNA, 60 bp, Artificial
  Synthetic oligonucleotide
ctagacgatgtgaaacaaagctcggtgatggccagcaaagaattctgcatgaaggtcgaa

SEQ ID NO: 379464 - DNA, 55 bp, Artificial
  Synthetic oligonucleotide
ctagacggactgtcttattgtatcgcgtgtgcatctttgagggtaaacgaactcg

SEQ ID NO: 379465 - DNA, 57 bp, Artificial
  Synthetic oligonucleotide
ctagacggagactgcttgattaactcaatggtgcattcagatgacaatcaaacatcg

SEQ ID NO: 379466 - DNA, 58 bp, Artificial
  Synthetic oligonucleotide
ctagacgtaccactcttcttacgaaatgcttgaacgcagcgacgggaagcacttacac

SEQ ID NO: 379467 - DNA, 55 bp, Artificial
  Synthetic oligonucleotide
ctagacgtgtcattcactcgccttgtaggcctgtggttgggcggcgccatgtggg

SEQ ID NO: 379468 - DNA, 55 bp, Artificial
  Synthetic oligonucleotide
ctagactcgaatcaattccccatcttgagggagattctttcaggagatccctcgg

SEQ ID NO: 379469 - DNA, 55 bp, Artificial
  Synthetic oligonucleotide
ctagactcgtggtggacttctctcaattttccagggggaacacccgtgtgtcttg

SEQ ID NO: 379470 - DNA, 60 bp, Artificial
  Synthetic oligonucleotide
ctagactgtcacttccacagtcaagaaaactatgagttagcgtgtaatgaacgcattaac

SEQ ID NO: 379471 - DNA, 58 bp, Artificial
  Synthetic oligonucleotide
ctagactgttcaccataagacaggaactggctagcaggggtctatgggattcctttcg

SEQ ID NO: 379472 - DNA, 50 bp, Artificial
  Synthetic oligonucleotide
ctagacttaactaccagtgcgggctacccttacgtggctttgggcattaa

SEQ ID NO: 379473 - DNA, 55 bp, Artificial
  Synthetic oligonucleotide
ctagacttgtaggaatgttgaaatatggtggaagagtatggacatttcatggtga

SEQ ID NO: 379474 - DNA, 60 bp, Artificial
  Synthetic oligonucleotide
ctagacttgtgctcctggtgatgcaatctaaaataccgtttgagtcgtggactgccgcct

SEQ ID NO: 379475 - DNA, 55 bp, Artificial
  Synthetic oligonucleotide
ctagactttagggatgtcaagctaatggtctggaaaggggctaccgcttacttcc

SEQ ID NO: 379476 - DNA, 55 bp, Artificial
  Synthetic oligonucleotide
ctagagaaagaacccatagcagaagcagaaactttctatgtagatggagcagcta

SEQ ID NO: 379477 - DNA, 55 bp, Artificial
  Synthetic oligonucleotide
ctagagaaccccggtcgcagacccctcctgcaagcacaggtggcgccggcttagt

SEQ ID NO: 379478 - DNA, 55 bp, Artificial
  Synthetic oligonucleotide
ctagagaacgttggagggataataactcttcagttggcctgctagtttcgagtgt

SEQ ID NO: 379479 - DNA, 60 bp, Artificial
  Synthetic oligonucleotide
ctagagaagggcgaggcaaactgcacgcgtcaacacatgcaggccgccatgtactacatc

SEQ ID NO: 379480 - DNA, 56 bp, Artificial
  Synthetic oligonucleotide
ctagagacaaaattggctgaggtattgcgtctgttaggaatactccccggaataaa

SEQ ID NO: 379481 - DNA, 57 bp, Artificial
  Synthetic oligonucleotide
ctagagacactaggcatcattactaacccattggctgtcgaggcacatacgcatggg

SEQ ID NO: 379482 - DNA, 60 bp, Artificial
  Synthetic oligonucleotide
ctagagacactcttgagcatctcctcctgttaattggagacattatataggtgtctctaa

SEQ ID NO: 379483 - DNA, 60 bp, Artificial
  Synthetic oligonucleotide
ctagagaccagcaaacaaatgctgcctcagctttcacgccgatcgaacctgagtcacgag

SEQ ID NO: 379484 - DNA, 60 bp, Artificial
  Synthetic oligonucleotide
ctagagaccgttgcaaggcgggctatggagcgtccatggagccttgcaagcctctgcgtg

SEQ ID NO: 379485 - DNA, 60 bp, Artificial
  Synthetic oligonucleotide
ctagagacgggatgggcctacacacatcaaggagggatcagctcagtagaccatgtcaca

SEQ ID NO: 379486 - DNA, 55 bp, Artificial
  Synthetic oligonucleotide
ctagagagaggaagaggcatgttgacttggtcaactggtgtctcgcaaactgggt

SEQ ID NO: 379487 - DNA, 55 bp, Artificial
  Synthetic oligonucleotide
ctagagagcagtcaaacgccgaagtccctagtggctttgtactcgcaagacctgc

SEQ ID NO: 379488 - DNA, 60 bp, Artificial
  Synthetic oligonucleotide
ctagagaggccgcccgaacgcagcggtccttcacgtcttgttaatgcgttgatagatgga

SEQ ID NO: 379489 - DNA, 60 bp, Artificial
  Synthetic oligonucleotide
ctagagaggtcacttgccatgccttggaaggtgtacaccataggctttacagaactgatg

SEQ ID NO: 379490 - DNA, 57 bp, Artificial
  Synthetic oligonucleotide
ctagagagtacgcagaattctattcacaatcaaatcaattattgtcgtatggtgacg

SEQ ID NO: 379491 - DNA, 60 bp, Artificial
  Synthetic oligonucleotide
ctagagagtgtgattacaacccacacgacagagtcgaacacataatcaacaacaggacta

SEQ ID NO: 379492 - DNA, 54 bp, Artificial
  Synthetic oligonucleotide
ctagagatacagtgctatatcacgaggaagaggtgggttgcctgctcgccaagc

SEQ ID NO: 379493 - DNA, 55 bp, Artificial
  Synthetic oligonucleotide
ctagagatatctatatcagtcgaagacttctcggaactttcacttggaccctttc

SEQ ID NO: 379494 - DNA, 59 bp, Artificial
  Synthetic oligonucleotide
ctagagatctggaacgcgagagagagaagtacgtcgttggacgtgtcaatttgtttgac

SEQ ID NO: 379495 - DNA, 59 bp, Artificial
  Synthetic oligonucleotide
ctagagatcttggtagtacctccaagggcaatcttgagttggaggaagacaatatcggc

SEQ ID NO: 379496 - DNA, 50 bp, Artificial
  Synthetic oligonucleotide
ctagagatggagaagaagttacagcgcacactacatgctcagttaatgga

SEQ ID NO: 379497 - DNA, 55 bp, Artificial
  Synthetic oligonucleotide
ctagagattaacacgactcgtgctattgctgctcaagtcctaaggcataggtcgt

SEQ ID NO: 379498 - DNA, 55 bp, Artificial
  Synthetic oligonucleotide
ctagagcaatgcaggcttttattggtgacccgagtacaatcatcacacaggcggc

SEQ ID NO: 379499 - DNA, 55 bp, Artificial
  Synthetic oligonucleotide
ctagagccagttttgcgtaccgcggcagaaccgccaagggttgcaggactactcg

SEQ ID NO: 379500 - DNA, 55 bp, Artificial
  Synthetic oligonucleotide
ctagagcgcaattttacggatcaaacggcattgtcacctttaggagatataccac

SEQ ID NO: 379501 - DNA, 55 bp, Artificial
  Synthetic oligonucleotide
ctagagcgtgtttacacgcgcactggagttccctacccgctctgtgaaaatgtgg

SEQ ID NO: 379502 - DNA, 59 bp, Artificial
  Synthetic oligonucleotide
ctagagctaacttaagagagattagaacatttgggcccagtgacatgtatgtgcatgtc

SEQ ID NO: 379503 - DNA, 55 bp, Artificial
  Synthetic oligonucleotide
ctagagctgcccctcccgctgctgcccaatcatcttacatgcgatgcatctcccc

SEQ ID NO: 379504 - DNA, 55 bp, Artificial
  Synthetic oligonucleotide
ctagagctggccagatacctaggcttcaccctaaaatgctacagacatgcaacag

SEQ ID NO: 379505 - DNA, 56 bp, Artificial
  Synthetic oligonucleotide
ctagagcttgtaagaaggaagggtgttgctgtagtaataagcacaattaccctgat

SEQ ID NO: 379506 - DNA, 60 bp, Artificial
  Synthetic oligonucleotide
ctagagctttgaggagatttggcttttcattggctgctggtaggagtgtgtggacattgg

SEQ ID NO: 379507 - DNA, 57 bp, Artificial
  Synthetic oligonucleotide
ctagaggaagtctcagtgaacgctcttaggccaaggaacaaccatttgaatatcaaa

SEQ ID NO: 379508 - DNA, 53 bp, Artificial
  Synthetic oligonucleotide
ctagaggacaccaaataacccatgtggaattaccaaaagtcttttgggacaaa

SEQ ID NO: 379509 - DNA, 55 bp, Artificial
  Synthetic oligonucleotide
ctagaggagattgagaggatgcacgatgatgcagcggcagaacttgagtttgccc

SEQ ID NO: 379510 - DNA, 58 bp, Artificial
  Synthetic oligonucleotide
ctagaggagggacatcaggtgacccaataccagaagatctttttgtagcccctactga

SEQ ID NO: 379511 - DNA, 55 bp, Artificial
  Synthetic oligonucleotide
ctagaggagtggaacctaggttttgtacccagtggagccacatcaatagaggacc

SEQ ID NO: 379512 - DNA, 58 bp, Artificial
  Synthetic oligonucleotide
ctagaggatcctaccactttgaatattaagggaggagctagtcccaccatcttactca

SEQ ID NO: 379513 - DNA, 50 bp, Artificial
  Synthetic oligonucleotide
ctagaggattggaatctgggctttgttccgcccgtccaggcaccaattag

SEQ ID NO: 379514 - DNA, 55 bp, Artificial
  Synthetic oligonucleotide
ctagaggcgccagtgaggccagaccgcagaaagtatggttaagacacccgttgca

SEQ ID NO: 379515 - DNA, 60 bp, Artificial
  Synthetic oligonucleotide
ctagaggggcgacactttgtactgtgattgactccacgctcggtccactggcgggtgtga

SEQ ID NO: 379516 - DNA, 55 bp, Artificial
  Synthetic oligonucleotide
ctagagggggagcttttgtactgtgtttgactccacgttcggtctactggcgagt

SEQ ID NO: 379517 - DNA, 60 bp, Artificial
  Synthetic oligonucleotide
ctagaggggtaacactttgtactgtgcttgactccacgctcggtccaccagcgagtgtga

SEQ ID NO: 379518 - DNA, 55 bp, Artificial
  Synthetic oligonucleotide
ctagaggtactttctaaggaacctgttaaagatgtcactgctgaggtgaccctcg

SEQ ID NO: 379519 - DNA, 56 bp, Artificial
  Synthetic oligonucleotide
ctagaggtagtgagccatcatataatttcaagttagtggtctcatcaagatcaata

SEQ ID NO: 379520 - DNA, 60 bp, Artificial
  Synthetic oligonucleotide
ctagaggtgcgctccgagacaatcaggaggcttgacccgcagccagatgacaggctactg

SEQ ID NO: 379521 - DNA, 55 bp, Artificial
  Synthetic oligonucleotide
ctagaggttacatggagcgttcagaaggaacaggacgtttgacatatgaccaagg

SEQ ID NO: 379522 - DNA, 55 bp, Artificial
  Synthetic oligonucleotide
ctagaggttccttgagaatgtagtctcgaaccttgtttactgactttgcactctg

SEQ ID NO: 379523 - DNA, 55 bp, Artificial
  Synthetic oligonucleotide
ctagagtaatacctgctggaggtttaccaactgagccatttgttcctctagaacc

SEQ ID NO: 379524 - DNA, 55 bp, Artificial
  Synthetic oligonucleotide
ctagagtattggaaaagtaatccatcagtgataccagacaatgtcgaccgtcgac

SEQ ID NO: 379525 - DNA, 54 bp, Artificial
  Synthetic oligonucleotide
ctagagtcaatacgtggtattgtaagtttactagagtcgatacttttactcttt

SEQ ID NO: 379526 - DNA, 60 bp, Artificial
  Synthetic oligonucleotide
ctagagtcttcgccatggcggattccattacacagagtgtaatggccccgctgaatagtt

SEQ ID NO: 379527 - DNA, 58 bp, Artificial
  Synthetic oligonucleotide
ctagagtgggtttcaaacaagactccaatgatgaggacattgaagtagttttcgacta

SEQ ID NO: 379528 - DNA, 53 bp, Artificial
  Synthetic oligonucleotide
ctagagtggtctgccagagcaacaataagttaactgatgagacagagtatggt

SEQ ID NO: 379529 - DNA, 56 bp, Artificial
  Synthetic oligonucleotide
ctagagtgtggtggacttcgaacagtattgttgtgttttgtggcacttcaggcacc

SEQ ID NO: 379530 - DNA, 57 bp, Artificial
  Synthetic oligonucleotide
ctagagttccggacgaccaaatgtatagactaagggatagattacgcttattgccag

SEQ ID NO: 379531 - DNA, 57 bp, Artificial
  Synthetic oligonucleotide
ctagagttctacgaagatcaataataagagcaatggaaagactaaagcagttgacac

SEQ ID NO: 379532 - DNA, 55 bp, Artificial
  Synthetic oligonucleotide
ctagagtttgtgttagacaacctatacctgaataggcatacggggttctctcagg

SEQ ID NO: 379533 - DNA, 55 bp, Artificial
  Synthetic oligonucleotide
ctagataaaactttgctttcaattgcgagtgtagcacgaaaatctgtgtcgctac

SEQ ID NO: 379534 - DNA, 56 bp, Artificial
  Synthetic oligonucleotide
ctagataacgggcgtgtgagccaagacgtgttatggtgtcttccccaccaacggtc

SEQ ID NO: 379535 - DNA, 55 bp, Artificial
  Synthetic oligonucleotide
ctagataattacctcccgctgctttcatttcaagttgtgcacccaaatcttctgg

SEQ ID NO: 379536 - DNA, 55 bp, Artificial
  Synthetic oligonucleotide
ctagatacagaggatttaaaccctaaccaacgggcctttgacgaggcaatggctg

SEQ ID NO: 379537 - DNA, 60 bp, Artificial
  Synthetic oligonucleotide
ctagataggaatgaattttgtaatagagtcatgaatatcatgacaagacggtcagtactc

SEQ ID NO: 379538 - DNA, 59 bp, Artificial
  Synthetic oligonucleotide
ctagataggcagaagtgtcccgtccccgaatatcagagagcggcgttcaataattacgc

SEQ ID NO: 379539 - DNA, 55 bp, Artificial
  Synthetic oligonucleotide
ctagataggctggcgtacgttccgcgcgtctttccttcgacgattgacgttcaac

SEQ ID NO: 379540 - DNA, 55 bp, Artificial
  Synthetic oligonucleotide
ctagatatactcctgagtaccacatctttgctcgcagaaacgctgttaagcggac

SEQ ID NO: 379541 - DNA, 55 bp, Artificial
  Synthetic oligonucleotide
ctagatatactggattcatggctgtgatgctatgcttgttatcactatgctcagc

SEQ ID NO: 379542 - DNA, 55 bp, Artificial
  Synthetic oligonucleotide
ctagatatcaggcccatgatttacgtgctttccgtgctgctagcggaactcctgg

SEQ ID NO: 379543 - DNA, 55 bp, Artificial
  Synthetic oligonucleotide
ctagatatccagatagagattcgatggtttgtcatcgcatcctaacgtacggcaa

SEQ ID NO: 379544 - DNA, 60 bp, Artificial
  Synthetic oligonucleotide
ctagatcaatcaggtaatccataccataaacagctgacatcacgatcaatcctggtgagc

SEQ ID NO: 379545 - DNA, 57 bp, Artificial
  Synthetic oligonucleotide
ctagatcaatccttctacggcgagttcctctcctcttcgccgccctgtgttgtggtt

SEQ ID NO: 379546 - DNA, 60 bp, Artificial
  Synthetic oligonucleotide
ctagatcaattgaaaactgagtatacagaagatgtagatgacgaaatgtatcgagaatac

SEQ ID NO: 379547 - DNA, 55 bp, Artificial
  Synthetic oligonucleotide
ctagatcaccgccctccgactccgttggcccgtttggccctgtcgatcacactgt

SEQ ID NO: 379548 - DNA, 55 bp, Artificial
  Synthetic oligonucleotide
ctagatcacctacagggtgtagtacactgttattacggtaactttgtacgccagt

SEQ ID NO: 379549 - DNA, 60 bp, Artificial
  Synthetic oligonucleotide
ctagatcactgaatgagctgcctagcagtgagaaccgtggtagaatgccctggaaactca

SEQ ID NO: 379550 - DNA, 59 bp, Artificial
  Synthetic oligonucleotide
ctagatcacttaattcgtcagcgttttattacagggtgtaggtgcatgttagattagag

SEQ ID NO: 379551 - DNA, 60 bp, Artificial
  Synthetic oligonucleotide
ctagatcagcagctaagactagcaagtcatctgaggttagagtcccaactcttagcacac

SEQ ID NO: 379552 - DNA, 56 bp, Artificial
  Synthetic oligonucleotide
ctagatcagcatattaatgatagagggataaagctttctaagtccttaatgctagg

SEQ ID NO: 379553 - DNA, 60 bp, Artificial
  Synthetic oligonucleotide
ctagatcatccaggctcatgcacctagaaacatttaaagttttgcagtccatgatgaact

SEQ ID NO: 379554 - DNA, 56 bp, Artificial
  Synthetic oligonucleotide
ctagatccgacccggactggcgtttcacctcagttcggatctttgccaaagcccaa

SEQ ID NO: 379555 - DNA, 60 bp, Artificial
  Synthetic oligonucleotide
ctagatccttcgtcagtcagagccgcatctcggttcctgtgaggtacaggccccccagca

SEQ ID NO: 379556 - DNA, 60 bp, Artificial
  Synthetic oligonucleotide
ctagatcgctagcaagctgggtccagagtgaattcaataaggcatgtgaattgaccgact

SEQ ID NO: 379557 - DNA, 60 bp, Artificial
  Synthetic oligonucleotide
ctagatgaaggagtacacataaaatccactggttttgaaataacatcagcagtggcctgc

SEQ ID NO: 379558 - DNA, 55 bp, Artificial
  Synthetic oligonucleotide
ctagatgacaaatctcactcccttacccggacaaagctgtcaagttggttgtctg

SEQ ID NO: 379559 - DNA, 60 bp, Artificial
  Synthetic oligonucleotide
ctagatgagggggtccatataaagtccactggttttgagataacatcagcagtagcctgc

SEQ ID NO: 379560 - DNA, 56 bp, Artificial
  Synthetic oligonucleotide
ctagatgagtgcgtccaagtttggtccacatcacaaggttataacctcaaaccagg

SEQ ID NO: 379561 - DNA, 60 bp, Artificial
  Synthetic oligonucleotide
ctagatgatcaatgcatcctcggtcttcacagtctcggttcagttcacgtcaaagacaat

SEQ ID NO: 379562 - DNA, 56 bp, Artificial
  Synthetic oligonucleotide
ctagatggaagcaaggtggtggttgagtttacaaccaaccggtcagaccaggaaca

SEQ ID NO: 379563 - DNA, 56 bp, Artificial
  Synthetic oligonucleotide
ctagatgtaagtaagtagtcaaaagttcgactgttaacttgcaaccctatgataaa

SEQ ID NO: 379564 - DNA, 52 bp, Artificial
  Synthetic oligonucleotide
ctagatgtaggggatgcctacttcagcatcccgctgtgtgaagacttcaggc

SEQ ID NO: 379565 - DNA, 60 bp, Artificial
  Synthetic oligonucleotide
ctagatgtcaggccagggttctccacgagtgtttcacgtggagatcacccagacttggtg

SEQ ID NO: 379566 - DNA, 58 bp, Artificial
  Synthetic oligonucleotide
ctagatgtccacacagataattgtgtggtcctaacgacctagcccacattgttttacc

SEQ ID NO: 379567 - DNA, 54 bp, Artificial
  Synthetic oligonucleotide
ctagatgtcccgtggttagaaaggggacggacctaccttcagacaactacagga

SEQ ID NO: 379568 - DNA, 50 bp, Artificial
  Synthetic oligonucleotide
ctagattacgctgggcagatgagtgagatatacgccccgttctggaatgg

SEQ ID NO: 379569 - DNA, 60 bp, Artificial
  Synthetic oligonucleotide
ctagattatcaaatcgtgtatttagagataaattatttccatctattgcaaacatacata

SEQ ID NO: 379570 - DNA, 55 bp, Artificial
  Synthetic oligonucleotide
ctagattcattcactatatatcacctgagcactggggagctgatttgtttagggc

SEQ ID NO: 379571 - DNA, 52 bp, Artificial
  Synthetic oligonucleotide
ctagattccctacgctctaaaggttttaccaggaagtatgtgattgatagcg

SEQ ID NO: 379572 - DNA, 53 bp, Artificial
  Synthetic oligonucleotide
ctagattctgttatgaaccttgggaaaggcacagaagggaaaaaacacacatt

SEQ ID NO: 379573 - DNA, 54 bp, Artificial
  Synthetic oligonucleotide
ctagattgattgaggctagttccttaaatgactcagttgccatgagggtcgcct

SEQ ID NO: 379574 - DNA, 56 bp, Artificial
  Synthetic oligonucleotide
ctagattgcccctaaagggggaggtaggtcctggattgcagaggaagatagtggga

SEQ ID NO: 379575 - DNA, 56 bp, Artificial
  Synthetic oligonucleotide
ctagattggccggacccaggaaaccaaggtaccgtggaagctggcagagcactaaa

SEQ ID NO: 379576 - DNA, 57 bp, Artificial
  Synthetic oligonucleotide
ctagattgttccccagttagtctgacatcaacaagtttcaagtctttccttccatgt

SEQ ID NO: 379577 - DNA, 57 bp, Artificial
  Synthetic oligonucleotide
ctagatttagtaccacttcatgagaagagtgataaccttagtgagaactttgatgag

SEQ ID NO: 379578 - DNA, 53 bp, Artificial
  Synthetic oligonucleotide
ctagatttcagacccgagggggtgtgtcggtgtaggacttagaacgagaaccg

SEQ ID NO: 379579 - DNA, 58 bp, Artificial
  Synthetic oligonucleotide
ctagattttcatgactcaaacatcaagaacctttacgacaaggttcgactacagctta

SEQ ID NO: 379580 - DNA, 55 bp, Artificial
  Synthetic oligonucleotide
ctagcaaagccccgatgactagtaccgaggttaatgtaattaggagtaggcgcag

SEQ ID NO: 379581 - DNA, 59 bp, Artificial
  Synthetic oligonucleotide
ctagcaaatatcttgacccacactactggtttcgcgacctcttggcggctagcgtcaca

SEQ ID NO: 379582 - DNA, 55 bp, Artificial
  Synthetic oligonucleotide
ctagcaacaaagagccccgtgattggtatagaagtgagtttgacttgtccgcctt

SEQ ID NO: 379583 - DNA, 60 bp, Artificial
  Synthetic oligonucleotide
ctagcaacacagcccacaataatgctgattgtgcctggctggaagcacaagaggacgaag

SEQ ID NO: 379584 - DNA, 55 bp, Artificial
  Synthetic oligonucleotide
ctagcaacaccggaaatcccttttacaacggaagcggcgaatgaaatagcacgcg

SEQ ID NO: 379585 - DNA, 55 bp, Artificial
  Synthetic oligonucleotide
ctagcaaccaaaactatagcctttaatctcaatacgaatctccaaaacgcacaag

SEQ ID NO: 379586 - DNA, 56 bp, Artificial
  Synthetic oligonucleotide
ctagcaaccccaatgacaccctgaaggaagagcaaggggcaatacaaaactgtact

SEQ ID NO: 379587 - DNA, 56 bp, Artificial
  Synthetic oligonucleotide
ctagcaaccctctggtgcgtacaccaaaggatagaggtaaaagacaccagggaagc

SEQ ID NO: 379588 - DNA, 56 bp, Artificial
  Synthetic oligonucleotide
ctagcaacgaacaagccctggtccggcgcttttggaaggtgaacaaccatgttgtg

SEQ ID NO: 379589 - DNA, 54 bp, Artificial
  Synthetic oligonucleotide
ctagcaactccactagtatacctgcccttaccgcagtcgaaaccgggcacacat

SEQ ID NO: 379590 - DNA, 60 bp, Artificial
  Synthetic oligonucleotide
ctagcaagaaagtatcccggaaggctgggtgttctgagtggatatgttctgctcagcaag

SEQ ID NO: 379591 - DNA, 60 bp, Artificial
  Synthetic oligonucleotide
ctagcaagagtggggcgtgagaggttatcaagaatggccatcagtggagatgattgtgtt

SEQ ID NO: 379592 - DNA, 51 bp, Artificial
  Synthetic oligonucleotide
ctagcaaggagaaacccaatacgtacccaccagacattgcactactcaagc

SEQ ID NO: 379593 - DNA, 60 bp, Artificial
  Synthetic oligonucleotide
ctagcaaggtcacagtgtacgtcaacactaccagttctcctcacactaaagtggcattag

SEQ ID NO: 379594 - DNA, 55 bp, Artificial
  Synthetic oligonucleotide
ctagcaatgaagtgcagtaatcttctctacggtgtggaactccccatgtgcttgc

SEQ ID NO: 379595 - DNA, 60 bp, Artificial
  Synthetic oligonucleotide
ctagcaatgatgtttggttcagacaggagcgatgccgtgttttcgacgttgtcaaaggta

SEQ ID NO: 379596 - DNA, 55 bp, Artificial
  Synthetic oligonucleotide
ctagcaatgtctccaagtttgaaaggatcatccgtctttatggtggacaaggtag

SEQ ID NO: 379597 - DNA, 55 bp, Artificial
  Synthetic oligonucleotide
ctagcacacaaacaggcttatgctgaagtaactaaggcagacgaagtaaaggttg

SEQ ID NO: 379598 - DNA, 55 bp, Artificial
  Synthetic oligonucleotide
ctagcacacacacaaggaccaattagtgactatgtaacacaattaggcaatgctt

SEQ ID NO: 379599 - DNA, 55 bp, Artificial
  Synthetic oligonucleotide
ctagcacaccacgtgagactattggacgtgctttggaaagagcgcgagatcttta

SEQ ID NO: 379600 - DNA, 55 bp, Artificial
  Synthetic oligonucleotide
ctagcacagattagcacaatctgccctagcttacaggcttgcaaactgcccttcc

SEQ ID NO: 379601 - DNA, 53 bp, Artificial
  Synthetic oligonucleotide
ctagcaccaaaccatgggtcggtcaacttgagcacaagagcacgtttgccgct

SEQ ID NO: 379602 - DNA, 54 bp, Artificial
  Synthetic oligonucleotide
ctagcacccccaaacaacccgagccctcaatacaaccagcaaccccaagcctag

SEQ ID NO: 379603 - DNA, 55 bp, Artificial
  Synthetic oligonucleotide
ctagcaccctcgagctgaggagcagatactgggccataagaaccagaagtggagg

SEQ ID NO: 379604 - DNA, 60 bp, Artificial
  Synthetic oligonucleotide
ctagcacctattgcatccaagacacacccacaccctgtgtctaagattattgaaaatcat

SEQ ID NO: 379605 - DNA, 55 bp, Artificial
  Synthetic oligonucleotide
ctagcacctccataacctcagtcgatggatggttgacagtttggcagctcacccc

SEQ ID NO: 379606 - DNA, 60 bp, Artificial
  Synthetic oligonucleotide
ctagcacgcagacacgtagcccgtgaacaacatccggaatattacaaagactgctgacac

SEQ ID NO: 379607 - DNA, 59 bp, Artificial
  Synthetic oligonucleotide
ctagcacgtaacgtatcccttgccagggagagcgtgccgaattgctatgggttggtgta

SEQ ID NO: 379608 - DNA, 60 bp, Artificial
  Synthetic oligonucleotide
ctagcactgagagagtagtcgtgagcattgatcgtttcttaagggtccgagatcagcggg

SEQ ID NO: 379609 - DNA, 60 bp, Artificial
  Synthetic oligonucleotide
ctagcactgcaactgtcaagaatgatcttcgagatcggtttcaagttttgcggaagttca

SEQ ID NO: 379610 - DNA, 52 bp, Artificial
  Synthetic oligonucleotide
ctagcactgccctctgcgagagagtacccattgctgaaattgctaacggact

SEQ ID NO: 379611 - DNA, 56 bp, Artificial
  Synthetic oligonucleotide
ctagcagaaaaattacactgttggttcggtgggaaagagtttgacctagactctgc

SEQ ID NO: 379612 - DNA, 60 bp, Artificial
  Synthetic oligonucleotide
ctagcagaagaagaggtagtaattagatctgaaaatttcacagacaatgctaaaaccata

SEQ ID NO: 379613 - DNA, 58 bp, Artificial
  Synthetic oligonucleotide
ctagcagacttacgaaagaccgcaagcttaagcgaatattctaagaagtacccgatca

SEQ ID NO: 379614 - DNA, 59 bp, Artificial
  Synthetic oligonucleotide
ctagcagatcgtccgtcgatctggaaagtaccccattcaagaacatctccgtccttgtc

SEQ ID NO: 379615 - DNA, 55 bp, Artificial
  Synthetic oligonucleotide
ctagcagcaagaatcatcagaatcctgtaccaaagcagtgagtaataacaattag

SEQ ID NO: 379616 - DNA, 54 bp, Artificial
  Synthetic oligonucleotide
ctagcaggaaaaactaggatcatagaagctagtagtttgaatgacacagtacaa

SEQ ID NO: 379617 - DNA, 50 bp, Artificial
  Synthetic oligonucleotide
ctagcaggaaaacggggatagaccctcgtgggaaactggttgtgtctgaa

SEQ ID NO: 379618 - DNA, 59 bp, Artificial
  Synthetic oligonucleotide
ctagcagggaaagggctcttatgcttcaagggacctggtttatgcctggtaggcatgat

SEQ ID NO: 379619 - DNA, 60 bp, Artificial
  Synthetic oligonucleotide
ctagcagtgacgatccatggtggcaactatccaggggccctccgtcccgtcacactagtg

SEQ ID NO: 379620 - DNA, 55 bp, Artificial
  Synthetic oligonucleotide
ctagcagttctagacttcttgctgtaggcaacccttattttgccatacgaccagc

SEQ ID NO: 379621 - DNA, 54 bp, Artificial
  Synthetic oligonucleotide
ctagcagtttttaccggaatttgctatggataacaaagaaggggacttcctatc

SEQ ID NO: 379622 - DNA, 60 bp, Artificial
  Synthetic oligonucleotide
ctagcatacacccaggcatgctagccctagacgaaagagcaagatggatacctagcttaa

SEQ ID NO: 379623 - DNA, 60 bp, Artificial
  Synthetic oligonucleotide
ctagcatacaggcccctgcttttactgcagcacccagactaaaattgtagccagagatgt

SEQ ID NO: 379624 - DNA, 60 bp, Artificial
  Synthetic oligonucleotide
ctagcatatccagaacgccatgggttcgattctgatatgtgcatgcgagccatcggcttt

SEQ ID NO: 379625 - DNA, 55 bp, Artificial
  Synthetic oligonucleotide
ctagcatcacggacgacagtcaatcgctctgcccaattgaattgatggctcagcg

SEQ ID NO: 379626 - DNA, 55 bp, Artificial
  Synthetic oligonucleotide
ctagcatcgggactaaccggagtgagactaattccgctcccggaaatggctcgta

SEQ ID NO: 379627 - DNA, 60 bp, Artificial
  Synthetic oligonucleotide
ctagcatctctcgcagtgcatttagtagtcgtgtaaacgactatgtgaaggtgctttcca

SEQ ID NO: 379628 - DNA, 60 bp, Artificial
  Synthetic oligonucleotide
ctagcatctctgttggagatgtgccatagcacacagatcgggggaataaggatggtggac

SEQ ID NO: 379629 - DNA, 55 bp, Artificial
  Synthetic oligonucleotide
ctagcatgagttgggactgtattccccataatggtccaaaccatccttctatggc

SEQ ID NO: 379630 - DNA, 60 bp, Artificial
  Synthetic oligonucleotide
ctagcatggggatcttatttgctgccctgctagcaatgactaacccacacttagctactg

SEQ ID NO: 379631 - DNA, 55 bp, Artificial
  Synthetic oligonucleotide
ctagcatggtcgaatgtgcgacagcaggatgtgagaatagctttcgggaggacac

SEQ ID NO: 379632 - DNA, 58 bp, Artificial
  Synthetic oligonucleotide
ctagcatgtgttcccgcgaagttatctacaccgccctctcccgagccgttcactccat

SEQ ID NO: 379633 - DNA, 52 bp, Artificial
  Synthetic oligonucleotide
ctagcattattcccaaacactttgaccatctaacttactctgtctcacatcc

SEQ ID NO: 379634 - DNA, 55 bp, Artificial
  Synthetic oligonucleotide
ctagcattcatgctagatcacattaagaggtttaatgaagctaggaggatagtcc

SEQ ID NO: 379635 - DNA, 60 bp, Artificial
  Synthetic oligonucleotide
ctagcattcttgatgtcggactctcctgatagttggatgagacagtgtaaatgagggaac

SEQ ID NO: 379636 - DNA, 56 bp, Artificial
  Synthetic oligonucleotide
ctagcattggaaagttggaacagtctgtggaattggtttggcataacaaattggct

SEQ ID NO: 379637 - DNA, 60 bp, Artificial
  Synthetic oligonucleotide
ctagcattggacagttggaaaactctgtggagttggtttgacatatcaaactggctgtgg

SEQ ID NO: 379638 - DNA, 60 bp, Artificial
  Synthetic oligonucleotide
ctagcatttcagcacgtagcccgagagctgcatccggagtactacaaggactgctgacat

SEQ ID NO: 379639 - DNA, 55 bp, Artificial
  Synthetic oligonucleotide
ctagccaaaggggaattcttgaggacgagcagatgtaccagaagtgctgcaatct

SEQ ID NO: 379640 - DNA, 55 bp, Artificial
  Synthetic oligonucleotide
ctagccaagccctctggccatacagagggaagatagccaacgaccaagcaagcgc

SEQ ID NO: 379641 - DNA, 55 bp, Artificial
  Synthetic oligonucleotide
ctagccaagcgaggtggaggtgttaccctattcacaacttagtacgtgaagaacg

SEQ ID NO: 379642 - DNA, 55 bp, Artificial
  Synthetic oligonucleotide
ctagccaagtatctgtctagtaaactaggtgtgcacctcttactcatgcactgca

SEQ ID NO: 379643 - DNA, 50 bp, Artificial
  Synthetic oligonucleotide
ctagccaatggttttgacttaatccttgtggaggaccacgtaaacgtcaa

SEQ ID NO: 379644 - DNA, 55 bp, Artificial
  Synthetic oligonucleotide
ctagccaatgtcaacatactagtgaaacaaatatccacacccaaaggaccttcat

SEQ ID NO: 379645 - DNA, 55 bp, Artificial
  Synthetic oligonucleotide
ctagccacaacctgtgctcagttgcgaatcttctacccagatgttcatgatgcgg

SEQ ID NO: 379646 - DNA, 55 bp, Artificial
  Synthetic oligonucleotide
ctagccagagagaaacatccggagttctaccgagactgggactgctgacacagag

SEQ ID NO: 379647 - DNA, 60 bp, Artificial
  Synthetic oligonucleotide
ctagccagcaaagttatgggatcagcctttacggctttgctcgatgccaacgaggacgcc

SEQ ID NO: 379648 - DNA, 51 bp, Artificial
  Synthetic oligonucleotide
ctagccagcggtggacaggtgacccgctataaagccgtccacaacggaagt

SEQ ID NO: 379649 - DNA, 50 bp, Artificial
  Synthetic oligonucleotide
ctagccaggcgctttgcatttgacatggacatacaaatcatgagcgagta

SEQ ID NO: 379650 - DNA, 59 bp, Artificial
  Synthetic oligonucleotide
ctagccagttcgcattcttcccgcgtcgccacctttttccagcaaccattgacagacat

SEQ ID NO: 379651 - DNA, 55 bp, Artificial
  Synthetic oligonucleotide
ctagccatacctaaccgaggagtaaatgcttggctcacagcaagcgagtatgcac

SEQ ID NO: 379652 - DNA, 55 bp, Artificial
  Synthetic oligonucleotide
ctagccattctatggcaggtttggcttgatactggtggatggaggtggtgctgaa

SEQ ID NO: 379653 - DNA, 56 bp, Artificial
  Synthetic oligonucleotide
ctagcccacattgttttacccgtacgactatcaccttctatcacaatactaatcgg

SEQ ID NO: 379654 - DNA, 55 bp, Artificial
  Synthetic oligonucleotide
ctagcccacctctcacaaatgtataatggttgggtcggcaatatgcgtgtacgta

SEQ ID NO: 379655 - DNA, 58 bp, Artificial
  Synthetic oligonucleotide
ctagcccccattactgcataccaccaacagacccgtggcttactggggacaatcgtca

SEQ ID NO: 379656 - DNA, 52 bp, Artificial
  Synthetic oligonucleotide
ctagcccttgttggtttcctctttgcagttcggttccgaagtaacaggcctt

SEQ ID NO: 379657 - DNA, 60 bp, Artificial
  Synthetic oligonucleotide
ctagccgaataatatccggctttcctgacatccttttcatcctgaaggtctccagataca

SEQ ID NO: 379658 - DNA, 55 bp, Artificial
  Synthetic oligonucleotide
ctagccgatcgtttagatgcgtgccaggacaagttactagacctttatgaaaagg

SEQ ID NO: 379659 - DNA, 55 bp, Artificial
  Synthetic oligonucleotide
ctagccgatgaccgcttaaaggatttctatgataatcccaatgctcttcgtgact

SEQ ID NO: 379660 - DNA, 60 bp, Artificial
  Synthetic oligonucleotide
ctagccgccatacttatggtggagcgatgattgaatgaacacgaaggtctcgaataagcg

SEQ ID NO: 379661 - DNA, 50 bp, Artificial
  Synthetic oligonucleotide
ctagccgcgggaaccaggtacggctcgctttgtcggtgctggaccaatat

SEQ ID NO: 379662 - DNA, 57 bp, Artificial
  Synthetic oligonucleotide
ctagccggaggacctgcctcatagagggtttctggccgttgagatacggacactggt

SEQ ID NO: 379663 - DNA, 53 bp, Artificial
  Synthetic oligonucleotide
ctagccggtttagacagttcaaccaggttgaactagagatgaatgatcaattg

SEQ ID NO: 379664 - DNA, 59 bp, Artificial
  Synthetic oligonucleotide
ctagccgtcatacacgagggacccgctaagctacatgctgaaaggacctacaggccaaa

SEQ ID NO: 379665 - DNA, 55 bp, Artificial
  Synthetic oligonucleotide
ctagcctctcccctgtatggtttaagtgtctcaatttgctcctcgagaagatagg

SEQ ID NO: 379666 - DNA, 55 bp, Artificial
  Synthetic oligonucleotide
ctagcctgagcccagcatggtttagagcattagagatcgttttgagagatctagg

SEQ ID NO: 379667 - DNA, 55 bp, Artificial
  Synthetic oligonucleotide
ctagcctgtaatagtacattctgtaagccaactgtctacatgattgttcctatac

SEQ ID NO: 379668 - DNA, 55 bp, Artificial
  Synthetic oligonucleotide
ctagcctgtctcccatgtggttccatgccctggcagaagtccttagacggattgg

SEQ ID NO: 379669 - DNA, 60 bp, Artificial
  Synthetic oligonucleotide
ctagccttgcctctcagcgtagccttgcctcttgtggtattgcctcttgtggctctacct

SEQ ID NO: 379670 - DNA, 58 bp, Artificial
  Synthetic oligonucleotide
ctagccttgcctcttgtggtattgcctcttgtggctctacctgggtactccctgggtg

SEQ ID NO: 379671 - DNA, 52 bp, Artificial
  Synthetic oligonucleotide
ctagccttgtctttgacttcatggcggggaaactatcgtcagaagatctgtg

SEQ ID NO: 379672 - DNA, 56 bp, Artificial
  Synthetic oligonucleotide
ctagcgaataaggagttgaaaggagacttcgctggtgtaccatccgtattttctgt

SEQ ID NO: 379673 - DNA, 52 bp, Artificial
  Synthetic oligonucleotide
ctagcgaatatcttggacgtagaccgcaatatacgacccaaacacttcaagg

SEQ ID NO: 379674 - DNA, 59 bp, Artificial
  Synthetic oligonucleotide
ctagcgactttcaccacacgaaacgcttgttggaagttgtgcgcgagttatcttcagag

SEQ ID NO: 379675 - DNA, 59 bp, Artificial
  Synthetic oligonucleotide
ctagcgagaagggaggaaattacccagtgcaacatgtaggcggcaactacacccatata

SEQ ID NO: 379676 - DNA, 51 bp, Artificial
  Synthetic oligonucleotide
ctagcgagcgtattgaccgttaccgcacacgctctcacctacgacctaaac

SEQ ID NO: 379677 - DNA, 60 bp, Artificial
  Synthetic oligonucleotide
ctagcgcgcatgtacccctcgttcttcgtcgaccatgacgccttactctcagtatgggat

SEQ ID NO: 379678 - DNA, 55 bp, Artificial
  Synthetic oligonucleotide
ctagcgcgggatttgggcgggctaacggaatcttcttccagagcgcccgagggag

SEQ ID NO: 379679 - DNA, 55 bp, Artificial
  Synthetic oligonucleotide
ctagcgctacagtcaaggcagcctgttggtgggcaaatatccaacaggaatttgg

SEQ ID NO: 379680 - DNA, 58 bp, Artificial
  Synthetic oligonucleotide
ctagcgctcgacccgcctttcgatgttgataagttggctagccccactgatttagtta

SEQ ID NO: 379681 - DNA, 52 bp, Artificial
  Synthetic oligonucleotide
ctagcgctctacctacaagaatcattagtgctgaaggttcctttcggggttt

SEQ ID NO: 379682 - DNA, 51 bp, Artificial
  Synthetic oligonucleotide
ctagcgctcttatcacacggtctctgctgccatctagcgggcgggagcggt

SEQ ID NO: 379683 - DNA, 55 bp, Artificial
  Synthetic oligonucleotide
ctagcgcttatgcctaacgctatagaggtcctatttagaacgtccgaagttgacg

SEQ ID NO: 379684 - DNA, 55 bp, Artificial
  Synthetic oligonucleotide
ctagcggagggaggtgcttagtagtccaatccccttatggcaatcctaaccaagg

SEQ ID NO: 379685 - DNA, 60 bp, Artificial
  Synthetic oligonucleotide
ctagcggatcgttcgttctctgtcaagtgaaccggtctgctgttgtgtggtctctacgct

SEQ ID NO: 379686 - DNA, 55 bp, Artificial
  Synthetic oligonucleotide
ctagcggtattgtggaaccctgtattgtaagggtagcttatggtaacaatgtcct

SEQ ID NO: 379687 - DNA, 60 bp, Artificial
  Synthetic oligonucleotide
ctagcgtcagccaggctagcgtcagccaaaattaccctatagtgcagaacctccaggggc

SEQ ID NO: 379688 - DNA, 55 bp, Artificial
  Synthetic oligonucleotide
ctagcgtcccatatgtttgcagtaaatttttactggaaacagagctgggttccgt

SEQ ID NO: 379689 - DNA, 58 bp, Artificial
  Synthetic oligonucleotide
ctagcgtcgaactacattacggacaccctgttgtgtggttctaccacgagtcaggagc

SEQ ID NO: 379690 - DNA, 60 bp, Artificial
  Synthetic oligonucleotide
ctagcgtctctattggagatgtgccacagcacacagattggtggaataaggatggtagac

SEQ ID NO: 379691 - DNA, 60 bp, Artificial
  Synthetic oligonucleotide
ctagcgtggctgtttgtagtctgtgcagtcctgcatatggcgtgtcgtcagactcatatg

SEQ ID NO: 379692 - DNA, 57 bp, Artificial
  Synthetic oligonucleotide
ctagcgtggtgcattagtaacgttctcggaacatttgtccccggtagtgacgacaga

SEQ ID NO: 379693 - DNA, 56 bp, Artificial
  Synthetic oligonucleotide
ctagcgttccagataatttctggacgagagccaccaatagtaacttcaaccggaac

SEQ ID NO: 379694 - DNA, 58 bp, Artificial
  Synthetic oligonucleotide
ctagcgttgcaaatattactgcgaatactctaagacaattgagagtttgtttagaatc

SEQ ID NO: 379695 - DNA, 60 bp, Artificial
  Synthetic oligonucleotide
ctagctaacccagcaccactggactatgtcaactttgaagcatgctcgaggcgtatcgat

SEQ ID NO: 379696 - DNA, 60 bp, Artificial
  Synthetic oligonucleotide
ctagctaatacactaatctcacacactgtcagtaagggagtctagttgaaatgcaaccgc

SEQ ID NO: 379697 - DNA, 60 bp, Artificial
  Synthetic oligonucleotide
ctagctaatcgtggaaaatcagatcacgagtgtacatcagatctggatgtgcaaacgtgt

SEQ ID NO: 379698 - DNA, 55 bp, Artificial
  Synthetic oligonucleotide
ctagctacacacgcagggatatggacaggaacagtattaatcgcggcatatttct

SEQ ID NO: 379699 - DNA, 55 bp, Artificial
  Synthetic oligonucleotide
ctagctacactatctctccttggatgtgatgcctctccatggcaatggcttaagg

SEQ ID NO: 379700 - DNA, 56 bp, Artificial
  Synthetic oligonucleotide
ctagctacattgaaccttactctggaccaggcaacaaccctgtctttccggtcaaa

SEQ ID NO: 379701 - DNA, 58 bp, Artificial
  Synthetic oligonucleotide
ctagctacgtccagcaccctcacaagaccgtcagggtcaagttccacacggagaccag

SEQ ID NO: 379702 - DNA, 55 bp, Artificial
  Synthetic oligonucleotide
ctagctagcaattgtcaggcaaaatatgtaaaggacgcatgcacaatgtgcagac

SEQ ID NO: 379703 - DNA, 56 bp, Artificial
  Synthetic oligonucleotide
ctagctatacttatatgctatctgataacatatatgtagcaaatgccagcggcgtg

SEQ ID NO: 379704 - DNA, 57 bp, Artificial
  Synthetic oligonucleotide
ctagctatatagcgtaaaatacattgctatagaacgtagccgctataagttgtatga

SEQ ID NO: 379705 - DNA, 60 bp, Artificial
  Synthetic oligonucleotide
ctagctatcaatatctgattattcagaacacaacctgggaaaatcactgtcagttctcaa

SEQ ID NO: 379706 - DNA, 60 bp, Artificial
  Synthetic oligonucleotide
ctagctatgctccatttatcaatgcctatcggcaggcaattttgagtcaatactcacaag

SEQ ID NO: 379707 - DNA, 57 bp, Artificial
  Synthetic oligonucleotide
ctagctatttcattacaaattcgccatttaaggcgttccaaaataccagtccagctg

SEQ ID NO: 379708 - DNA, 55 bp, Artificial
  Synthetic oligonucleotide
ctagctcaatccctgattgacaccaaggtgaaggagatctccaaccaagagccac

SEQ ID NO: 379709 - DNA, 60 bp, Artificial
  Synthetic oligonucleotide
ctagctcagtcctgctctaatatgccgttcgctccagagtctagttacgatcaacagatg

SEQ ID NO: 379710 - DNA, 58 bp, Artificial
  Synthetic oligonucleotide
ctagctccagtactaagacagaggacctttcaaaggtccggcagggacctgatgagcc

SEQ ID NO: 379711 - DNA, 58 bp, Artificial
  Synthetic oligonucleotide
ctagctcgaaaaccaggggccgagatcgcataccaaatagtaaggtatgaagcgattc

SEQ ID NO: 379712 - DNA, 53 bp, Artificial
  Synthetic oligonucleotide
ctagctcgctacgctttcgacttctatgaagtgacttctaagacatcagatcg

SEQ ID NO: 379713 - DNA, 60 bp, Artificial
  Synthetic oligonucleotide
ctagctctgatagctgtgctgactggtggagtgacgctgttcttcctatcaggaagaggc

SEQ ID NO: 379714 - DNA, 59 bp, Artificial
  Synthetic oligonucleotide
ctagctctttaattacattaagagccagtaatttgctaccgctgttaatggcctgcgcg

SEQ ID NO: 379715 - DNA, 55 bp, Artificial
  Synthetic oligonucleotide
ctagctcttttcgaaactttagttcccactctgctggtacattaagcaaacttgt

SEQ ID NO: 379716 - DNA, 60 bp, Artificial
  Synthetic oligonucleotide
ctagctgataaaacatacgctcacactattgttaatgggcttccgctgctagaacataac

SEQ ID NO: 379717 - DNA, 50 bp, Artificial
  Synthetic oligonucleotide
ctagctgataccacgctccaatacctagcccccactggtactataagttt

SEQ ID NO: 379718 - DNA, 60 bp, Artificial
  Synthetic oligonucleotide
ctagctgatataggcgacaaggagttatctcctatagacggacagtgcgtcacattacat

SEQ ID NO: 379719 - DNA, 60 bp, Artificial
  Synthetic oligonucleotide
ctagctgatctaggcgacaaggagttatctcccatagatggacaatgcgttacattacat

SEQ ID NO: 379720 - DNA, 56 bp, Artificial
  Synthetic oligonucleotide
ctagctgcgggcattagactggaaaactagtgctctttgggtaaccactaaaatcc

SEQ ID NO: 379721 - DNA, 57 bp, Artificial
  Synthetic oligonucleotide
ctagctgctctggccgcgtattgcctatctacgggctgcgtggtcatagtgggtagg

SEQ ID NO: 379722 - DNA, 55 bp, Artificial
  Synthetic oligonucleotide
ctagctggaggagtaataatatccctattggtcggatatctcatgttgaagacga

SEQ ID NO: 379723 - DNA, 59 bp, Artificial
  Synthetic oligonucleotide
ctagctggcgcgacgttgttgatagtgaacagtggtttgcgttctctgacgacccctct

SEQ ID NO: 379724 - DNA, 59 bp, Artificial
  Synthetic oligonucleotide
ctagctggctgggtggaccctggctgttacctgggaacgataatcctggctagctagac

SEQ ID NO: 379725 - DNA, 60 bp, Artificial
  Synthetic oligonucleotide
ctagctggtgagcaacgagacttgaatctatatcaaggtttagaccaactggcagatgag

SEQ ID NO: 379726 - DNA, 60 bp, Artificial
  Synthetic oligonucleotide
ctagctggtggcatgttacacatcgctgtccggccgatgtatgcgagctcatacgcgggg

SEQ ID NO: 379727 - DNA, 60 bp, Artificial
  Synthetic oligonucleotide
ctagctgtctcaaagggaaactgctcagggcccactacaatcagaggtcaattctcaaac

SEQ ID NO: 379728 - DNA, 59 bp, Artificial
  Synthetic oligonucleotide
ctagctgtgctaatgcctgccctgctaactaaatattcgaagaagttaatgagggttag

SEQ ID NO: 379729 - DNA, 55 bp, Artificial
  Synthetic oligonucleotide
ctagctgtgtcttatgtgtgccatggattagtcaaactcactataggtacgtgca

SEQ ID NO: 379730 - DNA, 60 bp, Artificial
  Synthetic oligonucleotide
ctagcttgctttcagagaaaaggcttaggcatttcctatggcaggaagaagcggagacag

SEQ ID NO: 379731 - DNA, 55 bp, Artificial
  Synthetic oligonucleotide
ctagcttggtttctgtgaacgacagggttagttgtgttgcaacaggggaaccatc

SEQ ID NO: 379732 - DNA, 60 bp, Artificial
  Synthetic oligonucleotide
ctagctttacaggactcaggactagaagtaaatatagtaacagattcacaatattgtctg

SEQ ID NO: 379733 - DNA, 56 bp, Artificial
  Synthetic oligonucleotide
ctagctttatattgttaagcaaagtagcaactagttgcacggagagaaatgtcaag

SEQ ID NO: 379734 - DNA, 60 bp, Artificial
  Synthetic oligonucleotide
ctaggaaaacagttttatgctatgatctttcatgcaaccagacacactgtcagccaaccc

SEQ ID NO: 379735 - DNA, 55 bp, Artificial
  Synthetic oligonucleotide
ctaggaaaagtgtatgtcagagatagtaacttagagaggttaagggttttggcgc

SEQ ID NO: 379736 - DNA, 56 bp, Artificial
  Synthetic oligonucleotide
ctaggaaacatgacaaactacacagacggtaaaaagtacaatacatcaggaacaac

SEQ ID NO: 379737 - DNA, 58 bp, Artificial
  Synthetic oligonucleotide
ctaggaaacatttgtgtatccccaaagctttcctcaggttgtgattgaactgtatctg

SEQ ID NO: 379738 - DNA, 55 bp, Artificial
  Synthetic oligonucleotide
ctaggaaagctgatattccaacgcataatctgaaacacttcatcacacggacctc

SEQ ID NO: 379739 - DNA, 54 bp, Artificial
  Synthetic oligonucleotide
ctaggaaaggcaaggtacacgttccgttccctctgactaacgtcacctgccgag

SEQ ID NO: 379740 - DNA, 51 bp, Artificial
  Synthetic oligonucleotide
ctaggaaattacaccgatatattgatagtatggaagatcattcagatgcag

SEQ ID NO: 379741 - DNA, 57 bp, Artificial
  Synthetic oligonucleotide
ctaggaaccctaatagggcctccccagtgtgatcaattcctggagtttgcctcagat

SEQ ID NO: 379742 - DNA, 60 bp, Artificial
  Synthetic oligonucleotide
ctaggaacgctctgtgctttgtgcgaaaaacaagcatcacattcacacagggctcatagc

SEQ ID NO: 379743 - DNA, 59 bp, Artificial
  Synthetic oligonucleotide
ctaggaaggaagcaatgcttggtactcacgttgtttgggatattggtttgcaatccaca

SEQ ID NO: 379744 - DNA, 55 bp, Artificial
  Synthetic oligonucleotide
ctaggaaggagcggatataccgttcatgtgcagtgtaatgctagtaaatttcacc

SEQ ID NO: 379745 - DNA, 57 bp, Artificial
  Synthetic oligonucleotide
ctaggaatacattggatctatcaggccttgaaacaacaggggatggattcagtactg

SEQ ID NO: 379746 - DNA, 60 bp, Artificial
  Synthetic oligonucleotide
ctaggaatagcaatcaacagatataatggattgacattacggggagtaacaatgagacct

SEQ ID NO: 379747 - DNA, 57 bp, Artificial
  Synthetic oligonucleotide
ctaggaatcttggccttgtccccagttaaactggacaaaggccatggttctgcgcca

SEQ ID NO: 379748 - DNA, 54 bp, Artificial
  Synthetic oligonucleotide
ctaggaatgatttcttcctaggaatgaatgtacctctctcaaacaaggccaggg

SEQ ID NO: 379749 - DNA, 55 bp, Artificial
  Synthetic oligonucleotide
ctaggaatgtgcctggatgcttatcgcagaatccctatcatgcgtgataaaggat

SEQ ID NO: 379750 - DNA, 56 bp, Artificial
  Synthetic oligonucleotide
ctaggacaaagactttgtagagctattctccacgtacctagaagaatcagacaggg

SEQ ID NO: 379751 - DNA, 50 bp, Artificial
  Synthetic oligonucleotide
ctaggacatcatgcagtagccaatggaaccatcgtgaagactctcacaaa

SEQ ID NO: 379752 - DNA, 60 bp, Artificial
  Synthetic oligonucleotide
ctaggaccaagagaaaatgtagcagttatacaagttggcggctcagaagtgctagatatt

SEQ ID NO: 379753 - DNA, 55 bp, Artificial
  Synthetic oligonucleotide
ctaggacgctggctcctagtctttgcaaatctcgatacgtatgtagctcgttctc

SEQ ID NO: 379754 - DNA, 55 bp, Artificial
  Synthetic oligonucleotide
ctaggactaaacgctttggagcgcatacttcagacggtgacgagattttctgcga

SEQ ID NO: 379755 - DNA, 60 bp, Artificial
  Synthetic oligonucleotide
ctaggactaaggtcgatatgcccacataagtaattatgtggacctaatgatctagcccac

SEQ ID NO: 379756 - DNA, 57 bp, Artificial
  Synthetic oligonucleotide
ctaggactggtgtgcttaatctatgtaggccttggtatgggtattcggaggagtcgt

SEQ ID NO: 379757 - DNA, 60 bp, Artificial
  Synthetic oligonucleotide
ctaggacttctgttccgagcttacttatgtgtctatacggatggagctcgttctctatct

SEQ ID NO: 379758 - DNA, 57 bp, Artificial
  Synthetic oligonucleotide
ctaggagaaaaggctgttggaaatgtgggaaagaaggacaccaaatgaaagattgca

SEQ ID NO: 379759 - DNA, 60 bp, Artificial
  Synthetic oligonucleotide
ctaggagactttactaccagcaagagattggcactggattgcagtatcgtgtgcacaacg

SEQ ID NO: 379760 - DNA, 55 bp, Artificial
  Synthetic oligonucleotide
ctaggagagtccctttcccagccctgaggcggctggttaataatagcctcaagcg

SEQ ID NO: 379761 - DNA, 57 bp, Artificial
  Synthetic oligonucleotide
ctaggagagttcctcctagactctcctctccgaggaggtaccgagacctcacaataa

SEQ ID NO: 379762 - DNA, 55 bp, Artificial
  Synthetic oligonucleotide
ctaggagatagaggggatgccaggaacctgaatgagcttaaaatggagtgcccac

SEQ ID NO: 379763 - DNA, 60 bp, Artificial
  Synthetic oligonucleotide
ctaggagatgggtatgaggtcataggccttcgatatccacttctctttgatcaggctttc

SEQ ID NO: 379764 - DNA, 55 bp, Artificial
  Synthetic oligonucleotide
ctaggagatgtcatcttgttggtgattgtgtgggtaacaaatgccagtcatggcg

SEQ ID NO: 379765 - DNA, 51 bp, Artificial
  Synthetic oligonucleotide
ctaggagcacaagagctagacgatgaatgcacaatgctctccttatttgga

SEQ ID NO: 379766 - DNA, 55 bp, Artificial
  Synthetic oligonucleotide
ctaggagcaggagatgagattccagacccgttgagtccaggagagcgcggcattc

SEQ ID NO: 379767 - DNA, 54 bp, Artificial
  Synthetic oligonucleotide
ctaggagctacaattggaaattcacgcatccggctccagccccatattatccag

SEQ ID NO: 379768 - DNA, 55 bp, Artificial
  Synthetic oligonucleotide
ctaggagcttctttctcatctgtagtctgtctcttcagcaagccaaggaccttga

SEQ ID NO: 379769 - DNA, 55 bp, Artificial
  Synthetic oligonucleotide
ctaggaggattggggtataaatggtctggaatatcatacccagcagcgaattatc

SEQ ID NO: 379770 - DNA, 60 bp, Artificial
  Synthetic oligonucleotide
ctaggaggtgtcacttagtaggcgaatgtcacaagaataggtgtcaatcctgggctgaca

SEQ ID NO: 379771 - DNA, 53 bp, Artificial
  Synthetic oligonucleotide
ctaggagtagggggagaccgaagcgaggaggatcccaaagaaagcaacggggc

SEQ ID NO: 379772 - DNA, 59 bp, Artificial
  Synthetic oligonucleotide
ctaggagtccagagtgatgctcctttagaccctagttgtggaggggattgctttcacag

SEQ ID NO: 379773 - DNA, 57 bp, Artificial
  Synthetic oligonucleotide
ctaggatcaaaattagtagtcagtcttggtccatttatataaactggattgttgtta

SEQ ID NO: 379774 - DNA, 60 bp, Artificial
  Synthetic oligonucleotide
ctaggatcttgtttgcctataagtatttagaaggcgagtgtaaagatgcagcgttcagac

SEQ ID NO: 379775 - DNA, 55 bp, Artificial
  Synthetic oligonucleotide
ctaggatgagaggggaacctctataaatattccgagccacttcggtggctcctcc

SEQ ID NO: 379776 - DNA, 55 bp, Artificial
  Synthetic oligonucleotide
ctaggatgtctgtccccagcctgcttatgtgtctatacggatgaagctcgttctc

SEQ ID NO: 379777 - DNA, 55 bp, Artificial
  Synthetic oligonucleotide
ctaggcaagcgagagtcagaaattagtgaaggaaagccttcttacgtcgataaag

SEQ ID NO: 379778 - DNA, 60 bp, Artificial
  Synthetic oligonucleotide
ctaggcacaagaaaagcttgcttatactgtgccccaatgccacttacaccgcctgctaac

SEQ ID NO: 379779 - DNA, 55 bp, Artificial
  Synthetic oligonucleotide
ctaggcacacgaccgccctaacgctaatcactgattacaatagctcgcacatgag

SEQ ID NO: 379780 - DNA, 53 bp, Artificial
  Synthetic oligonucleotide
ctaggcaccacaccaggtgactgcggctgcccctacatctacaagagggaaaa

SEQ ID NO: 379781 - DNA, 59 bp, Artificial
  Synthetic oligonucleotide
ctaggcacggttgcatattagctaggcacggttgcgacgaagattcaggggacttccga

SEQ ID NO: 379782 - DNA, 56 bp, Artificial
  Synthetic oligonucleotide
ctaggcacggttgcgacgaggattcaggggacttccgagtctctcctcaacaaaaa

SEQ ID NO: 379783 - DNA, 55 bp, Artificial
  Synthetic oligonucleotide
ctaggcagagtcgggcggaataagcctggagccgcattgcgaataggcttcacag

SEQ ID NO: 379784 - DNA, 55 bp, Artificial
  Synthetic oligonucleotide
ctaggcagagttgacgcaggaactttaaagttaagcattgataacatcggcttgc

SEQ ID NO: 379785 - DNA, 60 bp, Artificial
  Synthetic oligonucleotide
ctaggcagatggtgcatgcgatgagaacaattgggactcatcctagctccagtgctggtc

SEQ ID NO: 379786 - DNA, 55 bp, Artificial
  Synthetic oligonucleotide
ctaggcagggaggcctcaacggaggggccttcacagctaccctacatagacactt

SEQ ID NO: 379787 - DNA, 57 bp, Artificial
  Synthetic oligonucleotide
ctaggcatgatgaaacaacactcgtcagatcacaggttgacgctttcaacggcgaaa

SEQ ID NO: 379788 - DNA, 55 bp, Artificial
  Synthetic oligonucleotide
ctaggcatggatcactccgtgtactgatcgaactacttaagcgtgaatgttcgga

SEQ ID NO: 379789 - DNA, 57 bp, Artificial
  Synthetic oligonucleotide
ctaggccagggtgaggtggtactgatagggaacttaattactcacacggacaatgag

SEQ ID NO: 379790 - DNA, 55 bp, Artificial
  Synthetic oligonucleotide
ctaggccatggcttcatgcattaggacaacacgtctatgacacctatggggatac

SEQ ID NO: 379791 - DNA, 60 bp, Artificial
  Synthetic oligonucleotide
ctaggccatggcttcatggattgggaatacatatctataacacttatggggatacgtggg

SEQ ID NO: 379792 - DNA, 55 bp, Artificial
  Synthetic oligonucleotide
ctaggccctggctccatggcttagggcaacatatttatgacacatatggggatac

SEQ ID NO: 379793 - DNA, 55 bp, Artificial
  Synthetic oligonucleotide
ctaggccctggtaacgctcccaagctcagcaccaagactaaattctggaggtcct

SEQ ID NO: 379794 - DNA, 60 bp, Artificial
  Synthetic oligonucleotide
ctaggcctaggaactagggtgcgaactcccacaggtcgtgatctcctcatgaccaatcac

SEQ ID NO: 379795 - DNA, 60 bp, Artificial
  Synthetic oligonucleotide
ctaggcgcattggtagaagccctagacctacatggctatggacacccatatgtgacctac

SEQ ID NO: 379796 - DNA, 60 bp, Artificial
  Synthetic oligonucleotide
ctaggcgctgacattcgtgcggttaaggtgtcagttcactggacatctcagaagcccact

SEQ ID NO: 379797 - DNA, 60 bp, Artificial
  Synthetic oligonucleotide
ctaggcggcaaaataatagtgggggatctcgaagcaacagggtctcgcgtgattgatgcg

SEQ ID NO: 379798 - DNA, 55 bp, Artificial
  Synthetic oligonucleotide
ctaggcggcaatgatcttgcaaaatacatagagttgcccacagacacaacaggca

SEQ ID NO: 379799 - DNA, 52 bp, Artificial
  Synthetic oligonucleotide
ctaggcgtctcacgaggattggttatgtcgtatggttaacgcagagtacgaa

SEQ ID NO: 379800 - DNA, 55 bp, Artificial
  Synthetic oligonucleotide
ctaggcgtgggcacagtgctgaataaggatgatccgatcagccgagccaaacgca

SEQ ID NO: 379801 - DNA, 56 bp, Artificial
  Synthetic oligonucleotide
ctaggcgttgatgctcaactcgtcaacaatggagacgacaatgtcctaatctgctc

SEQ ID NO: 379802 - DNA, 55 bp, Artificial
  Synthetic oligonucleotide
ctaggctaggatgcccatatgcctactgctaacctcggcgcatatccggttgacg

SEQ ID NO: 379803 - DNA, 55 bp, Artificial
  Synthetic oligonucleotide
ctaggctgcacaggtgagataaagctcagagcagagcgtccgagcacggagcagg

SEQ ID NO: 379804 - DNA, 59 bp, Artificial
  Synthetic oligonucleotide
ctaggctgtacccctgctgaaggggaatattggacaacagcccgtccatgtgttactga

SEQ ID NO: 379805 - DNA, 57 bp, Artificial
  Synthetic oligonucleotide
ctaggcttaacaccaagttcgctatatccgataggacaagtgtaatttctgccgtaa

SEQ ID NO: 379806 - DNA, 60 bp, Artificial
  Synthetic oligonucleotide
ctaggcttatcggtatggggcacaaggacccacagtacacatctatgattgttcagtatt

SEQ ID NO: 379807 - DNA, 54 bp, Artificial
  Synthetic oligonucleotide
ctaggcttattgaagcgtccagcttgaatgactcagtggcgatgaggcagacgt

SEQ ID NO: 379808 - DNA, 52 bp, Artificial
  Synthetic oligonucleotide
ctagggaactcctaaggagaggggaaaccaacatggggttggcggtctcacg

SEQ ID NO: 379809 - DNA, 54 bp, Artificial
  Synthetic oligonucleotide
ctagggaagaccgtgctcccaggcctagggcatgcttggctagacgccttccac

SEQ ID NO: 379810 - DNA, 55 bp, Artificial
  Synthetic oligonucleotide
ctagggaatgctgggtaaatcattaccaactgccctctgctgttataccagagga

SEQ ID NO: 379811 - DNA, 53 bp, Artificial
  Synthetic oligonucleotide
ctagggaattccttgggttttatacgggtcgcaagttggagagataccagaag

SEQ ID NO: 379812 - DNA, 52 bp, Artificial
  Synthetic oligonucleotide
ctagggacacccagatactcagctcaagacacacacttaaacaagatgacca

SEQ ID NO: 379813 - DNA, 55 bp, Artificial
  Synthetic oligonucleotide
ctagggagaagattttgtctgttaagcagaagtgtttacctgataacactgtccc

SEQ ID NO: 379814 - DNA, 58 bp, Artificial
  Synthetic oligonucleotide
ctagggagcacaatctacaaccctgtaatggcccttcacactattactcctgctgaga

SEQ ID NO: 379815 - DNA, 53 bp, Artificial
  Synthetic oligonucleotide
ctagggaggaggaaatgacgccgaaggcgtcgtaagctccgaaggatcacact

SEQ ID NO: 379816 - DNA, 55 bp, Artificial
  Synthetic oligonucleotide
ctagggaggagtgcacttgggtcttcaaaccacatgagattcttaagacagcaac

SEQ ID NO: 379817 - DNA, 58 bp, Artificial
  Synthetic oligonucleotide
ctagggcaatggctgtacagcgggataagggagataggagctgatctactccagctgg

SEQ ID NO: 379818 - DNA, 55 bp, Artificial
  Synthetic oligonucleotide
ctagggcagagattgatcccatggcagtgatgctgtcaaagtattctcttcctat

SEQ ID NO: 379819 - DNA, 50 bp, Artificial
  Synthetic oligonucleotide
ctagggcagaggggcgcgaagcctacgtctctggtagtccgcaactccag

SEQ ID NO: 379820 - DNA, 51 bp, Artificial
  Synthetic oligonucleotide
ctagggcagcatagagcaaaagtagaggagttaagacagcatctattgaga

SEQ ID NO: 379821 - DNA, 60 bp, Artificial
  Synthetic oligonucleotide
ctagggcagtatcagaagagcaaactcaaccgagaggcttatgcaaaggatcttctcaaa

SEQ ID NO: 379822 - DNA, 55 bp, Artificial
  Synthetic oligonucleotide
ctagggccacaagatgcagcaaaatatctcaaatccaactcagacttcgcaaaca

SEQ ID NO: 379823 - DNA, 57 bp, Artificial
  Synthetic oligonucleotide
ctagggccatccacccagtgtgacctacacgcacggctcttccccctgttacaagga

SEQ ID NO: 379824 - DNA, 55 bp, Artificial
  Synthetic oligonucleotide
ctagggcgaacattctatgcaacaggtgacataataggggatataagacaagcac

SEQ ID NO: 379825 - DNA, 52 bp, Artificial
  Synthetic oligonucleotide
ctagggcggcgtccgtagagcgaccatgactgctgacccgctgcgtcatatt

SEQ ID NO: 379826 - DNA, 60 bp, Artificial
  Synthetic oligonucleotide
ctagggctcacaggcgaactggtggatccacccttccatgaatttgcctacgagagtctg

SEQ ID NO: 379827 - DNA, 60 bp, Artificial
  Synthetic oligonucleotide
ctagggctcatggtgtgcagtggggtccattttctgttccctaacagatgtggagtaatc

SEQ ID NO: 379828 - DNA, 56 bp, Artificial
  Synthetic oligonucleotide
ctagggctgaggtcgctgtgtaccaggacgtatacgctgtgcacgcaccgacgtca

SEQ ID NO: 379829 - DNA, 60 bp, Artificial
  Synthetic oligonucleotide
ctagggctgttgcttctgccttgaatgctgacgggtggcttactatttggatcctcaatc

SEQ ID NO: 379830 - DNA, 55 bp, Artificial
  Synthetic oligonucleotide
ctagggctttagaagaatccttctttaactcagagattcatggggtcaaccgaat

SEQ ID NO: 379831 - DNA, 55 bp, Artificial
  Synthetic oligonucleotide
ctagggcttttgtactagatgatctgtctccagatgagatatggaatcctacgga

SEQ ID NO: 379832 - DNA, 55 bp, Artificial
  Synthetic oligonucleotide
ctaggggagaagcagccaaggggttgtttcccaccaaggacgacccgtctgcgca

SEQ ID NO: 379833 - DNA, 52 bp, Artificial
  Synthetic oligonucleotide
ctaggggatagggcaccgcgtacaccgtttctacggataggtcccccaacac

SEQ ID NO: 379834 - DNA, 53 bp, Artificial
  Synthetic oligonucleotide
ctaggggatctcacaagggacgtttagtagtcaaaacaaatccaacaaaccca

SEQ ID NO: 379835 - DNA, 53 bp, Artificial
  Synthetic oligonucleotide
ctaggggatgctaaagtagtaatagcaacatattgggggctgcatacaggaga

SEQ ID NO: 379836 - DNA, 60 bp, Artificial
  Synthetic oligonucleotide
ctaggggcaaccatgtatctcccactcactacgtgccggagacagacacttcacgccaaa

SEQ ID NO: 379837 - DNA, 57 bp, Artificial
  Synthetic oligonucleotide
ctaggggcaataaaaactatgcactacactctgacgactacaccccccaaggacagc

SEQ ID NO: 379838 - DNA, 55 bp, Artificial
  Synthetic oligonucleotide
ctaggggcaggtctttttacacctaaatgctgcgttgatgctacgttttaccctg

SEQ ID NO: 379839 - DNA, 55 bp, Artificial
  Synthetic oligonucleotide
ctaggggcattcccaaatatgctcatggtgttggtatttcatctgaatctcggtt

SEQ ID NO: 379840 - DNA, 60 bp, Artificial
  Synthetic oligonucleotide
ctaggggccatcatcggcaatgggaaaatcaagttgcagcctcacatcgtcaagaagatt

SEQ ID NO: 379841 - DNA, 59 bp, Artificial
  Synthetic oligonucleotide
ctaggggctgctatgttagtaataagaacatattggggcctacactcaggagaacgaga

SEQ ID NO: 379842 - DNA, 54 bp, Artificial
  Synthetic oligonucleotide
ctagggggcgttctggttcgggagggggtgtgcacaagtgtcatacctaaagta

SEQ ID NO: 379843 - DNA, 58 bp, Artificial
  Synthetic oligonucleotide
ctaggggggatagccccattgcatttgggtaaatgtaacattgctggatggctcctgg

SEQ ID NO: 379844 - DNA, 58 bp, Artificial
  Synthetic oligonucleotide
ctaggggtacaggtctgacccataggataggtaagcgtttctgtgctaagtctgtcta

SEQ ID NO: 379845 - DNA, 56 bp, Artificial
  Synthetic oligonucleotide
ctaggggtggtggtcttacgcatcgcactggtaaacgcttttgtattaagtcgata

SEQ ID NO: 379846 - DNA, 55 bp, Artificial
  Synthetic oligonucleotide
ctagggtcatgggaagggcctcgcactgtaagggtgcgagatgtgctgcgaatag

SEQ ID NO: 379847 - DNA, 55 bp, Artificial
  Synthetic oligonucleotide
ctagggtctcacccctagcatgccaacgatagctcctgcgtcgcgacccacactg

SEQ ID NO: 379848 - DNA, 55 bp, Artificial
  Synthetic oligonucleotide
ctagggtctcacccctagcatgccaccggcagtccctgcgtctcactccacactt

SEQ ID NO: 379849 - DNA, 55 bp, Artificial
  Synthetic oligonucleotide
ctagggtctcgctcctagtgtgccaccgacggtcctcgcgttgcactccacactt

SEQ ID NO: 379850 - DNA, 55 bp, Artificial
  Synthetic oligonucleotide
ctagggtgagagaggaatctctataaatattccgagccgctaacgcggctcctcc

SEQ ID NO: 379851 - DNA, 55 bp, Artificial
  Synthetic oligonucleotide
ctagggtggaatctcataagattcaaggacaagacagatgtgttcaacatggaag

SEQ ID NO: 379852 - DNA, 51 bp, Artificial
  Synthetic oligonucleotide
ctagggttattgaagcaagcagtgtgaatgatactttgctgtttagaacaa

SEQ ID NO: 379853 - DNA, 50 bp, Artificial
  Synthetic oligonucleotide
ctagggttcgtagtttgtacaggcttgacgctctgagctaaggcatggat

SEQ ID NO: 379854 - DNA, 58 bp, Artificial
  Synthetic oligonucleotide
ctagggtttggggcgtacatgtccaaggcatatggcaccgaccccaacatcagaactg

SEQ ID NO: 379855 - DNA, 57 bp, Artificial
  Synthetic oligonucleotide
ctaggtaaactagccacagttatcatttcgggtcgctttctagtttgctataatata

SEQ ID NO: 379856 - DNA, 55 bp, Artificial
  Synthetic oligonucleotide
ctaggtaaccaccccgcacgcttagacgtttgtgagcgataataggcttgcttgt

SEQ ID NO: 379857 - DNA, 60 bp, Artificial
  Synthetic oligonucleotide
ctaggtaacgcggcaaccccaagataccgatcagatatgatagacatctattcacatgtt

SEQ ID NO: 379858 - DNA, 57 bp, Artificial
  Synthetic oligonucleotide
ctaggtagtttaaattcagtagatagggtagtgtacagcattatatatccggtagaa

SEQ ID NO: 379859 - DNA, 53 bp, Artificial
  Synthetic oligonucleotide
ctaggtcactcatgaagggcaagaggtgtctctcaaatagagatgggtaaagt

SEQ ID NO: 379860 - DNA, 57 bp, Artificial
  Synthetic oligonucleotide
ctaggtcagcgacttctcattctgaacggacaccggttcgggacgagagccccattc

SEQ ID NO: 379861 - DNA, 60 bp, Artificial
  Synthetic oligonucleotide
ctaggtcattgtatagtggtttgcagtcttactatgagcagctgccatccctaaacccta

SEQ ID NO: 379862 - DNA, 56 bp, Artificial
  Synthetic oligonucleotide
ctaggtcccagtccgggttgacctttgcatcacgtggtgctgatttggacaacgag

SEQ ID NO: 379863 - DNA, 60 bp, Artificial
  Synthetic oligonucleotide
ctaggtcccccagaagacgcactccctctcctcgcaggagaagatctcaatcaccgcgtc

SEQ ID NO: 379864 - DNA, 53 bp, Artificial
  Synthetic oligonucleotide
ctaggtccgaccgctggggttttactgtccggtacaagatttgacgaaagatg

SEQ ID NO: 379865 - DNA, 60 bp, Artificial
  Synthetic oligonucleotide
ctaggtctaccagcagttcaattacaggtctaccattatcaagccacctgatgactgtat

SEQ ID NO: 379866 - DNA, 55 bp, Artificial
  Synthetic oligonucleotide
ctaggtctcgtatgtggcttaatgaactgtcaccagctgtacagaatcagcttcg

SEQ ID NO: 379867 - DNA, 60 bp, Artificial
  Synthetic oligonucleotide
ctaggtctgaatcccatgaatctgcaatcctagtgtatctagggctcatagtgtgaagtg

SEQ ID NO: 379868 - DNA, 53 bp, Artificial
  Synthetic oligonucleotide
ctaggtgaaaaattcatgagcggagacacagaccccgttaaaaactttatacc

SEQ ID NO: 379869 - DNA, 55 bp, Artificial
  Synthetic oligonucleotide
ctaggtgacggcctttttgcctcgccttacctggggcatcccttggtagcccata

SEQ ID NO: 379870 - DNA, 59 bp, Artificial
  Synthetic oligonucleotide
ctaggtgactccctctatggtgcagcatctctaaatgacttcggtgttttggctgttag

SEQ ID NO: 379871 - DNA, 55 bp, Artificial
  Synthetic oligonucleotide
ctaggtgagttagtaagagatggcacggtcgcaatttcattcggacctgggattt

SEQ ID NO: 379872 - DNA, 55 bp, Artificial
  Synthetic oligonucleotide
ctaggtgcaaagaatgaacccgtagcagatatgatttacaggttaactcatggta

SEQ ID NO: 379873 - DNA, 60 bp, Artificial
  Synthetic oligonucleotide
ctaggtgcatagttgactacccatacaggctttggcattacccctgcactgtcaacttta

SEQ ID NO: 379874 - DNA, 60 bp, Artificial
  Synthetic oligonucleotide
ctaggtgcatggtcgactatccatacaggctttggcactacccttgcaccgtcaacttta

SEQ ID NO: 379875 - DNA, 55 bp, Artificial
  Synthetic oligonucleotide
ctaggtgccatctctacaaacgttgaaattgggaaaagggactgtctagaccttc

SEQ ID NO: 379876 - DNA, 60 bp, Artificial
  Synthetic oligonucleotide
ctaggtgcgatgctgcgtcacgcacaatgacatctagtcctttgcgggtgttttacgcaa

SEQ ID NO: 379877 - DNA, 51 bp, Artificial
  Synthetic oligonucleotide
ctaggtgcttggttgattacccatacagactctggcactacccctgcactg

SEQ ID NO: 379878 - DNA, 57 bp, Artificial
  Synthetic oligonucleotide
ctaggtggatttcctttagctgcggttctttagcagccgcactcctttgtcctataa

SEQ ID NO: 379879 - DNA, 60 bp, Artificial
  Synthetic oligonucleotide
ctaggtggcaaatggtggacatctgactggggtgttctcaccaatttgggcatcctgcta

SEQ ID NO: 379880 - DNA, 53 bp, Artificial
  Synthetic oligonucleotide
ctaggtggcatgaggttagggttagggaaaaaagtgggaggagtggaacagga

SEQ ID NO: 379881 - DNA, 55 bp, Artificial
  Synthetic oligonucleotide
ctaggtggttccagcgggacagcaccaaggcgaataacctaaccctctacccaca

SEQ ID NO: 379882 - DNA, 51 bp, Artificial
  Synthetic oligonucleotide
ctaggtggttttcagcgcacagctggaactaccgactcccaggtattcatt

SEQ ID NO: 379883 - DNA, 59 bp, Artificial
  Synthetic oligonucleotide
ctaggtgtaactatcaagcaggacataaccaggtaggatctttacaatacttggcacta

SEQ ID NO: 379884 - DNA, 57 bp, Artificial
  Synthetic oligonucleotide
ctaggtgtatcaaataggggttgaggtgttaggcgtatcagatagggggtagcgcaa

SEQ ID NO: 379885 - DNA, 54 bp, Artificial
  Synthetic oligonucleotide
ctaggtgtcccactaagtctcccccgaaacctgataatgatccctatggtggtt

SEQ ID NO: 379886 - DNA, 60 bp, Artificial
  Synthetic oligonucleotide
ctaggtgtcgatgttctgaacaccatgtctctgggtagcactgctctcaggaccaatgtt

SEQ ID NO: 379887 - DNA, 50 bp, Artificial
  Synthetic oligonucleotide
ctaggtgttcacgataacgtggccatcttaccaactcacgcctcacctgg

SEQ ID NO: 379888 - DNA, 55 bp, Artificial
  Synthetic oligonucleotide
ctaggttctatataactatgactcaagctgacaaagccgccttgataaccagagc

SEQ ID NO: 379889 - DNA, 52 bp, Artificial
  Synthetic oligonucleotide
ctaggttctatcctaacctcaccaaatacttaccgttagacaagggtattaa

SEQ ID NO: 379890 - DNA, 58 bp, Artificial
  Synthetic oligonucleotide
ctaggttgtggtattgttcccgcaccgcaatatatagcaaagagtcttggtacaggtc

SEQ ID NO: 379891 - DNA, 57 bp, Artificial
  Synthetic oligonucleotide
ctaggttgttggcttacaattatgaaacactaatggcatgcattacaatgaacatgc

SEQ ID NO: 379892 - DNA, 55 bp, Artificial
  Synthetic oligonucleotide
ctaggtttaaccttagcattctgttccagagtttcagatctagaaccctatatcc

SEQ ID NO: 379893 - DNA, 57 bp, Artificial
  Synthetic oligonucleotide
ctaggtttacagatttggagttgcatgggttaactcctctttctacacagatgatga

SEQ ID NO: 379894 - DNA, 55 bp, Artificial
  Synthetic oligonucleotide
ctaggtttactagtttgatcgcaagtctgtcattggccgtatgataggttggggt

SEQ ID NO: 379895 - DNA, 55 bp, Artificial
  Synthetic oligonucleotide
ctaggtttagtcggcactggtaaatagcccacgggcgaagactgctaaagccgct

SEQ ID NO: 379896 - DNA, 54 bp, Artificial
  Synthetic oligonucleotide
ctaggtttccgcctggtacggtactccctcaaggctactatattgaaggctcgg

SEQ ID NO: 379897 - DNA, 55 bp, Artificial
  Synthetic oligonucleotide
ctaggtttcttcggaaggacttcggtccgtgtacctctagcacaagatgctagtt

SEQ ID NO: 379898 - DNA, 57 bp, Artificial
  Synthetic oligonucleotide
ctaggttttgtaattgggaaagtgcttcttctttggtgagagagcatttgggatatg

SEQ ID NO: 379899 - DNA, 52 bp, Artificial
  Synthetic oligonucleotide
ctagtaaaaggatcctttggaaaagcactaagagtaatatttactaaatgtt

SEQ ID NO: 379900 - DNA, 59 bp, Artificial
  Synthetic oligonucleotide
ctagtaaaattatggtatcagctagagaaagaacccatagcaggagcagaaacttacta

SEQ ID NO: 379901 - DNA, 55 bp, Artificial
  Synthetic oligonucleotide
ctagtaaaccaccatacttacaagcaacagcatatggtattggtcacactggtgt

SEQ ID NO: 379902 - DNA, 54 bp, Artificial
  Synthetic oligonucleotide
ctagtaaataaagtacagaaattcaagggctcagaacagagggttagttttgtc

SEQ ID NO: 379903 - DNA, 50 bp, Artificial
  Synthetic oligonucleotide
ctagtaaatgccgataggctaatatccagcaaaactggccacttatacat

SEQ ID NO: 379904 - DNA, 60 bp, Artificial
  Synthetic oligonucleotide
ctagtaaatgttaaatacagctcatgtagttgtatattatgcctgcttagaaagcaacat

SEQ ID NO: 379905 - DNA, 60 bp, Artificial
  Synthetic oligonucleotide
ctagtaactccatccagttggttgtgctggtcttcacagcctcaaaagagctcacatcca

SEQ ID NO: 379906 - DNA, 53 bp, Artificial
  Synthetic oligonucleotide
ctagtaacttccattcggcatggttcctttcggcatggaggtagaagttcgta

SEQ ID NO: 379907 - DNA, 55 bp, Artificial
  Synthetic oligonucleotide
ctagtaagacaagatgggtcaaaatcctctactaggtgaaatgatatctctgaca

SEQ ID NO: 379908 - DNA, 55 bp, Artificial
  Synthetic oligonucleotide
ctagtaagatacgcagtgtcagcgctggacgtgcactgtatatcccaccttatga

SEQ ID NO: 379909 - DNA, 56 bp, Artificial
  Synthetic oligonucleotide
ctagtaagccgagaatgaaatctatcacaatgttagacaaacatacattaaagacg

SEQ ID NO: 379910 - DNA, 60 bp, Artificial
  Synthetic oligonucleotide
ctagtaagctgcctatgtggtccccagcagataaggctgctggccatattgcatttaaag

SEQ ID NO: 379911 - DNA, 58 bp, Artificial
  Synthetic oligonucleotide
ctagtaaggggccaaaacacagtacatgttgtaggcaaaggtggccattctggatcca

SEQ ID NO: 379912 - DNA, 60 bp, Artificial
  Synthetic oligonucleotide
ctagtaagtaccccaacatgtatgtcccagttggtgctgtgaccgaacaaggatatctca

SEQ ID NO: 379913 - DNA, 57 bp, Artificial
  Synthetic oligonucleotide
ctagtaagtttacaactttattcaacatggaagctaaggtgatggaacctgcagtac

SEQ ID NO: 379914 - DNA, 59 bp, Artificial
  Synthetic oligonucleotide
ctagtaatctgcttgatagggatgttagggaaattggattcaatacgtttgagtgccac

SEQ ID NO: 379915 - DNA, 60 bp, Artificial
  Synthetic oligonucleotide
ctagtaatgaatcaaacgaatgatcggccgctaatggatatatataacggagcttgtgac

SEQ ID NO: 379916 - DNA, 55 bp, Artificial
  Synthetic oligonucleotide
ctagtaatgacatagccactgctgttgattatgacactgctaccgcgattaccaa

SEQ ID NO: 379917 - DNA, 55 bp, Artificial
  Synthetic oligonucleotide
ctagtaatgtacaagatatccagcgagtgcttgtaacaggcaacagtttctatgc

SEQ ID NO: 379918 - DNA, 56 bp, Artificial
  Synthetic oligonucleotide
ctagtaattaacagtaatggtaacctaatcgctcctcgaggatacttcaaaatgcg

SEQ ID NO: 379919 - DNA, 53 bp, Artificial
  Synthetic oligonucleotide
ctagtacagcatgagagcagacttcccattgccggggcacaatacatccgtac

SEQ ID NO: 379920 - DNA, 55 bp, Artificial
  Synthetic oligonucleotide
ctagtaccccaaatacaactaccaggggaggatggatgtctcatgtcgctgtcgg

SEQ ID NO: 379921 - DNA, 60 bp, Artificial
  Synthetic oligonucleotide
ctagtacgtctacctggggttgtaacacagatcaatcgagatatcccatctggtgtgttg

SEQ ID NO: 379922 - DNA, 60 bp, Artificial
  Synthetic oligonucleotide
ctagtactacggctaaagccatggaacagatggcagggtcgagtgagcaagcagcagagg

SEQ ID NO: 379923 - DNA, 60 bp, Artificial
  Synthetic oligonucleotide
ctagtactgactcagtggaacccccaagacgtcaggagatgcacaataaggggcataata

SEQ ID NO: 379924 - DNA, 55 bp, Artificial
  Synthetic oligonucleotide
ctagtagagccgggagacaaaataacattcgaagcaactggaaatctagtggtac

SEQ ID NO: 379925 - DNA, 54 bp, Artificial
  Synthetic oligonucleotide
ctagtagcaccaaagatctgtcttggcgtttcgctcagcgcgtccccccgcgta

SEQ ID NO: 379926 - DNA, 59 bp, Artificial
  Synthetic oligonucleotide
ctagtagcatcaatctttgtgtggtaccctgataggcaataaagaccagtaagacgtaa

SEQ ID NO: 379927 - DNA, 56 bp, Artificial
  Synthetic oligonucleotide
ctagtagggcctacacctatcaatataattggaagaaatttgttaactcagcttgg

SEQ ID NO: 379928 - DNA, 54 bp, Artificial
  Synthetic oligonucleotide
ctagtagtacgacgcggtagtccccggctactacgcgtaaattgccgttgatac

SEQ ID NO: 379929 - DNA, 60 bp, Artificial
  Synthetic oligonucleotide
ctagtatacctcaaggagtgttctatcaacctcatcctgagcctataatacacacggaga

SEQ ID NO: 379930 - DNA, 54 bp, Artificial
  Synthetic oligonucleotide
ctagtataggacgaaagttctgcttccgggactggataagcatggaagttaaaa

SEQ ID NO: 379931 - DNA, 58 bp, Artificial
  Synthetic oligonucleotide
ctagtatggcaacatacaggtgtccccgcgtgtgtcacaggcccttacgggtgccatt

SEQ ID NO: 379932 - DNA, 53 bp, Artificial
  Synthetic oligonucleotide
ctagtattacccccgcggctccccaacctctgctaaccccgcttggctataaa

SEQ ID NO: 379933 - DNA, 53 bp, Artificial
  Synthetic oligonucleotide
ctagtattgttaagaccgaacccaatcggaccaggtcttatatcaagttaaaa

SEQ ID NO: 379934 - DNA, 56 bp, Artificial
  Synthetic oligonucleotide
ctagtcaaagaggccagcgctacggacgaaagcaccgttcacaaccgctcctaccg

SEQ ID NO: 379935 - DNA, 60 bp, Artificial
  Synthetic oligonucleotide
ctagtcaactgtccgctccatctctcagggcaacttgcaccgtcaaccacgactcccctg

SEQ ID NO: 379936 - DNA, 52 bp, Artificial
  Synthetic oligonucleotide
ctagtcaagactagagattcagttctatcagcgatgggaggtatcctctctg

SEQ ID NO: 379937 - DNA, 55 bp, Artificial
  Synthetic oligonucleotide
ctagtcaagggctgcctgatatacatggacctgatgtatggaggcgacgcgaggg

SEQ ID NO: 379938 - DNA, 55 bp, Artificial
  Synthetic oligonucleotide
ctagtcaccaacttttcgtacgctaccgcagtctggctgacttgtaccaatgcgt

SEQ ID NO: 379939 - DNA, 56 bp, Artificial
  Synthetic oligonucleotide
ctagtcacccgcagacagagcgcacgaacacgcgacacacacccagagacccaacc

SEQ ID NO: 379940 - DNA, 60 bp, Artificial
  Synthetic oligonucleotide
ctagtcagcgacgaggtaactcaagatatacaatgtataggcgtcctaatatttcgagac

SEQ ID NO: 379941 - DNA, 60 bp, Artificial
  Synthetic oligonucleotide
ctagtcagcgcaaggcagtcctgtcgactcttgtcggtaggtatggccgccgtacgaagc

SEQ ID NO: 379942 - DNA, 56 bp, Artificial
  Synthetic oligonucleotide
ctagtcaggacatagctgatcgagtaccaggcataacgttccctactcccaaacgt

SEQ ID NO: 379943 - DNA, 60 bp, Artificial
  Synthetic oligonucleotide
ctagtcatcaagaaccaagtacaaccattttggtaccttaccctggcatgtcatcagcga

SEQ ID NO: 379944 - DNA, 60 bp, Artificial
  Synthetic oligonucleotide
ctagtcatcaagaacccagtacaaccatcttgattccatatccaggaatgtcctctgcca

SEQ ID NO: 379945 - DNA, 55 bp, Artificial
  Synthetic oligonucleotide
ctagtcatgcacatatctgaaccaatcacacagtcattaagagacgtagccctgg

SEQ ID NO: 379946 - DNA, 55 bp, Artificial
  Synthetic oligonucleotide
ctagtcattctctgagtgaccgcctacctggttggggtaagacaccaggaacccc

SEQ ID NO: 379947 - DNA, 54 bp, Artificial
  Synthetic oligonucleotide
ctagtccaaacggcccagtcacggtatcaataacaggtatcctaattcccggaa

SEQ ID NO: 379948 - DNA, 57 bp, Artificial
  Synthetic oligonucleotide
ctagtccacactcttgttggtttagatggtgttctagcggtgggacctgacaacttc

SEQ ID NO: 379949 - DNA, 56 bp, Artificial
  Synthetic oligonucleotide
ctagtccaggagagggtgtacaggtcgtcacaattaaggcctaaatggaggaagcc

SEQ ID NO: 379950 - DNA, 55 bp, Artificial
  Synthetic oligonucleotide
ctagtccatcagaagtatattgtatagtccaagggaaaatgggacaagacgccag

SEQ ID NO: 379951 - DNA, 56 bp, Artificial
  Synthetic oligonucleotide
ctagtcccaaatcgtgacaggatcctcgcagctcttgcctaccacatgaaggcgaa

SEQ ID NO: 379952 - DNA, 59 bp, Artificial
  Synthetic oligonucleotide
ctagtcccacagtacaagccactcccaacagagatggataccctaggtcaatgatttga

SEQ ID NO: 379953 - DNA, 55 bp, Artificial
  Synthetic oligonucleotide
ctagtcccgcctcctgggtgaatgaaggccttttctggagataggtattggctct

SEQ ID NO: 379954 - DNA, 59 bp, Artificial
  Synthetic oligonucleotide
ctagtccgcaaaaccagattcctaccggtagcaggcggaacaagcagtgtgtacattga

SEQ ID NO: 379955 - DNA, 55 bp, Artificial
  Synthetic oligonucleotide
ctagtcgatcggtcgattactcgactagtagaagatagggccgatgcccggttgc

SEQ ID NO: 379956 - DNA, 55 bp, Artificial
  Synthetic oligonucleotide
ctagtcgcgtgatgcgatctttgttttggaatgagcctgcggtaggccagaagtt

SEQ ID NO: 379957 - DNA, 53 bp, Artificial
  Synthetic oligonucleotide
ctagtcggtgaattaggcaaatggccaacattgttagatgttgcgacagcttg

SEQ ID NO: 379958 - DNA, 56 bp, Artificial
  Synthetic oligonucleotide
ctagtcgtcttaagtagtggtcatatatctggatatatggacagaattcatgtacg

SEQ ID NO: 379959 - DNA, 55 bp, Artificial
  Synthetic oligonucleotide
ctagtctaaaggaagccttatctcttcaaacggatccagtcaaatataccgtaac

SEQ ID NO: 379960 - DNA, 55 bp, Artificial
  Synthetic oligonucleotide
ctagtctatatcgcagtgacataccttgatatcgctctaggcgtttctaaggcgg

SEQ ID NO: 379961 - DNA, 58 bp, Artificial
  Synthetic oligonucleotide
ctagtctcctcaaaagatcagttcttttggataactgtgattggctaagattcccaag

SEQ ID NO: 379962 - DNA, 54 bp, Artificial
  Synthetic oligonucleotide
ctagtctcggaaatagcctcgcaggctggggacgaaagaaccgctagagggact

SEQ ID NO: 379963 - DNA, 56 bp, Artificial
  Synthetic oligonucleotide
ctagtctctggggtaccggtggggctgtattgacgatacaaacatttagtcatcgt

SEQ ID NO: 379964 - DNA, 55 bp, Artificial
  Synthetic oligonucleotide
ctagtctgattggtactgaaatagctggtgttcaagcacttaaaactccaactgc

SEQ ID NO: 379965 - DNA, 56 bp, Artificial
  Synthetic oligonucleotide
ctagtcttcgtgctcgctgtgcacatggcgacgtgcgcaacaatgagtgagtatta

SEQ ID NO: 379966 - DNA, 58 bp, Artificial
  Synthetic oligonucleotide
ctagtcttctacagccacatatgtccctttaacatgtggcgtgtactttttcgagaaa

SEQ ID NO: 379967 - DNA, 60 bp, Artificial
  Synthetic oligonucleotide
ctagtcttcttaccgcaccaaacaactggggcggcatcttccgtatgcatggcgttagca

SEQ ID NO: 379968 - DNA, 52 bp, Artificial
  Synthetic oligonucleotide
ctagtcttgtgctggctaagcttggtaaggatgccacaaagccgcagcaagt

SEQ ID NO: 379969 - DNA, 59 bp, Artificial
  Synthetic oligonucleotide
ctagtgaaactatggtaccagttagagacagaacccatagtaggagcagagactttcta

SEQ ID NO: 379970 - DNA, 55 bp, Artificial
  Synthetic oligonucleotide
ctagtgaacgattctgaactgcaggtgcatgtgttacgaggtccgaaacatttcc

SEQ ID NO: 379971 - DNA, 60 bp, Artificial
  Synthetic oligonucleotide
ctagtgaactagcagtccaacaactatattgtcaagacgcagttgagctggctgctaatg

SEQ ID NO: 379972 - DNA, 55 bp, Artificial
  Synthetic oligonucleotide
ctagtgaattcaagtctagattttttatctggtcacaagaagtacccttacttac

SEQ ID NO: 379973 - DNA, 58 bp, Artificial
  Synthetic oligonucleotide
ctagtgaattggggttctatatatagtgagaccccaaatggcattatggtaataatcc

SEQ ID NO: 379974 - DNA, 60 bp, Artificial
  Synthetic oligonucleotide
ctagtgaattttgcactggagttccagggaggatactttgagctagttgattcactcgcg

SEQ ID NO: 379975 - DNA, 60 bp, Artificial
  Synthetic oligonucleotide
ctagtgactcatggtcagcaagataggactttcatcttgccagagtcatatgaagagctc

SEQ ID NO: 379976 - DNA, 55 bp, Artificial
  Synthetic oligonucleotide
ctagtgactgaatacaagcaatcgcaagtggttctggatcttctaagggctaggg

SEQ ID NO: 379977 - DNA, 55 bp, Artificial
  Synthetic oligonucleotide
ctagtgacttaactgtgcaagcaatgtatgtaccaccaggtgcgccaaacccaac

SEQ ID NO: 379978 - DNA, 51 bp, Artificial
  Synthetic oligonucleotide
ctagtgagccttacggctcggcaacttacgcgctggatgtagcagccggtc

SEQ ID NO: 379979 - DNA, 55 bp, Artificial
  Synthetic oligonucleotide
ctagtgagtatagattaagacattgtaacacctcaaccataacacaagcctgtcc

SEQ ID NO: 379980 - DNA, 52 bp, Artificial
  Synthetic oligonucleotide
ctagtgagtatgtccaaacttcactcagttcgacgtcaacagattgcgagat

SEQ ID NO: 379981 - DNA, 58 bp, Artificial
  Synthetic oligonucleotide
ctagtgagtcactgagttcgagatataactggcagtatttagtttatactgggaaaac

SEQ ID NO: 379982 - DNA, 52 bp, Artificial
  Synthetic oligonucleotide
ctagtgataacaaaactattactgctcatgaacgtggtcttggaggaacaac

SEQ ID NO: 379983 - DNA, 59 bp, Artificial
  Synthetic oligonucleotide
ctagtgataattcgagaggaatgaattacgagacgactatgtttaataaagtggcaatc

SEQ ID NO: 379984 - DNA, 52 bp, Artificial
  Synthetic oligonucleotide
ctagtgatatagatcccaaatcttcgtataagatcgtggattcagcatccac

SEQ ID NO: 379985 - DNA, 56 bp, Artificial
  Synthetic oligonucleotide
ctagtgatatggatatctccaaaattgaagacttagtcgcagaatatgcttatgta

SEQ ID NO: 379986 - DNA, 59 bp, Artificial
  Synthetic oligonucleotide
ctagtgatcactgatgttgtagatggggtcaatcataaattgaacgtgacgactaatac

SEQ ID NO: 379987 - DNA, 51 bp, Artificial
  Synthetic oligonucleotide
ctagtgatggcaactatagtgagtatgtactaataaattgtaatacatcaa

SEQ ID NO: 379988 - DNA, 57 bp, Artificial
  Synthetic oligonucleotide
ctagtgattactgacgtcgtggacggcgttaaccataaactagatgttacaacgaca

SEQ ID NO: 379989 - DNA, 56 bp, Artificial
  Synthetic oligonucleotide
ctagtgcaatttgttcagtggtgcgtagggctttcccccactgtctggcttttagt

SEQ ID NO: 379990 - DNA, 55 bp, Artificial
  Synthetic oligonucleotide
ctagtgcagctcgactagaaccctgtaatggtactgatccagaccacgttagtag

SEQ ID NO: 379991 - DNA, 55 bp, Artificial
  Synthetic oligonucleotide
ctagtgcaggataatatatcctattggcataggcaatgggcggtccccatgatac

SEQ ID NO: 379992 - DNA, 60 bp, Artificial
  Synthetic oligonucleotide
ctagtgcaggctacaatcatgacgtctccatacttcgtgcatggattcgcacgactaaaa

SEQ ID NO: 379993 - DNA, 55 bp, Artificial
  Synthetic oligonucleotide
ctagtgcagggtacccatatgtaacattagggattaagaaaagggatgtcatttc

SEQ ID NO: 379994 - DNA, 55 bp, Artificial
  Synthetic oligonucleotide
ctagtgcatggggttgcgaatcatggggctgcctagctattggaacagggtgtgt

SEQ ID NO: 379995 - DNA, 60 bp, Artificial
  Synthetic oligonucleotide
ctagtgccagtgctgcccaacggagaggtagagtgggcaggaatccaagtcaaataggag

SEQ ID NO: 379996 - DNA, 55 bp, Artificial
  Synthetic oligonucleotide
ctagtgcgcatttcagtgcgcaagggccattcccaccaggaggctgctaccgagc

SEQ ID NO: 379997 - DNA, 54 bp, Artificial
  Synthetic oligonucleotide
ctagtgcggccccattccgtggctcccgaacaggtagccccctcgccggacttg

SEQ ID NO: 379998 - DNA, 55 bp, Artificial
  Synthetic oligonucleotide
ctagtgctaacttaggaaacacatacccagccgatacttcttacatagtcaaagg

SEQ ID NO: 379999 - DNA, 60 bp, Artificial
  Synthetic oligonucleotide
ctagtgctcactactctttcttccaccatgggttcatgtgtcctactgtgagataacctc

SEQ ID NO: 380000 - DNA, 55 bp, Artificial
  Synthetic oligonucleotide
ctagtgctctccctggtctcctagatggtgctatgcccgagttacctaaggtcac

SEQ ID NO: 380001 - DNA, 60 bp, Artificial
  Synthetic oligonucleotide
ctagtgctgcctcacagccaattgtaggcctcaattatcatttcttctcagttgggggag

SEQ ID NO: 380002 - DNA, 59 bp, Artificial
  Synthetic oligonucleotide
ctagtgctggtgaccgtgttgagcttagttcaacctgaacaaggaaggaagtatctgct

SEQ ID NO: 380003 - DNA, 56 bp, Artificial
  Synthetic oligonucleotide
ctagtgcttaacccctcggttgcggccacactgggatttggggcgtacatgtccaa

SEQ ID NO: 380004 - DNA, 55 bp, Artificial
  Synthetic oligonucleotide
ctagtggacagctaactgttagatcgacatccccgaatttgaggtatccgatagc

SEQ ID NO: 380005 - DNA, 60 bp, Artificial
  Synthetic oligonucleotide
ctagtggaccatcgacagaaaacaatgcatgtcattgactcttttggttccgtggattct

SEQ ID NO: 380006 - DNA, 60 bp, Artificial
  Synthetic oligonucleotide
ctagtggcagatagaaatgtggatgtgtttagagcggcgatgtcggacccaatctatcgg

SEQ ID NO: 380007 - DNA, 56 bp, Artificial
  Synthetic oligonucleotide
ctagtggccccataggttagttacagtaagaagccccgacatctaaagagatataa

SEQ ID NO: 380008 - DNA, 60 bp, Artificial
  Synthetic oligonucleotide
ctagtggcttgtgggcaagctgacagtgcattggtaacaaagcatgttgttaaaggaaag

SEQ ID NO: 380009 - DNA, 60 bp, Artificial
  Synthetic oligonucleotide
ctagtgggaagattgtcgccatacacactggtaagctgttagggttctcaaagatgtgta

SEQ ID NO: 380010 - DNA, 60 bp, Artificial
  Synthetic oligonucleotide
ctagtgggagcagcatctctttctgtggtgtaaatagtgacactgtgggttggtcttggc

SEQ ID NO: 380011 - DNA, 50 bp, Artificial
  Synthetic oligonucleotide
ctagtgggccaaatgttctccttccaacctcgccgacattggactaccca

SEQ ID NO: 380012 - DNA, 57 bp, Artificial
  Synthetic oligonucleotide
ctagtgggtcccacaagagaagacaacgcgacgccgttttgagatcacctgttcgta

SEQ ID NO: 380013 - DNA, 60 bp, Artificial
  Synthetic oligonucleotide
ctagtggtatcgcagctactccggatcccacaagccgtcatggatatggtgacgggggcc

SEQ ID NO: 380014 - DNA, 53 bp, Artificial
  Synthetic oligonucleotide
ctagtggtattatgcctacaactcggttacgacgttgaggagtgccttaaaat

SEQ ID NO: 380015 - DNA, 50 bp, Artificial
  Synthetic oligonucleotide
ctagtggtattcagactaatgggactgagatcttcagacctggaggagga

SEQ ID NO: 380016 - DNA, 56 bp, Artificial
  Synthetic oligonucleotide
ctagtggttctatggttacctctgatgcccaaatattcaataaaccttattggtta

SEQ ID NO: 380017 - DNA, 54 bp, Artificial
  Synthetic oligonucleotide
ctagtggttctttagtaaccagtgaagcatctatttttaatagaccttattggt

SEQ ID NO: 380018 - DNA, 60 bp, Artificial
  Synthetic oligonucleotide
ctagtgtacaagcagcaaaggttgtctatactctgcaaacggatgtgcacgctattgcaa

SEQ ID NO: 380019 - DNA, 55 bp, Artificial
  Synthetic oligonucleotide
ctagtgtatactcactccccccagacccagatcactttgatgggtataagcaaca

SEQ ID NO: 380020 - DNA, 60 bp, Artificial
  Synthetic oligonucleotide
ctagtgtccagatactagaagtccgtgccgtggcgctggctttgcgtttgtggccgacta

SEQ ID NO: 380021 - DNA, 60 bp, Artificial
  Synthetic oligonucleotide
ctagtgtgatggtgtatatcacgataaagaatgacacccgggatgtgcttctcctagtta

SEQ ID NO: 380022 - DNA, 56 bp, Artificial
  Synthetic oligonucleotide
ctagtgttcccacggtagcgtagcgaatcttgtgggccctgttcggtgtgcggtcg

SEQ ID NO: 380023 - DNA, 58 bp, Artificial
  Synthetic oligonucleotide
ctagtgttcctaataccaccataagtggtatagcaccgacggtgcgtatagatgccgg

SEQ ID NO: 380024 - DNA, 54 bp, Artificial
  Synthetic oligonucleotide
ctagtgttgtgattggggagaaaattgaggttaggaacctcgatggtaaggtgg

SEQ ID NO: 380025 - DNA, 56 bp, Artificial
  Synthetic oligonucleotide
ctagtgtttgaacctggactgttagatcgtgaggaacttttagatcgtgaagggct

SEQ ID NO: 380026 - DNA, 52 bp, Artificial
  Synthetic oligonucleotide
ctagttaaatacgctgctgaagttggatcgccaaacgatctagagccggcta

SEQ ID NO: 380027 - DNA, 55 bp, Artificial
  Synthetic oligonucleotide
ctagttaaggtgttaagaggccaggtagtacagggactagtgtggctattactgg

SEQ ID NO: 380028 - DNA, 56 bp, Artificial
  Synthetic oligonucleotide
ctagttacatacaacctcatattgcaacctatgtgacagcctatgcacgtatcctt

SEQ ID NO: 380029 - DNA, 55 bp, Artificial
  Synthetic oligonucleotide
ctagttatatgtggtatgtcaaaaacgtaattcagcatgttagacatggtttact

SEQ ID NO: 380030 - DNA, 55 bp, Artificial
  Synthetic oligonucleotide
ctagttatgttagcgtggtttaaccacctttgtgctttatattatagtttatgcg

SEQ ID NO: 380031 - DNA, 60 bp, Artificial
  Synthetic oligonucleotide
ctagttcattacgaggacctcacagcacattggcacgcgttaggtgcggcacaaatggcg

SEQ ID NO: 380032 - DNA, 58 bp, Artificial
  Synthetic oligonucleotide
ctagttccctaagtactctaagagcctccggcttactgcctgtgttaagtgctgcggc

SEQ ID NO: 380033 - DNA, 52 bp, Artificial
  Synthetic oligonucleotide
ctagttccctcgggcttcttaaccctttagaaatctattgggagaagacgcc

SEQ ID NO: 380034 - DNA, 58 bp, Artificial
  Synthetic oligonucleotide
ctagttgaagagcttccactcggagagttttcacctggacgtatttcgagaaccatga

SEQ ID NO: 380035 - DNA, 55 bp, Artificial
  Synthetic oligonucleotide
ctagttgaaggcaacttgcaataaaatgagtggaaatgagacgcttaaagcatgg

SEQ ID NO: 380036 - DNA, 55 bp, Artificial
  Synthetic oligonucleotide
ctagttgaattgggagctgatctcaatgcacaagaggagcggtcacacgttactg

SEQ ID NO: 380037 - DNA, 58 bp, Artificial
  Synthetic oligonucleotide
ctagttgagaaaatggcatttacgtaaatatggtataggactccagtggagtccctca

SEQ ID NO: 380038 - DNA, 55 bp, Artificial
  Synthetic oligonucleotide
ctagttgagaagaatcctgactctattttgagagtcatatgtactctggcagcac

SEQ ID NO: 380039 - DNA, 50 bp, Artificial
  Synthetic oligonucleotide
ctagttgcgcacagcgcgccttgaggcacctgatcgaaaccacaagcggt

SEQ ID NO: 380040 - DNA, 57 bp, Artificial
  Synthetic oligonucleotide
ctagttgtttggagggaggtctcagagtggtacgacaactacgcatactacccagaa

SEQ ID NO: 380041 - DNA, 54 bp, Artificial
  Synthetic oligonucleotide
ctagtttactctcaaaagccagggaaacaaggtttcgacctagtgtctctacga

SEQ ID NO: 380042 - DNA, 60 bp, Artificial
  Synthetic oligonucleotide
ctagtttaggtcatggtgctactccaatgacatttggccgctccataccagaacctggtg

SEQ ID NO: 380043 - DNA, 57 bp, Artificial
  Synthetic oligonucleotide
ctagtttgaagagaagctcgtatggaattgccgaaaacgagaaggttgtaatgacaa

SEQ ID NO: 380044 - DNA, 52 bp, Artificial
  Synthetic oligonucleotide
ctagttttaggagctcatggaaaacaatttgtatgctatacagatgtagaga

SEQ ID NO: 380045 - DNA, 50 bp, Artificial
  Synthetic oligonucleotide
ctagttttgactggtcaaaaaagcagtcaggggtttaaagtgtaaatatg

SEQ ID NO: 380046 - DNA, 60 bp, Artificial
  Synthetic oligonucleotide
ctagttttgagacaaggctcgtatggacctgcgcactggtatcgacatggtatgtttatt

SEQ ID NO: 380047 - DNA, 56 bp, Artificial
  Synthetic oligonucleotide
ctataaaacaatcaggcgcaaagactgggtagaaccattaaatacaagtcttaatg

SEQ ID NO: 380048 - DNA, 58 bp, Artificial
  Synthetic oligonucleotide
ctataaaactctaagagccgagcaagcttcacaagacgtaaaaaattggatgacagaa

SEQ ID NO: 380049 - DNA, 55 bp, Artificial
  Synthetic oligonucleotide
ctataaaatgggtggcaaatggtcaaaacgcattggggaaggatggcctgctgta

SEQ ID NO: 380050 - DNA, 52 bp, Artificial
  Synthetic oligonucleotide
ctataaaattgtcaagaagggggactcagcaatcatgaaaagtgggttggaa

SEQ ID NO: 380051 - DNA, 50 bp, Artificial
  Synthetic oligonucleotide
ctataaacaagagtgcctggattaacctccgaagagaggctatagccaac

SEQ ID NO: 380052 - DNA, 59 bp, Artificial
  Synthetic oligonucleotide
ctataaacaatgataacagcaacgtttcaagtgacgctgaattttatttgataccgcaa

SEQ ID NO: 380053 - DNA, 57 bp, Artificial
  Synthetic oligonucleotide
ctataaacccaatagtagacctggcagatgaggctagaaatcccccactggtaacag

SEQ ID NO: 380054 - DNA, 59 bp, Artificial
  Synthetic oligonucleotide
ctataaaccttggggcttaagtcaagatggccacatagatagttatgacgtggatgtag

SEQ ID NO: 380055 - DNA, 55 bp, Artificial
  Synthetic oligonucleotide
ctataaacgattatgattactatcgttataacaggcctaccatgtttgatatacg

SEQ ID NO: 380056 - DNA, 54 bp, Artificial
  Synthetic oligonucleotide
ctataaactaaacacttatccttccttgttggaacttacagaaagagatttgat

SEQ ID NO: 380057 - DNA, 50 bp, Artificial
  Synthetic oligonucleotide
ctataaagagcaaattacgtttggacaatcaagaatgtttattccgcaca

SEQ ID NO: 380058 - DNA, 60 bp, Artificial
  Synthetic oligonucleotide
ctataaaggaagcagactttgggctctaagagcgatgttgttctcagataaactcaggta

SEQ ID NO: 380059 - DNA, 55 bp, Artificial
  Synthetic oligonucleotide
ctataaagggggtcccaatcgaattacaagtggaatgcttcacatgggaccaaaa

SEQ ID NO: 380060 - DNA, 57 bp, Artificial
  Synthetic oligonucleotide
ctataaagtgttatatagatccctcccttttcgtgaaagactcgccagagctagacc

SEQ ID NO: 380061 - DNA, 59 bp, Artificial
  Synthetic oligonucleotide
ctataaatagaagcgccctcgctcaaccagatcaggcgctgcaatggctagatatgtcg

SEQ ID NO: 380062 - DNA, 60 bp, Artificial
  Synthetic oligonucleotide
ctataaatagattgcctcctcgcactaccagtgcaggcaatgcaatggctaggtatgtga

SEQ ID NO: 380063 - DNA, 58 bp, Artificial
  Synthetic oligonucleotide
ctataaatcctggtccattcgcacgaacaggttatgcaccagttaattggggagcagg

SEQ ID NO: 380064 - DNA, 60 bp, Artificial
  Synthetic oligonucleotide
ctataaatcgggtcctcatatatagtatgagtaccaatggcatatgtgtaatttagaaga

SEQ ID NO: 380065 - DNA, 50 bp, Artificial
  Synthetic oligonucleotide
ctataaatgaaagccattggcccacgagctttaacccaaaatgcctaagc

SEQ ID NO: 380066 - DNA, 55 bp, Artificial
  Synthetic oligonucleotide
ctataacaactatttcgacatttacaagttcgaagtcttgcctcaaaatagggga

SEQ ID NO: 380067 - DNA, 55 bp, Artificial
  Synthetic oligonucleotide
ctataacaggagattcaccccggaaatagcagaaagacccaaagtaagaggtcaa

SEQ ID NO: 380068 - DNA, 55 bp, Artificial
  Synthetic oligonucleotide
ctataacaggctctcacgctctttgcgtgtagaagcttgtccttcttgtgccagt

SEQ ID NO: 380069 - DNA, 60 bp, Artificial
  Synthetic oligonucleotide
ctataacaggggctcctgggatagatgcaatcaatatggattcttcccctggatatcctt

SEQ ID NO: 380070 - DNA, 60 bp, Artificial
  Synthetic oligonucleotide
ctataacatcatcggatcaagttgatgcaatcaggaaaaccgtggttgatgaatatacgg

SEQ ID NO: 380071 - DNA, 52 bp, Artificial
  Synthetic oligonucleotide
ctataaccattgataaagaagatgcccagataatattccaaactgataaatt

SEQ ID NO: 380072 - DNA, 55 bp, Artificial
  Synthetic oligonucleotide
ctataacctttacaagtcactcaggaggggacttagaagttacaacacatagctt

SEQ ID NO: 380073 - DNA, 60 bp, Artificial
  Synthetic oligonucleotide
ctataacgaaggaaggttcatgtttatgcagcacaagccgttagcggcagatcagtcgta

SEQ ID NO: 380074 - DNA, 55 bp, Artificial
  Synthetic oligonucleotide
ctataacgaatgcattacttcgggatactccaatcatattgaaaggtgcgattcc

SEQ ID NO: 380075 - DNA, 55 bp, Artificial
  Synthetic oligonucleotide
ctataacgtatgcgacagagagtagcggcgatatccaatcaatatccactataag

SEQ ID NO: 380076 - DNA, 60 bp, Artificial
  Synthetic oligonucleotide
ctataactacgtcaaattatatcttagctagatcagtagtgccagatcttaaagaattag

SEQ ID NO: 380077 - DNA, 53 bp, Artificial
  Synthetic oligonucleotide
ctataactacttactaagactacaagcaaactacggggtgtagaaaaatcgta

SEQ ID NO: 380078 - DNA, 60 bp, Artificial
  Synthetic oligonucleotide
ctataactgaaagtctggtgcactttggccccttcctactcatgatgcacaatgtttcat

SEQ ID NO: 380079 - DNA, 59 bp, Artificial
  Synthetic oligonucleotide
ctataactggatctttgagactgtttccatcagaacgtgtactaacgacgaattccaca

SEQ ID NO: 380080 - DNA, 55 bp, Artificial
  Synthetic oligonucleotide
ctataagaagaaagcgagcatcaccggaggacttatatagggcttgtgcacaagg

SEQ ID NO: 380081 - DNA, 60 bp, Artificial
  Synthetic oligonucleotide
ctataagatcaggatccatgttcgagcatactagccatgtatatttgtaacttcgtcata

SEQ ID NO: 380082 - DNA, 51 bp, Artificial
  Synthetic oligonucleotide
ctataagatgggtggcaagtggtcaaagagtagtggggttggatggtctac

SEQ ID NO: 380083 - DNA, 55 bp, Artificial
  Synthetic oligonucleotide
ctataagcaatatgctgacaattcaggctacagtcagacaacatggagggcatac

SEQ ID NO: 380084 - DNA, 56 bp, Artificial
  Synthetic oligonucleotide
ctataagcacaacgtttccttacactggagaccccccttacagtcatgggacagga

SEQ ID NO: 380085 - DNA, 60 bp, Artificial
  Synthetic oligonucleotide
ctataagctgagagattgtgaagtcagattaagcgaagcagcgataccgcatggggtaca

SEQ ID NO: 380086 - DNA, 55 bp, Artificial
  Synthetic oligonucleotide
ctataaggagaaagaaggcactgtacacgttgattggtggaagtaaggtggtacg

SEQ ID NO: 380087 - DNA, 57 bp, Artificial
  Synthetic oligonucleotide
ctataaggggcgaacatacaaggtctctactcgaggccttacgtggaaatctgtgcg

SEQ ID NO: 380088 - DNA, 55 bp, Artificial
  Synthetic oligonucleotide
ctataagggtgtaccattgagatcacccttaaaacaggtatctagattgttccct

SEQ ID NO: 380089 - DNA, 55 bp, Artificial
  Synthetic oligonucleotide
ctataaggtcctggcacggagagtttgtcatccataacactacacaaatcaagat

SEQ ID NO: 380090 - DNA, 56 bp, Artificial
  Synthetic oligonucleotide
ctataaggtcgctcacagagcggctttatatcgggggtcccctgactaattcaaaa

SEQ ID NO: 380091 - DNA, 55 bp, Artificial
  Synthetic oligonucleotide
ctataagttaggtgaccggcttgtgtcaatgttttctgaagaagagaattgtgct

SEQ ID NO: 380092 - DNA, 51 bp, Artificial
  Synthetic oligonucleotide
ctataagtttaatccttataccgatgcagacatgccaacgtcgtattcttc

SEQ ID NO: 380093 - DNA, 58 bp, Artificial
  Synthetic oligonucleotide
ctataatagtcagaattacgtggcacgacgtctactaggtctgcaaacgcaaaccgta

SEQ ID NO: 380094 - DNA, 56 bp, Artificial
  Synthetic oligonucleotide
ctataatcagacaacaataaaatttaactcatcctcaggaggggacctagaaattg

SEQ ID NO: 380095 - DNA, 58 bp, Artificial
  Synthetic oligonucleotide
ctataatctgattgtgagagtataaacttgtagaattaccgtgagtcacaactgttgc

SEQ ID NO: 380096 - DNA, 58 bp, Artificial
  Synthetic oligonucleotide
ctataatgaattccagccccttcgtgttgttgtatttgattgtcatatttatttggtg

SEQ ID NO: 380097 - DNA, 57 bp, Artificial
  Synthetic oligonucleotide
ctataatgacttatatgacagtataaacattatccaaggtatgttagaaaacctaaa

SEQ ID NO: 380098 - DNA, 60 bp, Artificial
  Synthetic oligonucleotide
ctataatgagctgactagacaatttagaagtaataagacttgctgtaagcattgggtatt

SEQ ID NO: 380099 - DNA, 60 bp, Artificial
  Synthetic oligonucleotide
ctataatgcccggtacagctattctccatgggcagcagattgtgcgcacatttccccgag

SEQ ID NO: 380100 - DNA, 59 bp, Artificial
  Synthetic oligonucleotide
ctataatggacgtccagacttaatgcaggtctcgggaaataccctcatcaacaggtcta

SEQ ID NO: 380101 - DNA, 60 bp, Artificial
  Synthetic oligonucleotide
ctataatgggagtataacccttacaccatcagcagacatcagggcagtatggagagcaga

SEQ ID NO: 380102 - DNA, 55 bp, Artificial
  Synthetic oligonucleotide
ctataatggtatctcaagtttgatttgccaactcacaaacatctcagatggacac

SEQ ID NO: 380103 - DNA, 55 bp, Artificial
  Synthetic oligonucleotide
ctataatgttctcaaacaaaatggcaaggctaggaaaagggtacatgtttgaaag

SEQ ID NO: 380104 - DNA, 60 bp, Artificial
  Synthetic oligonucleotide
ctataattaatacttaacatacgtacatcaagtcacgtacaccaactatgacgtcacaga

SEQ ID NO: 380105 - DNA, 60 bp, Artificial
  Synthetic oligonucleotide
ctataattatgagtgcaataacgtccctctcttaccagatcaatagagctgcaaataaca

SEQ ID NO: 380106 - DNA, 56 bp, Artificial
  Synthetic oligonucleotide
ctatacaaagtctgaatctgattggagtcgagaatttgactttatatatggcacgg

SEQ ID NO: 380107 - DNA, 56 bp, Artificial
  Synthetic oligonucleotide
ctatacaaggaagcgacgttagggaacaagctaacagtgaacgttgggatggagga

SEQ ID NO: 380108 - DNA, 55 bp, Artificial
  Synthetic oligonucleotide
ctatacaaggtggatatgtagcatatgcaggatccggggtcataggagcagggtc

SEQ ID NO: 380109 - DNA, 60 bp, Artificial
  Synthetic oligonucleotide
ctatacaatatcaggagtacgatccctcagttggaacatgggctacatcatctgatatga

SEQ ID NO: 380110 - DNA, 58 bp, Artificial
  Synthetic oligonucleotide
ctatacaatgcactgtataagacccataaaagccggtttcaacgcaaccggagacata

SEQ ID NO: 380111 - DNA, 60 bp, Artificial
  Synthetic oligonucleotide
ctatacacaacacatggctaccataggtgtgctggcgacgcctgagataccgtttacgac

SEQ ID NO: 380112 - DNA, 60 bp, Artificial
  Synthetic oligonucleotide
ctatacacacaactcatgatatgtcggacatcttcaactcaccacaaaacaaggcatcca

SEQ ID NO: 380113 - DNA, 55 bp, Artificial
  Synthetic oligonucleotide
ctatacagcccagatggatcgtgaacaatgcctattttagacaacagcagggtgt

SEQ ID NO: 380114 - DNA, 60 bp, Artificial
  Synthetic oligonucleotide
ctatacagctgccagaaaaggatagctggactgtcaatgatatacaaaagttagtgggaa

SEQ ID NO: 380115 - DNA, 60 bp, Artificial
  Synthetic oligonucleotide
ctatacaggcgcaacagcatatgttgcagctcacggtctggggtattaaacaactccagg

SEQ ID NO: 380116 - DNA, 60 bp, Artificial
  Synthetic oligonucleotide
ctatacagtcagtatacgatgtctctagcatgggagcagtcgtatcagcagtagctgcag

SEQ ID NO: 380117 - DNA, 59 bp, Artificial
  Synthetic oligonucleotide
ctatacataaactattgacttatattgtatattatgcgtaaaattcccgtgcaatatta

SEQ ID NO: 380118 - DNA, 60 bp, Artificial
  Synthetic oligonucleotide
ctatacatgagcggctctcgactccgtcagatttgcggcacctctttacaaaaatggtcc

SEQ ID NO: 380119 - DNA, 59 bp, Artificial
  Synthetic oligonucleotide
ctatacattgaatggaccaagagcttctcgagtttcaccgttacaactactccagtctg

SEQ ID NO: 380120 - DNA, 56 bp, Artificial
  Synthetic oligonucleotide
ctataccaaaccctacaggaaaacttgtggttgccctggtcgatcccaacatgcca

SEQ ID NO: 380121 - DNA, 60 bp, Artificial
  Synthetic oligonucleotide
ctataccagaatgctgatgcatacgtttcagttggatcgtcaaaatacaaccgaagattc

SEQ ID NO: 380122 - DNA, 60 bp, Artificial
  Synthetic oligonucleotide
ctataccagttggaccagtattcccaccaggcatgaattggactgagctgattactaact

SEQ ID NO: 380123 - DNA, 55 bp, Artificial
  Synthetic oligonucleotide
ctataccatgcaaagttggtattgatcctacaagttctgagtggacattgttggc

SEQ ID NO: 380124 - DNA, 58 bp, Artificial
  Synthetic oligonucleotide
ctataccatgcaggccctagtcggatctaacgctaatccagtctccttgggttccttc

SEQ ID NO: 380125 - DNA, 55 bp, Artificial
  Synthetic oligonucleotide
ctatacccaagattgttgcgacaacgttttgcgatcggagacgcttgcggagggg

SEQ ID NO: 380126 - DNA, 58 bp, Artificial
  Synthetic oligonucleotide
ctataccccgaggagtgtgccttcgccgacaagcagtggcgcaaacactacaacttcc

SEQ ID NO: 380127 - DNA, 55 bp, Artificial
  Synthetic oligonucleotide
ctataccgctctcggtaccgctggggttcccgctaccgcatccggtgcttgcttt

SEQ ID NO: 380128 - DNA, 54 bp, Artificial
  Synthetic oligonucleotide
ctataccggaggtgcaataccttacccctatcttttatgatctttcggggccgc

SEQ ID NO: 380129 - DNA, 55 bp, Artificial
  Synthetic oligonucleotide
ctataccggttggaccagtgtttccaccaggaatgaattggactgatctaatcac

SEQ ID NO: 380130 - DNA, 59 bp, Artificial
  Synthetic oligonucleotide
ctataccgttggataaagcttatcgcactctatcttgaattttgaattattggctttgc

SEQ ID NO: 380131 - DNA, 55 bp, Artificial
  Synthetic oligonucleotide
ctatacctgagagcatgggaggtgataggaaacccaaaccttgggaacttcctca

SEQ ID NO: 380132 - DNA, 59 bp, Artificial
  Synthetic oligonucleotide
ctatacctgggcacacttgcggtttccgaatgccgtcggagatacgtagtcagctagta

SEQ ID NO: 380133 - DNA, 56 bp, Artificial
  Synthetic oligonucleotide
ctatacctggggggtccataacgtacaatggtacgctgttcggcaactacactctc

SEQ ID NO: 380134 - DNA, 56 bp, Artificial
  Synthetic oligonucleotide
ctatacgacttggttggcaagctccccctggccgtgatgggaagctcctatggatt

SEQ ID NO: 380135 - DNA, 60 bp, Artificial
  Synthetic oligonucleotide
ctatacgacttgtgattaattgactttctgcattacgctgtctattggcttgttgtgatt

SEQ ID NO: 380136 - DNA, 60 bp, Artificial
  Synthetic oligonucleotide
ctatacgtaatgaggaggatgaagatatcgactctggtgaagatgaaaattacaatcctt

SEQ ID NO: 380137 - DNA, 57 bp, Artificial
  Synthetic oligonucleotide
ctatacgtcatcagtcacgtgggggaaggcgtgcctaaacccggaagcatcctcgtc

SEQ ID NO: 380138 - DNA, 56 bp, Artificial
  Synthetic oligonucleotide
ctatacgtcatcgtgatgcggaatgggcgccaccccccgttggaaagcgggctccc

SEQ ID NO: 380139 - DNA, 60 bp, Artificial
  Synthetic oligonucleotide
ctatactatctgccattcatgggtcttggactagtgctatcagccacgattgtagcaaga

SEQ ID NO: 380140 - DNA, 58 bp, Artificial
  Synthetic oligonucleotide
ctatactctgataaattgtaatacctcaatcattacccaggcctgtccaaaggtatcc

SEQ ID NO: 380141 - DNA, 60 bp, Artificial
  Synthetic oligonucleotide
ctatactgacacgtctgaaatacaacgaattattggtgataggcatgacaaaccatttgc

SEQ ID NO: 380142 - DNA, 55 bp, Artificial
  Synthetic oligonucleotide
ctatactgcaaacgtggatgccacttgaactctggaataacaagcctaggaagcg

SEQ ID NO: 380143 - DNA, 60 bp, Artificial
  Synthetic oligonucleotide
ctatactgctggagaccctcagtgtcagaaacacaggtgtaaatcagccatgattggacc

SEQ ID NO: 380144 - DNA, 51 bp, Artificial
  Synthetic oligonucleotide
ctatactggctttcccagagcgcagttcgctctgcgtggtagaggacatgt

SEQ ID NO: 380145 - DNA, 50 bp, Artificial
  Synthetic oligonucleotide
ctatacttaatatgtcccacgatatggatactcagataattgcatgtggt

SEQ ID NO: 380146 - DNA, 55 bp, Artificial
  Synthetic oligonucleotide
ctatacttacgatcttcctcatatcactcgttgtgccaccaacagcaaacgggtt

SEQ ID NO: 380147 - DNA, 60 bp, Artificial
  Synthetic oligonucleotide
ctatactttctgatcagcttgatagccgtagggcctgcattcaatttttaaacctcatcc

SEQ ID NO: 380148 - DNA, 58 bp, Artificial
  Synthetic oligonucleotide
ctatagaaacctcttatggataataaagaccaagtcagcggcatacccagtgattaaa

SEQ ID NO: 380149 - DNA, 51 bp, Artificial
  Synthetic oligonucleotide
ctatagaaagcggctctttcaatcagtgtacaaaccagcagttttcaaaca

SEQ ID NO: 380150 - DNA, 57 bp, Artificial
  Synthetic oligonucleotide
ctatagaaggagcgtataaactcaaaaaggtgattaacgctctaagcgggatcgatc

SEQ ID NO: 380151 - DNA, 55 bp, Artificial
  Synthetic oligonucleotide
ctatagacttggcaccacaactagagtgcagatggaggtcaggagatctccctct

SEQ ID NO: 380152 - DNA, 60 bp, Artificial
  Synthetic oligonucleotide
ctatagaggcgcaacaacacgtgttgcaactcacagtctggggcattaagcagctccaga

SEQ ID NO: 380153 - DNA, 56 bp, Artificial
  Synthetic oligonucleotide
ctatagatcaaataaccgggaaattgaacaggctagtagagaagacaaacacggag

SEQ ID NO: 380154 - DNA, 60 bp, Artificial
  Synthetic oligonucleotide
ctatagatcctaaacaaacacagttattgattgtaggctgcaaaccagctgttggtgaat

SEQ ID NO: 380155 - DNA, 50 bp, Artificial
  Synthetic oligonucleotide
ctatagatgctggctcagttgaattgcaaccacttggtcagcaatctggg

SEQ ID NO: 380156 - DNA, 55 bp, Artificial
  Synthetic oligonucleotide
ctatagatgtgttcaactctcaaatcctgcacacatctcgacaactatccctcaa

SEQ ID NO: 380157 - DNA, 54 bp, Artificial
  Synthetic oligonucleotide
ctatagattttggtactacgagagtagaaagcgctaaggaagccctttgggacg

SEQ ID NO: 380158 - DNA, 52 bp, Artificial
  Synthetic oligonucleotide
ctatagcaatggacgaacaattagaaggcgataccacttcacgtcgtcgctt

SEQ ID NO: 380159 - DNA, 60 bp, Artificial
  Synthetic oligonucleotide
ctatagcacaaagagaggggatagaccaactgagagaatgataacttacattgaagatga

SEQ ID NO: 380160 - DNA, 55 bp, Artificial
  Synthetic oligonucleotide
ctatagcgaacttagcgtttaacacatctacacggaaatgacacattgctgcgta

SEQ ID NO: 380161 - DNA, 55 bp, Artificial
  Synthetic oligonucleotide
ctatagcgcagaagaggtgcactacgttgggtgtggtgacctgcgtaccttaatg

SEQ ID NO: 380162 - DNA, 55 bp, Artificial
  Synthetic oligonucleotide
ctataggaaatgttacgctgttattatccggcccgctaaattgaaacacgcacct

SEQ ID NO: 380163 - DNA, 57 bp, Artificial
  Synthetic oligonucleotide
ctataggaactgaatacagctacattgatcctcctgagctcatctatgaagaacatt

SEQ ID NO: 380164 - DNA, 59 bp, Artificial
  Synthetic oligonucleotide
ctataggaatcatattacgtttggacagtcacgaatgtttattcctcacattacgctta

SEQ ID NO: 380165 - DNA, 60 bp, Artificial
  Synthetic oligonucleotide
ctataggatggacagggactgtgagctgtacactggccaataaggatacgttagccacaa

SEQ ID NO: 380166 - DNA, 60 bp, Artificial
  Synthetic oligonucleotide
ctataggcacttacactatgactaaggtgcctgtttctcttgccatgcgtgtggattcag

SEQ ID NO: 380167 - DNA, 51 bp, Artificial
  Synthetic oligonucleotide
ctataggccacacccctaatatttctaagcaagcgtatatggctattacta

SEQ ID NO: 380168 - DNA, 55 bp, Artificial
  Synthetic oligonucleotide
ctataggggccgccaaagtgccaaagtgtgagtggcacgacgaactgatcacacg

SEQ ID NO: 380169 - DNA, 56 bp, Artificial
  Synthetic oligonucleotide
ctataggtacagtactagtagggcctacacctatcaatataattggaagaaatttg

SEQ ID NO: 380170 - DNA, 60 bp, Artificial
  Synthetic oligonucleotide
ctataggtgataattataagtcatatgatgactatagggtgttagaagctcttaacgtag

SEQ ID NO: 380171 - DNA, 58 bp, Artificial
  Synthetic oligonucleotide
ctatagtatacccgtgcgccttcgaaatccgccgctcccttgtcttatagtggttgca

SEQ ID NO: 380172 - DNA, 60 bp, Artificial
  Synthetic oligonucleotide
ctatagtccttaaaagtgaaccagtctggcacaaatgacaatggcaccaacagaatagat

SEQ ID NO: 380173 - DNA, 55 bp, Artificial
  Synthetic oligonucleotide
ctatagtctataggtgagcgtagtatagtcgccaacttaacaaaacggacttaaa

SEQ ID NO: 380174 - DNA, 55 bp, Artificial
  Synthetic oligonucleotide
ctatagtgaatacgatacacacctgacgcggcataatttccgaaccggcatgctc

SEQ ID NO: 380175 - DNA, 51 bp, Artificial
  Synthetic oligonucleotide
ctatagtgatagagtagaacagataactataggaaattcaaccattacaac

SEQ ID NO: 380176 - DNA, 55 bp, Artificial
  Synthetic oligonucleotide
ctatagtgcaaaacacacagggacaaatggtgtatcagtccatatcacctagaac

SEQ ID NO: 380177 - DNA, 52 bp, Artificial
  Synthetic oligonucleotide
ctatagttctcttacgtagactttttcctcaggactctgtttcaactttcta

SEQ ID NO: 380178 - DNA, 52 bp, Artificial
  Synthetic oligonucleotide
ctatagttgctattcatctctaattatcccacaaccgggtgcggcgcaagat

SEQ ID NO: 380179 - DNA, 60 bp, Artificial
  Synthetic oligonucleotide
ctatagtttgtataagcggtcatataagagcggcgtgacagaagctttagagtaatgtaa

SEQ ID NO: 380180 - DNA, 60 bp, Artificial
  Synthetic oligonucleotide
ctatataaagaacggtggaacttgcagttttttgagcagacacatggcaaagcctatgcg

SEQ ID NO: 380181 - DNA, 58 bp, Artificial
  Synthetic oligonucleotide
ctatataactaactacacttccgaatggctgagtttatgccgccagacgaagaaagga

SEQ ID NO: 380182 - DNA, 55 bp, Artificial
  Synthetic oligonucleotide
ctatataactaactacagtgacgaatggctgagtttaccccgctagacggtgcag

SEQ ID NO: 380183 - DNA, 57 bp, Artificial
  Synthetic oligonucleotide
ctatataaggaggccgaacctaagtgtttcaggcatcgagggaaatacccatctgcc

SEQ ID NO: 380184 - DNA, 60 bp, Artificial
  Synthetic oligonucleotide
ctatataatcagtgctttggaaagcttcgaggagtctctcaattgaggactttcgagttc

SEQ ID NO: 380185 - DNA, 60 bp, Artificial
  Synthetic oligonucleotide
ctatataattgaatgcgctaggaggattcgccaacctagaatccatatatgaaaaattgg

SEQ ID NO: 380186 - DNA, 60 bp, Artificial
  Synthetic oligonucleotide
ctatatacagatgtgtcccaatgggactcatctcaacacaatacgcagccatttaggaaa

SEQ ID NO: 380187 - DNA, 56 bp, Artificial
  Synthetic oligonucleotide
ctatatacccccctcccatacagaaggattcttcgtataattacaccgtctcatac

SEQ ID NO: 380188 - DNA, 55 bp, Artificial
  Synthetic oligonucleotide
ctatatacgagatgtccagtctcgagatgttggcttttacattcagcatccactt

SEQ ID NO: 380189 - DNA, 55 bp, Artificial
  Synthetic oligonucleotide
ctatatagctggacagtggacgggaaggtgttgccagtgtagagggccatgcacg

SEQ ID NO: 380190 - DNA, 58 bp, Artificial
  Synthetic oligonucleotide
ctatatagtggaaaaggaaaatccggcgcacggtctgtgctatccaggcaatttcaat

SEQ ID NO: 380191 - DNA, 53 bp, Artificial
  Synthetic oligonucleotide
ctatatataaaactggtactgtagttaccaattgaaaatcataaccgggttcg

SEQ ID NO: 380192 - DNA, 56 bp, Artificial
  Synthetic oligonucleotide
ctatatataggttcgtatccagcaactcacttagaagggttaaatttatacggatg

SEQ ID NO: 380193 - DNA, 59 bp, Artificial
  Synthetic oligonucleotide
ctatatatagtaaagttactaggggctctcagatataatattacctgagagccccgcga

SEQ ID NO: 380194 - DNA, 60 bp, Artificial
  Synthetic oligonucleotide
ctatatatggggaaatatgcgatagattctgctcgaacgtggcacattttatccacacgt

SEQ ID NO: 380195 - DNA, 60 bp, Artificial
  Synthetic oligonucleotide
ctatatatgttatctattgatgccactatttatgccgattgcatacttttatggttggtc

SEQ ID NO: 380196 - DNA, 60 bp, Artificial
  Synthetic oligonucleotide
ctatatattttagggaaggtatggatggacgagagcatcaagttgaagaatcacacaaat

SEQ ID NO: 380197 - DNA, 60 bp, Artificial
  Synthetic oligonucleotide
ctatatcaaagcagtaagtactcaatagtgtatgtaatggtagattcactagcaagagta

SEQ ID NO: 380198 - DNA, 59 bp, Artificial
  Synthetic oligonucleotide
ctatatcaagaaatgttctatatataggttcgtatccagcaactcacttagaagggtta

SEQ ID NO: 380199 - DNA, 55 bp, Artificial
  Synthetic oligonucleotide
ctatatcaataagtcccatgtgtgctgaattctctggcgctagagcaaggcctgt

SEQ ID NO: 380200 - DNA, 60 bp, Artificial
  Synthetic oligonucleotide
ctatatcagtcggtgcttatggtggcttcagtatttcctgaccagagtagaagcgcaact

SEQ ID NO: 380201 - DNA, 55 bp, Artificial
  Synthetic oligonucleotide
ctatatcatcggtagtgaaagttggaactacaaacgtggtttctacagtctcttc

SEQ ID NO: 380202 - DNA, 56 bp, Artificial
  Synthetic oligonucleotide
ctatatccatctggtccgtccgggccctcttcgctggaggggccccctctccatcc

SEQ ID NO: 380203 - DNA, 53 bp, Artificial
  Synthetic oligonucleotide
ctatatcctacacctgaggaaattccggactttgcattctatctcaaaatagg

SEQ ID NO: 380204 - DNA, 60 bp, Artificial
  Synthetic oligonucleotide
ctatatgacacatctgactttagagtgctgaatcaggcatttgcgttgaccaacagagtg

SEQ ID NO: 380205 - DNA, 55 bp, Artificial
  Synthetic oligonucleotide
ctatatgagttacagaaggacatcacaattaactgtctcggcacacgagaacagt

SEQ ID NO: 380206 - DNA, 60 bp, Artificial
  Synthetic oligonucleotide
ctatatgcaagtttacagcgcaaacttgaacgcgatttcacatgggatgagtacattgag

SEQ ID NO: 380207 - DNA, 60 bp, Artificial
  Synthetic oligonucleotide
ctatatgccccaggagttaactacatcggatagtgtgctcactttcgaactcacggacat

SEQ ID NO: 380208 - DNA, 60 bp, Artificial
  Synthetic oligonucleotide
ctatatgctatggtgcagagagcgtgacattaacaagagggcaaaatacagtcaaagtat

SEQ ID NO: 380209 - DNA, 60 bp, Artificial
  Synthetic oligonucleotide
ctatatggatattcgtcgttcaattggttcaccactgtgctggcgaaagcccaagtatgc

SEQ ID NO: 380210 - DNA, 60 bp, Artificial
  Synthetic oligonucleotide
ctatatggatgatgtggtactgggggccaaatctgtacaacatcttgagtccctttatac

SEQ ID NO: 380211 - DNA, 60 bp, Artificial
  Synthetic oligonucleotide
ctatatggcacccgggaagaagagccttcacagtagcgaatctaacacgattcgtgaaca

SEQ ID NO: 380212 - DNA, 59 bp, Artificial
  Synthetic oligonucleotide
ctatatgggtattcctcgttcaattggttcacgactgtgcttgcggaagcccaagtatg

SEQ ID NO: 380213 - DNA, 56 bp, Artificial
  Synthetic oligonucleotide
ctatatggtgggtagagatggcacatccagagaggtgagtctagcagcatccggtg

SEQ ID NO: 380214 - DNA, 60 bp, Artificial
  Synthetic oligonucleotide
ctatatgtccgactcaacacaagcggcgtttggtgccgctagtgatatggcttatagctc

SEQ ID NO: 380215 - DNA, 60 bp, Artificial
  Synthetic oligonucleotide
ctatatgtccgatgcatcagctccgttcatcggtccagtccgcctctaccactggttagt

SEQ ID NO: 380216 - DNA, 52 bp, Artificial
  Synthetic oligonucleotide
ctatatgtgcctactggttgaaatcaatgtcattggtaaaaacaataagagt

SEQ ID NO: 380217 - DNA, 55 bp, Artificial
  Synthetic oligonucleotide
ctatatgtgctggtggttggatgcatgcccctattgaactactgtctatcctggg

SEQ ID NO: 380218 - DNA, 60 bp, Artificial
  Synthetic oligonucleotide
ctatatgttcctcgactatcacgtccagttacacattgacttggtggatacatatcacat

SEQ ID NO: 380219 - DNA, 56 bp, Artificial
  Synthetic oligonucleotide
ctatattaaccggcgggcgattagatgcctgggagaaaattaggctcagaccaggg

SEQ ID NO: 380220 - DNA, 56 bp, Artificial
  Synthetic oligonucleotide
ctatattaattgagcataagcaactgaagcaacaggacatggaaaggaaaactgag

SEQ ID NO: 380221 - DNA, 60 bp, Artificial
  Synthetic oligonucleotide
ctatattcatatctcgatcgtatccgctcccactacggaatcatagatggagagacgata

SEQ ID NO: 380222 - DNA, 54 bp, Artificial
  Synthetic oligonucleotide
ctatattgactaagtaagtgtaggatttatcatacaaattaagtttaggagtta

SEQ ID NO: 380223 - DNA, 55 bp, Artificial
  Synthetic oligonucleotide
ctatattgcaaggccagaagcacaccagtcacactaagtaaggatcaactgagtg

SEQ ID NO: 380224 - DNA, 56 bp, Artificial
  Synthetic oligonucleotide
ctatattggagcgaaacgtcaccgtgacccatgccaaggacatccttgagaaagtg

SEQ ID NO: 380225 - DNA, 60 bp, Artificial
  Synthetic oligonucleotide
ctatattggagtcaagtgctcattgctgcgccgagcctctagaggtgaacctctcttact

SEQ ID NO: 380226 - DNA, 60 bp, Artificial
  Synthetic oligonucleotide
ctatattgtgtgctactactgggatgcaccatggaaattgtaccatacatttttcgtggt

SEQ ID NO: 380227 - DNA, 55 bp, Artificial
  Synthetic oligonucleotide
ctatattgtttgagagagctgtagaacatgtcatccagatcttacgcagtgtcgg

SEQ ID NO: 380228 - DNA, 60 bp, Artificial
  Synthetic oligonucleotide
ctatatttagatcgtgagtatatgcctaagattctgggtttaacatcaattgagaaatgt

SEQ ID NO: 380229 - DNA, 53 bp, Artificial
  Synthetic oligonucleotide
ctatatttttatggaaaaagcgaacaagacattaaaaaagaagcacatagcac

SEQ ID NO: 380230 - DNA, 60 bp, Artificial
  Synthetic oligonucleotide
ctatcaaaaattggaatgctcaatcaagacgtgagaatcctgtatatgagtacaaaaatc

SEQ ID NO: 380231 - DNA, 60 bp, Artificial
  Synthetic oligonucleotide
ctatcaaagagcgtataataaacccacccggatcatctagagattgggttcacatctcac

SEQ ID NO: 380232 - DNA, 56 bp, Artificial
  Synthetic oligonucleotide
ctatcaaagtgtacagtggaacaagctaggacgatgatgcaattcgagttatcacc

SEQ ID NO: 380233 - DNA, 55 bp, Artificial
  Synthetic oligonucleotide
ctatcaacaggaaaggccaaagtgtgttgtgttaaattaactgctatggacctag

SEQ ID NO: 380234 - DNA, 57 bp, Artificial
  Synthetic oligonucleotide
ctatcaaccaaatcaatgggaaactgaatagagtaatcgagaagacgaacgagaaat

SEQ ID NO: 380235 - DNA, 55 bp, Artificial
  Synthetic oligonucleotide
ctatcaaccatgaagaccatcattgctttgagctacattcttcgtctggttttcg

SEQ ID NO: 380236 - DNA, 60 bp, Artificial
  Synthetic oligonucleotide
ctatcaagcttgtaagttcctacagagcccatccagttacagactagaggaggatgcttc

SEQ ID NO: 380237 - DNA, 59 bp, Artificial
  Synthetic oligonucleotide
ctatcaaggtatgttgcccgtttgtcctctaattccaggatcatcaacaaccagcaccg

SEQ ID NO: 380238 - DNA, 59 bp, Artificial
  Synthetic oligonucleotide
ctatcaatatatggatgatctgtatgtaggatctgatttagagatagggcaacatagag

SEQ ID NO: 380239 - DNA, 55 bp, Artificial
  Synthetic oligonucleotide
ctatcaatcatacctcagacacacacaatcaatgggaattcaactggaccagagg

SEQ ID NO: 380240 - DNA, 58 bp, Artificial
  Synthetic oligonucleotide
ctatcaatccaggcatacagagaacactagtaccgttagctcagtttctcatgggtga

SEQ ID NO: 380241 - DNA, 51 bp, Artificial
  Synthetic oligonucleotide
ctatcaatcgatttaaataattgagtaacatgcggaggattgggtcctgga

SEQ ID NO: 380242 - DNA, 56 bp, Artificial
  Synthetic oligonucleotide
ctatcaatcttacctaagaaggacacaatctatggggattcaactggaccaaaaaa

SEQ ID NO: 380243 - DNA, 60 bp, Artificial
  Synthetic oligonucleotide
ctatcaattgaattgcaaagtgagtgatagttatgatgtcatatgtgaagcacatcagat

SEQ ID NO: 380244 - DNA, 60 bp, Artificial
  Synthetic oligonucleotide
ctatcacaactagctttttagctagaatgatcacaaatgagagtgacatttattccttac

SEQ ID NO: 380245 - DNA, 55 bp, Artificial
  Synthetic oligonucleotide
ctatcacaatgtgacactaaggatgagagggctgagcaagtttgggtcgagtaac

SEQ ID NO: 380246 - DNA, 55 bp, Artificial
  Synthetic oligonucleotide
ctatcacacacaaggattcttcccagattggcagggctacacaccagggccaggg

SEQ ID NO: 380247 - DNA, 57 bp, Artificial
  Synthetic oligonucleotide
ctatcaccgcttgcgttaaggtaattgaattcgaatgaaggactaagcggtgtacat

SEQ ID NO: 380248 - DNA, 60 bp, Artificial
  Synthetic oligonucleotide
ctatcaccgtgaccattgcacccatgtgttgtgaattcaacgggcttaggaacattacca

SEQ ID NO: 380249 - DNA, 60 bp, Artificial
  Synthetic oligonucleotide
ctatcacggcctacgcccaacaaacgcggggcctacttggctgcatcatcactagcctca

SEQ ID NO: 380250 - DNA, 55 bp, Artificial
  Synthetic oligonucleotide
ctatcacgtcgtcatgaatggttcacccgatgatcacacgcagctggccacccgc

SEQ ID NO: 380251 - DNA, 60 bp, Artificial
  Synthetic oligonucleotide
ctatcactatctaggaagagctggttataccatacatgtgcagtgcaacgcttctaagtt

SEQ ID NO: 380252 - DNA, 57 bp, Artificial
  Synthetic oligonucleotide
ctatcactcagtacataaaacccacaggaagggcagatttgaaagggttatacaaca

SEQ ID NO: 380253 - DNA, 55 bp, Artificial
  Synthetic oligonucleotide
ctatcactccgctggatttaccagccataattcaaagactccatggcttgagcgc

SEQ ID NO: 380254 - DNA, 55 bp, Artificial
  Synthetic oligonucleotide
ctatcactgacacctacttcaatcagccagattgtctctgccccgtttcctgagg

SEQ ID NO: 380255 - DNA, 54 bp, Artificial
  Synthetic oligonucleotide
ctatcagcggttcccggagtcgtttgaccccgccgagtttattatgaatgacgg

SEQ ID NO: 380256 - DNA, 60 bp, Artificial
  Synthetic oligonucleotide
ctatcagctggcagaagctactttgaaaccaccggggcctactctgacattatatacaac

SEQ ID NO: 380257 - DNA, 60 bp, Artificial
  Synthetic oligonucleotide
ctatcagcttttatgaagttgaatagatcgctctctttagtagatatgcatattttgcta

SEQ ID NO: 380258 - DNA, 58 bp, Artificial
  Synthetic oligonucleotide
ctatcaggaaggggcctagggaaaacatctattggcctactctgcgtaatggcttcaa

SEQ ID NO: 380259 - DNA, 54 bp, Artificial
  Synthetic oligonucleotide
ctatcagtttcgaatccggaaaggacacttttatacttatcgcacctacccctg

SEQ ID NO: 380260 - DNA, 55 bp, Artificial
  Synthetic oligonucleotide
ctatcatacatcccggggttcggactggacatacctgcgtgaccgatggtggcag

SEQ ID NO: 380261 - DNA, 55 bp, Artificial
  Synthetic oligonucleotide
ctatcatacccacttctactaccgctggcaagttatcatgtgacatgaggtcagt

SEQ ID NO: 380262 - DNA, 54 bp, Artificial
  Synthetic oligonucleotide
ctatcatagtaaattggatcgcatcccaagcagccgaggatttcaatcggctgt

SEQ ID NO: 380263 - DNA, 60 bp, Artificial
  Synthetic oligonucleotide
ctatcatatacgttaccgactaatccgaaagtgatatgggaagtgcctaggagctcgata

SEQ ID NO: 380264 - DNA, 60 bp, Artificial
  Synthetic oligonucleotide
ctatcatatcacttgcaagtcctgccttcgagagattcaagagccaatgttagaatcacg

SEQ ID NO: 380265 - DNA, 55 bp, Artificial
  Synthetic oligonucleotide
ctatcatatgggtgtacggctctcaaggcaatgaagggaagaccacctgggccaa

SEQ ID NO: 380266 - DNA, 60 bp, Artificial
  Synthetic oligonucleotide
ctatcatattaaaggccttatacatgttatcaacacgaggaagacagactgtgaaggaaa

SEQ ID NO: 380267 - DNA, 60 bp, Artificial
  Synthetic oligonucleotide
ctatcatcacagagcactattagaagcacactatgataacattgtgaaggtgagttctac

SEQ ID NO: 380268 - DNA, 60 bp, Artificial
  Synthetic oligonucleotide
ctatcatcggatcatttagtgatcgcgcaattagagtctcatgcgacgaccacaccgatg

SEQ ID NO: 380269 - DNA, 60 bp, Artificial
  Synthetic oligonucleotide
ctatcatgctgcaggtgatatcttgtgttacgatccatccagacctagactggattagtc

SEQ ID NO: 380270 - DNA, 60 bp, Artificial
  Synthetic oligonucleotide
ctatcatgggaagggtgtgacatggactactactgtaatgttggcgattggccaacctgt

SEQ ID NO: 380271 - DNA, 54 bp, Artificial
  Synthetic oligonucleotide
ctatcattaacactgaggaatgatgaacccatccactcagattctaccaagtga

SEQ ID NO: 380272 - DNA, 58 bp, Artificial
  Synthetic oligonucleotide
ctatcattgaaagtcttatagggagaatttctgaactcctggatgaccctactcgttg

SEQ ID NO: 380273 - DNA, 55 bp, Artificial
  Synthetic oligonucleotide
ctatcattgcaacatgttacatttaacctgtctcatcgtactcacaagtaagctc

SEQ ID NO: 380274 - DNA, 55 bp, Artificial
  Synthetic oligonucleotide
ctatcatttccagtggttgccggcctcaattcacgacacgcgcggcggtgtgtac

SEQ ID NO: 380275 - DNA, 55 bp, Artificial
  Synthetic oligonucleotide
ctatccaaacagggtgttgctttcccgctcacttgccttcaatccgtgtacaatg

SEQ ID NO: 380276 - DNA, 60 bp, Artificial
  Synthetic oligonucleotide
ctatccaaatgccaacgttccagctcacttcaatcctcatactgctcagagaatcactcc

SEQ ID NO: 380277 - DNA, 57 bp, Artificial
  Synthetic oligonucleotide
ctatccaactgcggcctatgtcgtgaactctacaagataacctcgaaaggggtcgtc

SEQ ID NO: 380278 - DNA, 58 bp, Artificial
  Synthetic oligonucleotide
ctatccaagaaggcacggattacgttctgtaagtccagtcacagagaacataaacgga

SEQ ID NO: 380279 - DNA, 59 bp, Artificial
  Synthetic oligonucleotide
ctatccacgggctgcgtggtcatagtgggcaggattgtcttgtccgggaagccggcaat

SEQ ID NO: 380280 - DNA, 55 bp, Artificial
  Synthetic oligonucleotide
ctatccacgtgtaatgttttattttccatgagtgactctatgagtagtccgtcca

SEQ ID NO: 380281 - DNA, 60 bp, Artificial
  Synthetic oligonucleotide
ctatccactgtaaaggagatgaaccagggatggatgtctcgtctaggtgcaggcaatgat

SEQ ID NO: 380282 - DNA, 59 bp, Artificial
  Synthetic oligonucleotide
ctatccagacagttgcaaaagtcatgtaagttaaatggtgtgtataccaacccaacagc

SEQ ID NO: 380283 - DNA, 55 bp, Artificial
  Synthetic oligonucleotide
ctatccagctggttatgtattatcagcttcacttaaattggaacatacggcgaat

SEQ ID NO: 380284 - DNA, 60 bp, Artificial
  Synthetic oligonucleotide
ctatccagttggcagagggcctgctgaggacccccgtggggtcaactgggcatacatatg

SEQ ID NO: 380285 - DNA, 50 bp, Artificial
  Synthetic oligonucleotide
ctatccatgcgcaactcctgaaggatcgtacttatctctgatcccatcaa

SEQ ID NO: 380286 - DNA, 55 bp, Artificial
  Synthetic oligonucleotide
ctatccatgtgaaccagttgaaacacctttagatgaaagcatagccctaaaagtc

SEQ ID NO: 380287 - DNA, 60 bp, Artificial
  Synthetic oligonucleotide
ctatccatttctccattaggattgacatgtgaaggtgggcttgagactgaaggtgtgact

SEQ ID NO: 380288 - DNA, 56 bp, Artificial
  Synthetic oligonucleotide
ctatcccatgatagtcctttaactcaagggttgagttcggtttgcatcttttgccg

SEQ ID NO: 380289 - DNA, 55 bp, Artificial
  Synthetic oligonucleotide
ctatccccatcatgctgtcttgtttagcaattttgacacttccgctaagtaattc

SEQ ID NO: 380290 - DNA, 55 bp, Artificial
  Synthetic oligonucleotide
ctatcccctgatttaactgctgagctcctctgcattatgagactttggggccatc

SEQ ID NO: 380291 - DNA, 57 bp, Artificial
  Synthetic oligonucleotide
ctatccccttgtgtttatcacagagatgctcaaatctcttccaaacaaggtcttcga

SEQ ID NO: 380292 - DNA, 58 bp, Artificial
  Synthetic oligonucleotide
ctatcccgaaaaggtcacctcaagggctggccttctgcagccacatatgtccctttaa

SEQ ID NO: 380293 - DNA, 60 bp, Artificial
  Synthetic oligonucleotide
ctatccctatgacgtaccagactatgcatcgctcaggtctctagttgcctcctcaggaac

SEQ ID NO: 380294 - DNA, 50 bp, Artificial
  Synthetic oligonucleotide
ctatccctgggcccccccaagcaatccctacaaagtaaactttaaactag

SEQ ID NO: 380295 - DNA, 58 bp, Artificial
  Synthetic oligonucleotide
ctatccgacacaatcaaccaacgctatcgctacaacacacaaggtaagacgcctacag

SEQ ID NO: 380296 - DNA, 55 bp, Artificial
  Synthetic oligonucleotide
ctatccgactcagcaatcaactatacaatacggaatcggcaaacaacagtctgca

SEQ ID NO: 380297 - DNA, 59 bp, Artificial
  Synthetic oligonucleotide
ctatccgagatctcgtcgacaccgcctctgctttgtatcgggaggccttagagtctccg

SEQ ID NO: 380298 - DNA, 60 bp, Artificial
  Synthetic oligonucleotide
ctatccgcggagttgcaactagctctctccagcggcctgggagccctgagagactggtag

SEQ ID NO: 380299 - DNA, 55 bp, Artificial
  Synthetic oligonucleotide
ctatccggcctttgccaaattacaagaccatgaaaagtgcagcaggcctaagccc

SEQ ID NO: 380300 - DNA, 60 bp, Artificial
  Synthetic oligonucleotide
ctatccgggttgcgctggtactgagttgcatctgtccggcaaactccattgatggcaggc

SEQ ID NO: 380301 - DNA, 55 bp, Artificial
  Synthetic oligonucleotide
ctatccgtagaggaagcctgtagcctgacgcccccacactcggccaaatccaagt

SEQ ID NO: 380302 - DNA, 58 bp, Artificial
  Synthetic oligonucleotide
ctatccgtagaggaagcttgtgacctgacgcccccacattcagccaaatccaaatttg

SEQ ID NO: 380303 - DNA, 59 bp, Artificial
  Synthetic oligonucleotide
ctatccgtgaactgaaaaacatggaaacggtacacatggatagagtgtctgtcctgacc

SEQ ID NO: 380304 - DNA, 55 bp, Artificial
  Synthetic oligonucleotide
ctatccgtgtccaacggaaggatggttctctaaggaccaacgtagatggctgagc

SEQ ID NO: 380305 - DNA, 54 bp, Artificial
  Synthetic oligonucleotide
ctatcctaacgattaagggccgcaggcccgtcaagttggatgaacggttagatt

SEQ ID NO: 380306 - DNA, 52 bp, Artificial
  Synthetic oligonucleotide
ctatcctataaggagtagctttaggtgtaattcctattagcgaagcgccaag

SEQ ID NO: 380307 - DNA, 55 bp, Artificial
  Synthetic oligonucleotide
ctatcctcctacgcgacaccacatacaaaggggagattgtcgaggagatcgtccc

SEQ ID NO: 380308 - DNA, 57 bp, Artificial
  Synthetic oligonucleotide
ctatcctgaggtaggtcacgtaagaaaaatgtgactcaatttatgttattaaatcta

SEQ ID NO: 380309 - DNA, 56 bp, Artificial
  Synthetic oligonucleotide
ctatcctgcacgctccggggtgtgtcccttgcgttcacgagggtaacgtctcgcgg

SEQ ID NO: 380310 - DNA, 60 bp, Artificial
  Synthetic oligonucleotide
ctatccttcacatacctaggagaatcagacagggctttgaaagggctttgctctaacatg

SEQ ID NO: 380311 - DNA, 56 bp, Artificial
  Synthetic oligonucleotide
ctatcgaatttcacggatcagaggcagaaacgctaaacgatgcgaatcctcgactg

SEQ ID NO: 380312 - DNA, 60 bp, Artificial
  Synthetic oligonucleotide
ctatcgacggcccaagcctgcgcctgagacggcctcatctgactccataaatcagatcac

SEQ ID NO: 380313 - DNA, 60 bp, Artificial
  Synthetic oligonucleotide
ctatcgagacgttccccgcccacatggacctatgggcacattgcgaagaggtgatgctca

SEQ ID NO: 380314 - DNA, 55 bp, Artificial
  Synthetic oligonucleotide
ctatcgagacttgaacgacttcaaaaggaggctcgggatccgtatataatacttg

SEQ ID NO: 380315 - DNA, 55 bp, Artificial
  Synthetic oligonucleotide
ctatcgaggccacaccagataacacgacagacactgtccttaaggccggatgtgc

SEQ ID NO: 380316 - DNA, 59 bp, Artificial
  Synthetic oligonucleotide
ctatcgatcagcttatttgtaagagtaatcctacaaaaataagcagatctactggtaag

SEQ ID NO: 380317 - DNA, 57 bp, Artificial
  Synthetic oligonucleotide
ctatcgatttatcgggttgattccgtagcgagtaaggggtatcacgatagaatatat

SEQ ID NO: 380318 - DNA, 50 bp, Artificial
  Synthetic oligonucleotide
ctatcgccacagagcggataccgcagtcgcgcccgctgtttcagatctcc

SEQ ID NO: 380319 - DNA, 60 bp, Artificial
  Synthetic oligonucleotide
ctatcgccagaccagttacaccagcacctccataacttcggttgatggatggttgacagt

SEQ ID NO: 380320 - DNA, 57 bp, Artificial
  Synthetic oligonucleotide
ctatcgcggcaaagaaccattttggtggtattgtacgccccacccgagccaatgagc

SEQ ID NO: 380321 - DNA, 58 bp, Artificial
  Synthetic oligonucleotide
ctatcgcggtgttaatcccatcctgtttgtggaccagtatggttgcgactatactggt

SEQ ID NO: 380322 - DNA, 59 bp, Artificial
  Synthetic oligonucleotide
ctatcgctatgggttcgtggccaattttagcatggaactgcccagctttggggtgtctg

SEQ ID NO: 380323 - DNA, 51 bp, Artificial
  Synthetic oligonucleotide
ctatcgcttcacactggaagacgcggacgctctgcgacagcacgacgcaaa

SEQ ID NO: 380324 - DNA, 55 bp, Artificial
  Synthetic oligonucleotide
ctatcggagatggtttctagatctccagaacgcatgagaattgaacagcctgaga

SEQ ID NO: 380325 - DNA, 60 bp, Artificial
  Synthetic oligonucleotide
ctatcggccagtacattacaggctttgcacttgcaataatcttgaaggcattgtatatgc

SEQ ID NO: 380326 - DNA, 60 bp, Artificial
  Synthetic oligonucleotide
ctatcggcgcgctcgaggagattcagaccccttatgcgcgcgccaatctccacgacgctg

SEQ ID NO: 380327 - DNA, 58 bp, Artificial
  Synthetic oligonucleotide
ctatcgggctcactacacccgtcgcgcctgcctttcgcccgtacgataccggctcatc

SEQ ID NO: 380328 - DNA, 59 bp, Artificial
  Synthetic oligonucleotide
ctatcggtagtaagcctgctgataggaattgccaatttaggcctaaacatcggactcca

SEQ ID NO: 380329 - DNA, 59 bp, Artificial
  Synthetic oligonucleotide
ctatcggtggggcacgattgacggcgtatgggatcctagggtgctgcccgtataccaga

SEQ ID NO: 380330 - DNA, 59 bp, Artificial
  Synthetic oligonucleotide
ctatcggtggtaaacatcgtgttcatgtctcagggactgaacaggtttccagtgtagct

SEQ ID NO: 380331 - DNA, 60 bp, Artificial
  Synthetic oligonucleotide
ctatcgtagctagaaattttgatactattagactatcattccagttaatgagaccaccaa

SEQ ID NO: 380332 - DNA, 60 bp, Artificial
  Synthetic oligonucleotide
ctatcgtatcgcttaagggccgcaggcccgtcaagaggatgaacggtcagatttgattgc

SEQ ID NO: 380333 - DNA, 55 bp, Artificial
  Synthetic oligonucleotide
ctatcgtgagttaccagagttaagttcacctgtttggccagacgacgcgcgtact

SEQ ID NO: 380334 - DNA, 56 bp, Artificial
  Synthetic oligonucleotide
ctatcgtgatggccctatctttgacttgtgcaagaacgttgtttttctgttcagat

SEQ ID NO: 380335 - DNA, 59 bp, Artificial
  Synthetic oligonucleotide
ctatctaactatgtggtttggacgcaatccgcgggagcgacccagcaaacgccggctga

SEQ ID NO: 380336 - DNA, 57 bp, Artificial
  Synthetic oligonucleotide
ctatctaataggcgttttacttgttggtcaacgtttatggatattgaccgtgactca

SEQ ID NO: 380337 - DNA, 60 bp, Artificial
  Synthetic oligonucleotide
ctatctaattatacagtatttagccatcacaagaccgtccagactagagtagcgcctagc

SEQ ID NO: 380338 - DNA, 51 bp, Artificial
  Synthetic oligonucleotide
ctatctacagggaaagctaagatatgttgtgttaaaatgaccgctatggat

SEQ ID NO: 380339 - DNA, 60 bp, Artificial
  Synthetic oligonucleotide
ctatctactgaggccacagctgctctggcagtgtccaatgaagctgctatagtattatct

SEQ ID NO: 380340 - DNA, 52 bp, Artificial
  Synthetic oligonucleotide
ctatctagcaggatcagaccagttgtcgttatgatatctggcaagccaggga

SEQ ID NO: 380341 - DNA, 55 bp, Artificial
  Synthetic oligonucleotide
ctatctagggtgaatgtagcaccagccggagtgcatgctcgagatcttctgctag

SEQ ID NO: 380342 - DNA, 60 bp, Artificial
  Synthetic oligonucleotide
ctatctatcccggccatataacgggtcaccgcatggcatgggatatgatgatgaactggt

SEQ ID NO: 380343 - DNA, 60 bp, Artificial
  Synthetic oligonucleotide
ctatctcaatctcacacatcgttacttacgagctgcgggtgtttccagtcgagttgagct

SEQ ID NO: 380344 - DNA, 60 bp, Artificial
  Synthetic oligonucleotide
ctatctcaatgccacacaccgcaacaagaaagaccttgcgaacatgcttggcgtctacag

SEQ ID NO: 380345 - DNA, 60 bp, Artificial
  Synthetic oligonucleotide
ctatctcacgtgaggagtcgcactcaccttaatccaaagcgacccaggcactggacagtg

SEQ ID NO: 380346 - DNA, 58 bp, Artificial
  Synthetic oligonucleotide
ctatctcagtcctggacatcagacaaggggccaaggagccttttaaggactacgtaga

SEQ ID NO: 380347 - DNA, 60 bp, Artificial
  Synthetic oligonucleotide
ctatctcattcaagtcatgagacagttgatattcatcacggttagattctacataattga

SEQ ID NO: 380348 - DNA, 55 bp, Artificial
  Synthetic oligonucleotide
ctatctccacatttattccagttatccatcttgggcaagtcccgaagcccagtcg

SEQ ID NO: 380349 - DNA, 57 bp, Artificial
  Synthetic oligonucleotide
ctatctccacctacaccactagcctaggtgccggccctacctctatctccgcggtcg

SEQ ID NO: 380350 - DNA, 60 bp, Artificial
  Synthetic oligonucleotide
ctatctcccagatataaacgccattctctgaatgaggtgcagtgatgagttcccctgtgc

SEQ ID NO: 380351 - DNA, 60 bp, Artificial
  Synthetic oligonucleotide
ctatctcccagatatacacgccattctccgcctgaggtacagtgatgaattcccctgtgc

SEQ ID NO: 380352 - DNA, 60 bp, Artificial
  Synthetic oligonucleotide
ctatctcccatataaaaacgccattctccgcttgagctgcagtgatgagttcccctgtgc

SEQ ID NO: 380353 - DNA, 60 bp, Artificial
  Synthetic oligonucleotide
ctatctcctggactccagttgtcgctggcgactcatttgaaactgagatggtaggcgcta

SEQ ID NO: 380354 - DNA, 59 bp, Artificial
  Synthetic oligonucleotide
ctatctcggtagataaagaaggatatgccgaagtgagattgggaatcctgacgaacgga

SEQ ID NO: 380355 - DNA, 60 bp, Artificial
  Synthetic oligonucleotide
ctatctctcagcagaccgtttggaatcaaatggcaacagtgagaacaccattgaactttg

SEQ ID NO: 380356 - DNA, 55 bp, Artificial
  Synthetic oligonucleotide
ctatctctcctgtgactcgtcgtcataagttagtagtgacaagttcagctattca

SEQ ID NO: 380357 - DNA, 57 bp, Artificial
  Synthetic oligonucleotide
ctatctctcggggggaacacccagccatgcgcgtattcccgttagcacagcccccca

SEQ ID NO: 380358 - DNA, 55 bp, Artificial
  Synthetic oligonucleotide
ctatctgaatggagagttcttacagcaagacgacgcaactgagaacttcggcact

SEQ ID NO: 380359 - DNA, 55 bp, Artificial
  Synthetic oligonucleotide
ctatctgagaaactcacttcgatcactatgcttgccgttcattctggcaagcagg

SEQ ID NO: 380360 - DNA, 60 bp, Artificial
  Synthetic oligonucleotide
ctatctgagactaagattcatcactaagaactacctacgcaagccttcctgaatccgcca

SEQ ID NO: 380361 - DNA, 57 bp, Artificial
  Synthetic oligonucleotide
ctatctgagcaagcgcccgtctccgttgggccacctacagataaccgcggtctcccg

SEQ ID NO: 380362 - DNA, 55 bp, Artificial
  Synthetic oligonucleotide
ctatctgagctttcaggcccatcagctgtagtcagactgttgaaatcgcagctca

SEQ ID NO: 380363 - DNA, 51 bp, Artificial
  Synthetic oligonucleotide
ctatctgagggtaaggggcctaaacaacatcgtcctatacatgaatgactt

SEQ ID NO: 380364 - DNA, 55 bp, Artificial
  Synthetic oligonucleotide
ctatctgatttagagattaatgtcggagagtcacatgtacagattgacgaaccca

SEQ ID NO: 380365 - DNA, 60 bp, Artificial
  Synthetic oligonucleotide
ctatctgctgtgctactggagtgtttggcactgcctacctcgtacctcgtcaccttttcg

SEQ ID NO: 380366 - DNA, 55 bp, Artificial
  Synthetic oligonucleotide
ctatctgtgattatggcggctatacatgaaggtgttgctagtagctccatcggaa

SEQ ID NO: 380367 - DNA, 60 bp, Artificial
  Synthetic oligonucleotide
ctatctgtgtgggctaccatgcaaacaactctacagacactgttgacacagtactggaaa

SEQ ID NO: 380368 - DNA, 57 bp, Artificial
  Synthetic oligonucleotide
ctatcttaagtagtaatagagcatatcttcttaacaggcagtctgtcctggatgagt

SEQ ID NO: 380369 - DNA, 60 bp, Artificial
  Synthetic oligonucleotide
ctatcttcaatgactccattgacggcgccaggtattgtctcaacacctgaagcaccctat

SEQ ID NO: 380370 - DNA, 55 bp, Artificial
  Synthetic oligonucleotide
ctatcttcaccacccgtcttacagcagcgcgtgagttacagctcgtggctgggga

SEQ ID NO: 380371 - DNA, 60 bp, Artificial
  Synthetic oligonucleotide
ctatcttctcacacagtcccacattgcttgaccctagcaaccgcatataccaacagtgca

SEQ ID NO: 380372 - DNA, 59 bp, Artificial
  Synthetic oligonucleotide
ctatcttctgggtgtatggtcccactggtggagaagggaaatcgacattcgcgcgagac

SEQ ID NO: 380373 - DNA, 58 bp, Artificial
  Synthetic oligonucleotide
ctatcttctgggtttatggtcccactggtggtgaaggcaaatcaacgtttgccagaga

SEQ ID NO: 380374 - DNA, 58 bp, Artificial
  Synthetic oligonucleotide
ctatcttgaatatggttgaaggctattcagaacaaaacaagtgtccctggaatcaagg

SEQ ID NO: 380375 - DNA, 60 bp, Artificial
  Synthetic oligonucleotide
ctatcttgattgatgataatatcactcgtgtgtgtggcgataaagcagtttacactgcct

SEQ ID NO: 380376 - DNA, 52 bp, Artificial
  Synthetic oligonucleotide
ctatctttgataatttaagatatctaatccctgcagtgacctcgctttattc

SEQ ID NO: 380377 - DNA, 60 bp, Artificial
  Synthetic oligonucleotide
ctatcttttccacacgtcttacggcgtcacgcgagttacagcttgtagctggagatgttg

SEQ ID NO: 380378 - DNA, 50 bp, Artificial
  Synthetic oligonucleotide
ctatgaaaatatcgtcctccttttgggcacaccaccacttcttctatgtc

SEQ ID NO: 380379 - DNA, 58 bp, Artificial
  Synthetic oligonucleotide
ctatgaaaatgacagtaaagacatacatagccaaattaattattggcaacttatacgt

SEQ ID NO: 380380 - DNA, 51 bp, Artificial
  Synthetic oligonucleotide
ctatgaaaccttgtgtgaagttatcaccactatgcatcaagatgaattgtg

SEQ ID NO: 380381 - DNA, 59 bp, Artificial
  Synthetic oligonucleotide
ctatgaaagtagacatccaaaaataagttcagaggtacacattccactagaaagtgcta

SEQ ID NO: 380382 - DNA, 55 bp, Artificial
  Synthetic oligonucleotide
ctatgaagaatgttaagggcgccctgggttatttgggtgccacggctatggcgcc

SEQ ID NO: 380383 - DNA, 57 bp, Artificial
  Synthetic oligonucleotide
ctatgaagctacaaattattgcggttggactgaaataatgctaactaaaggtaaaca

SEQ ID NO: 380384 - DNA, 55 bp, Artificial
  Synthetic oligonucleotide
ctatgaagctctgaagaacaacgcgcagcggatagtttacgatgatgaattgcag

SEQ ID NO: 380385 - DNA, 55 bp, Artificial
  Synthetic oligonucleotide
ctatgaaggcaagaggattgatttagctagcaagaatctggctctcaagaatcgc

SEQ ID NO: 380386 - DNA, 50 bp, Artificial
  Synthetic oligonucleotide
ctatgaagtcgcttgccgtagacttcccatctacgaccgaaacatacaag

SEQ ID NO: 380387 - DNA, 55 bp, Artificial
  Synthetic oligonucleotide
ctatgaagttacttccaaaacaccaaacagggcaagggaagcaatagcgcaaatg

SEQ ID NO: 380388 - DNA, 52 bp, Artificial
  Synthetic oligonucleotide
ctatgaagttctattacgtatgatagtaatgtcacagcaacgaatgataact

SEQ ID NO: 380389 - DNA, 59 bp, Artificial
  Synthetic oligonucleotide
ctatgaatatgtctagacagggtattttccaaactgttgggagtggtcttgaccacatc

SEQ ID NO: 380390 - DNA, 55 bp, Artificial
  Synthetic oligonucleotide
ctatgaatgacttgtactgggaagaaagattttggagagctcgctggtcaaccag

SEQ ID NO: 380391 - DNA, 55 bp, Artificial
  Synthetic oligonucleotide
ctatgacaacagacaacgagatatactgggaagaggacagacaggactggtcacc

SEQ ID NO: 380392 - DNA, 60 bp, Artificial
  Synthetic oligonucleotide
ctatgacacagggtgcgcgtggtatgagctcacgccgtctgagaccaccgtcagattacg

SEQ ID NO: 380393 - DNA, 52 bp, Artificial
  Synthetic oligonucleotide
ctatgacagaagaattagaaatgaatgagcgaaattataataatgctatcat

SEQ ID NO: 380394 - DNA, 60 bp, Artificial
  Synthetic oligonucleotide
ctatgacagatcctgtggcgtttattgggacttgctgtctgtattcgatgacgcaatgat

SEQ ID NO: 380395 - DNA, 53 bp, Artificial
  Synthetic oligonucleotide
ctatgacataataatctgcgacgagtgccactccacggatgcaacatctatct

SEQ ID NO: 380396 - DNA, 54 bp, Artificial
  Synthetic oligonucleotide
ctatgaccaggtactccgcccctcctggtgaccctcccagaccggaatacgacc

SEQ ID NO: 380397 - DNA, 55 bp, Artificial
  Synthetic oligonucleotide
ctatgaccccgtcaagaggacgtttacgtcttaataagcctagtgcttcacgtaa

SEQ ID NO: 380398 - DNA, 60 bp, Artificial
  Synthetic oligonucleotide
ctatgacctaactatgtcctctatgtgcagccttggctctcctgggatcattggtcctcg

SEQ ID NO: 380399 - DNA, 57 bp, Artificial
  Synthetic oligonucleotide
ctatgacgatgcttgcgatgttctttggtgttccgcaaatgatttatgttaccacga

SEQ ID NO: 380400 - DNA, 50 bp, Artificial
  Synthetic oligonucleotide
ctatgacgcgctctctgctcaatagattttcctctgccaatgaaacggag

SEQ ID NO: 380401 - DNA, 53 bp, Artificial
  Synthetic oligonucleotide
ctatgacggggagaacccgaaagaattcacggcgaatttaaggtaccacagtg

SEQ ID NO: 380402 - DNA, 59 bp, Artificial
  Synthetic oligonucleotide
ctatgactaagtgcatcattccgttcggcaaagaggtgggtcgtgtaccccactctaga

SEQ ID NO: 380403 - DNA, 55 bp, Artificial
  Synthetic oligonucleotide
ctatgactaatcttaggttcactagcagtgacaatatgggatctcatggggtgta

SEQ ID NO: 380404 - DNA, 50 bp, Artificial
  Synthetic oligonucleotide
ctatgactaggtactctgccccccccggggacccgccccaaccggaatac

SEQ ID NO: 380405 - DNA, 60 bp, Artificial
  Synthetic oligonucleotide
ctatgagcaacagggttgtaggtgtacccccactgagatcgagagtgtatcatagccctg

SEQ ID NO: 380406 - DNA, 59 bp, Artificial
  Synthetic oligonucleotide
ctatgagccttccattgtgttgcccaaacaaatagcaactttggaacatgccccagctt

SEQ ID NO: 380407 - DNA, 60 bp, Artificial
  Synthetic oligonucleotide
ctatgaggaagcatgttgatgctctcctagcaagaggagtaatcaggaaaagcaacagtc

SEQ ID NO: 380408 - DNA, 54 bp, Artificial
  Synthetic oligonucleotide
ctatgagggacttcttactcatgtcggtccaagctgtgttccactacttgctgt

SEQ ID NO: 380409 - DNA, 55 bp, Artificial
  Synthetic oligonucleotide
ctatgagtacatgcattacatagctaactcagctaatgacacgtgggacaagcag

SEQ ID NO: 380410 - DNA, 60 bp, Artificial
  Synthetic oligonucleotide
ctatgagtgggtgatttagcttggtggaacatagcttgcccgtgtcaagagctaagaccc

SEQ ID NO: 380411 - DNA, 57 bp, Artificial
  Synthetic oligonucleotide
ctatgagtgttgagcgattcagtgtcttagattacccggagtactgcatgatcgatt

SEQ ID NO: 380412 - DNA, 58 bp, Artificial
  Synthetic oligonucleotide
ctatgataaatttcgcacagaagcgaatcgctacaaaggactgtttcggtcatctttt

SEQ ID NO: 380413 - DNA, 58 bp, Artificial
  Synthetic oligonucleotide
ctatgataacactcgttataactctagtaatgatgcaaagtaccgtaccctcaacaaa

SEQ ID NO: 380414 - DNA, 60 bp, Artificial
  Synthetic oligonucleotide
ctatgatattagcccaatttcgactattgttgaagagatagaattacagcccatacatga

SEQ ID NO: 380415 - DNA, 56 bp, Artificial
  Synthetic oligonucleotide
ctatgatattcccttcaaagccgttgaagtcgaatggaacttgcatgtccccgtac

SEQ ID NO: 380416 - DNA, 60 bp, Artificial
  Synthetic oligonucleotide
ctatgatcgatataccctaccctggtatgtcagcagcaatggggggagatgtaggtatct

SEQ ID NO: 380417 - DNA, 55 bp, Artificial
  Synthetic oligonucleotide
ctatgatctgtgtacttggacgttgagtggaggaagagtcgcactgaaagcgcgg

SEQ ID NO: 380418 - DNA, 55 bp, Artificial
  Synthetic oligonucleotide
ctatgatgacatttggggaaacatgacctggttgcagtgggatagagaaattagc

SEQ ID NO: 380419 - DNA, 55 bp, Artificial
  Synthetic oligonucleotide
ctatgatgcattcggcgttattgaaagaaaagaatgcccgttcattacttacccc

SEQ ID NO: 380420 - DNA, 55 bp, Artificial
  Synthetic oligonucleotide
ctatgatgccaaacataaggataccctaccgtactgggacaaataccctttaatc

SEQ ID NO: 380421 - DNA, 55 bp, Artificial
  Synthetic oligonucleotide
ctatgattgtaccatgggttagtgctagtcactttagaaataccacacctgacac

SEQ ID NO: 380422 - DNA, 55 bp, Artificial
  Synthetic oligonucleotide
ctatgatttatagccccgggcgcgtctgtcgcaatccagtttccacagagctgcg

SEQ ID NO: 380423 - DNA, 60 bp, Artificial
  Synthetic oligonucleotide
ctatgatttgactggaaatgacataattgctgacatttgtgtggtccaggctgccagagt

SEQ ID NO: 380424 - DNA, 57 bp, Artificial
  Synthetic oligonucleotide
ctatgatttggagagtgggaggccaatccctaaaattgatttggaggacagggagag

SEQ ID NO: 380425 - DNA, 59 bp, Artificial
  Synthetic oligonucleotide
ctatgcaaagaggcgttgatgcatgactggaacttaacgccgattactgggttgggtcc

SEQ ID NO: 380426 - DNA, 60 bp, Artificial
  Synthetic oligonucleotide
ctatgcaaagctagcagatgaagacgcaaatgcccgtgcatggctaagtagcaatagcca

SEQ ID NO: 380427 - DNA, 55 bp, Artificial
  Synthetic oligonucleotide
ctatgcaacgtttcagattgtgtagtgtttgtcacatggtgtcatggcctagaac

SEQ ID NO: 380428 - DNA, 59 bp, Artificial
  Synthetic oligonucleotide
ctatgcaagatagaagatcacctaccaaatggtatgagggcctagttgacaaaattaag

SEQ ID NO: 380429 - DNA, 60 bp, Artificial
  Synthetic oligonucleotide
ctatgcaatacgctatagcaaaacatggtcttagtccagagtcaacggatagctttatcc

SEQ ID NO: 380430 - DNA, 60 bp, Artificial
  Synthetic oligonucleotide
ctatgcaatgttgagggatgggtcgtggtagcaaaagacaatgcaataagatttggggaa

SEQ ID NO: 380431 - DNA, 55 bp, Artificial
  Synthetic oligonucleotide
ctatgcacactcaagatgtcatacattatcaaattgtcccaggtggaatgaagga

SEQ ID NO: 380432 - DNA, 57 bp, Artificial
  Synthetic oligonucleotide
ctatgcacatagcaagttattctcaccttattacaaccttaaatttacccgaggcaa

SEQ ID NO: 380433 - DNA, 60 bp, Artificial
  Synthetic oligonucleotide
ctatgcacgtcgtctcaaaccatacaacaatcggagctggaccattggacagaccatgca

SEQ ID NO: 380434 - DNA, 58 bp, Artificial
  Synthetic oligonucleotide
ctatgcactacactctgacgactacaccccccaaggacaaccatttggaggggctcta

SEQ ID NO: 380435 - DNA, 55 bp, Artificial
  Synthetic oligonucleotide
ctatgcactgcgtattgttcgcctgctaactttactcgatagtaacctgtgttac

SEQ ID NO: 380436 - DNA, 60 bp, Artificial
  Synthetic oligonucleotide
ctatgcactggtacgattgggtcataaccggcgtgacagtcgtcgctcaactgaccatct

SEQ ID NO: 380437 - DNA, 55 bp, Artificial
  Synthetic oligonucleotide
ctatgcacttcactgatgagagaatagaatggaaagaccctgatggaatgttacg

SEQ ID NO: 380438 - DNA, 54 bp, Artificial
  Synthetic oligonucleotide
ctatgcagaattagaggcgaacaagtagggggacaattaaagattgggcctgga

SEQ ID NO: 380439 - DNA, 60 bp, Artificial
  Synthetic oligonucleotide
ctatgcaggagagaacttgggaataattggatgactaatgatcaagggcctttactaaga

SEQ ID NO: 380440 - DNA, 58 bp, Artificial
  Synthetic oligonucleotide
ctatgcatccctatcctcacttaggaaaagcttaagccagaagggtcataagctcttt

SEQ ID NO: 380441 - DNA, 57 bp, Artificial
  Synthetic oligonucleotide
ctatgcattatgtacatattttgcaggagaaggctataaaacagcatggtttacagc

SEQ ID NO: 380442 - DNA, 55 bp, Artificial
  Synthetic oligonucleotide
ctatgccagcaccagttgcaccacatgcaatatacgatactagtttagactcttt

SEQ ID NO: 380443 - DNA, 59 bp, Artificial
  Synthetic oligonucleotide
ctatgccagcaggaactgtctttcaaccaggatttccatgggaacaaactctatccaac

SEQ ID NO: 380444 - DNA, 60 bp, Artificial
  Synthetic oligonucleotide
ctatgccagcgtttggggcgctgatgaatcgagagtggttcttgaacctatggcaaggaa

SEQ ID NO: 380445 - DNA, 55 bp, Artificial
  Synthetic oligonucleotide
ctatgcccgaaatcatattccaaatctcgggaaaatagccggacctctctattcc

SEQ ID NO: 380446 - DNA, 55 bp, Artificial
  Synthetic oligonucleotide
ctatgcccttcacagcgaggactttaccactcagataagaccctttggaggcagc

SEQ ID NO: 380447 - DNA, 55 bp, Artificial
  Synthetic oligonucleotide
ctatgccgaagcgtcccgcagatatagtcattcccactcccgcatccaaggtgcc

SEQ ID NO: 380448 - DNA, 55 bp, Artificial
  Synthetic oligonucleotide
ctatgccggatatgcgcacaccacgaacaagcgttacctcagcaggtgaaagcgc

SEQ ID NO: 380449 - DNA, 55 bp, Artificial
  Synthetic oligonucleotide
ctatgcctaactagaaagacccctgaaaatattactataagcggcaggaagttgt

SEQ ID NO: 380450 - DNA, 60 bp, Artificial
  Synthetic oligonucleotide
ctatgcctcaagcgagcggcggatttgatcgcatgattgttacaaagaagcttaaatggc

SEQ ID NO: 380451 - DNA, 55 bp, Artificial
  Synthetic oligonucleotide
ctatgcctcacctattagtcacttactgtgggctgccaactatgcttttagctgc

SEQ ID NO: 380452 - DNA, 55 bp, Artificial
  Synthetic oligonucleotide
ctatgcgacgtagttatgcgtaaaggaaagcaaaattgaatagtccgatctgccg

SEQ ID NO: 380453 - DNA, 55 bp, Artificial
  Synthetic oligonucleotide
ctatgcgcatggtcccaaagggcgtacgctgggccgggattttccagggtgacga

SEQ ID NO: 380454 - DNA, 55 bp, Artificial
  Synthetic oligonucleotide
ctatgcgccttttgtttatacagattcgccgaaaggatatctaacgtataaagtt

SEQ ID NO: 380455 - DNA, 55 bp, Artificial
  Synthetic oligonucleotide
ctatgcggcgccccgtctgagcagggtttttgggccgtgtacccaaactgtgcgg

SEQ ID NO: 380456 - DNA, 60 bp, Artificial
  Synthetic oligonucleotide
ctatgcgtacaagatggagcttcctgtttttaccacgatccactatccgccggtcgcata

SEQ ID NO: 380457 - DNA, 60 bp, Artificial
  Synthetic oligonucleotide
ctatgcgtcgtctgcgaataggtcgcttcttagctatcctgtgctgtgcctttatagagg

SEQ ID NO: 380458 - DNA, 53 bp, Artificial
  Synthetic oligonucleotide
ctatgcgtctgcagactcttgctactgtacgttgcattgattatgtgggccaa

SEQ ID NO: 380459 - DNA, 57 bp, Artificial
  Synthetic oligonucleotide
ctatgcgtggagtcgtaaaattaacgacgcaggccggtgttgcacccgaaggcgata

SEQ ID NO: 380460 - DNA, 53 bp, Artificial
  Synthetic oligonucleotide
ctatgctaacggaggacgaggcttctgtaaggctcacaattggaattgtctca

SEQ ID NO: 380461 - DNA, 58 bp, Artificial
  Synthetic oligonucleotide
ctatgctacgagctttaataagaaaggcaatttttgttgtaacgacggacgcattgca

SEQ ID NO: 380462 - DNA, 51 bp, Artificial
  Synthetic oligonucleotide
ctatgctagtgaggcaaaaagaattaagatcctacacaataagtgtaacac

SEQ ID NO: 380463 - DNA, 60 bp, Artificial
  Synthetic oligonucleotide
ctatgctgagcgttgggctttgaagattttatagctacgctgcgtttatctcatttgtat

SEQ ID NO: 380464 - DNA, 60 bp, Artificial
  Synthetic oligonucleotide
ctatgctgcctcaggggacccaacatcaccagataacattgaatctcctaatgcaccgtg

SEQ ID NO: 380465 - DNA, 56 bp, Artificial
  Synthetic oligonucleotide
ctatgctggggttaacggaaatgatgcacacgctttttgcacatccgtttactcct

SEQ ID NO: 380466 - DNA, 60 bp, Artificial
  Synthetic oligonucleotide
ctatgcttagacataataattggagcttggttataatcccaatatgccctcttcaggtcc

SEQ ID NO: 380467 - DNA, 60 bp, Artificial
  Synthetic oligonucleotide
ctatgcttcattgcagatcacctcggggataatactgtctcatcatgcagcaatctagcc

SEQ ID NO: 380468 - DNA, 55 bp, Artificial
  Synthetic oligonucleotide
ctatgcttggcaatctggaacaaatgcatctatattctggcaacatgggcaaccc

SEQ ID NO: 380469 - DNA, 56 bp, Artificial
  Synthetic oligonucleotide
ctatggaaatggggtgttaatcggacagggcgaatatgttagtggcattattcagg

SEQ ID NO: 380470 - DNA, 55 bp, Artificial
  Synthetic oligonucleotide
ctatggaagcaattcctaggagatatggtgtgtacccagctaaatttagtggact

SEQ ID NO: 380471 - DNA, 55 bp, Artificial
  Synthetic oligonucleotide
ctatggaagccgagtcacctgggtccaacatgctggtgcccagtctatggagccc

SEQ ID NO: 380472 - DNA, 60 bp, Artificial
  Synthetic oligonucleotide
ctatggaagttgctagtcaggctaggcagatggtgcaggcaatgaggaccattgggactc

SEQ ID NO: 380473 - DNA, 55 bp, Artificial
  Synthetic oligonucleotide
ctatggacaagagtcggtttgtgattcgcataaaagcgttaccagcttctatgag

SEQ ID NO: 380474 - DNA, 60 bp, Artificial
  Synthetic oligonucleotide
ctatggacttgtccaaggctgcgaatctatctataattaaaactgctttggcaggattgg

SEQ ID NO: 380475 - DNA, 55 bp, Artificial
  Synthetic oligonucleotide
ctatggaggccctaatggtcacaactgtagacaaattaacccaggggagacagac

SEQ ID NO: 380476 - DNA, 57 bp, Artificial
  Synthetic oligonucleotide
ctatggagggggaaaagaattggattgtggtaccgacatggaggataccaggcaggc

SEQ ID NO: 380477 - DNA, 57 bp, Artificial
  Synthetic oligonucleotide
ctatggaggtctcagacttccgtggttcctccggctcccctgtcttgtgcgacgagg

SEQ ID NO: 380478 - DNA, 58 bp, Artificial
  Synthetic oligonucleotide
ctatggaggtgtcccggttgatgtcattaattcatgggcaggggatattctaagaacc

SEQ ID NO: 380479 - DNA, 60 bp, Artificial
  Synthetic oligonucleotide
ctatggaggttgccagtcagcgtaggcagatggtgcaggcaatgagaaccattggaactc

SEQ ID NO: 380480 - DNA, 59 bp, Artificial
  Synthetic oligonucleotide
ctatggagtcatcttggtgggaatcaaagccaagctgcctaactttagaggaatggaag

SEQ ID NO: 380481 - DNA, 52 bp, Artificial
  Synthetic oligonucleotide
ctatggataaggcgtatggtatcagccacaccgaggacttcacagcatccag

SEQ ID NO: 380482 - DNA, 55 bp, Artificial
  Synthetic oligonucleotide
ctatggataccgcatatgcaaactctacacaacaagagaattctatgacgtcccc

SEQ ID NO: 380483 - DNA, 55 bp, Artificial
  Synthetic oligonucleotide
ctatggatatttcaatcctaacagggcctaacaattgggagtcagtactggggtg

SEQ ID NO: 380484 - DNA, 60 bp, Artificial
  Synthetic oligonucleotide
ctatggatcctcacttcaagcactagctggttctatactgatgctaacttgcaactctac

SEQ ID NO: 380485 - DNA, 56 bp, Artificial
  Synthetic oligonucleotide
ctatggatgcgttaactggaccaacgagaactttccgttcaacgactgcgtcgaaa

SEQ ID NO: 380486 - DNA, 60 bp, Artificial
  Synthetic oligonucleotide
ctatggattctgtcatcgcaagaaagatagttccttcatctacagttattctcgatggtt

SEQ ID NO: 380487 - DNA, 55 bp, Artificial
  Synthetic oligonucleotide
ctatggatttatgacagtaaaagtttcgacagacccaacaagagaaatacagcca

SEQ ID NO: 380488 - DNA, 55 bp, Artificial
  Synthetic oligonucleotide
ctatggatttgtagccaatttcagcatggagttgcccagttttggggtgtccggg

SEQ ID NO: 380489 - DNA, 57 bp, Artificial
  Synthetic oligonucleotide
ctatggcaatggttcaccaaggtttgattatctttgccacttggcgagtagaaaaga

SEQ ID NO: 380490 - DNA, 58 bp, Artificial
  Synthetic oligonucleotide
ctatggcagatgcctaaaaggaagagagaaccgcagatcaaaaagggagacccaccta

SEQ ID NO: 380491 - DNA, 60 bp, Artificial
  Synthetic oligonucleotide
ctatggcaggaagaagcggagacaacgacgaagagctcctgagagcagtcagactcatca

SEQ ID NO: 380492 - DNA, 60 bp, Artificial
  Synthetic oligonucleotide
ctatggcaggaagaagtggagacagcgacgaagcgctcctccaagcagtgaggatcatca

SEQ ID NO: 380493 - DNA, 58 bp, Artificial
  Synthetic oligonucleotide
ctatggcaggagctttcttaagaggtggagcacggagtcgactcccaggtgttcttcc

SEQ ID NO: 380494 - DNA, 58 bp, Artificial
  Synthetic oligonucleotide
ctatggcataattattgaacagtgttatccaataaaagatttgcctatgaataagatt

SEQ ID NO: 380495 - DNA, 60 bp, Artificial
  Synthetic oligonucleotide
ctatggccagagctttgctgttagcacccagaacatcctaccgaaccatgaagagttttg

SEQ ID NO: 380496 - DNA, 52 bp, Artificial
  Synthetic oligonucleotide
ctatggcccacagattaagaatggatgcacgactggactatgagtcaggaag

SEQ ID NO: 380497 - DNA, 60 bp, Artificial
  Synthetic oligonucleotide
ctatggccgtatggaatcatgaattgttttgttgctaatactggggagcctgttgagaag

SEQ ID NO: 380498 - DNA, 51 bp, Artificial
  Synthetic oligonucleotide
ctatggccgtgtgaacggtgcttggggtgaggttcctggtgaggcacctac

SEQ ID NO: 380499 - DNA, 55 bp, Artificial
  Synthetic oligonucleotide
ctatggcctccctccgcaccagctcccgcaaagatggcagcacctacacatcggt

SEQ ID NO: 380500 - DNA, 54 bp, Artificial
  Synthetic oligonucleotide
ctatggcctgaaataatcccgaacttaaagaggtacatattgacaagctgcctt

SEQ ID NO: 380501 - DNA, 60 bp, Artificial
  Synthetic oligonucleotide
ctatggcgcgctttgaggatccaacacggcgaccctacaagctacctgatctgtgcacgg

SEQ ID NO: 380502 - DNA, 52 bp, Artificial
  Synthetic oligonucleotide
ctatggcgcgtgctaggcgagtcaagcgtgactctgctactaacatttacag

SEQ ID NO: 380503 - DNA, 58 bp, Artificial
  Synthetic oligonucleotide
ctatggcgggcccggagagaaaataaccatctgcaacggctctactattgtagaacaa

SEQ ID NO: 380504 - DNA, 55 bp, Artificial
  Synthetic oligonucleotide
ctatggcggggacctctaaagtgtcccgcaatgctaactattcacctcgtgcagg

SEQ ID NO: 380505 - DNA, 59 bp, Artificial
  Synthetic oligonucleotide
ctatgggaatacaactggatcagcgtattattgtgcttttcatggtggactggggtaag

SEQ ID NO: 380506 - DNA, 60 bp, Artificial
  Synthetic oligonucleotide
ctatgggacgactatggaatgagtaatcccatccatgatgccctcaggttacaagaactc

SEQ ID NO: 380507 - DNA, 56 bp, Artificial
  Synthetic oligonucleotide
ctatgggaggcgcgttgacctttctatacgccgcactttgggtatgtatcccacgg

SEQ ID NO: 380508 - DNA, 55 bp, Artificial
  Synthetic oligonucleotide
ctatgggattcaatgacaaccgcaaattacgtattagctagatcggttattccag

SEQ ID NO: 380509 - DNA, 55 bp, Artificial
  Synthetic oligonucleotide
ctatgggccgacgatgacaggagtgttgactataacgagaaacttagtttcgagg

SEQ ID NO: 380510 - DNA, 55 bp, Artificial
  Synthetic oligonucleotide
ctatgggcgcacccataaagggaagtttctatctggtacaatcatcacaacctgt

SEQ ID NO: 380511 - DNA, 60 bp, Artificial
  Synthetic oligonucleotide
ctatgggcgcagcatcaataacgctgacggtacaggccagacaattgttgtccggcatag

SEQ ID NO: 380512 - DNA, 55 bp, Artificial
  Synthetic oligonucleotide
ctatgggcgcagcatcactaacgctgacggtacaagccaggctactactgtctgg

SEQ ID NO: 380513 - DNA, 60 bp, Artificial
  Synthetic oligonucleotide
ctatgggcgcagcgtcaataacgctgacggcacaggccaggcaactgttgtctggtatag

SEQ ID NO: 380514 - DNA, 55 bp, Artificial
  Synthetic oligonucleotide
ctatgggcgcagcgtctctgacgttgacggtacaggccagacaactactgtctgg

SEQ ID NO: 380515 - DNA, 60 bp, Artificial
  Synthetic oligonucleotide
ctatgggcgcaggctcaataacgctaacggtacaggccagacacttattgtctggtatag

SEQ ID NO: 380516 - DNA, 55 bp, Artificial
  Synthetic oligonucleotide
ctatgggctctctccaaccgcggcagacaaaaccgagttcattgacgtgtgcccc

SEQ ID NO: 380517 - DNA, 60 bp, Artificial
  Synthetic oligonucleotide
ctatgggcttcatacaacatagacacgtcaagcagtgatgacgtgtataatttcagtacc

SEQ ID NO: 380518 - DNA, 54 bp, Artificial
  Synthetic oligonucleotide
ctatggggaaactatttacatgtgaacgatataagtaatatatcgccgaccaga

SEQ ID NO: 380519 - DNA, 55 bp, Artificial
  Synthetic oligonucleotide
ctatggggaagttgaaatcaggtatgcagtctctttggggcaaactcaagcggtg

SEQ ID NO: 380520 - DNA, 55 bp, Artificial
  Synthetic oligonucleotide
ctatggggattcaactggaccagaaaatcataattctctacatgctttcatgggg

SEQ ID NO: 380521 - DNA, 56 bp, Artificial
  Synthetic oligonucleotide
ctatggggtgttcatcacccgcctaacataggggaccaaaggaccctctatcatac

SEQ ID NO: 380522 - DNA, 59 bp, Artificial
  Synthetic oligonucleotide
ctatggggttctcctatgacacccggtgttttgactcaacagtcaccgagcgcgacatc

SEQ ID NO: 380523 - DNA, 55 bp, Artificial
  Synthetic oligonucleotide
ctatgggtgcagagtgctgtaagcatgtttgttgccagctgcgccccgggacggg

SEQ ID NO: 380524 - DNA, 57 bp, Artificial
  Synthetic oligonucleotide
ctatgggttggcccccactgctgcagacaaatcccaaagcatcgagccaacagacac

SEQ ID NO: 380525 - DNA, 57 bp, Artificial
  Synthetic oligonucleotide
ctatggtaaggcacctcgcggggggcaagtacgtccagatggctctactagcccttg

SEQ ID NO: 380526 - DNA, 57 bp, Artificial
  Synthetic oligonucleotide
ctatggtagtagacgaaaacgcttacttacaaacacatccctctataatgctactaa

SEQ ID NO: 380527 - DNA, 60 bp, Artificial
  Synthetic oligonucleotide
ctatggtataatgaagcacggtggtcagctctggacttataatggagagactccaaatgc

SEQ ID NO: 380528 - DNA, 56 bp, Artificial
  Synthetic oligonucleotide
ctatggtatgagacatagtcatcgatatatggtacataatatactagcattagatg

SEQ ID NO: 380529 - DNA, 55 bp, Artificial
  Synthetic oligonucleotide
ctatggtcatggggtatggaggggcatgatggatggcgtggatgtgcagatcgat

SEQ ID NO: 380530 - DNA, 60 bp, Artificial
  Synthetic oligonucleotide
ctatggtccagcagatacaggaaagtcatatttctgcatgagtctattaagatttctagg

SEQ ID NO: 380531 - DNA, 55 bp, Artificial
  Synthetic oligonucleotide
ctatggtcctactgccccctttaccgtggcccttgtagagagtcttagtgaaaga

SEQ ID NO: 380532 - DNA, 58 bp, Artificial
  Synthetic oligonucleotide
ctatggtcttatgggtagatttagccttatgagcaatttggcggttcttctcgtatac

SEQ ID NO: 380533 - DNA, 56 bp, Artificial
  Synthetic oligonucleotide
ctatggtgaaagcaattcagaccgtgacagtttaaacacacttgtatattgcttag

SEQ ID NO: 380534 - DNA, 60 bp, Artificial
  Synthetic oligonucleotide
ctatggtgaagcgaccagcagatatcatcttttcaacgcccgtatcgaaagtacgccgtc

SEQ ID NO: 380535 - DNA, 60 bp, Artificial
  Synthetic oligonucleotide
ctatggtggctttgtaccttgccactttgggggatgccatcactgcatttcatgagcaca

SEQ ID NO: 380536 - DNA, 55 bp, Artificial
  Synthetic oligonucleotide
ctatggtgtgtacatgaagatataacagtacgagacaccaaggaagccttagaca

SEQ ID NO: 380537 - DNA, 55 bp, Artificial
  Synthetic oligonucleotide
ctatggttcacataacatgggtggtaattggggagtggtcttagcggccatttcc

SEQ ID NO: 380538 - DNA, 55 bp, Artificial
  Synthetic oligonucleotide
ctatggttgatctagaaggaagcaattacgactttatgttccaggcatctatgat

SEQ ID NO: 380539 - DNA, 55 bp, Artificial
  Synthetic oligonucleotide
ctatggttgggccctgttgtgtctttctcatgcaccatcgtcctagtcacgaggt

SEQ ID NO: 380540 - DNA, 55 bp, Artificial
  Synthetic oligonucleotide
ctatggttgttgttgtggatcgtaaaccacaccttgggccttccgggtgtttgca

SEQ ID NO: 380541 - DNA, 55 bp, Artificial
  Synthetic oligonucleotide
ctatggtttacggaaagaagactgcccgtcatgtgtctgggatgaggaacaatgt

SEQ ID NO: 380542 - DNA, 54 bp, Artificial
  Synthetic oligonucleotide
ctatggtttttgtgtgggaccgccatgcatctacttcgccaaattttttgtggt

SEQ ID NO: 380543 - DNA, 55 bp, Artificial
  Synthetic oligonucleotide
ctatgtaaactaggggggatagccccgttgcacctgggcaaatgtaacattgccg

SEQ ID NO: 380544 - DNA, 55 bp, Artificial
  Synthetic oligonucleotide
ctatgtaactcaaacatcatcctctactacagcaacatcatgggagattggaatt

SEQ ID NO: 380545 - DNA, 60 bp, Artificial
  Synthetic oligonucleotide
ctatgtaattgtctgtatggatgcatcgcgttctctatatctgagcccgcctctgatggg

SEQ ID NO: 380546 - DNA, 55 bp, Artificial
  Synthetic oligonucleotide
ctatgtacgcttacagaattagcggagaagcacgaaagcaagtacagacgtatgg

SEQ ID NO: 380547 - DNA, 53 bp, Artificial
  Synthetic oligonucleotide
ctatgtagatggagcagctaatagggaaactaaagcaggaaaagcagggtacg

SEQ ID NO: 380548 - DNA, 55 bp, Artificial
  Synthetic oligonucleotide
ctatgtagattaaaaggaatagccccactacaattggggaaatgtaacatcgccg

SEQ ID NO: 380549 - DNA, 55 bp, Artificial
  Synthetic oligonucleotide
ctatgtagatttattggattacgtgtcgagtcttctgtgttaagggttcggaatc

SEQ ID NO: 380550 - DNA, 55 bp, Artificial
  Synthetic oligonucleotide
ctatgtaggccttggtatgggtattcggaggagtcgttatcttcttccagtggtc

SEQ ID NO: 380551 - DNA, 56 bp, Artificial
  Synthetic oligonucleotide
ctatgtaggtgatccttactgtcctccatcagataaagaacatatatcattagagg

SEQ ID NO: 380552 - DNA, 60 bp, Artificial
  Synthetic oligonucleotide
ctatgtataggttatcatgcaaataattcaactgacactgttgatacagtactagaaaag

SEQ ID NO: 380553 - DNA, 60 bp, Artificial
  Synthetic oligonucleotide
ctatgtatgcacagttcgcccatactatacgtatagtatgggcgaactgtgcatacatag

SEQ ID NO: 380554 - DNA, 55 bp, Artificial
  Synthetic oligonucleotide
ctatgtatgtttctgatactgtgacgttcgtcaatgtggctaccggtgcccaggg

SEQ ID NO: 380555 - DNA, 51 bp, Artificial
  Synthetic oligonucleotide
ctatgtcaacattgctcctactagttcttggacccagcatgctaattggac

SEQ ID NO: 380556 - DNA, 60 bp, Artificial
  Synthetic oligonucleotide
ctatgtcaactttgaagcatgctcgaggcgcatcgatttcctcgtgtatgcagaagcccc

SEQ ID NO: 380557 - DNA, 50 bp, Artificial
  Synthetic oligonucleotide
ctatgtcacaattcattgtgacacctactatgcatgcagtttacacaggt

SEQ ID NO: 380558 - DNA, 55 bp, Artificial
  Synthetic oligonucleotide
ctatgtccgagtagacgaggatatgtggagtggagacgtgaaccagcttctcatg

SEQ ID NO: 380559 - DNA, 51 bp, Artificial
  Synthetic oligonucleotide
ctatgtcgaaatttaaacgatgtgaagttactctacccgttttgcgtttct

SEQ ID NO: 380560 - DNA, 55 bp, Artificial
  Synthetic oligonucleotide
ctatgtcgtcacgaccatatcgacacttgtttgattgcctgtttgtagaaattag

SEQ ID NO: 380561 - DNA, 52 bp, Artificial
  Synthetic oligonucleotide
ctatgtcgtttaacgacgctcgtaaatacgcctttttaacgtctaacaagac

SEQ ID NO: 380562 - DNA, 57 bp, Artificial
  Synthetic oligonucleotide
ctatgtctacaagaaaggaaacacctgggttgtgattggggtgcacgtggcggccac

SEQ ID NO: 380563 - DNA, 55 bp, Artificial
  Synthetic oligonucleotide
ctatgtctacgctgctcaataggctctacgtcggtaaggctggttctacctccgc

SEQ ID NO: 380564 - DNA, 55 bp, Artificial
  Synthetic oligonucleotide
ctatgtctggcaccgatgctcaggttgaagaagtccggatttatgaaggtacaga

SEQ ID NO: 380565 - DNA, 55 bp, Artificial
  Synthetic oligonucleotide
ctatgtgaagtccaaggtcggaaactaccgactgccctcaaataaaccgagtggc

SEQ ID NO: 380566 - DNA, 52 bp, Artificial
  Synthetic oligonucleotide
ctatgtgatcaatagcttcatgacaacgataaaggatttctttcatggaatc

SEQ ID NO: 380567 - DNA, 60 bp, Artificial
  Synthetic oligonucleotide
ctatgtgccatcttgctaattagtggagctatccttattagctaccggttccaagccagg

SEQ ID NO: 380568 - DNA, 60 bp, Artificial
  Synthetic oligonucleotide
ctatgtgccttgcagtacatgtgaaggtaatcttgcttgtttatcactctgccaaatcgg

SEQ ID NO: 380569 - DNA, 60 bp, Artificial
  Synthetic oligonucleotide
ctatgtggaaattgacatatctagatcataaactaatgcctattttagatcaaaacttca

SEQ ID NO: 380570 - DNA, 55 bp, Artificial
  Synthetic oligonucleotide
ctatgtggaggactttcagatgcggtcgtttatgtattgccaatcagttttccga

SEQ ID NO: 380571 - DNA, 55 bp, Artificial
  Synthetic oligonucleotide
ctatgtggatgagtggtccatctgtcatccgcgtatttctgaggagactgtttat

SEQ ID NO: 380572 - DNA, 60 bp, Artificial
  Synthetic oligonucleotide
ctatgtggattaacgctggatcagaaattcaagtagctggattcgattattcatgtgctt

SEQ ID NO: 380573 - DNA, 58 bp, Artificial
  Synthetic oligonucleotide
ctatgtggcacttaagaagaccgtgtaagaacgcgttgctagaagaacaatctattac

SEQ ID NO: 380574 - DNA, 59 bp, Artificial
  Synthetic oligonucleotide
ctatgtgtacaccttacactactacgatccccaaatcagtctggacgaagcgcccatcc

SEQ ID NO: 380575 - DNA, 60 bp, Artificial
  Synthetic oligonucleotide
ctatgtgtagacactataaacgtgctgaaatgcaccaaatgtctatgtcacagtggataa

SEQ ID NO: 380576 - DNA, 59 bp, Artificial
  Synthetic oligonucleotide
ctatgtgtagtccactttgcacgggtgtgggttacatatgcggtgtgtcggttgtggga

SEQ ID NO: 380577 - DNA, 60 bp, Artificial
  Synthetic oligonucleotide
ctatgtgtctagactatcagatcagttgctggtatctaagaataatatagtatctagagg

SEQ ID NO: 380578 - DNA, 60 bp, Artificial
  Synthetic oligonucleotide
ctatgtgtgacacaagagacaaagcctcacaattcacatccagtgccacacagagatcta

SEQ ID NO: 380579 - DNA, 51 bp, Artificial
  Synthetic oligonucleotide
ctatgtgtgagacaagagacaaggcttcacagttaacatccaacgctacac

SEQ ID NO: 380580 - DNA, 60 bp, Artificial
  Synthetic oligonucleotide
ctatgtgtggatatctaaccgcatattgtgcgaatggattaaacgtggcaagatcatgcc

SEQ ID NO: 380581 - DNA, 55 bp, Artificial
  Synthetic oligonucleotide
ctatgtgttaacagcagcaaagcactatgcagctcagttgttccctcttgacatc

SEQ ID NO: 380582 - DNA, 60 bp, Artificial
  Synthetic oligonucleotide
ctatgttacatatgggccagacattctaagcgcgctcaacatgaaagctgcaatgggtgc

SEQ ID NO: 380583 - DNA, 60 bp, Artificial
  Synthetic oligonucleotide
ctatgttacatctgatcggaaatgtccaggttgcctgtaacgactcgttatccgtcattc

SEQ ID NO: 380584 - DNA, 60 bp, Artificial
  Synthetic oligonucleotide
ctatgttactcacgcaaaacaagggagagcgaatgttcattcttgctgcccaattttaga

SEQ ID NO: 380585 - DNA, 58 bp, Artificial
  Synthetic oligonucleotide
ctatgttactgtgactatgaaccataacatgactttagtgggtcccttaaacctgcca

SEQ ID NO: 380586 - DNA, 60 bp, Artificial
  Synthetic oligonucleotide
ctatgttagatgatgtgacttctgcatgctgggcctatatggatacacacatgagaaatt

SEQ ID NO: 380587 - DNA, 55 bp, Artificial
  Synthetic oligonucleotide
ctatgttcaacgcgaagttacgactagcccatggagaaatcgcaacgcgcagagc

SEQ ID NO: 380588 - DNA, 55 bp, Artificial
  Synthetic oligonucleotide
ctatgttccataccctcgttctaccgaggtctatgtccggtccatcttcggtccc

SEQ ID NO: 380589 - DNA, 51 bp, Artificial
  Synthetic oligonucleotide
ctatgttctcacggtacctggttaggtatttacccgacggggtaaacagtg

SEQ ID NO: 380590 - DNA, 58 bp, Artificial
  Synthetic oligonucleotide
ctatgttctgaagggcccatctaacattgctgctagttatcagggtaatgagaactcg

SEQ ID NO: 380591 - DNA, 58 bp, Artificial
  Synthetic oligonucleotide
ctatgttgacctataaatactcattcggttacaggataaacgattgttactgtcatgg

SEQ ID NO: 380592 - DNA, 55 bp, Artificial
  Synthetic oligonucleotide
ctatgttgagcgcaacaaggagctagtcagctgtccgcaacctgaacccggcagc

SEQ ID NO: 380593 - DNA, 60 bp, Artificial
  Synthetic oligonucleotide
ctatgttgcaggaatggcagagttaggagcgttcttttctatcctgcaggatatgaggaa

SEQ ID NO: 380594 - DNA, 56 bp, Artificial
  Synthetic oligonucleotide
ctatgttgccgtcattcagaagatttactcagatgataggaatctagataggaatg

SEQ ID NO: 380595 - DNA, 59 bp, Artificial
  Synthetic oligonucleotide
ctatgttggatgcggtgatttacgcactttgatgcagtttaagaaacgttcgcctgggc

SEQ ID NO: 380596 - DNA, 60 bp, Artificial
  Synthetic oligonucleotide
ctatgttggttatgaatcaattcaagtacagctagctggaggtgttttagttagggcaca

SEQ ID NO: 380597 - DNA, 55 bp, Artificial
  Synthetic oligonucleotide
ctatgtttacccgcagcggtacacaaataggtgctagggttcacttttatcatga

SEQ ID NO: 380598 - DNA, 57 bp, Artificial
  Synthetic oligonucleotide
ctatgtttagcaccctcataaaaagtctactgcagattaagaaccgtgagggtatgt

SEQ ID NO: 380599 - DNA, 53 bp, Artificial
  Synthetic oligonucleotide
ctatgtttatgtatgttactacccatatgttgggtgtgacattgtgtgcgctt

SEQ ID NO: 380600 - DNA, 60 bp, Artificial
  Synthetic oligonucleotide
ctatgtttcacgaattactgccgtttgtaaacgctgacacagttgagccaattaatgctg

SEQ ID NO: 380601 - DNA, 52 bp, Artificial
  Synthetic oligonucleotide
ctattaaaacctggtgaatattatcttacccccccacattgccccttagttg

SEQ ID NO: 380602 - DNA, 60 bp, Artificial
  Synthetic oligonucleotide
ctattaaacaatcaacctgtagctttggtaggagcattaccatttgtaacagattcatca

SEQ ID NO: 380603 - DNA, 55 bp, Artificial
  Synthetic oligonucleotide
ctattaaagtatgtccattgaatgcccaaacactaggaataggatgtcagactac

SEQ ID NO: 380604 - DNA, 57 bp, Artificial
  Synthetic oligonucleotide
ctattaacaagagatggtggtaaccatggtggtaaccatactaatgatactgagatc

SEQ ID NO: 380605 - DNA, 55 bp, Artificial
  Synthetic oligonucleotide
ctattaaccagagatggtggtaacagtagtaacaacgagaccttcagacctggag

SEQ ID NO: 380606 - DNA, 55 bp, Artificial
  Synthetic oligonucleotide
ctattaaccatgaagaccatcattgctctgagctacatcctctgtctagctttcg

SEQ ID NO: 380607 - DNA, 59 bp, Artificial
  Synthetic oligonucleotide
ctattaacccagtgcttgtattagtatggctattagcatggcttgctattaagttaaag

SEQ ID NO: 380608 - DNA, 60 bp, Artificial
  Synthetic oligonucleotide
ctattaacgcaccagccaacacgcagcagtttgagcatatagtgcagctccgtagagtgc

SEQ ID NO: 380609 - DNA, 55 bp, Artificial
  Synthetic oligonucleotide
ctattaacgggctcgttcacaagcctccttgctatggtaaggtttatgtgaacac

SEQ ID NO: 380610 - DNA, 55 bp, Artificial
  Synthetic oligonucleotide
ctattaagggagattcgcaagttctacagttgggtacttgaacaagcaccgtata

SEQ ID NO: 380611 - DNA, 58 bp, Artificial
  Synthetic oligonucleotide
ctattaagtaaggcggccagacgttacggcaatcttggaattgtgcgaaagagatata

SEQ ID NO: 380612 - DNA, 58 bp, Artificial
  Synthetic oligonucleotide
ctattaatactgacaagaaactcacagttgattttgacacaactcaagatcttccagc

SEQ ID NO: 380613 - DNA, 60 bp, Artificial
  Synthetic oligonucleotide
ctattaatcatagggtcacttccaatacagcccctggtagggcacaatggatctcagagc

SEQ ID NO: 380614 - DNA, 55 bp, Artificial
  Synthetic oligonucleotide
ctattaatgttttcaccatcaaggatacttctaatatgactggagatacagtgga

SEQ ID NO: 380615 - DNA, 58 bp, Artificial
  Synthetic oligonucleotide
ctattaattgctgcgaggattgtgggcaagggactgacgagggggtgggaagccctca

SEQ ID NO: 380616 - DNA, 54 bp, Artificial
  Synthetic oligonucleotide
ctattaatttgaaaaacgtttacgatatcgtaatttcagacatggaccaaagta

SEQ ID NO: 380617 - DNA, 58 bp, Artificial
  Synthetic oligonucleotide
ctattaccagaagaaggcctatcgggtgaaagattgcgttatgcagtcggtcaaccga

SEQ ID NO: 380618 - DNA, 60 bp, Artificial
  Synthetic oligonucleotide
ctattacccgaactagtcgcaggcgtgcacagagatgtagatccagttgtgttagatgta

SEQ ID NO: 380619 - DNA, 60 bp, Artificial
  Synthetic oligonucleotide
ctattacctctccaggacggcaccaatacccacatcatggcgactgaggcgtctaactac

SEQ ID NO: 380620 - DNA, 56 bp, Artificial
  Synthetic oligonucleotide
ctattacgacgtttcggtgtgccaatccaagtggtttcgaagtatgaaaggagctc

SEQ ID NO: 380621 - DNA, 55 bp, Artificial
  Synthetic oligonucleotide
ctattacgttgaaacctagaatcgacctccaagatgtgtatacaattgatcccgc

SEQ ID NO: 380622 - DNA, 55 bp, Artificial
  Synthetic oligonucleotide
ctattactgatggtagtgataaattatcccctgtgcttgaggctaaaccccttgc

SEQ ID NO: 380623 - DNA, 57 bp, Artificial
  Synthetic oligonucleotide
ctattactggaccttgctagaacccggagacacaataatatttgaggcaactggtaa

SEQ ID NO: 380624 - DNA, 57 bp, Artificial
  Synthetic oligonucleotide
ctattacttaaagatatggctgtagagaataaaaattcaagggatgctggtaaagta

SEQ ID NO: 380625 - DNA, 55 bp, Artificial
  Synthetic oligonucleotide
ctattagaagagcttaaacatgaagctgttacacattttcctaggccgtggctcc

SEQ ID NO: 380626 - DNA, 55 bp, Artificial
  Synthetic oligonucleotide
ctattagacatcagtctaatttacaagctctactgcctcctgtatatggagaacc

SEQ ID NO: 380627 - DNA, 55 bp, Artificial
  Synthetic oligonucleotide
ctattagagtgtggtcagaattgaacattggaactggcacatcagcttacacctc

SEQ ID NO: 380628 - DNA, 56 bp, Artificial
  Synthetic oligonucleotide
ctattagcaaaggtgctaggtggtgacgatttattcgtcatactatcccggtttac

SEQ ID NO: 380629 - DNA, 58 bp, Artificial
  Synthetic oligonucleotide
ctattagcgaagctggcctacatgcgaacaggcttagggtgtgatgttatagtgctcg

SEQ ID NO: 380630 - DNA, 52 bp, Artificial
  Synthetic oligonucleotide
ctattaggaactggacttttgattttggtctattaggtacaacacttttaaa

SEQ ID NO: 380631 - DNA, 55 bp, Artificial
  Synthetic oligonucleotide
ctattaggaccttttcagtacttcaacttttccgagacagatagaggacatccac

SEQ ID NO: 380632 - DNA, 55 bp, Artificial
  Synthetic oligonucleotide
ctattagggtcctcaatggctgcctctcctgaagcaggaatgaatgcagccacac

SEQ ID NO: 380633 - DNA, 55 bp, Artificial
  Synthetic oligonucleotide
ctattaggtacaacacttttaaatttagacgctaattacgttgagaatgctagaa

SEQ ID NO: 380634 - DNA, 57 bp, Artificial
  Synthetic oligonucleotide
ctattagtaagtttacacaattagcagtaacagcaacagcgttaattggtggcgttg

SEQ ID NO: 380635 - DNA, 54 bp, Artificial
  Synthetic oligonucleotide
ctattagtacccgtcaaacgtatatagggtacatttgggactgtggaaggtcaa

SEQ ID NO: 380636 - DNA, 57 bp, Artificial
  Synthetic oligonucleotide
ctattagtagcacccctgtacctggtgtaagtagaattgcaggtccccgcctatata

SEQ ID NO: 380637 - DNA, 57 bp, Artificial
  Synthetic oligonucleotide
ctattatactgtataggtttattttgcataacaacaaagttaccactcatacaatta

SEQ ID NO: 380638 - DNA, 60 bp, Artificial
  Synthetic oligonucleotide
ctattatagaaattgatatgaacacattggagcacacaagtagatacgtgtgcactggaa

SEQ ID NO: 380639 - DNA, 58 bp, Artificial
  Synthetic oligonucleotide
ctattatcacaaattcaactcttcgggctgtcctgagaggttggctagttgccgaccc

SEQ ID NO: 380640 - DNA, 55 bp, Artificial
  Synthetic oligonucleotide
ctattatcagaaaatgctagaatgcccgaacgaaatcataagacggatgcaggtt

SEQ ID NO: 380641 - DNA, 60 bp, Artificial
  Synthetic oligonucleotide
ctattatcagatacaaagttgtacggagcaatgaaatacagtggtcgtatttatacatat

SEQ ID NO: 380642 - DNA, 60 bp, Artificial
  Synthetic oligonucleotide
ctattatcatcgaccacgttggaaatgtagataggcatggacttccaaacgctgaccgtg

SEQ ID NO: 380643 - DNA, 58 bp, Artificial
  Synthetic oligonucleotide
ctattatcgcaagaaattttgatacaattcggttgtcatttcagttaatgcgtccacc

SEQ ID NO: 380644 - DNA, 60 bp, Artificial
  Synthetic oligonucleotide
ctattatgaacttgattccgctaccgttgttatatattatcgtcatctctccttgctgga

SEQ ID NO: 380645 - DNA, 52 bp, Artificial
  Synthetic oligonucleotide
ctattatgagttcgaagcctcaaacgatgcgaccgttggttctgatggctca

SEQ ID NO: 380646 - DNA, 55 bp, Artificial
  Synthetic oligonucleotide
ctattatggttactgccgtcatttactccagcaatgtcattaattcttggaggat

SEQ ID NO: 380647 - DNA, 59 bp, Artificial
  Synthetic oligonucleotide
ctattattcggaaattcataaagattacgacaaagatcaagatgtcgggcatttctgtc

SEQ ID NO: 380648 - DNA, 51 bp, Artificial
  Synthetic oligonucleotide
ctattattgtagacgacaataaggataccgggggtctaacgaacgctgtga

SEQ ID NO: 380649 - DNA, 55 bp, Artificial
  Synthetic oligonucleotide
ctattattgtgctagaaggcgaggaataacaagggtagggatggctgtggtgccg

SEQ ID NO: 380650 - DNA, 54 bp, Artificial
  Synthetic oligonucleotide
ctattcaaaaagactctgaggctttgaattattcgtttagttaaaacaagtcca

SEQ ID NO: 380651 - DNA, 55 bp, Artificial
  Synthetic oligonucleotide
ctattcaaactagaagtggtgtgacagtgggaggacgtgtgcattttcggtactc

SEQ ID NO: 380652 - DNA, 60 bp, Artificial
  Synthetic oligonucleotide
ctattcaactggtgcacttgccagctgcatgggtctcatttacaacaggatggggacagt

SEQ ID NO: 380653 - DNA, 54 bp, Artificial
  Synthetic oligonucleotide
ctattcaagagtacggcgcgtcaattaatcacccgggtggaacatcgtacggat

SEQ ID NO: 380654 - DNA, 55 bp, Artificial
  Synthetic oligonucleotide
ctattcaagcaactacaacaggtagagagccacctgacttatgtccaagatgtaa

SEQ ID NO: 380655 - DNA, 55 bp, Artificial
  Synthetic oligonucleotide
ctattcaccctgtccattttaccgacgtaagatggtacccctggaagatatctac

SEQ ID NO: 380656 - DNA, 55 bp, Artificial
  Synthetic oligonucleotide
ctattcactattttatgtggaggatgtggtaaacctagggaatgagaacaacaca

SEQ ID NO: 380657 - DNA, 60 bp, Artificial
  Synthetic oligonucleotide
ctattcagtataactcatgctcctccgacgcaactccaggtgcaatcgcacttgaagtgg

SEQ ID NO: 380658 - DNA, 56 bp, Artificial
  Synthetic oligonucleotide
ctattcatgtacggacaatacgatttactaagaggtattggattcgtattaaccgc

SEQ ID NO: 380659 - DNA, 59 bp, Artificial
  Synthetic oligonucleotide
ctattcatttacgtcaagtcgattctacgatttataaaaccatgcatggacattcattt

SEQ ID NO: 380660 - DNA, 60 bp, Artificial
  Synthetic oligonucleotide
ctattcatttgaccttaaacgatggatatatttacactcaacaggcaaagctagcattga

SEQ ID NO: 380661 - DNA, 56 bp, Artificial
  Synthetic oligonucleotide
ctattccaacaggtatataattccagttttacttactatcatattacatacccaag

SEQ ID NO: 380662 - DNA, 55 bp, Artificial
  Synthetic oligonucleotide
ctattccatcaccattctagcctgtacacggaaagtcaagatggacgaatcgctc

SEQ ID NO: 380663 - DNA, 60 bp, Artificial
  Synthetic oligonucleotide
ctattccatgtccttggaatctgtgatcaaatgatgctttcaactgatcgctttacgcgt

SEQ ID NO: 380664 - DNA, 52 bp, Artificial
  Synthetic oligonucleotide
ctattcccaactcaaattcaagtgcgtaacataatgagtcctgtaatgggag

SEQ ID NO: 380665 - DNA, 55 bp, Artificial
  Synthetic oligonucleotide
ctattcccgccgtacctatacgtcatttgatgaagcgttcaataaatttatgacg

SEQ ID NO: 380666 - DNA, 58 bp, Artificial
  Synthetic oligonucleotide
ctattccgacgcctgaaactcacttacctagtgctcgaaacgtgcctggaaatgtata

SEQ ID NO: 380667 - DNA, 55 bp, Artificial
  Synthetic oligonucleotide
ctattccgcgtcgagccagtgacccgcatgcggcgtgatgtccaacagtactgtg

SEQ ID NO: 380668 - DNA, 60 bp, Artificial
  Synthetic oligonucleotide
ctattcctatggcattgttgagagctgttgggatagcacttaggagggaaaactgctctg

SEQ ID NO: 380669 - DNA, 55 bp, Artificial
  Synthetic oligonucleotide
ctattcctgaattgggctttacctttgaattgtatgagcgcgtggagatgcagag

SEQ ID NO: 380670 - DNA, 58 bp, Artificial
  Synthetic oligonucleotide
ctattcgaccggagttggttccgacaaaatggtggcacgttactcatagatgcccagc

SEQ ID NO: 380671 - DNA, 56 bp, Artificial
  Synthetic oligonucleotide
ctattcgataatacttcccgtacttacgatatctctgatcgtacgtatcctaagtt

SEQ ID NO: 380672 - DNA, 59 bp, Artificial
  Synthetic oligonucleotide
ctattcgccattaatggacacgcgtcagccattaagggactcattgtaatccgacttta

SEQ ID NO: 380673 - DNA, 55 bp, Artificial
  Synthetic oligonucleotide
ctattcgcgcagaagggtaacaaagactccgccctgatggtagacaaatcctgag

SEQ ID NO: 380674 - DNA, 56 bp, Artificial
  Synthetic oligonucleotide
ctattcgctcggctatgactggtggattgtcaggacgcatggactcgctagagaat

SEQ ID NO: 380675 - DNA, 55 bp, Artificial
  Synthetic oligonucleotide
ctattcggatggctacaaactgaactttgcttcggtggttgcccctgacgcgcct

SEQ ID NO: 380676 - DNA, 58 bp, Artificial
  Synthetic oligonucleotide
ctattcgtcgtcttcgaataactcgttttttagctatcctgtgctgtgcttttataga

SEQ ID NO: 380677 - DNA, 59 bp, Artificial
  Synthetic oligonucleotide
ctattcgttccctggctggaggctgaaccaacactttcaacgtttgaccatgctcattc

SEQ ID NO: 380678 - DNA, 59 bp, Artificial
  Synthetic oligonucleotide
ctattctaccacgttgtcatgctcaaaattatggggttaatgttccaatcacaggatcg

SEQ ID NO: 380679 - DNA, 56 bp, Artificial
  Synthetic oligonucleotide
ctattctacgactccgcccttaaagctcgggtcatgaagggccgatataactggga

SEQ ID NO: 380680 - DNA, 57 bp, Artificial
  Synthetic oligonucleotide
ctattctcgccttttgttggcgttaatagtcctattgatcgtaatcttttgaggaga

SEQ ID NO: 380681 - DNA, 60 bp, Artificial
  Synthetic oligonucleotide
ctattctgcaactgtggtgatcctctaaggcatctccaaggatggcgtactactggagac

SEQ ID NO: 380682 - DNA, 60 bp, Artificial
  Synthetic oligonucleotide
ctattctgcttgggccttcaataacaatggatatgggtctatctggccgcgcagcggaat

SEQ ID NO: 380683 - DNA, 57 bp, Artificial
  Synthetic oligonucleotide
ctattctgggaaccaacaatttcgtcgcattgggccttagatccgctctgagcgggg

SEQ ID NO: 380684 - DNA, 58 bp, Artificial
  Synthetic oligonucleotide
ctattctgggtcaggctggacttggtaattgggcatctgccaaccccactgtacgggc

SEQ ID NO: 380685 - DNA, 58 bp, Artificial
  Synthetic oligonucleotide
ctattctgtggacttatccaacgatcctttctaactttggactggtcacgctttgata

SEQ ID NO: 380686 - DNA, 55 bp, Artificial
  Synthetic oligonucleotide
ctattcttgcatggtctgtgttgaccgctccagcctatcctcatggcatgtcctg

SEQ ID NO: 380687 - DNA, 52 bp, Artificial
  Synthetic oligonucleotide
ctattctttacccccagacccctctcacttcgatgggtataaacaacaaggg

SEQ ID NO: 380688 - DNA, 60 bp, Artificial
  Synthetic oligonucleotide
ctattgaaagatggcgccccattgaggacatggccacaaccatgtgctcctttgggtagt

SEQ ID NO: 380689 - DNA, 58 bp, Artificial
  Synthetic oligonucleotide
ctattgaacactattgccggaacaaagacggtaccctagactgcgagacctatgaggc

SEQ ID NO: 380690 - DNA, 55 bp, Artificial
  Synthetic oligonucleotide
ctattgaacaggtgtttaagaactatggaaaccatagctaggaatccatttaggc

SEQ ID NO: 380691 - DNA, 57 bp, Artificial
  Synthetic oligonucleotide
ctattgaagacgtgcaatatctcaaaaggaaatttcgatatgattctaaacggaaag

SEQ ID NO: 380692 - DNA, 59 bp, Artificial
  Synthetic oligonucleotide
ctattgaatggcatagctgataaaatagggaagatgagagctgcataccgaaggcggac

SEQ ID NO: 380693 - DNA, 55 bp, Artificial
  Synthetic oligonucleotide
ctattgacacagaaccctccattgaattgcaactgttaggggaacattctgggga

SEQ ID NO: 380694 - DNA, 59 bp, Artificial
  Synthetic oligonucleotide
ctattgacactgaggggagcggaagatccccaatggttatggcaggcttcttccactcg

SEQ ID NO: 380695 - DNA, 60 bp, Artificial
  Synthetic oligonucleotide
ctattgacagtttgttggaaagtgtgtaacagagctccagaattttgcatgaacaaaaca

SEQ ID NO: 380696 - DNA, 60 bp, Artificial
  Synthetic oligonucleotide
ctattgaccagtgtggcattccagcttcacaagtgggaaggtcagttcaatcagttggta

SEQ ID NO: 380697 - DNA, 55 bp, Artificial
  Synthetic oligonucleotide
ctattgaccatacaatggatccaagtgataagctcagtggtttattcgttctggc

SEQ ID NO: 380698 - DNA, 55 bp, Artificial
  Synthetic oligonucleotide
ctattgacctggaagaaccaagtggacaaaccgctgactggaaggctattggagc

SEQ ID NO: 380699 - DNA, 60 bp, Artificial
  Synthetic oligonucleotide
ctattgagctcaatgtcatcatttgaaaggtttgagatattccccaagacaagtttatgg

SEQ ID NO: 380700 - DNA, 60 bp, Artificial
  Synthetic oligonucleotide
ctattgagtcttagaaactataaaatgcaagatactatcgactcaccttgtctcttggga

SEQ ID NO: 380701 - DNA, 60 bp, Artificial
  Synthetic oligonucleotide
ctattgatacctgtatttctgaatgcatcactccaaatggaagcattcccaatgacaaac

SEQ ID NO: 380702 - DNA, 52 bp, Artificial
  Synthetic oligonucleotide
ctattgatagttgttggaactttagggaaaaagtttaaacagtatagagagt

SEQ ID NO: 380703 - DNA, 60 bp, Artificial
  Synthetic oligonucleotide
ctattgatcaggcgttgaatggaaagtttggatcagctattagaaatagaaattggatga

SEQ ID NO: 380704 - DNA, 55 bp, Artificial
  Synthetic oligonucleotide
ctattgatgcttgtcctctggattacacaattttgtgtcgaatgtactggggtcc

SEQ ID NO: 380705 - DNA, 54 bp, Artificial
  Synthetic oligonucleotide
ctattgatgttgagaattatgccatgaacagtaatcacacggtatcttatgccc

SEQ ID NO: 380706 - DNA, 58 bp, Artificial
  Synthetic oligonucleotide
ctattgattggaaatctcgttatgatcagttagaaaaaagattcgagtcactaaaaca

SEQ ID NO: 380707 - DNA, 55 bp, Artificial
  Synthetic oligonucleotide
ctattgcaacacatcaagcctgtttaataatacataccggcctacatactggcct

SEQ ID NO: 380708 - DNA, 55 bp, Artificial
  Synthetic oligonucleotide
ctattgcacgggagccccggagcgggaaagtcagtggccactaatctaattgggc

SEQ ID NO: 380709 - DNA, 60 bp, Artificial
  Synthetic oligonucleotide
ctattgcagcaggccaaatgagagaaccaaggggaagtgacatagcaggaactactagta

SEQ ID NO: 380710 - DNA, 60 bp, Artificial
  Synthetic oligonucleotide
ctattgcatgccagattcactggggcaatctatccaagatagggattgttggaacaggga

SEQ ID NO: 380711 - DNA, 60 bp, Artificial
  Synthetic oligonucleotide
ctattgcatggcatccggcacaaccgagcaggacactacatgtacgtgcgtaacggagca

SEQ ID NO: 380712 - DNA, 58 bp, Artificial
  Synthetic oligonucleotide
ctattgccaaccaagccacagtgttaatgggccttgggaaaggatggccactgtcaaa

SEQ ID NO: 380713 - DNA, 55 bp, Artificial
  Synthetic oligonucleotide
ctattgcgatacatcaggactgtttaatagcagttggagttggaatgagactaac

SEQ ID NO: 380714 - DNA, 52 bp, Artificial
  Synthetic oligonucleotide
ctattgcgcacttggggtcgataatggaattcatgataacgtgcactcaacg

SEQ ID NO: 380715 - DNA, 60 bp, Artificial
  Synthetic oligonucleotide
ctattgctagcgtgacattggttgacctggattcctctaggttttacatcacgatgactc

SEQ ID NO: 380716 - DNA, 52 bp, Artificial
  Synthetic oligonucleotide
ctattgctaggcaaggtaggttcagtattggtgatcaaagtaatgcctataa

SEQ ID NO: 380717 - DNA, 60 bp, Artificial
  Synthetic oligonucleotide
ctattgctccaggcaattttcagattaatgtaccaccatggtattcagacctgaatgtag

SEQ ID NO: 380718 - DNA, 60 bp, Artificial
  Synthetic oligonucleotide
ctattggaaccgcaaaaatgcgccctgaatggaatcgttggacacagttgtggaatgcta

SEQ ID NO: 380719 - DNA, 60 bp, Artificial
  Synthetic oligonucleotide
ctattggacagatacaggtaaatggcagataatggagatagaaggaagtaatcaaaaagc

SEQ ID NO: 380720 - DNA, 59 bp, Artificial
  Synthetic oligonucleotide
ctattggatcgtgacgacgaccatgttgtcgctagatttaccagggtatttatagagga

SEQ ID NO: 380721 - DNA, 60 bp, Artificial
  Synthetic oligonucleotide
ctattggcagcataaatgggttcgagatagagtctcacaaatgctattgtagtctgtttt

SEQ ID NO: 380722 - DNA, 60 bp, Artificial
  Synthetic oligonucleotide
ctattggctgttttggcttcaaacgtgagcgcttcgaagctgctaaccacacaatttgag

SEQ ID NO: 380723 - DNA, 57 bp, Artificial
  Synthetic oligonucleotide
ctattggggaacactggggtattggcactacatgcaaaaacacacctgtacctccag

SEQ ID NO: 380724 - DNA, 54 bp, Artificial
  Synthetic oligonucleotide
ctattggggtctacgtctttatgtctctggacaggacccagggcttactttcgg

SEQ ID NO: 380725 - DNA, 55 bp, Artificial
  Synthetic oligonucleotide
ctattgggttaggtcaaggccttgtcattggttcagtggaattgccacctgttcc

SEQ ID NO: 380726 - DNA, 55 bp, Artificial
  Synthetic oligonucleotide
ctattgggttgggtcaaggccttgttgtaggatcagtggaactgccacctgtccc

SEQ ID NO: 380727 - DNA, 58 bp, Artificial
  Synthetic oligonucleotide
ctattgtaatgatttgggctgagaagccctacaattactattaatacactcttggacc

SEQ ID NO: 380728 - DNA, 54 bp, Artificial
  Synthetic oligonucleotide
ctattgtaatgggcaaaaaaaggtgattttaaccaagacacttgtaataggaca

SEQ ID NO: 380729 - DNA, 58 bp, Artificial
  Synthetic oligonucleotide
ctattgtacccgagaggtgtgttcccggcgggagataataggaatgtaatgagatcca

SEQ ID NO: 380730 - DNA, 58 bp, Artificial
  Synthetic oligonucleotide
ctattgtagctagaaattttgatactattcgcttatcatttcaattagtacgtccacc

SEQ ID NO: 380731 - DNA, 60 bp, Artificial
  Synthetic oligonucleotide
ctattgtatatggcatgtacccatgcgtcaaaccctgtgtatgctagtcttaaaatacga

SEQ ID NO: 380732 - DNA, 57 bp, Artificial
  Synthetic oligonucleotide
ctattgtatctttggtagaggaatcagctattattaattctggagtacctgaccctt

SEQ ID NO: 380733 - DNA, 58 bp, Artificial
  Synthetic oligonucleotide
ctattgtcgcaagaaattttgatacaattcgtttatcattccaattgatgcgtccacc

SEQ ID NO: 380734 - DNA, 54 bp, Artificial
  Synthetic oligonucleotide
ctattgtcgtcccttcttatctaaatcatctagacgaagctgtcttaactaaat

SEQ ID NO: 380735 - DNA, 57 bp, Artificial
  Synthetic oligonucleotide
ctattgtctgcaatacccatcacggtaatcggactctattttgtctacctaaagatt

SEQ ID NO: 380736 - DNA, 55 bp, Artificial
  Synthetic oligonucleotide
ctattgtggaaaggggaaggagcagtcatcttaaaggtagggacagacattaagg

SEQ ID NO: 380737 - DNA, 55 bp, Artificial
  Synthetic oligonucleotide
ctattgtgtacatgaaaagatagaggtacgagacaccaaggaagccttagacagg

SEQ ID NO: 380738 - DNA, 60 bp, Artificial
  Synthetic oligonucleotide
ctattgtgtgttgcataatgccccctaagagacagaacactgagacgcgcaaagctagac

SEQ ID NO: 380739 - DNA, 58 bp, Artificial
  Synthetic oligonucleotide
ctattgtgtgttggggtgagttgatgaatctagccacctgggtgggaagtaatttgga

SEQ ID NO: 380740 - DNA, 57 bp, Artificial
  Synthetic oligonucleotide
ctattgttaatacctctctatcgacttatgtttttaagtttgactatagagttctca

SEQ ID NO: 380741 - DNA, 59 bp, Artificial
  Synthetic oligonucleotide
ctattgttacattaatagaggactccagtgtggttacatcaggtgcacctaggcctacg

SEQ ID NO: 380742 - DNA, 59 bp, Artificial
  Synthetic oligonucleotide
ctattgttacgttcaagcaactttcgttagagagcgagctggcacgcgtggagggaatc

SEQ ID NO: 380743 - DNA, 55 bp, Artificial
  Synthetic oligonucleotide
ctattgttctccaatctatctcttcgaacctcaatggtgccatccctctctctgg

SEQ ID NO: 380744 - DNA, 55 bp, Artificial
  Synthetic oligonucleotide
ctattgttgataagttggattgggatttcactaacttcgtacgtgattggatggc

SEQ ID NO: 380745 - DNA, 58 bp, Artificial
  Synthetic oligonucleotide
ctattgtttacccatttcagaattgggtgtcagcatagcagaataggcattactcgac

SEQ ID NO: 380746 - DNA, 60 bp, Artificial
  Synthetic oligonucleotide
ctattgtttgatgaatgcttcttgacgcatgcgggttgcgtgtatgcagcagccactctg

SEQ ID NO: 380747 - DNA, 54 bp, Artificial
  Synthetic oligonucleotide
ctatttaaaatggaaattagtactagttatacgtatatgctatcggataatatg

SEQ ID NO: 380748 - DNA, 56 bp, Artificial
  Synthetic oligonucleotide
ctatttaaacctgatggtgttgtgatttccgaaatcactcgtcgggggagaatgga

SEQ ID NO: 380749 - DNA, 53 bp, Artificial
  Synthetic oligonucleotide
ctatttaactcgggttaatatatagggtaaatgagacaccaatgggtaaattg

SEQ ID NO: 380750 - DNA, 52 bp, Artificial
  Synthetic oligonucleotide
ctatttaatacggactttactaaattctctagcgaaaccggaacatggggtc

SEQ ID NO: 380751 - DNA, 60 bp, Artificial
  Synthetic oligonucleotide
ctatttaccgtatgatgatcttgacgtggactatacttcattgcgtgtgtgtggtgatga

SEQ ID NO: 380752 - DNA, 54 bp, Artificial
  Synthetic oligonucleotide
ctatttagaggcaacatactagtccctgagtctaaaaggtgggccagagtctca

SEQ ID NO: 380753 - DNA, 50 bp, Artificial
  Synthetic oligonucleotide
ctatttagaggcgcagacgtggggccaatcgggacagcagtcagggcgga

SEQ ID NO: 380754 - DNA, 52 bp, Artificial
  Synthetic oligonucleotide
ctatttagagtgtgtgtatgaacggttttcctaaatcgtcgtgagacggacc

SEQ ID NO: 380755 - DNA, 58 bp, Artificial
  Synthetic oligonucleotide
ctatttaggctttatagcacaccttatggaaaatcgaataaccaatgaagtatccata

SEQ ID NO: 380756 - DNA, 60 bp, Artificial
  Synthetic oligonucleotide
ctatttatatcagttgttgtgcagggttttggtgtatacaacgctgatcagaatggaatt

SEQ ID NO: 380757 - DNA, 59 bp, Artificial
  Synthetic oligonucleotide
ctatttatggatccatctgctggaattgaagggtttaagccatactgtatgaaaagttc

SEQ ID NO: 380758 - DNA, 60 bp, Artificial
  Synthetic oligonucleotide
ctatttcaaagaatttcaacgaaattgctctccctgacccatctcctagtgatgactatg

SEQ ID NO: 380759 - DNA, 58 bp, Artificial
  Synthetic oligonucleotide
ctatttcagatgcggaagagccagacagtactaccggttctgtggatgacaagccctc

SEQ ID NO: 380760 - DNA, 55 bp, Artificial
  Synthetic oligonucleotide
ctatttcatatgtccgtgattcgtcgtcgtgatatttttccttggcttaacaaga

SEQ ID NO: 380761 - DNA, 55 bp, Artificial
  Synthetic oligonucleotide
ctatttcattacgtatgtatttatagcgtgaaccagtctgcaggacacagggttg

SEQ ID NO: 380762 - DNA, 55 bp, Artificial
  Synthetic oligonucleotide
ctatttctatacaacgtgacagcaatttgagcccttcaaccaacaccatcctggg

SEQ ID NO: 380763 - DNA, 60 bp, Artificial
  Synthetic oligonucleotide
ctatttctcgtccattcatctgatgaagcctcttgtgtcgaataatttggagttgtactt

SEQ ID NO: 380764 - DNA, 60 bp, Artificial
  Synthetic oligonucleotide
ctatttctgttaaaattggcaggcagatggcctattacacatctacacacagataatggt

SEQ ID NO: 380765 - DNA, 55 bp, Artificial
  Synthetic oligonucleotide
ctatttgagttccagagctccaaactttctaaggttggatgatcaagtatcgctg

SEQ ID NO: 380766 - DNA, 55 bp, Artificial
  Synthetic oligonucleotide
ctatttgcagcgtgcataagggtgctcatgtcgcatcatccgatgctatcatgac

SEQ ID NO: 380767 - DNA, 60 bp, Artificial
  Synthetic oligonucleotide
ctatttggatgacagctgtcatccactaacggtcagagtaattatttataagtgctaaag

SEQ ID NO: 380768 - DNA, 55 bp, Artificial
  Synthetic oligonucleotide
ctatttggcccgtggttccgcgctattgagaaggagattctggcagcactcgcac

SEQ ID NO: 380769 - DNA, 56 bp, Artificial
  Synthetic oligonucleotide
ctatttggggatacgaggtcgaagaatcgttgatttcggcatgtatattttccctc

SEQ ID NO: 380770 - DNA, 55 bp, Artificial
  Synthetic oligonucleotide
ctatttggtgcgattatccacagccatggaaccctgtctatagttcccgcgttga

SEQ ID NO: 380771 - DNA, 59 bp, Artificial
  Synthetic oligonucleotide
ctatttggttttatcaagtactacagactgtggcataccagcttacgtgcctgtggtta

SEQ ID NO: 380772 - DNA, 55 bp, Artificial
  Synthetic oligonucleotide
ctatttgtcttcatcgggttcgatcgtaaaacgcgaacccataacccatacaagc

SEQ ID NO: 380773 - DNA, 60 bp, Artificial
  Synthetic oligonucleotide
ctatttgttccagtttcgcgtgaggctttgcctcgtctgttgctgtaactcatagtgaga

SEQ ID NO: 380774 - DNA, 60 bp, Artificial
  Synthetic oligonucleotide
ctattttactacatgagagtggggaatatatagagagtgaaccattattcatgaaaccag

SEQ ID NO: 380775 - DNA, 57 bp, Artificial
  Synthetic oligonucleotide
ctattttagaatacgcacgaattagacatagctatcaactccttgatacaacattag

SEQ ID NO: 380776 - DNA, 52 bp, Artificial
  Synthetic oligonucleotide
ctattttctcagatgtttcggtaggtaaacgtgccggccgatatttatcccc

SEQ ID NO: 380777 - DNA, 54 bp, Artificial
  Synthetic oligonucleotide
ctattttgagaaggttgacagattaaaacatggaacctttggtcctgtccactt

SEQ ID NO: 380778 - DNA, 55 bp, Artificial
  Synthetic oligonucleotide
ctattttggaatgggacagatccaaagagccgtcacataggcttgaagccatctg

SEQ ID NO: 380779 - DNA, 54 bp, Artificial
  Synthetic oligonucleotide
ctattttggatctgcaagaatggggggtttttgggttccaccttggctacgtca

SEQ ID NO: 380780 - DNA, 60 bp, Artificial
  Synthetic oligonucleotide
ctattttgggcacacatttgcggagattgcatacacgttgtgtcaagcttcagctaacag

SEQ ID NO: 380781 - DNA, 56 bp, Artificial
  Synthetic oligonucleotide
ctattttgtctccacacaagagtttaggtatatgaattcacagggacttttacctc

SEQ ID NO: 380782 - DNA, 53 bp, Artificial
  Synthetic oligonucleotide
ctcaaaaacgtgtccctcctaatcgcgggcgatgactgtctgatcatatgtga

SEQ ID NO: 380783 - DNA, 57 bp, Artificial
  Synthetic oligonucleotide
ctcaaaaatataataggcgggttgtacaatatgtatctaaaagaccagcacctgaat

SEQ ID NO: 380784 - DNA, 59 bp, Artificial
  Synthetic oligonucleotide
ctcaaaaatatggccgtcgtgtggtgtcttgacgagaatcgcaaggtggcgaaacgcat

SEQ ID NO: 380785 - DNA, 55 bp, Artificial
  Synthetic oligonucleotide
ctcaaaacaaccagacctatgcccgtgtattctgtccctggtctaatagatcatt

SEQ ID NO: 380786 - DNA, 59 bp, Artificial
  Synthetic oligonucleotide
ctcaaaacaattattatgtccagacgtatcttagaggcaacgtgcgaaagccaattcta

SEQ ID NO: 380787 - DNA, 59 bp, Artificial
  Synthetic oligonucleotide
ctcaaaacgtaactgtaaatccaggtccatttgctcaaacaagatatgctccagtcaat

SEQ ID NO: 380788 - DNA, 54 bp, Artificial
  Synthetic oligonucleotide
ctcaaaacgttaccgttaatccaggaccattcgcgcaaacaaattacgctccag

SEQ ID NO: 380789 - DNA, 55 bp, Artificial
  Synthetic oligonucleotide
ctcaaaactatgggattaatttaccgataacaggatcaatggatggcgcgtatac

SEQ ID NO: 380790 - DNA, 60 bp, Artificial
  Synthetic oligonucleotide
ctcaaaactcagtcccacaactgtcaagcacctctggattttaaggatgaactcatccac

SEQ ID NO: 380791 - DNA, 57 bp, Artificial
  Synthetic oligonucleotide
ctcaaaactgcaacaaataccctcgtcgaggcgtgggtactatagattggtctgagc

SEQ ID NO: 380792 - DNA, 57 bp, Artificial
  Synthetic oligonucleotide
ctcaaaagaacaaatgctacttatccggcaacggataagtacggcccagctgctctt

SEQ ID NO: 380793 - DNA, 60 bp, Artificial
  Synthetic oligonucleotide
ctcaaaagatgattatgagataatttttccagatgcgttatcaataggcatacgccgata

SEQ ID NO: 380794 - DNA, 60 bp, Artificial
  Synthetic oligonucleotide
ctcaaaagctttgatatctctcagtgccccaagattggagggcacggtagtaagaagtgc

SEQ ID NO: 380795 - DNA, 53 bp, Artificial
  Synthetic oligonucleotide
ctcaaaagggaaaaagacagttgacctcggtcaatgtggacttttgggaacaa

SEQ ID NO: 380796 - DNA, 58 bp, Artificial
  Synthetic oligonucleotide
ctcaaaagttgagcatgaactgctatttagctttaaacagaggaaattccttaagcca

SEQ ID NO: 380797 - DNA, 58 bp, Artificial
  Synthetic oligonucleotide
ctcaaaatagtacaatgaatacaccagtgtatcctgttcctaaaccagatggaaggtg

SEQ ID NO: 380798 - DNA, 58 bp, Artificial
  Synthetic oligonucleotide
ctcaaaatggcctttcacctgtagtggcatcccatgggccaacaggaagatcagagtt

SEQ ID NO: 380799 - DNA, 58 bp, Artificial
  Synthetic oligonucleotide
ctcaaacaaaatggcgagactaggaaaggggtacatgtttgagagcaagagtatgaaa

SEQ ID NO: 380800 - DNA, 57 bp, Artificial
  Synthetic oligonucleotide
ctcaaacaagagagatggcttggcaaaagattatcacagtttgacattggtcaatac

SEQ ID NO: 380801 - DNA, 60 bp, Artificial
  Synthetic oligonucleotide
ctcaaacaatcagtgttgttctgattgtgcgtgaaatccactgtgattgaaaactccaat

SEQ ID NO: 380802 - DNA, 58 bp, Artificial
  Synthetic oligonucleotide
ctcaaacacaggtggaagaggtaccagccattgttccaccaacaacagctcagggaac

SEQ ID NO: 380803 - DNA, 58 bp, Artificial
  Synthetic oligonucleotide
ctcaaacacgacaatcctggtttgagttgcttctctttggcttgcccgtgggaccaca

SEQ ID NO: 380804 - DNA, 60 bp, Artificial
  Synthetic oligonucleotide
ctcaaacactcgcgccactcaatctcaatttgagaagtggtacgagggagtgaggaatga

SEQ ID NO: 380805 - DNA, 57 bp, Artificial
  Synthetic oligonucleotide
ctcaaacactggtgacaggctaaggatgcccttcaggtaccccgaggtaacacgcga

SEQ ID NO: 380806 - DNA, 53 bp, Artificial
  Synthetic oligonucleotide
ctcaaacaggtaactcctgggcggattgccactaacacccctggcccctcccg

SEQ ID NO: 380807 - DNA, 59 bp, Artificial
  Synthetic oligonucleotide
ctcaaacattacaggactactattaacaagagatgggggtgataatagcctaaatgaga

SEQ ID NO: 380808 - DNA, 57 bp, Artificial
  Synthetic oligonucleotide
ctcaaacccattcactctacaacggttgtgccttggaaattactatgatgtacgacc

SEQ ID NO: 380809 - DNA, 55 bp, Artificial
  Synthetic oligonucleotide
ctcaaaccccatcttgagaaacagcgagctcgtaaaacagacgatgctcgcgact

SEQ ID NO: 380810 - DNA, 55 bp, Artificial
  Synthetic oligonucleotide
ctcaaaccgaggatggtcatactcacatctatgaaatcctggtctaggagattcc

SEQ ID NO: 380811 - DNA, 51 bp, Artificial
  Synthetic oligonucleotide
ctcaaacctaccttcccttaggtgagctttcgaagactaaagaaagtttct

SEQ ID NO: 380812 - DNA, 58 bp, Artificial
  Synthetic oligonucleotide
ctcaaacgacaaccaccccgacgtctgttgatatgaactcgatcacctccactgatgt

SEQ ID NO: 380813 - DNA, 56 bp, Artificial
  Synthetic oligonucleotide
ctcaaacgacattcaacgtctcctggacacagaatatactcacgttaaacgctggt

SEQ ID NO: 380814 - DNA, 58 bp, Artificial
  Synthetic oligonucleotide
ctcaaacgatccgaccaattcgaaaatcttcgccttagtagtggcaatatcgccagac

SEQ ID NO: 380815 - DNA, 60 bp, Artificial
  Synthetic oligonucleotide
ctcaaacgctagaagtgatcctacggacaccagccggtgcagagattgatgatactaaac

SEQ ID NO: 380816 - DNA, 55 bp, Artificial
  Synthetic oligonucleotide
ctcaaacgctagccgagataggccaactcaccgttatgaggtcggtaaatacgtc

SEQ ID NO: 380817 - DNA, 54 bp, Artificial
  Synthetic oligonucleotide
ctcaaacgggacttttagcgttggcgcgttttgacccaccgtgagtacatccgc

SEQ ID NO: 380818 - DNA, 55 bp, Artificial
  Synthetic oligonucleotide
ctcaaacggtggtatgattcccaaacttggaacaggccttagttttgatactaca

SEQ ID NO: 380819 - DNA, 55 bp, Artificial
  Synthetic oligonucleotide
ctcaaacgttaacaagcgatctgacaacggagcaagcgttagcttcaggaggcgt

SEQ ID NO: 380820 - DNA, 59 bp, Artificial
  Synthetic oligonucleotide
ctcaaactgggtaagaaagttacccgtgctggctggaatgggaaaggcatgtatctgca

SEQ ID NO: 380821 - DNA, 55 bp, Artificial
  Synthetic oligonucleotide
ctcaaacttcgacgcctcactatccccagtatggttcaaatgtcttgagcaggtg

SEQ ID NO: 380822 - DNA, 57 bp, Artificial
  Synthetic oligonucleotide
ctcaaagaagaagaacatcttggcgtattcgagtacgggtggggatgctaagacgga

SEQ ID NO: 380823 - DNA, 51 bp, Artificial
  Synthetic oligonucleotide
ctcaaagaattacaacaacggggccgttcgctattctaaccgggtcaaccc

SEQ ID NO: 380824 - DNA, 53 bp, Artificial
  Synthetic oligonucleotide
ctcaaagaccctagccggcccaaaagggccaatcacccaaatgtataccaatg

SEQ ID NO: 380825 - DNA, 59 bp, Artificial
  Synthetic oligonucleotide
ctcaaagagcgtgtaccactctttaaggcacgcgtacatggccggtttgtgttgaagca

SEQ ID NO: 380826 - DNA, 58 bp, Artificial
  Synthetic oligonucleotide
ctcaaagagtacttagacaagaacgaacagctatttgaaagcctatatgagggtcatt

SEQ ID NO: 380827 - DNA, 60 bp, Artificial
  Synthetic oligonucleotide
ctcaaagcaagtgaagtgtgttcagtatggaggaggtgtcaaatgctctgtttctgctac

SEQ ID NO: 380828 - DNA, 55 bp, Artificial
  Synthetic oligonucleotide
ctcaaagccaagcaccactgcataccagaggagatcatccaagcatacatagaca

SEQ ID NO: 380829 - DNA, 59 bp, Artificial
  Synthetic oligonucleotide
ctcaaagctaggcaccactccatcccggaagtgtacattgagggctacctggacttgaa

SEQ ID NO: 380830 - DNA, 55 bp, Artificial
  Synthetic oligonucleotide
ctcaaagctgaaatgggtggaaccccaaaggttactgactgttagccaggtagca

SEQ ID NO: 380831 - DNA, 60 bp, Artificial
  Synthetic oligonucleotide
ctcaaaggagtgaggcccctcattctgaaggattgcagtgtggctggatggcttcttgga

SEQ ID NO: 380832 - DNA, 51 bp, Artificial
  Synthetic oligonucleotide
ctcaaaggattagcatgcatggatatctcctatggatgtgaggtggacgcg

SEQ ID NO: 380833 - DNA, 55 bp, Artificial
  Synthetic oligonucleotide
ctcaaaggtagacagtgtagaaaggtctcaccagcatcagcacccctcgagattg

SEQ ID NO: 380834 - DNA, 57 bp, Artificial
  Synthetic oligonucleotide
ctcaaaggttaacattggagcaattgtcattagcatacacaagcttgggtactattc

SEQ ID NO: 380835 - DNA, 55 bp, Artificial
  Synthetic oligonucleotide
ctcaaaggttagccgcaacgctaattactctccccgttcaggaattgggccaaga

SEQ ID NO: 380836 - DNA, 60 bp, Artificial
  Synthetic oligonucleotide
ctcaaagtcccacgcaagctccgtctttgccgtggagtcgtctcggtgagatagctatat

SEQ ID NO: 380837 - DNA, 55 bp, Artificial
  Synthetic oligonucleotide
ctcaaagtccttccgcgcagcggagattggagggacccagttccaggcgacatcg

SEQ ID NO: 380838 - DNA, 60 bp, Artificial
  Synthetic oligonucleotide
ctcaaagtctgacgccattcgcctggcctcagggcagcagccgacgaggtccgtcgattg

SEQ ID NO: 380839 - DNA, 54 bp, Artificial
  Synthetic oligonucleotide
ctcaaagtctggtgaatcgggggaactggggggcaatttatatgtgccccccaa

SEQ ID NO: 380840 - DNA, 55 bp, Artificial
  Synthetic oligonucleotide
ctcaaagtcttgatcatgaatgcttggattgaagggaactagtttcttatcacct

SEQ ID NO: 380841 - DNA, 60 bp, Artificial
  Synthetic oligonucleotide
ctcaaagtgtcaccatttctagacattgacaataggagtattgcctacaacaagattagt

SEQ ID NO: 380842 - DNA, 58 bp, Artificial
  Synthetic oligonucleotide
ctcaaagttcttagaagctgtggtttccgctaatgtgattaacgctacattagttgta

SEQ ID NO: 380843 - DNA, 59 bp, Artificial
  Synthetic oligonucleotide
ctcaaagtttctcttcgttgtcattgcaacaggttttcctcttctcctacagcaagcga

SEQ ID NO: 380844 - DNA, 60 bp, Artificial
  Synthetic oligonucleotide
ctcaaatagctagcttagctgttggttaatatgacctgttcagggtgtgacgtgtgaacc

SEQ ID NO: 380845 - DNA, 60 bp, Artificial
  Synthetic oligonucleotide
ctcaaatattacaggtctactattgacaagagatggtggtcttaatgagactaatcagac

SEQ ID NO: 380846 - DNA, 60 bp, Artificial
  Synthetic oligonucleotide
ctcaaatcaatctttggcagcgaccaatgatgacagtgaaagtccagggacaagtctgtc

SEQ ID NO: 380847 - DNA, 50 bp, Artificial
  Synthetic oligonucleotide
ctcaaatctgtcggtatagacctgaatgatcaaacgatcaatcagcgttt

SEQ ID NO: 380848 - DNA, 60 bp, Artificial
  Synthetic oligonucleotide
ctcaaatctttgactagaatgatggactttgacatctgcagatttcttttcgttatagtc

SEQ ID NO: 380849 - DNA, 60 bp, Artificial
  Synthetic oligonucleotide
ctcaaatgacctgtgggtcacggtctattatggggtgcctgtgtgggaagatgcagatac

SEQ ID NO: 380850 - DNA, 57 bp, Artificial
  Synthetic oligonucleotide
ctcaaatgcagttcaaactgacaaccctgtggttcaactctttccccaccaacaagc

SEQ ID NO: 380851 - DNA, 55 bp, Artificial
  Synthetic oligonucleotide
ctcaaatgccctccactactaataactaccaatgtgaatccgttggaggatgaca

SEQ ID NO: 380852 - DNA, 55 bp, Artificial
  Synthetic oligonucleotide
ctcaaatgctaagggtatggatctggggacaactcctggtgaccgtggctgcccg

SEQ ID NO: 380853 - DNA, 55 bp, Artificial
  Synthetic oligonucleotide
ctcaaatggcacaatacatgataggagtccccatagaacccttttaatgaacgag

SEQ ID NO: 380854 - DNA, 60 bp, Artificial
  Synthetic oligonucleotide
ctcaaatgggacaatccatgatagaacggctttcagaggtcttatatccactccattggg

SEQ ID NO: 380855 - DNA, 58 bp, Artificial
  Synthetic oligonucleotide
ctcaaatgggactttcagcgttggggcgttcagccccactgtgagtacatccgcgagt

SEQ ID NO: 380856 - DNA, 57 bp, Artificial
  Synthetic oligonucleotide
ctcaaatgggagtagtcaatacttacctgaaaggatccgaatttgtcgatgccaacc

SEQ ID NO: 380857 - DNA, 56 bp, Artificial
  Synthetic oligonucleotide
ctcaaattatattgtcgttattttggttatcttacgttggggtgattcaccagcag

SEQ ID NO: 380858 - DNA, 55 bp, Artificial
  Synthetic oligonucleotide
ctcaaattatgtggggtgcctggacttagacttatggacggaacatgggtcgcaa

SEQ ID NO: 380859 - DNA, 51 bp, Artificial
  Synthetic oligonucleotide
ctcaaattcaagtaaccgatcctgtctttttaaggaaccccgcctccctag

SEQ ID NO: 380860 - DNA, 60 bp, Artificial
  Synthetic oligonucleotide
ctcaaatttgtgattgcgctatgtcgtcacgaccatatcgacacttgtttgattgcctgt

SEQ ID NO: 380861 - DNA, 50 bp, Artificial
  Synthetic oligonucleotide
ctcaacaaacgctgtcacgagcagcggtgagctattgcttcggtgactac

SEQ ID NO: 380862 - DNA, 59 bp, Artificial
  Synthetic oligonucleotide
ctcaacaaacttcataagtcagtgaaaatgcgtactaatttaccaggtcatgagaatac

SEQ ID NO: 380863 - DNA, 55 bp, Artificial
  Synthetic oligonucleotide
ctcaacaaagatcaacttctgtcatccagcaaatacaccatccaacggagcacag

SEQ ID NO: 380864 - DNA, 60 bp, Artificial
  Synthetic oligonucleotide
ctcaacaacattccaacaagctctgctagaccccagagtgaggggcctatatcttcctgc

SEQ ID NO: 380865 - DNA, 60 bp, Artificial
  Synthetic oligonucleotide
ctcaacaacctgatagatgttgaccaagcttgacaagtcataaatgtttgtacagtgtcc

SEQ ID NO: 380866 - DNA, 55 bp, Artificial
  Synthetic oligonucleotide
ctcaacaactgtattatcccatgccctacccttgatctgtgatcgtgaagcaatg

SEQ ID NO: 380867 - DNA, 60 bp, Artificial
  Synthetic oligonucleotide
ctcaacaatctgtcaaactgtgtgcaccctgcagttgagcacagaagcaggatggttggc

SEQ ID NO: 380868 - DNA, 57 bp, Artificial
  Synthetic oligonucleotide
ctcaacaatgtttacgataccaaattacgcatgcgcaaaaacgtgtttagaaataga

SEQ ID NO: 380869 - DNA, 54 bp, Artificial
  Synthetic oligonucleotide
ctcaacacaaattttacttaagtggaatatttcggtgcttaaaacgactgtgaa

SEQ ID NO: 380870 - DNA, 55 bp, Artificial
  Synthetic oligonucleotide
ctcaacacaacacataacaacaactacaaacgcacacgatttcactagcattcac

SEQ ID NO: 380871 - DNA, 55 bp, Artificial
  Synthetic oligonucleotide
ctcaacacactaccccgtgtgtagttttggctgatgagtcacggcattccccacg

SEQ ID NO: 380872 - DNA, 55 bp, Artificial
  Synthetic oligonucleotide
ctcaacacagttatccatcaaggaatggatgcaacagcagcatgtattgggctcc

SEQ ID NO: 380873 - DNA, 57 bp, Artificial
  Synthetic oligonucleotide
ctcaacacagttccaccaagcactgttagatccgagagtaaggggtctgtattttcc

SEQ ID NO: 380874 - DNA, 52 bp, Artificial
  Synthetic oligonucleotide
ctcaacacccccgtccccctagccctcctcgcctccttggtgccggaattgt

SEQ ID NO: 380875 - DNA, 55 bp, Artificial
  Synthetic oligonucleotide
ctcaacacccgcctgactgctatagaaaagtacctaaaagatcagagcaagttaa

SEQ ID NO: 380876 - DNA, 51 bp, Artificial
  Synthetic oligonucleotide
ctcaacacctgaagcaccctatccgggctcactgatgtatcaagagtccat

SEQ ID NO: 380877 - DNA, 54 bp, Artificial
  Synthetic oligonucleotide
ctcaacacggtttgtgtcacgaacccgactacttcatatgccaagcagaccgtt

SEQ ID NO: 380878 - DNA, 60 bp, Artificial
  Synthetic oligonucleotide
ctcaacagatgtacgctagattagttaataaacacaagcgtgcaatagtgaatgtgaatc

SEQ ID NO: 380879 - DNA, 55 bp, Artificial
  Synthetic oligonucleotide
ctcaacaggggattttgagttacatcctagtcttagaaagcgtcgtaaaagagct

SEQ ID NO: 380880 - DNA, 57 bp, Artificial
  Synthetic oligonucleotide
ctcaacagtcacataaagaattgtgtgagaagagttgatcctcaattcaattgcaac

SEQ ID NO: 380881 - DNA, 55 bp, Artificial
  Synthetic oligonucleotide
ctcaacagtcaggacaatatgtgagacagaattggcgtatttatacggcgtacaa

SEQ ID NO: 380882 - DNA, 60 bp, Artificial
  Synthetic oligonucleotide
ctcaacagtctggtgctgtgctagcatctctgcagaagactaccaaattcactgtggtgg

SEQ ID NO: 380883 - DNA, 60 bp, Artificial
  Synthetic oligonucleotide
ctcaacagttcgctgagccaatgcaagatttggctccagttgtaagagagtatatgatgc

SEQ ID NO: 380884 - DNA, 56 bp, Artificial
  Synthetic oligonucleotide
ctcaacatatggctacaattggtgtactagcaacaccggaaatcccttttacaacg

SEQ ID NO: 380885 - DNA, 60 bp, Artificial
  Synthetic oligonucleotide
ctcaacatcaatgagttttatgtcccttctattctgtgagtccagaagctttctgatgtc

SEQ ID NO: 380886 - DNA, 58 bp, Artificial
  Synthetic oligonucleotide
ctcaacattagagattcacatctagtccaattgaccagtttagaatagttcactgata

SEQ ID NO: 380887 - DNA, 60 bp, Artificial
  Synthetic oligonucleotide
ctcaaccaactccgaaaatactgaaaggcacactgcaagggatgtgaatcaaaacatgca

SEQ ID NO: 380888 - DNA, 52 bp, Artificial
  Synthetic oligonucleotide
ctcaaccaagagattggttccccgaagacggggaccccaaaggagacgaggc

SEQ ID NO: 380889 - DNA, 59 bp, Artificial
  Synthetic oligonucleotide
ctcaaccacctatgtatgacaaaaacagacctaactggggatacgtagtctatgacaca

SEQ ID NO: 380890 - DNA, 55 bp, Artificial
  Synthetic oligonucleotide
ctcaaccacttatcgggagtcagaatccctgccagtagtatcaaagccctaggtc

SEQ ID NO: 380891 - DNA, 57 bp, Artificial
  Synthetic oligonucleotide
ctcaaccataacacaagcctgtccaaaggtcaactttgacccgatccctatacatta

SEQ ID NO: 380892 - DNA, 55 bp, Artificial
  Synthetic oligonucleotide
ctcaacccactcatgcagccttacacaccaatccttagaaacataatgtctgcgc

SEQ ID NO: 380893 - DNA, 52 bp, Artificial
  Synthetic oligonucleotide
ctcaaccctactacacccaccgaacttgacaacggtgtggtaggggtaaatc

SEQ ID NO: 380894 - DNA, 55 bp, Artificial
  Synthetic oligonucleotide
ctcaaccctggtcacggccgacaactacaggggtgcctccgccaagtttacgcag

SEQ ID NO: 380895 - DNA, 58 bp, Artificial
  Synthetic oligonucleotide
ctcaacccttacctcgcatcaccgtcggtcctacctacgactcggccatgttcagatg

SEQ ID NO: 380896 - DNA, 55 bp, Artificial
  Synthetic oligonucleotide
ctcaaccgaggatctggacgtccccgtctctagccgaacggcgttgtctttgtcc

SEQ ID NO: 380897 - DNA, 60 bp, Artificial
  Synthetic oligonucleotide
ctcaaccgcgtaactgagggcgaacgagaagtgcggtatatgcgcatctcgcgtcacctg

SEQ ID NO: 380898 - DNA, 55 bp, Artificial
  Synthetic oligonucleotide
ctcaaccgcttggtccagtttgtaaaagacagaatttcggtggtgcaggccctgg

SEQ ID NO: 380899 - DNA, 57 bp, Artificial
  Synthetic oligonucleotide
ctcaaccgtgtaattgctctagccctcttgggcgctgtattaactagcgtaggtaat

SEQ ID NO: 380900 - DNA, 55 bp, Artificial
  Synthetic oligonucleotide
ctcaaccttgtagggtccacgtgcggctgattcgccggttcgctctctattcaac

SEQ ID NO: 380901 - DNA, 50 bp, Artificial
  Synthetic oligonucleotide
ctcaacgacagatggtcaatgtggattgccattggtggacgttattagta

SEQ ID NO: 380902 - DNA, 60 bp, Artificial
  Synthetic oligonucleotide
ctcaacgatgacatggagagaaacctaatccaaaatgcgcatgctgtggaaagaattcta

SEQ ID NO: 380903 - DNA, 51 bp, Artificial
  Synthetic oligonucleotide
ctcaacgcaagaagaagtatttctaacttcgactttatgcttgtattaccc

SEQ ID NO: 380904 - DNA, 50 bp, Artificial
  Synthetic oligonucleotide
ctcaacgccacggcatatttcatgcatccgcacaaagaatcagccctgaa

SEQ ID NO: 380905 - DNA, 54 bp, Artificial
  Synthetic oligonucleotide
ctcaacgctccccgcgggtgtctacgcactcaacgggaccttcaatggggttac

SEQ ID NO: 380906 - DNA, 58 bp, Artificial
  Synthetic oligonucleotide
ctcaacggtcctgtgttgaggcctatcttcgtttcgcttcttagctctacggatacgc

SEQ ID NO: 380907 - DNA, 60 bp, Artificial
  Synthetic oligonucleotide
ctcaacgtccgaggggggcgcgatgctgtcatcctactcatgtgcgttgcacacccggcc

SEQ ID NO: 380908 - DNA, 53 bp, Artificial
  Synthetic oligonucleotide
ctcaacgtcgaacaattactctgcaggcactgacgccaagatacacgaccgga

SEQ ID NO: 380909 - DNA, 55 bp, Artificial
  Synthetic oligonucleotide
ctcaacgttttaccaacgttgttgactggcggccatgtgttgaggcgactgctcc

SEQ ID NO: 380910 - DNA, 60 bp, Artificial
  Synthetic oligonucleotide
ctcaactacagctgcaattatgctcgcatcgtacaccatcactcactttggcaaaacctc

SEQ ID NO: 380911 - DNA, 56 bp, Artificial
  Synthetic oligonucleotide
ctcaactacttttgattgtagatttggccaaccaccagtatacaaactagtttgtg

SEQ ID NO: 380912 - DNA, 55 bp, Artificial
  Synthetic oligonucleotide
ctcaactagggttcaacgttgaagagtactctatggttgggtatgaagccatggc

SEQ ID NO: 380913 - DNA, 60 bp, Artificial
  Synthetic oligonucleotide
ctcaactatagttcataagaagagcgatttagttgatgagtattgtctaagcccaaattg

SEQ ID NO: 380914 - DNA, 57 bp, Artificial
  Synthetic oligonucleotide
ctcaactcacttccaccaagctctgttggatcccagggtaggggaaccctgctccga

SEQ ID NO: 380915 - DNA, 56 bp, Artificial
  Synthetic oligonucleotide
ctcaactcagctgcactcatgccaaaagacggactcattcgaaagcctacacgcgc

SEQ ID NO: 380916 - DNA, 50 bp, Artificial
  Synthetic oligonucleotide
ctcaactcatgttgcattgcagaatccatatatccatgtgaagaacagga

SEQ ID NO: 380917 - DNA, 60 bp, Artificial
  Synthetic oligonucleotide
ctcaactcctacattagatcatatacatttatgcacttcctcatatttagctgcactaag

SEQ ID NO: 380918 - DNA, 55 bp, Artificial
  Synthetic oligonucleotide
ctcaactcctcgattcgaccccgagtcgtattcgacttcttcctgtctccggccc

SEQ ID NO: 380919 - DNA, 55 bp, Artificial
  Synthetic oligonucleotide
ctcaactcgtgaagcaccccgaccgccggcatgtgatcgtcatgatcgtcgactg

SEQ ID NO: 380920 - DNA, 55 bp, Artificial
  Synthetic oligonucleotide
ctcaactcgtttcaaaacgaccccttaaagatatccgcgccgattacaactatgc

SEQ ID NO: 380921 - DNA, 55 bp, Artificial
  Synthetic oligonucleotide
ctcaactctacagcgcaatcaaccagtatcttctgagacacaagttccacctcgc

SEQ ID NO: 380922 - DNA, 55 bp, Artificial
  Synthetic oligonucleotide
ctcaactgaccgctttattgtgagaatatggaggagcattaattactttagggtc

SEQ ID NO: 380923 - DNA, 60 bp, Artificial
  Synthetic oligonucleotide
ctcaactggagacacccttgagcatctcctcctattaattggagacattatatagttgtc

SEQ ID NO: 380924 - DNA, 60 bp, Artificial
  Synthetic oligonucleotide
ctcaactggtcaaaatataaacttgcactcccttcaagcagaatctcatccaggtcagac

SEQ ID NO: 380925 - DNA, 60 bp, Artificial
  Synthetic oligonucleotide
ctcaactgtcatcactactaacaagctcgaattccccatggcaacgatttctatcatcac

SEQ ID NO: 380926 - DNA, 60 bp, Artificial
  Synthetic oligonucleotide
ctcaactgtcgccagttcactggtgcttctggtctccctgggggcaatcagcttttggat

SEQ ID NO: 380927 - DNA, 60 bp, Artificial
  Synthetic oligonucleotide
ctcaactgtcgccagttcattggtgctgttagtctccctgggggcaatcagtttctggat

SEQ ID NO: 380928 - DNA, 52 bp, Artificial
  Synthetic oligonucleotide
ctcaacttccacccagttcacccgtggtcatctctctaacacagctccacag

SEQ ID NO: 380929 - DNA, 56 bp, Artificial
  Synthetic oligonucleotide
ctcaacttgacgggatttggcccgatttcgtacgttcgggtggatgaagatatgtg

SEQ ID NO: 380930 - DNA, 52 bp, Artificial
  Synthetic oligonucleotide
ctcaacttggaggtgtgcctgtgcgagatattcgcacatccacgactattcc

SEQ ID NO: 380931 - DNA, 58 bp, Artificial
  Synthetic oligonucleotide
ctcaactttactcatcaactttgtttggagataatacggttgaattaacaccatatga

SEQ ID NO: 380932 - DNA, 60 bp, Artificial
  Synthetic oligonucleotide
ctcaagaaacatacacaacgcgtattatttgagacgtgctcaaacccactactatctgga

SEQ ID NO: 380933 - DNA, 50 bp, Artificial
  Synthetic oligonucleotide
ctcaagaaccaacccaacactacgtcttagctaaggggtctcatttaatt

SEQ ID NO: 380934 - DNA, 55 bp, Artificial
  Synthetic oligonucleotide
ctcaagaaccacacaaatagcgttattttttggttggtgcgtgaccgtcgaccca

SEQ ID NO: 380935 - DNA, 55 bp, Artificial
  Synthetic oligonucleotide
ctcaagaagaatcaacaattctattggatgggacagtgataatcaaggagatctc

SEQ ID NO: 380936 - DNA, 52 bp, Artificial
  Synthetic oligonucleotide
ctcaagaagatgtatcacatattgaagtaaatggcaaacgacaaatgagagg

SEQ ID NO: 380937 - DNA, 60 bp, Artificial
  Synthetic oligonucleotide
ctcaagaatctgaatgccaatgtattgacgggacctgtgttgtcgctgttacagatggcc

SEQ ID NO: 380938 - DNA, 55 bp, Artificial
  Synthetic oligonucleotide
ctcaagacaccttgcctttgtgtgttgtttagcagagatagcatcttttggacca

SEQ ID NO: 380939 - DNA, 60 bp, Artificial
  Synthetic oligonucleotide
ctcaagacgactgtgtttgattctatcaactcaaggataggcgcaactgagcaaagttac

SEQ ID NO: 380940 - DNA, 55 bp, Artificial
  Synthetic oligonucleotide
ctcaagagcttaaggaggagatgaaatattaccaacaccttgacaacattctgtt

SEQ ID NO: 380941 - DNA, 56 bp, Artificial
  Synthetic oligonucleotide
ctcaagagtattttggatggacaggaacttttgatgcaggaaccactattttcctt

SEQ ID NO: 380942 - DNA, 52 bp, Artificial
  Synthetic oligonucleotide
ctcaagagttaaaattaatttgatttcgagaaaggttcgttccgacgtatat

SEQ ID NO: 380943 - DNA, 60 bp, Artificial
  Synthetic oligonucleotide
ctcaagatcatgtgcgctccctgtgcttattggcttggcacaatggagagcacgaatatg

SEQ ID NO: 380944 - DNA, 54 bp, Artificial
  Synthetic oligonucleotide
ctcaagatctgcagctaatgttaacaggtcatctgatgataatgtccccacacg

SEQ ID NO: 380945 - DNA, 57 bp, Artificial
  Synthetic oligonucleotide
ctcaagatgatgaatgattcaatggctaagaaaaccagtgggaatgctttcatcggg

SEQ ID NO: 380946 - DNA, 55 bp, Artificial
  Synthetic oligonucleotide
ctcaagatttacaaactataccactccctaaacctgtacctgagactgctattac

SEQ ID NO: 380947 - DNA, 60 bp, Artificial
  Synthetic oligonucleotide
ctcaagcaggcgtgacggtcagcgttggcggagtagatatgcgagcgggacgtattatag

SEQ ID NO: 380948 - DNA, 60 bp, Artificial
  Synthetic oligonucleotide
ctcaagccgcaaaagcgtgaccccatgaggcgcaaccctcgcatcggtgatttcttccac

SEQ ID NO: 380949 - DNA, 51 bp, Artificial
  Synthetic oligonucleotide
ctcaagccgttttcggagccgcgtggcctgctccccccccaggagatctta

SEQ ID NO: 380950 - DNA, 60 bp, Artificial
  Synthetic oligonucleotide
ctcaagcctaccctgcatgggcctacacctctcctctacagattagggtctgtgcagaat

SEQ ID NO: 380951 - DNA, 60 bp, Artificial
  Synthetic oligonucleotide
ctcaagcgaacgatcgtccgcactgagaacggcataagagcattgcttgacaaatcatcc

SEQ ID NO: 380952 - DNA, 55 bp, Artificial
  Synthetic oligonucleotide
ctcaagcgcaaaacttagcgcaacagatcgacaaatttcacgctccgcgcgcgac

SEQ ID NO: 380953 - DNA, 60 bp, Artificial
  Synthetic oligonucleotide
ctcaagcggacgattgttcgcactgagaatggcattagagcacttcttgacagatcatcc

SEQ ID NO: 380954 - DNA, 60 bp, Artificial
  Synthetic oligonucleotide
ctcaagcgtggacaacatcatattgataggggtttatcgcggaatgatcgcaaaagtagc

SEQ ID NO: 380955 - DNA, 55 bp, Artificial
  Synthetic oligonucleotide
ctcaagctccacggcttcactgccctcactccccaacatgacggcacatgccaaa

SEQ ID NO: 380956 - DNA, 55 bp, Artificial
  Synthetic oligonucleotide
ctcaagctgataccaacagaccaaatcatgcgaacattttacgaaatttaggaca

SEQ ID NO: 380957 - DNA, 60 bp, Artificial
  Synthetic oligonucleotide
ctcaagcttaagggaagattactaatggaaatatgggcatacatgagtgaacctactggc

SEQ ID NO: 380958 - DNA, 60 bp, Artificial
  Synthetic oligonucleotide
ctcaaggaacaaataatggggtctgctggaataatcagctatttgttactgcagttgata

SEQ ID NO: 380959 - DNA, 55 bp, Artificial
  Synthetic oligonucleotide
ctcaaggaatattcatttgacggcaagctcattaaagtgtctgcaacacctccag

SEQ ID NO: 380960 - DNA, 60 bp, Artificial
  Synthetic oligonucleotide
ctcaaggacaacggagtgacctgtctactgctgtgagtaccttgttggagagcgggagtc

SEQ ID NO: 380961 - DNA, 60 bp, Artificial
  Synthetic oligonucleotide
ctcaaggacttcatcacaacgtatgtcgggtcctcgtcgtctgtcatcagttgtggtgcg

SEQ ID NO: 380962 - DNA, 60 bp, Artificial
  Synthetic oligonucleotide
ctcaaggagagatcaagcttgcgatatggaaatgtccttgatgtgaatgctatcgacata

SEQ ID NO: 380963 - DNA, 60 bp, Artificial
  Synthetic oligonucleotide
ctcaaggatgcaatgctgcaacttgacccaaatgctaagacctggatggacattgaagga

SEQ ID NO: 380964 - DNA, 55 bp, Artificial
  Synthetic oligonucleotide
ctcaaggcaaaggagtacagggagcagtacactgatgttggacgcacagagcaga

SEQ ID NO: 380965 - DNA, 55 bp, Artificial
  Synthetic oligonucleotide
ctcaaggcagcagaaatcaaactaagggagttagaaaacctcgtggacttgagcc

SEQ ID NO: 380966 - DNA, 60 bp, Artificial
  Synthetic oligonucleotide
ctcaaggccagtagtgggcagatcaagagcatacacacggctgattacgaaccactcact

SEQ ID NO: 380967 - DNA, 55 bp, Artificial
  Synthetic oligonucleotide
ctcaaggccgccagacttatgactggacattgaatcggaaccagccggcagcaac

SEQ ID NO: 380968 - DNA, 55 bp, Artificial
  Synthetic oligonucleotide
ctcaaggcgcaaccctggatccacgccgataaagtggtgaactgcgagaccaagc

SEQ ID NO: 380969 - DNA, 56 bp, Artificial
  Synthetic oligonucleotide
ctcaaggcgcctcagcaaggccctctgcttttagttcaaaaaggtgaggcttttta

SEQ ID NO: 380970 - DNA, 55 bp, Artificial
  Synthetic oligonucleotide
ctcaagggcccaacactgaatttgcattatcattgcttaggaagaacattgtcac

SEQ ID NO: 380971 - DNA, 60 bp, Artificial
  Synthetic oligonucleotide
ctcaaggggaagttccaaacagcagcacaaagagcaatgatggaccaagtgcgggagagc

SEQ ID NO: 380972 - DNA, 60 bp, Artificial
  Synthetic oligonucleotide
ctcaaggggatgtttgtcatactgccacaaacacaggaaggcagccaagagacaagagga

SEQ ID NO: 380973 - DNA, 60 bp, Artificial
  Synthetic oligonucleotide
ctcaagggttaccagatcggtgcacattccatcccacgcagagcggaacatggtgggtca

SEQ ID NO: 380974 - DNA, 55 bp, Artificial
  Synthetic oligonucleotide
ctcaaggtagttactcaatccttaaagaaatgcttggctttatccgtgccatcct

SEQ ID NO: 380975 - DNA, 55 bp, Artificial
  Synthetic oligonucleotide
ctcaaggtagtttagatcatcagaccctatgcgctgctgtcgattcagacatcac

SEQ ID NO: 380976 - DNA, 54 bp, Artificial
  Synthetic oligonucleotide
ctcaaggtctaaagaaatactacggtaagatactgaagcttctgcacctcacct

SEQ ID NO: 380977 - DNA, 57 bp, Artificial
  Synthetic oligonucleotide
ctcaaggtgtgtcagtagatcacgctgtattggtaagacttaaatctaccaagtgtg

SEQ ID NO: 380978 - DNA, 57 bp, Artificial
  Synthetic oligonucleotide
ctcaaggtttaacgaggtgtgcgaagaacttggtcactattactgctcccaccgctc

SEQ ID NO: 380979 - DNA, 55 bp, Artificial
  Synthetic oligonucleotide
ctcaagtaagtagtagcaatctctagggatgccgaaagcttgagcaaaggtgtac

SEQ ID NO: 380980 - DNA, 60 bp, Artificial
  Synthetic oligonucleotide
ctcaagtacagcattgacatatcgtttgtccgtagcaaacgaaacagctcgaattacatt

SEQ ID NO: 380981 - DNA, 53 bp, Artificial
  Synthetic oligonucleotide
ctcaagtacatgatttacataccatctgtctgttgcgaagcgaacagctctaa

SEQ ID NO: 380982 - DNA, 55 bp, Artificial
  Synthetic oligonucleotide
ctcaagtaggaatctaattcgttatctgtttgaaggtgggtatggcagagtaaga

SEQ ID NO: 380983 - DNA, 55 bp, Artificial
  Synthetic oligonucleotide
ctcaagtaggggtgaatacaaaggcagtagttgattatgtagatcagcaggtcgg

SEQ ID NO: 380984 - DNA, 59 bp, Artificial
  Synthetic oligonucleotide
ctcaagtagtcatcaaccagacacacgaaagtggttgactcaacgaaagcaataacgta

SEQ ID NO: 380985 - DNA, 59 bp, Artificial
  Synthetic oligonucleotide
ctcaagtatatcccaggagcaactactagtcctaagagttttgcagaagcattaactac

SEQ ID NO: 380986 - DNA, 55 bp, Artificial
  Synthetic oligonucleotide
ctcaagtatttgggagctgacggaccatgcaagattcccatctcttctgttacca

SEQ ID NO: 380987 - DNA, 57 bp, Artificial
  Synthetic oligonucleotide
ctcaagtccgtgtttcccgtcctcgacaacgaagatgtgaaatccactgacaccgtc

SEQ ID NO: 380988 - DNA, 55 bp, Artificial
  Synthetic oligonucleotide
ctcaagtcggcagtgcgccctcactcaccctacttccaccaaactaacaccgccg

SEQ ID NO: 380989 - DNA, 55 bp, Artificial
  Synthetic oligonucleotide
ctcaagtctgggattagggctgagattgtggattccatgggttcggttgtgcatg

SEQ ID NO: 380990 - DNA, 60 bp, Artificial
  Synthetic oligonucleotide
ctcaagtgcacagtctcacaataaggggataatcatgactgagcaagacctaaggtacat

SEQ ID NO: 380991 - DNA, 60 bp, Artificial
  Synthetic oligonucleotide
ctcaagtgcttactgcgggtgtttagcattagtcatgcttcagcagctgtgcttggggac

SEQ ID NO: 380992 - DNA, 60 bp, Artificial
  Synthetic oligonucleotide
ctcaagtggaggaaagacataggcttccgtgtcaatgcaaacacagcagctttgagcaac

SEQ ID NO: 380993 - DNA, 60 bp, Artificial
  Synthetic oligonucleotide
ctcaagtgtagtgtctgagtcgagtaatatttcgagagtcaagcaagccaacttcttcaa

SEQ ID NO: 380994 - DNA, 60 bp, Artificial
  Synthetic oligonucleotide
ctcaagtgtgtgaccagggagatatgcatgtcgatgcgcgtccaaggctttgatctggac

SEQ ID NO: 380995 - DNA, 57 bp, Artificial
  Synthetic oligonucleotide
ctcaagttaggaaagaactatctcagaagttaaaatctttagtcttggacgatgatg

SEQ ID NO: 380996 - DNA, 58 bp, Artificial
  Synthetic oligonucleotide
ctcaagttcttacccaccaaataatgtatgtgccaccaggtggtccagtaccagacaa

SEQ ID NO: 380997 - DNA, 53 bp, Artificial
  Synthetic oligonucleotide
ctcaagtttaagacagtccgcccggtggtcctaccacgcgcgttagcgccccc

SEQ ID NO: 380998 - DNA, 60 bp, Artificial
  Synthetic oligonucleotide
ctcaataacgcattcaagtagcaagtggcctgcaatgaccatttcctatccacgcagctt

SEQ ID NO: 380999 - DNA, 53 bp, Artificial
  Synthetic oligonucleotide
ctcaataacggtgtgggtcgaagtacgagtcgataaccgtttccgatcgtccg

SEQ ID NO: 381000 - DNA, 55 bp, Artificial
  Synthetic oligonucleotide
ctcaataagacgttagcagctggtcgtccaactattaaccacccaacctttgtgg

SEQ ID NO: 381001 - DNA, 54 bp, Artificial
  Synthetic oligonucleotide
ctcaatacaagattctcaagttatagtgacaggcaatcttgatatctcaactga

SEQ ID NO: 381002 - DNA, 59 bp, Artificial
  Synthetic oligonucleotide
ctcaatactcaggcaaatgtactggactaggggccccaaccatgaagacccatctgaaa

SEQ ID NO: 381003 - DNA, 60 bp, Artificial
  Synthetic oligonucleotide
ctcaatactctgatgtcgttccaatcatcgcaaactcattagctgaagacaactgcaacc

SEQ ID NO: 381004 - DNA, 53 bp, Artificial
  Synthetic oligonucleotide
ctcaatactgtggtgcagttcgcggacccactgtacctggcagcagacctcct

SEQ ID NO: 381005 - DNA, 50 bp, Artificial
  Synthetic oligonucleotide
ctcaatagagtgtacactatcatttcttgtgatacaccaggtgaaacagg

SEQ ID NO: 381006 - DNA, 52 bp, Artificial
  Synthetic oligonucleotide
ctcaataggctgaccacaaggaagttttgtcgtcaagactatagcgtttctt

SEQ ID NO: 381007 - DNA, 60 bp, Artificial
  Synthetic oligonucleotide
ctcaatagtatatgggattgcgccacctccacaattcaagaagcgttataacactaatga

SEQ ID NO: 381008 - DNA, 58 bp, Artificial
  Synthetic oligonucleotide
ctcaatagttttggcaattacattgaacaaaacatgatcagcagctctaatgacatcg

SEQ ID NO: 381009 - DNA, 60 bp, Artificial
  Synthetic oligonucleotide
ctcaatataataggcacaatacatttaggatagctatgtgtgctaataacaatgtgtttg

SEQ ID NO: 381010 - DNA, 55 bp, Artificial
  Synthetic oligonucleotide
ctcaatatactgtctcaaaattagatgaagacgtgaataggttgcggatgcttct

SEQ ID NO: 381011 - DNA, 56 bp, Artificial
  Synthetic oligonucleotide
ctcaatatgagagaggttataccgttaacggttatgtgaatttcacgtgggatgat

SEQ ID NO: 381012 - DNA, 60 bp, Artificial
  Synthetic oligonucleotide
ctcaatatggattagccactcaattcaacttgggaatcataatcagattgaaacatgcaa

SEQ ID NO: 381013 - DNA, 60 bp, Artificial
  Synthetic oligonucleotide
ctcaatatggattagccattcaattcaaactggaagtcaaaaccatactggaatatgcaa

SEQ ID NO: 381014 - DNA, 51 bp, Artificial
  Synthetic oligonucleotide
ctcaatatggattagccattcaattcaagctgggagtagcacctgggtgaa

SEQ ID NO: 381015 - DNA, 59 bp, Artificial
  Synthetic oligonucleotide
ctcaatatgggttagccattcaattcaaactggaagtcagaaccaccccgaaacatgca

SEQ ID NO: 381016 - DNA, 58 bp, Artificial
  Synthetic oligonucleotide
ctcaatatgggttagccattcaattcagactgggaaccaaaaccaacctgaaacatgc

SEQ ID NO: 381017 - DNA, 60 bp, Artificial
  Synthetic oligonucleotide
ctcaatatgggttagccattcgatccagactggaggtcaaaaccgccctgaaacatgcaa

SEQ ID NO: 381018 - DNA, 60 bp, Artificial
  Synthetic oligonucleotide
ctcaatatgtttgccctgaatggattggtgagacattgactatgtatgaagaaaaacacg

SEQ ID NO: 381019 - DNA, 60 bp, Artificial
  Synthetic oligonucleotide
ctcaatattctgaacctcactcttctggcattaaaatagcgacatctaagaaggtccaca

SEQ ID NO: 381020 - DNA, 59 bp, Artificial
  Synthetic oligonucleotide
ctcaatcaaacaagcagtaattttgaacgtagctggcacgttagagtcggctccagacc

SEQ ID NO: 381021 - DNA, 55 bp, Artificial
  Synthetic oligonucleotide
ctcaatcaaacatgggctcacaggtatccgcacaacgctccggttctcatgagaa

SEQ ID NO: 381022 - DNA, 60 bp, Artificial
  Synthetic oligonucleotide
ctcaatcaactatgaaggctgaagaactgacccctggacgatttagaaccatagtatgcg

SEQ ID NO: 381023 - DNA, 55 bp, Artificial
  Synthetic oligonucleotide
ctcaatcacatggcaatctgttcctgtggcttctataagcaaccaggtctcccca

SEQ ID NO: 381024 - DNA, 60 bp, Artificial
  Synthetic oligonucleotide
ctcaatcacctggtaatgacatggactatgtgttaacttgtttgagacaaacgaatgctg

SEQ ID NO: 381025 - DNA, 50 bp, Artificial
  Synthetic oligonucleotide
ctcaatcacctttgagagtactgggaactttatagctcccgaatatgcat

SEQ ID NO: 381026 - DNA, 58 bp, Artificial
  Synthetic oligonucleotide
ctcaatcaggaagcacaacgccattttgggagagaactcctcttccaagtatggaact

SEQ ID NO: 381027 - DNA, 59 bp, Artificial
  Synthetic oligonucleotide
ctcaatcatgtagtctagacatgtatctgagacaccacacctgcattaatggtcatgct

SEQ ID NO: 381028 - DNA, 50 bp, Artificial
  Synthetic oligonucleotide
ctcaatcccacaggaagcattgtatcatctgtcatattggactcacaaaa

SEQ ID NO: 381029 - DNA, 55 bp, Artificial
  Synthetic oligonucleotide
ctcaatccttcagaccgtgtcagtcgcccttaccatcctagttgccctactgacg

SEQ ID NO: 381030 - DNA, 55 bp, Artificial
  Synthetic oligonucleotide
ctcaatcgagtcatagatattgtggtccggctggaggaagccgctaactcctctc

SEQ ID NO: 381031 - DNA, 54 bp, Artificial
  Synthetic oligonucleotide
ctcaatcgcgaagcatacgcgaaggatcttcttaagtacgcaacgccaatcgaa

SEQ ID NO: 381032 - DNA, 51 bp, Artificial
  Synthetic oligonucleotide
ctcaatcggtggtgtgattagtgctgcattgagcggtattgcatctattgt

SEQ ID NO: 381033 - DNA, 55 bp, Artificial
  Synthetic oligonucleotide
ctcaatctcaggtttaagtgtggtgagaataggtgccccaccattccttattggg

SEQ ID NO: 381034 - DNA, 55 bp, Artificial
  Synthetic oligonucleotide
ctcaatctcatactccaatcgtgagtagatgcgacttcatcgatggtaaccatac

SEQ ID NO: 381035 - DNA, 55 bp, Artificial
  Synthetic oligonucleotide
ctcaatctgatgttgcaaacgtcctttcaagagtagtttctgttagacatttgga

SEQ ID NO: 381036 - DNA, 55 bp, Artificial
  Synthetic oligonucleotide
ctcaatctggcaactgagcttgtcttcatgctgtttgtcaaagccagacaaacag

SEQ ID NO: 381037 - DNA, 58 bp, Artificial
  Synthetic oligonucleotide
ctcaatgaaaaaatctacggttttttgtggttctggatgcactttgtagcacttatga

SEQ ID NO: 381038 - DNA, 55 bp, Artificial
  Synthetic oligonucleotide
ctcaatgacaaacattctaatggcacagtgaaagaccggagcccctacagaactc

SEQ ID NO: 381039 - DNA, 55 bp, Artificial
  Synthetic oligonucleotide
ctcaatgagacagtagaaattgtgtgcacaagacccaacaataacacaagaaaaa

SEQ ID NO: 381040 - DNA, 60 bp, Artificial
  Synthetic oligonucleotide
ctcaatgatgttggagaatctagggttgctctctaggatactatctgtgtgccaagatga

SEQ ID NO: 381041 - DNA, 58 bp, Artificial
  Synthetic oligonucleotide
ctcaatgccccctcttgagggggagcctggtgaccctgacctaagctcaggctcttgg

SEQ ID NO: 381042 - DNA, 60 bp, Artificial
  Synthetic oligonucleotide
ctcaatggaacctgagtgataacggcactaatggtattcagcatgctatgtaccttagag

SEQ ID NO: 381043 - DNA, 55 bp, Artificial
  Synthetic oligonucleotide
ctcaatgtcacttagtctgaagcttatgggtttgggtggtgagagaactattaag

SEQ ID NO: 381044 - DNA, 56 bp, Artificial
  Synthetic oligonucleotide
ctcaatgtccccctatgcccggactgtcaggacatacagctttcaaacaataacgc

SEQ ID NO: 381045 - DNA, 55 bp, Artificial
  Synthetic oligonucleotide
ctcaatgtcttccactagacaggagcataaaattcagagtaatcttcgtgaattg

SEQ ID NO: 381046 - DNA, 60 bp, Artificial
  Synthetic oligonucleotide
ctcaatgttctgcagtcgagcgcccatggatctggcttctacactatggtgtcactatac

SEQ ID NO: 381047 - DNA, 55 bp, Artificial
  Synthetic oligonucleotide
ctcaattatcagataacttgtttgccggacatctgagcaatctgagttacattcc

SEQ ID NO: 381048 - DNA, 54 bp, Artificial
  Synthetic oligonucleotide
ctcaattatttaatcctatgcttactctggagttcgactgataaggcgttcccg

SEQ ID NO: 381049 - DNA, 57 bp, Artificial
  Synthetic oligonucleotide
ctcaattctactgtattctcacgcgtgcgcaacgggaaaaccttaatcgcgtttgac

SEQ ID NO: 381050 - DNA, 52 bp, Artificial
  Synthetic oligonucleotide
ctcaattctgaccactcattcgtcactaaaactgacggaatatctcggagct

SEQ ID NO: 381051 - DNA, 55 bp, Artificial
  Synthetic oligonucleotide
ctcaattgccgcaaactcagtgtcgactgctcagggatgtggtgtgagggctcgg

SEQ ID NO: 381052 - DNA, 58 bp, Artificial
  Synthetic oligonucleotide
ctcaattggatttgactctgtaggtacatttgacatactaggagtgttggctccagga

SEQ ID NO: 381053 - DNA, 55 bp, Artificial
  Synthetic oligonucleotide
ctcaattggcgaagatgttgattctggattatcaaacggtatcgaacaaaacgca

SEQ ID NO: 381054 - DNA, 55 bp, Artificial
  Synthetic oligonucleotide
ctcaattgggtagaaaacaggccgaatcagacacagcgcaattatgcaccgtgcc

SEQ ID NO: 381055 - DNA, 55 bp, Artificial
  Synthetic oligonucleotide
ctcaattgggtagaaaataaacctaatacgacaaagcgcaattatgcaccatgcc

SEQ ID NO: 381056 - DNA, 55 bp, Artificial
  Synthetic oligonucleotide
ctcaattgtttacggaattgcgccacctccacaattcaagaaacgttataatact

SEQ ID NO: 381057 - DNA, 55 bp, Artificial
  Synthetic oligonucleotide
ctcaatttactgactttgtgtcacttaattcgttaagatttagattcagtttaac

SEQ ID NO: 381058 - DNA, 53 bp, Artificial
  Synthetic oligonucleotide
ctcaatttggatgctcagctgcttaaagtgagtctgtctaaaggtttggaaaa

SEQ ID NO: 381059 - DNA, 52 bp, Artificial
  Synthetic oligonucleotide
ctcaatttggccctctcacctgcatgagactcactggggaacccggcactta

SEQ ID NO: 381060 - DNA, 55 bp, Artificial
  Synthetic oligonucleotide
ctcaattttctagggggagctcccgtgtgtcgtggccaaaattcgcagtccccaa

SEQ ID NO: 381061 - DNA, 55 bp, Artificial
  Synthetic oligonucleotide
ctcacaaaagctgttacgtgcttgtaacacactacacacccgttttgtgttcggg

SEQ ID NO: 381062 - DNA, 60 bp, Artificial
  Synthetic oligonucleotide
ctcacaaacaactacagaaacttcagtcgactcatcctgagttgcatgttgacatacctg

SEQ ID NO: 381063 - DNA, 53 bp, Artificial
  Synthetic oligonucleotide
ctcacaaaggaggtcgtaaaagaagtgaacggtgaagaaacgaaacgcctcga

SEQ ID NO: 381064 - DNA, 60 bp, Artificial
  Synthetic oligonucleotide
ctcacaacaccgatctcacaggcagatggtgactactaccaacccactaatcaggcatga

SEQ ID NO: 381065 - DNA, 56 bp, Artificial
  Synthetic oligonucleotide
ctcacaacggcgaaagcggggacgaggagggtcaaggtctagctcctaccgtggca

SEQ ID NO: 381066 - DNA, 55 bp, Artificial
  Synthetic oligonucleotide
ctcacaactctacactatctgagtgcaaatcggtaactatgagcatatgctttgg

SEQ ID NO: 381067 - DNA, 53 bp, Artificial
  Synthetic oligonucleotide
ctcacaagaaggtcctactggaggctagaagactgggcctcagtgatgaacac

SEQ ID NO: 381068 - DNA, 58 bp, Artificial
  Synthetic oligonucleotide
ctcacaagagagttcgtaaccgcgttcacacacggagacgacagcctcgtcggagtac

SEQ ID NO: 381069 - DNA, 55 bp, Artificial
  Synthetic oligonucleotide
ctcacaagaggaacctctatgacaaggctttaatgtcaatcgtaacaacattcca

SEQ ID NO: 381070 - DNA, 60 bp, Artificial
  Synthetic oligonucleotide
ctcacaaggtggtagctggtgacgattgtaaggagccagtctgcagcgataccgtctgtc

SEQ ID NO: 381071 - DNA, 60 bp, Artificial
  Synthetic oligonucleotide
ctcacaatatgcattaggaataatccaagcacaaccagataagagtgaatcagagttagt

SEQ ID NO: 381072 - DNA, 55 bp, Artificial
  Synthetic oligonucleotide
ctcacaatatgtattgggcatcatatcctcccaaccaacacagagtgactcccct

SEQ ID NO: 381073 - DNA, 57 bp, Artificial
  Synthetic oligonucleotide
ctcacaatattcttttgaaatcgaagagccaaccccacctaggcaaacaagcactcc

SEQ ID NO: 381074 - DNA, 55 bp, Artificial
  Synthetic oligonucleotide
ctcacaatcagacattctctggcagtccgcattttcttagttagtgagcttaaga

SEQ ID NO: 381075 - DNA, 50 bp, Artificial
  Synthetic oligonucleotide
ctcacaatggttcgacattgggattaaccatgatggcttttcctatgttg

SEQ ID NO: 381076 - DNA, 50 bp, Artificial
  Synthetic oligonucleotide
ctcacaattgatttcgaccttgaaacaaataaggagtcttccagtgtctc

SEQ ID NO: 381077 - DNA, 60 bp, Artificial
  Synthetic oligonucleotide
ctcacacaacactgcagatagggggcgcaattgggatcgttaaacactgcagataggggg

SEQ ID NO: 381078 - DNA, 54 bp, Artificial
  Synthetic oligonucleotide
ctcacacaactacctgagaagggtcaattcacatggctacgttcggcaccggaa

SEQ ID NO: 381079 - DNA, 55 bp, Artificial
  Synthetic oligonucleotide
ctcacacaccgatcaatagcaagcgtggcacaccagccatgttttgatcaagcac

SEQ ID NO: 381080 - DNA, 60 bp, Artificial
  Synthetic oligonucleotide
ctcacaccacctttacaaaaacaagacatactgtgtcaagggcggcatgccatctggctg

SEQ ID NO: 381081 - DNA, 55 bp, Artificial
  Synthetic oligonucleotide
ctcacaccacgggacgttctagaacagctcgccgcaggacgtgagtgggagtgtg

SEQ ID NO: 381082 - DNA, 60 bp, Artificial
  Synthetic oligonucleotide
ctcacacgcattctcgctcagtggtgttgtatccatgttatcatcacgatatatgagaga

SEQ ID NO: 381083 - DNA, 60 bp, Artificial
  Synthetic oligonucleotide
ctcacactcacaacctgaagcaaccaatgcaagccaaacaataataaacaactactataa

SEQ ID NO: 381084 - DNA, 55 bp, Artificial
  Synthetic oligonucleotide
ctcacactgcataccaacctactaataatcttaagtggcagtgtgttagcactcc

SEQ ID NO: 381085 - DNA, 58 bp, Artificial
  Synthetic oligonucleotide
ctcacagaaacacatatgtctcctacgaggaggtagtggcgaagtgggtcccgtcctg

SEQ ID NO: 381086 - DNA, 57 bp, Artificial
  Synthetic oligonucleotide
ctcacagacgatttcggtaacaccttttcagtcccggatcccttgcgtgagatccaa

SEQ ID NO: 381087 - DNA, 55 bp, Artificial
  Synthetic oligonucleotide
ctcacagaggtgtcatcgctgacaatcaagcaaaatgggctgtcccgacaacacg

SEQ ID NO: 381088 - DNA, 55 bp, Artificial
  Synthetic oligonucleotide
ctcacagattccattcacctcacaaacgactacacctccttcgaccaatcccaac

SEQ ID NO: 381089 - DNA, 55 bp, Artificial
  Synthetic oligonucleotide
ctcacagcacattggcacgcgttaggtgcggcacaaatggcgatgggacgtacgc

SEQ ID NO: 381090 - DNA, 60 bp, Artificial
  Synthetic oligonucleotide
ctcacagcagcatcgtgtaatagacatcttatccagccctataccgagactaatgaagtt

SEQ ID NO: 381091 - DNA, 55 bp, Artificial
  Synthetic oligonucleotide
ctcacagcgttcacgatgatacttgtagtccgtttcagtatgattgatgtgcccc

SEQ ID NO: 381092 - DNA, 55 bp, Artificial
  Synthetic oligonucleotide
ctcacagctagaattttgctcacacgtctttgagcgggaggacctcgccaggccg

SEQ ID NO: 381093 - DNA, 59 bp, Artificial
  Synthetic oligonucleotide
ctcacagctgcactactccggtcgttacgctaccgtccgatacgacgagctggcccgta

SEQ ID NO: 381094 - DNA, 57 bp, Artificial
  Synthetic oligonucleotide
ctcacaggattcttgcactctagccttcgagtataagcttttaaggtaccttgcctt

SEQ ID NO: 381095 - DNA, 60 bp, Artificial
  Synthetic oligonucleotide
ctcacaggctcacccgtcgatctgatgtgcgccttccccctctaccacactctgcctctc

SEQ ID NO: 381096 - DNA, 60 bp, Artificial
  Synthetic oligonucleotide
ctcacaggggcccgtgccctatggctcctgcggatcccctgtcatatgtgagcatggggt

SEQ ID NO: 381097 - DNA, 59 bp, Artificial
  Synthetic oligonucleotide
ctcacagtaggttcggtagtcgtgtgtggcaggattgtgacatctggcaaacccgcggt

SEQ ID NO: 381098 - DNA, 55 bp, Artificial
  Synthetic oligonucleotide
ctcacagtagtacccgtaacaattggtggcgcaagaacattgcgaggtgcttgca

SEQ ID NO: 381099 - DNA, 60 bp, Artificial
  Synthetic oligonucleotide
ctcacagtatccaacagatgccctctttgcaaacacagcctgccccaaaggctggagctt

SEQ ID NO: 381100 - DNA, 55 bp, Artificial
  Synthetic oligonucleotide
ctcacagtcccctgagattaagtacatgccatcacttctccagaacggtgcccgt

SEQ ID NO: 381101 - DNA, 55 bp, Artificial
  Synthetic oligonucleotide
ctcacagtggtggtggacaaacttgatcccacagactatcgaggtggcatccctg

SEQ ID NO: 381102 - DNA, 51 bp, Artificial
  Synthetic oligonucleotide
ctcacagttgaacgtgggaaccctgagcagcactgacctgaaagatctaca

SEQ ID NO: 381103 - DNA, 59 bp, Artificial
  Synthetic oligonucleotide
ctcacataaaattccattctcgcttaccgaggcttttgttcctgcggagcatactacta

SEQ ID NO: 381104 - DNA, 60 bp, Artificial
  Synthetic oligonucleotide
ctcacatagcggagaaacgactccaatgcatagtggactcgggaaaagtttgactgttgc

SEQ ID NO: 381105 - DNA, 52 bp, Artificial
  Synthetic oligonucleotide
ctcacatccaagctcggtgatatcacggtgatctctaatggtgaaacatcat

SEQ ID NO: 381106 - DNA, 54 bp, Artificial
  Synthetic oligonucleotide
ctcacatgcagaattgatgtaatacagcacaccatctgtgcaagagggcttgat

SEQ ID NO: 381107 - DNA, 60 bp, Artificial
  Synthetic oligonucleotide
ctcacatgctgatagggtgcggatttgcagaacccggggactgcggtgggatactgaggt

SEQ ID NO: 381108 - DNA, 51 bp, Artificial
  Synthetic oligonucleotide
ctcacatgggaacaatgggatgtacatgtcagcaattacacaggagtaatt

SEQ ID NO: 381109 - DNA, 60 bp, Artificial
  Synthetic oligonucleotide
ctcacattatgcgcatgcaccttgaaaatcttctggacgtggcagaagagtataaatctg

SEQ ID NO: 381110 - DNA, 60 bp, Artificial
  Synthetic oligonucleotide
ctcacattcaatctcgccacgtaatggtgttggagattcgaatttgagtgatactcgcgg

SEQ ID NO: 381111 - DNA, 60 bp, Artificial
  Synthetic oligonucleotide
ctcacatttctttcagcccatgaagaaatgtagctcggaaccttgttaaatgactccatc

SEQ ID NO: 381112 - DNA, 51 bp, Artificial
  Synthetic oligonucleotide
ctcaccaagctctcaccggagttgttattgaggcggacccagatcgggcac

SEQ ID NO: 381113 - DNA, 60 bp, Artificial
  Synthetic oligonucleotide
ctcaccaattacacagagggtaagcgtgcagtaactgaggtgcagaacctatggagcaac

SEQ ID NO: 381114 - DNA, 55 bp, Artificial
  Synthetic oligonucleotide
ctcaccacaaacgaacaccccgaccacaaccttccaggcgttgaaagacatctat

SEQ ID NO: 381115 - DNA, 56 bp, Artificial
  Synthetic oligonucleotide
ctcaccaccgcgtgaaactgtagttggaattcctgtaacccgtgctgttgacaact

SEQ ID NO: 381116 - DNA, 59 bp, Artificial
  Synthetic oligonucleotide
ctcaccacgaaccgagacaggaatgatgatggaagatcgtgtcctttcccgtactgccg

SEQ ID NO: 381117 - DNA, 59 bp, Artificial
  Synthetic oligonucleotide
ctcaccactcgtaatggacacaccacctctacaactcagtcgagtgtgggggtcaccta

SEQ ID NO: 381118 - DNA, 60 bp, Artificial
  Synthetic oligonucleotide
ctcaccagaagactggatgatgatgcagccagacagttacattgaaatgatggctcaacc

SEQ ID NO: 381119 - DNA, 60 bp, Artificial
  Synthetic oligonucleotide
ctcaccagatgatcaagacggaggagttagtcgaagtggtggatatgataatggctgaga

SEQ ID NO: 381120 - DNA, 60 bp, Artificial
  Synthetic oligonucleotide
ctcaccagcaacaattcagttgcttagaactctcgaactccaactcgaagctcgccatct

SEQ ID NO: 381121 - DNA, 54 bp, Artificial
  Synthetic oligonucleotide
ctcaccagcacttggccggtgctgggcagagtgactccacgcttgcttgcttaa

SEQ ID NO: 381122 - DNA, 60 bp, Artificial
  Synthetic oligonucleotide
ctcaccaggattgcaaagcacgattgctgggatgccacctttaatttgaacaggctttcc

SEQ ID NO: 381123 - DNA, 55 bp, Artificial
  Synthetic oligonucleotide
ctcaccagtcccgacaaaacccaagagtgctggctgtgtctggtatcgggacccc

SEQ ID NO: 381124 - DNA, 58 bp, Artificial
  Synthetic oligonucleotide
ctcaccagtctaataaggcaagaggttgtcactagagccgttaacattcagagttccg

SEQ ID NO: 381125 - DNA, 55 bp, Artificial
  Synthetic oligonucleotide
ctcaccatatcaagattgtgatgctattatatgtgacggggctataagaagtggt

SEQ ID NO: 381126 - DNA, 55 bp, Artificial
  Synthetic oligonucleotide
ctcaccatatggggagtgaagaatctccaagcacgcctgacagcacttgaggagt

SEQ ID NO: 381127 - DNA, 55 bp, Artificial
  Synthetic oligonucleotide
ctcaccatcaaagcagaggcgaacagtgcaaatgaggttctcaaattaaatggtt

SEQ ID NO: 381128 - DNA, 55 bp, Artificial
  Synthetic oligonucleotide
ctcaccatcagattgatagccgtgatcctccatggtaatatcttcgtaggatgtt

SEQ ID NO: 381129 - DNA, 54 bp, Artificial
  Synthetic oligonucleotide
ctcaccatttttcacggcttgttttgaaaaattttccctggcgctgagagaaag

SEQ ID NO: 381130 - DNA, 55 bp, Artificial
  Synthetic oligonucleotide
ctcacccaaacagcgggttgaattcctcgtgcaagcgtggaagtccaagaaaacc

SEQ ID NO: 381131 - DNA, 59 bp, Artificial
  Synthetic oligonucleotide
ctcacccaccaaatcatgtacgtgccaccagggggtccaatacccacgtctgtggatga

SEQ ID NO: 381132 - DNA, 55 bp, Artificial
  Synthetic oligonucleotide
ctcacccaccaccgatagggccattgccaccagggcagataagggaaccaacagg

SEQ ID NO: 381133 - DNA, 60 bp, Artificial
  Synthetic oligonucleotide
ctcacccatttgatgatctggcattccaatctgaatgatgccacataccagagaacaagg

SEQ ID NO: 381134 - DNA, 55 bp, Artificial
  Synthetic oligonucleotide
ctcaccccagctcgtccaacgctcggctttctccagagcacgtttatctccgccc

SEQ ID NO: 381135 - DNA, 59 bp, Artificial
  Synthetic oligonucleotide
ctcacccgaagtacaccgacgtaatagctgacgagtactctcgcatttgtcaagaacca

SEQ ID NO: 381136 - DNA, 56 bp, Artificial
  Synthetic oligonucleotide
ctcacccggacagcgggttgacttcctcgtgcaagcgtggaagtccaagaggaccc

SEQ ID NO: 381137 - DNA, 60 bp, Artificial
  Synthetic oligonucleotide
ctcacccgtgatcctaccacccccctcgcacgagctgcgtgggagacagctagacacact

SEQ ID NO: 381138 - DNA, 58 bp, Artificial
  Synthetic oligonucleotide
ctcaccctaattccagcactggtctgaaagatgaccttctcgaaaatttacaggccta

SEQ ID NO: 381139 - DNA, 60 bp, Artificial
  Synthetic oligonucleotide
ctcaccctagctccagtgccggtctaaaagatgatcttcttgaaaatctgcaggcctacc

SEQ ID NO: 381140 - DNA, 60 bp, Artificial
  Synthetic oligonucleotide
ctcaccctcagatgctgcatataagcagccgcttttcgcctgtactgggtctctctagtt

SEQ ID NO: 381141 - DNA, 60 bp, Artificial
  Synthetic oligonucleotide
ctcaccctctattactatacttatgggtctcaaaggccgcgcagcggcatccttcacatt

SEQ ID NO: 381142 - DNA, 58 bp, Artificial
  Synthetic oligonucleotide
ctcaccctgaggcccaaagtcactggccctctgattgacctgcccattctccgaccct

SEQ ID NO: 381143 - DNA, 57 bp, Artificial
  Synthetic oligonucleotide
ctcaccctgttaacggacttggcactctgaatgtttgggtgaaacccatttatatca

SEQ ID NO: 381144 - DNA, 59 bp, Artificial
  Synthetic oligonucleotide
ctcacccttgactcttttaatagctcttctgtgcaagattacaatctaaacaattcgga

SEQ ID NO: 381145 - DNA, 60 bp, Artificial
  Synthetic oligonucleotide
ctcaccgactgtcgctcaacctttgcgtgtaccttgggcgcaccatacggacgcaatctc

SEQ ID NO: 381146 - DNA, 55 bp, Artificial
  Synthetic oligonucleotide
ctcaccgagacaacttcatactttatttgaagtcgatagagcctctcttcccgcg

SEQ ID NO: 381147 - DNA, 59 bp, Artificial
  Synthetic oligonucleotide
ctcaccgatccctcccacataacagcagaagcggctgggagaaggttagcaaggggatc

SEQ ID NO: 381148 - DNA, 53 bp, Artificial
  Synthetic oligonucleotide
ctcaccgccatcccctcgtcttccaatctttaaggtagttttgacacctaaac

SEQ ID NO: 381149 - DNA, 55 bp, Artificial
  Synthetic oligonucleotide
ctcaccgcttgacggttcattgtcgttagcgtggcgcaggtgagtcgcgttggcg

SEQ ID NO: 381150 - DNA, 56 bp, Artificial
  Synthetic oligonucleotide
ctcaccggaaccctcaaactgactgattccggtgtcaattttcgacacgcgcggcg

SEQ ID NO: 381151 - DNA, 54 bp, Artificial
  Synthetic oligonucleotide
ctcaccggaactcactttccatacctgggacttcaaacgtggcctctttggccc

SEQ ID NO: 381152 - DNA, 51 bp, Artificial
  Synthetic oligonucleotide
ctcaccggtggcgaacgtacgtgtccagtgtgcagagtgccgttcaacatt

SEQ ID NO: 381153 - DNA, 58 bp, Artificial
  Synthetic oligonucleotide
ctcacctaaagaggttgtggaaaatgctagacccaaggcaaggcctggctgttctgag

SEQ ID NO: 381154 - DNA, 55 bp, Artificial
  Synthetic oligonucleotide
ctcacctcatcaccacgcacgcccttgtctttgagagcatctgccaggaggttac

SEQ ID NO: 381155 - DNA, 55 bp, Artificial
  Synthetic oligonucleotide
ctcacctccaaagactttacaaagactcgctatgttggcgtgtggcgtgccggct

SEQ ID NO: 381156 - DNA, 60 bp, Artificial
  Synthetic oligonucleotide
ctcacctgatctcgtcatgcaattacataaaccagtgattgactcagaccatgtggtctt

SEQ ID NO: 381157 - DNA, 60 bp, Artificial
  Synthetic oligonucleotide
ctcacctgatgtcaatataggattcattataatggccaatatatacttgtatgttaagtc

SEQ ID NO: 381158 - DNA, 57 bp, Artificial
  Synthetic oligonucleotide
ctcacctggagtacgacagatgtggttcaaaacccgataagtaacggagatgattgg

SEQ ID NO: 381159 - DNA, 55 bp, Artificial
  Synthetic oligonucleotide
ctcacctgggtttggcattctcagacctgggacgttgactctgtgaacgatcctg

SEQ ID NO: 381160 - DNA, 57 bp, Artificial
  Synthetic oligonucleotide
ctcacctggtacacggatggtagcagcttcatccgtaacggagaaagaaaagccgga

SEQ ID NO: 381161 - DNA, 57 bp, Artificial
  Synthetic oligonucleotide
ctcacctggtctcaattcaattgggcctgaaaggccaacccgggccattgaattgga

SEQ ID NO: 381162 - DNA, 56 bp, Artificial
  Synthetic oligonucleotide
ctcaccttgaatcctccggcccctgaatgcggctaaccttaaacccgcagccatgg

SEQ ID NO: 381163 - DNA, 59 bp, Artificial
  Synthetic oligonucleotide
ctcaccttggccacaaatacccagaaggttaatattctgggatgttccagcatctgaaa

SEQ ID NO: 381164 - DNA, 59 bp, Artificial
  Synthetic oligonucleotide
ctcaccttgtgttccctgaacgtcctcaacgacttgaagaaaccgccgcatcatgcgtc

SEQ ID NO: 381165 - DNA, 55 bp, Artificial
  Synthetic oligonucleotide
ctcacctttctagcacggtctgcgctcatattgagagggtcagttgctcacaagt

SEQ ID NO: 381166 - DNA, 55 bp, Artificial
  Synthetic oligonucleotide
ctcacctttgtcattacagacccatatcccaagcccagaggaacccgacaggccc

SEQ ID NO: 381167 - DNA, 55 bp, Artificial
  Synthetic oligonucleotide
ctcacgaaacgggctcgcaatccacaggaacatgaacaacgatctggtatctccg

SEQ ID NO: 381168 - DNA, 55 bp, Artificial
  Synthetic oligonucleotide
ctcacgaacgctaccgacaagagatggtggtgttaataatacggctaacgagacc

SEQ ID NO: 381169 - DNA, 59 bp, Artificial
  Synthetic oligonucleotide
ctcacgaagcgtcgtattacttctgttttgcaggtcactattgatccgaacagaacgta

SEQ ID NO: 381170 - DNA, 55 bp, Artificial
  Synthetic oligonucleotide
ctcacgaataggtgcaattatgatatgtggcgcgaacagaagcgcgtattacgag

SEQ ID NO: 381171 - DNA, 60 bp, Artificial
  Synthetic oligonucleotide
ctcacgaattacgtgatctcgttagctgctcagggtggcttcgattaccaatcggtaatc

SEQ ID NO: 381172 - DNA, 60 bp, Artificial
  Synthetic oligonucleotide
ctcacgacccagtgaggtgtgcatggtcgacggtacggacatgtgcttggctgactttca

SEQ ID NO: 381173 - DNA, 58 bp, Artificial
  Synthetic oligonucleotide
ctcacgaggggatcgtaccagagacctcagcttatgaccacgttcctttaaactgcca

SEQ ID NO: 381174 - DNA, 55 bp, Artificial
  Synthetic oligonucleotide
ctcacgcatgaggtctttgacttaacgtctgacttgcctggggtgcaaccgttta

SEQ ID NO: 381175 - DNA, 60 bp, Artificial
  Synthetic oligonucleotide
ctcacgccttcggaattgattaccgagtggcgatcccacatgatagcaactgactgctcc

SEQ ID NO: 381176 - DNA, 60 bp, Artificial
  Synthetic oligonucleotide
ctcacgcggatggagtacgttcgatgaaagctcattactcaatgggacatgatactctgg

SEQ ID NO: 381177 - DNA, 60 bp, Artificial
  Synthetic oligonucleotide
ctcacgcggcgcgattttgcgccggcagtataatctgtccacgtccccgcttacgtcatc

SEQ ID NO: 381178 - DNA, 60 bp, Artificial
  Synthetic oligonucleotide
ctcacgctccccctaatcgcatgtttactatgtccgttctttatgacgctgccaatatct

SEQ ID NO: 381179 - DNA, 55 bp, Artificial
  Synthetic oligonucleotide
ctcacgcttaggattgaatctgcagtttgtgaatccgtactcgccgatgcaagcg

SEQ ID NO: 381180 - DNA, 60 bp, Artificial
  Synthetic oligonucleotide
ctcacggaaccaccattttgaagggaacgatgatgttcgatggtgcgatgatgtttgacg

SEQ ID NO: 381181 - DNA, 54 bp, Artificial
  Synthetic oligonucleotide
ctcacggaaccacgtttttaaagggaacaatgatgtttgatggggctatgttgt

SEQ ID NO: 381182 - DNA, 51 bp, Artificial
  Synthetic oligonucleotide
ctcacggcattcgttaaccaatgcctatggtgtcataaacgagtatccgtg

SEQ ID NO: 381183 - DNA, 59 bp, Artificial
  Synthetic oligonucleotide
ctcacgggaagtcctctgcggcacgcgtcatagacttcgtaggcgcgttatgaaacgag

SEQ ID NO: 381184 - DNA, 53 bp, Artificial
  Synthetic oligonucleotide
ctcacgggacacttccgtgacaccatgaagctgtcgaaaggcagccccgtcgt

SEQ ID NO: 381185 - DNA, 58 bp, Artificial
  Synthetic oligonucleotide
ctcacgggcaactcgcttctctctcgtttctctgtgtgaccggtttcaggcacctaag

SEQ ID NO: 381186 - DNA, 55 bp, Artificial
  Synthetic oligonucleotide
ctcacgggtgaatgacatccgcgcccaccgaaaccagatactcctagaacagtca

SEQ ID NO: 381187 - DNA, 60 bp, Artificial
  Synthetic oligonucleotide
ctcacggtgtatggattggcaaagttagatttagttatcttgcaatcaccagaaagctta

SEQ ID NO: 381188 - DNA, 56 bp, Artificial
  Synthetic oligonucleotide
ctcacgtaactttcacattctgtaaaggaggatctagtacgaggagtttgcgattt

SEQ ID NO: 381189 - DNA, 60 bp, Artificial
  Synthetic oligonucleotide
ctcacgtacgaatttgatgacatcactagcgacatttgcgagaatccttatatgtccctc

SEQ ID NO: 381190 - DNA, 58 bp, Artificial
  Synthetic oligonucleotide
ctcacgtaggtaaggtcatttgtgtgtcggatgttactcgtggtaatggtttgacgca

SEQ ID NO: 381191 - DNA, 60 bp, Artificial
  Synthetic oligonucleotide
ctcacgtcagaagatggatgagaaacctgtggatccaactggtattgagcttgacgacca

SEQ ID NO: 381192 - DNA, 55 bp, Artificial
  Synthetic oligonucleotide
ctcacgttacatccttcggatcccgtttatttaatcagatgtcggcgttcgttac

SEQ ID NO: 381193 - DNA, 60 bp, Artificial
  Synthetic oligonucleotide
ctcacgttctctttgatgctcgtcaagtggaacctgtcatcttctctatccccgatttaa

SEQ ID NO: 381194 - DNA, 59 bp, Artificial
  Synthetic oligonucleotide
ctcacgtttgtagtgaaacatcatgccccagtaaaccgtcgcttgcacaatatgaagcg

SEQ ID NO: 381195 - DNA, 55 bp, Artificial
  Synthetic oligonucleotide
ctcacgtttgtattgtggctagaagcgaacacgatagtgctcctagaaccgtcgg

SEQ ID NO: 381196 - DNA, 55 bp, Artificial
  Synthetic oligonucleotide
ctcacgttttggaggtacgcggaccaaaacatgagggcactgctagatggatatg

SEQ ID NO: 381197 - DNA, 54 bp, Artificial
  Synthetic oligonucleotide
ctcactaaaagaacaattggaaactgctaacgaagaaattaaaactcgtgataa

SEQ ID NO: 381198 - DNA, 60 bp, Artificial
  Synthetic oligonucleotide
ctcactaaatgtcacaggacacatggaaaactttatgcgcttacacgtacaaaacataca

SEQ ID NO: 381199 - DNA, 60 bp, Artificial
  Synthetic oligonucleotide
ctcactaatatcattggtaccatctaatgacgattaccagacaccaataactaattcagt

SEQ ID NO: 381200 - DNA, 56 bp, Artificial
  Synthetic oligonucleotide
ctcactacaagtcagtccggacttggaatgagatcgtcccctcaaaagggtgttta

SEQ ID NO: 381201 - DNA, 60 bp, Artificial
  Synthetic oligonucleotide
ctcactacacactgcagagcaatgggaactacaagttcgatcagatgctcctgactgccc

SEQ ID NO: 381202 - DNA, 60 bp, Artificial
  Synthetic oligonucleotide
ctcactacacttgtagagtcatctttgtcatcctactctttgtgagtttccccgcaaatc

SEQ ID NO: 381203 - DNA, 60 bp, Artificial
  Synthetic oligonucleotide
ctcactacagatggaatgtgaaccagacggaactagagttcgaccagtggctggagacgt

SEQ ID NO: 381204 - DNA, 56 bp, Artificial
  Synthetic oligonucleotide
ctcactaccggtcatacgcggcgtcataagcgtggtggtaagcgtccgtttggttc

SEQ ID NO: 381205 - DNA, 55 bp, Artificial
  Synthetic oligonucleotide
ctcactacctccagacccagatcacttcgacggctacaaacaacaggccgtggtg

SEQ ID NO: 381206 - DNA, 55 bp, Artificial
  Synthetic oligonucleotide
ctcactactagtgctggctttccatatgtcacaatgggtgtccggaaacgggatc

SEQ ID NO: 381207 - DNA, 54 bp, Artificial
  Synthetic oligonucleotide
ctcactaggaataaaaccactggggttgaattaaggtaccaggtcagtctcgtg

SEQ ID NO: 381208 - DNA, 54 bp, Artificial
  Synthetic oligonucleotide
ctcactagtcataagttgtggaaggagtggctctttgctcatgccgaatatttc

SEQ ID NO: 381209 - DNA, 60 bp, Artificial
  Synthetic oligonucleotide
ctcactatatcgtcgttgtctatcaaggaagatgacagaagaacaacgatcaactgcaga

SEQ ID NO: 381210 - DNA, 51 bp, Artificial
  Synthetic oligonucleotide
ctcactatctcttaaacaacaggaagcgctagtacatactagtgggaccaa

SEQ ID NO: 381211 - DNA, 60 bp, Artificial
  Synthetic oligonucleotide
ctcactatcttacaacaatcaattatgaccctgtaagcggaactagcagtaaggcaggag

SEQ ID NO: 381212 - DNA, 60 bp, Artificial
  Synthetic oligonucleotide
ctcactatcttcaattacacacgcgcttagagcccgatataacaccaatcatgcagttga

SEQ ID NO: 381213 - DNA, 60 bp, Artificial
  Synthetic oligonucleotide
ctcactcacctgatgatctggcattccaacctgaatgatgccacatatcagagaacaaga

SEQ ID NO: 381214 - DNA, 53 bp, Artificial
  Synthetic oligonucleotide
ctcactcagcatggtaaggaaggactcaaattccctcaaggccagggagttcc

SEQ ID NO: 381215 - DNA, 60 bp, Artificial
  Synthetic oligonucleotide
ctcactcaggacatctgcttcccgctccatgtaagttgttccagaaggccaggagacacg

SEQ ID NO: 381216 - DNA, 60 bp, Artificial
  Synthetic oligonucleotide
ctcactccatatttgataaatgctgtcctcatcatcagaagcacatacatggaagattgg

SEQ ID NO: 381217 - DNA, 54 bp, Artificial
  Synthetic oligonucleotide
ctcactccatgtcctcaaccgtgttatcctctccatgtactccgaatatgtgat

SEQ ID NO: 381218 - DNA, 52 bp, Artificial
  Synthetic oligonucleotide
ctcactccctcgcgtctattgcggtatcaggaagttgtccttctgggcgggt

SEQ ID NO: 381219 - DNA, 55 bp, Artificial
  Synthetic oligonucleotide
ctcactcgtgaactaccatttccatcggatctaatcaattacgcgcaccacgtga

SEQ ID NO: 381220 - DNA, 55 bp, Artificial
  Synthetic oligonucleotide
ctcactctgctatacactttcatgttagctgttgacgtaaccactcgccccgaga

SEQ ID NO: 381221 - DNA, 59 bp, Artificial
  Synthetic oligonucleotide
ctcactctttgaggaaaggcgagcgcagtcgatggacgcgccgtacactttcccttagc

SEQ ID NO: 381222 - DNA, 57 bp, Artificial
  Synthetic oligonucleotide
ctcactgaaccctctcacataacggcggaggcggctaggaggaggttagcaagggga

SEQ ID NO: 381223 - DNA, 60 bp, Artificial
  Synthetic oligonucleotide
ctcactgacaccctgcacttgcggctcctcagacctctacttggtcacgaggcacgccga

SEQ ID NO: 381224 - DNA, 55 bp, Artificial
  Synthetic oligonucleotide
ctcactgacagaatgttctcgctttctgacatccattaaagcatgtgacatggca

SEQ ID NO: 381225 - DNA, 55 bp, Artificial
  Synthetic oligonucleotide
ctcactgacccctgctgacatagaggctgttggaccactctatccactaaccatc

SEQ ID NO: 381226 - DNA, 55 bp, Artificial
  Synthetic oligonucleotide
ctcactgataggacattcctaaccaggccatcacaattagtgcgttgggaattcg

SEQ ID NO: 381227 - DNA, 60 bp, Artificial
  Synthetic oligonucleotide
ctcactgcagtggatgaggtaccatgttgaattggacatacaattggacacgcccttgaa

SEQ ID NO: 381228 - DNA, 55 bp, Artificial
  Synthetic oligonucleotide
ctcactgccggacgatatgtttaacgcgttactccctgatttaatagctggcgct

SEQ ID NO: 381229 - DNA, 55 bp, Artificial
  Synthetic oligonucleotide
ctcactgcggatcctttgtgagaatgctgatcccgacgtcagggactacttagat

SEQ ID NO: 381230 - DNA, 53 bp, Artificial
  Synthetic oligonucleotide
ctcactgctacctggggtggcacattccattgctgttgaactttgtgtgcctg

SEQ ID NO: 381231 - DNA, 60 bp, Artificial
  Synthetic oligonucleotide
ctcactggaaccgatccaccgtcgttttctatcctctgatcgagtacacctgattagagc

SEQ ID NO: 381232 - DNA, 55 bp, Artificial
  Synthetic oligonucleotide
ctcactggagtgccccaccacaaacactcaacaggcacaacttctccttttggtg

SEQ ID NO: 381233 - DNA, 60 bp, Artificial
  Synthetic oligonucleotide
ctcactggggctaacgcaaagaacatggacctgggaactagtcctggagactgcggctgc

SEQ ID NO: 381234 - DNA, 60 bp, Artificial
  Synthetic oligonucleotide
ctcactggtacctagcagacctaatgaaggaaccaggcaatggatccttctattatgcca

SEQ ID NO: 381235 - DNA, 59 bp, Artificial
  Synthetic oligonucleotide
ctcactggtcaaccatttcaagccaatattgctgctaggcttgtaaaccgccaaaattc

SEQ ID NO: 381236 - DNA, 55 bp, Artificial
  Synthetic oligonucleotide
ctcactgttcaagcaatgtatataccaccaggagcaccaaatccagtcaaatggg

SEQ ID NO: 381237 - DNA, 59 bp, Artificial
  Synthetic oligonucleotide
ctcacttagggaccatattaatgtaattgtgagtcgtgatctatccttccaagacctaa

SEQ ID NO: 381238 - DNA, 55 bp, Artificial
  Synthetic oligonucleotide
ctcacttcacaacctaaaatcagagatcgcttcgctgtttatgcccctggttggc

SEQ ID NO: 381239 - DNA, 55 bp, Artificial
  Synthetic oligonucleotide
ctcacttccccgcaaccaacgcgggtatgctgctggaacctatgaaagaagcgct

SEQ ID NO: 381240 - DNA, 55 bp, Artificial
  Synthetic oligonucleotide
ctcacttcctccagacccaaaacattttgatgggtaccaacaacaagaagtagtg

SEQ ID NO: 381241 - DNA, 58 bp, Artificial
  Synthetic oligonucleotide
ctcacttcgcattgcgaagttatggtattttaccgccatttgcgattaggaatccaaa

SEQ ID NO: 381242 - DNA, 50 bp, Artificial
  Synthetic oligonucleotide
ctcacttgtgaaagggtgctaaacgatggctaacataaagattgaccggc

SEQ ID NO: 381243 - DNA, 59 bp, Artificial
  Synthetic oligonucleotide
ctcagaaaacttggggcgccacccctcagagcgtggaagagccgggcacgtgcagtcag

SEQ ID NO: 381244 - DNA, 58 bp, Artificial
  Synthetic oligonucleotide
ctcagaaaagaactttctacaaaggttttttgccatctcatcgaggccacactgatct

SEQ ID NO: 381245 - DNA, 55 bp, Artificial
  Synthetic oligonucleotide
ctcagaaaagcaaccaggagattgattcagctgatagtgagtgggagggacgaac

SEQ ID NO: 381246 - DNA, 56 bp, Artificial
  Synthetic oligonucleotide
ctcagaaaaggggaaatggacaacaaacacagaaactggagcaccacaacttaatc

SEQ ID NO: 381247 - DNA, 55 bp, Artificial
  Synthetic oligonucleotide
ctcagaaaagtccagaccattaagaaggctggttgcatccttgatgacagcagcc

SEQ ID NO: 381248 - DNA, 55 bp, Artificial
  Synthetic oligonucleotide
ctcagaaagatctaactacgattactggtgcaccgactggcaaagattggcgctc

SEQ ID NO: 381249 - DNA, 58 bp, Artificial
  Synthetic oligonucleotide
ctcagaaaggactatctgaagaggcgccccttgagcaaagaagacgttgaggaattag

SEQ ID NO: 381250 - DNA, 58 bp, Artificial
  Synthetic oligonucleotide
ctcagaaatgaacaaactttacgagcgtgtcaggaaacaactaagggagaatgctgaa

SEQ ID NO: 381251 - DNA, 59 bp, Artificial
  Synthetic oligonucleotide
ctcagaaattttttagatgggtactctgtgtgtgttgatagaaagcacaggacatcagt

SEQ ID NO: 381252 - DNA, 55 bp, Artificial
  Synthetic oligonucleotide
ctcagaacccaaacttcctgggtgccgcatatctggcggtagggtcttggtgccg

SEQ ID NO: 381253 - DNA, 55 bp, Artificial
  Synthetic oligonucleotide
ctcagaagaaattgttcctcaggagttcagaacaaatgcagcagtaaaggcactc

SEQ ID NO: 381254 - DNA, 60 bp, Artificial
  Synthetic oligonucleotide
ctcagaagacagctatcttcactgcaaaaactctcagcactaatacgccgatggtaaagt

SEQ ID NO: 381255 - DNA, 57 bp, Artificial
  Synthetic oligonucleotide
ctcagaagagcccgaggagcccccctcctcttcaaggagcagcccccagcagccccc

SEQ ID NO: 381256 - DNA, 55 bp, Artificial
  Synthetic oligonucleotide
ctcagaagggaaaacacttcctgcttttagccaggcaaatcgcataaatgatgtc

SEQ ID NO: 381257 - DNA, 55 bp, Artificial
  Synthetic oligonucleotide
ctcagaagggccatagtttcggtcagaggttaaatttaccagttcccgtatctga

SEQ ID NO: 381258 - DNA, 60 bp, Artificial
  Synthetic oligonucleotide
ctcagaagtaatcctgaataaattagccataccaaacagcaatgtgtgtgggtggatgag

SEQ ID NO: 381259 - DNA, 58 bp, Artificial
  Synthetic oligonucleotide
ctcagaagtgtgtaagagtaaataccatagtcttgtaaattgtgtcgatagtggtatt

SEQ ID NO: 381260 - DNA, 56 bp, Artificial
  Synthetic oligonucleotide
ctcagaatgaagagatagaccagtacatatcagaagtattcttagcacgagaagga

SEQ ID NO: 381261 - DNA, 60 bp, Artificial
  Synthetic oligonucleotide
ctcagaatgagagtttagaatcggtggttgatagggtcatccacgccctgtcctgctgac

SEQ ID NO: 381262 - DNA, 55 bp, Artificial
  Synthetic oligonucleotide
ctcagaatgatgttgctaattactacgccgcctgtagagcaatgactaacgatgg

SEQ ID NO: 381263 - DNA, 60 bp, Artificial
  Synthetic oligonucleotide
ctcagaatgtaagacattagttgatctcttgtttgtagacctcttacaaacctatcactg

SEQ ID NO: 381264 - DNA, 51 bp, Artificial
  Synthetic oligonucleotide
ctcagaattaacgtcaggatttgacccaccgaaagatgacttggctaaact

SEQ ID NO: 381265 - DNA, 55 bp, Artificial
  Synthetic oligonucleotide
ctcagaattggtccaaccactttatcagctgatttcaacagcgtctgggaacttc

SEQ ID NO: 381266 - DNA, 60 bp, Artificial
  Synthetic oligonucleotide
ctcagacaaggctaagaccgatttaaatgtcgttgcgaccgccattctcaataaggcaga

SEQ ID NO: 381267 - DNA, 60 bp, Artificial
  Synthetic oligonucleotide
ctcagacacaatcagtggacgctagcaataataccagtagtgccattgggtacgcgcaca

SEQ ID NO: 381268 - DNA, 60 bp, Artificial
  Synthetic oligonucleotide
ctcagacacttggagcagcattacaacttgctctcattacttgtaacaaagggagggaaa

SEQ ID NO: 381269 - DNA, 60 bp, Artificial
  Synthetic oligonucleotide
ctcagacagacaaagaacactggcagggtttcatcaccttcgtcggacagaagagactta

SEQ ID NO: 381270 - DNA, 55 bp, Artificial
  Synthetic oligonucleotide
ctcagacaggcgatctacgggccacagtcgagcagacctttggagctgtaaccaa

SEQ ID NO: 381271 - DNA, 55 bp, Artificial
  Synthetic oligonucleotide
ctcagacatatattgggtccaacctattacttgtcaaaaaccttccttaacatta

SEQ ID NO: 381272 - DNA, 55 bp, Artificial
  Synthetic oligonucleotide
ctcagacatggtcaatgcaattgaatacttttcgcgactgctgccaaatccagac

SEQ ID NO: 381273 - DNA, 58 bp, Artificial
  Synthetic oligonucleotide
ctcagacattgaattgacataaacaaacttcttgccgctatagcttctcaattcatac

SEQ ID NO: 381274 - DNA, 53 bp, Artificial
  Synthetic oligonucleotide
ctcagaccaattttacccaacttttcgagtcaattttacccgtctctcaagcc

SEQ ID NO: 381275 - DNA, 60 bp, Artificial
  Synthetic oligonucleotide
ctcagaccgacgattcttcgagtgagtacatcgactggagcagtcaaccagggaatgagt

SEQ ID NO: 381276 - DNA, 59 bp, Artificial
  Synthetic oligonucleotide
ctcagacgacccgagagagaagaccctggagatgctcatgcagcctgatgtggagctaa

SEQ ID NO: 381277 - DNA, 55 bp, Artificial
  Synthetic oligonucleotide
ctcagacgcatacggttttgatgagagggcacgttacgctgtgaaatccttgtgc

SEQ ID NO: 381278 - DNA, 55 bp, Artificial
  Synthetic oligonucleotide
ctcagactcactccaatcccggctgcgtccaagctggacttgtccggctggttcg

SEQ ID NO: 381279 - DNA, 59 bp, Artificial
  Synthetic oligonucleotide
ctcagactccatttcagatagccgaacaacaaatacagaacttccaagtggctaattgg

SEQ ID NO: 381280 - DNA, 55 bp, Artificial
  Synthetic oligonucleotide
ctcagactcggcatgagaatatcggcgctgcaatcgctgagtgatacgccctcgc

SEQ ID NO: 381281 - DNA, 60 bp, Artificial
  Synthetic oligonucleotide
ctcagacttatttccgacagctgaagaatatacggattcattaatggatccagcgatatt

SEQ ID NO: 381282 - DNA, 52 bp, Artificial
  Synthetic oligonucleotide
ctcagagaaaaacaacagcaccgctacactgtgcttagggcatcatgcagta

SEQ ID NO: 381283 - DNA, 55 bp, Artificial
  Synthetic oligonucleotide
ctcagagaaattatttcctccttttagagagaccaatgtccctatcccttcattg

SEQ ID NO: 381284 - DNA, 57 bp, Artificial
  Synthetic oligonucleotide
ctcagagaataacccgcctaatggaatatccttcgactttccagttgcactatggtt

SEQ ID NO: 381285 - DNA, 55 bp, Artificial
  Synthetic oligonucleotide
ctcagagatcatcttacattttgttgtaccctcctagagaatatgatggcagaca

SEQ ID NO: 381286 - DNA, 55 bp, Artificial
  Synthetic oligonucleotide
ctcagagattatagtggcatttccacactcatatgtcaacttacaaattcatcgg

SEQ ID NO: 381287 - DNA, 55 bp, Artificial
  Synthetic oligonucleotide
ctcagagcaacagtgtctgaatcttcaatggtgttacctgaaggggttggatcct

SEQ ID NO: 381288 - DNA, 52 bp, Artificial
  Synthetic oligonucleotide
ctcagagcagaacaagctagtcaggaagtaaagagttggatgacagacacat

SEQ ID NO: 381289 - DNA, 54 bp, Artificial
  Synthetic oligonucleotide
ctcagagcggaccttcaacgccgtatccaggttgaacttgacactgtcaaagat

SEQ ID NO: 381290 - DNA, 55 bp, Artificial
  Synthetic oligonucleotide
ctcagagctatcaaggagtcatttccaatcaggtgggatgtgataaagatcaaag

SEQ ID NO: 381291 - DNA, 58 bp, Artificial
  Synthetic oligonucleotide
ctcagaggaagtaccattagtgggatcggggatggcaaccgccatagcgaccggacga

SEQ ID NO: 381292 - DNA, 52 bp, Artificial
  Synthetic oligonucleotide
ctcagaggaatgacatgttaagggatgagaaagacgtgcgtctcaaagccga

SEQ ID NO: 381293 - DNA, 55 bp, Artificial
  Synthetic oligonucleotide
ctcagaggctggcgggatcctccatatgctgaacgctggttccccggttcccctt

SEQ ID NO: 381294 - DNA, 55 bp, Artificial
  Synthetic oligonucleotide
ctcagagggctagcgagaggtgtcttgatagggtcctccatttgcttcttaaccc

SEQ ID NO: 381295 - DNA, 60 bp, Artificial
  Synthetic oligonucleotide
ctcagagtatcgtttgtttccagcacgaggtcctatgcaggtttgcaccttatatgcgtt

SEQ ID NO: 381296 - DNA, 51 bp, Artificial
  Synthetic oligonucleotide
ctcagagtctagcgctgtgcacggccatcactcacactaattgagagacat

SEQ ID NO: 381297 - DNA, 60 bp, Artificial
  Synthetic oligonucleotide
ctcagataaagcagctgtttcattcacagccgaggtacacgatgcttctgcttggttcgg

SEQ ID NO: 381298 - DNA, 60 bp, Artificial
  Synthetic oligonucleotide
ctcagataacggagatataagcttggattatggatttccagttatgggcaaaactacatc

SEQ ID NO: 381299 - DNA, 55 bp, Artificial
  Synthetic oligonucleotide
ctcagataattgaacaccaagaaaggctcctggtgcctgatgagtacgctgaagc

SEQ ID NO: 381300 - DNA, 55 bp, Artificial
  Synthetic oligonucleotide
ctcagatagtcgacgctctaaatgccaagcgtaattacagtaatgaagcgcgtct

SEQ ID NO: 381301 - DNA, 60 bp, Artificial
  Synthetic oligonucleotide
ctcagatattaattggttcgaggaaacaagtaagactcaggtgcctgatctttattgcat

SEQ ID NO: 381302 - DNA, 55 bp, Artificial
  Synthetic oligonucleotide
ctcagatcagagtctggtttggtctattcagtggagcttctcaatcagaacggac

SEQ ID NO: 381303 - DNA, 60 bp, Artificial
  Synthetic oligonucleotide
ctcagatcagttgttaatgaggaatcatctaagagacctaatgggggtaccctactgcaa

SEQ ID NO: 381304 - DNA, 60 bp, Artificial
  Synthetic oligonucleotide
ctcagatccagccaagtccatcgtggttaccctggggcagaaacttcagacagtcaatgc

SEQ ID NO: 381305 - DNA, 60 bp, Artificial
  Synthetic oligonucleotide
ctcagatcgcagttgaacgctcagattgagcgggcgaaggctgagatcgtgaggctgacg

SEQ ID NO: 381306 - DNA, 60 bp, Artificial
  Synthetic oligonucleotide
ctcagatctagatgaccgcacagataattatgtgggcccaacgaacgggcccacattgtc

SEQ ID NO: 381307 - DNA, 60 bp, Artificial
  Synthetic oligonucleotide
ctcagatgaaagcggcagccctcgctaacgttaacactagattgtttggtctagatggta

SEQ ID NO: 381308 - DNA, 60 bp, Artificial
  Synthetic oligonucleotide
ctcagatgcgattcgcagacgattctacatggactgtgatatagaggtgacagactccta

SEQ ID NO: 381309 - DNA, 54 bp, Artificial
  Synthetic oligonucleotide
ctcagatggaaggctttcttgcaaacatgagacgactccatatgtccaggcatg

SEQ ID NO: 381310 - DNA, 55 bp, Artificial
  Synthetic oligonucleotide
ctcagatggactaggaaaccttctgaaacacaacaacatgtgaggtcattgtgcg

SEQ ID NO: 381311 - DNA, 60 bp, Artificial
  Synthetic oligonucleotide
ctcagatggtaagactacctggtgcagccagacaagttatcaatacttgatcatacagaa

SEQ ID NO: 381312 - DNA, 56 bp, Artificial
  Synthetic oligonucleotide
ctcagattcagggatggaggtcctgtgagggaaccaggtaaaagaccccagagtcc

SEQ ID NO: 381313 - DNA, 55 bp, Artificial
  Synthetic oligonucleotide
ctcagattgtatagaaaccgaggaattaaattggaactgcactggccctttcttg

SEQ ID NO: 381314 - DNA, 55 bp, Artificial
  Synthetic oligonucleotide
ctcagattgttatcataaagcgagttggattggccatccggtaaagataaagtgt

SEQ ID NO: 381315 - DNA, 60 bp, Artificial
  Synthetic oligonucleotide
ctcagatttgataattgagcgaagagaaggaaccgatatatgctatcccggtaaattcac

SEQ ID NO: 381316 - DNA, 53 bp, Artificial
  Synthetic oligonucleotide
ctcagattttaactaaaggtaggccactaatgggtttattttctaggatggga

SEQ ID NO: 381317 - DNA, 52 bp, Artificial
  Synthetic oligonucleotide
ctcagcaaaagacacgtagttgtgcctagcctaaaaacaaaaccacacggca

SEQ ID NO: 381318 - DNA, 60 bp, Artificial
  Synthetic oligonucleotide
ctcagcaactccacatgtaagtgtcatatctggcacaaccgaattcggtcagtcatctga

SEQ ID NO: 381319 - DNA, 55 bp, Artificial
  Synthetic oligonucleotide
ctcagcaagacattcaagataaacgctcagaccttacgcaactctttgtgtactg

SEQ ID NO: 381320 - DNA, 55 bp, Artificial
  Synthetic oligonucleotide
ctcagcaagtacacgatcgagatgcttacactcgcctcgctttacatatccaccg

SEQ ID NO: 381321 - DNA, 60 bp, Artificial
  Synthetic oligonucleotide
ctcagcacctcctgaactgctccttccggggtaagtctcctctcaggtcgagctcggctg

SEQ ID NO: 381322 - DNA, 60 bp, Artificial
  Synthetic oligonucleotide
ctcagcacctgtgaatgccctacattttgtggggaacagccctggttggaagagatggct

SEQ ID NO: 381323 - DNA, 55 bp, Artificial
  Synthetic oligonucleotide
ctcagcacgatgcgcgggcctgagcgcatacacaaaatcgtcccttaggagggcg

SEQ ID NO: 381324 - DNA, 56 bp, Artificial
  Synthetic oligonucleotide
ctcagcagaatatctattgaggtacttagttcattataattgaagggccgatttgg

SEQ ID NO: 381325 - DNA, 55 bp, Artificial
  Synthetic oligonucleotide
ctcagcagatggccagttcaatcattaacacttcttttgaagccgcagttgttgc

SEQ ID NO: 381326 - DNA, 55 bp, Artificial
  Synthetic oligonucleotide
ctcagcagatggtgagctctattattaacacttcttttgaagccgcagttgttgc

SEQ ID NO: 381327 - DNA, 59 bp, Artificial
  Synthetic oligonucleotide
ctcagcagcatagagcacagtatattagttccatgaaattgcctaaaggtgtagagtgg

SEQ ID NO: 381328 - DNA, 60 bp, Artificial
  Synthetic oligonucleotide
ctcagcagcgtaaaacacttcgagaaagtaaggattctgcccaaagatggatggacacaa

SEQ ID NO: 381329 - DNA, 52 bp, Artificial
  Synthetic oligonucleotide
ctcagcagctctgtctcgtacaaaacgattctgaaggagtcaaacgtaatgt

SEQ ID NO: 381330 - DNA, 54 bp, Artificial
  Synthetic oligonucleotide
ctcagcataaccccttctttgaaagaccggttttacataagacacgtgttcaaa

SEQ ID NO: 381331 - DNA, 55 bp, Artificial
  Synthetic oligonucleotide
ctcagcatatccaccgcccaggagggcgttctgactgtggtagccttgacagtat

SEQ ID NO: 381332 - DNA, 53 bp, Artificial
  Synthetic oligonucleotide
ctcagcatcattaactggtggtcaatatgccagcaaggaacaagcagttatta

SEQ ID NO: 381333 - DNA, 56 bp, Artificial
  Synthetic oligonucleotide
ctcagcatgtcgggttggatacacaaacgggtgcagcgcgccccggacggggggga

SEQ ID NO: 381334 - DNA, 52 bp, Artificial
  Synthetic oligonucleotide
ctcagccaccagagggagaggtccagggtcacccacaaccaccaccagtgac

SEQ ID NO: 381335 - DNA, 55 bp, Artificial
  Synthetic oligonucleotide
ctcagccacctcccgagccccagcgaattcacaactggtgcactctggctccaag

SEQ ID NO: 381336 - DNA, 60 bp, Artificial
  Synthetic oligonucleotide
ctcagccatatagtcaatcttatcgacgactggggaccctgtaccgaacatggagaacat

SEQ ID NO: 381337 - DNA, 55 bp, Artificial
  Synthetic oligonucleotide
ctcagcccaagctgtgctgactctagctaatgtggaaaaggacaaacacgatctt

SEQ ID NO: 381338 - DNA, 55 bp, Artificial
  Synthetic oligonucleotide
ctcagcctttgatggagagttcgagagcaaataccttcgaactgatgagcatact

SEQ ID NO: 381339 - DNA, 60 bp, Artificial
  Synthetic oligonucleotide
ctcagcgattaccgaacttatacagcgtcattatgacgcaggcagatcatgtgtacaact

SEQ ID NO: 381340 - DNA, 60 bp, Artificial
  Synthetic oligonucleotide
ctcagcgcacataccggaagatgggtagcaccgcattactcggtactacctcaatgatta

SEQ ID NO: 381341 - DNA, 60 bp, Artificial
  Synthetic oligonucleotide
ctcagcgcctggagaggaaggacgcgtaaacactgagcgtcacactaccaacgacgtgag

SEQ ID NO: 381342 - DNA, 60 bp, Artificial
  Synthetic oligonucleotide
ctcagcgcgtgcgacacggggccggagtgcatcgaatcgcacagcgaaatgcacatgatg

SEQ ID NO: 381343 - DNA, 51 bp, Artificial
  Synthetic oligonucleotide
ctcagcggaacttgaaggcatgaaaaccggctacggtgctatgactctttt

SEQ ID NO: 381344 - DNA, 59 bp, Artificial
  Synthetic oligonucleotide
ctcagcgtcccaggcttcagacaccgagtccagaggagccagtgtacctccccaatact

SEQ ID NO: 381345 - DNA, 60 bp, Artificial
  Synthetic oligonucleotide
ctcagcgtcccgatgttacgcacacctggacagctaaggtctctgacggcacgaactacg

SEQ ID NO: 381346 - DNA, 55 bp, Artificial
  Synthetic oligonucleotide
ctcagctaccccatcgggagctgggcggtgtagagaagtctccagagcagttcgc

SEQ ID NO: 381347 - DNA, 59 bp, Artificial
  Synthetic oligonucleotide
ctcagctagcggctgaacaaatcccggaaaaatgtactcccgctcaaccacagacatct

SEQ ID NO: 381348 - DNA, 60 bp, Artificial
  Synthetic oligonucleotide
ctcagctaggcgtaaagctcgattacgatatttgccactcatagacccgcggtctttaga

SEQ ID NO: 381349 - DNA, 60 bp, Artificial
  Synthetic oligonucleotide
ctcagctattagaaatagaaattggatgactgattctaaaacggttgctaaattagatga

SEQ ID NO: 381350 - DNA, 55 bp, Artificial
  Synthetic oligonucleotide
ctcagctcatgaggcggctacaccagtggataagctcggattgcactactccgtg

SEQ ID NO: 381351 - DNA, 55 bp, Artificial
  Synthetic oligonucleotide
ctcagctcgatcgaagtttgggtacggagcaaaggacgtccggagtcatactagc

SEQ ID NO: 381352 - DNA, 55 bp, Artificial
  Synthetic oligonucleotide
ctcagctctcaattgtcttaatcccgggggaactttagtagtgaaggcgtacgga

SEQ ID NO: 381353 - DNA, 60 bp, Artificial
  Synthetic oligonucleotide
ctcagctgagggtaggagtgccctgcagccttagccgcgcgcacttcctcgtgaagctcc

SEQ ID NO: 381354 - DNA, 60 bp, Artificial
  Synthetic oligonucleotide
ctcagctgatcacgctctagcttacaaagcccacaccgcctcagttcaggcgttcttgaa

SEQ ID NO: 381355 - DNA, 60 bp, Artificial
  Synthetic oligonucleotide
ctcagctggagcaaagggcagagattctccgctcgatggggtttgctaatgccagacccg

SEQ ID NO: 381356 - DNA, 55 bp, Artificial
  Synthetic oligonucleotide
ctcagctggcaaaactaggtgtattgaggcatgtgaggtagactattgtatagtc

SEQ ID NO: 381357 - DNA, 60 bp, Artificial
  Synthetic oligonucleotide
ctcagctgggtacatggttggacagtcagttttcgtgcaaacgcctggtgttacatctta

SEQ ID NO: 381358 - DNA, 59 bp, Artificial
  Synthetic oligonucleotide
ctcagctgtgttaaatgttgttcctagaaacggacaagtagaatgcagttcttcaaaga

SEQ ID NO: 381359 - DNA, 59 bp, Artificial
  Synthetic oligonucleotide
ctcagcttgaggtggaaaaatacgatctaaattggaattcatattatggaattgcaaaa

SEQ ID NO: 381360 - DNA, 53 bp, Artificial
  Synthetic oligonucleotide
ctcagcttgcacgaatccaatatcgtcggtcggtatctgcggtgccaccatgc

SEQ ID NO: 381361 - DNA, 58 bp, Artificial
  Synthetic oligonucleotide
ctcagctttagagtttggtgatacgagaattgaccctatcgggttattgcgtgagttc

SEQ ID NO: 381362 - DNA, 55 bp, Artificial
  Synthetic oligonucleotide
ctcagctttcgcggtgctcaagtccacgaaaccaattcggaacattcggtgcgta

SEQ ID NO: 381363 - DNA, 60 bp, Artificial
  Synthetic oligonucleotide
ctcagcttttaacgcaaatccacaagtattagatgcagtagttaatatcataactggaag

SEQ ID NO: 381364 - DNA, 55 bp, Artificial
  Synthetic oligonucleotide
ctcaggaagcaaataccgaacctcaatgacatgccatactatgagatgggtggcc

SEQ ID NO: 381365 - DNA, 60 bp, Artificial
  Synthetic oligonucleotide
ctcaggaaggcaaccaggagattgatccaactaatagtaagtgggagggatgagcaatca

SEQ ID NO: 381366 - DNA, 55 bp, Artificial
  Synthetic oligonucleotide
ctcaggaagtgactcagatggacccctttcaaaaccacagacagtaaaagtgtgg

SEQ ID NO: 381367 - DNA, 60 bp, Artificial
  Synthetic oligonucleotide
ctcaggaatcttgcgcagctattgattgaccagaaagtcaaggagatttctaaccaagaa

SEQ ID NO: 381368 - DNA, 53 bp, Artificial
  Synthetic oligonucleotide
ctcaggaattcacggtgcccaagttctcagctacataaactggaatggatacc

SEQ ID NO: 381369 - DNA, 51 bp, Artificial
  Synthetic oligonucleotide
ctcaggacacacaggaggagcagcacaaatagataacctctgggaaaacgg

SEQ ID NO: 381370 - DNA, 50 bp, Artificial
  Synthetic oligonucleotide
ctcaggacacatgtgaatttcggttccagacgggtctgacatccacgacc

SEQ ID NO: 381371 - DNA, 60 bp, Artificial
  Synthetic oligonucleotide
ctcaggacatttactgtcgttaaccattgccgcgcactttgtggcatctccaatagttat

SEQ ID NO: 381372 - DNA, 58 bp, Artificial
  Synthetic oligonucleotide
ctcaggacccaggagtcagaatgcgtttgtatcaatggaacttgtacagtagtaatga

SEQ ID NO: 381373 - DNA, 55 bp, Artificial
  Synthetic oligonucleotide
ctcaggactgcataacttcgatgaaactcgttataccaacgtttacggttacatt

SEQ ID NO: 381374 - DNA, 55 bp, Artificial
  Synthetic oligonucleotide
ctcaggagaaagccatggaagaatcttgaagactgatttgagcagtggcgactgc

SEQ ID NO: 381375 - DNA, 55 bp, Artificial
  Synthetic oligonucleotide
ctcaggagatcacctgggatgatgacacggagtttgtcggactgcagataagggt

SEQ ID NO: 381376 - DNA, 60 bp, Artificial
  Synthetic oligonucleotide
ctcaggagcattcatagactactgggcaaacaaagagtgcttcaatccttgtttctatgt

SEQ ID NO: 381377 - DNA, 59 bp, Artificial
  Synthetic oligonucleotide
ctcaggagctgtgaatcagtaacgaaagtgagtggggccagacttcgccataaggcctt

SEQ ID NO: 381378 - DNA, 60 bp, Artificial
  Synthetic oligonucleotide
ctcaggagtaggtaaccatgtctatgtagtgatgctacaaaaagacgcagaggacaatcc

SEQ ID NO: 381379 - DNA, 60 bp, Artificial
  Synthetic oligonucleotide
ctcaggatagtgagctcccgcagagggataagctatctccctgcgacgtagtggtagaac

SEQ ID NO: 381380 - DNA, 53 bp, Artificial
  Synthetic oligonucleotide
ctcaggatgcatggtaatcaggttgatattaaggacattgtcctgcaagatgt

SEQ ID NO: 381381 - DNA, 59 bp, Artificial
  Synthetic oligonucleotide
ctcaggatgcgaggaatgaataagtttggatctagtaacattactgtgatgacaagcgg

SEQ ID NO: 381382 - DNA, 55 bp, Artificial
  Synthetic oligonucleotide
ctcaggcaaaccaagtattatcatatggtgatgtcacgcgttatcttgattcaaa

SEQ ID NO: 381383 - DNA, 58 bp, Artificial
  Synthetic oligonucleotide
ctcaggcaagccattctctgctggggggacctaatgaatctagctaccggggtgggta

SEQ ID NO: 381384 - DNA, 55 bp, Artificial
  Synthetic oligonucleotide
ctcaggcaccaagatcgcaggaactctattgctggctctgctcatgatgatagtg

SEQ ID NO: 381385 - DNA, 59 bp, Artificial
  Synthetic oligonucleotide
ctcaggcatcaactcaaaacagcaagttaagcagaagattaagccgggaaaaatgttca

SEQ ID NO: 381386 - DNA, 59 bp, Artificial
  Synthetic oligonucleotide
ctcaggcatgtggttattaactgttgttccgaacgatatgttcataagagaatctttag

SEQ ID NO: 381387 - DNA, 55 bp, Artificial
  Synthetic oligonucleotide
ctcaggcattatctgactatttgatgcagaatccggagttaaagtcgcgtgtgct

SEQ ID NO: 381388 - DNA, 55 bp, Artificial
  Synthetic oligonucleotide
ctcaggccatcaaatcgagggaacatgaaatcccaaaaggattgtttggaatgct

SEQ ID NO: 381389 - DNA, 60 bp, Artificial
  Synthetic oligonucleotide
ctcaggcccaattaaagaccatctggaggttcgggcagaatatctgcgatgccattcaac

SEQ ID NO: 381390 - DNA, 55 bp, Artificial
  Synthetic oligonucleotide
ctcaggcgaacccaatcaatgggaatacaactggaccaaagaatcatagtgctct

SEQ ID NO: 381391 - DNA, 55 bp, Artificial
  Synthetic oligonucleotide
ctcaggcgcaccatgtcattcccgtctctgcaattccccacgtcatccacccaca

SEQ ID NO: 381392 - DNA, 59 bp, Artificial
  Synthetic oligonucleotide
ctcaggcgggcgcatgccgtcccttcgtggaggttcctggtctccgcgtgattacacgc

SEQ ID NO: 381393 - DNA, 59 bp, Artificial
  Synthetic oligonucleotide
ctcaggcgtcagcgcgggacggcatctgttcccggcgaacttctacgactcgaccgatc

SEQ ID NO: 381394 - DNA, 55 bp, Artificial
  Synthetic oligonucleotide
ctcaggctgacactatgacaattttcaagctccccatattcctaacgcgcgatct

SEQ ID NO: 381395 - DNA, 60 bp, Artificial
  Synthetic oligonucleotide
ctcaggctgtgaggaaacacgcaatagatgctggttgtaacatcattgaccacattgact

SEQ ID NO: 381396 - DNA, 58 bp, Artificial
  Synthetic oligonucleotide
ctcaggcttatacccaaaaactggtgctcctacttggttctatggatggtcaaagcaa

SEQ ID NO: 381397 - DNA, 60 bp, Artificial
  Synthetic oligonucleotide
ctcaggcttggccacgtctgtatccacgttgacagactcattatctgacgccgcatcagc

SEQ ID NO: 381398 - DNA, 57 bp, Artificial
  Synthetic oligonucleotide
ctcagggatcgatacgaggaatgcttcggggtgggcttagaatcctacgtccaccag

SEQ ID NO: 381399 - DNA, 56 bp, Artificial
  Synthetic oligonucleotide
ctcagggattcttccctgattggcaaaactacacaccgggaccaggacctagatac

SEQ ID NO: 381400 - DNA, 58 bp, Artificial
  Synthetic oligonucleotide
ctcagggattgtatcgaaaaatttaagatcttgcagtcttcgagggtgatcgcagaga

SEQ ID NO: 381401 - DNA, 55 bp, Artificial
  Synthetic oligonucleotide
ctcagggctgatacaataagctcgcaaatagagcttgcagtcttgctttccaacg

SEQ ID NO: 381402 - DNA, 59 bp, Artificial
  Synthetic oligonucleotide
ctcaggggaaggcccgactttcgacgctaacactgagtgcgctatcgcgtaccaccaca

SEQ ID NO: 381403 - DNA, 60 bp, Artificial
  Synthetic oligonucleotide
ctcaggggacatgctgggagcagatgtacactccgggaggagaagtgagaaatgatgatg

SEQ ID NO: 381404 - DNA, 60 bp, Artificial
  Synthetic oligonucleotide
ctcaggggagccaaagcactaacagaagtaataccactaacagaagaagcagagctagaa

SEQ ID NO: 381405 - DNA, 60 bp, Artificial
  Synthetic oligonucleotide
ctcaggggagccaaagcactaacagatataataacattaactgaggaagcagaattagaa

SEQ ID NO: 381406 - DNA, 55 bp, Artificial
  Synthetic oligonucleotide
ctcaggggatttgctacctcccaagtaaagacgccattctctagctgagctgcag

SEQ ID NO: 381407 - DNA, 55 bp, Artificial
  Synthetic oligonucleotide
ctcaggggccgacatgcaaatgggactatacatgataggagtccattcagagccc

SEQ ID NO: 381408 - DNA, 56 bp, Artificial
  Synthetic oligonucleotide
ctcaggggcctacgtgattacaatcctattgcacaaacaatatgcatgcttacagt

SEQ ID NO: 381409 - DNA, 55 bp, Artificial
  Synthetic oligonucleotide
ctcaggggctcttatattcaattttggtggcaattcatgactcaggatataatga

SEQ ID NO: 381410 - DNA, 56 bp, Artificial
  Synthetic oligonucleotide
ctcagggtactgtgggcgtaatcgcaataaaggttggtgtgagttcaggaatacta

SEQ ID NO: 381411 - DNA, 60 bp, Artificial
  Synthetic oligonucleotide
ctcagggtatgacgccagcctcagtccagtgtggttcagggcgctagaaatagtcctgcg

SEQ ID NO: 381412 - DNA, 60 bp, Artificial
  Synthetic oligonucleotide
ctcagggtatgagaccttcaaggtcattggtggttggaccacagctaacgccaaatcaca

SEQ ID NO: 381413 - DNA, 60 bp, Artificial
  Synthetic oligonucleotide
ctcagggtgaatttcacttgctaattcaggaacatattttgaatggtctaggatgtccag

SEQ ID NO: 381414 - DNA, 57 bp, Artificial
  Synthetic oligonucleotide
ctcagggtgacgatgctggcactcaaatgctcactttcaagcctttccaacctttcg

SEQ ID NO: 381415 - DNA, 55 bp, Artificial
  Synthetic oligonucleotide
ctcagggttgcaactaatcaacgtaacaatgcattcatctaagatgcccattact

SEQ ID NO: 381416 - DNA, 55 bp, Artificial
  Synthetic oligonucleotide
ctcaggtaggtcgtagtaaaactacagtgagcacgtagcatacgtagcaggggcg

SEQ ID NO: 381417 - DNA, 60 bp, Artificial
  Synthetic oligonucleotide
ctcaggtagtgagcatcggtggtcgtaacttagctgatgtgtctgtcgttccactcacta

SEQ ID NO: 381418 - DNA, 55 bp, Artificial
  Synthetic oligonucleotide
ctcaggtatcatcacgatagcgtagcccaggacacacagcggctcgttacagcag

SEQ ID NO: 381419 - DNA, 60 bp, Artificial
  Synthetic oligonucleotide
ctcaggtcttagctcaaccagctttgcaagcccaggcagatcgggtgtacgactgtgatg

SEQ ID NO: 381420 - DNA, 59 bp, Artificial
  Synthetic oligonucleotide
ctcaggtgatttaattgtaaattggctcgtcacctgttcagctctaactaacgcaagat

SEQ ID NO: 381421 - DNA, 55 bp, Artificial
  Synthetic oligonucleotide
ctcaggtgtggactggttttatgaaccgtcaatgcagagggtggtctgcggttgg

SEQ ID NO: 381422 - DNA, 58 bp, Artificial
  Synthetic oligonucleotide
ctcaggttaaagcaaggaatttggtcagtcctgtaatgagtgtgattgggtttgtatc

SEQ ID NO: 381423 - DNA, 55 bp, Artificial
  Synthetic oligonucleotide
ctcaggttatcatcattactggatcgactctctcattagacttctttacactaca

SEQ ID NO: 381424 - DNA, 56 bp, Artificial
  Synthetic oligonucleotide
ctcaggttatcccttctcaacaaattagaagggatgatccaaggaagacgaggaaa

SEQ ID NO: 381425 - DNA, 54 bp, Artificial
  Synthetic oligonucleotide
ctcaggttgaggaagtacgggtttatgagggagtggaacccctccctggtgatc

SEQ ID NO: 381426 - DNA, 57 bp, Artificial
  Synthetic oligonucleotide
ctcaggttgcgacaacccggctctcttcgaaatcctcccaaatctcagaccctttga

SEQ ID NO: 381427 - DNA, 50 bp, Artificial
  Synthetic oligonucleotide
ctcaggttgcgattgaaccgcacttggactgttatgatgtcgtggttcct

SEQ ID NO: 381428 - DNA, 54 bp, Artificial
  Synthetic oligonucleotide
ctcaggttgggaccgcaggtcacggcggcagttatatggatgtcatccaccagt

SEQ ID NO: 381429 - DNA, 55 bp, Artificial
  Synthetic oligonucleotide
ctcaggtttaagggaactgttaagattgaacgagtacatgctgatgttgccatgg

SEQ ID NO: 381430 - DNA, 58 bp, Artificial
  Synthetic oligonucleotide
ctcagtaagagtcgccagacggcaccgaaggcaggagaagacgaggggccggacctgc

SEQ ID NO: 381431 - DNA, 55 bp, Artificial
  Synthetic oligonucleotide
ctcagtaagtatctcacaacccagagtccacgaggatggttcatggagtgcttgg

SEQ ID NO: 381432 - DNA, 60 bp, Artificial
  Synthetic oligonucleotide
ctcagtaataccaacatctggggacgtcgtggtttgtgccacggatgctcttatgacagg

SEQ ID NO: 381433 - DNA, 60 bp, Artificial
  Synthetic oligonucleotide
ctcagtacaagtacaggaatgttcctataactaagcgagcttgggcccagggagtgatgc

SEQ ID NO: 381434 - DNA, 50 bp, Artificial
  Synthetic oligonucleotide
ctcagtaccacgggcacattcccctggggtggaaaatctccagcgggcac

SEQ ID NO: 381435 - DNA, 55 bp, Artificial
  Synthetic oligonucleotide
ctcagtacgacagccccggcacctacaactattcaatcccgtactggtgccggta

SEQ ID NO: 381436 - DNA, 60 bp, Artificial
  Synthetic oligonucleotide
ctcagtacggattcgacctggctcactatggagtccggcgacaatccactcgtgacgtac

SEQ ID NO: 381437 - DNA, 60 bp, Artificial
  Synthetic oligonucleotide
ctcagtagatatgatcagagattatattggagccagaatgcgaaagattgaagccagggc

SEQ ID NO: 381438 - DNA, 53 bp, Artificial
  Synthetic oligonucleotide
ctcagtaggcctgttaggattatgcgcgagtcaatttcattagatgaacggac

SEQ ID NO: 381439 - DNA, 60 bp, Artificial
  Synthetic oligonucleotide
ctcagtagtgcaggcacctcgggtgctgcaaaattgtatggttgtgtcaaataggtactc

SEQ ID NO: 381440 - DNA, 60 bp, Artificial
  Synthetic oligonucleotide
ctcagtatcagctgagtgccacagaccacccaggtgtaagttccctccagctctcccaat

SEQ ID NO: 381441 - DNA, 56 bp, Artificial
  Synthetic oligonucleotide
ctcagtattttcagtagaggaaatgttgttgtcggctgtaccgtcaagttttaatg

SEQ ID NO: 381442 - DNA, 60 bp, Artificial
  Synthetic oligonucleotide
ctcagtcactacaatggcatccataacgattggagcattctccgtgcctctggccattgg

SEQ ID NO: 381443 - DNA, 59 bp, Artificial
  Synthetic oligonucleotide
ctcagtcactgtgccccatcctaacatcgaggaggttgctctgtccaccagcggagaga

SEQ ID NO: 381444 - DNA, 60 bp, Artificial
  Synthetic oligonucleotide
ctcagtcagtgattgcaaaaaggttgaaaagttgatgctgtcaggactaggtagggaaca

SEQ ID NO: 381445 - DNA, 55 bp, Artificial
  Synthetic oligonucleotide
ctcagtcattgattactcaatgtttacgcgaacagcattagttggatttgcgtca

SEQ ID NO: 381446 - DNA, 60 bp, Artificial
  Synthetic oligonucleotide
ctcagtccgggctccaagcagaatatccagctgatcaactccaacggcagttggcacatc

SEQ ID NO: 381447 - DNA, 55 bp, Artificial
  Synthetic oligonucleotide
ctcagtcctgaatcccactcaattcatgactcagtgtctcctcctatctgttatg

SEQ ID NO: 381448 - DNA, 60 bp, Artificial
  Synthetic oligonucleotide
ctcagtcgaaataaacaactacctgttactgtccggacaatctcagatgcttcattggta

SEQ ID NO: 381449 - DNA, 55 bp, Artificial
  Synthetic oligonucleotide
ctcagtcgcatactaactttgagagtcgtgatctgtttactgcaacgtatgcacg

SEQ ID NO: 381450 - DNA, 53 bp, Artificial
  Synthetic oligonucleotide
ctcagtctacgtacgccgaagacctttcgtattacgaggcatccgagcgggac

SEQ ID NO: 381451 - DNA, 54 bp, Artificial
  Synthetic oligonucleotide
ctcagtctattcttaagcaaaccacccccgtgttgagagaccccgaagtttgga

SEQ ID NO: 381452 - DNA, 55 bp, Artificial
  Synthetic oligonucleotide
ctcagtctcccgcactcgagaccctgtactgcagtctcatagtgcctccagagtc

SEQ ID NO: 381453 - DNA, 55 bp, Artificial
  Synthetic oligonucleotide
ctcagtgacggtgagacaggacttagagaggcagttaggagaattgagagaagaa

SEQ ID NO: 381454 - DNA, 55 bp, Artificial
  Synthetic oligonucleotide
ctcagtgagggagtacagaagacttggcattcaaatagggtgtgatgagcgagtg

SEQ ID NO: 381455 - DNA, 55 bp, Artificial
  Synthetic oligonucleotide
ctcagtgattacatgcgagcgcaacatgattatgtgagtccaagttcatctagag

SEQ ID NO: 381456 - DNA, 54 bp, Artificial
  Synthetic oligonucleotide
ctcagtgcaccgcaatgaagaaattctcaatgcgtaactgcatcccgcgcactt

SEQ ID NO: 381457 - DNA, 60 bp, Artificial
  Synthetic oligonucleotide
ctcagtgcaggtgcttaaattgttacatactcatatggagaaccagcagaccaattggat

SEQ ID NO: 381458 - DNA, 60 bp, Artificial
  Synthetic oligonucleotide
ctcagtgcatccggagggtgcaactactgtggtcttcgagcactagtgggtgagggtcgc

SEQ ID NO: 381459 - DNA, 60 bp, Artificial
  Synthetic oligonucleotide
ctcagtgccaatggattcaatgacacgtcacaataatgtgtcattaatggttattcccat

SEQ ID NO: 381460 - DNA, 55 bp, Artificial
  Synthetic oligonucleotide
ctcagtgccccaagattggagggcacggtagtaagaagtgcactggggacgcagc

SEQ ID NO: 381461 - DNA, 55 bp, Artificial
  Synthetic oligonucleotide
ctcagtgcctaaaactgctattgagcaaaacactttcctagtccagttcagagga

SEQ ID NO: 381462 - DNA, 55 bp, Artificial
  Synthetic oligonucleotide
ctcagtgctgtacgagccggtggtagttcgcgaaagcgtggcaccgcaaggaacg

SEQ ID NO: 381463 - DNA, 55 bp, Artificial
  Synthetic oligonucleotide
ctcagtgctttcattcttgaattaacttcggaggttactttctccgtgtggtttg

SEQ ID NO: 381464 - DNA, 57 bp, Artificial
  Synthetic oligonucleotide
ctcagtggaaataatgaccagaggggagggtttcatgatgaaggaacatgggttagt

SEQ ID NO: 381465 - DNA, 60 bp, Artificial
  Synthetic oligonucleotide
ctcagtggagatagcagcaagttatcactatcagtcccagaggaaaagaagcattcagtt

SEQ ID NO: 381466 - DNA, 60 bp, Artificial
  Synthetic oligonucleotide
ctcagtggcaccccactaccgtccgcaactgctccatccgaggccttgtgcctctggtgc

SEQ ID NO: 381467 - DNA, 56 bp, Artificial
  Synthetic oligonucleotide
ctcagtggcatacgtataatgacttgtacattgttcacgatcaagagatctaccct

SEQ ID NO: 381468 - DNA, 60 bp, Artificial
  Synthetic oligonucleotide
ctcagtggtcggatctcctcaactaccctagatgggcaaacagacgtcgtgagctgcaat

SEQ ID NO: 381469 - DNA, 55 bp, Artificial
  Synthetic oligonucleotide
ctcagtgtactcaaatgctgcgtgacaccttgcgttcagattatgacgtctgtac

SEQ ID NO: 381470 - DNA, 55 bp, Artificial
  Synthetic oligonucleotide
ctcagtgtcatcatttgaaaggtttgagatattccctaaggcaagttcatggccc

SEQ ID NO: 381471 - DNA, 58 bp, Artificial
  Synthetic oligonucleotide
ctcagtgtcatgggtggagtgacgttgccactatttgtgttccaatcagatcacctca

SEQ ID NO: 381472 - DNA, 50 bp, Artificial
  Synthetic oligonucleotide
ctcagtgtgattcaacaatccgacaactagttctcgtaacgagagtctac

SEQ ID NO: 381473 - DNA, 60 bp, Artificial
  Synthetic oligonucleotide
ctcagtgttagaatcgggagaatgtgtggtgaatggcactgattgacactgtgcctctaa

SEQ ID NO: 381474 - DNA, 60 bp, Artificial
  Synthetic oligonucleotide
ctcagttaagaatggcacatatgactacccaaagtaccaggaagagagcagacttaatag

SEQ ID NO: 381475 - DNA, 60 bp, Artificial
  Synthetic oligonucleotide
ctcagttacagacctacaaggaacgatggtattgttgtgccaagattacttgatataaca

SEQ ID NO: 381476 - DNA, 57 bp, Artificial
  Synthetic oligonucleotide
ctcagttagaacacctcccgacggctagagagttcgcgagcggagaggtgacaatct

SEQ ID NO: 381477 - DNA, 55 bp, Artificial
  Synthetic oligonucleotide
ctcagttagatgaggcggtgcgggaagtccataagactgcccctccgggttcgtt

SEQ ID NO: 381478 - DNA, 56 bp, Artificial
  Synthetic oligonucleotide
ctcagttatgttaattcgcgtactaacaattatatgagtaataattttccctgtgt

SEQ ID NO: 381479 - DNA, 60 bp, Artificial
  Synthetic oligonucleotide
ctcagttattcaactggtgcacttgccagttgcatgggtctcatatacaaccggatggga

SEQ ID NO: 381480 - DNA, 55 bp, Artificial
  Synthetic oligonucleotide
ctcagttcaggacctatcatcaattaccacgtctggataggagattgtatctgtc

SEQ ID NO: 381481 - DNA, 55 bp, Artificial
  Synthetic oligonucleotide
ctcagttcgccgtgggatttgtaaggagtgggacctcggacaatcatctgagtgc

SEQ ID NO: 381482 - DNA, 60 bp, Artificial
  Synthetic oligonucleotide
ctcagttctaactttcgatgaggcgcatgctcaccagtgtactgttagagacctggtgaa

SEQ ID NO: 381483 - DNA, 58 bp, Artificial
  Synthetic oligonucleotide
ctcagttctcatatattctttctaagaaagaggagactgttggaccaaacgcccgagc

SEQ ID NO: 381484 - DNA, 52 bp, Artificial
  Synthetic oligonucleotide
ctcagttgataatgacttcgttattgaacttgaccaaggaaagattcgcttt

SEQ ID NO: 381485 - DNA, 60 bp, Artificial
  Synthetic oligonucleotide
ctcagttgatgggtcagaatttgaccttattaactgtcatagtccgaatgaactctatga

SEQ ID NO: 381486 - DNA, 60 bp, Artificial
  Synthetic oligonucleotide
ctcagttgcgtcaagaacaaccgtgcgggaaatcctagacatgctacaagccaagcgtca

SEQ ID NO: 381487 - DNA, 52 bp, Artificial
  Synthetic oligonucleotide
ctcagttgggggcgtagggtcgccgacatgacacaaggggttgtgaccgggg

SEQ ID NO: 381488 - DNA, 60 bp, Artificial
  Synthetic oligonucleotide
ctcagtttatactagcatgtatgcagtatgtacacttgaactatatggacagggcagata

SEQ ID NO: 381489 - DNA, 55 bp, Artificial
  Synthetic oligonucleotide
ctcagtttcccagtaactttgatcagttcgatagggtccacacaagttaagctca

SEQ ID NO: 381490 - DNA, 55 bp, Artificial
  Synthetic oligonucleotide
ctcataaacaggaaatgactaaaatacccctgtccctgtgtccggaaggcgcgtg

SEQ ID NO: 381491 - DNA, 55 bp, Artificial
  Synthetic oligonucleotide
ctcataaaggcatcatgtgtgaaggcatgtacatacctaaactggagcctgaaag

SEQ ID NO: 381492 - DNA, 55 bp, Artificial
  Synthetic oligonucleotide
ctcataaatacatatgagagtgcaacagctagtgcttggaaagggctggaggaga

SEQ ID NO: 381493 - DNA, 60 bp, Artificial
  Synthetic oligonucleotide
ctcataacaatgtgtattccattagctcgtaaatttactcaatctatctattcagcccaa

SEQ ID NO: 381494 - DNA, 56 bp, Artificial
  Synthetic oligonucleotide
ctcataacccacacaaagacggcttatacatttacgaattttataactgacgaaca

SEQ ID NO: 381495 - DNA, 54 bp, Artificial
  Synthetic oligonucleotide
ctcataacgaggcacctcatgaaggacataaattgtcgactcgtcaataacggg

SEQ ID NO: 381496 - DNA, 55 bp, Artificial
  Synthetic oligonucleotide
ctcataagctggacagcttcggaggttgtagatgtggcaaatatcccagattgag

SEQ ID NO: 381497 - DNA, 53 bp, Artificial
  Synthetic oligonucleotide
ctcataagtatgacgctcagcgatgggtcagtagtacaggctgcaacagcgga

SEQ ID NO: 381498 - DNA, 60 bp, Artificial
  Synthetic oligonucleotide
ctcataagtcatgcaaatgggcacctgatctcattaagtatagacctgtgacagattatg

SEQ ID NO: 381499 - DNA, 60 bp, Artificial
  Synthetic oligonucleotide
ctcataagtcctgcctgcctgcttgtgtgtatggacttgctgtggccagcggatacgact

SEQ ID NO: 381500 - DNA, 60 bp, Artificial
  Synthetic oligonucleotide
ctcataatcggtcctaatgccgatccagacttgacattcagagcattcaatgcaggacta

SEQ ID NO: 381501 - DNA, 55 bp, Artificial
  Synthetic oligonucleotide
ctcataattggtgttgcctaaaatacccctatttctgtgtctggaaggcgcgtgg

SEQ ID NO: 381502 - DNA, 60 bp, Artificial
  Synthetic oligonucleotide
ctcatacaagcaaatacttgtgttcaaagatcctaactgacacaagtcggcctaatgacc

SEQ ID NO: 381503 - DNA, 59 bp, Artificial
  Synthetic oligonucleotide
ctcatacacataaacagaagtcaagtgagtaaacttgctagtatgttccttttgaacta

SEQ ID NO: 381504 - DNA, 55 bp, Artificial
  Synthetic oligonucleotide
ctcatacatgctgtgtacatttgttagcgatcagggacgagtaggaggtaatgct

SEQ ID NO: 381505 - DNA, 60 bp, Artificial
  Synthetic oligonucleotide
ctcataccagtaaaagctcaggagacagtggatacactctgtgcatcattccaggtcgac

SEQ ID NO: 381506 - DNA, 58 bp, Artificial
  Synthetic oligonucleotide
ctcataccccctgttttgtggctactacctctccccagctggttgcatacgcaatcca

SEQ ID NO: 381507 - DNA, 58 bp, Artificial
  Synthetic oligonucleotide
ctcataccctgacctcacaaccaatgatatggtttcccgcctcacgaatctaatcaca

SEQ ID NO: 381508 - DNA, 55 bp, Artificial
  Synthetic oligonucleotide
ctcatacgccgcagacatacacacactcaggccttgcagcctcatgtcgtttgat

SEQ ID NO: 381509 - DNA, 60 bp, Artificial
  Synthetic oligonucleotide
ctcatacgcgccaatatcacttgagaaaagacgcgcgcaaatatcagctttgctgactat

SEQ ID NO: 381510 - DNA, 60 bp, Artificial
  Synthetic oligonucleotide
ctcatacggctaaagcctacgctgcacgggccgacacccctgctgtataggctaggagcc

SEQ ID NO: 381511 - DNA, 58 bp, Artificial
  Synthetic oligonucleotide
ctcatacggctcaaacccacgctgcatgggccaacacccttgctgtataggctaggag

SEQ ID NO: 381512 - DNA, 55 bp, Artificial
  Synthetic oligonucleotide
ctcatacggctgaagcccgtactaacgggccctacccctctgttgtacagactgg

SEQ ID NO: 381513 - DNA, 59 bp, Artificial
  Synthetic oligonucleotide
ctcatactagaacttcaatgttagctgacagggggggttacgtgcctgtgtataagcaa

SEQ ID NO: 381514 - DNA, 50 bp, Artificial
  Synthetic oligonucleotide
ctcatactcacaccccggcttctctcggtgcagcacccgcgactcacaac

SEQ ID NO: 381515 - DNA, 55 bp, Artificial
  Synthetic oligonucleotide
ctcatactcacagtaggggtaggcatcttcctgctgcctgctcgataggcagctt

SEQ ID NO: 381516 - DNA, 60 bp, Artificial
  Synthetic oligonucleotide
ctcatactgaataagaactttgtgctgatgatcaaagatacacttctagccaggttccag

SEQ ID NO: 381517 - DNA, 60 bp, Artificial
  Synthetic oligonucleotide
ctcatactgctccgatgacgacgctacagcggtggataagccaacgcgcccagatgtttc

SEQ ID NO: 381518 - DNA, 55 bp, Artificial
  Synthetic oligonucleotide
ctcatactgggaaggtgatgtgtatctcagatgttactcgcggtaatggcattac

SEQ ID NO: 381519 - DNA, 54 bp, Artificial
  Synthetic oligonucleotide
ctcatactgtaggtttaggtcaaggccttgtaatagggactgtggatttaaacc

SEQ ID NO: 381520 - DNA, 60 bp, Artificial
  Synthetic oligonucleotide
ctcatagactccacccaagcccgcactgtaccaatcatccacatcgctggtttcgctggt

SEQ ID NO: 381521 - DNA, 57 bp, Artificial
  Synthetic oligonucleotide
ctcatagacttccgcgccctaaatcaagcaacccaagacttcgcggaagtacaacag

SEQ ID NO: 381522 - DNA, 55 bp, Artificial
  Synthetic oligonucleotide
ctcatagagccttcatgagtaaatcaaagtcactctgttcattcgattcggtcag

SEQ ID NO: 381523 - DNA, 60 bp, Artificial
  Synthetic oligonucleotide
ctcatagatacacaggagaaggtatatggagaggttcattcgatgattccgatgtttgca

SEQ ID NO: 381524 - DNA, 60 bp, Artificial
  Synthetic oligonucleotide
ctcatagatgagtacgacttagaactttcagatgtcgagtaaatgtggtcatgattacgc

SEQ ID NO: 381525 - DNA, 60 bp, Artificial
  Synthetic oligonucleotide
ctcatagatgtccagccgatgtctgtgagttaatccgtggtgcgtacccaaaaatccaga

SEQ ID NO: 381526 - DNA, 59 bp, Artificial
  Synthetic oligonucleotide
ctcatagccatggggtccaacagcccatttgtacccaattatgacagggtggagaacaa

SEQ ID NO: 381527 - DNA, 60 bp, Artificial
  Synthetic oligonucleotide
ctcatagcgatgatacaaaggggccagtacgtctatcccgtctacggatgggatgagagc

SEQ ID NO: 381528 - DNA, 50 bp, Artificial
  Synthetic oligonucleotide
ctcatagctcataaacggttcgaggtggcccttagtcatcaacgatgtag

SEQ ID NO: 381529 - DNA, 60 bp, Artificial
  Synthetic oligonucleotide
ctcatagctctgaatgagcttagaaaaattagagcaggagctcctcgggcagttaatgtg

SEQ ID NO: 381530 - DNA, 55 bp, Artificial
  Synthetic oligonucleotide
ctcatagctgaatactccagacccacaccgctaagctacattatagggccacccc

SEQ ID NO: 381531 - DNA, 50 bp, Artificial
  Synthetic oligonucleotide
ctcataggagttagcgtggcagcattccttgtcaaccccaacgtcaccac

SEQ ID NO: 381532 - DNA, 60 bp, Artificial
  Synthetic oligonucleotide
ctcataggttgagttgtaaggctgacatgttgtgcatcttactcgcaaacgctagttatg

SEQ ID NO: 381533 - DNA, 60 bp, Artificial
  Synthetic oligonucleotide
ctcatagtagtgctggaagtgttgctggactgcgtgaacgtatgtgggcattatcacgtg

SEQ ID NO: 381534 - DNA, 60 bp, Artificial
  Synthetic oligonucleotide
ctcatagtgaatgcaccaaatcatgagggaatacaagcaggggtagatagattctacaga

SEQ ID NO: 381535 - DNA, 60 bp, Artificial
  Synthetic oligonucleotide
ctcatagtgctgcagaatttggttgtcttgtcaaaagacttgcaggcagatatcaaagga

SEQ ID NO: 381536 - DNA, 60 bp, Artificial
  Synthetic oligonucleotide
ctcatatacaacaggatgggaacggtgaccacagaagtggctcttggcctagtatgtgcc

SEQ ID NO: 381537 - DNA, 55 bp, Artificial
  Synthetic oligonucleotide
ctcatatcaagatattggacacttctgcctatctccaaggtgttcaacaatccga

SEQ ID NO: 381538 - DNA, 60 bp, Artificial
  Synthetic oligonucleotide
ctcatatcaatcattgacttttatatgttcaaaacagggttggcgggcaaattgcatgtg

SEQ ID NO: 381539 - DNA, 60 bp, Artificial
  Synthetic oligonucleotide
ctcatatcactagtaccaacaaatgatgactatcacacgccaatcgctaattcagttact

SEQ ID NO: 381540 - DNA, 60 bp, Artificial
  Synthetic oligonucleotide
ctcatatcctgaggaggttttgctagatgaaatcgaatccgttgccaacgacctgcagct

SEQ ID NO: 381541 - DNA, 60 bp, Artificial
  Synthetic oligonucleotide
ctcatatcgcagctgggaagactctagtactgccattcaacagattagctgagcaaacga

SEQ ID NO: 381542 - DNA, 51 bp, Artificial
  Synthetic oligonucleotide
ctcatatctttaactggtctttagacgctttacaagatttgacattaccag

SEQ ID NO: 381543 - DNA, 60 bp, Artificial
  Synthetic oligonucleotide
ctcatatgacacccgctgttttgactcaacggtcactgagagcgacatccgcactgagga

SEQ ID NO: 381544 - DNA, 56 bp, Artificial
  Synthetic oligonucleotide
ctcatatgagctgaggaaagcggatcacaaaaaggacatctcgattaaatgcctcg

SEQ ID NO: 381545 - DNA, 60 bp, Artificial
  Synthetic oligonucleotide
ctcatatgaggatcaaagttttgagtctatgttcggtgagacgatgtcggtagtgacaac

SEQ ID NO: 381546 - DNA, 55 bp, Artificial
  Synthetic oligonucleotide
ctcatatgataatctgtgagccttaaccacttttccattaacgcttattcttccg

SEQ ID NO: 381547 - DNA, 60 bp, Artificial
  Synthetic oligonucleotide
ctcatatgctgcgagggtagcccatgtagccaagtcgaaggtgggattactcgccaacac

SEQ ID NO: 381548 - DNA, 55 bp, Artificial
  Synthetic oligonucleotide
ctcatatgttacgaacatctctgacgaaattaacgaaattggaactaaaaaaaca

SEQ ID NO: 381549 - DNA, 55 bp, Artificial
  Synthetic oligonucleotide
ctcatatgtttcaaacgcaagtcggagtttttaacagtgttacgggacttgtgac

SEQ ID NO: 381550 - DNA, 55 bp, Artificial
  Synthetic oligonucleotide
ctcatattaatccttgtgtgcctgttttgtctgttgttagtctacaggtgtaccc

SEQ ID NO: 381551 - DNA, 54 bp, Artificial
  Synthetic oligonucleotide
ctcatattagagcagtaataggggaaacacccgctcaaataagggacgtcccct

SEQ ID NO: 381552 - DNA, 55 bp, Artificial
  Synthetic oligonucleotide
ctcatattgggaaggtattgtgtatcagtgatgttacacgaggaaccggactcac

SEQ ID NO: 381553 - DNA, 55 bp, Artificial
  Synthetic oligonucleotide
ctcatattggtaaggtaatgtgtatcagcgatgtcacacgaggaaccggactcac

SEQ ID NO: 381554 - DNA, 60 bp, Artificial
  Synthetic oligonucleotide
ctcatattttgagtccgattcgaatgatcgagcctgctgctcaatccctcgcaatcatcc

SEQ ID NO: 381555 - DNA, 54 bp, Artificial
  Synthetic oligonucleotide
ctcatcaaaatcgtggatggacgtttaacggatttcggttcgactacgcgcccg

SEQ ID NO: 381556 - DNA, 55 bp, Artificial
  Synthetic oligonucleotide
ctcatcaacaatggtgacgattgtgttctcataacagagcgcaacaacctccccg

SEQ ID NO: 381557 - DNA, 60 bp, Artificial
  Synthetic oligonucleotide
ctcatcaacccgcaacaagcgccattactccgtgccttcgccgagcatatccgtgctaat

SEQ ID NO: 381558 - DNA, 60 bp, Artificial
  Synthetic oligonucleotide
ctcatcaagtgcgtagcactagatattagcacactccggaactggttatctcacctacat

SEQ ID NO: 381559 - DNA, 55 bp, Artificial
  Synthetic oligonucleotide
ctcatcaatctggtatcgtgttcggagtaccctctgaaaatggctgacttgtctg

SEQ ID NO: 381560 - DNA, 55 bp, Artificial
  Synthetic oligonucleotide
ctcatcaattgagaacccttcctctgcttggttagtagtggatactcgtgtatag

SEQ ID NO: 381561 - DNA, 56 bp, Artificial
  Synthetic oligonucleotide
ctcatcagaaaaagttaacacactgttagagaacgatgtcccggttacaagttctg

SEQ ID NO: 381562 - DNA, 60 bp, Artificial
  Synthetic oligonucleotide
ctcatcagcagctccagcggcctcaaggaatggtgggtagctccgcgtggcgaggcgaag

SEQ ID NO: 381563 - DNA, 60 bp, Artificial
  Synthetic oligonucleotide
ctcatcagcatccagtgggcgatgtagtgctctctcagtgacagggtgacgaggttactg

SEQ ID NO: 381564 - DNA, 60 bp, Artificial
  Synthetic oligonucleotide
ctcatcaggaactctagagttcatcaccgaaggctttacatggacaggagtcacacaaaa

SEQ ID NO: 381565 - DNA, 59 bp, Artificial
  Synthetic oligonucleotide
ctcatcaggagttgtaaacccaatttacgatgagccgacgccgactactagcgtgcctc

SEQ ID NO: 381566 - DNA, 55 bp, Artificial
  Synthetic oligonucleotide
ctcatcaggccaacatgtgcctggaggatactgtttggaacagtgggcaattgtc

SEQ ID NO: 381567 - DNA, 60 bp, Artificial
  Synthetic oligonucleotide
ctcatcaggggtgaagccactggttgaattaacgaaagataacatcagcgatagcatctg

SEQ ID NO: 381568 - DNA, 58 bp, Artificial
  Synthetic oligonucleotide
ctcatcaggtcaaggtggtcccggagtggccaccgatggtggatctcaacgacggttg

SEQ ID NO: 381569 - DNA, 60 bp, Artificial
  Synthetic oligonucleotide
ctcatcagtctatcaacttccttatttaagtctctgagtttatcaagatctgcgtctcct

SEQ ID NO: 381570 - DNA, 50 bp, Artificial
  Synthetic oligonucleotide
ctcatcagtggatcaatctacgaaccaataattgcgccacgataatagtg

SEQ ID NO: 381571 - DNA, 51 bp, Artificial
  Synthetic oligonucleotide
ctcatcatacgtccacatttcaaacgacaggcatcagagtaagattgatgg

SEQ ID NO: 381572 - DNA, 60 bp, Artificial
  Synthetic oligonucleotide
ctcatcatactatgttgttacctgccataattcgcgccgtagaactagattatgataata

SEQ ID NO: 381573 - DNA, 55 bp, Artificial
  Synthetic oligonucleotide
ctcatcatcaaaaggttggtggtggaaactaccagatgcattgaaagacatgggc

SEQ ID NO: 381574 - DNA, 60 bp, Artificial
  Synthetic oligonucleotide
ctcatcattactagtatcatgtcataaatatatgattgattacagtacattgaaacatga

SEQ ID NO: 381575 - DNA, 55 bp, Artificial
  Synthetic oligonucleotide
ctcatccaagttaacccactcatgccccacggcagcttggtcggagtggaacacc

SEQ ID NO: 381576 - DNA, 55 bp, Artificial
  Synthetic oligonucleotide
ctcatccagccagcagtcaccaccaatcaggtatccctggttgaccagactgcgc

SEQ ID NO: 381577 - DNA, 56 bp, Artificial
  Synthetic oligonucleotide
ctcatccatccggattcgcccttcgttctgccgcccggagacttctacgcagcata

SEQ ID NO: 381578 - DNA, 60 bp, Artificial
  Synthetic oligonucleotide
ctcatcccaaaagcatatgcaggccctatttcacagcacaactaccgccagggctatgcc

SEQ ID NO: 381579 - DNA, 57 bp, Artificial
  Synthetic oligonucleotide
ctcatcccaaccatctgcagaatttgagatctttgatcaagttgttgcattgtcagg

SEQ ID NO: 381580 - DNA, 60 bp, Artificial
  Synthetic oligonucleotide
ctcatcccagttccatcaggccttgttggatccgagggtaagggctctgtatcttcctgc

SEQ ID NO: 381581 - DNA, 55 bp, Artificial
  Synthetic oligonucleotide
ctcatcccgaaagatatagccaacagcttctatgaagtatttgaaaagtaccctc

SEQ ID NO: 381582 - DNA, 55 bp, Artificial
  Synthetic oligonucleotide
ctcatccctcacccaacgggagccgacaggcccggagaaatcgaagaaggaggtg

SEQ ID NO: 381583 - DNA, 55 bp, Artificial
  Synthetic oligonucleotide
ctcatccctctaactgcagggaagattcctttgtcccgattcgaccagctcaact

SEQ ID NO: 381584 - DNA, 60 bp, Artificial
  Synthetic oligonucleotide
ctcatccgatggctgtttgaacgtagatctcggacttcagcaagagaatcactctttaaa

SEQ ID NO: 381585 - DNA, 60 bp, Artificial
  Synthetic oligonucleotide
ctcatccgtttcctccttgcttgatagtgtctcaggtctggatggtcgagttacccaagc

SEQ ID NO: 381586 - DNA, 60 bp, Artificial
  Synthetic oligonucleotide
ctcatcctcaggccatgcagtggaactccacggtattccaccgaactttacaagatccca

SEQ ID NO: 381587 - DNA, 59 bp, Artificial
  Synthetic oligonucleotide
ctcatcctcgttggctaggattattgatggaatgctcttagaagctaccttcttcttct

SEQ ID NO: 381588 - DNA, 60 bp, Artificial
  Synthetic oligonucleotide
ctcatcctgtccgtccggtctccataacaacacatcctcccgctctgtgttctcacgcgg

SEQ ID NO: 381589 - DNA, 53 bp, Artificial
  Synthetic oligonucleotide
ctcatcgaacgggcgattgaatttgaaggtctacacattgaggtcccggaatt

SEQ ID NO: 381590 - DNA, 53 bp, Artificial
  Synthetic oligonucleotide
ctcatcgcagacactaagcacgatggggtacgcgggaacatttgcgtagacaa

SEQ ID NO: 381591 - DNA, 55 bp, Artificial
  Synthetic oligonucleotide
ctcatcgcccagggggggaaagccgctatatgcggcaagtacctctttaactggg

SEQ ID NO: 381592 - DNA, 55 bp, Artificial
  Synthetic oligonucleotide
ctcatcgccttggcccttttgataacggtaaaatcggtatcatccaactgcttaa

SEQ ID NO: 381593 - DNA, 55 bp, Artificial
  Synthetic oligonucleotide
ctcatcgcgttttcattgctggtgacttcgcggcagtacttcggaaagctcatag

SEQ ID NO: 381594 - DNA, 58 bp, Artificial
  Synthetic oligonucleotide
ctcatcgcttcgtcgtcaaacggcgttggccgttcacgttatcatgcaacgggagtac

SEQ ID NO: 381595 - DNA, 55 bp, Artificial
  Synthetic oligonucleotide
ctcatcggacatctggatgagactcactaggccactcaggacagcggttcggaag

SEQ ID NO: 381596 - DNA, 55 bp, Artificial
  Synthetic oligonucleotide
ctcatcggagctgccctctacgcatacttgtggttcacaagaccggactgttccg

SEQ ID NO: 381597 - DNA, 59 bp, Artificial
  Synthetic oligonucleotide
ctcatcggagggggtctcttacctgtggagattctgcttcggtgggcctctagctaagc

SEQ ID NO: 381598 - DNA, 50 bp, Artificial
  Synthetic oligonucleotide
ctcatcggcatcaattacacagacgcagcaactaccgaagccgcaaaccc

SEQ ID NO: 381599 - DNA, 57 bp, Artificial
  Synthetic oligonucleotide
ctcatcggcccacgcctgcatttcgtccggaacgttagtgaatgaggacaacgggaa

SEQ ID NO: 381600 - DNA, 58 bp, Artificial
  Synthetic oligonucleotide
ctcatcgggatgttcgccaacaaaagatgtatagctttggaatccgttattaggacga

SEQ ID NO: 381601 - DNA, 55 bp, Artificial
  Synthetic oligonucleotide
ctcatcggtatcgctggttgaccaactagttgaaaggctgctattcgggccccaa

SEQ ID NO: 381602 - DNA, 55 bp, Artificial
  Synthetic oligonucleotide
ctcatcggtcatcctggaggtttcaaaccgtttgtaagtgatgtgtgacgggcga

SEQ ID NO: 381603 - DNA, 56 bp, Artificial
  Synthetic oligonucleotide
ctcatcggtctcgcgtttggggacgattccctcttcgagcgacgtttcgctaagaa

SEQ ID NO: 381604 - DNA, 60 bp, Artificial
  Synthetic oligonucleotide
ctcatcgtcaatgatgtgggagattaatggtcctgaatcagtgttggtcaatacctatca

SEQ ID NO: 381605 - DNA, 52 bp, Artificial
  Synthetic oligonucleotide
ctcatcgtgattgtaaaccgctacttcgtctttaggcatccagacacgtgtt

SEQ ID NO: 381606 - DNA, 55 bp, Artificial
  Synthetic oligonucleotide
ctcatctagcgatcccattgtcccttacggagagttatttgggctcgagcatgga

SEQ ID NO: 381607 - DNA, 55 bp, Artificial
  Synthetic oligonucleotide
ctcatctatcgcatacctaaagtcctttcgtatgtcagcgctgagcgtgtggaca

SEQ ID NO: 381608 - DNA, 55 bp, Artificial
  Synthetic oligonucleotide
ctcatctattcagcaatcgtcttgcgacgcttgccaaacagggcacatcagccct

SEQ ID NO: 381609 - DNA, 60 bp, Artificial
  Synthetic oligonucleotide
ctcatctctgcgttgagggtgagatgcgagagtatcttgattcttatcatgatggtctcg

SEQ ID NO: 381610 - DNA, 55 bp, Artificial
  Synthetic oligonucleotide
ctcatctgatggtcatagtgaatctgtctatggtattggatatggaccatatgtc

SEQ ID NO: 381611 - DNA, 60 bp, Artificial
  Synthetic oligonucleotide
ctcatctggaaattgctagggatgtagagaaggcgcaattgtacgcgatgaaggaagata

SEQ ID NO: 381612 - DNA, 55 bp, Artificial
  Synthetic oligonucleotide
ctcatctggatataccagacctttcaaaacttcatctggatcctctggatcagcc

SEQ ID NO: 381613 - DNA, 56 bp, Artificial
  Synthetic oligonucleotide
ctcatctgttgtcgtacctttattttcatgggacaaccgttctttaaagatcacaa

SEQ ID NO: 381614 - DNA, 59 bp, Artificial
  Synthetic oligonucleotide
ctcatcttcttgtgggttctgctggactatcaagggatgtcgcccgttggtcctctact

SEQ ID NO: 381615 - DNA, 51 bp, Artificial
  Synthetic oligonucleotide
ctcatcttgcattaaccaatgggttacagttaagttatatgacccatcact

SEQ ID NO: 381616 - DNA, 50 bp, Artificial
  Synthetic oligonucleotide
ctcatcttttaaatgagagaaggtgccacgtcatcggtgtatcggtgtcg

SEQ ID NO: 381617 - DNA, 54 bp, Artificial
  Synthetic oligonucleotide
ctcatcttttccgcagttctcatgtccaagactctgaagaggatgggtcctgta

SEQ ID NO: 381618 - DNA, 58 bp, Artificial
  Synthetic oligonucleotide
ctcatcttttcgtaatattataacagcagtgcctcaacctagtaattttggtgaaatg

SEQ ID NO: 381619 - DNA, 56 bp, Artificial
  Synthetic oligonucleotide
ctcatcttttctaaagaagatttgcccaatttagctaaccagataaatcaggactt

SEQ ID NO: 381620 - DNA, 60 bp, Artificial
  Synthetic oligonucleotide
ctcatgaacattgcggtgaagagcttacaggtgtaccaacaagagccaaagcttgacaag

SEQ ID NO: 381621 - DNA, 60 bp, Artificial
  Synthetic oligonucleotide
ctcatgaagtgcagcaattgcagctaacggatcttttcattggcgcgttaggctacgttc

SEQ ID NO: 381622 - DNA, 60 bp, Artificial
  Synthetic oligonucleotide
ctcatgactggctttaccggcgacttcgactctgtgatagactgcaacacgtgtgtcact

SEQ ID NO: 381623 - DNA, 60 bp, Artificial
  Synthetic oligonucleotide
ctcatgataacttgatgggtacgatgtggctcaatgcgggatcagaaattcaggtcgctg

SEQ ID NO: 381624 - DNA, 60 bp, Artificial
  Synthetic oligonucleotide
ctcatgcaccatcgttctagtcacgaggttcgcttgcgattctctgatttctacaatgtc

SEQ ID NO: 381625 - DNA, 55 bp, Artificial
  Synthetic oligonucleotide
ctcatgcatggtcagtcggggatgctgctcactggtgccaacgctaaaggcatgg

SEQ ID NO: 381626 - DNA, 51 bp, Artificial
  Synthetic oligonucleotide
ctcatgcccactggggaggtcacgatccaacgcagaggcaacccctcagga

SEQ ID NO: 381627 - DNA, 54 bp, Artificial
  Synthetic oligonucleotide
ctcatgcccggccccgtttgttcctctggtgcctactcctactttcagtagggg

SEQ ID NO: 381628 - DNA, 60 bp, Artificial
  Synthetic oligonucleotide
ctcatgcgctcagcggtcacactgctgagtcggatcgggcactggtagatggtggacata

SEQ ID NO: 381629 - DNA, 60 bp, Artificial
  Synthetic oligonucleotide
ctcatgctactacgcagcatgcatcaggaccctacacggattgttcagatcgttaatgag

SEQ ID NO: 381630 - DNA, 52 bp, Artificial
  Synthetic oligonucleotide
ctcatgctcaattgatcataggcactgggctacgtaggcccaatgctgtgtc

SEQ ID NO: 381631 - DNA, 55 bp, Artificial
  Synthetic oligonucleotide
ctcatggacaggcgctcccatcaccccttgcgcagctgaggaggaaaagttgcca

SEQ ID NO: 381632 - DNA, 53 bp, Artificial
  Synthetic oligonucleotide
ctcatggaccctcaacgcactgtagaacaacaaaatcctaggggcagaagtcg

SEQ ID NO: 381633 - DNA, 55 bp, Artificial
  Synthetic oligonucleotide
ctcatggattaagggccaggaaacactgtaagggttctgtttggacctgttccac

SEQ ID NO: 381634 - DNA, 59 bp, Artificial
  Synthetic oligonucleotide
ctcatggattcatacgttcaaataccagatggcaacgtcattaagaaaatacaatacgg

SEQ ID NO: 381635 - DNA, 55 bp, Artificial
  Synthetic oligonucleotide
ctcatggcagccatgttgggcttttcaaacgtagcagccacctcattagcctgct

SEQ ID NO: 381636 - DNA, 54 bp, Artificial
  Synthetic oligonucleotide
ctcatggccccaatccccaacatccccggtttaacctccaacaagctggtcttc

SEQ ID NO: 381637 - DNA, 60 bp, Artificial
  Synthetic oligonucleotide
ctcatggctagattgatagaaaatagcagatgggtgctgactacaggccctagcaatatc

SEQ ID NO: 381638 - DNA, 53 bp, Artificial
  Synthetic oligonucleotide
ctcatggggagatgcgcgcactgcgtgtacaacatgatgggcaagagagagaa

SEQ ID NO: 381639 - DNA, 60 bp, Artificial
  Synthetic oligonucleotide
ctcatggggatgtgaagagtttggctgcttagcaattagtgatgggtgtgtttttggttc

SEQ ID NO: 381640 - DNA, 60 bp, Artificial
  Synthetic oligonucleotide
ctcatggggctttgaacagcagccttcctttccagaatgtacatcctatcactattggag

SEQ ID NO: 381641 - DNA, 52 bp, Artificial
  Synthetic oligonucleotide
ctcatgggtgcgtatcaaccaagccgactaaacaaagatgcgttcaaacgag

SEQ ID NO: 381642 - DNA, 60 bp, Artificial
  Synthetic oligonucleotide
ctcatgggttcctaaaagaaatcgatccatcttgaacacgagccagagaggaatacttga

SEQ ID NO: 381643 - DNA, 55 bp, Artificial
  Synthetic oligonucleotide
ctcatggtactctactagaaaacactatgcgtgcgcacacggctggctatgtcct

SEQ ID NO: 381644 - DNA, 58 bp, Artificial
  Synthetic oligonucleotide
ctcatggtacttcaggggagtattttgataaagttgcaagtcacacagaaacagaggg

SEQ ID NO: 381645 - DNA, 60 bp, Artificial
  Synthetic oligonucleotide
ctcatggtgtgcagtggggtccattttctgttccctaacagatgtggagtaatgacctca

SEQ ID NO: 381646 - DNA, 55 bp, Artificial
  Synthetic oligonucleotide
ctcatggtgttgggtatagccacgaatacgtagatgcggagtttgattcttgtag

SEQ ID NO: 381647 - DNA, 59 bp, Artificial
  Synthetic oligonucleotide
ctcatggttatatgtccatacacagagccacaactagtagacccccaagataaaactaa

SEQ ID NO: 381648 - DNA, 55 bp, Artificial
  Synthetic oligonucleotide
ctcatggttctaactggaaaatctatacggatacaggggtgcaatctgtcaccag

SEQ ID NO: 381649 - DNA, 60 bp, Artificial
  Synthetic oligonucleotide
ctcatgtacagtggatctaactaattcgttcaactgtgacattgacatggtgatgttcga

SEQ ID NO: 381650 - DNA, 57 bp, Artificial
  Synthetic oligonucleotide
ctcatgtacgcacccatttcaccacgaccctcctgtgataggtcgggaaaaattcca

SEQ ID NO: 381651 - DNA, 60 bp, Artificial
  Synthetic oligonucleotide
ctcatgtagacaacagtagtggcagtcaccaaggttgctttatcagggctactggagagt

SEQ ID NO: 381652 - DNA, 60 bp, Artificial
  Synthetic oligonucleotide
ctcatgtatcctacgacgttattgaaacatgatattcatggtgctcctgtatatggatct

SEQ ID NO: 381653 - DNA, 60 bp, Artificial
  Synthetic oligonucleotide
ctcatgtattgaaacgatggaggctgttcagcaaacaagagtggacaaactgacacaagg

SEQ ID NO: 381654 - DNA, 60 bp, Artificial
  Synthetic oligonucleotide
ctcatgtcatctttgaagctaatacacaaagccaacgctcttcaggagagactgcgtctc

SEQ ID NO: 381655 - DNA, 60 bp, Artificial
  Synthetic oligonucleotide
ctcatgtccggaacattcaggctcatttcgaaaaatctgtcattttgcaactacaccagt

SEQ ID NO: 381656 - DNA, 60 bp, Artificial
  Synthetic oligonucleotide
ctcatgtcgagttgacgagaagcgctgccgcggatgaatacgtttggaaagacgacactt

SEQ ID NO: 381657 - DNA, 57 bp, Artificial
  Synthetic oligonucleotide
ctcatgtcgccaataccccctgtcaaggggttgacagcgcctaattttgtgtacgag

SEQ ID NO: 381658 - DNA, 60 bp, Artificial
  Synthetic oligonucleotide
ctcatgtcgtgtatctctatcacgacatgaccgactgcattaattggaacctgattgcga

SEQ ID NO: 381659 - DNA, 60 bp, Artificial
  Synthetic oligonucleotide
ctcatgtcttcgtaatgtgaatgttcaaatggtattggaatattttgacgtaaagcctga

SEQ ID NO: 381660 - DNA, 55 bp, Artificial
  Synthetic oligonucleotide
ctcatgttacaaaagtatcagatagtgcaggtaaggacgtacacgtatggagtgg

SEQ ID NO: 381661 - DNA, 60 bp, Artificial
  Synthetic oligonucleotide
ctcatgttcacgtcctactgttcaagcctccaagctgtgccttgggtggctttaggacat

SEQ ID NO: 381662 - DNA, 55 bp, Artificial
  Synthetic oligonucleotide
ctcatgttctactctgaggcttgcaagaacacgtttctaaactctgttgtgctgc

SEQ ID NO: 381663 - DNA, 60 bp, Artificial
  Synthetic oligonucleotide
ctcatgtttgtcagtggtgtattcaaaataagcgttgttttctagataacgagccacatc

SEQ ID NO: 381664 - DNA, 55 bp, Artificial
  Synthetic oligonucleotide
ctcattaacactgttagtaagtacccagactggatccggatgcataatgatccta

SEQ ID NO: 381665 - DNA, 55 bp, Artificial
  Synthetic oligonucleotide
ctcattaacagatatgtcacgagcgcagaccgactccgctacccctctgaattcc

SEQ ID NO: 381666 - DNA, 55 bp, Artificial
  Synthetic oligonucleotide
ctcattaatctgggctacagacaacgttatatttgattgggccctatgggctgcg

SEQ ID NO: 381667 - DNA, 55 bp, Artificial
  Synthetic oligonucleotide
ctcattacaacattttgttttggctggttgtggatccccggagcaacatggatgg

SEQ ID NO: 381668 - DNA, 55 bp, Artificial
  Synthetic oligonucleotide
ctcattacagatgaaagtcgcagaggagccgttcgagtcatcgactacctatctc

SEQ ID NO: 381669 - DNA, 55 bp, Artificial
  Synthetic oligonucleotide
ctcattaccaccagaccccgatcactttgacggttacaaacaacaagccgtcgtg

SEQ ID NO: 381670 - DNA, 55 bp, Artificial
  Synthetic oligonucleotide
ctcattacttgtaacaaagggagggagagtatgggaggacaaactccatgggaag

SEQ ID NO: 381671 - DNA, 60 bp, Artificial
  Synthetic oligonucleotide
ctcattagagccagcccacgaaacatctctattaacttgtgacacttgctcgcgtgccaa

SEQ ID NO: 381672 - DNA, 56 bp, Artificial
  Synthetic oligonucleotide
ctcattagaggtgctgtttcaaggcccggtttacaaagacctatctattgatatta

SEQ ID NO: 381673 - DNA, 60 bp, Artificial
  Synthetic oligonucleotide
ctcattatccgtcattcttttgtcgtgaatctccacaatcacagttcctgttgcgttgat

SEQ ID NO: 381674 - DNA, 60 bp, Artificial
  Synthetic oligonucleotide
ctcattatgggtcagtcattcaattcagacagggaatcaacaccaagttgaaccaatcag

SEQ ID NO: 381675 - DNA, 56 bp, Artificial
  Synthetic oligonucleotide
ctcattcaaaattctcgcttatttgtgtcaaaagtttttggacttacacaagttga

SEQ ID NO: 381676 - DNA, 59 bp, Artificial
  Synthetic oligonucleotide
ctcattcacgggagaagaaatggccacaaaggccgactacactctcgatgaagaaagta

SEQ ID NO: 381677 - DNA, 53 bp, Artificial
  Synthetic oligonucleotide
ctcattcatagattcgctatctagatcagcctttttacagttgataatagatg

SEQ ID NO: 381678 - DNA, 60 bp, Artificial
  Synthetic oligonucleotide
ctcattcatagctattttcaacctctgcatatcacgtgggtgagtgtattcgtccgattt

SEQ ID NO: 381679 - DNA, 55 bp, Artificial
  Synthetic oligonucleotide
ctcattcattgggtcgaggtcgggcttgagtccgggtggacaccagatccatcgc

SEQ ID NO: 381680 - DNA, 57 bp, Artificial
  Synthetic oligonucleotide
ctcattccacttattgacggcagaacatcattttacaatgagcaaatccctgattgg

SEQ ID NO: 381681 - DNA, 55 bp, Artificial
  Synthetic oligonucleotide
ctcattctgcaccttcggtggttcgatacatgctcagaatcttcaagccttcgca

SEQ ID NO: 381682 - DNA, 55 bp, Artificial
  Synthetic oligonucleotide
ctcattctggggcacaccgtggagccagtactcacctaggtagatcccgtgtggg

SEQ ID NO: 381683 - DNA, 60 bp, Artificial
  Synthetic oligonucleotide
ctcattgaatgtgatcgagtggaggcttatgatagaccttatacgctgaacgattctcaa

SEQ ID NO: 381684 - DNA, 55 bp, Artificial
  Synthetic oligonucleotide
ctcattgagagactacgcattagcactcaagagtaagtaccctggaaatgccttg

SEQ ID NO: 381685 - DNA, 55 bp, Artificial
  Synthetic oligonucleotide
ctcattgagagttttggtactgcaggagttaattcgagtgccgtgatcgaagaag

SEQ ID NO: 381686 - DNA, 55 bp, Artificial
  Synthetic oligonucleotide
ctcattgagtatagtgattttgctacctctgcttgcgttcttgctgctgagtgta

SEQ ID NO: 381687 - DNA, 60 bp, Artificial
  Synthetic oligonucleotide
ctcattgcaacgcatgaagaaattctcaattcgaaactgcatcccgcgcacctactctac

SEQ ID NO: 381688 - DNA, 53 bp, Artificial
  Synthetic oligonucleotide
ctcattgccacacggaggttgttacaaagacggaactaagtccatctattacg

SEQ ID NO: 381689 - DNA, 55 bp, Artificial
  Synthetic oligonucleotide
ctcattgcttccctcgctcagattattggtgacaacaaagcagcctgggtaggaa

SEQ ID NO: 381690 - DNA, 60 bp, Artificial
  Synthetic oligonucleotide
ctcattgcttcgataatgatggaccctatgatgctcgtttccactaaaggtttcattccc

SEQ ID NO: 381691 - DNA, 59 bp, Artificial
  Synthetic oligonucleotide
ctcattggataaagcgtagccggacgaatattattcatccgactatccggacgactagc

SEQ ID NO: 381692 - DNA, 55 bp, Artificial
  Synthetic oligonucleotide
ctcattggtagttctaaagctgccgcaagagaatactatactgatgtaagtgcaa

SEQ ID NO: 381693 - DNA, 55 bp, Artificial
  Synthetic oligonucleotide
ctcattggtattgttacatcgcttacgagataggcacgatggagacaaagagttg

SEQ ID NO: 381694 - DNA, 57 bp, Artificial
  Synthetic oligonucleotide
ctcattggtcctcaacctctggaaagttataccttccaccaagtactcctgttgcca

SEQ ID NO: 381695 - DNA, 55 bp, Artificial
  Synthetic oligonucleotide
ctcattggtgttacactcacaatgtaatacttggagattgcctcgatttcacgac

SEQ ID NO: 381696 - DNA, 49 bp, Artificial
  Synthetic oligonucleotide
ctcattggttcgtttaaaaaacgtcaccgagcgggaaactccgggggcg

SEQ ID NO: 381697 - DNA, 59 bp, Artificial
  Synthetic oligonucleotide
ctcattgtagggcgacagaatacataatgaagggagtatacataaacacagccttgctt

SEQ ID NO: 381698 - DNA, 60 bp, Artificial
  Synthetic oligonucleotide
ctcattgtcgcaagaaattgcgttgtcacaattgattgatttagcgacgctaccgcttga

SEQ ID NO: 381699 - DNA, 60 bp, Artificial
  Synthetic oligonucleotide
ctcattgtctgtcatacgtttgtcatggatctccactatcaccgtaccagacgcgttgat

SEQ ID NO: 381700 - DNA, 60 bp, Artificial
  Synthetic oligonucleotide
ctcattgtctgtcattcttctatcatgaatctccactattactgaacccgtcgcgtttat

SEQ ID NO: 381701 - DNA, 55 bp, Artificial
  Synthetic oligonucleotide
ctcattgtgagtagttgttttcgttctattccattcgtcaatttctgattgggtc

SEQ ID NO: 381702 - DNA, 55 bp, Artificial
  Synthetic oligonucleotide
ctcattgtgccgttgaatttcgagcgtgctcgaatggcattacagggtaagagcg

SEQ ID NO: 381703 - DNA, 53 bp, Artificial
  Synthetic oligonucleotide
ctcattgtggaggcagaaacccgagggttgacaggttacaatcctatggcagg

SEQ ID NO: 381704 - DNA, 60 bp, Artificial
  Synthetic oligonucleotide
ctcattgttgcaggaaaatgatcaccatgaatgtagaatgctaaatatactgcagcaaat

SEQ ID NO: 381705 - DNA, 55 bp, Artificial
  Synthetic oligonucleotide
ctcatttaggatcctgcggcatatcctgagatcgttcgacgagatatactccggg

SEQ ID NO: 381706 - DNA, 56 bp, Artificial
  Synthetic oligonucleotide
ctcatttccattttagctaatttaatccggtagtcttcgaaattcagtgtatgtgg

SEQ ID NO: 381707 - DNA, 56 bp, Artificial
  Synthetic oligonucleotide
ctcatttcgctgggttctacggaacctattatcaaggaaaccttgtatgaagatgt

SEQ ID NO: 381708 - DNA, 58 bp, Artificial
  Synthetic oligonucleotide
ctcatttctggaaggcagttctaaatgatagtccagaggcagtgaaagccgttatgaa

SEQ ID NO: 381709 - DNA, 55 bp, Artificial
  Synthetic oligonucleotide
ctcatttgagggttacgacattctcggcggaatccttgacgagggtgactcgcac

SEQ ID NO: 381710 - DNA, 55 bp, Artificial
  Synthetic oligonucleotide
ctcatttgcgtacaccgaagatagaacctacgatggttgcgactacgttggaaca

SEQ ID NO: 381711 - DNA, 60 bp, Artificial
  Synthetic oligonucleotide
ctcatttgttaatatcactggctgttactcctgtgattatggggctagagtatgtgttag

SEQ ID NO: 381712 - DNA, 60 bp, Artificial
  Synthetic oligonucleotide
ctcattttcgttcactctgaatagatcgcagcctcaacatgacaatttaatgggtacaat

SEQ ID NO: 381713 - DNA, 55 bp, Artificial
  Synthetic oligonucleotide
ctcattttgcctcactttggctactgatgatgtcttcattgaattcaccaatgcc

SEQ ID NO: 381714 - DNA, 56 bp, Artificial
  Synthetic oligonucleotide
ctccaaaaaaacaacgcaaaacagaacacaaggtactgatcgattggtcctcacaa

SEQ ID NO: 381715 - DNA, 49 bp, Artificial
  Synthetic oligonucleotide
ctccaaaaaacgggaaacaaggggctcaggggaggccccagaaacaaac

SEQ ID NO: 381716 - DNA, 54 bp, Artificial
  Synthetic oligonucleotide
ctccaaaacctgacaaaggtcaacaacggggactacgcaaggctttacatatgg

SEQ ID NO: 381717 - DNA, 58 bp, Artificial
  Synthetic oligonucleotide
ctccaaaataaacatccgcccactcttgcatctcatcgggaacgttagtgaaagacga

SEQ ID NO: 381718 - DNA, 55 bp, Artificial
  Synthetic oligonucleotide
ctccaaacaaagaaaggtatactgctgatgaaagagcaactgcaagaaatttagc

SEQ ID NO: 381719 - DNA, 58 bp, Artificial
  Synthetic oligonucleotide
ctccaaacaatatacgcgtaaggaaatctgtgaaacacaggagggatcggattatgtc

SEQ ID NO: 381720 - DNA, 57 bp, Artificial
  Synthetic oligonucleotide
ctccaaacacccgccggtcaaatccattggggcaatctctctaagataggtgtagta

SEQ ID NO: 381721 - DNA, 55 bp, Artificial
  Synthetic oligonucleotide
ctccaaacacgtccccctccgcactcggctcgacgagttcggaaccaagctcgga

SEQ ID NO: 381722 - DNA, 58 bp, Artificial
  Synthetic oligonucleotide
ctccaaacattgaaaataagggtacatgaaggatatgaggaattcacaatggttgggc

SEQ ID NO: 381723 - DNA, 56 bp, Artificial
  Synthetic oligonucleotide
ctccaaacctcgacaaggcatggggacaaatctttctgtccccaatcctctgggat

SEQ ID NO: 381724 - DNA, 55 bp, Artificial
  Synthetic oligonucleotide
ctccaaacgaggcttccatttagtttccatagtcaaggtaccaccggcggatgta

SEQ ID NO: 381725 - DNA, 58 bp, Artificial
  Synthetic oligonucleotide
ctccaaacggatggtgcgaataaatggatatcgatgggacagtcttgtaccataaaag

SEQ ID NO: 381726 - DNA, 58 bp, Artificial
  Synthetic oligonucleotide
ctccaaacgtattactccggagggtagactatcgttcgctagcgcttttggcatcagc

SEQ ID NO: 381727 - DNA, 50 bp, Artificial
  Synthetic oligonucleotide
ctccaaactttctaaggttggatgatcaagtatcgctgaaactaacatcc

SEQ ID NO: 381728 - DNA, 54 bp, Artificial
  Synthetic oligonucleotide
ctccaaagtgatccacgtgtgtatgggagaatatgacggcggacacaggtcgtt

SEQ ID NO: 381729 - DNA, 60 bp, Artificial
  Synthetic oligonucleotide
ctccaaataggatcaatacccccatggctcaagacacttcatcggctcggagcatggatg

SEQ ID NO: 381730 - DNA, 55 bp, Artificial
  Synthetic oligonucleotide
ctccaaatctacggataaatgtggtctgcccagtatccatacaccaagtaaaacc

SEQ ID NO: 381731 - DNA, 55 bp, Artificial
  Synthetic oligonucleotide
ctccaaatgaactaggactcacttcagcccaagatgatggcccacttggtcaaga

SEQ ID NO: 381732 - DNA, 55 bp, Artificial
  Synthetic oligonucleotide
ctccaaatggcataatggtaattaggtagaactattttcaaaatgtgaaccaaaa

SEQ ID NO: 381733 - DNA, 55 bp, Artificial
  Synthetic oligonucleotide
ctccaaattgccgaagtcgaacggtcgtataatcccatcatggccgtatcggatc

SEQ ID NO: 381734 - DNA, 54 bp, Artificial
  Synthetic oligonucleotide
ctccaacaatattgtgacctgtggtaatctttgcccccaacttaaacgttggga

SEQ ID NO: 381735 - DNA, 51 bp, Artificial
  Synthetic oligonucleotide
ctccaacaatcagccaaaacgcacagtacccggctgattttacaatcaacg

SEQ ID NO: 381736 - DNA, 57 bp, Artificial
  Synthetic oligonucleotide
ctccaacacagagagagtggtggtaagcattgaccgatttttgagggttagggacca

SEQ ID NO: 381737 - DNA, 57 bp, Artificial
  Synthetic oligonucleotide
ctccaacagctggtagcactttactgccgctctattgggttacacctttacttaagc

SEQ ID NO: 381738 - DNA, 60 bp, Artificial
  Synthetic oligonucleotide
ctccaacagtgtcctgagtttatccgatggcaccttgcttgcgcagcgagtgcctggagt

SEQ ID NO: 381739 - DNA, 59 bp, Artificial
  Synthetic oligonucleotide
ctccaacatccccgacgccgctacaagcgcaccaccaatggacaaaatggtcgaacaga

SEQ ID NO: 381740 - DNA, 55 bp, Artificial
  Synthetic oligonucleotide
ctccaacatgactcggataaacgctatctcatgtcgatgtctgacgtgatcggcg

SEQ ID NO: 381741 - DNA, 55 bp, Artificial
  Synthetic oligonucleotide
ctccaaccatcgagctcgcccaaccaaatcgtcactaatgtccaagacttacaag

SEQ ID NO: 381742 - DNA, 55 bp, Artificial
  Synthetic oligonucleotide
ctccaacccagaccttttaccttctacattccttaacgattcacagagtctacta

SEQ ID NO: 381743 - DNA, 52 bp, Artificial
  Synthetic oligonucleotide
ctccaacgatgcacatggacagagctccaaacgcaggcataaggtctttatc

SEQ ID NO: 381744 - DNA, 60 bp, Artificial
  Synthetic oligonucleotide
ctccaacgctcacaagatgttatgcgtatgtctctcccacttggcacgcattacgcgctg

SEQ ID NO: 381745 - DNA, 50 bp, Artificial
  Synthetic oligonucleotide
ctccaacgtacagtacttcgcacattattgtaggaagtatgcgcccttgt

SEQ ID NO: 381746 - DNA, 60 bp, Artificial
  Synthetic oligonucleotide
ctccaactaccagtgagcaacaaagtctataccagaacgctgatgcatatgtttcagttg

SEQ ID NO: 381747 - DNA, 60 bp, Artificial
  Synthetic oligonucleotide
ctccaactctcgcctcattcccgaagtcagccatctcgctccctacctcgactactactg

SEQ ID NO: 381748 - DNA, 60 bp, Artificial
  Synthetic oligonucleotide
ctccaactgccagcgagcagcaaagtctatatcagaacgctgacgcatatgtgtcagttg

SEQ ID NO: 381749 - DNA, 59 bp, Artificial
  Synthetic oligonucleotide
ctccaactgtggcactcattgacgtcagtgttgaccagagtttcaggaaaggtggtttc

SEQ ID NO: 381750 - DNA, 60 bp, Artificial
  Synthetic oligonucleotide
ctccaacttcaacatgttaacaccctagtaagcattcatgatcttacctgcggctgtgaa

SEQ ID NO: 381751 - DNA, 54 bp, Artificial
  Synthetic oligonucleotide
ctccaacttgttctttgtaagataaagagaactttagccttcctgtgtcgggtc

SEQ ID NO: 381752 - DNA, 54 bp, Artificial
  Synthetic oligonucleotide
ctccaagaaatcttgcctgactccctactacacaacccagaagttgatcagttc

SEQ ID NO: 381753 - DNA, 53 bp, Artificial
  Synthetic oligonucleotide
ctccaagatcgtaacatctatcgaactggaagcgccccgacaaatcgtgcgct

SEQ ID NO: 381754 - DNA, 59 bp, Artificial
  Synthetic oligonucleotide
ctccaagcaagagtcctggctgtggaaagatacctaaaggatcaacagctcctggggat

SEQ ID NO: 381755 - DNA, 50 bp, Artificial
  Synthetic oligonucleotide
ctccaagcaataaggaccatcaaaatcctatatcaaagcagtaagtacca

SEQ ID NO: 381756 - DNA, 51 bp, Artificial
  Synthetic oligonucleotide
ctccaagccaactctttcaagcacgaccttgagatgcttggcgcccaggtc

SEQ ID NO: 381757 - DNA, 56 bp, Artificial
  Synthetic oligonucleotide
ctccaagcctgttagagtataacccaggcagtctgaactctaagactttaaaactg

SEQ ID NO: 381758 - DNA, 59 bp, Artificial
  Synthetic oligonucleotide
ctccaagcggatgtctggcaccaactaacctagaatacaaacttcagtggtaccagaca

SEQ ID NO: 381759 - DNA, 55 bp, Artificial
  Synthetic oligonucleotide
ctccaagctgggacacaactatgtttggttcttagttcctcaatgctgtcaatct

SEQ ID NO: 381760 - DNA, 55 bp, Artificial
  Synthetic oligonucleotide
ctccaaggaagttcctgaatccctcagataatatgtttgcttgattatcgattcc

SEQ ID NO: 381761 - DNA, 59 bp, Artificial
  Synthetic oligonucleotide
ctccaaggccgcgcagcggaacccatgacgttctctgacacccagacttcaagttcttc

SEQ ID NO: 381762 - DNA, 55 bp, Artificial
  Synthetic oligonucleotide
ctccaaggttttggaggccatcctgtcctttgcacggcgtggcacactccaggag

SEQ ID NO: 381763 - DNA, 58 bp, Artificial
  Synthetic oligonucleotide
ctccaagtacagacctcacacaaatggtcccaacagcaccaggaccatggaacgcaga

SEQ ID NO: 381764 - DNA, 60 bp, Artificial
  Synthetic oligonucleotide
ctccaagtaccgagatgtcaatgagaggagtgagagtcagcaagatgggtgtagatgaat

SEQ ID NO: 381765 - DNA, 57 bp, Artificial
  Synthetic oligonucleotide
ctccaagtagtgcactcttaccaatgtgggatccattagtaaacgagtttcctgaaa

SEQ ID NO: 381766 - DNA, 60 bp, Artificial
  Synthetic oligonucleotide
ctccaagtatgacttggagtatgcagacgtaccccagagcatgcgttcggatacctttaa

SEQ ID NO: 381767 - DNA, 60 bp, Artificial
  Synthetic oligonucleotide
ctccaagtatgcatactctacttggagtcaagaacatgtgatgtagtgtctctcctgacg

SEQ ID NO: 381768 - DNA, 60 bp, Artificial
  Synthetic oligonucleotide
ctccaagtccgggagcacggagaatcgattttcactggctactccttgatcccaatgaca

SEQ ID NO: 381769 - DNA, 57 bp, Artificial
  Synthetic oligonucleotide
ctccaatacatgatttacatacactctgtttgttgcgaaacgtacagctctaattac

SEQ ID NO: 381770 - DNA, 54 bp, Artificial
  Synthetic oligonucleotide
ctccaatacccggtgcgagctccctagatttatcggggtggttcgtagcgggtg

SEQ ID NO: 381771 - DNA, 54 bp, Artificial
  Synthetic oligonucleotide
ctccaatactgcgatacgagtgttgccatcgaagacgtaaagaacagtcgtata

SEQ ID NO: 381772 - DNA, 55 bp, Artificial
  Synthetic oligonucleotide
ctccaatattagcggtaatggattttctggggccattagcagcaagattagtcgc

SEQ ID NO: 381773 - DNA, 55 bp, Artificial
  Synthetic oligonucleotide
ctccaatcatccatggcaaaactcagtcaggttcttccaaatcccactgggccag

SEQ ID NO: 381774 - DNA, 60 bp, Artificial
  Synthetic oligonucleotide
ctccaatcctctgatgatttcgctctcatagtgaatgcaccaaatcatgagggaatacaa

SEQ ID NO: 381775 - DNA, 60 bp, Artificial
  Synthetic oligonucleotide
ctccaatcgagcacattgcgagtatgagaaggaattacttcacagcagaagtgtcacact

SEQ ID NO: 381776 - DNA, 58 bp, Artificial
  Synthetic oligonucleotide
ctccaatcgcggaacaggtgtgatgtggctggtgtacgacactactcccggcggaaac

SEQ ID NO: 381777 - DNA, 55 bp, Artificial
  Synthetic oligonucleotide
ctccaatcttagaagttaccccagaaacacacccaacatctagggtccgcagtac

SEQ ID NO: 381778 - DNA, 60 bp, Artificial
  Synthetic oligonucleotide
ctccaatgcagaataaagcaaattgtgcgtatgtggcagaaagtaggacaagcaatgtat

SEQ ID NO: 381779 - DNA, 54 bp, Artificial
  Synthetic oligonucleotide
ctccaatgccaagaacactgattttgatgagattgggacatctagccttgaaac

SEQ ID NO: 381780 - DNA, 53 bp, Artificial
  Synthetic oligonucleotide
ctccaatgctaacgaaacggcaaaacgaagtatacggaaaatggatttcgtac

SEQ ID NO: 381781 - DNA, 55 bp, Artificial
  Synthetic oligonucleotide
ctccaatgctgttttccaactcagcgacggaacattgataagtcaaggcttaccg

SEQ ID NO: 381782 - DNA, 60 bp, Artificial
  Synthetic oligonucleotide
ctccaatggatcgttacaatgcagaatttgcatttaaatttgtgagttcagattgtagtt

SEQ ID NO: 381783 - DNA, 55 bp, Artificial
  Synthetic oligonucleotide
ctccaatgtgattcccgtggagacccagacaggtgcctactctgcccttgcaatg

SEQ ID NO: 381784 - DNA, 55 bp, Artificial
  Synthetic oligonucleotide
ctccaatgtttaataaagtggcggtgttaatttgtgaagcgttgaattcaattaa

SEQ ID NO: 381785 - DNA, 55 bp, Artificial
  Synthetic oligonucleotide
ctccaattaactctactcagcttgctgctactaaaaccccagctgtagcggcacc

SEQ ID NO: 381786 - DNA, 55 bp, Artificial
  Synthetic oligonucleotide
ctccaattagtggtgacgtccggtgttttgtggcagcagtctgctgattctggtg

SEQ ID NO: 381787 - DNA, 60 bp, Artificial
  Synthetic oligonucleotide
ctccaattatgaattcagtaacggtgaggcaagatctagagcgtcaacttactgatttgc

SEQ ID NO: 381788 - DNA, 60 bp, Artificial
  Synthetic oligonucleotide
ctccaattatgaattcagtcactgttaggcaagatcttgagagacagcttggagacttaa

SEQ ID NO: 381789 - DNA, 55 bp, Artificial
  Synthetic oligonucleotide
ctccaattgacggactctcttgggattccactacttgggaactcaccaggattag

SEQ ID NO: 381790 - DNA, 55 bp, Artificial
  Synthetic oligonucleotide
ctccaattggctttgcacccacaaatgtaaagagatattcctctgtgacaccgaa

SEQ ID NO: 381791 - DNA, 54 bp, Artificial
  Synthetic oligonucleotide
ctccaatttcaagtcctattaccgtaacaagtgaaatgggttggagaacgagtc

SEQ ID NO: 381792 - DNA, 60 bp, Artificial
  Synthetic oligonucleotide
ctccaatttggagtttagagctcgatcagtgcggcttgatctctgtagaggagatcaaga

SEQ ID NO: 381793 - DNA, 55 bp, Artificial
  Synthetic oligonucleotide
ctccacaaacaggtgaggtctcaggacatatattaattactacacctacagctgg

SEQ ID NO: 381794 - DNA, 55 bp, Artificial
  Synthetic oligonucleotide
ctccacaaatgcatttagaatacaatgttatgccaatgggtcttaaacaggcacc

SEQ ID NO: 381795 - DNA, 59 bp, Artificial
  Synthetic oligonucleotide
ctccacaacaaggggagttttacaggggctagacaatgccatatctgccctgacaagag

SEQ ID NO: 381796 - DNA, 60 bp, Artificial
  Synthetic oligonucleotide
ctccacaacattccaccaaactctgctagaccccagagtgagaggcctatactttcctgc

SEQ ID NO: 381797 - DNA, 58 bp, Artificial
  Synthetic oligonucleotide
ctccacaactggaagggttttcagctgaatctaggaaattacttctcattgttcaggc

SEQ ID NO: 381798 - DNA, 56 bp, Artificial
  Synthetic oligonucleotide
ctccacaacttgaggggttttcagccgaatcaagaaaattgcttcttattgttcaa

SEQ ID NO: 381799 - DNA, 59 bp, Artificial
  Synthetic oligonucleotide
ctccacaccgatagggccgtggctagccgtctctacggagtcccatcgcaccatgttta

SEQ ID NO: 381800 - DNA, 55 bp, Artificial
  Synthetic oligonucleotide
ctccacaccttatcgggttgtggtataacctgttgagagaacctgtgccaggaga

SEQ ID NO: 381801 - DNA, 58 bp, Artificial
  Synthetic oligonucleotide
ctccacacttacgttctgtgcgcgggacccgatggactctcgttcacccacttacagc

SEQ ID NO: 381802 - DNA, 60 bp, Artificial
  Synthetic oligonucleotide
ctccacagaatttcaggatatttagcaagatggattttggaggaatataagagagatgat

SEQ ID NO: 381803 - DNA, 54 bp, Artificial
  Synthetic oligonucleotide
ctccacagagcgccaaataattatagggaatccatactttaaggttgtaggtga

SEQ ID NO: 381804 - DNA, 55 bp, Artificial
  Synthetic oligonucleotide
ctccacagagctggtttcatgacagtctcgagtaacaccagtgctccggtggttg

SEQ ID NO: 381805 - DNA, 59 bp, Artificial
  Synthetic oligonucleotide
ctccacagcagacctaatacgattggcaaattacctgcttttcataaccggcatgcaac

SEQ ID NO: 381806 - DNA, 53 bp, Artificial
  Synthetic oligonucleotide
ctccacagcgagcttgctcagtcctaggcctctcgcctgtctcaaaggttcct

SEQ ID NO: 381807 - DNA, 60 bp, Artificial
  Synthetic oligonucleotide
ctccacagtattccaccagactctgcaagatcccagagtaaggggcctgtattaccctgc

SEQ ID NO: 381808 - DNA, 60 bp, Artificial
  Synthetic oligonucleotide
ctccacagtattccaccaggctctacaggatcccagagtcaggggtctgtattttcctgc

SEQ ID NO: 381809 - DNA, 60 bp, Artificial
  Synthetic oligonucleotide
ctccacagtgttccatcgggctctgcaggatcccagagtgagaggcctgtatttccctgc

SEQ ID NO: 381810 - DNA, 59 bp, Artificial
  Synthetic oligonucleotide
ctccacagttactctccaggtgaaatcaatagggtggccgcatgcctcagaaaacttgg

SEQ ID NO: 381811 - DNA, 57 bp, Artificial
  Synthetic oligonucleotide
ctccacatatataatgtcaactgacagaagtgggagttcaaaagaggcagcatcgat

SEQ ID NO: 381812 - DNA, 58 bp, Artificial
  Synthetic oligonucleotide
ctccacatcgcgctactgttccgattgcctctacaggccttcgtccagtaacaaccgt

SEQ ID NO: 381813 - DNA, 58 bp, Artificial
  Synthetic oligonucleotide
ctccacattccggaagtctgcctgaagtgggagctaatggacgaagactaccagggga

SEQ ID NO: 381814 - DNA, 51 bp, Artificial
  Synthetic oligonucleotide
ctccaccaaaccgggattaaaactagataagaatttcctttatccccgcat

SEQ ID NO: 381815 - DNA, 54 bp, Artificial
  Synthetic oligonucleotide
ctccaccaaggaatggacagtctggttgaggctcctaagtctctgcagatcttt

SEQ ID NO: 381816 - DNA, 59 bp, Artificial
  Synthetic oligonucleotide
ctccaccaagtcaactttgagcctgaactggagtggacacaccgtcctgagcctcttgg

SEQ ID NO: 381817 - DNA, 60 bp, Artificial
  Synthetic oligonucleotide
ctccaccaatatgcggttgggtcacagctcccatgtgagcccgagccagatgtaagagtg

SEQ ID NO: 381818 - DNA, 58 bp, Artificial
  Synthetic oligonucleotide
ctccaccacgttccaccaaactcttcctgctggtggctccagttcaggaacagtgaac

SEQ ID NO: 381819 - DNA, 54 bp, Artificial
  Synthetic oligonucleotide
ctccaccactttccaccaaactcttcaagatcccaaagtcagggccctgtactt

SEQ ID NO: 381820 - DNA, 53 bp, Artificial
  Synthetic oligonucleotide
ctccaccagacggtaatacttctggcacacaatactttgcttttggcacacct

SEQ ID NO: 381821 - DNA, 55 bp, Artificial
  Synthetic oligonucleotide
ctccaccatgaaccgctcccctgtgaggaactactgtcttcacgcagaaagcgtc

SEQ ID NO: 381822 - DNA, 55 bp, Artificial
  Synthetic oligonucleotide
ctccacccaatttgactgatgtgaagccaacgaccattgtgctgactgagtgtgc

SEQ ID NO: 381823 - DNA, 54 bp, Artificial
  Synthetic oligonucleotide
ctccaccctacgcgaactcgaagcctccaacactgctctccaacgtcaggtcat

SEQ ID NO: 381824 - DNA, 54 bp, Artificial
  Synthetic oligonucleotide
ctccaccgacctccgttctccgcgaacggcgctctacgaccctgaaacttctgt

SEQ ID NO: 381825 - DNA, 55 bp, Artificial
  Synthetic oligonucleotide
ctccaccgggtgaacaattcacacacctagtacctttgatgcgtaaagggcagcc

SEQ ID NO: 381826 - DNA, 58 bp, Artificial
  Synthetic oligonucleotide
ctccaccgtgttttgtggtgtttccagtgaggtcccaggatggtcgtgggatgatgga

SEQ ID NO: 381827 - DNA, 55 bp, Artificial
  Synthetic oligonucleotide
ctccacctacagagagcaatgctcgatcattctcaatgctactcaatacgggtgc

SEQ ID NO: 381828 - DNA, 51 bp, Artificial
  Synthetic oligonucleotide
ctccacctcactcacttttccaagcaattcaatttgcttcatgcacgatgc

SEQ ID NO: 381829 - DNA, 59 bp, Artificial
  Synthetic oligonucleotide
ctccacctctctttccagctcgaactctcgcctggaatccgaaatcacacgcctctccc

SEQ ID NO: 381830 - DNA, 57 bp, Artificial
  Synthetic oligonucleotide
ctccacctgtggtggagaccagtctgggagccccgccaacctctcgacccggctgag

SEQ ID NO: 381831 - DNA, 60 bp, Artificial
  Synthetic oligonucleotide
ctccacgacattccaccaaactctgctagatcccagagtgagggttcctgctggtggctc

SEQ ID NO: 381832 - DNA, 60 bp, Artificial
  Synthetic oligonucleotide
ctccacgacggatcaacaacgttactttctgcccagtctgtcataacagacggcacttga

SEQ ID NO: 381833 - DNA, 59 bp, Artificial
  Synthetic oligonucleotide
ctccacgagtagtagccctactcctcttatccctgcagcatcccttctagttaactcga

SEQ ID NO: 381834 - DNA, 59 bp, Artificial
  Synthetic oligonucleotide
ctccacgatcatccaaggccagtgcgacttccgcccggagctagtcctcgccgcccacc

SEQ ID NO: 381835 - DNA, 60 bp, Artificial
  Synthetic oligonucleotide
ctccacgcagatccactacgtcaatcactgtacctagatttcagactcctcaaaatccta

SEQ ID NO: 381836 - DNA, 60 bp, Artificial
  Synthetic oligonucleotide
ctccacgccgcagcagtactccattgccacgcaatcaatctgtaggccgtaggaggggtt

SEQ ID NO: 381837 - DNA, 59 bp, Artificial
  Synthetic oligonucleotide
ctccacgccttgctccggctcatggctaagggacgtttgggattggatatgcacggtgt

SEQ ID NO: 381838 - DNA, 54 bp, Artificial
  Synthetic oligonucleotide
ctccacgcgtgtcgctacactatactacaaatcattgggataactcgcctggag

SEQ ID NO: 381839 - DNA, 55 bp, Artificial
  Synthetic oligonucleotide
ctccacgctcggtccactggcgggtgtgagtaacaggactgttgtttcgtagcgg

SEQ ID NO: 381840 - DNA, 54 bp, Artificial
  Synthetic oligonucleotide
ctccacggggtgccccagtcgcttaagctggtgcaggccactgcgcatgtttga

SEQ ID NO: 381841 - DNA, 56 bp, Artificial
  Synthetic oligonucleotide
ctccacggtaaattgatatttcctgattacatcggaggagttagagggcggaaggc

SEQ ID NO: 381842 - DNA, 55 bp, Artificial
  Synthetic oligonucleotide
ctccacgtattgtttaacatctgaggcgctcttagccgcctgaacgtttggatgg

SEQ ID NO: 381843 - DNA, 55 bp, Artificial
  Synthetic oligonucleotide
ctccacgtccgatcattcatgctgtggctcccgattatagggttgagcagaaccc

SEQ ID NO: 381844 - DNA, 55 bp, Artificial
  Synthetic oligonucleotide
ctccacgtttatcagtttccctaaccttggtaagactgaacccaatcgatctcgc

SEQ ID NO: 381845 - DNA, 55 bp, Artificial
  Synthetic oligonucleotide
ctccactaatcctgcgtaggctatactaaacatatacccataggtgtttgttagg

SEQ ID NO: 381846 - DNA, 60 bp, Artificial
  Synthetic oligonucleotide
ctccactagcgcgtcgcttcactagatggactcacgtgcgttcggggcacgaagtaccac

SEQ ID NO: 381847 - DNA, 57 bp, Artificial
  Synthetic oligonucleotide
ctccactaggcgtccctggtgctgatcggaactataacctggcgttcggatttccac

SEQ ID NO: 381848 - DNA, 56 bp, Artificial
  Synthetic oligonucleotide
ctccactataatcataagctccattagttttaacagttactaaggcgttacttcca

SEQ ID NO: 381849 - DNA, 59 bp, Artificial
  Synthetic oligonucleotide
ctccactatatcaacgcctcagcaaccttttccaggttccgcatggtaccaggagtcaa

SEQ ID NO: 381850 - DNA, 60 bp, Artificial
  Synthetic oligonucleotide
ctccactcacatccaccatcgccaccgggactaatcttgtgctatatgctgccccgctta

SEQ ID NO: 381851 - DNA, 55 bp, Artificial
  Synthetic oligonucleotide
ctccactcaggataaattggaagcactgtttcagggacctccccagtttagagaa

SEQ ID NO: 381852 - DNA, 55 bp, Artificial
  Synthetic oligonucleotide
ctccactcagttcggtcccctcacttgcatgcgcttaactggcgaaccagggacc

SEQ ID NO: 381853 - DNA, 58 bp, Artificial
  Synthetic oligonucleotide
ctccactctatcatgctatggatgtcacaactcaggttggagatgattctggaggctt

SEQ ID NO: 381854 - DNA, 60 bp, Artificial
  Synthetic oligonucleotide
ctccactgatggtgacattcgacagaacccagaactccgcatcgacctgtccaccatgtc

SEQ ID NO: 381855 - DNA, 58 bp, Artificial
  Synthetic oligonucleotide
ctccactgggtcgttaaatctaccttcaatgtcaatccacgtgggggcattaggatca

SEQ ID NO: 381856 - DNA, 55 bp, Artificial
  Synthetic oligonucleotide
ctccactggtgagcgagcctcaggaatgtttgacagtgtagtgctctgcgagtgc

SEQ ID NO: 381857 - DNA, 55 bp, Artificial
  Synthetic oligonucleotide
ctccactgtcggggttgtcacgctcaacgctttcagacggatctgctctgtcaag

SEQ ID NO: 381858 - DNA, 58 bp, Artificial
  Synthetic oligonucleotide
ctccacttcgacgaggccttaatggcccacgccggaatggtgtttttctgtgctcagc

SEQ ID NO: 381859 - DNA, 55 bp, Artificial
  Synthetic oligonucleotide
ctccacttcgtttgagtacactcttgggttgaagtccagatgtccactaaggtaa

SEQ ID NO: 381860 - DNA, 57 bp, Artificial
  Synthetic oligonucleotide
ctccactttagatttctataggtcatggttagcatacattcaaaggttactatacgc

SEQ ID NO: 381861 - DNA, 55 bp, Artificial
  Synthetic oligonucleotide
ctccagaaactcacctacagaggtgactgatatagttgttggagccataagcact

SEQ ID NO: 381862 - DNA, 58 bp, Artificial
  Synthetic oligonucleotide
ctccagaaagagttgggaatttcccgtgagggagtggccgagcagacggagagattga

SEQ ID NO: 381863 - DNA, 55 bp, Artificial
  Synthetic oligonucleotide
ctccagaactgatgccagaaaactgcctcttttctagtgaggagttcaacgaatt

SEQ ID NO: 381864 - DNA, 57 bp, Artificial
  Synthetic oligonucleotide
ctccagaagtcgtccgcaagcgaaatatatacccggatctgtctgcccttaaaggcg

SEQ ID NO: 381865 - DNA, 60 bp, Artificial
  Synthetic oligonucleotide
ctccagacaccgtaggtcgtgatcttatacgtgaccttatacttgtcatacgagctaaga

SEQ ID NO: 381866 - DNA, 59 bp, Artificial
  Synthetic oligonucleotide
ctccagacccacgtgttaacatggccatggacccgaagcaaacccagatgttcatggta

SEQ ID NO: 381867 - DNA, 55 bp, Artificial
  Synthetic oligonucleotide
ctccagacggggttcatagcgtcactcttttacacccgcagcttcaactcctcgg

SEQ ID NO: 381868 - DNA, 56 bp, Artificial
  Synthetic oligonucleotide
ctccagactacatacaaaatttcgctacaatcggggtttcggcgacacctgaaata

SEQ ID NO: 381869 - DNA, 55 bp, Artificial
  Synthetic oligonucleotide
ctccagagaagacaaagccaccgctgcctagtgtccagaaactagtagaggacag

SEQ ID NO: 381870 - DNA, 55 bp, Artificial
  Synthetic oligonucleotide
ctccagagaagaccaaagagggagtggacaagtggttacatatgctcttaacacc

SEQ ID NO: 381871 - DNA, 55 bp, Artificial
  Synthetic oligonucleotide
ctccagagactttcccaaccatctcacagttccttttcgaactggggaagcagcc

SEQ ID NO: 381872 - DNA, 55 bp, Artificial
  Synthetic oligonucleotide
ctccagagccgacataatccctgtgccacgtcctttacggactgacacggtaggg

SEQ ID NO: 381873 - DNA, 55 bp, Artificial
  Synthetic oligonucleotide
ctccagaggaccccttcaacgaacaaagaagcgctctgaggcgtcagggtgagac

SEQ ID NO: 381874 - DNA, 51 bp, Artificial
  Synthetic oligonucleotide
ctccagaggttgttaagtattgtgaatataataagtggataattccagctg

SEQ ID NO: 381875 - DNA, 60 bp, Artificial
  Synthetic oligonucleotide
ctccagatacatccactctccttatagaggattcaaccccatatacgcctgcctatttcc

SEQ ID NO: 381876 - DNA, 55 bp, Artificial
  Synthetic oligonucleotide
ctccagatatacaactggtggagctagaaacttgggtcttgagtatgatgttgac

SEQ ID NO: 381877 - DNA, 55 bp, Artificial
  Synthetic oligonucleotide
ctccagatcccgactcctggcttctagatgaccaagctgccaccctacacgagga

SEQ ID NO: 381878 - DNA, 55 bp, Artificial
  Synthetic oligonucleotide
ctccagatgacaccgagttgtcggttctgattaaatgcttgaggtacttaggcct

SEQ ID NO: 381879 - DNA, 60 bp, Artificial
  Synthetic oligonucleotide
ctccagatgccgtctccaaagtcgccatgccatcacccaattaccactctgagacaattc

SEQ ID NO: 381880 - DNA, 58 bp, Artificial
  Synthetic oligonucleotide
ctccagatgttatgaagaaagtggcacctatgttgtataaaagtgcaaaatcacgggt

SEQ ID NO: 381881 - DNA, 60 bp, Artificial
  Synthetic oligonucleotide
ctccagattatctgtcagaactgataaggccgttccatatgacccatactctttttggcc

SEQ ID NO: 381882 - DNA, 59 bp, Artificial
  Synthetic oligonucleotide
ctccagattgatgcgaaatgtgttggctgccctgattgctttgagagctattcctgcaa

SEQ ID NO: 381883 - DNA, 55 bp, Artificial
  Synthetic oligonucleotide
ctccagcaataatacattctcaaaactgttgttgcccggattgttcttggcagcc

SEQ ID NO: 381884 - DNA, 55 bp, Artificial
  Synthetic oligonucleotide
ctccagcaatctagcaacagagatctgtgcacttgaccactgtagagcacctcca

SEQ ID NO: 381885 - DNA, 58 bp, Artificial
  Synthetic oligonucleotide
ctccagcacggagaggataatggtgagcattgaccgttttttgagagttcgggaccaa

SEQ ID NO: 381886 - DNA, 55 bp, Artificial
  Synthetic oligonucleotide
ctccagcactgagagggtggttgtgagcattgatcgtttcttaagagtccgagac

SEQ ID NO: 381887 - DNA, 55 bp, Artificial
  Synthetic oligonucleotide
ctccagcagtgggtcccggggaggggaaacaggacaggaagagtctctatccttc

SEQ ID NO: 381888 - DNA, 55 bp, Artificial
  Synthetic oligonucleotide
ctccagcgttaccatagcctcctctcagggctctaccctccaggaagcggcttgc

SEQ ID NO: 381889 - DNA, 60 bp, Artificial
  Synthetic oligonucleotide
ctccagctacacatcctctctgctgacgatagccagtttcattaagaacagaccgattga

SEQ ID NO: 381890 - DNA, 55 bp, Artificial
  Synthetic oligonucleotide
ctccaggaacaagatatcaatacaatgtcctcccgcaaggatggaaggggtcacc

SEQ ID NO: 381891 - DNA, 55 bp, Artificial
  Synthetic oligonucleotide
ctccaggaaggcctggaacctccgtgaccataggaggaagtcacctaggtaaggc

SEQ ID NO: 381892 - DNA, 48 bp, Artificial
  Synthetic oligonucleotide
ctccaggacccccgaaaggaggggggtgggccctggacctccgggaac

SEQ ID NO: 381893 - DNA, 59 bp, Artificial
  Synthetic oligonucleotide
ctccaggactgtaagatcgctcctttgatggtggcatacatgttggaaagggaactggt

SEQ ID NO: 381894 - DNA, 55 bp, Artificial
  Synthetic oligonucleotide
ctccaggattgtgactgaggagcacaagacacaggttaacatcactactagagtg

SEQ ID NO: 381895 - DNA, 60 bp, Artificial
  Synthetic oligonucleotide
ctccaggcactgtctattcgattgacagaccactgtctatcgattacaacctgggagttg

SEQ ID NO: 381896 - DNA, 54 bp, Artificial
  Synthetic oligonucleotide
ctccaggccctccatcttttcctcaaaaccaacgtccgaacgcaattcggccca

SEQ ID NO: 381897 - DNA, 60 bp, Artificial
  Synthetic oligonucleotide
ctccaggccttatttcgattgggcctctgatccccagtcttgacatagatgcgcatctga

SEQ ID NO: 381898 - DNA, 59 bp, Artificial
  Synthetic oligonucleotide
ctccaggccttgactgacctggtatccaaggcgctggaggccaaatacatagaacctta

SEQ ID NO: 381899 - DNA, 55 bp, Artificial
  Synthetic oligonucleotide
ctccaggcgaagccagcatacaccccgcaagaacggggccagtgggcagagttct

SEQ ID NO: 381900 - DNA, 55 bp, Artificial
  Synthetic oligonucleotide
ctccaggcgcgcgagacaaacaagaaatttgacactcgtgccaaatacctgggac

SEQ ID NO: 381901 - DNA, 55 bp, Artificial
  Synthetic oligonucleotide
ctccagggaaaacagctacgcaggagttgaggggctagggctgcagagattgggt

SEQ ID NO: 381902 - DNA, 55 bp, Artificial
  Synthetic oligonucleotide
ctccagggtacatattaccaccttctgcacgaggtacgaaagagttcgcattacc

SEQ ID NO: 381903 - DNA, 53 bp, Artificial
  Synthetic oligonucleotide
ctccagggtccgggtaagggtcctcaccgaaaggcagcctcgttactggcgga

SEQ ID NO: 381904 - DNA, 55 bp, Artificial
  Synthetic oligonucleotide
ctccagggtggtttgaagtccttatggaccttcgatcacctaaggggcgattgcc

SEQ ID NO: 381905 - DNA, 54 bp, Artificial
  Synthetic oligonucleotide
ctccagggttactattcgagggtaagacctcccaattaaagacgatacgccata

SEQ ID NO: 381906 - DNA, 55 bp, Artificial
  Synthetic oligonucleotide
ctccaggtaaaatcgtaattggcctctttgacagggcccgatttgattgggccga

SEQ ID NO: 381907 - DNA, 58 bp, Artificial
  Synthetic oligonucleotide
ctccaggtaggcaagtgacatcccgccctgtggacacatcccctctaccgatctcggg

SEQ ID NO: 381908 - DNA, 60 bp, Artificial
  Synthetic oligonucleotide
ctccaggtccgccgcttgtgactcctccaggtccatcttaagatcgtggcggtcatctca

SEQ ID NO: 381909 - DNA, 57 bp, Artificial
  Synthetic oligonucleotide
ctccaggtgagatcaatagggtggccgcatgcctcagaaaacttggggttccgccct

SEQ ID NO: 381910 - DNA, 55 bp, Artificial
  Synthetic oligonucleotide
ctccaggttatgctttgcttagatgtaatgacacaaagtattcaggctttatgcc

SEQ ID NO: 381911 - DNA, 57 bp, Artificial
  Synthetic oligonucleotide
ctccagtacaagcgatacaaatattgcctgctggtttgggtagatacttactccggg

SEQ ID NO: 381912 - DNA, 60 bp, Artificial
  Synthetic oligonucleotide
ctccagtcaattcctggctaggcaacataatcatgtttgcccctacactgtgggtgaggg

SEQ ID NO: 381913 - DNA, 55 bp, Artificial
  Synthetic oligonucleotide
ctccagtctaacggctcccattggccgtctcgtttgatgtagcagccgcttaaag

SEQ ID NO: 381914 - DNA, 57 bp, Artificial
  Synthetic oligonucleotide
ctccagtgacgcatccgcctctgaatgaggaagtggttccaagtggccgttagtatt

SEQ ID NO: 381915 - DNA, 60 bp, Artificial
  Synthetic oligonucleotide
ctccagtgctgttattctagatgataactttgtaacaaaggccacagccctcacctatga

SEQ ID NO: 381916 - DNA, 54 bp, Artificial
  Synthetic oligonucleotide
ctccagtgcttaccaccggtatttcttcggacccactcgttacaagtatcttaa

SEQ ID NO: 381917 - DNA, 55 bp, Artificial
  Synthetic oligonucleotide
ctccagtgggccttgctgtcgacaccccttgggtagaaaaggagtcagctctgtc

SEQ ID NO: 381918 - DNA, 52 bp, Artificial
  Synthetic oligonucleotide
ctccagtgttaaacgtcctgccctacaaattagtggtctcgtttacgggaac

SEQ ID NO: 381919 - DNA, 60 bp, Artificial
  Synthetic oligonucleotide
ctccagttaactgggggcatggtgaattgtctgattcaacattagttcagccaacgcttg

SEQ ID NO: 381920 - DNA, 54 bp, Artificial
  Synthetic oligonucleotide
ctccagttacctttcattaaatgcatggggattttatcagtcggttaataaagg

SEQ ID NO: 381921 - DNA, 58 bp, Artificial
  Synthetic oligonucleotide
ctccagttagtgttatcctctatgataagtccccttgtaataagcacctcagttctaa

SEQ ID NO: 381922 - DNA, 60 bp, Artificial
  Synthetic oligonucleotide
ctccagttcagaaattcatcatattcgtctcattcttttgcggctgcgcaccgcgtgtgt

SEQ ID NO: 381923 - DNA, 55 bp, Artificial
  Synthetic oligonucleotide
ctccagttgaagagaatgttgtctctgactatgcttgttactttggtccgtggtc

SEQ ID NO: 381924 - DNA, 55 bp, Artificial
  Synthetic oligonucleotide
ctccagttgggtgtgcaaaaggtggttcgaatccaatgccttccttcaatcgcct

SEQ ID NO: 381925 - DNA, 55 bp, Artificial
  Synthetic oligonucleotide
ctccagtttaaaacagttgacacgaaaacactaccatatatagtagccgtaaaca

SEQ ID NO: 381926 - DNA, 52 bp, Artificial
  Synthetic oligonucleotide
ctccataaagttacaatcatcagttgatcaggataagatattttcccttaga

SEQ ID NO: 381927 - DNA, 59 bp, Artificial
  Synthetic oligonucleotide
ctccatacaatcttctcagaggagcagtccatggcccatcaattaaccgttcgaaaaat

SEQ ID NO: 381928 - DNA, 60 bp, Artificial
  Synthetic oligonucleotide
ctccatacaattcaaggtttgaatcagttgcttggtcagcaagcgcatgtcatgatggca

SEQ ID NO: 381929 - DNA, 60 bp, Artificial
  Synthetic oligonucleotide
ctccatacatagctgagacagcgcttcggaaattgtatactgacaaaggagcggaaacag

SEQ ID NO: 381930 - DNA, 58 bp, Artificial
  Synthetic oligonucleotide
ctccatacgtctttgctaccaccaattgtgaccgcctggccccaccaaccatagcgga

SEQ ID NO: 381931 - DNA, 58 bp, Artificial
  Synthetic oligonucleotide
ctccatagaagaatacctccaggatagggatcggtattatgaagaattggccatagcc

SEQ ID NO: 381932 - DNA, 59 bp, Artificial
  Synthetic oligonucleotide
ctccatagaatggaggctaagaaggtatagcacacaagtagatcctgaccaggcagacc

SEQ ID NO: 381933 - DNA, 50 bp, Artificial
  Synthetic oligonucleotide
ctccatataatgcggattggtcaggagttaagatgccttatcaaattcgt

SEQ ID NO: 381934 - DNA, 59 bp, Artificial
  Synthetic oligonucleotide
ctccatatacctacaagaatcagacagggcttagaaaggcttttgctataagatgggtg

SEQ ID NO: 381935 - DNA, 55 bp, Artificial
  Synthetic oligonucleotide
ctccatattgagcttgaggaacaaactataggtgtagatgtgcatgcgttggggc

SEQ ID NO: 381936 - DNA, 55 bp, Artificial
  Synthetic oligonucleotide
ctccatcactttccgcaccagtgtacactgcaaccaagaggacaccctcccatgg

SEQ ID NO: 381937 - DNA, 60 bp, Artificial
  Synthetic oligonucleotide
ctccatcaggttgcttcaatccacgtatattgcgagctaatgccattatgatgtctgtga

SEQ ID NO: 381938 - DNA, 55 bp, Artificial
  Synthetic oligonucleotide
ctccatcagtgaaggtatgtatgattggtactgtatcaaagttacagcctggtga

SEQ ID NO: 381939 - DNA, 55 bp, Artificial
  Synthetic oligonucleotide
ctccatcatctgtaattacaaagaatcgtaaggtactgaccaatgattggctaca

SEQ ID NO: 381940 - DNA, 56 bp, Artificial
  Synthetic oligonucleotide
ctccatccaagactcgcacctctgcgcgaagagccagctcggtcgatgaacgaccg

SEQ ID NO: 381941 - DNA, 54 bp, Artificial
  Synthetic oligonucleotide
ctccatcgcgttccacagtaatcggctcgtctaagctaactaaaactaaaaact

SEQ ID NO: 381942 - DNA, 60 bp, Artificial
  Synthetic oligonucleotide
ctccatctacagattccccagtggtaactactagtagaggatccagtgctgtactagagg

SEQ ID NO: 381943 - DNA, 60 bp, Artificial
  Synthetic oligonucleotide
ctccatctaggtatcatgggctatcattttggactatagatgtctctaaatctctcaccc

SEQ ID NO: 381944 - DNA, 54 bp, Artificial
  Synthetic oligonucleotide
ctccatcttattggatttacaatattaaacactattctgattttacatttgaaa

SEQ ID NO: 381945 - DNA, 60 bp, Artificial
  Synthetic oligonucleotide
ctccatctttgtgtgcctctcgggcacatatgatgtacttagggttccaacgaccaacga

SEQ ID NO: 381946 - DNA, 55 bp, Artificial
  Synthetic oligonucleotide
ctccatgagggtgtacatgacgttccacaggtcgatggcgattggcgtgaggacc

SEQ ID NO: 381947 - DNA, 58 bp, Artificial
  Synthetic oligonucleotide
ctccatgagtgagggtagattgctgacattcgctcatgccgacagtgagctgctgaac

SEQ ID NO: 381948 - DNA, 51 bp, Artificial
  Synthetic oligonucleotide
ctccatgagttacaactaagtcacaagatgatggatgaatattgctagtga

SEQ ID NO: 381949 - DNA, 60 bp, Artificial
  Synthetic oligonucleotide
ctccatgattctaatgttcgaaacctccatgaaaaggtcagacgaatgctgaaggacaat

SEQ ID NO: 381950 - DNA, 59 bp, Artificial
  Synthetic oligonucleotide
ctccatgcaacagcatgggggggtccagagtcagtcccctctttatttacctagagatc

SEQ ID NO: 381951 - DNA, 57 bp, Artificial
  Synthetic oligonucleotide
ctccatgcaagtggttgtgggtttttgaagacttcgatgggtttacaatccattcga

SEQ ID NO: 381952 - DNA, 59 bp, Artificial
  Synthetic oligonucleotide
ctccatgccttggactagtgtgccgtcaagttggcgtatatcacggtcctcttctcacc

SEQ ID NO: 381953 - DNA, 60 bp, Artificial
  Synthetic oligonucleotide
ctccatgctccggctcctggctaagagacatctgggactgggtatgcgaggtactgagcg

SEQ ID NO: 381954 - DNA, 60 bp, Artificial
  Synthetic oligonucleotide
ctccatgtgccgactcttggctgtgggaggtatgggattgggtctgtaccgtgctgagtg

SEQ ID NO: 381955 - DNA, 50 bp, Artificial
  Synthetic oligonucleotide
ctccatgtgctagttgtgtcgtggaccagagaccacggaaatgtggtgac

SEQ ID NO: 381956 - DNA, 55 bp, Artificial
  Synthetic oligonucleotide
ctccattaactgttttagcgataacgcgcaagtctgcaaatgcgcactaatgcgg

SEQ ID NO: 381957 - DNA, 55 bp, Artificial
  Synthetic oligonucleotide
ctccattaggagattatgccgcgttttctaatgcgatttgggtagctagaagatc

SEQ ID NO: 381958 - DNA, 60 bp, Artificial
  Synthetic oligonucleotide
ctccattcaaactgagttctagtgagcctcactgtgctctgctagattgcatcatgtatc

SEQ ID NO: 381959 - DNA, 60 bp, Artificial
  Synthetic oligonucleotide
ctccattccctcagtggaagggaacgcagccgccccacaggctgctgcggtggttgctga

SEQ ID NO: 381960 - DNA, 60 bp, Artificial
  Synthetic oligonucleotide
ctccattctcaatacaagccaaagaggaatccttgaggatgaacaaatgtatcaaaagtg

SEQ ID NO: 381961 - DNA, 57 bp, Artificial
  Synthetic oligonucleotide
ctccattgaatagaaattatgtcttcacaggctaccactttacaagaactagtaagg

SEQ ID NO: 381962 - DNA, 55 bp, Artificial
  Synthetic oligonucleotide
ctccattgacgtcaatcagcatgtgccaagaacattgagtcatagggaccacctt

SEQ ID NO: 381963 - DNA, 55 bp, Artificial
  Synthetic oligonucleotide
ctccattgataatacagttgctacattagacattacaccagctacaccaccagtg

SEQ ID NO: 381964 - DNA, 55 bp, Artificial
  Synthetic oligonucleotide
ctccattgatggtgctactaccttcatgcaaaacttcttctctggccttgccccg

SEQ ID NO: 381965 - DNA, 59 bp, Artificial
  Synthetic oligonucleotide
ctccattgcacctatggctgcatctttttctggtttacgcaattctgttcgacccagtt

SEQ ID NO: 381966 - DNA, 51 bp, Artificial
  Synthetic oligonucleotide
ctccattgcctggactctcatcaagaacgctgacaagccctccctaaaaag

SEQ ID NO: 381967 - DNA, 55 bp, Artificial
  Synthetic oligonucleotide
ctccattgctgacccagacaaacagggcattgattaccactcggtggctaatgcc

SEQ ID NO: 381968 - DNA, 60 bp, Artificial
  Synthetic oligonucleotide
ctccattgggcactccaccaacagtaagtaacagtgatttcatatgtgttggatggtcga

SEQ ID NO: 381969 - DNA, 56 bp, Artificial
  Synthetic oligonucleotide
ctccatttaaggggcccagagaatgtgaaactgagctatccctttccttttcacca

SEQ ID NO: 381970 - DNA, 55 bp, Artificial
  Synthetic oligonucleotide
ctccatttgagtggaagcatgtcctgatcacccacggtgtgcctgtaccggcact

SEQ ID NO: 381971 - DNA, 57 bp, Artificial
  Synthetic oligonucleotide
ctccattttgtactgcgcgaccgctttcggtcgcggttggcacacacatacatttgt

SEQ ID NO: 381972 - DNA, 55 bp, Artificial
  Synthetic oligonucleotide
ctcccaaacctgggaattcccttgtggagcactgttgatcatcgtattacataag

SEQ ID NO: 381973 - DNA, 54 bp, Artificial
  Synthetic oligonucleotide
ctcccaacgaaagataacgtatcgacagtgggcgtcttcgtcgtaaccaaccga

SEQ ID NO: 381974 - DNA, 60 bp, Artificial
  Synthetic oligonucleotide
ctcccaactcatgctgaccccagtagtatgatttatgtgaatgggattgctactaaagtc

SEQ ID NO: 381975 - DNA, 55 bp, Artificial
  Synthetic oligonucleotide
ctcccaactgtcgtcacttacaccactactaacgtgaattatgttcggatgaatg

SEQ ID NO: 381976 - DNA, 53 bp, Artificial
  Synthetic oligonucleotide
ctcccaagaagcaaacgccgaccaagaaacggaaacgacccctccggatctca

SEQ ID NO: 381977 - DNA, 53 bp, Artificial
  Synthetic oligonucleotide
ctcccaagccatacccccgtcccgacgacaacaaaccgaaagacgctgcgccc

SEQ ID NO: 381978 - DNA, 60 bp, Artificial
  Synthetic oligonucleotide
ctcccaatacgccatgtggcgatgcttgtcgctacgtgttatactggtaccaactgtcgg

SEQ ID NO: 381979 - DNA, 55 bp, Artificial
  Synthetic oligonucleotide
ctcccaatagtttggagagtgatccgtgtttcgaacgcgatgaagctccgtcgac

SEQ ID NO: 381980 - DNA, 55 bp, Artificial
  Synthetic oligonucleotide
ctcccaatcacgccaaatctcttacacaaacattagtgtcaaacaatgattggtc

SEQ ID NO: 381981 - DNA, 59 bp, Artificial
  Synthetic oligonucleotide
ctcccaatcttctattgattcaccggggtgttgtcttgacatcttgcggagtctactac

SEQ ID NO: 381982 - DNA, 55 bp, Artificial
  Synthetic oligonucleotide
ctcccacaagttatgatttagtaacggttaagaaggttgaagatcatggctaatg

SEQ ID NO: 381983 - DNA, 56 bp, Artificial
  Synthetic oligonucleotide
ctcccacacattccaccaagctgtactaaatcccaaagtgaggggcctatactttc

SEQ ID NO: 381984 - DNA, 55 bp, Artificial
  Synthetic oligonucleotide
ctcccacaccgtaggcgaggacgtaccgacattgaccgtctcaggacatgtgtgg

SEQ ID NO: 381985 - DNA, 55 bp, Artificial
  Synthetic oligonucleotide
ctcccacactatggacaaccgcatctccacaaactaatgccaatgtgagatctga

SEQ ID NO: 381986 - DNA, 55 bp, Artificial
  Synthetic oligonucleotide
ctcccacaggttcggcaatcaaacagtgcaggtgctaaggaatttgggctacaac

SEQ ID NO: 381987 - DNA, 59 bp, Artificial
  Synthetic oligonucleotide
ctcccacagtcagtggatctttagtttctacagatgcacagattttcaataggcctttt

SEQ ID NO: 381988 - DNA, 59 bp, Artificial
  Synthetic oligonucleotide
ctcccacagtgttggaaggttcacaatggaagctacttaaatgagtcacagttcaagaa

SEQ ID NO: 381989 - DNA, 55 bp, Artificial
  Synthetic oligonucleotide
ctcccacatttacagggtgatcacggagaatggacacgagctgtgcgataacctc

SEQ ID NO: 381990 - DNA, 55 bp, Artificial
  Synthetic oligonucleotide
ctcccacccgttgcagatttggcccacaaaggcattccttttactagtccagtta

SEQ ID NO: 381991 - DNA, 55 bp, Artificial
  Synthetic oligonucleotide
ctcccacctgatcgacggtctggtcaacggtattcgcaatcgcttcacggctgcg

SEQ ID NO: 381992 - DNA, 60 bp, Artificial
  Synthetic oligonucleotide
ctcccacggcgataaaggactactcgcgaccgccctagttgataaaacagctcatgagca

SEQ ID NO: 381993 - DNA, 55 bp, Artificial
  Synthetic oligonucleotide
ctcccacgtgatgctcatctcaaggaattgagattcgccacgtgtagagtgggcc

SEQ ID NO: 381994 - DNA, 53 bp, Artificial
  Synthetic oligonucleotide
ctcccacgtggtggtagaaagacggggtctagaggttagagaagaccctccag

SEQ ID NO: 381995 - DNA, 60 bp, Artificial
  Synthetic oligonucleotide
ctcccactacaggaggcagaacagcttgtgccggaaagctcttgtaacatggacaatcac

SEQ ID NO: 381996 - DNA, 60 bp, Artificial
  Synthetic oligonucleotide
ctcccactatggtctcaggcgacgactccctcctggatcgtgagcctcccactcgccctg

SEQ ID NO: 381997 - DNA, 55 bp, Artificial
  Synthetic oligonucleotide
ctcccactcggaggacaataagttcgtttgcgataggaatctgaataccgaggag

SEQ ID NO: 381998 - DNA, 55 bp, Artificial
  Synthetic oligonucleotide
ctcccactgacatactgggttcttcagtatgtattctctgaccttgttagcgctt

SEQ ID NO: 381999 - DNA, 55 bp, Artificial
  Synthetic oligonucleotide
ctcccactgctggatatattaagtttgccaataagggaagtattaagcctatagc

SEQ ID NO: 382000 - DNA, 55 bp, Artificial
  Synthetic oligonucleotide
ctcccagaaaagacaggatatccttgatctgtgggtctatcacacacaaggttac

SEQ ID NO: 382001 - DNA, 55 bp, Artificial
  Synthetic oligonucleotide
ctcccagaaatccgttaggactgtgtcttattgggtctgcactcctgagaagtct

SEQ ID NO: 382002 - DNA, 55 bp, Artificial
  Synthetic oligonucleotide
ctcccagagagggtacctatagtgttcaccccccaacagtgggaggacgagtatg

SEQ ID NO: 382003 - DNA, 59 bp, Artificial
  Synthetic oligonucleotide
ctcccagagcctcggcttgatgacatcgaaagatttagacaggaaggtttctattacac

SEQ ID NO: 382004 - DNA, 60 bp, Artificial
  Synthetic oligonucleotide
ctcccagaggccagctcagagcctctttcagatttggctcggaccacttcagctgccttt

SEQ ID NO: 382005 - DNA, 55 bp, Artificial
  Synthetic oligonucleotide
ctcccagatagctcgatgcagtagttgcacacggtagttagcgtagtcttgaacc

SEQ ID NO: 382006 - DNA, 55 bp, Artificial
  Synthetic oligonucleotide
ctcccagcccggaactccctgaaacacctgctgatgccgtacctggaagcttgca

SEQ ID NO: 382007 - DNA, 60 bp, Artificial
  Synthetic oligonucleotide
ctcccagccgatcctgtatttctggggtgtacaccatcctccagataccaatgagcaaaa

SEQ ID NO: 382008 - DNA, 57 bp, Artificial
  Synthetic oligonucleotide
ctcccagctgatttgttttgtgttcgactacatttttgagaaacacgtacagctacg

SEQ ID NO: 382009 - DNA, 53 bp, Artificial
  Synthetic oligonucleotide
ctcccaggaaaacctgagttcaaagagggatttgactcctccgttggtaagga

SEQ ID NO: 382010 - DNA, 59 bp, Artificial
  Synthetic oligonucleotide
ctcccaggaccgatctcagcagaccccctcactacccctggctgcctcagtcttacagg

SEQ ID NO: 382011 - DNA, 55 bp, Artificial
  Synthetic oligonucleotide
ctcccaggctcctcttggacccgctggttacatctattaccagcttgtggatgac

SEQ ID NO: 382012 - DNA, 55 bp, Artificial
  Synthetic oligonucleotide
ctcccagggcgtgaacatcgatagatctcaaggcaacatcgatgcgtaccaccac

SEQ ID NO: 382013 - DNA, 55 bp, Artificial
  Synthetic oligonucleotide
ctcccaggtcaaaaggcacgcgatgacgtgaactccgagcctgcccaacctgttg

SEQ ID NO: 382014 - DNA, 55 bp, Artificial
  Synthetic oligonucleotide
ctcccagtcgaagtgcaagggtggtcatacttcaaattatatctgtcaaccctgt

SEQ ID NO: 382015 - DNA, 60 bp, Artificial
  Synthetic oligonucleotide
ctcccagtgcgtctactcacgtcccgataactgtgacagttgcccccatgtgtgccgaat

SEQ ID NO: 382016 - DNA, 55 bp, Artificial
  Synthetic oligonucleotide
ctcccagtggtatgaggtgtccagagcacactggatcatttaggaaaatttgcgg

SEQ ID NO: 382017 - DNA, 55 bp, Artificial
  Synthetic oligonucleotide
ctcccagttcagaagatcaagttaaccggagcagagcatttgggtcgagcaagtg

SEQ ID NO: 382018 - DNA, 53 bp, Artificial
  Synthetic oligonucleotide
ctcccagtttaaactcctacggtgtccggtacatgtatacttgcccttccgta

SEQ ID NO: 382019 - DNA, 57 bp, Artificial
  Synthetic oligonucleotide
ctcccatacaccaatacaagtaagggggtcagataacacttctagctacatgccggg

SEQ ID NO: 382020 - DNA, 55 bp, Artificial
  Synthetic oligonucleotide
ctcccatctcatctcaaagggtcgagcggaactggaaacgtggcccaagtgtctg

SEQ ID NO: 382021 - DNA, 59 bp, Artificial
  Synthetic oligonucleotide
ctcccatcttcgtgtagttctctacagaccttgatgaacttcttgttagttgcggtgtc

SEQ ID NO: 382022 - DNA, 54 bp, Artificial
  Synthetic oligonucleotide
ctcccatgaaaccatgctatggctcctatgccagacctaccaattctaacggag

SEQ ID NO: 382023 - DNA, 51 bp, Artificial
  Synthetic oligonucleotide
ctcccatgctgagacacaccatagaaaacacgtcggccaacctatctctag

SEQ ID NO: 382024 - DNA, 52 bp, Artificial
  Synthetic oligonucleotide
ctcccatgggtttctcttacgacaccagatgctttgactcctccgtcacgga

SEQ ID NO: 382025 - DNA, 55 bp, Artificial
  Synthetic oligonucleotide
ctcccatttgccgtagcccacatgactgaagtcgatgtccttatctgaaaactgt

SEQ ID NO: 382026 - DNA, 55 bp, Artificial
  Synthetic oligonucleotide
ctccccaaagttatagttgaggccagagttttgattaagcctactcctatctgtt

SEQ ID NO: 382027 - DNA, 55 bp, Artificial
  Synthetic oligonucleotide
ctccccaactgattaacaattggaggcaacacctggttgcaactgactgctccgg

SEQ ID NO: 382028 - DNA, 56 bp, Artificial
  Synthetic oligonucleotide
ctccccaaggttcccgctcattgactccttgcacctgcggctcctcggacctttac

SEQ ID NO: 382029 - DNA, 55 bp, Artificial
  Synthetic oligonucleotide
ctccccaccgaagcttagtactaaacagcgccctattgaatgaagtgaagtgcat

SEQ ID NO: 382030 - DNA, 57 bp, Artificial
  Synthetic oligonucleotide
ctccccacctggtgcatcggtgccaaagagtcgtaaggacgccatgttgggtacgca

SEQ ID NO: 382031 - DNA, 57 bp, Artificial
  Synthetic oligonucleotide
ctccccagacactctcaggagactgcatggagagtcgttcccctacacagcctttga

SEQ ID NO: 382032 - DNA, 59 bp, Artificial
  Synthetic oligonucleotide
ctccccagagatgagcggttcgcacgaatccggccaacataccacgaggtacgtcacga

SEQ ID NO: 382033 - DNA, 56 bp, Artificial
  Synthetic oligonucleotide
ctccccagagtttgattggattcttgggtggacaattaagggattgggacatgact

SEQ ID NO: 382034 - DNA, 55 bp, Artificial
  Synthetic oligonucleotide
ctccccagccaccatgggctaggttggcagccaggttttaacttggtggggagta

SEQ ID NO: 382035 - DNA, 55 bp, Artificial
  Synthetic oligonucleotide
ctccccaggattttggccaggtgtttaacatgtacgataatgagccgagtacagc

SEQ ID NO: 382036 - DNA, 52 bp, Artificial
  Synthetic oligonucleotide
ctccccagggtcccgagtgaggcttatcccggggaactcggcccagtcccga

SEQ ID NO: 382037 - DNA, 60 bp, Artificial
  Synthetic oligonucleotide
ctccccagttatcagtaattaatagaatgcccgaggagtatgaattaggcataatataca

SEQ ID NO: 382038 - DNA, 55 bp, Artificial
  Synthetic oligonucleotide
ctccccatggaatataacctgttggtgcggatgaagttcttgaaatttgtccgtt

SEQ ID NO: 382039 - DNA, 51 bp, Artificial
  Synthetic oligonucleotide
ctcccccagtgtggatcaggtcgatgagtcactgcgttccccacgggtgac

SEQ ID NO: 382040 - DNA, 60 bp, Artificial
  Synthetic oligonucleotide
ctccccccgtgaaaaactgaccactctcgactctctcatagatgtcgctgcccctcgcga

SEQ ID NO: 382041 - DNA, 51 bp, Artificial
  Synthetic oligonucleotide
ctcccccgcgatgtttatcgggctgtgtgatcccactggtttcctgaccga

SEQ ID NO: 382042 - DNA, 59 bp, Artificial
  Synthetic oligonucleotide
ctccccctacgcaacttagaagtatgagcctagaggtcaacaggtaactcagcacgcca

SEQ ID NO: 382043 - DNA, 50 bp, Artificial
  Synthetic oligonucleotide
ctccccctccggttaagagtgctttccacacgattaaccgcaaggagaag

SEQ ID NO: 382044 - DNA, 55 bp, Artificial
  Synthetic oligonucleotide
ctccccctcggaaatgagctcggtccaggcctccccgaggagctacgggcagaag

SEQ ID NO: 382045 - DNA, 55 bp, Artificial
  Synthetic oligonucleotide
ctccccctgcttacagaccaccaaatgcccctatcttatcaacacttccggaaac

SEQ ID NO: 382046 - DNA, 55 bp, Artificial
  Synthetic oligonucleotide
ctccccgagccatatgattatcgggcgtttgaagtggtcagtgctacggtcgcgg

SEQ ID NO: 382047 - DNA, 53 bp, Artificial
  Synthetic oligonucleotide
ctccccgatgaaggaggaaaaaccaaagcgctctttggtccccaattcattgg

SEQ ID NO: 382048 - DNA, 60 bp, Artificial
  Synthetic oligonucleotide
ctccccgcaaggctcaataaataagcggggagctccagcagttggaagagctggagcagt

SEQ ID NO: 382049 - DNA, 59 bp, Artificial
  Synthetic oligonucleotide
ctccccgcgaagctgtcagccctcgggctcaacgctgtagcatattaccgggggcttga

SEQ ID NO: 382050 - DNA, 60 bp, Artificial
  Synthetic oligonucleotide
ctccccgctctaccacaaaggttgcgtggttggtctgcatataggtgctgcggatggtta

SEQ ID NO: 382051 - DNA, 55 bp, Artificial
  Synthetic oligonucleotide
ctccccggacgtttcgtcgaagcacctttctgcttatttggacagtgcggttgct

SEQ ID NO: 382052 - DNA, 57 bp, Artificial
  Synthetic oligonucleotide
ctccccggtgcgaaaatccatagttacgacagttgatatggatataataactacacc

SEQ ID NO: 382053 - DNA, 50 bp, Artificial
  Synthetic oligonucleotide
ctccccgtcacaaaacaactccttaagccaaatccatgcggctctaacat

SEQ ID NO: 382054 - DNA, 55 bp, Artificial
  Synthetic oligonucleotide
ctccccgttccacaacattcgctcgtgaccggagatcatataatgccggtaagtt

SEQ ID NO: 382055 - DNA, 54 bp, Artificial
  Synthetic oligonucleotide
ctccccgtttcgaaacggatatatggagcccacccttggagagcaactcccgtc

SEQ ID NO: 382056 - DNA, 56 bp, Artificial
  Synthetic oligonucleotide
ctcccctgaaaggcctcttcctaggtccggagtctacctccatctggtctgctcgg

SEQ ID NO: 382057 - DNA, 56 bp, Artificial
  Synthetic oligonucleotide
ctcccctggagcgcgtcttcccaggtccggagtctacctccatctggtctgtccgg

SEQ ID NO: 382058 - DNA, 57 bp, Artificial
  Synthetic oligonucleotide
ctcccctggcgcgagccgcgtgggagacagtccgacacactccggtcaattcctggt

SEQ ID NO: 382059 - DNA, 58 bp, Artificial
  Synthetic oligonucleotide
ctcccctgtgaggaactactgtcttcacggccagcccccgattgtgggcgacactcca

SEQ ID NO: 382060 - DNA, 60 bp, Artificial
  Synthetic oligonucleotide
ctcccctgtgcgtaaatccatgatttatgcagtctaagtgaatgtaataagagcagccac

SEQ ID NO: 382061 - DNA, 60 bp, Artificial
  Synthetic oligonucleotide
ctcccctgtgcgtgaatccatagttgtgacagtcaatggagatgtatagtgaacagccac

SEQ ID NO: 382062 - DNA, 60 bp, Artificial
  Synthetic oligonucleotide
ctcccctgtgcgtgaatccgtgatcatggcaatttattgacatgtaatatgagcatccac

SEQ ID NO: 382063 - DNA, 55 bp, Artificial
  Synthetic oligonucleotide
ctccccttgcagaccttccatcgatctgaaactcaccccaatcgatggtgtctcc

SEQ ID NO: 382064 - DNA, 55 bp, Artificial
  Synthetic oligonucleotide
ctccccttggcgattccatccgcaagattcaagggtctgtatccacgtctggagg

SEQ ID NO: 382065 - DNA, 52 bp, Artificial
  Synthetic oligonucleotide
ctcccctttatccttccccaaccccagacaacaggcagccccgtagtcttcg

SEQ ID NO: 382066 - DNA, 54 bp, Artificial
  Synthetic oligonucleotide
ctcccgaaccgtctgtcgtagcgtgtgatcgaacaccacaaccgcctctcggtt

SEQ ID NO: 382067 - DNA, 56 bp, Artificial
  Synthetic oligonucleotide
ctcccgaagattgatgttcagtcgatgattaactttaatccgtggtaccaaggagt

SEQ ID NO: 382068 - DNA, 55 bp, Artificial
  Synthetic oligonucleotide
ctcccgaaggtcatcagggttgaggagctagcggaacctatagacattcccgatg

SEQ ID NO: 382069 - DNA, 50 bp, Artificial
  Synthetic oligonucleotide
ctcccgactcctttccccaagtaacacactggtagccctcacaagatcca

SEQ ID NO: 382070 - DNA, 53 bp, Artificial
  Synthetic oligonucleotide
ctcccgagagaccttgcccaggatgtctttcctgttctggttggtccacatat

SEQ ID NO: 382071 - DNA, 50 bp, Artificial
  Synthetic oligonucleotide
ctcccgagatggcggcgtccttggaagatgtccacttggaagcgtggcca

SEQ ID NO: 382072 - DNA, 57 bp, Artificial
  Synthetic oligonucleotide
ctcccgatacattagggtacgatttaatacgtgatttaatcttagtcattcgtgcca

SEQ ID NO: 382073 - DNA, 55 bp, Artificial
  Synthetic oligonucleotide
ctcccgatgtggctcttctatgaccctcctcatagacgccccaggctacgacccc

SEQ ID NO: 382074 - DNA, 50 bp, Artificial
  Synthetic oligonucleotide
ctcccgattcccgacccctacccaggttcctcggaacaggaacaccaaat

SEQ ID NO: 382075 - DNA, 55 bp, Artificial
  Synthetic oligonucleotide
ctcccgcaaagaggaagaaccaatcccagctgaaggggtatatcatggtgtaact

SEQ ID NO: 382076 - DNA, 55 bp, Artificial
  Synthetic oligonucleotide
ctcccgcacaacccgaaggtcgagccgcgtttcgcccgtttcgataccgcacata

SEQ ID NO: 382077 - DNA, 55 bp, Artificial
  Synthetic oligonucleotide
ctcccgcacgcgagacacccccgtccgccccgctagcagatgacccccaaaagcc

SEQ ID NO: 382078 - DNA, 55 bp, Artificial
  Synthetic oligonucleotide
ctcccgcactatccccaacagtataaattctacactgaaaaaaacggattgctgc

SEQ ID NO: 382079 - DNA, 56 bp, Artificial
  Synthetic oligonucleotide
ctcccgcagacacaggtcacggtaccgtggtgttggaattgcagtacactggcaca

SEQ ID NO: 382080 - DNA, 58 bp, Artificial
  Synthetic oligonucleotide
ctcccgcagcaactaagctggtaagcgcggacgtgacccatcccgattgaatcccgcg

SEQ ID NO: 382081 - DNA, 55 bp, Artificial
  Synthetic oligonucleotide
ctcccgcagcacaatgaaccaaaacgggttcatttcgttgatcacacttagataa

SEQ ID NO: 382082 - DNA, 55 bp, Artificial
  Synthetic oligonucleotide
ctcccgccgtggtaccgccgcctacccacttctcggatcaggcatataccaggtc

SEQ ID NO: 382083 - DNA, 53 bp, Artificial
  Synthetic oligonucleotide
ctcccgcgtcgaaggtacgccgacgtctaaacttcgacagcccctatgtttcc

SEQ ID NO: 382084 - DNA, 54 bp, Artificial
  Synthetic oligonucleotide
ctcccgctattcgagtagcgcacgccacaagttacgccgtgggcccgatggtac

SEQ ID NO: 382085 - DNA, 55 bp, Artificial
  Synthetic oligonucleotide
ctcccggacaataaggaggcagtttagaaagagcctctcaagaactttagaggag

SEQ ID NO: 382086 - DNA, 56 bp, Artificial
  Synthetic oligonucleotide
ctcccggagagcgaacgattatgcgtcccctaaagcgcgagtacgacgaagtgtac

SEQ ID NO: 382087 - DNA, 58 bp, Artificial
  Synthetic oligonucleotide
ctcccgggatgcgttccttgtgtgagggccgggaacaaatctagctgctgggtgtctc

SEQ ID NO: 382088 - DNA, 53 bp, Artificial
  Synthetic oligonucleotide
ctcccgtagcgtgtcagacacctgactacgaatactacagaacagagcgtaag

SEQ ID NO: 382089 - DNA, 55 bp, Artificial
  Synthetic oligonucleotide
ctcccgtagtattatggtattcgtctgtattgtgtttactttagtacgcgtcaac

SEQ ID NO: 382090 - DNA, 55 bp, Artificial
  Synthetic oligonucleotide
ctcccgtatccaaagtacgtcgtcgtctgaatttcgacagcccctattctcgacg

SEQ ID NO: 382091 - DNA, 55 bp, Artificial
  Synthetic oligonucleotide
ctcccgtcgaagctggagccgtgtgcaaaacaggatgtagctaggcagcggaccg

SEQ ID NO: 382092 - DNA, 55 bp, Artificial
  Synthetic oligonucleotide
ctcccgtgcaaaacgcgcagtggcatagttcatccgaggtaaggggacctagatc

SEQ ID NO: 382093 - DNA, 57 bp, Artificial
  Synthetic oligonucleotide
ctcccgtgttgagagaccccgaagtctggactgggttcattcagggcgtacgtgatg

SEQ ID NO: 382094 - DNA, 55 bp, Artificial
  Synthetic oligonucleotide
ctcccgttatgcctcttctcaggtaggtaaaaccgctaaggacgtgtccaatgca

SEQ ID NO: 382095 - DNA, 55 bp, Artificial
  Synthetic oligonucleotide
ctcccgttccgcgtctgtcctcccggtgatctggccatagctgcgcttggtcatt

SEQ ID NO: 382096 - DNA, 51 bp, Artificial
  Synthetic oligonucleotide
ctcccgttcggcaatgttttccgcagttatacttggttcattacatggacg

SEQ ID NO: 382097 - DNA, 60 bp, Artificial
  Synthetic oligonucleotide
ctcccgttcttgggaactacaaggaaatgtgcatcgcatggtccagcagcagctgctttg

SEQ ID NO: 382098 - DNA, 60 bp, Artificial
  Synthetic oligonucleotide
ctccctaaaagtgggaagtctcggtgcacagtccatgacaactctatggctacatggatc

SEQ ID NO: 382099 - DNA, 51 bp, Artificial
  Synthetic oligonucleotide
ctccctaaattaccccaggttacttggtataacctgggttccagttaatca

SEQ ID NO: 382100 - DNA, 57 bp, Artificial
  Synthetic oligonucleotide
ctccctacacgctgccggcttgaaattattgaagactactatgatgccatagctaag

SEQ ID NO: 382101 - DNA, 55 bp, Artificial
  Synthetic oligonucleotide
ctccctagcggtggttttgtctgggattgtgtcgaccaaagctcttacgcccagc

SEQ ID NO: 382102 - DNA, 58 bp, Artificial
  Synthetic oligonucleotide
ctccctagtcatttgggccacagttaacctcctctgtgcaataaccccatccacagct

SEQ ID NO: 382103 - DNA, 59 bp, Artificial
  Synthetic oligonucleotide
ctccctagtcggaatagatcctttccgcctactccagaacagccaggtattcagcctca

SEQ ID NO: 382104 - DNA, 57 bp, Artificial
  Synthetic oligonucleotide
ctccctagtcggaatcgatcctttccgtctgctccaaaacagccaagtcttcagtct

SEQ ID NO: 382105 - DNA, 56 bp, Artificial
  Synthetic oligonucleotide
ctccctagtcgggatagaccctttccgcttgcttcagaatagtcaggtatttagcc

SEQ ID NO: 382106 - DNA, 55 bp, Artificial
  Synthetic oligonucleotide
ctccctcatgtgacagctaagtcatctgccggcctaccctacataggcaaaacca

SEQ ID NO: 382107 - DNA, 55 bp, Artificial
  Synthetic oligonucleotide
ctccctccacgatatgtcaccatccgatgtcgcagaggccatgttccgccatggc

SEQ ID NO: 382108 - DNA, 58 bp, Artificial
  Synthetic oligonucleotide
ctccctccgattactgtggcgggagctgagttggtagtgttactataaactgcctgaa

SEQ ID NO: 382109 - DNA, 55 bp, Artificial
  Synthetic oligonucleotide
ctccctccgccgtgcttttcatgaaacagagcaagttcgagaagttgcagcacga

SEQ ID NO: 382110 - DNA, 57 bp, Artificial
  Synthetic oligonucleotide
ctccctccttacccttcacaacgtggagcgtgagcaatccgccaccgaagcctacca

SEQ ID NO: 382111 - DNA, 60 bp, Artificial
  Synthetic oligonucleotide
ctccctcctttcctgacatacatttgcgggaggacattattaacagatgtcaacaatatg

SEQ ID NO: 382112 - DNA, 53 bp, Artificial
  Synthetic oligonucleotide
ctccctcgcctaggaaataaagaccccgctcgtcataaactggggaagttatc

SEQ ID NO: 382113 - DNA, 54 bp, Artificial
  Synthetic oligonucleotide
ctccctcggagaaagaaggccgtcacaaaattcacatttaagaaaatcttccga

SEQ ID NO: 382114 - DNA, 53 bp, Artificial
  Synthetic oligonucleotide
ctccctcgtctgtaacccccagttgcttagcgaaacccaaattataggcacct

SEQ ID NO: 382115 - DNA, 55 bp, Artificial
  Synthetic oligonucleotide
ctccctctatgactacacttattggtctaaaaggccgcgcagcggcacacactac

SEQ ID NO: 382116 - DNA, 55 bp, Artificial
  Synthetic oligonucleotide
ctccctgaaagcatgcaaactgtcgttcacctgttggtagatgaatccatcgcag

SEQ ID NO: 382117 - DNA, 53 bp, Artificial
  Synthetic oligonucleotide
ctccctgcagtgtgcaaccttacaccgtcgcttaggcattagaagccccacat

SEQ ID NO: 382118 - DNA, 58 bp, Artificial
  Synthetic oligonucleotide
ctccctggaatagcttccggagttttaggatatcttggcgcacagaaacaaaatgcga

SEQ ID NO: 382119 - DNA, 55 bp, Artificial
  Synthetic oligonucleotide
ctccctggcacggaaaccagtattgtggtgcgcaaggatgaagtacaggagactg

SEQ ID NO: 382120 - DNA, 52 bp, Artificial
  Synthetic oligonucleotide
ctccctggcggacgactcccagagcgctgggcgcaacggggatagaggtagg

SEQ ID NO: 382121 - DNA, 55 bp, Artificial
  Synthetic oligonucleotide
ctccctgtagccggtggaacaagcagtgtgtatatcgaagtcttgcacttgaccc

SEQ ID NO: 382122 - DNA, 54 bp, Artificial
  Synthetic oligonucleotide
ctccctgtgatcctacggatccagcggtaacaatgaagcccccctgccattagg

SEQ ID NO: 382123 - DNA, 54 bp, Artificial
  Synthetic oligonucleotide
ctccctgttaaccgtcccattgattggaaagtctgtcaaagaattgtgggtctt

SEQ ID NO: 382124 - DNA, 55 bp, Artificial
  Synthetic oligonucleotide
ctccctgtttacggttatctgctaagtatgaactagaaagatattatcagtgctc

SEQ ID NO: 382125 - DNA, 55 bp, Artificial
  Synthetic oligonucleotide
ctcccttagatcattagttgcttcgtcaggcactctggaatttatcgctgagggc

SEQ ID NO: 382126 - DNA, 55 bp, Artificial
  Synthetic oligonucleotide
ctcccttcaccatcaacaattccataccctgattaccgaagctgaaacccgggga

SEQ ID NO: 382127 - DNA, 54 bp, Artificial
  Synthetic oligonucleotide
ctcccttcctcacgaaggtccaccgctgttccgtggaggaggtccgctcggtag

SEQ ID NO: 382128 - DNA, 55 bp, Artificial
  Synthetic oligonucleotide
ctcccttcctgccaacagcaacggtcggaggtcttcgtctgggaccccaactcac

SEQ ID NO: 382129 - DNA, 55 bp, Artificial
  Synthetic oligonucleotide
ctcccttcgacgttgacaagttggctagccccactgacttggttaaccaagagta

SEQ ID NO: 382130 - DNA, 59 bp, Artificial
  Synthetic oligonucleotide
ctcccttctcgaactcatgatcggtttttctcgacttcaaagctctcactcagacccca

SEQ ID NO: 382131 - DNA, 55 bp, Artificial
  Synthetic oligonucleotide
ctcccttgaattggagtggaccgaatccaggttgggtattcctgcaagaacgccc

SEQ ID NO: 382132 - DNA, 55 bp, Artificial
  Synthetic oligonucleotide
ctcccttgtggcgttcccctacacatggaaggtttcaagggaggtgtgtcatcgc

SEQ ID NO: 382133 - DNA, 60 bp, Artificial
  Synthetic oligonucleotide
ctccctttacacaatgtggttacccagcattaatgcctttgtatgcaagtatacaagcta

SEQ ID NO: 382134 - DNA, 59 bp, Artificial
  Synthetic oligonucleotide
ctccgaaacgaacagctagcctagggagtgtgtccgatttaacagagcacactggctac

SEQ ID NO: 382135 - DNA, 60 bp, Artificial
  Synthetic oligonucleotide
ctccgaaagctggtccagctcctggacagaataggctggactggaacatcaaaaactgtc

SEQ ID NO: 382136 - DNA, 55 bp, Artificial
  Synthetic oligonucleotide
ctccgaaaggagaaccgtcaattgaaggcgcgactgactgctattgagtctgaac

SEQ ID NO: 382137 - DNA, 59 bp, Artificial
  Synthetic oligonucleotide
ctccgaacatcgcccatctcatgtttaagccgcatatattgttgccacgggccggtggg

SEQ ID NO: 382138 - DNA, 58 bp, Artificial
  Synthetic oligonucleotide
ctccgaaccgctcgacaatacagagatcctcgacaccggatgggcccaggcggacgac

SEQ ID NO: 382139 - DNA, 55 bp, Artificial
  Synthetic oligonucleotide
ctccgaagacgcagtgtgtctcatagaagggatcaatcacacccatcatgtgtac

SEQ ID NO: 382140 - DNA, 56 bp, Artificial
  Synthetic oligonucleotide
ctccgaatgctccgactacacccaccccatcttcagctacaagagatactacaaca

SEQ ID NO: 382141 - DNA, 55 bp, Artificial
  Synthetic oligonucleotide
ctccgacaaacaggaacagctttacaaatacctgttaatcaagttccagctgcga

SEQ ID NO: 382142 - DNA, 55 bp, Artificial
  Synthetic oligonucleotide
ctccgacagcccgatcacatcgaaatttgcagcccagggagcccagtgggcgatc

SEQ ID NO: 382143 - DNA, 60 bp, Artificial
  Synthetic oligonucleotide
ctccgaccggttcatgtgaacgcagtccatgatcaacaaaccacatatgtgaaattgctg

SEQ ID NO: 382144 - DNA, 50 bp, Artificial
  Synthetic oligonucleotide
ctccgaccgtgttacgcataaattttaacaatgactacatctgcgacagg

SEQ ID NO: 382145 - DNA, 52 bp, Artificial
  Synthetic oligonucleotide
ctccgacggagtttctatgaaggtccagacgattgaggaagtacagaatggt

SEQ ID NO: 382146 - DNA, 55 bp, Artificial
  Synthetic oligonucleotide
ctccgactaccaagcgtcggcacctccagggttatcttcagttgaagggtaggag

SEQ ID NO: 382147 - DNA, 55 bp, Artificial
  Synthetic oligonucleotide
ctccgactgaccctaattgtgtcatctctgctggtgttaaccttagttttgctgg

SEQ ID NO: 382148 - DNA, 55 bp, Artificial
  Synthetic oligonucleotide
ctccgacttgaccagtggtgctaagtccttgtacgggcacgtgagctcgatactt

SEQ ID NO: 382149 - DNA, 55 bp, Artificial
  Synthetic oligonucleotide
ctccgagcgcagccatagccagcctgttcacttcgtccctctcgctatgaacccg

SEQ ID NO: 382150 - DNA, 58 bp, Artificial
  Synthetic oligonucleotide
ctccgagtctaatcttcgtcacctatgggacatttccggcggtcgcggaagtgagatc

SEQ ID NO: 382151 - DNA, 57 bp, Artificial
  Synthetic oligonucleotide
ctccgagtggcggcgtacctttcctgtggcggtaaggaccaggcagaagcacaagtc

SEQ ID NO: 382152 - DNA, 59 bp, Artificial
  Synthetic oligonucleotide
ctccgataacgcctctacagactacacaaccccatggcaagctgtaggtgctaggggcc

SEQ ID NO: 382153 - DNA, 51 bp, Artificial
  Synthetic oligonucleotide
ctccgatatatcggtgatcaattggagaccaataaattgcctttcccaaaa

SEQ ID NO: 382154 - DNA, 59 bp, Artificial
  Synthetic oligonucleotide
ctccgatccagccggcttcgtcaggacccattcaaacaagccgaagcacgcctgggtca

SEQ ID NO: 382155 - DNA, 55 bp, Artificial
  Synthetic oligonucleotide
ctccgatctgcttgcccatgattcgttcggtcctattgctagatatggtacccgc

SEQ ID NO: 382156 - DNA, 58 bp, Artificial
  Synthetic oligonucleotide
ctccgatgagacttttcaacatgagaggttgggtcagttctcatttattggaaaggta

SEQ ID NO: 382157 - DNA, 60 bp, Artificial
  Synthetic oligonucleotide
ctccgatgttgcaaagcgattcgccataaagccaggtatgagcctccaggatgccataac

SEQ ID NO: 382158 - DNA, 55 bp, Artificial
  Synthetic oligonucleotide
ctccgattcaaggcaatacgagtgaggaaactggatgaggtgtgtgtgatatgcc

SEQ ID NO: 382159 - DNA, 60 bp, Artificial
  Synthetic oligonucleotide
ctccgattgaacacattgcaagtatgaggaggaactacttcacagcagaagtgtcccatt

SEQ ID NO: 382160 - DNA, 56 bp, Artificial
  Synthetic oligonucleotide
ctccgatttccgaactctggggccttaacatccgtgtggtgtcttgctacgtcgat

SEQ ID NO: 382161 - DNA, 60 bp, Artificial
  Synthetic oligonucleotide
ctccgcaaagtggagcagaaggtcaaggctgcgagggcacgccacagagcaaaccggaag

SEQ ID NO: 382162 - DNA, 58 bp, Artificial
  Synthetic oligonucleotide
ctccgcaactccaaattcctggccaacaagctgggagtctactcggccaactcgtgcc

SEQ ID NO: 382163 - DNA, 59 bp, Artificial
  Synthetic oligonucleotide
ctccgcactggaagactcttaatccttaatcatgcccgaatacgccctaggactcatgt

SEQ ID NO: 382164 - DNA, 58 bp, Artificial
  Synthetic oligonucleotide
ctccgcagtcaatgaccgtagaacgctggacttatacggggcgtgacctttatgccgc

SEQ ID NO: 382165 - DNA, 60 bp, Artificial
  Synthetic oligonucleotide
ctccgcagtttcatacaatacagaggaaccatcgtatgcagttaggagataacgcttatg

SEQ ID NO: 382166 - DNA, 60 bp, Artificial
  Synthetic oligonucleotide
ctccgcatagatccattatcgtcgttaccctgtattcatatgttctgccacttgatgagg

SEQ ID NO: 382167 - DNA, 55 bp, Artificial
  Synthetic oligonucleotide
ctccgcatctgctcccgacctcgttccggtgtttgaaaacactcacgttagttac

SEQ ID NO: 382168 - DNA, 55 bp, Artificial
  Synthetic oligonucleotide
ctccgcattatgtataacacaacacatggcaatccgatagatactccaatccctg

SEQ ID NO: 382169 - DNA, 55 bp, Artificial
  Synthetic oligonucleotide
ctccgccacaccactagcggacgtccaggacaaggtcggactctacatcagcctc

SEQ ID NO: 382170 - DNA, 56 bp, Artificial
  Synthetic oligonucleotide
ctccgccactccagaccatgttggccactttagtcttgccgatcgaggctatgcat

SEQ ID NO: 382171 - DNA, 51 bp, Artificial
  Synthetic oligonucleotide
ctccgccagttggccaactctcagtccgccgctaaagtcctcaatcagtgc

SEQ ID NO: 382172 - DNA, 55 bp, Artificial
  Synthetic oligonucleotide
ctccgccattgacgaatgtgctgacttcgtaaaaggattctaatgagccattcca

SEQ ID NO: 382173 - DNA, 52 bp, Artificial
  Synthetic oligonucleotide
ctccgccccgccaaggtccaaatcccctatcccgcgattcggttccgatctc

SEQ ID NO: 382174 - DNA, 60 bp, Artificial
  Synthetic oligonucleotide
ctccgccgctagtcgtcaatgattcaggtggctctcgcttgctgaggttactatatgaca

SEQ ID NO: 382175 - DNA, 50 bp, Artificial
  Synthetic oligonucleotide
ctccgcctccactaccgttcagaagtattgcctgaccagccatcctatat

SEQ ID NO: 382176 - DNA, 57 bp, Artificial
  Synthetic oligonucleotide
ctccgcctgaaaactctaggaatagcctctgacacagtaagtaaaacaaatgtctta

SEQ ID NO: 382177 - DNA, 55 bp, Artificial
  Synthetic oligonucleotide
ctccgccttttcatctgtgtaagcgtgacgtcacttccgtggctccaagtcgcgg

SEQ ID NO: 382178 - DNA, 55 bp, Artificial
  Synthetic oligonucleotide
ctccgcgacaagtggacccaactcgaaatcaaccgtaacaagcaacaggctggcg

SEQ ID NO: 382179 - DNA, 60 bp, Artificial
  Synthetic oligonucleotide
ctccgcgatgaatgttagtacgtgacgaacgttgcgagctactgatgatctccgcaacgg

SEQ ID NO: 382180 - DNA, 55 bp, Artificial
  Synthetic oligonucleotide
ctccgcgcagggaggcagccacccggaaagaacggaaaaatcacctccagaggac

SEQ ID NO: 382181 - DNA, 55 bp, Artificial
  Synthetic oligonucleotide
ctccgcggttcttcttcgactcggatcggctcatctcgacaagaggcggcgaacc

SEQ ID NO: 382182 - DNA, 55 bp, Artificial
  Synthetic oligonucleotide
ctccgcgtagagagcaccaccgccatgtggttaaatggccgctgatcgctcactc

SEQ ID NO: 382183 - DNA, 53 bp, Artificial
  Synthetic oligonucleotide
ctccgcgtgcagctacgggcctatctaacacaagccgttcctgcagagtacga

SEQ ID NO: 382184 - DNA, 55 bp, Artificial
  Synthetic oligonucleotide
ctccgcgttgcgtcgcttttgctccgtccattcattgagcgcaccgcgcgacaca

SEQ ID NO: 382185 - DNA, 49 bp, Artificial
  Synthetic oligonucleotide
ctccgctaacccccggtccaacccccggtccaatggttaagcaggggga

SEQ ID NO: 382186 - DNA, 57 bp, Artificial
  Synthetic oligonucleotide
ctccgctaagggaggtactgaagcattcagacaccctcgtaccggaaagccgctcac

SEQ ID NO: 382187 - DNA, 60 bp, Artificial
  Synthetic oligonucleotide
ctccgctaccgtcagaactcgttctgacgagtggcataggctctatagcaatggcgggct

SEQ ID NO: 382188 - DNA, 60 bp, Artificial
  Synthetic oligonucleotide
ctccgctaggagcaagcatagctggcttcaactgtgtcagaacaagttacaagtacctaa

SEQ ID NO: 382189 - DNA, 55 bp, Artificial
  Synthetic oligonucleotide
ctccgctccactgtctcagaatcttccatgacaatacctgaaggaactggctcat

SEQ ID NO: 382190 - DNA, 55 bp, Artificial
  Synthetic oligonucleotide
ctccgctcgttaatgccgtctctccgtatgtcgcggagttcaacgagaacacgcg

SEQ ID NO: 382191 - DNA, 56 bp, Artificial
  Synthetic oligonucleotide
ctccgctctcaaaactctatatgaatcgggggaactgggggtacatttatactaga

SEQ ID NO: 382192 - DNA, 58 bp, Artificial
  Synthetic oligonucleotide
ctccgctctctgggcccccactatcgaagcagactctcccgggtctaagacgctggtc

SEQ ID NO: 382193 - DNA, 60 bp, Artificial
  Synthetic oligonucleotide
ctccgctgacactcgacccctcaaggaagtcagcagcaccgctagagtgtcaacacgaag

SEQ ID NO: 382194 - DNA, 60 bp, Artificial
  Synthetic oligonucleotide
ctccgctgattctcagccggcagtaacttctgttcccgctgagcctgcacagaacatcac

SEQ ID NO: 382195 - DNA, 59 bp, Artificial
  Synthetic oligonucleotide
ctccgcttagctccagttggaaagactgatcttcttatcattaggatgcctaaggactt

SEQ ID NO: 382196 - DNA, 55 bp, Artificial
  Synthetic oligonucleotide
ctccgcttctgttaactcctgcgacacaatgaactaaaacaggatattgttgagc

SEQ ID NO: 382197 - DNA, 55 bp, Artificial
  Synthetic oligonucleotide
ctccgcttgacgtgcagtgatgcgttcccctgtgcgtgaatccatgtcctgagca

SEQ ID NO: 382198 - DNA, 52 bp, Artificial
  Synthetic oligonucleotide
ctccggaaaccccccagatctccgattcgggcacttccggtcaccaatttcc

SEQ ID NO: 382199 - DNA, 55 bp, Artificial
  Synthetic oligonucleotide
ctccggaaacggtctggtggatatgctccatacgtctcctgggtttttatactcc

SEQ ID NO: 382200 - DNA, 55 bp, Artificial
  Synthetic oligonucleotide
ctccggaattactacgggcgaatcatgactaccgactcccatcccggtcataacc

SEQ ID NO: 382201 - DNA, 59 bp, Artificial
  Synthetic oligonucleotide
ctccggacaagagtcctggctatagaaagatacctacaggatcaacagctcctaggact

SEQ ID NO: 382202 - DNA, 55 bp, Artificial
  Synthetic oligonucleotide
ctccggacacaaataccagcagaaatgctcgcaaatattgacctgaagtacttca

SEQ ID NO: 382203 - DNA, 60 bp, Artificial
  Synthetic oligonucleotide
ctccggaggctcgatctgtccgtggggctcagtgatgtacttgggccatctatcttagtc

SEQ ID NO: 382204 - DNA, 58 bp, Artificial
  Synthetic oligonucleotide
ctccggaggttgtggttgaactgcactcgaagcttgattatgttgtatggcaaccccg

SEQ ID NO: 382205 - DNA, 52 bp, Artificial
  Synthetic oligonucleotide
ctccggagtaattctcgcggcggttacgttggcgaaagcaaagaaactttat

SEQ ID NO: 382206 - DNA, 55 bp, Artificial
  Synthetic oligonucleotide
ctccggatcacccagggactcgatgatgcaaacaaacgaatcatcgctcttgagc

SEQ ID NO: 382207 - DNA, 59 bp, Artificial
  Synthetic oligonucleotide
ctccggattgccgtggagccgcgtcggtgagatagctatctttacctttgttgctgtcc

SEQ ID NO: 382208 - DNA, 60 bp, Artificial
  Synthetic oligonucleotide
ctccggatttgtcttacagagtcggatacttgtgtgcaggtctccccagtgacactccaa

SEQ ID NO: 382209 - DNA, 55 bp, Artificial
  Synthetic oligonucleotide
ctccggcaaccgtgagggtgactaagtgagcgagtacctcaaagttctggcggcc

SEQ ID NO: 382210 - DNA, 59 bp, Artificial
  Synthetic oligonucleotide
ctccggcacctatgcaggtctccccattgccgactacggtgatgcccctcccctgagta

SEQ ID NO: 382211 - DNA, 55 bp, Artificial
  Synthetic oligonucleotide
ctccggcatctacatgatcccaaggacaatgctagaattcagaaggaacaacgct

SEQ ID NO: 382212 - DNA, 57 bp, Artificial
  Synthetic oligonucleotide
ctccggccagggaacatgttttgcgatcctgaaatatttggctacctacccagttga

SEQ ID NO: 382213 - DNA, 55 bp, Artificial
  Synthetic oligonucleotide
ctccggccccaaaacctgtacaccctctggggagactctgttgtctgcctgtacc

SEQ ID NO: 382214 - DNA, 55 bp, Artificial
  Synthetic oligonucleotide
ctccggcccgtttccgccttcttcatgctgtacaacgcggacgaacaggcgttcc

SEQ ID NO: 382215 - DNA, 55 bp, Artificial
  Synthetic oligonucleotide
ctccggcgacccctgatgcatctaccgataagcaggcccgcaagcaggctatcac

SEQ ID NO: 382216 - DNA, 54 bp, Artificial
  Synthetic oligonucleotide
ctccggcttacggccgcatgccaccccttcaaattcccaccttcaccggtccta

SEQ ID NO: 382217 - DNA, 60 bp, Artificial
  Synthetic oligonucleotide
ctccggcttcggttggccagcagtaggcccccaagctgaggtgacctctctcactttgca

SEQ ID NO: 382218 - DNA, 54 bp, Artificial
  Synthetic oligonucleotide
ctccgggagtaaaaggattcgggttcttgaatggagacaacacatggttaggga

SEQ ID NO: 382219 - DNA, 54 bp, Artificial
  Synthetic oligonucleotide
ctccgggagtaaaaggtaagtactccaaatttgcaattcgtctactctaggaca

SEQ ID NO: 382220 - DNA, 55 bp, Artificial
  Synthetic oligonucleotide
ctccgggccacaaactccctcaccagagacctagcttctccatctcccggtcccc

SEQ ID NO: 382221 - DNA, 53 bp, Artificial
  Synthetic oligonucleotide
ctccggggtgcgtcccttgcgttcgcgagggtaacgacacgaggtgttgggta

SEQ ID NO: 382222 - DNA, 52 bp, Artificial
  Synthetic oligonucleotide
ctccgggtaaccgaccaaacctccagagcatcggggcaatgtctcccggata

SEQ ID NO: 382223 - DNA, 55 bp, Artificial
  Synthetic oligonucleotide
ctccgggtactgacgctagattgttggtgtttccaattcgcgtgtaatgggtgag

SEQ ID NO: 382224 - DNA, 55 bp, Artificial
  Synthetic oligonucleotide
ctccgggtgaacttctagatgaacgcgaagccttcgctatcgacgctttggggtg

SEQ ID NO: 382225 - DNA, 55 bp, Artificial
  Synthetic oligonucleotide
ctccgggttttcctcgaatcggactggctcatcttcgacgagaggcgggcgatcc

SEQ ID NO: 382226 - DNA, 53 bp, Artificial
  Synthetic oligonucleotide
ctccggtatcacggtacccttgtacgcctgttttatactccctacccctgcaa

SEQ ID NO: 382227 - DNA, 56 bp, Artificial
  Synthetic oligonucleotide
ctccggtcaccaccgtgtggactgtttcgcagttctttgcccgtcacagcggaggg

SEQ ID NO: 382228 - DNA, 53 bp, Artificial
  Synthetic oligonucleotide
ctccggtccgtgtacttcctagcacaacgtgctagtttagggtaacgggtgcc

SEQ ID NO: 382229 - DNA, 60 bp, Artificial
  Synthetic oligonucleotide
ctccggtctggatgaaatctacacgggaatcaggtcagagtacgacagcgccgcaggctg

SEQ ID NO: 382230 - DNA, 57 bp, Artificial
  Synthetic oligonucleotide
ctccggtgccccgcatcccacctttacaggaacagatgggtttgaggtcaccactgc

SEQ ID NO: 382231 - DNA, 56 bp, Artificial
  Synthetic oligonucleotide
ctccggtggaacatgcggaataggtggaacaccacctttagaagaacgctcgagtc

SEQ ID NO: 382232 - DNA, 58 bp, Artificial
  Synthetic oligonucleotide
ctccggtttggcctgatcgagcacgtagtggtaggtcgggcaggtgatgtggatacgt

SEQ ID NO: 382233 - DNA, 55 bp, Artificial
  Synthetic oligonucleotide
ctccgtaactgcctctagtatccgccgtgttgtcgtgcacaaacatactaatcgg

SEQ ID NO: 382234 - DNA, 51 bp, Artificial
  Synthetic oligonucleotide
ctccgtacatcagaatggtatctaaggcgtacaaggaagtgaccaagcctt

SEQ ID NO: 382235 - DNA, 55 bp, Artificial
  Synthetic oligonucleotide
ctccgtacgcgctggtgtgcagtggtgtaccgcttttgcccttggtgcccgtttg

SEQ ID NO: 382236 - DNA, 55 bp, Artificial
  Synthetic oligonucleotide
ctccgtacttacacacgggctgtggagagtctgcatatcactcctgtctcggaga

SEQ ID NO: 382237 - DNA, 51 bp, Artificial
  Synthetic oligonucleotide
ctccgtacttaggaaaataccgactctactttctaaaaagagttacgtaga

SEQ ID NO: 382238 - DNA, 59 bp, Artificial
  Synthetic oligonucleotide
ctccgtagcgataaggtgtctgacacattgtacgactaatggaacgtggcccaattata

SEQ ID NO: 382239 - DNA, 60 bp, Artificial
  Synthetic oligonucleotide
ctccgtagcgtatccgtgcgcgtgattgcgaacggtgcaacgaacacacagtttgtccta

SEQ ID NO: 382240 - DNA, 55 bp, Artificial
  Synthetic oligonucleotide
ctccgtaggaggaagcacagggggagaataccatttctcccccggcgacataaca

SEQ ID NO: 382241 - DNA, 55 bp, Artificial
  Synthetic oligonucleotide
ctccgtatcaaggtgcagtggataatactgtcgtggcttcctcccgggaaacgtc

SEQ ID NO: 382242 - DNA, 55 bp, Artificial
  Synthetic oligonucleotide
ctccgtatgacgaatccacaacgcggacacgtaacaagcgtagtgtcctcgacga

SEQ ID NO: 382243 - DNA, 53 bp, Artificial
  Synthetic oligonucleotide
ctccgtcaacgagtcgattaagaccgagtaaattaaatgtttcaaggaaacta

SEQ ID NO: 382244 - DNA, 55 bp, Artificial
  Synthetic oligonucleotide
ctccgtcaactgcacagccttcagtcattgttgcacacaattcagaatatagtgc

SEQ ID NO: 382245 - DNA, 55 bp, Artificial
  Synthetic oligonucleotide
ctccgtcaataacacccaccattactacaaaggaccagcaaacacaacctggggc

SEQ ID NO: 382246 - DNA, 60 bp, Artificial
  Synthetic oligonucleotide
ctccgtcacaactttgagcaaattcgattggccagccttagctcttgcatgcgagaaaca

SEQ ID NO: 382247 - DNA, 55 bp, Artificial
  Synthetic oligonucleotide
ctccgtcagaccaacagcccctccaatggagagagattactcacgtccagaggag

SEQ ID NO: 382248 - DNA, 55 bp, Artificial
  Synthetic oligonucleotide
ctccgtcagcacaatgtagctgccacgtccctttccatattgaacgattagcccc

SEQ ID NO: 382249 - DNA, 54 bp, Artificial
  Synthetic oligonucleotide
ctccgtccccttctccagcgcttctgggcgccgaccttcgcttcggggaccttc

SEQ ID NO: 382250 - DNA, 52 bp, Artificial
  Synthetic oligonucleotide
ctccgtcccggaccctcagcctgttgacctgcaagaagtcgactgggtggtc

SEQ ID NO: 382251 - DNA, 55 bp, Artificial
  Synthetic oligonucleotide
ctccgtccgccggaggcctgccgtggagtcgcgtcggtgagatagtcatctttac

SEQ ID NO: 382252 - DNA, 55 bp, Artificial
  Synthetic oligonucleotide
ctccgtcctggacgtgttggtggtgtgttgttccaggtcgcattgagtcgctgct

SEQ ID NO: 382253 - DNA, 59 bp, Artificial
  Synthetic oligonucleotide
ctccgtccttatcgatgtaggacttgacgtcggagctggatttagctccctgtatgttc

SEQ ID NO: 382254 - DNA, 55 bp, Artificial
  Synthetic oligonucleotide
ctccgtcgcctgcgttggcaatagactcaataacagtaccgtgtgaatcaatcgt

SEQ ID NO: 382255 - DNA, 52 bp, Artificial
  Synthetic oligonucleotide
ctccgtcgctccaggcgacagcgtttcttcccgtggcgggaagaaaggtaaa

SEQ ID NO: 382256 - DNA, 55 bp, Artificial
  Synthetic oligonucleotide
ctccgtcggctttgacgaagacgatgtttcagacatctactcggtaggcgaggag

SEQ ID NO: 382257 - DNA, 56 bp, Artificial
  Synthetic oligonucleotide
ctccgtctggacattttttaggaacaatgcacatccctaaaggtggacatggtacg

SEQ ID NO: 382258 - DNA, 55 bp, Artificial
  Synthetic oligonucleotide
ctccgtgaatcagagatgctcctcagcaaactagcaataccattccagtacacta

SEQ ID NO: 382259 - DNA, 60 bp, Artificial
  Synthetic oligonucleotide
ctccgtgctgaccttagatgtgagcggtacgatcctcccctatgacacaaatcctgatct

SEQ ID NO: 382260 - DNA, 55 bp, Artificial
  Synthetic oligonucleotide
ctccgtggaagaaggtccttacgagtgggagtgtgttcagtgcaaaccaagtctg

SEQ ID NO: 382261 - DNA, 55 bp, Artificial
  Synthetic oligonucleotide
ctccgtggcactcggcaccgaacgccgatatggtgccgcgggatctgaaacatca

SEQ ID NO: 382262 - DNA, 58 bp, Artificial
  Synthetic oligonucleotide
ctccgtgtatgatcgagagtcttgtctgttgtgataagcttattttttttggtgttac

SEQ ID NO: 382263 - DNA, 56 bp, Artificial
  Synthetic oligonucleotide
ctccgtgtctggtccgccgtacccatactcatagaggctattgccgtcccaccaca

SEQ ID NO: 382264 - DNA, 56 bp, Artificial
  Synthetic oligonucleotide
ctccgttatactataccctagctacttttagcaactatccattgaatattttgcgt

SEQ ID NO: 382265 - DNA, 53 bp, Artificial
  Synthetic oligonucleotide
ctccgttcaaaagagtaggtgagactcgaagaggctttcatgaaacaactcac

SEQ ID NO: 382266 - DNA, 55 bp, Artificial
  Synthetic oligonucleotide
ctccgttcaaagggtaggtggtgggatctggaccctaggcagtcccgatcagtcc

SEQ ID NO: 382267 - DNA, 58 bp, Artificial
  Synthetic oligonucleotide
ctccgttcgcctgacaccattcttggtaatcgacgtagagcgaagctttgtccacgaa

SEQ ID NO: 382268 - DNA, 55 bp, Artificial
  Synthetic oligonucleotide
ctccgttgatgttcgtggttggatactctgcgctcaaagctgtattcgtgaatcc

SEQ ID NO: 382269 - DNA, 55 bp, Artificial
  Synthetic oligonucleotide
ctccgttgcgtggcgtgactaccctcgacttgtcggggtggtttacgtcaggcta

SEQ ID NO: 382270 - DNA, 54 bp, Artificial
  Synthetic oligonucleotide
ctccgttgtgtcaaacgagacaaatggaatcgaaccaccaagagattatttgtc

SEQ ID NO: 382271 - DNA, 55 bp, Artificial
  Synthetic oligonucleotide
ctccgtttcaatgtcaccacgacgttgaatgtcaaggctttgtgttcgaattcga

SEQ ID NO: 382272 - DNA, 58 bp, Artificial
  Synthetic oligonucleotide
ctccgtttcgctggggtggtatgaccaaccagtgggagcccactactctcaatgcctg

SEQ ID NO: 382273 - DNA, 55 bp, Artificial
  Synthetic oligonucleotide
ctccgtttgctgaacagctatttgccaccactttcacaatcgcaggtccgcaata

SEQ ID NO: 382274 - DNA, 56 bp, Artificial
  Synthetic oligonucleotide
ctcctaaacaaaattgtatactaatacatggacctccagacacaggaaagtctatg

SEQ ID NO: 382275 - DNA, 58 bp, Artificial
  Synthetic oligonucleotide
ctcctaaagatcacgaaagcgatcttaaggttcctcaagaggagctaaataaggatca

SEQ ID NO: 382276 - DNA, 56 bp, Artificial
  Synthetic oligonucleotide
ctcctaaatggtctaaatacttgatacattgatatttaaatactcttaagaaacgc

SEQ ID NO: 382277 - DNA, 58 bp, Artificial
  Synthetic oligonucleotide
ctcctaaatgttatggatgtcgtaatggactcattcaacctgttactaaatgtacgaa

SEQ ID NO: 382278 - DNA, 55 bp, Artificial
  Synthetic oligonucleotide
ctcctaacataagttataagactagtgatcagtgcaaagagactgaagtgatagg

SEQ ID NO: 382279 - DNA, 55 bp, Artificial
  Synthetic oligonucleotide
ctcctaaccaaattacacagagagccaactacagtctcacttgacaaccatcgag

SEQ ID NO: 382280 - DNA, 55 bp, Artificial
  Synthetic oligonucleotide
ctcctaagcaagtgcttaagaaacctgttcttcgcacagcaacagtacagggccc

SEQ ID NO: 382281 - DNA, 57 bp, Artificial
  Synthetic oligonucleotide
ctcctaagctaccttcacgttgccgcaaaaaagaactacattacgcgcgtgtgttgc

SEQ ID NO: 382282 - DNA, 60 bp, Artificial
  Synthetic oligonucleotide
ctcctaaggcgactgcaccagtggataagctcggagtgtaccactccatgctccggttcc

SEQ ID NO: 382283 - DNA, 50 bp, Artificial
  Synthetic oligonucleotide
ctcctaataagactccactaaacatgatgcaatccattaatgcgcaatgg

SEQ ID NO: 382284 - DNA, 59 bp, Artificial
  Synthetic oligonucleotide
ctcctaatacagccaacatgttgtgttttgtatcagcttgcaaggatttctgtttacgt

SEQ ID NO: 382285 - DNA, 55 bp, Artificial
  Synthetic oligonucleotide
ctcctaattaagaacccttattctctatcctataccccttacaatgagtctgctg

SEQ ID NO: 382286 - DNA, 56 bp, Artificial
  Synthetic oligonucleotide
ctcctacaagactactggtacctctcctgcgggctattattcccgaaggccgagag

SEQ ID NO: 382287 - DNA, 55 bp, Artificial
  Synthetic oligonucleotide
ctcctacaccaacactggagcttcctctgtgtcactccctccacagtcctcttca

SEQ ID NO: 382288 - DNA, 60 bp, Artificial
  Synthetic oligonucleotide
ctcctacatgcatttacattgctgggatggcagagcttggtgcattcttttctatacttc

SEQ ID NO: 382289 - DNA, 56 bp, Artificial
  Synthetic oligonucleotide
ctcctacgacaaatataacgctgttgaacggaaattagccaaatatgcgaaaggta

SEQ ID NO: 382290 - DNA, 54 bp, Artificial
  Synthetic oligonucleotide
ctcctacgaggaggtagtggcgaagtgggtcccgtcctgtttgaagaacgaagc

SEQ ID NO: 382291 - DNA, 55 bp, Artificial
  Synthetic oligonucleotide
ctcctacgcttgacgggttggttgttgccccaccgcaggtcttagctcagccagc

SEQ ID NO: 382292 - DNA, 54 bp, Artificial
  Synthetic oligonucleotide
ctcctactcgtttctaccgtacaacaaattctactaagtctggtgtcctattgg

SEQ ID NO: 382293 - DNA, 55 bp, Artificial
  Synthetic oligonucleotide
ctcctactctcagaccgtagcgaccgtaccacctaccaacttggctcagaacaca

SEQ ID NO: 382294 - DNA, 60 bp, Artificial
  Synthetic oligonucleotide
ctcctacttatggcccccatctgctactgccgcagacaggtgacgtgttgggatacagtt

SEQ ID NO: 382295 - DNA, 56 bp, Artificial
  Synthetic oligonucleotide
ctcctactttccgtgggagtaggcatcttcctgctgcctgctcggtagacgggtag

SEQ ID NO: 382296 - DNA, 60 bp, Artificial
  Synthetic oligonucleotide
ctcctagacgacctggctacaatcctcgtgctgctccctgccacattcagaggctctctg

SEQ ID NO: 382297 - DNA, 60 bp, Artificial
  Synthetic oligonucleotide
ctcctagatctcaaggacaacggagtgacctctctactgctgtgagtaccttgttggaga

SEQ ID NO: 382298 - DNA, 60 bp, Artificial
  Synthetic oligonucleotide
ctcctagcaatggccaagatattggtcctcacaaactcgtccctcacagctccagaaaat

SEQ ID NO: 382299 - DNA, 60 bp, Artificial
  Synthetic oligonucleotide
ctcctagcagtggagactgggccatggagtttctcgcagcaaaaatatttgataggccag

SEQ ID NO: 382300 - DNA, 55 bp, Artificial
  Synthetic oligonucleotide
ctcctagccaccgaagcaaatatttgcgctgtttcgcagcagtcgtgcaacgttc

SEQ ID NO: 382301 - DNA, 55 bp, Artificial
  Synthetic oligonucleotide
ctcctaggacccctgctcgtgttacaggcggcgtttttcttggtgactgaaatcg

SEQ ID NO: 382302 - DNA, 60 bp, Artificial
  Synthetic oligonucleotide
ctcctagggctctggggctgctctggaaaacacatctgcaccactaatgtgccttggaac

SEQ ID NO: 382303 - DNA, 55 bp, Artificial
  Synthetic oligonucleotide
ctcctaggtttcttcggaaggacttcggtccgtgtacttctagcacaatgtgtta

SEQ ID NO: 382304 - DNA, 60 bp, Artificial
  Synthetic oligonucleotide
ctcctagtacttacgagtataagactcaacacatttcgatcgcaaaatagacatttcgca

SEQ ID NO: 382305 - DNA, 56 bp, Artificial
  Synthetic oligonucleotide
ctcctagtcgccgcctggtcattcggggtcccggataacgagccctggtactgtca

SEQ ID NO: 382306 - DNA, 52 bp, Artificial
  Synthetic oligonucleotide
ctcctagttatattgatctaggtacttttaggcgtaaacaattcccttcgtt

SEQ ID NO: 382307 - DNA, 60 bp, Artificial
  Synthetic oligonucleotide
ctcctataaggaagattgtacatgatatcccgccgtgttggaacgagactcaaggagata

SEQ ID NO: 382308 - DNA, 50 bp, Artificial
  Synthetic oligonucleotide
ctcctatacacacagccccgctcttaaccagatgagacgtaacggtcacc

SEQ ID NO: 382309 - DNA, 52 bp, Artificial
  Synthetic oligonucleotide
ctcctatagacctgttttgcgagattattctacccatctttctcaagttgtg

SEQ ID NO: 382310 - DNA, 60 bp, Artificial
  Synthetic oligonucleotide
ctcctatagatctagaaagattgcgccatgagactgagtctctccgtgagaaggagaata

SEQ ID NO: 382311 - DNA, 57 bp, Artificial
  Synthetic oligonucleotide
ctcctatagttaaagggaaaatagcacaattacacactataatgagtttgcctcaac

SEQ ID NO: 382312 - DNA, 54 bp, Artificial
  Synthetic oligonucleotide
ctcctatcttaaagggttgcttcatttaaggttcgaaactgtgtactggaagta

SEQ ID NO: 382313 - DNA, 52 bp, Artificial
  Synthetic oligonucleotide
ctcctatgaagagggcaaatgtggactgaattccgtggactcccttgagcat

SEQ ID NO: 382314 - DNA, 56 bp, Artificial
  Synthetic oligonucleotide
ctcctatgcaacaacccccacgggaccacgctcttcgccccgcacaccacagcccc

SEQ ID NO: 382315 - DNA, 55 bp, Artificial
  Synthetic oligonucleotide
ctcctatggactttgatgaacttccggtctttgaatctactatggtatcggtttt

SEQ ID NO: 382316 - DNA, 60 bp, Artificial
  Synthetic oligonucleotide
ctcctatggcaggcgcttcagaaaacgtccaagatctgatcagaacgtgcagaatcatcc

SEQ ID NO: 382317 - DNA, 60 bp, Artificial
  Synthetic oligonucleotide
ctcctatgggaacatcctacttagtggcaatcaaacagcacggatgcttaaatataatta

SEQ ID NO: 382318 - DNA, 55 bp, Artificial
  Synthetic oligonucleotide
ctcctatggggggctgacctgtctacagtcatccgagcggccagagctttcggtc

SEQ ID NO: 382319 - DNA, 55 bp, Artificial
  Synthetic oligonucleotide
ctcctattacagatttaagcgtactagaccgtaaaacatggactggcgctatgag

SEQ ID NO: 382320 - DNA, 56 bp, Artificial
  Synthetic oligonucleotide
ctcctattccagtaggagatatttatagaagatggatagttttggggttaaacaga

SEQ ID NO: 382321 - DNA, 56 bp, Artificial
  Synthetic oligonucleotide
ctcctattctggtagtgggctgaattggagggtacaggtgaactccgacattttta

SEQ ID NO: 382322 - DNA, 58 bp, Artificial
  Synthetic oligonucleotide
ctcctattgtgggaaacagtggaaacctagccatagcttacatggatgtgtttcgacc

SEQ ID NO: 382323 - DNA, 55 bp, Artificial
  Synthetic oligonucleotide
ctcctcaaaacaatcctccgacgactacacttccaaagccgggcagcaaccccac

SEQ ID NO: 382324 - DNA, 55 bp, Artificial
  Synthetic oligonucleotide
ctcctcaaatcttcaccttcccagatgtgtctaagaggatctcaaggatggtgtc

SEQ ID NO: 382325 - DNA, 60 bp, Artificial
  Synthetic oligonucleotide
ctcctcaaccggttgcactgcagcctagtggtgccccccgaaagcagcttcaccgatctc

SEQ ID NO: 382326 - DNA, 55 bp, Artificial
  Synthetic oligonucleotide
ctcctcaactaccgtctaacctcggccgacacctgccgataccccgagacgtcaa

SEQ ID NO: 382327 - DNA, 55 bp, Artificial
  Synthetic oligonucleotide
ctcctcaactcccagcattgccacacaagacatgggctagttatgcttccgacac

SEQ ID NO: 382328 - DNA, 60 bp, Artificial
  Synthetic oligonucleotide
ctcctcaactttggtcagggaacgtgcgtcatggatcaactccgtccttcgattgctatg

SEQ ID NO: 382329 - DNA, 59 bp, Artificial
  Synthetic oligonucleotide
ctcctcaaggctcccgctcactgacaccatgtacctgcggctcctcggacctttacctg

SEQ ID NO: 382330 - DNA, 60 bp, Artificial
  Synthetic oligonucleotide
ctcctcaagtatttgtggagcctcctgcagtactggagtcaggaactgaagaatagtgct

SEQ ID NO: 382331 - DNA, 58 bp, Artificial
  Synthetic oligonucleotide
ctcctcaatgacaaacactcgaatgggacagtaaaagataggagtccttttcgcacac

SEQ ID NO: 382332 - DNA, 56 bp, Artificial
  Synthetic oligonucleotide
ctcctcacgatctccgcggatcgtgactaacacccacttgggatttttactcagtt

SEQ ID NO: 382333 - DNA, 55 bp, Artificial
  Synthetic oligonucleotide
ctcctcacttggacggaggctcttccggttaacagcttcactgttgatctgacag

SEQ ID NO: 382334 - DNA, 55 bp, Artificial
  Synthetic oligonucleotide
ctcctcagacagcaacgactcaagcaagccaagtacaagcagcgactcctccagc

SEQ ID NO: 382335 - DNA, 55 bp, Artificial
  Synthetic oligonucleotide
ctcctcagagcagtaaggatcatcaaaatcctctaccagagcagtaagtacccag

SEQ ID NO: 382336 - DNA, 60 bp, Artificial
  Synthetic oligonucleotide
ctcctcagagccgttaaagtcgaatgggatgaagacatcagcgaagtgatatggtatgat

SEQ ID NO: 382337 - DNA, 58 bp, Artificial
  Synthetic oligonucleotide
ctcctcaggtcgagtgaatcggcccactggtagggtaatactgacgacccagtgttca

SEQ ID NO: 382338 - DNA, 56 bp, Artificial
  Synthetic oligonucleotide
ctcctcaggttgtggttgaaccggatctggattgttattatgtcgtggttccggaa

SEQ ID NO: 382339 - DNA, 58 bp, Artificial
  Synthetic oligonucleotide
ctcctcaggttgtggttgaaccgtatctggatgtggtatacccttgttctggtgtata

SEQ ID NO: 382340 - DNA, 55 bp, Artificial
  Synthetic oligonucleotide
ctcctcagttaatgcgaatacttcatgtatatgctttggaagtcgaagtaggtgg

SEQ ID NO: 382341 - DNA, 55 bp, Artificial
  Synthetic oligonucleotide
ctcctcattcccttcgctctgaggaggattcatccgttgatgttgacgatatggc

SEQ ID NO: 382342 - DNA, 55 bp, Artificial
  Synthetic oligonucleotide
ctcctccaaacgcatcgttcatttggaccttacgatgttttggatgtcggttccc

SEQ ID NO: 382343 - DNA, 50 bp, Artificial
  Synthetic oligonucleotide
ctcctccaccccgtcaacgtagtctgggaaagacgagggctcgcccctat

SEQ ID NO: 382344 - DNA, 57 bp, Artificial
  Synthetic oligonucleotide
ctcctccacccttagaagcctctggcagacttttattttcaaatgacactgtaacta

SEQ ID NO: 382345 - DNA, 54 bp, Artificial
  Synthetic oligonucleotide
ctcctccactaattcgcggatacgttgccttatggctgagcttattggttcccc

SEQ ID NO: 382346 - DNA, 55 bp, Artificial
  Synthetic oligonucleotide
ctcctccaggaggatcaaccttagttacataggtagctgagacctgacctttgag

SEQ ID NO: 382347 - DNA, 60 bp, Artificial
  Synthetic oligonucleotide
ctcctccatccgaacatgttaaatgggcaaaccgctagtcgcagagcagcctgacgctac

SEQ ID NO: 382348 - DNA, 55 bp, Artificial
  Synthetic oligonucleotide
ctcctccatggtgatataaagaccacccacaatctttcgggtgagcccctaagcc

SEQ ID NO: 382349 - DNA, 51 bp, Artificial
  Synthetic oligonucleotide
ctcctcccaataaagtatgcctggattatacgtgttctgatttatgagtag

SEQ ID NO: 382350 - DNA, 55 bp, Artificial
  Synthetic oligonucleotide
ctcctccgacggagtgacaaactgcccaagatgctggcgagtgttgggcaagtgg

SEQ ID NO: 382351 - DNA, 58 bp, Artificial
  Synthetic oligonucleotide
ctcctccgacttccgattcaggcacttccggtcatcaattacgacacgcgcggcggtg

SEQ ID NO: 382352 - DNA, 60 bp, Artificial
  Synthetic oligonucleotide
ctcctccgtcttgatcatctggtgagtggtgtccttgaacatattccttaacccattcat

SEQ ID NO: 382353 - DNA, 55 bp, Artificial
  Synthetic oligonucleotide
ctcctcctagggactgcttcaaaaaaggaggatttacagtaactgtgtactttga

SEQ ID NO: 382354 - DNA, 54 bp, Artificial
  Synthetic oligonucleotide
ctcctcctatcattggaagaattaattgtgtatcatatattacaggaatactat

SEQ ID NO: 382355 - DNA, 59 bp, Artificial
  Synthetic oligonucleotide
ctcctcctgaccatacctgggccgttcgtattatagcattgggactcgctgttactgcc

SEQ ID NO: 382356 - DNA, 60 bp, Artificial
  Synthetic oligonucleotide
ctcctcgactcgtttagactgaatgcttcagcaggtccatcgaccgccgtcgctcgtatc

SEQ ID NO: 382357 - DNA, 57 bp, Artificial
  Synthetic oligonucleotide
ctcctcgctagataccctaacgagtatcttggggactctccgtggagagtcagtaaa

SEQ ID NO: 382358 - DNA, 55 bp, Artificial
  Synthetic oligonucleotide
ctcctcggactagtacacctgtccaaagagcagtacaatcattatctagtctgcg

SEQ ID NO: 382359 - DNA, 55 bp, Artificial
  Synthetic oligonucleotide
ctcctcggggggtccattgttgtgccccgcgggacacgccgtgggcatattcagg

SEQ ID NO: 382360 - DNA, 60 bp, Artificial
  Synthetic oligonucleotide
ctcctcgttacgtgtcaagtttcaggccatagagtattcacagctcaacgccacgtcgca

SEQ ID NO: 382361 - DNA, 56 bp, Artificial
  Synthetic oligonucleotide
ctcctctaacgtgtcagtcgcccacgacggcactggaaagagggtctactacctta

SEQ ID NO: 382362 - DNA, 55 bp, Artificial
  Synthetic oligonucleotide
ctcctctaactctgtacgtgttgaggatgtaacgaacacagcggaatattgggga

SEQ ID NO: 382363 - DNA, 58 bp, Artificial
  Synthetic oligonucleotide
ctcctctacattgtattgaaattctaaatacattcccaataataaaaacacatcctca

SEQ ID NO: 382364 - DNA, 55 bp, Artificial
  Synthetic oligonucleotide
ctcctctagaacctattaattcaagctcaagggagtctcctagtatcagaggatc

SEQ ID NO: 382365 - DNA, 52 bp, Artificial
  Synthetic oligonucleotide
ctcctctcacagaggactagagacatttatattagtagaagactactaggca

SEQ ID NO: 382366 - DNA, 55 bp, Artificial
  Synthetic oligonucleotide
ctcctctcagtagaggaagcctgcgcgttgaccccgccccactccgccaagtcac

SEQ ID NO: 382367 - DNA, 50 bp, Artificial
  Synthetic oligonucleotide
ctcctctcgtgcctaaccgttcccacatcggccatacactatcgtaacat

SEQ ID NO: 382368 - DNA, 60 bp, Artificial
  Synthetic oligonucleotide
ctcctctctaatgacccgattccagaatctaaacttcttgccctggtgcacaagatcaaa

SEQ ID NO: 382369 - DNA, 60 bp, Artificial
  Synthetic oligonucleotide
ctcctctctgctactggatccagaggatgaggtgggttcctcatggtgttcgggaggtat

SEQ ID NO: 382370 - DNA, 55 bp, Artificial
  Synthetic oligonucleotide
ctcctctctggctaccgatcgtcgttgtttgggcaatgcacgttctccaacggtg

SEQ ID NO: 382371 - DNA, 60 bp, Artificial
  Synthetic oligonucleotide
ctcctctgccgatccatactgcggaactcctagcagcttgcttcgctcgcagcaggtctg

SEQ ID NO: 382372 - DNA, 53 bp, Artificial
  Synthetic oligonucleotide
ctcctctggaagcatatgctgacaagatcataggcagtgaaaataatagctgt

SEQ ID NO: 382373 - DNA, 60 bp, Artificial
  Synthetic oligonucleotide
ctcctctggacctcgtcgggaaaggagcagcgtctcacgtcacctggtcggctgatactc

SEQ ID NO: 382374 - DNA, 60 bp, Artificial
  Synthetic oligonucleotide
ctcctcttctgacagcgaagaggaaccatcaactagtagtacatcatctacaagttaagc

SEQ ID NO: 382375 - DNA, 55 bp, Artificial
  Synthetic oligonucleotide
ctcctcttgcataagggcacccaatttgataaagtacaaacccatgacagaccag

SEQ ID NO: 382376 - DNA, 60 bp, Artificial
  Synthetic oligonucleotide
ctcctcttgcttgaaattagagatgtctgaatcctcgtacatcaattccagtgtctccct

SEQ ID NO: 382377 - DNA, 53 bp, Artificial
  Synthetic oligonucleotide
ctcctcttgtctgtgttgacgtcaaccctaccatatggcgccggggatcagaa

SEQ ID NO: 382378 - DNA, 55 bp, Artificial
  Synthetic oligonucleotide
ctcctctttaccatgctatggatgttaccacacaggttggagatgattcaggagg

SEQ ID NO: 382379 - DNA, 56 bp, Artificial
  Synthetic oligonucleotide
ctcctctttgctattctgtaactttccctggttgtgacaattgaatcagttttatc

SEQ ID NO: 382380 - DNA, 55 bp, Artificial
  Synthetic oligonucleotide
ctcctcttttttgtcattaggaccgatatttgtacgctttaatatagtaattctc

SEQ ID NO: 382381 - DNA, 60 bp, Artificial
  Synthetic oligonucleotide
ctcctgaaaaacagatctcagagctaagtccgcggttatcggcagtgcatataacgcctg

SEQ ID NO: 382382 - DNA, 59 bp, Artificial
  Synthetic oligonucleotide
ctcctgaaatcaccgattgcacggagctttagatacgagaatagcctaaccttgcgagg

SEQ ID NO: 382383 - DNA, 55 bp, Artificial
  Synthetic oligonucleotide
ctcctgaagataatctcggatttagagagatcacttgtactgacagtgaggccgg

SEQ ID NO: 382384 - DNA, 55 bp, Artificial
  Synthetic oligonucleotide
ctcctgaaggccacattagactaagcaggttgggtcaacgtggcactattcgtac

SEQ ID NO: 382385 - DNA, 55 bp, Artificial
  Synthetic oligonucleotide
ctcctgaaggcgaagttggagccatagctctagatttcaaacccggcacatctgg

SEQ ID NO: 382386 - DNA, 55 bp, Artificial
  Synthetic oligonucleotide
ctcctgaattgaggagcagatactgggctataagaacaagaagcggagggaacac

SEQ ID NO: 382387 - DNA, 53 bp, Artificial
  Synthetic oligonucleotide
ctcctgacgagcattcagcttatgatccttcaactaagccaaaaccaaagacc

SEQ ID NO: 382388 - DNA, 55 bp, Artificial
  Synthetic oligonucleotide
ctcctgactttctccgaccacgccctactgatgtcccttctagcaacttcaacca

SEQ ID NO: 382389 - DNA, 58 bp, Artificial
  Synthetic oligonucleotide
ctcctgaggaggttagcgaaacacagggaatggagaaattgacaataacctattcatc

SEQ ID NO: 382390 - DNA, 55 bp, Artificial
  Synthetic oligonucleotide
ctcctgagttagtactcatgtactgtgatgtagttgaaggaaggtggaatataag

SEQ ID NO: 382391 - DNA, 55 bp, Artificial
  Synthetic oligonucleotide
ctcctgataacacgtggcatgacagggcgactatccaacactcccaatgtagcct

SEQ ID NO: 382392 - DNA, 56 bp, Artificial
  Synthetic oligonucleotide
ctcctgatagttttaggtatgcatattttagcgagttagcgaaggggggatttgac

SEQ ID NO: 382393 - DNA, 55 bp, Artificial
  Synthetic oligonucleotide
ctcctgatgacaaaactgttcatctgttggatcgtgatgacgaccacgtagttgc

SEQ ID NO: 382394 - DNA, 55 bp, Artificial
  Synthetic oligonucleotide
ctcctgatgcagtcaatgttgctacaaccacactgtacgcaaacacatcacgtgt

SEQ ID NO: 382395 - DNA, 51 bp, Artificial
  Synthetic oligonucleotide
ctcctgatgtcactgaccctatattaaagagtccaaattggattatcgtag

SEQ ID NO: 382396 - DNA, 55 bp, Artificial
  Synthetic oligonucleotide
ctcctgcaaggttaggcttcatgtagatgagccagatgagctcacggtacacgtg

SEQ ID NO: 382397 - DNA, 60 bp, Artificial
  Synthetic oligonucleotide
ctcctgcagacaaacttcaatgtgggtaagcacattaagactaagtgctatatgtggcct

SEQ ID NO: 382398 - DNA, 58 bp, Artificial
  Synthetic oligonucleotide
ctcctgcatatagaccaccaaatgcccctatcttatcaacacttccggaaactactgt

SEQ ID NO: 382399 - DNA, 59 bp, Artificial
  Synthetic oligonucleotide
ctcctgccaccgcacctgtgggtaagaacacacccatcatgttcgcgtctgtcgtcagg

SEQ ID NO: 382400 - DNA, 56 bp, Artificial
  Synthetic oligonucleotide
ctcctgcctctaccaatcgccagtcaggaagacagcctacccctccaactctacct

SEQ ID NO: 382401 - DNA, 60 bp, Artificial
  Synthetic oligonucleotide
ctcctgcctctaccaatcgccagtcaggaaggcagcctacccctctgtctccgcctttga

SEQ ID NO: 382402 - DNA, 55 bp, Artificial
  Synthetic oligonucleotide
ctcctgcctgtcacttacgttgtccactgggtctcgccgcagcgcgtgctactga

SEQ ID NO: 382403 - DNA, 60 bp, Artificial
  Synthetic oligonucleotide
ctcctgcgcagatcacgaggtcggctggggtaacctggcaacactttcaccctgtgtggc

SEQ ID NO: 382404 - DNA, 60 bp, Artificial
  Synthetic oligonucleotide
ctcctgcgcctgtgtcaaaaatattaagcacagatgcttttgtcacacgtttagatatat

SEQ ID NO: 382405 - DNA, 60 bp, Artificial
  Synthetic oligonucleotide
ctcctgctatgagctggcgtcctccggcacacaatgccgaaggacaggagggactctggt

SEQ ID NO: 382406 - DNA, 60 bp, Artificial
  Synthetic oligonucleotide
ctcctgctatgtgggatctcgctcgtgcttatgcggatgtccaagctagtcgctcagcta

SEQ ID NO: 382407 - DNA, 59 bp, Artificial
  Synthetic oligonucleotide
ctcctgctcaaggaaactcttcgattccctcatgttgctgtacaaaacctacggatgga

SEQ ID NO: 382408 - DNA, 57 bp, Artificial
  Synthetic oligonucleotide
ctcctgctcaaggaacctctatgtttccctcatgttgctgtaccaaacctacggacg

SEQ ID NO: 382409 - DNA, 55 bp, Artificial
  Synthetic oligonucleotide
ctcctgcttgccgcaggagtaggcatctacctctaccccaaccggtgaaggttgg

SEQ ID NO: 382410 - DNA, 55 bp, Artificial
  Synthetic oligonucleotide
ctcctgcttggatccccatcgtctcacagctttacatctctgtactctggatggt

SEQ ID NO: 382411 - DNA, 55 bp, Artificial
  Synthetic oligonucleotide
ctcctggacaatctgcgtttaatacgcgcagacagccgctattcgcacaccttcg

SEQ ID NO: 382412 - DNA, 55 bp, Artificial
  Synthetic oligonucleotide
ctcctggacaggtgcactcatcaccccgtgcgccgcggaagaacagaaactgcct

SEQ ID NO: 382413 - DNA, 57 bp, Artificial
  Synthetic oligonucleotide
ctcctggaccgtggacctaacgatctcattaatctgggctacagacaacgttatatt

SEQ ID NO: 382414 - DNA, 54 bp, Artificial
  Synthetic oligonucleotide
ctcctggactggggccttgataaccccttgcagcccggaggaaggaaagttgcc

SEQ ID NO: 382415 - DNA, 55 bp, Artificial
  Synthetic oligonucleotide
ctcctggagaaactcacaaggaagattgcagtgaatcaaattctgatagaccagt

SEQ ID NO: 382416 - DNA, 60 bp, Artificial
  Synthetic oligonucleotide
ctcctggatctagaacgctcgtcccgagcctgttcaggtgtctgtatgggtggagctcgt

SEQ ID NO: 382417 - DNA, 60 bp, Artificial
  Synthetic oligonucleotide
ctcctggatggtctcatagcgtgagcagtgagtctactaaacagagcaagaaagtcacgt

SEQ ID NO: 382418 - DNA, 59 bp, Artificial
  Synthetic oligonucleotide
ctcctggatgtggtgtacagcacacccatccgggatttttactaggggacgtcattgca

SEQ ID NO: 382419 - DNA, 55 bp, Artificial
  Synthetic oligonucleotide
ctcctggcaaacatagtgatcatgatccgcgagactcgcaagagacaacggatgg

SEQ ID NO: 382420 - DNA, 52 bp, Artificial
  Synthetic oligonucleotide
ctcctggccataccctgtttaggggtctaaatccacccccggcactaaatgg

SEQ ID NO: 382421 - DNA, 55 bp, Artificial
  Synthetic oligonucleotide
ctcctggccgtctcgatgaggaggaatacaacgttattcgatcgcgtttcctgac

SEQ ID NO: 382422 - DNA, 60 bp, Artificial
  Synthetic oligonucleotide
ctcctgggaaatcaatcactgctggagacacatccgcgataccagaatcccgagccagcg

SEQ ID NO: 382423 - DNA, 55 bp, Artificial
  Synthetic oligonucleotide
ctcctgggtggatggggtgcaaatccacaggttcgctcccacaccaaagccgttc

SEQ ID NO: 382424 - DNA, 56 bp, Artificial
  Synthetic oligonucleotide
ctcctggtcagggctgttcaatcctttaactggaaactccctcagggagctccaac

SEQ ID NO: 382425 - DNA, 60 bp, Artificial
  Synthetic oligonucleotide
ctcctggtctttgacagactcatccggcaaggacacccctggaggctattgtctagaaga

SEQ ID NO: 382426 - DNA, 53 bp, Artificial
  Synthetic oligonucleotide
ctcctgtaaaaattaattgtaccagacctggcaatcctataagaaaaagggta

SEQ ID NO: 382427 - DNA, 54 bp, Artificial
  Synthetic oligonucleotide
ctcctgtaattgctgaaccaggacctgcagtacgcccaccaatagctgttgaca

SEQ ID NO: 382428 - DNA, 58 bp, Artificial
  Synthetic oligonucleotide
ctcctgtacggtcgaaaagagggtgcagcgtaagtttgttggtcgagagcagtatcaa

SEQ ID NO: 382429 - DNA, 60 bp, Artificial
  Synthetic oligonucleotide
ctcctgtagataagcatttatatcttgctggagtagcctggtaccaatgtatgtttcctg

SEQ ID NO: 382430 - DNA, 54 bp, Artificial
  Synthetic oligonucleotide
ctcctgtccagagcaaaccgagcgtaaatgcgaagtcctcgctgagaagtaccc

SEQ ID NO: 382431 - DNA, 55 bp, Artificial
  Synthetic oligonucleotide
ctcctgtctagtcctggtgcattagcctcgacccatattggctcagtggatgctg

SEQ ID NO: 382432 - DNA, 55 bp, Artificial
  Synthetic oligonucleotide
ctcctgtctttgagtacctatcaggtgacagacaagtggaggaatggcccaaggc

SEQ ID NO: 382433 - DNA, 54 bp, Artificial
  Synthetic oligonucleotide
ctcctgtgataggccgggaaaaattccattcccgaccgcagcacggtagggaac

SEQ ID NO: 382434 - DNA, 60 bp, Artificial
  Synthetic oligonucleotide
ctcctgtgcgtgctagagaggcacatatgcaaatgaaagcagcagcagttagaggtaagt

SEQ ID NO: 382435 - DNA, 55 bp, Artificial
  Synthetic oligonucleotide
ctcctgtgcttccacggtaatgggcgctatggacacagaccgccacatgccatcc

SEQ ID NO: 382436 - DNA, 60 bp, Artificial
  Synthetic oligonucleotide
ctcctgtgcttggaaactacaaagaaatgtgcgctgcatggtccagtagcagctgcttcg

SEQ ID NO: 382437 - DNA, 56 bp, Artificial
  Synthetic oligonucleotide
ctcctgtggaaaggtgagggagcagtagtcatacaagataaaggagacattaaagt

SEQ ID NO: 382438 - DNA, 56 bp, Artificial
  Synthetic oligonucleotide
ctcctgtggaaatttctcacggtgaaaactctcaggttaatttccagcgagtagta

SEQ ID NO: 382439 - DNA, 55 bp, Artificial
  Synthetic oligonucleotide
ctcctgtgttcctcaagcgcaccttttcccaaaccccttttggtctgcgtgcgct

SEQ ID NO: 382440 - DNA, 60 bp, Artificial
  Synthetic oligonucleotide
ctcctgttcacagcagtgaggggggaccagatatgcattggataccatgccaataattcc

SEQ ID NO: 382441 - DNA, 52 bp, Artificial
  Synthetic oligonucleotide
ctcctgttccgggagcacgcacgcaaccagtcacgcagcactgtgcagtcgc

SEQ ID NO: 382442 - DNA, 55 bp, Artificial
  Synthetic oligonucleotide
ctcctgttgctggtacttgccattatcctctgcccacttagccatgcgttgctgg

SEQ ID NO: 382443 - DNA, 59 bp, Artificial
  Synthetic oligonucleotide
ctccttaaagcctgggtccatctaaaggatgcaacgttatcggatgccatcacaagttc

SEQ ID NO: 382444 - DNA, 55 bp, Artificial
  Synthetic oligonucleotide
ctccttaagagttaggtcaagtactcagaatgtatagtgttcacgcgatgacgtc

SEQ ID NO: 382445 - DNA, 59 bp, Artificial
  Synthetic oligonucleotide
ctccttaatccagtcttggttaaggatgctactgggagtactcagtttggtccagtgca

SEQ ID NO: 382446 - DNA, 60 bp, Artificial
  Synthetic oligonucleotide
ctccttacgctggttgatgcgctctagccgcacagggtgacagtacgcagaggattaagg

SEQ ID NO: 382447 - DNA, 57 bp, Artificial
  Synthetic oligonucleotide
ctccttagcttgccttatatgctcatattttgctttctcttgcgttttaaactcttg

SEQ ID NO: 382448 - DNA, 58 bp, Artificial
  Synthetic oligonucleotide
ctccttatgaatggatggggtaccagctgcatccaaagaagtggacagtgcaagaaat

SEQ ID NO: 382449 - DNA, 55 bp, Artificial
  Synthetic oligonucleotide
ctccttatggcataacagtactaaatcacatgggtagcatggcattcagagtggt

SEQ ID NO: 382450 - DNA, 55 bp, Artificial
  Synthetic oligonucleotide
ctccttatttgccacccaactgtgcgtacataaaagggcagttagaacaagggtc

SEQ ID NO: 382451 - DNA, 55 bp, Artificial
  Synthetic oligonucleotide
ctccttcaactcactggccactacatatgagtacgttgttcacaacggttccttg

SEQ ID NO: 382452 - DNA, 55 bp, Artificial
  Synthetic oligonucleotide
ctccttcatacgtgacctcggaaaagcagccacatcagccgatccagaagcggga

SEQ ID NO: 382453 - DNA, 56 bp, Artificial
  Synthetic oligonucleotide
ctccttccaggagctcatctggagatggctaaagctccaaagaaagctattgaata

SEQ ID NO: 382454 - DNA, 58 bp, Artificial
  Synthetic oligonucleotide
ctccttcccgtcacctctctggtccgtttcagtgttccgacacgcatcctcctctcag

SEQ ID NO: 382455 - DNA, 60 bp, Artificial
  Synthetic oligonucleotide
ctccttcctgatacctcggcagtaagtctccatggtgggcctgcaacgaatagagactat

SEQ ID NO: 382456 - DNA, 59 bp, Artificial
  Synthetic oligonucleotide
ctccttcgataaccctcaaacttggtgactacggagaagtcacactggactgtgagcca

SEQ ID NO: 382457 - DNA, 55 bp, Artificial
  Synthetic oligonucleotide
ctccttcgtgagcttaagcgctcaggtgactcgtatatacttgagttccccacgc

SEQ ID NO: 382458 - DNA, 55 bp, Artificial
  Synthetic oligonucleotide
ctccttcgttgggccaaccttccaatacatggaggccaatgaatattacccagct

SEQ ID NO: 382459 - DNA, 55 bp, Artificial
  Synthetic oligonucleotide
ctccttctatggcgatgatgagattgtcagtacagatataaagttggacccagag

SEQ ID NO: 382460 - DNA, 55 bp, Artificial
  Synthetic oligonucleotide
ctccttgatattgcatgatgggttctggtccattacaaccctcctcacacctatg

SEQ ID NO: 382461 - DNA, 60 bp, Artificial
  Synthetic oligonucleotide
ctccttgatgcttgacagtttgttggtgtcttcaatgaactttctctcaaagctggctgg

SEQ ID NO: 382462 - DNA, 60 bp, Artificial
  Synthetic oligonucleotide
ctccttgcagtgcttgcaacatatccggattagactatgtatctgtccactgtccgaatg

SEQ ID NO: 382463 - DNA, 60 bp, Artificial
  Synthetic oligonucleotide
ctccttgcattcgtatcagctgatacagtagaacctataaacgcggttgcatttgataac

SEQ ID NO: 382464 - DNA, 57 bp, Artificial
  Synthetic oligonucleotide
ctccttggaaacccggagtgtgatctgttcttagaagtacctgaatggtcctatata

SEQ ID NO: 382465 - DNA, 59 bp, Artificial
  Synthetic oligonucleotide
ctccttggaaatcgcaaatggatcccatcagaagacacctggtttgacggactgaacta

SEQ ID NO: 382466 - DNA, 60 bp, Artificial
  Synthetic oligonucleotide
ctccttggacttcttgcaacagggtagattcaagggtcatgagacttccattaatcatct

SEQ ID NO: 382467 - DNA, 59 bp, Artificial
  Synthetic oligonucleotide
ctccttggcaatagagagagctttaaatcagtatagggcagaagacaaccttagggatc

SEQ ID NO: 382468 - DNA, 60 bp, Artificial
  Synthetic oligonucleotide
ctccttgggttcttgggagcagcagggagcactatgggcgcagcgtcagtaacgctgacg

SEQ ID NO: 382469 - DNA, 57 bp, Artificial
  Synthetic oligonucleotide
ctccttgtcggtgaagtctcccgcgcgagatctcttcctaggtccggaatcgacctc

SEQ ID NO: 382470 - DNA, 55 bp, Artificial
  Synthetic oligonucleotide
ctcctttaagggacggaaagtaactcttgatgttgacaatatgtcaacggaagcg

SEQ ID NO: 382471 - DNA, 58 bp, Artificial
  Synthetic oligonucleotide
ctcctttaatttgaatgggcttcccatactttgtgttgctctgccagtctctttgggc

SEQ ID NO: 382472 - DNA, 55 bp, Artificial
  Synthetic oligonucleotide
ctcctttagctgatcaaaataatcgcttgcacctccatcgagcaaaatttcgtct

SEQ ID NO: 382473 - DNA, 50 bp, Artificial
  Synthetic oligonucleotide
ctcctttataagaaagctcattccgtgtatagcaggaaagcaaagcgttc

SEQ ID NO: 382474 - DNA, 59 bp, Artificial
  Synthetic oligonucleotide
ctcctttcaaaccaataaataatgactcattcaacctctcatcataatctagggaattc

SEQ ID NO: 382475 - DNA, 60 bp, Artificial
  Synthetic oligonucleotide
ctcctttcacaatcgtgttgggtgcccatgcaaacagcatactggtgaggcggaagctag

SEQ ID NO: 382476 - DNA, 57 bp, Artificial
  Synthetic oligonucleotide
ctcctttcgagatttacggcaaattccgagaagctaactctgaggagtatgacgaaa

SEQ ID NO: 382477 - DNA, 58 bp, Artificial
  Synthetic oligonucleotide
ctcctttgataaaactgtatatcatacactggtaatctggtaaacattgtaggacgtg

SEQ ID NO: 382478 - DNA, 59 bp, Artificial
  Synthetic oligonucleotide
ctcctttggagcacctagccttctctcttcggagagtgaagatgaagttaactatttga

SEQ ID NO: 382479 - DNA, 52 bp, Artificial
  Synthetic oligonucleotide
ctcctttggagctgaacatgtgaagaaggcagtaaagccgtcttctgaagga

SEQ ID NO: 382480 - DNA, 53 bp, Artificial
  Synthetic oligonucleotide
ctccttttgacgccacaaggcaccagaggccctattctctcttgaggcccgcc

SEQ ID NO: 382481 - DNA, 55 bp, Artificial
  Synthetic oligonucleotide
ctccttttttagaaatgtggtatggcttatcaaaaagaacagtacatacccaaca

SEQ ID NO: 382482 - DNA, 57 bp, Artificial
  Synthetic oligonucleotide
ctcgaaaaacatcgagtgctgttggtcagttggaatgacaaagttctatggtgggtg

SEQ ID NO: 382483 - DNA, 55 bp, Artificial
  Synthetic oligonucleotide
ctcgaaaatgtaataaaatccagtagtatcagtgcgacgagttaatctggttggt

SEQ ID NO: 382484 - DNA, 55 bp, Artificial
  Synthetic oligonucleotide
ctcgaaaattggacctgtcagttgaggattttctaatgctacgtcaccgcgcggc

SEQ ID NO: 382485 - DNA, 55 bp, Artificial
  Synthetic oligonucleotide
ctcgaaacaaagcaattgattgtcgccgcacgaagaacataatgcgctcagttcg

SEQ ID NO: 382486 - DNA, 55 bp, Artificial
  Synthetic oligonucleotide
ctcgaaactgagtatgaccgcttgacaaaccttacgggcaaagctaagcttgtag

SEQ ID NO: 382487 - DNA, 55 bp, Artificial
  Synthetic oligonucleotide
ctcgaaactgcgtggagtgcggcggaacagccgtgttacaggagggacgtgagac

SEQ ID NO: 382488 - DNA, 55 bp, Artificial
  Synthetic oligonucleotide
ctcgaaagagttctggcgacgaagtggcaagggaacaccactttgactgtagacg

SEQ ID NO: 382489 - DNA, 60 bp, Artificial
  Synthetic oligonucleotide
ctcgaaagtaccatggtttgatgcgttatcggaatgtgaattccacgcgcagcaccccaa

SEQ ID NO: 382490 - DNA, 55 bp, Artificial
  Synthetic oligonucleotide
ctcgaaataaaggggattgtttatctcccaggtatatacgccattccttagttga

SEQ ID NO: 382491 - DNA, 55 bp, Artificial
  Synthetic oligonucleotide
ctcgaaataggagatatgcttctgaggactgcaataggccaggtgtcaaggccca

SEQ ID NO: 382492 - DNA, 57 bp, Artificial
  Synthetic oligonucleotide
ctcgaaatatgtgggtcgttgttctgtgtagagctgagggataagggggatttagta

SEQ ID NO: 382493 - DNA, 55 bp, Artificial
  Synthetic oligonucleotide
ctcgaaatccaggatctagaagaaccttgtaccaaagtctaaacgaacatgaaac

SEQ ID NO: 382494 - DNA, 55 bp, Artificial
  Synthetic oligonucleotide
ctcgaaatttgattgcaacggaattcgtgaacaatcaattactcaaaggcaagac

SEQ ID NO: 382495 - DNA, 50 bp, Artificial
  Synthetic oligonucleotide
ctcgaacagatagccctcacgagcttctttcgaggcgcggaggcgtgccc

SEQ ID NO: 382496 - DNA, 55 bp, Artificial
  Synthetic oligonucleotide
ctcgaacatggacggaaatgacaaggtaacctctgcagcatcgtttgtgagcgcg

SEQ ID NO: 382497 - DNA, 55 bp, Artificial
  Synthetic oligonucleotide
ctcgaacattgaaggccattacgccaacgaatgtcctaatcgacaaagctcggag

SEQ ID NO: 382498 - DNA, 53 bp, Artificial
  Synthetic oligonucleotide
ctcgaacctagaagacgaaaggttaaaaccacagttgtctatgggagaagacg

SEQ ID NO: 382499 - DNA, 58 bp, Artificial
  Synthetic oligonucleotide
ctcgaacggctctatcactactccgggtaatgtctgtactccgaatctcgatactccg

SEQ ID NO: 382500 - DNA, 55 bp, Artificial
  Synthetic oligonucleotide
ctcgaacgtgtgcgcgacgaccctcgccccgcgtgggacgggtacaccgtggcga

SEQ ID NO: 382501 - DNA, 54 bp, Artificial
  Synthetic oligonucleotide
ctcgaactcctaccgggagtccggttgtgaggcaagttgaggtgttactaccta

SEQ ID NO: 382502 - DNA, 58 bp, Artificial
  Synthetic oligonucleotide
ctcgaactcttgggtggacatcgccagtctcgtatacaccggggagagagacgacacc

SEQ ID NO: 382503 - DNA, 55 bp, Artificial
  Synthetic oligonucleotide
ctcgaactggataagcacatggagatgtggttccccattctcatgtaactcacgg

SEQ ID NO: 382504 - DNA, 56 bp, Artificial
  Synthetic oligonucleotide
ctcgaagactcggggtcaagcgttggacagttggaccttattctatactacaaaca

SEQ ID NO: 382505 - DNA, 53 bp, Artificial
  Synthetic oligonucleotide
ctcgaagcggcgtgcaattttacccgtggggaccgttgcaacctggaagaccg

SEQ ID NO: 382506 - DNA, 55 bp, Artificial
  Synthetic oligonucleotide
ctcgaagctaagatcaaaccatgggtaacttatgataaggctttggaactgttga

SEQ ID NO: 382507 - DNA, 55 bp, Artificial
  Synthetic oligonucleotide
ctcgaaggacaatctcgcgggaagttccagtggatcaatcacgttcgggccgagt

SEQ ID NO: 382508 - DNA, 57 bp, Artificial
  Synthetic oligonucleotide
ctcgaaggaccggagctgaagtgggctggacctgtctttaaagataatctccgtgcc

SEQ ID NO: 382509 - DNA, 55 bp, Artificial
  Synthetic oligonucleotide
ctcgaagggccacctgatggaccggtggaacacctacgtgcatgagaagtccggc

SEQ ID NO: 382510 - DNA, 51 bp, Artificial
  Synthetic oligonucleotide
ctcgaagggcccgtcatgggggctgcctatacagcactagcagtagccggg

SEQ ID NO: 382511 - DNA, 59 bp, Artificial
  Synthetic oligonucleotide
ctcgaaggtacgacgtcgtctgaacttcgacagccctatgcagtccggtgttcgtgctc

SEQ ID NO: 382512 - DNA, 55 bp, Artificial
  Synthetic oligonucleotide
ctcgaaggtcacacctcgagtaccttgatttagagtctgttagtaaacctacgct

SEQ ID NO: 382513 - DNA, 51 bp, Artificial
  Synthetic oligonucleotide
ctcgaaggtcacggcttggttaaatggagcagtggctagaactatggataa

SEQ ID NO: 382514 - DNA, 55 bp, Artificial
  Synthetic oligonucleotide
ctcgaagtaggcgaagagtctaccgacagtaagactgcgtatctgaggcgcgcgt

SEQ ID NO: 382515 - DNA, 60 bp, Artificial
  Synthetic oligonucleotide
ctcgaatagagtgtgttgttgctttgcgtcgcggatcccatatgttaataacacgtggaa

SEQ ID NO: 382516 - DNA, 55 bp, Artificial
  Synthetic oligonucleotide
ctcgaatcgaattggagctctgtacggagtgctgtgacacacacgtgtacacccg

SEQ ID NO: 382517 - DNA, 55 bp, Artificial
  Synthetic oligonucleotide
ctcgaatcgtcttgctaggatcgcgtatctgattgctttgttacctgcgactgcc

SEQ ID NO: 382518 - DNA, 59 bp, Artificial
  Synthetic oligonucleotide
ctcgaatctttggactaactctcagtgactggttctacgttgcagctataggttacacc

SEQ ID NO: 382519 - DNA, 55 bp, Artificial
  Synthetic oligonucleotide
ctcgaatgctgagaacttttggaagggtttggatggtaactgggcacgattgaga

SEQ ID NO: 382520 - DNA, 60 bp, Artificial
  Synthetic oligonucleotide
ctcgaatggcatgataccagtgaggatcaattcaagatccactataaagggaacggagag

SEQ ID NO: 382521 - DNA, 55 bp, Artificial
  Synthetic oligonucleotide
ctcgaatgggacagtaaaagataggagtccttttcgcacactaatgagttgccct

SEQ ID NO: 382522 - DNA, 59 bp, Artificial
  Synthetic oligonucleotide
ctcgaatgggacagtaaaggatagaagcccatttagaactctcatgagtgtcgaagtgg

SEQ ID NO: 382523 - DNA, 51 bp, Artificial
  Synthetic oligonucleotide
ctcgaatttcaaggcatgggtatgcaatttcaagatccatcagaactaatg

SEQ ID NO: 382524 - DNA, 55 bp, Artificial
  Synthetic oligonucleotide
ctcgacaacgattcgctacaaagccttcttgaacgctccaatctcccaagctccc

SEQ ID NO: 382525 - DNA, 51 bp, Artificial
  Synthetic oligonucleotide
ctcgacaattcacgtcatatccctgcgattcagagcatgatccagaatttc

SEQ ID NO: 382526 - DNA, 58 bp, Artificial
  Synthetic oligonucleotide
ctcgacagatatcctgtaatcgttgagattaaaggctcctcttgtgtcttcaaagcga

SEQ ID NO: 382527 - DNA, 55 bp, Artificial
  Synthetic oligonucleotide
ctcgacataacggctgatccaaccacagcaccacaaactgaacgaatgatgcgca

SEQ ID NO: 382528 - DNA, 55 bp, Artificial
  Synthetic oligonucleotide
ctcgacatcaatgagcttgatatcccttctattctgtgagtctaagagtttcctg

SEQ ID NO: 382529 - DNA, 55 bp, Artificial
  Synthetic oligonucleotide
ctcgacatgatttcgtttcctttggtaaggtaatgtgtatctcggatgttacgcg

SEQ ID NO: 382530 - DNA, 57 bp, Artificial
  Synthetic oligonucleotide
ctcgacattttgagagacacagttatggcaggaggtgctggtaatagttggagaagt

SEQ ID NO: 382531 - DNA, 55 bp, Artificial
  Synthetic oligonucleotide
ctcgaccaagctgtgccggcattattggatggggaccgtccctgtcaacatgctg

SEQ ID NO: 382532 - DNA, 56 bp, Artificial
  Synthetic oligonucleotide
ctcgaccaagttacagtgttaagtcgaaattgattttaacgtctctccatttatga

SEQ ID NO: 382533 - DNA, 59 bp, Artificial
  Synthetic oligonucleotide
ctcgaccaatgaaattcacgctacatggcttctttattacatggggaccattaaataga

SEQ ID NO: 382534 - DNA, 55 bp, Artificial
  Synthetic oligonucleotide
ctcgaccccagggtgcttgtctttgatgaatcagtgccatgccgttgtaggacgt

SEQ ID NO: 382535 - DNA, 55 bp, Artificial
  Synthetic oligonucleotide
ctcgaccctacactatcagggtaagatgagaaccacgaacttatgtagtgcaccc

SEQ ID NO: 382536 - DNA, 55 bp, Artificial
  Synthetic oligonucleotide
ctcgaccgactcgaagcgaccttgaatgtattacttactgacatgcgtgagcgag

SEQ ID NO: 382537 - DNA, 55 bp, Artificial
  Synthetic oligonucleotide
ctcgaccgatgcgtttgtgttcatgtatgatatagcgtcctgcagctctacagtg

SEQ ID NO: 382538 - DNA, 55 bp, Artificial
  Synthetic oligonucleotide
ctcgaccggaaagttgtccagaaacatccctctgttaatcgtcttgcttggacga

SEQ ID NO: 382539 - DNA, 55 bp, Artificial
  Synthetic oligonucleotide
ctcgacctacactgttatgtagacactggctcaagtttgtgtatggcaagtaagt

SEQ ID NO: 382540 - DNA, 55 bp, Artificial
  Synthetic oligonucleotide
ctcgacctagttcgtttatctggtgacttgcgctaccgttgctttgcgtagagaa

SEQ ID NO: 382541 - DNA, 55 bp, Artificial
  Synthetic oligonucleotide
ctcgacctccagcctccatctgccacatcaatggtcatcgcctacacctctaagg

SEQ ID NO: 382542 - DNA, 57 bp, Artificial
  Synthetic oligonucleotide
ctcgaccttaacacaagcctgtccaaaggtcacctttgagccaattcctatacatta

SEQ ID NO: 382543 - DNA, 58 bp, Artificial
  Synthetic oligonucleotide
ctcgacggtcatatcacggcgctgtgcctccaatttaaggatatggttaacgccaaag

SEQ ID NO: 382544 - DNA, 59 bp, Artificial
  Synthetic oligonucleotide
ctcgacggtgtctccgtccttatcgatgtaggacttgacgtcggagctggatttagctc

SEQ ID NO: 382545 - DNA, 58 bp, Artificial
  Synthetic oligonucleotide
ctcgacgtcgccacctgcaggggtatctccaattgaagggtcagaggacgttgaacca

SEQ ID NO: 382546 - DNA, 55 bp, Artificial
  Synthetic oligonucleotide
ctcgacgtgtcattcactcgcctcgtcggcctgtggttaggtggtgccatgtggg

SEQ ID NO: 382547 - DNA, 53 bp, Artificial
  Synthetic oligonucleotide
ctcgacgttccgtacgaacgtttgggcgctacgaccaaagtcgattacattcc

SEQ ID NO: 382548 - DNA, 60 bp, Artificial
  Synthetic oligonucleotide
ctcgactaccttcaagattcaaagggatattcgctgtaatggtgtcatgtctgaatgaga

SEQ ID NO: 382549 - DNA, 55 bp, Artificial
  Synthetic oligonucleotide
ctcgactactcacaaggtcgctggtgctcgggtgcgtctcttcggacctgccaag

SEQ ID NO: 382550 - DNA, 60 bp, Artificial
  Synthetic oligonucleotide
ctcgactcctctgatacattttgatcgtccgtccaacgggattcattgcttggtgccctc

SEQ ID NO: 382551 - DNA, 60 bp, Artificial
  Synthetic oligonucleotide
ctcgagaacataatttacatacgacctggctgttgcgaaacgaacagctctgattacatt

SEQ ID NO: 382552 - DNA, 58 bp, Artificial
  Synthetic oligonucleotide
ctcgagaagaacgtaaccgtgacacactctgttaacctgcttgaagacagccacaacg

SEQ ID NO: 382553 - DNA, 60 bp, Artificial
  Synthetic oligonucleotide
ctcgagacacatccgctttaccagaataccgagccagaaccagccgtgcctgtgataaaa

SEQ ID NO: 382554 - DNA, 60 bp, Artificial
  Synthetic oligonucleotide
ctcgagacagatacagacatgtggtgtgatcgatgtgcgtgcgtcagaattaattggatg

SEQ ID NO: 382555 - DNA, 60 bp, Artificial
  Synthetic oligonucleotide
ctcgagactcatccgctataccagacggaaccagctgtgccagtgataaagactcctccc

SEQ ID NO: 382556 - DNA, 57 bp, Artificial
  Synthetic oligonucleotide
ctcgagagcttcactcgccttctagaagaccctaccaccttaaatatcagaggaggg

SEQ ID NO: 382557 - DNA, 55 bp, Artificial
  Synthetic oligonucleotide
ctcgagatcgatcacatgcttagcacggtcataccgaatctagcgcagcagcaca

SEQ ID NO: 382558 - DNA, 59 bp, Artificial
  Synthetic oligonucleotide
ctcgagatctaatcgacaccgcctcagctctgtaccgggaggccttagagtctccggaa

SEQ ID NO: 382559 - DNA, 60 bp, Artificial
  Synthetic oligonucleotide
ctcgagatctctgttatacagtgatccgagcgagctctgacatatgtgcctcgatattgc

SEQ ID NO: 382560 - DNA, 60 bp, Artificial
  Synthetic oligonucleotide
ctcgagatgttggcttttacattcagcatccacttcaacttttgaatacgatcacattgc

SEQ ID NO: 382561 - DNA, 55 bp, Artificial
  Synthetic oligonucleotide
ctcgagcagaagttgggccacggtctaacaaggcctctgactgggtaaacaggcc

SEQ ID NO: 382562 - DNA, 55 bp, Artificial
  Synthetic oligonucleotide
ctcgagccaagtatccataggtccccacgcctggcacctactttacgtgtgcgag

SEQ ID NO: 382563 - DNA, 60 bp, Artificial
  Synthetic oligonucleotide
ctcgagccgttctagctccactgtcaatgggtctgcgtaaccaagttcagcgacgtccaa

SEQ ID NO: 382564 - DNA, 55 bp, Artificial
  Synthetic oligonucleotide
ctcgagcgttataaatcgctcggtttcaaagtcgaggagtcctcaaaactggaat

SEQ ID NO: 382565 - DNA, 59 bp, Artificial
  Synthetic oligonucleotide
ctcgagctcgagtttcgcaatctaacgcctggcaacacgaatacgcgtgtctcccgtta

SEQ ID NO: 382566 - DNA, 55 bp, Artificial
  Synthetic oligonucleotide
ctcgagctttaggcactggggtcatccttttatcaattatcgggtaggcttagcc

SEQ ID NO: 382567 - DNA, 60 bp, Artificial
  Synthetic oligonucleotide
ctcgaggaagtctttatagctggctccctctcctggattgcagagcacgattgttggtat

SEQ ID NO: 382568 - DNA, 60 bp, Artificial
  Synthetic oligonucleotide
ctcgaggagacaaatcttatgctccacaagagtccaagaattttgggccatgattgtaat

SEQ ID NO: 382569 - DNA, 55 bp, Artificial
  Synthetic oligonucleotide
ctcgaggccgttattcatggcagcgaacgcacattttgtgctttggccagactca

SEQ ID NO: 382570 - DNA, 55 bp, Artificial
  Synthetic oligonucleotide
ctcgagggagaaccgggcgatccggacttgagttgcgactcttggtccaccgtta

SEQ ID NO: 382571 - DNA, 59 bp, Artificial
  Synthetic oligonucleotide
ctcgagggatttggggtggctgtgagggacgctcatggaaacctgcggccattcaagga

SEQ ID NO: 382572 - DNA, 56 bp, Artificial
  Synthetic oligonucleotide
ctcgagggtataacaggtaggttgaagaagcatgtaagattcgggactaacctgaa

SEQ ID NO: 382573 - DNA, 55 bp, Artificial
  Synthetic oligonucleotide
ctcgaggtctcattgtcaaggctcgtcggtctatggatcggcggggccatgtggg

SEQ ID NO: 382574 - DNA, 60 bp, Artificial
  Synthetic oligonucleotide
ctcgagtacagcatttacatattgtttgtctgttgcgaatcgaacagctctaattacatt

SEQ ID NO: 382575 - DNA, 55 bp, Artificial
  Synthetic oligonucleotide
ctcgagtattcggccacgccttcgttaaatatttggaagtgtacaagctcacttg

SEQ ID NO: 382576 - DNA, 60 bp, Artificial
  Synthetic oligonucleotide
ctcgagtccttatattattgacccttgttgcgcttttctgtgcgtgctctacattggctg

SEQ ID NO: 382577 - DNA, 56 bp, Artificial
  Synthetic oligonucleotide
ctcgagtctcccgtcaactgcaaggactaggaactgggttgaggaccaaaacagaa

SEQ ID NO: 382578 - DNA, 54 bp, Artificial
  Synthetic oligonucleotide
ctcgagtgaacaagaacaacccgtatataacggtccaggtatccgaactctcgt

SEQ ID NO: 382579 - DNA, 60 bp, Artificial
  Synthetic oligonucleotide
ctcgagtgccacaactgccacgaagaatactggcaactcacaacctactactgcaaagag

SEQ ID NO: 382580 - DNA, 60 bp, Artificial
  Synthetic oligonucleotide
ctcgagtgtagaggactctccgatcctgggcaccatacagtacccacagctcgcagaatg

SEQ ID NO: 382581 - DNA, 55 bp, Artificial
  Synthetic oligonucleotide
ctcgagtttgtggtgacaataaaagcgtcagtgtcgggcactcgaactattgtcg

SEQ ID NO: 382582 - DNA, 55 bp, Artificial
  Synthetic oligonucleotide
ctcgataaatgttgtcgtgaagttcctgctcaaatgggaatattaactgacgaag

SEQ ID NO: 382583 - DNA, 59 bp, Artificial
  Synthetic oligonucleotide
ctcgataacaggactcaaaggatgaatgtggactttggtatggaagcgaagtttattga

SEQ ID NO: 382584 - DNA, 57 bp, Artificial
  Synthetic oligonucleotide
ctcgatacacatgatgtttacgatgccgcctttcttaagggggttgggctcaacaag

SEQ ID NO: 382585 - DNA, 60 bp, Artificial
  Synthetic oligonucleotide
ctcgatacgcatttgacttctatgaagtcacatcacgtacgtcaacacgtgctcgcgaag

SEQ ID NO: 382586 - DNA, 60 bp, Artificial
  Synthetic oligonucleotide
ctcgatagaaaaagctgatatagaaggtggaaagtattatgaacatgctccgatagaatt

SEQ ID NO: 382587 - DNA, 60 bp, Artificial
  Synthetic oligonucleotide
ctcgataggtttaatgatcttgattgtcgtgtctattttgcgtggctagcagcaatcaca

SEQ ID NO: 382588 - DNA, 55 bp, Artificial
  Synthetic oligonucleotide
ctcgatagttgcagcaatttcgccggaatcaaagatcgtactcgtgggcgacgag

SEQ ID NO: 382589 - DNA, 55 bp, Artificial
  Synthetic oligonucleotide
ctcgatataattttcggactggtatgttgcaagggattagagaagcgatgactcc

SEQ ID NO: 382590 - DNA, 60 bp, Artificial
  Synthetic oligonucleotide
ctcgatatcctggtgtcagatgtgtctgcagagacaactggaaaggctccaataggccca

SEQ ID NO: 382591 - DNA, 55 bp, Artificial
  Synthetic oligonucleotide
ctcgatatgcccatgatagcaagcatcccagaggatatagcaggggcactaagat

SEQ ID NO: 382592 - DNA, 56 bp, Artificial
  Synthetic oligonucleotide
ctcgatcaacgacacatgtttgttgacttgtgtctcttgtcccggcttttagccga

SEQ ID NO: 382593 - DNA, 54 bp, Artificial
  Synthetic oligonucleotide
ctcgatcatagcgtcgagtgagttgagcatgtctgtcgagtcgatgcctgtctc

SEQ ID NO: 382594 - DNA, 55 bp, Artificial
  Synthetic oligonucleotide
ctcgatccaaatgtccgcaccgaattagtagttagtagataccgttattcacgta

SEQ ID NO: 382595 - DNA, 52 bp, Artificial
  Synthetic oligonucleotide
ctcgatgaaattggggaggatgtcgccccaatagaatacattgcgagcatga

SEQ ID NO: 382596 - DNA, 60 bp, Artificial
  Synthetic oligonucleotide
ctcgatgagcatgatgcaaatgtgaacaatctgtataataaggtgaagagagcattgggt

SEQ ID NO: 382597 - DNA, 60 bp, Artificial
  Synthetic oligonucleotide
ctcgatgagcatgatgcgaatgtaaacaatctatataacaaagtgaagagggcactgggt

SEQ ID NO: 382598 - DNA, 60 bp, Artificial
  Synthetic oligonucleotide
ctcgatgctctagcgtcgacttcacacaaggacccctccttgcacccagtcctagagtcg

SEQ ID NO: 382599 - DNA, 55 bp, Artificial
  Synthetic oligonucleotide
ctcgatgctgcaatacccacatgtcctgtttgatgctcgccaagtggaacctgtc

SEQ ID NO: 382600 - DNA, 55 bp, Artificial
  Synthetic oligonucleotide
ctcgatggataaaaccttaaatcaataccccgcgttggcagcagaaatttacaac

SEQ ID NO: 382601 - DNA, 55 bp, Artificial
  Synthetic oligonucleotide
ctcgatgggtgtctcagtcgaaagtccaacgttccgtttccactagaagcgtagc

SEQ ID NO: 382602 - DNA, 55 bp, Artificial
  Synthetic oligonucleotide
ctcgatgtagacccaactcgtactcaactccatctggacaaatacatcgacccgg

SEQ ID NO: 382603 - DNA, 55 bp, Artificial
  Synthetic oligonucleotide
ctcgatgtctgttctctgtcatggacaagctctcggaatcaagggagagagcttg

SEQ ID NO: 382604 - DNA, 57 bp, Artificial
  Synthetic oligonucleotide
ctcgatgtgatttactatttccgagattcccgagtttgtgagaaagtcgcttcttta

SEQ ID NO: 382605 - DNA, 60 bp, Artificial
  Synthetic oligonucleotide
ctcgattacaatcccgttccaatggcagcggcccgacatttgcaatggcgtcaagatggc

SEQ ID NO: 382606 - DNA, 55 bp, Artificial
  Synthetic oligonucleotide
ctcgattacaccactctgcgaacagtcaattccatacaaagcgtccggcaaatgg

SEQ ID NO: 382607 - DNA, 55 bp, Artificial
  Synthetic oligonucleotide
ctcgattacgatatttgccactcatagacccgcggtctttagaagtacaggcgcg

SEQ ID NO: 382608 - DNA, 55 bp, Artificial
  Synthetic oligonucleotide
ctcgattacttgatgaagcaagagacccacctattgtagttttaaaaggcaaccc

SEQ ID NO: 382609 - DNA, 51 bp, Artificial
  Synthetic oligonucleotide
ctcgattagtgagcggattcttgccacttatctgggacgacctgaggagcc

SEQ ID NO: 382610 - DNA, 60 bp, Artificial
  Synthetic oligonucleotide
ctcgattagtggaaggattcttagcacttatctgggacgatctgcggagcctgtgtctct

SEQ ID NO: 382611 - DNA, 55 bp, Artificial
  Synthetic oligonucleotide
ctcgattatccagatacgttgtccgccatcaccgactataacggtacccgagaca

SEQ ID NO: 382612 - DNA, 60 bp, Artificial
  Synthetic oligonucleotide
ctcgattccatccaggcgatgcgcgtaagagacaggaagtgagtgcgtttcataaggctt

SEQ ID NO: 382613 - DNA, 55 bp, Artificial
  Synthetic oligonucleotide
ctcgatttcctgaactgctggaatcactggtatcaacctcttgcaattaacaccc

SEQ ID NO: 382614 - DNA, 55 bp, Artificial
  Synthetic oligonucleotide
ctcgatttgcgcattcataagctaccgagagtgggtatatttgcaaagtcaccgg

SEQ ID NO: 382615 - DNA, 54 bp, Artificial
  Synthetic oligonucleotide
ctcgatttttaccgctgtttgggacacggtaatgaacttaactagaatcgtcaa

SEQ ID NO: 382616 - DNA, 55 bp, Artificial
  Synthetic oligonucleotide
ctcgcaaaaggatcgggcaattttgggcgctgagcagagtgacatacttagactg

SEQ ID NO: 382617 - DNA, 60 bp, Artificial
  Synthetic oligonucleotide
ctcgcaaagatgcatggcatactacgattaaagaatgacgttaacggccacaagtatgga

SEQ ID NO: 382618 - DNA, 60 bp, Artificial
  Synthetic oligonucleotide
ctcgcaaaggccgtgtatcgccctaaactgatgagggagataatacatgaacagccatac

SEQ ID NO: 382619 - DNA, 59 bp, Artificial
  Synthetic oligonucleotide
ctcgcaaattgagtcccgaggtaatagtgatgcgtctatggtttttatattatcctgga

SEQ ID NO: 382620 - DNA, 57 bp, Artificial
  Synthetic oligonucleotide
ctcgcaacagccatccacactcgttattagtgtatgtttgttgcgactcttagtgga

SEQ ID NO: 382621 - DNA, 55 bp, Artificial
  Synthetic oligonucleotide
ctcgcaaccctggggctcctgtgggtgctcctcttacgtgggtcagtgagcagaa

SEQ ID NO: 382622 - DNA, 60 bp, Artificial
  Synthetic oligonucleotide
ctcgcaacgcagagaatctgtgataacagaatgacggccaaccattataaaaccttgatg

SEQ ID NO: 382623 - DNA, 60 bp, Artificial
  Synthetic oligonucleotide
ctcgcaagagctgcgtgggagacagcaagacacactccagtcaattcctggctaggcaac

SEQ ID NO: 382624 - DNA, 60 bp, Artificial
  Synthetic oligonucleotide
ctcgcaagtatatggtgttagccctggcttggtacataacctgattgggatgctccagac

SEQ ID NO: 382625 - DNA, 60 bp, Artificial
  Synthetic oligonucleotide
ctcgcaagtcgattctcttgtagttatgtcttttgaggtatgacaaactcgttctcaagc

SEQ ID NO: 382626 - DNA, 60 bp, Artificial
  Synthetic oligonucleotide
ctcgcaataatcagcattattaaaggtgaccaaatctgcattggttatcatgcaaacaat

SEQ ID NO: 382627 - DNA, 60 bp, Artificial
  Synthetic oligonucleotide
ctcgcaatccaaggaaaatctcgcgagaactgcagacggcgctcccgtgatgccgacccg

SEQ ID NO: 382628 - DNA, 60 bp, Artificial
  Synthetic oligonucleotide
ctcgcaatcgcatgattgaagttcaaaactcgctcgaagttatgcctgttatgtaaatac

SEQ ID NO: 382629 - DNA, 56 bp, Artificial
  Synthetic oligonucleotide
ctcgcacagcgttatctcaaaccgttacagcgactactgaaacgtaagtcgttctt

SEQ ID NO: 382630 - DNA, 52 bp, Artificial
  Synthetic oligonucleotide
ctcgcacatatcaggcgtgtcagcataacatagagtgtctatccagacatcg

SEQ ID NO: 382631 - DNA, 55 bp, Artificial
  Synthetic oligonucleotide
ctcgcacatctctgcggctgttggcacccgacctctcgtcgcagagacgttcgtt

SEQ ID NO: 382632 - DNA, 60 bp, Artificial
  Synthetic oligonucleotide
ctcgcacgaaatgttgactgatttcagaagacaagatacgatctgggtactggccctaca

SEQ ID NO: 382633 - DNA, 55 bp, Artificial
  Synthetic oligonucleotide
ctcgcacgactgaagccaggtgggcgtttatgtgctggaggccgcaagcgttgtg

SEQ ID NO: 382634 - DNA, 55 bp, Artificial
  Synthetic oligonucleotide
ctcgcacggaacttacattgtgcatggacagggtatcgcaatcaggcagcaccgg

SEQ ID NO: 382635 - DNA, 55 bp, Artificial
  Synthetic oligonucleotide
ctcgcactagtcgggtttgaagcgcgggtgtatctaggagggtaagcctagagca

SEQ ID NO: 382636 - DNA, 60 bp, Artificial
  Synthetic oligonucleotide
ctcgcactcatgcacgattacgtaattctagttcttggacccgtcaagaaatatcaaaga

SEQ ID NO: 382637 - DNA, 54 bp, Artificial
  Synthetic oligonucleotide
ctcgcagagtacgccgtccacgcagcggtaacatttgcgcgtgaccatacctgg

SEQ ID NO: 382638 - DNA, 60 bp, Artificial
  Synthetic oligonucleotide
ctcgcagcatataccctgaccccgcgccctatcattcatgcagtggctcccgactatagg

SEQ ID NO: 382639 - DNA, 59 bp, Artificial
  Synthetic oligonucleotide
ctcgcagccatagccgatgcctggaccaccctcggagtcccggcggcagaaacgaccaa

SEQ ID NO: 382640 - DNA, 57 bp, Artificial
  Synthetic oligonucleotide
ctcgcagccggtctggagcgaaacttatcgggaccgacaattctgtcgtcctctccc

SEQ ID NO: 382641 - DNA, 60 bp, Artificial
  Synthetic oligonucleotide
ctcgcagccggtctggagcgaacattatcggcacagacaactctgttgtcctctctcgga

SEQ ID NO: 382642 - DNA, 55 bp, Artificial
  Synthetic oligonucleotide
ctcgcagcgctggagcatggccgctccttgcctaaaataaccaatgagcagctgg

SEQ ID NO: 382643 - DNA, 60 bp, Artificial
  Synthetic oligonucleotide
ctcgcaggagccctgactatagttgcaatgtatagcgggaccaagccctgtaaacatgtg

SEQ ID NO: 382644 - DNA, 60 bp, Artificial
  Synthetic oligonucleotide
ctcgcagtctgcaagcgcatgtgcttcagagcaactatggaagtgagcaataaggcccta

SEQ ID NO: 382645 - DNA, 55 bp, Artificial
  Synthetic oligonucleotide
ctcgcagtggcagtttactttgttgtattgttgttagatgccagttttgtttgcg

SEQ ID NO: 382646 - DNA, 60 bp, Artificial
  Synthetic oligonucleotide
ctcgcagtggcccttcggggcatgggcttgaacgctgtggcatattacagggggctggac

SEQ ID NO: 382647 - DNA, 54 bp, Artificial
  Synthetic oligonucleotide
ctcgcagtgtaacatagatatgttcggggaccccaaaccctacaacccctcctc

SEQ ID NO: 382648 - DNA, 60 bp, Artificial
  Synthetic oligonucleotide
ctcgcatccttgtatgacaaacatctaaaggaatgtatggcgcgagcctgcaccctagaa

SEQ ID NO: 382649 - DNA, 55 bp, Artificial
  Synthetic oligonucleotide
ctcgcatcgaaagattttaccgttagaggttccctgttgaacgtcaactctgcgt

SEQ ID NO: 382650 - DNA, 60 bp, Artificial
  Synthetic oligonucleotide
ctcgcatcgctttgattcgatatagttgcttgtagcaacaactcctgtgtaattatccat

SEQ ID NO: 382651 - DNA, 55 bp, Artificial
  Synthetic oligonucleotide
ctcgcatctattcaacgatatacccgtgattcaaatctcgtcgggctacgctgtg

SEQ ID NO: 382652 - DNA, 60 bp, Artificial
  Synthetic oligonucleotide
ctcgcatgagttaaatgccgtccatgacagataaggatgattcggtataacatacgtaat

SEQ ID NO: 382653 - DNA, 60 bp, Artificial
  Synthetic oligonucleotide
ctcgcatgcctgcgatgcgcagactcagtggagccgcgccgtagcttctcgcgcagtatc

SEQ ID NO: 382654 - DNA, 60 bp, Artificial
  Synthetic oligonucleotide
ctcgcatggtgatcccttcagtagtcggtggctgtcaagtcagcggatacggacgtaccc

SEQ ID NO: 382655 - DNA, 55 bp, Artificial
  Synthetic oligonucleotide
ctcgcatgtacgttacgcaagtgaaagagacgtccgtagataagtggatcgatgc

SEQ ID NO: 382656 - DNA, 58 bp, Artificial
  Synthetic oligonucleotide
ctcgcattagaccgtggtggttaaagaagttcataatagccgctgaaatggtccgaga

SEQ ID NO: 382657 - DNA, 54 bp, Artificial
  Synthetic oligonucleotide
ctcgcattcggaccgttcatatgtgaaggacgttcacaacatctcattcgcgtc

SEQ ID NO: 382658 - DNA, 60 bp, Artificial
  Synthetic oligonucleotide
ctcgcattcttgttgaccatgcaagccagacaatgcatgtgattgactcatttggatccc

SEQ ID NO: 382659 - DNA, 52 bp, Artificial
  Synthetic oligonucleotide
ctcgccaagacagaaaagtagcgtgactgctactccagatgaatacacttac

SEQ ID NO: 382660 - DNA, 55 bp, Artificial
  Synthetic oligonucleotide
ctcgccacagcgtcgaagctagcgcagtctgcgtagaccgaggaagcggaacatg

SEQ ID NO: 382661 - DNA, 55 bp, Artificial
  Synthetic oligonucleotide
ctcgccaccctgggacatgttgttaaaatcaccggtttgacaattgaagaagtgt

SEQ ID NO: 382662 - DNA, 55 bp, Artificial
  Synthetic oligonucleotide
ctcgccacgtgcgacgacggatgaatagcgacgccgctgctgtcagaacggcaaa

SEQ ID NO: 382663 - DNA, 55 bp, Artificial
  Synthetic oligonucleotide
ctcgccaggacgtttgtctagaacaatgatgcatagtgcgttgctaaaggaatct

SEQ ID NO: 382664 - DNA, 55 bp, Artificial
  Synthetic oligonucleotide
ctcgccaggggtccgctggtcctacccaggatatcctgttcagcaggtcgaatgt

SEQ ID NO: 382665 - DNA, 60 bp, Artificial
  Synthetic oligonucleotide
ctcgccagttgcatgggtctaatatacaacaggatggggacagtgactacagaggtagct

SEQ ID NO: 382666 - DNA, 60 bp, Artificial
  Synthetic oligonucleotide
ctcgccataatctgggcgaacatcgtgtcttgtatgacatttgagtcttctaccttgtat

SEQ ID NO: 382667 - DNA, 55 bp, Artificial
  Synthetic oligonucleotide
ctcgccataggcttgcccagcatagtaggcatccgtatcgttgatcgcgcgagcc

SEQ ID NO: 382668 - DNA, 60 bp, Artificial
  Synthetic oligonucleotide
ctcgccatgcaggacagggccgcagtgatcctccacccaggccccgacatccccatcgct

SEQ ID NO: 382669 - DNA, 58 bp, Artificial
  Synthetic oligonucleotide
ctcgcccacatggttttgcctgtacgtgagtcaccctcaaccactatactaataggtc

SEQ ID NO: 382670 - DNA, 55 bp, Artificial
  Synthetic oligonucleotide
ctcgcccactcaaacacgaggtcccatggccacgagaggaaacaaactgtcttgg

SEQ ID NO: 382671 - DNA, 58 bp, Artificial
  Synthetic oligonucleotide
ctcgcccagtaataataccggttggggactgtatgcgcccaccaagatgtatggaggc

SEQ ID NO: 382672 - DNA, 57 bp, Artificial
  Synthetic oligonucleotide
ctcgcccctcgttcttatcgacccgccttcattaaacctgaggatgctaagtggatc

SEQ ID NO: 382673 - DNA, 56 bp, Artificial
  Synthetic oligonucleotide
ctcgcccgagctggctatcttctgggaggacttcctaaacgggatcggtaacgtca

SEQ ID NO: 382674 - DNA, 57 bp, Artificial
  Synthetic oligonucleotide
ctcgcccgggcatgtctgggagtcggctaacccgttttgtggggagatcacactcta

SEQ ID NO: 382675 - DNA, 59 bp, Artificial
  Synthetic oligonucleotide
ctcgcccggttaccgagttccggcagaatctcgcaatcgcaatactctcgcgcctcttc

SEQ ID NO: 382676 - DNA, 51 bp, Artificial
  Synthetic oligonucleotide
ctcgccctagtccggatgccaaacttaaacgacagccgtagcgctgtgggg

SEQ ID NO: 382677 - DNA, 58 bp, Artificial
  Synthetic oligonucleotide
ctcgccctgtcaaactcattggcagggagtctattgggtcggtgccacccctacagcc

SEQ ID NO: 382678 - DNA, 55 bp, Artificial
  Synthetic oligonucleotide
ctcgcccttggctacatagactaggacagtacatctatgaaacttatggagatac

SEQ ID NO: 382679 - DNA, 51 bp, Artificial
  Synthetic oligonucleotide
ctcgccgaagctgtaaggcgggtggacggactagaggttagaggagacccc

SEQ ID NO: 382680 - DNA, 57 bp, Artificial
  Synthetic oligonucleotide
ctcgccgcaaagctgtcaggtctcggtcttaacgctgtagcgtactaccggggtcta

SEQ ID NO: 382681 - DNA, 55 bp, Artificial
  Synthetic oligonucleotide
ctcgccgcaaagctgtcatccctcggaatgaacgccgtagcgtattaccggggtc

SEQ ID NO: 382682 - DNA, 60 bp, Artificial
  Synthetic oligonucleotide
ctcgccgcaatgagagcagtcgcgatagatcacgtacgactgtaagttcgtcaaggtcat

SEQ ID NO: 382683 - DNA, 60 bp, Artificial
  Synthetic oligonucleotide
ctcgccgcagcgcgtgctactgaatggtggtaacgtgtcctttactagtgggcttgagtg

SEQ ID NO: 382684 - DNA, 53 bp, Artificial
  Synthetic oligonucleotide
ctcgccgccttcttcctccccgctcacgaccccgagttaaaggaagtgaccag

SEQ ID NO: 382685 - DNA, 55 bp, Artificial
  Synthetic oligonucleotide
ctcgccgctgacaaggggtacgaggttgtcgcgaatctattccaggtgccccaga

SEQ ID NO: 382686 - DNA, 56 bp, Artificial
  Synthetic oligonucleotide
ctcgcctactgggtgggcgcagggatccggactgaatccgtagtacttcggtacaa

SEQ ID NO: 382687 - DNA, 51 bp, Artificial
  Synthetic oligonucleotide
ctcgcctcagacggcgtctatcaacagtgtctttattcctcgcactgttga

SEQ ID NO: 382688 - DNA, 60 bp, Artificial
  Synthetic oligonucleotide
ctcgcctctcgcgtagccatggtctgcgctggtctcgactgtgacgatatccacgagatt

SEQ ID NO: 382689 - DNA, 52 bp, Artificial
  Synthetic oligonucleotide
ctcgccttccctgaacctggcctccgtccccaaaacgtctacaccacctggg

SEQ ID NO: 382690 - DNA, 52 bp, Artificial
  Synthetic oligonucleotide
ctcgccttttataccgaaggtgtcttaatctaaaagtcgacgagaagcggtt

SEQ ID NO: 382691 - DNA, 56 bp, Artificial
  Synthetic oligonucleotide
ctcgcgaaggagttatcccacaaaatgtgggatccactcctaaacgagttcccaga

SEQ ID NO: 382692 - DNA, 60 bp, Artificial
  Synthetic oligonucleotide
ctcgcgacaagcgatcttggtatgaagttctgtattcgtagtaccaccgaactgtgtcac

SEQ ID NO: 382693 - DNA, 60 bp, Artificial
  Synthetic oligonucleotide
ctcgcgacttgctcgtgtcatccactaccgcccagggttgtgacacaattgcccgctgta

SEQ ID NO: 382694 - DNA, 60 bp, Artificial
  Synthetic oligonucleotide
ctcgcgatagtggcctctaccagcaaatcagacaagatctgcattggataccatgccaac

SEQ ID NO: 382695 - DNA, 60 bp, Artificial
  Synthetic oligonucleotide
ctcgcgatctactagtgtcgtctaccaccgctcagggctgtgacacaatcgcgcgttgca

SEQ ID NO: 382696 - DNA, 55 bp, Artificial
  Synthetic oligonucleotide
ctcgcgcaataacgcttacaatcttatgcgtgaaactgatgtgcccataatggaa

SEQ ID NO: 382697 - DNA, 55 bp, Artificial
  Synthetic oligonucleotide
ctcgcgcaatcaggagcggtatttccgcgaaaagtttgaggaaatgacggaaggc

SEQ ID NO: 382698 - DNA, 58 bp, Artificial
  Synthetic oligonucleotide
ctcgcgcctacgctgacgtcggggcgtccaagagtgctaccctgcttggtttctgccc

SEQ ID NO: 382699 - DNA, 60 bp, Artificial
  Synthetic oligonucleotide
ctcgcgcgtgcataccgttgcgtttccgcaaatttcaccacaactcgatactgagatccg

SEQ ID NO: 382700 - DNA, 50 bp, Artificial
  Synthetic oligonucleotide
ctcgcggcactttccctatcgccacagagcggataccgcagtcgcgcccg

SEQ ID NO: 382701 - DNA, 60 bp, Artificial
  Synthetic oligonucleotide
ctcgcgggaagttccagcggagcaatcacgttcgggccgagtctatcagactgcccggca

SEQ ID NO: 382702 - DNA, 55 bp, Artificial
  Synthetic oligonucleotide
ctcgcggttttgaaatggcaaccgtgatggcatctgtgaaactggctggtaagcg

SEQ ID NO: 382703 - DNA, 55 bp, Artificial
  Synthetic oligonucleotide
ctcgcgtaaaggaggatgataagaacggactaacgtaagtttgtggcggagcctg

SEQ ID NO: 382704 - DNA, 58 bp, Artificial
  Synthetic oligonucleotide
ctcgcgtataaccaaaaagagagtatgtcacgcgttggcgctattctcgaaaacacaa

SEQ ID NO: 382705 - DNA, 59 bp, Artificial
  Synthetic oligonucleotide
ctcgcgtatgtctgaggtatatagttttgcgttacctatagtacatccatcaaaaggta

SEQ ID NO: 382706 - DNA, 60 bp, Artificial
  Synthetic oligonucleotide
ctcgcgtcactgccatacttagcagcctcactgtaacccagctcctgaggcgactacacc

SEQ ID NO: 382707 - DNA, 58 bp, Artificial
  Synthetic oligonucleotide
ctcgcgtcatccaagggtcccgttatccagatgtataccaatatagaccaagacctcg

SEQ ID NO: 382708 - DNA, 57 bp, Artificial
  Synthetic oligonucleotide
ctcgcgtctattgcggtatcaggaagttgtccttctgggcgggtactctttcggcca

SEQ ID NO: 382709 - DNA, 51 bp, Artificial
  Synthetic oligonucleotide
ctcgcgtgactggggagacttcaacgtggggaccggcgcgtcagccctatg

SEQ ID NO: 382710 - DNA, 50 bp, Artificial
  Synthetic oligonucleotide
ctcgcgtggaacagcaggacatgatgactcaatccctacagtacttaaac

SEQ ID NO: 382711 - DNA, 55 bp, Artificial
  Synthetic oligonucleotide
ctcgcgtggagtcagagaataaggtagtagtcctggactctttcgaaccgcttcg

SEQ ID NO: 382712 - DNA, 55 bp, Artificial
  Synthetic oligonucleotide
ctcgcgtggcacggcaaagctcgcttggcttgaagaacgcggatatcgcaccctc

SEQ ID NO: 382713 - DNA, 55 bp, Artificial
  Synthetic oligonucleotide
ctcgcgtttgtttgtattctcggatagcaccgatccggctaggcataccatccag

SEQ ID NO: 382714 - DNA, 55 bp, Artificial
  Synthetic oligonucleotide
ctcgctacgcttttgatttctatgaggtgacatccaaaacatcggatcgagccag

SEQ ID NO: 382715 - DNA, 55 bp, Artificial
  Synthetic oligonucleotide
ctcgctatagctctgaggggccacatgtgggccaggttagctcgcgggagaccta

SEQ ID NO: 382716 - DNA, 55 bp, Artificial
  Synthetic oligonucleotide
ctcgctatgtacaacgagttcaaggagtgcacgaaagacttaatccgcatgcgag

SEQ ID NO: 382717 - DNA, 60 bp, Artificial
  Synthetic oligonucleotide
ctcgctcaaatcgtagagatgatcccgattcggtgcaacgttttgtcaaggctctagagt

SEQ ID NO: 382718 - DNA, 60 bp, Artificial
  Synthetic oligonucleotide
ctcgctcaatacaaatcattgacccgaagtacaacacaccagagcttaccatccacgcgt

SEQ ID NO: 382719 - DNA, 52 bp, Artificial
  Synthetic oligonucleotide
ctcgctcacgacgccgtgatccaaatcaacgtgcacggccgaactgtcactc

SEQ ID NO: 382720 - DNA, 51 bp, Artificial
  Synthetic oligonucleotide
ctcgctcagaataagcacggtcaacgcgttccgaatcacgactagcgttat

SEQ ID NO: 382721 - DNA, 60 bp, Artificial
  Synthetic oligonucleotide
ctcgctcgcttgaagcaatgtaaccctcggttactgcatttatcttatgctgctttctgt

SEQ ID NO: 382722 - DNA, 55 bp, Artificial
  Synthetic oligonucleotide
ctcgctctcagacttggcgaaatccccgattattcccgcctcctcagattcgacc

SEQ ID NO: 382723 - DNA, 56 bp, Artificial
  Synthetic oligonucleotide
ctcgctctcatgcacgatgctgtcgttctgctccttggccccgtcaagaagtatca

SEQ ID NO: 382724 - DNA, 56 bp, Artificial
  Synthetic oligonucleotide
ctcgctctctagtctctttcacgtgccggcccccgtcttcagtttcggagccccga

SEQ ID NO: 382725 - DNA, 55 bp, Artificial
  Synthetic oligonucleotide
ctcgctgaccacatgagggtggatctggcaatatgcacaagtatggtcttcgcca

SEQ ID NO: 382726 - DNA, 60 bp, Artificial
  Synthetic oligonucleotide
ctcgctgactctactggctgttggagggattctaatctttctagcgaccagcgtgcaagc

SEQ ID NO: 382727 - DNA, 55 bp, Artificial
  Synthetic oligonucleotide
ctcgctgcaaagttgtcgggcctcggacttaacgctgtagcgtattaccggggcc

SEQ ID NO: 382728 - DNA, 60 bp, Artificial
  Synthetic oligonucleotide
ctcgctgccaaactgtcaggcctcggacttaatgctgtagcatattaccggggtctcgac

SEQ ID NO: 382729 - DNA, 55 bp, Artificial
  Synthetic oligonucleotide
ctcgctgcttattactggaatctagaccggagaaacatgtcatcgcttacctatc

SEQ ID NO: 382730 - DNA, 60 bp, Artificial
  Synthetic oligonucleotide
ctcgctgcttgccagcagtgtgagatccgtgcactacgggtcttaggcgacgacagcgct

SEQ ID NO: 382731 - DNA, 55 bp, Artificial
  Synthetic oligonucleotide
ctcgctggaccgaaaggaccagtgtgtcaaatgtacaccaatgtggacaaggacc

SEQ ID NO: 382732 - DNA, 60 bp, Artificial
  Synthetic oligonucleotide
ctcgctgtgaaatatatgcaggagattgccaagagtacgagcctagtacattggtttcga

SEQ ID NO: 382733 - DNA, 50 bp, Artificial
  Synthetic oligonucleotide
ctcgcttatatttctgtcttctgcgatagatggctgcaattaagtcacat

SEQ ID NO: 382734 - DNA, 50 bp, Artificial
  Synthetic oligonucleotide
ctcgcttatgttccccgcgcttttgttcgccgctgtgccttccacgtgcc

SEQ ID NO: 382735 - DNA, 53 bp, Artificial
  Synthetic oligonucleotide
ctcgcttcacgcaaatgggatcagtgaatgtttgataggtcacacattagcac

SEQ ID NO: 382736 - DNA, 53 bp, Artificial
  Synthetic oligonucleotide
ctcgcttttccccccagtcaagctcctccgaagagtccccccatgggaggact

SEQ ID NO: 382737 - DNA, 59 bp, Artificial
  Synthetic oligonucleotide
ctcggaaaggacgcgggtgcattaacagaagatccagatgagggaacggctggagtgga

SEQ ID NO: 382738 - DNA, 52 bp, Artificial
  Synthetic oligonucleotide
ctcggaaaggcagtctttcaggccaagaaaagggttctcgaaccttttggcc

SEQ ID NO: 382739 - DNA, 51 bp, Artificial
  Synthetic oligonucleotide
ctcggaaattcagaaggttgtggcctacaacgaaagccggggttggacccg

SEQ ID NO: 382740 - DNA, 58 bp, Artificial
  Synthetic oligonucleotide
ctcggaaatttgcgccggtatgaagtacttagatgaaatttacacagtacagttcgca

SEQ ID NO: 382741 - DNA, 56 bp, Artificial
  Synthetic oligonucleotide
ctcggaacatccatctcgggggtcttatggaccgtttaccacggagctggcaataa

SEQ ID NO: 382742 - DNA, 53 bp, Artificial
  Synthetic oligonucleotide
ctcggaaccatactgcccgcgaactccgtagtctcggagcccgaagtacgggg

SEQ ID NO: 382743 - DNA, 60 bp, Artificial
  Synthetic oligonucleotide
ctcggaacgagcgttgtgacttgtcggacagggatagatcagagcttagcccgctgctgc

SEQ ID NO: 382744 - DNA, 55 bp, Artificial
  Synthetic oligonucleotide
ctcggaacggattcggcttagctacccacgtctttgcggttgggtgcagttcgcc

SEQ ID NO: 382745 - DNA, 52 bp, Artificial
  Synthetic oligonucleotide
ctcggaagcactgtcttcactccgaactatagttgatgggaactccactacc

SEQ ID NO: 382746 - DNA, 53 bp, Artificial
  Synthetic oligonucleotide
ctcggaagcctcgaaaccagacgcccctcctactcctttaagttccgatccaa

SEQ ID NO: 382747 - DNA, 56 bp, Artificial
  Synthetic oligonucleotide
ctcggaagctaaaagaagattgaatgcggatgaattgaaactaaagaactggttta

SEQ ID NO: 382748 - DNA, 51 bp, Artificial
  Synthetic oligonucleotide
ctcggaaggggcgtcctccatccaagactcgcacctctgcgcgaagagcca

SEQ ID NO: 382749 - DNA, 58 bp, Artificial
  Synthetic oligonucleotide
ctcggaagtcattctgaaccccttcatgtcccaagtctaaaagacatccggtcagcag

SEQ ID NO: 382750 - DNA, 58 bp, Artificial
  Synthetic oligonucleotide
ctcggaatcaatgctgtagcgtattaccggggtcttgacgtgtccgtcataccaacaa

SEQ ID NO: 382751 - DNA, 58 bp, Artificial
  Synthetic oligonucleotide
ctcggaatgtcgatgactatgagggggcgcgggggataaccgctatcgcggtcttgta

SEQ ID NO: 382752 - DNA, 58 bp, Artificial
  Synthetic oligonucleotide
ctcggaattaatgctgtagcgtactaccggggccttgatgtgtccgtcatcccgacaa

SEQ ID NO: 382753 - DNA, 55 bp, Artificial
  Synthetic oligonucleotide
ctcggaattgcctggaaagattagagaatctctggttgcgacttcacgcctgcca

SEQ ID NO: 382754 - DNA, 54 bp, Artificial
  Synthetic oligonucleotide
ctcggaattggatgtttaactaccgatactacaacttttgaggaagttgcaacg

SEQ ID NO: 382755 - DNA, 55 bp, Artificial
  Synthetic oligonucleotide
ctcggacaagtcctccctcctgaggtcgaggcgtccgttcccgttgagccaacag

SEQ ID NO: 382756 - DNA, 55 bp, Artificial
  Synthetic oligonucleotide
ctcggacagcattactacctatccaattgatccccgaaacgtcaagaccttcccc

SEQ ID NO: 382757 - DNA, 57 bp, Artificial
  Synthetic oligonucleotide
ctcggacggtactgatgggttcaacgccggaaactgggtagcattctccattcaaga

SEQ ID NO: 382758 - DNA, 58 bp, Artificial
  Synthetic oligonucleotide
ctcggactctcccacactgattcgcacggaaacactttcgaagagaccttcgtctgtg

SEQ ID NO: 382759 - DNA, 55 bp, Artificial
  Synthetic oligonucleotide
ctcggacttaatgccgtagcgtactaccggggtcttgacgtgtccgtcataccga

SEQ ID NO: 382760 - DNA, 54 bp, Artificial
  Synthetic oligonucleotide
ctcggagaactcaaccacccgccccgtgcgaacgttgacccgctacatgcagct

SEQ ID NO: 382761 - DNA, 56 bp, Artificial
  Synthetic oligonucleotide
ctcggagagagaaataaatcccggattcccaaaatacccctatctctgtgtctgga

SEQ ID NO: 382762 - DNA, 55 bp, Artificial
  Synthetic oligonucleotide
ctcggagagagaaataaattccggataccgaaactaccctcaaagctgtgtctgg

SEQ ID NO: 382763 - DNA, 55 bp, Artificial
  Synthetic oligonucleotide
ctcggagcgaatttacggagccttctattcaccatgcgaccaaagtctatctaca

SEQ ID NO: 382764 - DNA, 53 bp, Artificial
  Synthetic oligonucleotide
ctcggagcttcatgagagactacggggcactcgaggcagtccaccatcagagc

SEQ ID NO: 382765 - DNA, 60 bp, Artificial
  Synthetic oligonucleotide
ctcggaggcacttagagatcttgcttttgcatcaggattcaatcctactgatagattttc

SEQ ID NO: 382766 - DNA, 60 bp, Artificial
  Synthetic oligonucleotide
ctcggaggcgggcgccatggtgaagctacgagacatatcaacaatagccgtatctgaaag

SEQ ID NO: 382767 - DNA, 53 bp, Artificial
  Synthetic oligonucleotide
ctcggaggctcggttccgatcgacggcgagtcggctgtgctcatcccgttctt

SEQ ID NO: 382768 - DNA, 54 bp, Artificial
  Synthetic oligonucleotide
ctcggagtagagaacacgggaacaagttaacggttaactcacgcactcggagta

SEQ ID NO: 382769 - DNA, 51 bp, Artificial
  Synthetic oligonucleotide
ctcggagtcccgacgcctagcaagctagtgtttgcactactaggagcgaag

SEQ ID NO: 382770 - DNA, 60 bp, Artificial
  Synthetic oligonucleotide
ctcggatacaccaccgagcaatgcaagttggccgccatgtaagcggaacgtggacttcca

SEQ ID NO: 382771 - DNA, 55 bp, Artificial
  Synthetic oligonucleotide
ctcggatatcgtcttacatgccgagcataaccaacattggtattatcctggaagg

SEQ ID NO: 382772 - DNA, 57 bp, Artificial
  Synthetic oligonucleotide
ctcggatccgaaatctctcgtcgctttaacgtttggactttcacttatatggatgac

SEQ ID NO: 382773 - DNA, 56 bp, Artificial
  Synthetic oligonucleotide
ctcggatctgccattggaactgacccggatgtcgattggacacgctacgccgctga

SEQ ID NO: 382774 - DNA, 52 bp, Artificial
  Synthetic oligonucleotide
ctcggatgcgcttaaggattggctgcaccccgtgcatagacgtaaaatttaa

SEQ ID NO: 382775 - DNA, 60 bp, Artificial
  Synthetic oligonucleotide
ctcggatgctgttggggtgattgggctgactgtttaataggtgaacacctattgcaacga

SEQ ID NO: 382776 - DNA, 52 bp, Artificial
  Synthetic oligonucleotide
ctcggatggtctcgccgttatgcgtggagtaacccaggagagtcttcgagcg

SEQ ID NO: 382777 - DNA, 57 bp, Artificial
  Synthetic oligonucleotide
ctcggatgtacttcgccggttgataaccgcaaccagcgcagtagttaatccggccac

SEQ ID NO: 382778 - DNA, 55 bp, Artificial
  Synthetic oligonucleotide
ctcggatgttataactatctgaagtctaatcaaccccgcaactatatagacctgg

SEQ ID NO: 382779 - DNA, 52 bp, Artificial
  Synthetic oligonucleotide
ctcggattcctccataatcgttccgagccctacgctaccgttcttgtcggac

SEQ ID NO: 382780 - DNA, 55 bp, Artificial
  Synthetic oligonucleotide
ctcggattttattctggtcgcaaattagaaaggtaccagcaggccgtggagtcgt

SEQ ID NO: 382781 - DNA, 55 bp, Artificial
  Synthetic oligonucleotide
ctcggatttttaaatgaagaccactggttctcgcgtgaaaactcttacagtggag

SEQ ID NO: 382782 - DNA, 55 bp, Artificial
  Synthetic oligonucleotide
ctcggcaatggtacgcaacccaatggtggatggggacgtcatcaacccgtttggg

SEQ ID NO: 382783 - DNA, 55 bp, Artificial
  Synthetic oligonucleotide
ctcggcacaccgatagtttgacttacaacgttttggccgctcgaaggggtgatgc

SEQ ID NO: 382784 - DNA, 55 bp, Artificial
  Synthetic oligonucleotide
ctcggcacaggttgcaatagcgatattctcaagcatggggtcaatgtgttggtct

SEQ ID NO: 382785 - DNA, 55 bp, Artificial
  Synthetic oligonucleotide
ctcggcacccctcttcgcaagtcgtttgaactcttgagccttgttaccttcagcc

SEQ ID NO: 382786 - DNA, 58 bp, Artificial
  Synthetic oligonucleotide
ctcggcatcaatttgcgacacgcgcggcggtgtgtacccctgggagggactacgctac

SEQ ID NO: 382787 - DNA, 57 bp, Artificial
  Synthetic oligonucleotide
ctcggccagtgggttctcattgacgctaatgtgtcatgggaggcccccccttctaac

SEQ ID NO: 382788 - DNA, 55 bp, Artificial
  Synthetic oligonucleotide
ctcggccatacgtttacttttgcgtatacatgtccgggcgatatatcgtacagtg

SEQ ID NO: 382789 - DNA, 56 bp, Artificial
  Synthetic oligonucleotide
ctcggcccacattctccagatccctggacgtcgcgcatcagagcagcgggtttcac

SEQ ID NO: 382790 - DNA, 60 bp, Artificial
  Synthetic oligonucleotide
ctcggcccataccgtcacggcgtcttgctctccctcgaagccatcaccatgccatctgcc

SEQ ID NO: 382791 - DNA, 57 bp, Artificial
  Synthetic oligonucleotide
ctcggcctacagaacgctggacaagatctggggaggaaagaccgtgatgaaagggta

SEQ ID NO: 382792 - DNA, 50 bp, Artificial
  Synthetic oligonucleotide
ctcggcctactttcacaggaacgctctcttcaccggtgtgtcccgggcta

SEQ ID NO: 382793 - DNA, 55 bp, Artificial
  Synthetic oligonucleotide
ctcggcgctcgagaagacgtctcaaatacactctgatactatcctccggatcacc

SEQ ID NO: 382794 - DNA, 55 bp, Artificial
  Synthetic oligonucleotide
ctcggcgtgggtggttactttctgtttcccatgactcacatgtttggcagcaagc

SEQ ID NO: 382795 - DNA, 59 bp, Artificial
  Synthetic oligonucleotide
ctcggctacacctccaggcagagaatgtgagttcactacccagcatccggtaaaactta

SEQ ID NO: 382796 - DNA, 51 bp, Artificial
  Synthetic oligonucleotide
ctcggcttatcaatcttagtagtcttccttatgacaatccaaatgcatgct

SEQ ID NO: 382797 - DNA, 60 bp, Artificial
  Synthetic oligonucleotide
ctcggcttccaattattcagtttgcaccgcttgcgttgacaatatcacatcctgtaatct

SEQ ID NO: 382798 - DNA, 57 bp, Artificial
  Synthetic oligonucleotide
ctcggcttgccgctaaaagatcaaatataatggcttatacttcaacggaggaggacg

SEQ ID NO: 382799 - DNA, 60 bp, Artificial
  Synthetic oligonucleotide
ctcggcttgctgagtgccacggcagaggcgagagcggcgactggtgagtacgccaatttt

SEQ ID NO: 382800 - DNA, 55 bp, Artificial
  Synthetic oligonucleotide
ctcggctttctacggacgacgttaagttatataaaacgattagcatgttacatca

SEQ ID NO: 382801 - DNA, 54 bp, Artificial
  Synthetic oligonucleotide
ctcgggaaaccgatagaagcaagcccgtcacaccgaagcccggttcgttcgctg

SEQ ID NO: 382802 - DNA, 60 bp, Artificial
  Synthetic oligonucleotide
ctcgggaatacacgaatggatgtactgagtgagagctccatgactcgtagctcttccctg

SEQ ID NO: 382803 - DNA, 56 bp, Artificial
  Synthetic oligonucleotide
ctcgggaccatcccgggcgattgtggctgcccctatgtctacaagaagggaaacac

SEQ ID NO: 382804 - DNA, 59 bp, Artificial
  Synthetic oligonucleotide
ctcgggaccttctcgacaccgcatcagctctctatcgggaggccttagagtctccggaa

SEQ ID NO: 382805 - DNA, 58 bp, Artificial
  Synthetic oligonucleotide
ctcgggacgttgagccgtttgacccagacctttatgccgagtgcatcaacctcaacga

SEQ ID NO: 382806 - DNA, 55 bp, Artificial
  Synthetic oligonucleotide
ctcgggagagggcccgtagcgatggggagggatgctaggagttgggggagaccga

SEQ ID NO: 382807 - DNA, 55 bp, Artificial
  Synthetic oligonucleotide
ctcgggatacagcacagcacgggaataccatggaatccgcagtcacaggccttag

SEQ ID NO: 382808 - DNA, 55 bp, Artificial
  Synthetic oligonucleotide
ctcgggatatcataatagctttgtctgtgttagtcggtggagggtggatgcttgc

SEQ ID NO: 382809 - DNA, 55 bp, Artificial
  Synthetic oligonucleotide
ctcgggattatccgccacccaatctgtcaacgctaggcttatcggtatgggacac

SEQ ID NO: 382810 - DNA, 55 bp, Artificial
  Synthetic oligonucleotide
ctcgggcagacgagttgattgctaaatcgggctcaaagccgatgggtaaggcggc

SEQ ID NO: 382811 - DNA, 60 bp, Artificial
  Synthetic oligonucleotide
ctcgggccatgcatcatcaataagttagttcaattcatcaatgataggataagtgcagtt

SEQ ID NO: 382812 - DNA, 60 bp, Artificial
  Synthetic oligonucleotide
ctcgggccgcagatcacgccgattatcggcgtggctatcggtgtttctctgattccgttc

SEQ ID NO: 382813 - DNA, 60 bp, Artificial
  Synthetic oligonucleotide
ctcgggcgggcagtgcatcagactctcagccacgattctaagataaccggagtgctccat

SEQ ID NO: 382814 - DNA, 55 bp, Artificial
  Synthetic oligonucleotide
ctcgggctgtagatcgactgacaaccaacacacccattagaaacctgagatttca

SEQ ID NO: 382815 - DNA, 55 bp, Artificial
  Synthetic oligonucleotide
ctcggggatgtggttactaacagttgtacctaacgatatgtttatacgcgaatcc

SEQ ID NO: 382816 - DNA, 50 bp, Artificial
  Synthetic oligonucleotide
ctcggggccccgggtcccaataggaccaaaccccgtcttgtcagaccaac

SEQ ID NO: 382817 - DNA, 52 bp, Artificial
  Synthetic oligonucleotide
ctcggggggttgcaaaggcggtggactttatacccgttgagtctatggaaac

SEQ ID NO: 382818 - DNA, 56 bp, Artificial
  Synthetic oligonucleotide
ctcggggtaagaattaaagagttttgagatcttgacataacggtgattgtatggta

SEQ ID NO: 382819 - DNA, 57 bp, Artificial
  Synthetic oligonucleotide
ctcgggtatggtgggctaaccaccccattgcaaggtgatacgaagtgtaggactcaa

SEQ ID NO: 382820 - DNA, 55 bp, Artificial
  Synthetic oligonucleotide
ctcgggtgataataccaagtggggcccgatacactgctgttctttcttttctggc

SEQ ID NO: 382821 - DNA, 58 bp, Artificial
  Synthetic oligonucleotide
ctcgggtgatgattcactcgctttctcctccatcgctcccgtcggtgacccttcgaag

SEQ ID NO: 382822 - DNA, 56 bp, Artificial
  Synthetic oligonucleotide
ctcgggtgtatactagccgttccggatagcggggcggacatagaaatagacttaga

SEQ ID NO: 382823 - DNA, 60 bp, Artificial
  Synthetic oligonucleotide
ctcgggttgagggtgtgcgtgatttcaacgatatgaaattgtccaccgcaatggacatta

SEQ ID NO: 382824 - DNA, 55 bp, Artificial
  Synthetic oligonucleotide
ctcgggttggttttgtactcagctaacaactctggcactaccacttggttgaacc

SEQ ID NO: 382825 - DNA, 53 bp, Artificial
  Synthetic oligonucleotide
ctcggtaatgtcatcaccaattatggttacgatgtccggggaacagtccgacg

SEQ ID NO: 382826 - DNA, 52 bp, Artificial
  Synthetic oligonucleotide
ctcggtaccgtatgtcggtatttcaaacgcctattcacatttttacgacggt

SEQ ID NO: 382827 - DNA, 53 bp, Artificial
  Synthetic oligonucleotide
ctcggtagaaatgaattggggaagctgggactcaattagagttgaaattctct

SEQ ID NO: 382828 - DNA, 60 bp, Artificial
  Synthetic oligonucleotide
ctcggtagaccatgtcacagccggaaaggatttactagtgtgtgacagtatgggcaggac

SEQ ID NO: 382829 - DNA, 59 bp, Artificial
  Synthetic oligonucleotide
ctcggtagtcgtgtgtggcaggattgtgacatctggcaaacccgcggttgtgccggacc

SEQ ID NO: 382830 - DNA, 55 bp, Artificial
  Synthetic oligonucleotide
ctcggtagttacgcatggatgagtaagtggtccctacgcactaagttggacaggc

SEQ ID NO: 382831 - DNA, 50 bp, Artificial
  Synthetic oligonucleotide
ctcggtatcgacgttccaccgatgatctgcgggctccctttccaccggga

SEQ ID NO: 382832 - DNA, 57 bp, Artificial
  Synthetic oligonucleotide
ctcggtcaacaaccagagtgcgactgccccgcactgttcgttttcacccaagtatgg

SEQ ID NO: 382833 - DNA, 60 bp, Artificial
  Synthetic oligonucleotide
ctcggtcacagtaaccatgaatctcgattacatcatcgataagccatccgacctatcgag

SEQ ID NO: 382834 - DNA, 60 bp, Artificial
  Synthetic oligonucleotide
ctcggtcaggcgagagaacaattccttcatcagctcggatggtgttaggttgcagtgtgg

SEQ ID NO: 382835 - DNA, 55 bp, Artificial
  Synthetic oligonucleotide
ctcggtcagtgagtcctcgagactgtgggcagggccggcaaagacatgccacttg

SEQ ID NO: 382836 - DNA, 60 bp, Artificial
  Synthetic oligonucleotide
ctcggtcatcagggctcgtaattatgtcgaagcgaccaggagatatcatcatttccacgc

SEQ ID NO: 382837 - DNA, 56 bp, Artificial
  Synthetic oligonucleotide
ctcggtcccgtgtttgaaaacactcacgttagttacgcctgctggcaagaggaaga

SEQ ID NO: 382838 - DNA, 55 bp, Artificial
  Synthetic oligonucleotide
ctcggtcctttacctacacaacccagacttgaccaccactgtctgtctttctttg

SEQ ID NO: 382839 - DNA, 52 bp, Artificial
  Synthetic oligonucleotide
ctcggtcgcggtgcggcttctgtaggccttcgtgcacggggatattgcagtc

SEQ ID NO: 382840 - DNA, 55 bp, Artificial
  Synthetic oligonucleotide
ctcggtgactgtatacttggagctgatgggtgttttatatatcctccgaagtatc

SEQ ID NO: 382841 - DNA, 60 bp, Artificial
  Synthetic oligonucleotide
ctcggtgccctaaagcagtcaggcggtcagttaatggagcactatcgatgtgacgcggct

SEQ ID NO: 382842 - DNA, 60 bp, Artificial
  Synthetic oligonucleotide
ctcggtggatatctcggtgtttgatcgtagtcgcacgttgatgatgaacgatagcccctt

SEQ ID NO: 382843 - DNA, 55 bp, Artificial
  Synthetic oligonucleotide
ctcggtggcaagttggtcgcagcgggcggtggcgatttgggtgtcgaaaggtgct

SEQ ID NO: 382844 - DNA, 50 bp, Artificial
  Synthetic oligonucleotide
ctcggtggtaaggaccccagaatcaagggtggcccctcactacaacaagt

SEQ ID NO: 382845 - DNA, 55 bp, Artificial
  Synthetic oligonucleotide
ctcggtgtaggtacccgctctagtatatctgttcgtaaacgctcggcgacaacca

SEQ ID NO: 382846 - DNA, 54 bp, Artificial
  Synthetic oligonucleotide
ctcggtgtctctagtagaccagttagttgaaagggtcttgttcggccgccaaaa

SEQ ID NO: 382847 - DNA, 55 bp, Artificial
  Synthetic oligonucleotide
ctcggtgtgccgttacgacgacgggatcagtggtgctggcttatgatccggacgc

SEQ ID NO: 382848 - DNA, 56 bp, Artificial
  Synthetic oligonucleotide
ctcggttacatagagtgtatgggataccagaagctcctccgttgtatatggaatat

SEQ ID NO: 382849 - DNA, 55 bp, Artificial
  Synthetic oligonucleotide
ctcggttcatcaggtgctctgcataccttcgatgagctattcggtgcaaggatcc

SEQ ID NO: 382850 - DNA, 55 bp, Artificial
  Synthetic oligonucleotide
ctcggttgaactggttgaaaatgagcacactggatctttctgttcaatcaacggg

SEQ ID NO: 382851 - DNA, 55 bp, Artificial
  Synthetic oligonucleotide
ctcggttgagacccaagaaattacaacctttcatgatgtggaaactccaaatagg

SEQ ID NO: 382852 - DNA, 59 bp, Artificial
  Synthetic oligonucleotide
ctcggttgctcaagcgcctccgtttcgtacgtagtcaagtatcagcccatagcaaaaga

SEQ ID NO: 382853 - DNA, 52 bp, Artificial
  Synthetic oligonucleotide
ctcggttgtgcggccgtaaattgtaatgcacgacttcttgtgctggtcgagc

SEQ ID NO: 382854 - DNA, 57 bp, Artificial
  Synthetic oligonucleotide
ctcggtttgaccaacattgttctgccgaggcccttagatgggaacacagtgtttaca

SEQ ID NO: 382855 - DNA, 60 bp, Artificial
  Synthetic oligonucleotide
ctcggtttgattcaatgtaattgaatgcatttgggggacaagctaactgagaatccatat

SEQ ID NO: 382856 - DNA, 58 bp, Artificial
  Synthetic oligonucleotide
ctcggtttttgagtgctatgtcaagattggtttatgtcttgaaatcaaaaatccatat

SEQ ID NO: 382857 - DNA, 51 bp, Artificial
  Synthetic oligonucleotide
ctcgtaaaatatcgccgctcttagcagctgatgccgtcaggagatttccga

SEQ ID NO: 382858 - DNA, 51 bp, Artificial
  Synthetic oligonucleotide
ctcgtaaacgtcagccgtatggtcgctgagactgtccaacggtactgagta

SEQ ID NO: 382859 - DNA, 55 bp, Artificial
  Synthetic oligonucleotide
ctcgtaaggcaacaaaggccgcccctctactggtcagatgcctgcccaatgtggg

SEQ ID NO: 382860 - DNA, 57 bp, Artificial
  Synthetic oligonucleotide
ctcgtaagtcgattttcttgcagttgtgtatacgctacccaacaaattcgttctcaa

SEQ ID NO: 382861 - DNA, 54 bp, Artificial
  Synthetic oligonucleotide
ctcgtaatagaataatcgaggtaaaaaatccgcagaatccgacaactacggaaa

SEQ ID NO: 382862 - DNA, 52 bp, Artificial
  Synthetic oligonucleotide
ctcgtaatcgttgaggtgaatgtcgtcgtaaaaatcttttccggacttcatg

SEQ ID NO: 382863 - DNA, 60 bp, Artificial
  Synthetic oligonucleotide
ctcgtaatggcgtgttaccattgagtattataccagctgcctcagctacaagacttattg

SEQ ID NO: 382864 - DNA, 55 bp, Artificial
  Synthetic oligonucleotide
ctcgtaatgggttgaatccaattaaatattcagttggacaacctatgggggcgta

SEQ ID NO: 382865 - DNA, 60 bp, Artificial
  Synthetic oligonucleotide
ctcgtaattatgtcgaagcgaccaggagatatcatcatttccactccaggctccaaggtt

SEQ ID NO: 382866 - DNA, 54 bp, Artificial
  Synthetic oligonucleotide
ctcgtaattggattgccacgtgagctgaacatagccacgaccatagtatagatg

SEQ ID NO: 382867 - DNA, 56 bp, Artificial
  Synthetic oligonucleotide
ctcgtacccaatgaataataactcatcgtcgataattcaagctcgtgctcaccctt

SEQ ID NO: 382868 - DNA, 55 bp, Artificial
  Synthetic oligonucleotide
ctcgtagcagccacatcatgttccgatcctccagtttataagcgatacgccacgg

SEQ ID NO: 382869 - DNA, 60 bp, Artificial
  Synthetic oligonucleotide
ctcgtagcattcaagatcatgagtggtgaggtcccctccacggaggacctggtcaatcta

SEQ ID NO: 382870 - DNA, 56 bp, Artificial
  Synthetic oligonucleotide
ctcgtaggactattagcattctttgtcttattcgtgccaactttaactattagtgc

SEQ ID NO: 382871 - DNA, 51 bp, Artificial
  Synthetic oligonucleotide
ctcgtaggcgcccccgtgggtggcgtcgccagggctctagcacatggtgtt

SEQ ID NO: 382872 - DNA, 55 bp, Artificial
  Synthetic oligonucleotide
ctcgtagtattgaggatagcgatttgttgtgagctcctttagagggagggctcac

SEQ ID NO: 382873 - DNA, 60 bp, Artificial
  Synthetic oligonucleotide
ctcgtagtgcattcagtagtcgtacatacgactacatcaaggtgctgtccataagtgcct

SEQ ID NO: 382874 - DNA, 51 bp, Artificial
  Synthetic oligonucleotide
ctcgtatcaataaaggtaggggggcaaataaaggaagctttattagataca

SEQ ID NO: 382875 - DNA, 55 bp, Artificial
  Synthetic oligonucleotide
ctcgtatcattgatgctcgtaagaaagatgactcaagctgccgaggacttccaca

SEQ ID NO: 382876 - DNA, 55 bp, Artificial
  Synthetic oligonucleotide
ctcgtatcgaaagactcctccgctcgaagtatccacagtatctacaatatgttcg

SEQ ID NO: 382877 - DNA, 59 bp, Artificial
  Synthetic oligonucleotide
ctcgtatgaacataaatccaacagagattgagtgggcgttaaccgagtgtgctcaaggg

SEQ ID NO: 382878 - DNA, 60 bp, Artificial
  Synthetic oligonucleotide
ctcgtatgaacataggcaatggtctgtcccggtcattctgcacgctgacgttatgtggtt

SEQ ID NO: 382879 - DNA, 58 bp, Artificial
  Synthetic oligonucleotide
ctcgtatgaggagaggcacgttcagtgactcgacgattcccgagcaaaaaaagtctcc

SEQ ID NO: 382880 - DNA, 55 bp, Artificial
  Synthetic oligonucleotide
ctcgtatggaattgccgaaaacgagaaggttgtaatgacaactcatggcgttagc

SEQ ID NO: 382881 - DNA, 60 bp, Artificial
  Synthetic oligonucleotide
ctcgtatgtatcgagtaatatacccattcaccacaggtggcgttctaactattctgagag

SEQ ID NO: 382882 - DNA, 59 bp, Artificial
  Synthetic oligonucleotide
ctcgtatgttatcaattgcttttcgttcatgtacgcaatataatcgttaagaggaacaa

SEQ ID NO: 382883 - DNA, 55 bp, Artificial
  Synthetic oligonucleotide
ctcgtattccaactgtcaccttgcgtcacgcctcggtgattggtaagttgaagcc

SEQ ID NO: 382884 - DNA, 55 bp, Artificial
  Synthetic oligonucleotide
ctcgtattcggattcagttagttaactttaagcaagagtgcgcaaagtcgtccct

SEQ ID NO: 382885 - DNA, 59 bp, Artificial
  Synthetic oligonucleotide
ctcgtatttataatacaaaatcacgtgacttatgacgtcaatgcaaaagtagaactgta

SEQ ID NO: 382886 - DNA, 55 bp, Artificial
  Synthetic oligonucleotide
ctcgtcaaactcaccacgctcggcttccccattccaagcgtgtctcacttccaaa

SEQ ID NO: 382887 - DNA, 58 bp, Artificial
  Synthetic oligonucleotide
ctcgtcaacattgccatgggctcgttctacaacggggttaccgattgccttgagtggc

SEQ ID NO: 382888 - DNA, 55 bp, Artificial
  Synthetic oligonucleotide
ctcgtcaaccgggcctcacgcttcagaccagtgagaatggaagtcaaaatctata

SEQ ID NO: 382889 - DNA, 56 bp, Artificial
  Synthetic oligonucleotide
ctcgtcaagcgtctctaccaaagcagtaagtagtacatgtaatgcaacctctagag

SEQ ID NO: 382890 - DNA, 58 bp, Artificial
  Synthetic oligonucleotide
ctcgtcaatattgggtgattaggtgtcgcaagcaagactgtaccgttatccgtaacga

SEQ ID NO: 382891 - DNA, 60 bp, Artificial
  Synthetic oligonucleotide
ctcgtcacaaacagaagacgggcttggacctacaggcccatgtatcgcaagcccaagatg

SEQ ID NO: 382892 - DNA, 55 bp, Artificial
  Synthetic oligonucleotide
ctcgtcacaatacgacgacgtcgacaacacagagttctgtcggagtgacctacgg

SEQ ID NO: 382893 - DNA, 56 bp, Artificial
  Synthetic oligonucleotide
ctcgtcacaggagcagacatcaggaaacgaagacccgacgacttccaacctaaagg

SEQ ID NO: 382894 - DNA, 57 bp, Artificial
  Synthetic oligonucleotide
ctcgtcacgtggtttgattaaaactgttgggaatgattaccttgccttggcggagca

SEQ ID NO: 382895 - DNA, 58 bp, Artificial
  Synthetic oligonucleotide
ctcgtcagtctagcacttatttgagccgtggtcgacggaaattgcaacacgatttggg

SEQ ID NO: 382896 - DNA, 57 bp, Artificial
  Synthetic oligonucleotide
ctcgtcagttgcaaatcacgcagaccgagtttacgctacttttaagagtaataacaa

SEQ ID NO: 382897 - DNA, 55 bp, Artificial
  Synthetic oligonucleotide
ctcgtcatcagtttccggatggaccaccaagcttcaaactatcgcgcgatgcagg

SEQ ID NO: 382898 - DNA, 60 bp, Artificial
  Synthetic oligonucleotide
ctcgtcatgacaatatttcagccgtgtttcagacctattaccaacatcaagtcgacggcg

SEQ ID NO: 382899 - DNA, 55 bp, Artificial
  Synthetic oligonucleotide
ctcgtccaatcatgtaacgtttgacgagcttagatattttcaactacttcgggcc

SEQ ID NO: 382900 - DNA, 55 bp, Artificial
  Synthetic oligonucleotide
ctcgtcccaaatctgatgttcaaattttcttgcatcggccttttgcattgagaca

SEQ ID NO: 382901 - DNA, 57 bp, Artificial
  Synthetic oligonucleotide
ctcgtcccaataaggataggggggcagctaaaggaagctttattagatacaggagca

SEQ ID NO: 382902 - DNA, 52 bp, Artificial
  Synthetic oligonucleotide
ctcgtcccaccttacgagaaacacccacaggtgtgtaggggcaacccacccc

SEQ ID NO: 382903 - DNA, 55 bp, Artificial
  Synthetic oligonucleotide
ctcgtcccattagtgctgaagtcgagtccgtatcaagagtgaaacgttgcgctgg

SEQ ID NO: 382904 - DNA, 57 bp, Artificial
  Synthetic oligonucleotide
ctcgtcccgttgatgtcgagaggacagaaatgggaagtggttcgaattcgaatagta

SEQ ID NO: 382905 - DNA, 55 bp, Artificial
  Synthetic oligonucleotide
ctcgtccctgctatgcaacatatgtcatgtgaattagttgggcagagattagggt

SEQ ID NO: 382906 - DNA, 58 bp, Artificial
  Synthetic oligonucleotide
ctcgtccctggtaaggaagcttcaaagatgataatcaaacgtgcaaatgctgggggga

SEQ ID NO: 382907 - DNA, 54 bp, Artificial
  Synthetic oligonucleotide
ctcgtccgcttgggctgacccaacggacttacttaatttgtgtactaactcgct

SEQ ID NO: 382908 - DNA, 59 bp, Artificial
  Synthetic oligonucleotide
ctcgtcctctatgacaaagaagaaataaggcgaatttggcgccaagccaacaatggtga

SEQ ID NO: 382909 - DNA, 55 bp, Artificial
  Synthetic oligonucleotide
ctcgtcgaggcagatgtgacattaatgctgcgtgacatcggtataacacatgaga

SEQ ID NO: 382910 - DNA, 60 bp, Artificial
  Synthetic oligonucleotide
ctcgtcgccatgagtagaatgcaaacagacgtgccgcactctggcgacgacgcgattaga

SEQ ID NO: 382911 - DNA, 55 bp, Artificial
  Synthetic oligonucleotide
ctcgtcgctctagtcctactgatgttcttactggtacctctgtcactctacctgg

SEQ ID NO: 382912 - DNA, 58 bp, Artificial
  Synthetic oligonucleotide
ctcgtcgcttgagctgcagtgatgtattcccctgtgcgtgaatccatggttgtgacag

SEQ ID NO: 382913 - DNA, 56 bp, Artificial
  Synthetic oligonucleotide
ctcgtcggacggacgaagctcgcgactattgcatgaaagaggaaactagggtttcc

SEQ ID NO: 382914 - DNA, 55 bp, Artificial
  Synthetic oligonucleotide
ctcgtcgtcgcaaagtctcttgtctaaaatggtcacaaccacggtgcctgtggcg

SEQ ID NO: 382915 - DNA, 60 bp, Artificial
  Synthetic oligonucleotide
ctcgtctaacgcttctagagagagaagcaatcggtgtctagccatttagctctatgtatc

SEQ ID NO: 382916 - DNA, 55 bp, Artificial
  Synthetic oligonucleotide
ctcgtctacctttaaaagtgggtctcccatctttttcactttcctgcagatatta

SEQ ID NO: 382917 - DNA, 60 bp, Artificial
  Synthetic oligonucleotide
ctcgtctcgatgtgactctatgtaattgaaggcgttgggaggattaactaactgagaatc

SEQ ID NO: 382918 - DNA, 59 bp, Artificial
  Synthetic oligonucleotide
ctcgtctctcctcactagagccgattccagactgttccaaccaccgatttctcccgtca

SEQ ID NO: 382919 - DNA, 55 bp, Artificial
  Synthetic oligonucleotide
ctcgtctgagtcagttgccctactatgtgagactgagagacaagtactatcctgg

SEQ ID NO: 382920 - DNA, 60 bp, Artificial
  Synthetic oligonucleotide
ctcgtctgtcctctgcgagtgctatgacgcgggctgtgcttggtatgaactcacacccgc

SEQ ID NO: 382921 - DNA, 57 bp, Artificial
  Synthetic oligonucleotide
ctcgtcttgaacccatctgtcgccgccactctaagttttggggcgtacatgtccaaa

SEQ ID NO: 382922 - DNA, 55 bp, Artificial
  Synthetic oligonucleotide
ctcgtgaaataccctgtgctggatcggttctatatcagcggaatctgttatacag

SEQ ID NO: 382923 - DNA, 55 bp, Artificial
  Synthetic oligonucleotide
ctcgtgaacaggaattctgctgttttcctgctgaagctaagagtggggaaatcct

SEQ ID NO: 382924 - DNA, 58 bp, Artificial
  Synthetic oligonucleotide
ctcgtgaaccatcggttgatttgcgattaccattatgtgcgggtattgacccattaaa

SEQ ID NO: 382925 - DNA, 60 bp, Artificial
  Synthetic oligonucleotide
ctcgtgaacggtggatctaactaattcgttcagttgtgacatggacatggtaatgttcga

SEQ ID NO: 382926 - DNA, 55 bp, Artificial
  Synthetic oligonucleotide
ctcgtgaactgccattttcctcggatttaatcaactatgcacaccatgtcaattc

SEQ ID NO: 382927 - DNA, 55 bp, Artificial
  Synthetic oligonucleotide
ctcgtgaagcacgagattcacacacgtggcggccatccgatataatattaccgga

SEQ ID NO: 382928 - DNA, 53 bp, Artificial
  Synthetic oligonucleotide
ctcgtgacatcaaaccaggatggagcggggttgtattgctacaagacgagctt

SEQ ID NO: 382929 - DNA, 55 bp, Artificial
  Synthetic oligonucleotide
ctcgtgacccctctacgaaagtaggggcggtcatcattcgtcctgacaagacgat

SEQ ID NO: 382930 - DNA, 60 bp, Artificial
  Synthetic oligonucleotide
ctcgtgacctactagtatcatctactaccgctcagggctgtgacacaatcgcccgttgca

SEQ ID NO: 382931 - DNA, 50 bp, Artificial
  Synthetic oligonucleotide
ctcgtgacgccttcttactgctgcaaaaggctgtggctgatggaggcatt

SEQ ID NO: 382932 - DNA, 60 bp, Artificial
  Synthetic oligonucleotide
ctcgtgagcaccactacaacacatgggtgtgatacaatcgccaggtgtcaatgttcaacc

SEQ ID NO: 382933 - DNA, 52 bp, Artificial
  Synthetic oligonucleotide
ctcgtgagccttaatagcatgagtaaaaggctaaagcaacgtgaagtagtgc

SEQ ID NO: 382934 - DNA, 55 bp, Artificial
  Synthetic oligonucleotide
ctcgtgagtaatgatgcatatctcctaggaagagagaaggcactgagggaatcac

SEQ ID NO: 382935 - DNA, 56 bp, Artificial
  Synthetic oligonucleotide
ctcgtgatagagtcaactcatcccgggaaggattcccttcctttagcttatacttg

SEQ ID NO: 382936 - DNA, 55 bp, Artificial
  Synthetic oligonucleotide
ctcgtgataggtcttatgtgtctaaaggtcgccctccttctcggagtggacctgt

SEQ ID NO: 382937 - DNA, 58 bp, Artificial
  Synthetic oligonucleotide
ctcgtgatgctaaagaaccttgccgttggcaatataagcctacagtacaacaccacgt

SEQ ID NO: 382938 - DNA, 53 bp, Artificial
  Synthetic oligonucleotide
ctcgtgattacacccgtcgttctacccttgcccctctcaacctcgaatccccc

SEQ ID NO: 382939 - DNA, 59 bp, Artificial
  Synthetic oligonucleotide
ctcgtgattcgtcgcgacggtaccatcgagcaaggccgaccacacaaggccatcgggtc

SEQ ID NO: 382940 - DNA, 55 bp, Artificial
  Synthetic oligonucleotide
ctcgtgcacaacgaagggctgcggcccgtaagaacaagcggaacactcgtgtggt

SEQ ID NO: 382941 - DNA, 55 bp, Artificial
  Synthetic oligonucleotide
ctcgtgcatgacacggttggaagttcttatacgaccgactgagcagactgcggcg

SEQ ID NO: 382942 - DNA, 55 bp, Artificial
  Synthetic oligonucleotide
ctcgtgcatggcggaattgacccgattctatgtagaacggaactaggatcaccac

SEQ ID NO: 382943 - DNA, 54 bp, Artificial
  Synthetic oligonucleotide
ctcgtgccaggagctctggtgattacaattttagcaatgcagaaagcacaaata

SEQ ID NO: 382944 - DNA, 52 bp, Artificial
  Synthetic oligonucleotide
ctcgtgcctcactacccccgtctccgcaattcatgccaagaacgcgtcaggg

SEQ ID NO: 382945 - DNA, 53 bp, Artificial
  Synthetic oligonucleotide
ctcgtgccttgacctttaacacatttgtgaacttctttaaatcccttttatta

SEQ ID NO: 382946 - DNA, 55 bp, Artificial
  Synthetic oligonucleotide
ctcgtgcgcttttaatgcaccagcgaatattcagcagtttgaacatgtcgtgccg

SEQ ID NO: 382947 - DNA, 55 bp, Artificial
  Synthetic oligonucleotide
ctcgtgctatacggcgaacgtttgcgaaaactccatataaccaggtgactagacc

SEQ ID NO: 382948 - DNA, 58 bp, Artificial
  Synthetic oligonucleotide
ctcgtgctctcttagataggcctcaagtgcctcatttaatacgtctgagaaagtccta

SEQ ID NO: 382949 - DNA, 55 bp, Artificial
  Synthetic oligonucleotide
ctcgtggaaatgggctgacccatagagttggtaagcgtttttgtgttaagtctgt

SEQ ID NO: 382950 - DNA, 55 bp, Artificial
  Synthetic oligonucleotide
ctcgtggacagggtgattctggttgggttggacaaggacttaaaccctctagtgc

SEQ ID NO: 382951 - DNA, 55 bp, Artificial
  Synthetic oligonucleotide
ctcgtggcacatcaacagtactgtcctccactgcaatgagtccataaacacaggg

SEQ ID NO: 382952 - DNA, 60 bp, Artificial
  Synthetic oligonucleotide
ctcgtggcctttaaggtcatgagtggcgagatgccctccactgaggacctagtcaaccta

SEQ ID NO: 382953 - DNA, 54 bp, Artificial
  Synthetic oligonucleotide
ctcgtgggaaaagtgacgtcaaacgaggtgtggtttgaacacggaaatactcaa

SEQ ID NO: 382954 - DNA, 55 bp, Artificial
  Synthetic oligonucleotide
ctcgtggggaggtacggccgaaagacgaaattgtatgaggcagcccactcagatg

SEQ ID NO: 382955 - DNA, 56 bp, Artificial
  Synthetic oligonucleotide
ctcgtggtaatgggcttacacatcgtgttgtaagaggttttggtataaaatcagtc

SEQ ID NO: 382956 - DNA, 58 bp, Artificial
  Synthetic oligonucleotide
ctcgtggtactgggctgacccatagagttggtaagagattttgtgtcaagtctgttta

SEQ ID NO: 382957 - DNA, 55 bp, Artificial
  Synthetic oligonucleotide
ctcgtggtattgggctgactcaccgggttggcaagaggttctgtgtgaagtccgt

SEQ ID NO: 382958 - DNA, 55 bp, Artificial
  Synthetic oligonucleotide
ctcgtggtgattttgttgctgacgacactattctgccgacagcggagcaccctga

SEQ ID NO: 382959 - DNA, 55 bp, Artificial
  Synthetic oligonucleotide
ctcgtggtgcgcgaatctgctgtaattccacctccttcatccgcaccatgctccg

SEQ ID NO: 382960 - DNA, 60 bp, Artificial
  Synthetic oligonucleotide
ctcgtggttcgcgagcaacggattcacggtgcagtcggacgccctgctcctcaggtacag

SEQ ID NO: 382961 - DNA, 57 bp, Artificial
  Synthetic oligonucleotide
ctcgtggtttaagttcagtttctcgttcatctttacaagcaagtaagcaaatatcta

SEQ ID NO: 382962 - DNA, 60 bp, Artificial
  Synthetic oligonucleotide
ctcgtgtaatgaaagcgccatggttcccgcaccagtgtcacccagagcaccgctggaagc

SEQ ID NO: 382963 - DNA, 57 bp, Artificial
  Synthetic oligonucleotide
ctcgtgtaccgggcatcaacagccaccctgacgttaacaagatgattcgtgacctcg

SEQ ID NO: 382964 - DNA, 55 bp, Artificial
  Synthetic oligonucleotide
ctcgtgtacgaatgagttgcccttggcaggactaaaaagggtatactgggaagaa

SEQ ID NO: 382965 - DNA, 51 bp, Artificial
  Synthetic oligonucleotide
ctcgtgtatcgggccggtcagtcagtcaggtttgatgacgtgcgctattca

SEQ ID NO: 382966 - DNA, 53 bp, Artificial
  Synthetic oligonucleotide
ctcgtgtcaacgagggttcaagggagtctggcggggcgatggcatctgctata

SEQ ID NO: 382967 - DNA, 60 bp, Artificial
  Synthetic oligonucleotide
ctcgtgtcagcgcttgtggtcacattgcttgtccttcaggtggtgcaacgcaacactgac

SEQ ID NO: 382968 - DNA, 55 bp, Artificial
  Synthetic oligonucleotide
ctcgtgtctgtgagcttatgaagaaccttgtcgataatcaaagatatcaaccagg

SEQ ID NO: 382969 - DNA, 59 bp, Artificial
  Synthetic oligonucleotide
ctcgtgtcttgagacgatggaggttgtccaacaaacaagagtggacaaattgactcaag

SEQ ID NO: 382970 - DNA, 60 bp, Artificial
  Synthetic oligonucleotide
ctcgtgtggtcagtacagagcacaccaggcttatcaccgatgcgtatccggagttttcga

SEQ ID NO: 382971 - DNA, 50 bp, Artificial
  Synthetic oligonucleotide
ctcgtgtgtattagtttattagtcactatagcttctgaagccaatcgtat

SEQ ID NO: 382972 - DNA, 58 bp, Artificial
  Synthetic oligonucleotide
ctcgtgtttggtggtacagcaatgagaggttggaacaagtccgggcagatttccttgc

SEQ ID NO: 382973 - DNA, 55 bp, Artificial
  Synthetic oligonucleotide
ctcgtgttttccagaaccctccctccgattctgtggcgggagctgagttggcagt

SEQ ID NO: 382974 - DNA, 53 bp, Artificial
  Synthetic oligonucleotide
ctcgttaaccgacgggttgccgctgttaccactaataagcctgccgtccggta

SEQ ID NO: 382975 - DNA, 55 bp, Artificial
  Synthetic oligonucleotide
ctcgttaacgtatcaacaacgcgacaccgctccgacggtattcgaaaaagcaatg

SEQ ID NO: 382976 - DNA, 53 bp, Artificial
  Synthetic oligonucleotide
ctcgttaagaagtttgctataattaaatttctaacactgacaccccttaatcg

SEQ ID NO: 382977 - DNA, 60 bp, Artificial
  Synthetic oligonucleotide
ctcgttaagtctatcacctggaatgctgaaccctggaggtgtaccatggatcgcaattgg

SEQ ID NO: 382978 - DNA, 55 bp, Artificial
  Synthetic oligonucleotide
ctcgttaccgcgggatctcaaaatacaatgtgaccgtctgtgagcgatcaataag

SEQ ID NO: 382979 - DNA, 55 bp, Artificial
  Synthetic oligonucleotide
ctcgttacttaagttagcaagttctcctgcatagtctaaagccttgttacggtct

SEQ ID NO: 382980 - DNA, 55 bp, Artificial
  Synthetic oligonucleotide
ctcgttatggataagccattcaattcagactagggacaaaagccatcctgaagta

SEQ ID NO: 382981 - DNA, 55 bp, Artificial
  Synthetic oligonucleotide
ctcgttatgttgaatttacgttaaatcattttggtgtacatacggcagatgctcg

SEQ ID NO: 382982 - DNA, 58 bp, Artificial
  Synthetic oligonucleotide
ctcgttattcgaatacaactgatttcacaggggatcttctggattaagtcttctcaaa

SEQ ID NO: 382983 - DNA, 51 bp, Artificial
  Synthetic oligonucleotide
ctcgttatttatgcaaaaagaggttacccaatatggctttagcaatcatcg

SEQ ID NO: 382984 - DNA, 57 bp, Artificial
  Synthetic oligonucleotide
ctcgttcaaccgtcattagaatttttgttcgaggtcccaagtgctctcaatgcaagt

SEQ ID NO: 382985 - DNA, 60 bp, Artificial
  Synthetic oligonucleotide
ctcgttcaatcttaatgaattggtagcctcccacggctcttcaggacttatagcttcagc

SEQ ID NO: 382986 - DNA, 57 bp, Artificial
  Synthetic oligonucleotide
ctcgttcactagaacaaggctagcgtcatggctctcggaaaacagaggaggaccggt

SEQ ID NO: 382987 - DNA, 55 bp, Artificial
  Synthetic oligonucleotide
ctcgttcactggggaagaaatggccactaaggcagattatactcttgacgaagag

SEQ ID NO: 382988 - DNA, 55 bp, Artificial
  Synthetic oligonucleotide
ctcgttcccaagctgggaagaggcaacgatcgtcgtttaacaagtcctattgcga

SEQ ID NO: 382989 - DNA, 59 bp, Artificial
  Synthetic oligonucleotide
ctcgttcccagcagcctcagatacacatatatagcgcaccgtgggattcagacgatgtc

SEQ ID NO: 382990 - DNA, 55 bp, Artificial
  Synthetic oligonucleotide
ctcgttccctatcgcgtcgaactgattaaccgaatcgggcaggaagcagtagacg

SEQ ID NO: 382991 - DNA, 52 bp, Artificial
  Synthetic oligonucleotide
ctcgttccgaccaccggaagacgttggctataacgccttggtaggggaagtc

SEQ ID NO: 382992 - DNA, 55 bp, Artificial
  Synthetic oligonucleotide
ctcgttccgtatcgcgtcgaactgattaatcgcatcgggcaggaagcagtagacg

SEQ ID NO: 382993 - DNA, 60 bp, Artificial
  Synthetic oligonucleotide
ctcgttcgcactcactctaagaagggactgatgcgctatgaggatgtttacatgccagaa

SEQ ID NO: 382994 - DNA, 57 bp, Artificial
  Synthetic oligonucleotide
ctcgttcggacctatcctcagatatggtacccttaacgatctagaactgtgtccgat

SEQ ID NO: 382995 - DNA, 55 bp, Artificial
  Synthetic oligonucleotide
ctcgttcgtcatcccgagcctatggtctacaggcctcgcaatcccagtcagatca

SEQ ID NO: 382996 - DNA, 53 bp, Artificial
  Synthetic oligonucleotide
ctcgttctgtgacgagtttgaattcccagagtctgtcgttgcaatagtcattg

SEQ ID NO: 382997 - DNA, 55 bp, Artificial
  Synthetic oligonucleotide
ctcgttcttgccgcaatttactcatccttcagtgtgtcagaactcgtggcggccc

SEQ ID NO: 382998 - DNA, 55 bp, Artificial
  Synthetic oligonucleotide
ctcgttctttgctgttatagctcccgatgtctaacactacttttagaccttttac

SEQ ID NO: 382999 - DNA, 57 bp, Artificial
  Synthetic oligonucleotide
ctcgttgaaccaagcgttcaaagcacacgccgggaatacgttcttgacggacagaca

SEQ ID NO: 383000 - DNA, 60 bp, Artificial
  Synthetic oligonucleotide
ctcgttgagacaaaccatactggaacatactgctcattgaatggggtcagcccaattcat

SEQ ID NO: 383001 - DNA, 59 bp, Artificial
  Synthetic oligonucleotide
ctcgttgaggaattccttataactgctgttcggaccaggattgcacaggaagattgtcg

SEQ ID NO: 383002 - DNA, 60 bp, Artificial
  Synthetic oligonucleotide
ctcgttgatagtcttatcaatttcaaatgccacccgcaattgttcgatgctcaacgtttc

SEQ ID NO: 383003 - DNA, 60 bp, Artificial
  Synthetic oligonucleotide
ctcgttgcaacgcgaaccggagtgtaacagtgtccactacggcatctatatgcgctcgct

SEQ ID NO: 383004 - DNA, 55 bp, Artificial
  Synthetic oligonucleotide
ctcgttgcgagagtggatactgcagaacgtaacattggatcattgaccaccgagc

SEQ ID NO: 383005 - DNA, 52 bp, Artificial
  Synthetic oligonucleotide
ctcgttggacctgttttggccaagggaacccgaagtatcatacttcgaggtg

SEQ ID NO: 383006 - DNA, 55 bp, Artificial
  Synthetic oligonucleotide
ctcgttggtaggtttgacgaggttgaagagaaacgcctgacttacaggtgcccaa

SEQ ID NO: 383007 - DNA, 56 bp, Artificial
  Synthetic oligonucleotide
ctcgttgtctaaatagctctgaatataatcactagatgactaggtcttctgatctc

SEQ ID NO: 383008 - DNA, 60 bp, Artificial
  Synthetic oligonucleotide
ctcgttgtgtgatgaatcgaaacggggtcaatgaggcgagtgtggagcacttttactctc

SEQ ID NO: 383009 - DNA, 55 bp, Artificial
  Synthetic oligonucleotide
ctcgttgttcgtgcgaagaattatgtcgaggcgacctgcagatatagggattttc

SEQ ID NO: 383010 - DNA, 58 bp, Artificial
  Synthetic oligonucleotide
ctcgttgttgcccatttatatgtggtaaagctgtaactttcaaagaccgcaacacatg

SEQ ID NO: 383011 - DNA, 56 bp, Artificial
  Synthetic oligonucleotide
ctcgttgttgtgtagattgggtcctctacgttgtacatcttgaaatagaggggatt

SEQ ID NO: 383012 - DNA, 55 bp, Artificial
  Synthetic oligonucleotide
ctcgtttaatatgagtttcgtagacttgtctgatcctctgctcaccatcagtgag

SEQ ID NO: 383013 - DNA, 55 bp, Artificial
  Synthetic oligonucleotide
ctcgtttagcagtccctgagacactgagagcgggacaagagggtatcggtgagtc

SEQ ID NO: 383014 - DNA, 60 bp, Artificial
  Synthetic oligonucleotide
ctcgtttcgagtagagagaaccgcgtgtttatctggagtatacattgttgagatgacgct

SEQ ID NO: 383015 - DNA, 54 bp, Artificial
  Synthetic oligonucleotide
ctcgtttcgatatgtataagcctgactactccgcaacaaccactggtcaagtag

SEQ ID NO: 383016 - DNA, 57 bp, Artificial
  Synthetic oligonucleotide
ctcgtttgaagcgacgttcctgcgttgggaagaaaagcgtacgctgctcgatacgac

SEQ ID NO: 383017 - DNA, 56 bp, Artificial
  Synthetic oligonucleotide
ctcgtttgagtatggctttctctgggtctagtcggactttaacacaacagtcctcg

SEQ ID NO: 383018 - DNA, 60 bp, Artificial
  Synthetic oligonucleotide
ctcgtttggcccatgacggatccaaaatccctctgagatgtgtgctgggatgggttgccc

SEQ ID NO: 383019 - DNA, 55 bp, Artificial
  Synthetic oligonucleotide
ctcgtttgttatatcatatacgctttttaacgcaaagtagctgtctatgttgtgt

SEQ ID NO: 383020 - DNA, 57 bp, Artificial
  Synthetic oligonucleotide
ctcgttttcagtcgatccacaactgtattgggattataatttggtattaatgaaata

SEQ ID NO: 383021 - DNA, 55 bp, Artificial
  Synthetic oligonucleotide
ctcgttttccgtcattctcttgtcatggatctccacaatcactgtccccgtcgcg

SEQ ID NO: 383022 - DNA, 51 bp, Artificial
  Synthetic oligonucleotide
ctctaaaaattgcaagatctcggtgcaatataaactcagagtatcttcgac

SEQ ID NO: 383023 - DNA, 54 bp, Artificial
  Synthetic oligonucleotide
ctctaaaacaggttcttaactcctactctcagaccgtagcgaccgtaccaccta

SEQ ID NO: 383024 - DNA, 57 bp, Artificial
  Synthetic oligonucleotide
ctctaaaagaactgttaaatgtttcgactgtggcaaggaggggcacatagctagaaa

SEQ ID NO: 383025 - DNA, 60 bp, Artificial
  Synthetic oligonucleotide
ctctaaaagggttactgcacatggagacacaccacaactagatctgaaggcaaggccaac

SEQ ID NO: 383026 - DNA, 59 bp, Artificial
  Synthetic oligonucleotide
ctctaaaattcgcttgcggaagcgtttctctctctagcgaatcggtgtacaccgattgc

SEQ ID NO: 383027 - DNA, 57 bp, Artificial
  Synthetic oligonucleotide
ctctaaacccgggatgggtctgtcgaaagctagccaagtcgcgctgttatgggagga

SEQ ID NO: 383028 - DNA, 55 bp, Artificial
  Synthetic oligonucleotide
ctctaaacctatctaccgccttcatagtcattcgagttctacaactgcgtctgac
